United States Patent Application Publication US 2005/0228172 A9 - sequence listing, part 2

SEQ ID NO: 2910 - DNA, 573 bp, Homo sapiens
gcggtgcgtgcttcctcttcaccttctgccatgattgtaagtttcctaaggcttacccagaagcagaaacctgtacagcttgcagaattataagccttaaatatctcttctctataacttacccagtctcagatatgtcttctagcagtgtgagaacagactaatacagtggatatatatttattatataatacaatayatattttatatataatatataaaatatataatatataatatatagatatatattatgattttttatccattcatctgttttttaacatcaaaattcataattttaatgaattgaaaacattaaatctatggaaatccgtgaatctacagaagaaaatgcttatttgacatcatttaaggtgactcttaaatcacctccttactttgaaaactggtatttaaaggtgtaaagaattaagcctttgcactacttgatgaatgcctttacaaaaaaagaaaaaagaatgaagcctttgttctgacttcctagcactgattattttgaggaattttaaattgtattgtatgtgatattgtttcagttgagaggtaaat

SEQ ID NO: 2911 - DNA, 612 bp, Homo sapiens
ttatgaagcaaaggaaaaataatcatggagacataaaggtcttcctgtcttgaaggtctcagaattatgtcttaagtctaagggtggacttaagattctatactctatatrttttatatgtgcctgattctatattccctgttggctacagctggatccctcttgaggtggtcctcattgaagcctgggttgaaggtaccatccttgcacagttgctggctgtgtctcaggaaatccaaagtccctagtctggcagactggcacatactttgggtcctaatcaggcttctcaagggggctgtgctcatgacagtaatcatgatagtaagctgctttatttccaaatagacataagtccttcccagatcccctgctctattcaagctattaagtttttttctcctactgcatggaaatagagatttcagtctccctacaggtgatgtagtgcatgtgcaaggaacagctgattacacatccaagaagtctcatggaccattctattgctaagctctagggtcccttcctagacccaagcccaattctttgacatctttccttctcacgaatacagggactaagccagtttctgtttcatttgtaacatagtac

SEQ ID NO: 2912 - DNA, 570 bp, Homo sapiens
gatgagaaaatttaggcatattaaataggttggccaaagtcacatatccagttgaattgcagagtcagaacgggattcccagtcgatcttattctaaagtcaatgggccatagtgctgtctcccatgactccaccactccatgcagccatcacgcccagccaccctgacctctcttcagtcctctggccttcttgatgaaggggwtattatcctcacttgacccaaaaactcatttcctgagattcaggcaattcttctcaatcttagaaagggctttctctatcccttttgaaggtttctgtggctctggctctgaaagggcctaccttcccccagatggatttcattccgatagagtgaattcaatttggctggacatagtcaccatagtcattgggactgataccttgagacgaagctcactgtgctggcactcgaaatattatactgaataatattgacttgattcctatctgagggagataacagactatgaaaaatagactcctgggaactcaagaaggtgaagagtagatgaagatgaagctggcaatgtagacactcatagg

SEQ ID NO: 2913 - DNA, 1265 bp, Homo sapiens
ctgggcgacagagtgagaccctgtctcaaaaaagaaaaatctccagatgactcacacacattgaagtttgagaaccaccaagggaaattactagagcttctctatagctacacacagccgtctatgccttaaaaagtcctcctttggtgaccctcacccaaatatgagaaccattagtctaaagcttccctctggctgcacatggcccagtgagccatacctgccaaatctgccaaccccagtgccgaactagaggttaccaataactgtggcatcactctattacagtgagcaagaaactgatactcctttatctcggtttctgtcgctgtcctgcaaaggaaagttaaagcattcatgacactccagaattcctgtgtattctggcctggcctcacagccctaacttgttcccacccataacttagaaggttgctcggcccctgcagtgacttctaggagtgagtggagtgactagacctagtcacctaggacctagactcctagatctagtccagtagtgactaggagtacccagaccctggagtgactaactgatgggcttgaaaaaagtaaacgggtaatgggtaccaratagaacatggtagttgccaaggtatgcagtgtagttgatgcagctactcttgactttgatttccatctgccacaggacaagaagggagtatgggaatagttattctctaatggcttgattacagttttgtactgcacactcttgaataataacttggacccagaattcaaatggaaggccttcagctcaaatttgaaaagctttgctcatacccaggggtgatgggggtatgtctgtaatggcaaagaagcaggccaagagttctgagaatcatagggatatcgtcaatattacggatttggcagaaatctaagagaatgaactgtttattatgccatgtcaattaatatgctgagaactctcaagttcatgtaattgagtataattgtgataattagagcatggttcaaaatgcttttaggccaaatataaaaggcaaaacttcttatctgttacttttcatatataataggtaaggtatttcttaggctcattgaaatcttgaaatagcaagtacctttgaaatggtgtaagttgctggggaaggatttagtaaattcattaatgtgtctgttctcacaatgagttttaaccagaatgtatcatattaagagcctttgtttttaagctggacattgtttttccatgaatattgtggtactcaaattca

SEQ ID NO: 2914 - DNA, 626 bp, Homo sapiens
tataaatgtgcatctgactgcatccctgccctcaaggagttgaagtgaacacaggtcaacagtataaaggataaacagtaccctgggagagatgcagcacagaargcacaacagtcaggctcagaggcagcagaggttacttccaggtggggaaggtcaaagaagacctagtgaggctcccagctctggctcaacaagctcaatgcccagaggcctttcttacttctagggctgacgccctggagtggaggctgctggaatactccctagaaaagtgagcttttacagtattcactttggaatatacactgaaacatgggggcatccctaatgaaaattcacagcatttcgaagtactaaagtcacattgtgaatccctcatgttagaagtgccagctggctcagccccccttctctgaggcgggagagatgccttcccaggctaccaggctatgtcttggaagatcagaggtaatgggtgatggtatcaatagatgggcagaggaacaaaaaaggatgccagggagaaaatccaagaggaccctgggacctcagacaagccactcaccttctctgggcctcagtttccccagctgttaaatgaagaggtggaaaatctctaggat

SEQ ID NO: 2915 - DNA, 626 bp, Homo sapiens
tataaatgtgcatctgactgcatccctgccctcaaggagttgaagtgaacacaggtcaacagtataaaggataaacagtaccctgggagagatgcagcacagaaagcacaacagtcaggctcagaggcagcagaggttacttccaggtggggaaggtcaaagaagacctagtgaggctcccagctctggctcaacaagctcaatgcccagaggcctttcttacttctagggctgacgccctggagtggaggctgctggaatactccctagaaaagtgagcttttacagtattcactttggaatatacactgaaacatgggggcatccctaatgaaaattcacagcatttcgaagtactaaagtcacattgtgaatccctcatgttagaagtgcyagctggctcagccccccttctctgaggcgggagagatgccttcccaggctaccaggctatgtcttggaagatcagaggtaatgggtgatggtatcaatagatgggcagaggaacaaaaaaggatgccagggagaaaatccaagaggaccctgggacctcagacaagccactcaccttctctgggcctcagtttccccagctgttaaatgaagaggtggaaaatctctaggat

SEQ ID NO: 2916 - DNA, 1159 bp, Homo sapiens
agccacctcacctcgaagtgtgttatcctactaagttatgtctggctattcttttgccttcatgaacttttctatgtaaaaacaaaaacaaaaaaaactctcattctatatcccaaacatagatctaagtgtcctggctcaaaaacaccaagcagtgcatacaaaaggagaatttttttttttttttttgaggtggtgtctcactctgtcttccaggctggagtgcaatggcacgatctcagttcagtgcagcctctttctcccaaactcccaggttcaagcgattctcctgcctcagcctcctgagtagctgcgattacaggcatgcaccaccatgcctggctaatttttgtatttttagtggagagagggtttcaccatgttggccaggctggtctcaaactcctgacctcaagtgatctgcccacctcagcctcccaaagtgctgggattacaggcgtgagccaccgcacccagcctggagaaatatttaagtatcgaggagatgcttgaaataacaatgtggggtttaaaaaaaaaattgggaggatataagcaatctttgttttgcacagcaccacattcattgaaacccatgcagattggaaggaatgatgtactccctttctagttgacaaatcttagcatgaacaaagttctgatacatgtttctgttaacacagcgtcatgcagaacagcgtcatgcaggattggctrtatgtgatatctcctgagcaatgggcataagggaattcacagtgtggacaatgacagacaatgccacaaaaatgaaattttaaaaattccatgcttaggacaactttgacagtaagaacaaagactagaaatacaaaataaatggaaagataattgaatgtatagattaaagaccaaatagtaaaaagtacaggaaaaatctttctaatgagaaggcactatctatacacaaaagactcaaaaggaaatctccaatcctcaaatcctgcagaagtgacttttcatgctattgatgcctcgttgcaagatttcagacattgctacagtttccaaagcctccagctatcagacatatgaggaatttgcagaaaaatttccagcaatgcagaagttaaagtagatagttatactttggaccaaatttgcaattttgatgaaacag

SEQ ID NO: 2917 - DNA, 992 bp, Homo sapiens
cattcctgggggagcctctaaaatggctgctstgggagtgtctgccttatgcagttgtagatagggatgaaacacgccctggtctcctgcagcacccccaggcttgctaggattaggaaattccagcctggcgaattctagtcagaccagttctctgctcttgaactctgtttcctgttaagatgtttatcaatgacaatgcgtgcacagtgggacatgaaacttcataagcaattctagtttcgccctggccttgtgaccttgccctgcccatttgccttgtgatattttattgcccttgaagcatgtgatctctgtgacccacaccctattcgtacactccctcccctttgaaaattgctaataaaaacttgctggttttatggttcagggggcatcacggaacctgctgacatgtgatgtctccctcggacacccagctttaaaatttctctcttttgtactctttccctttatttctcagaccagccgacacttagagaaaatagaaaagaacctacattgaaatattgggggctggtttccccaatatctggcaccctgatagatatgtgagtacatgtacatatgttttcttttttgaaaggtcatttcttttggggatcctatttataatctagaccccttctcaacaatttggaatgtaacttggcagaaataaccacccgcaacaccctataggaattttgaatgaaacacctcttagttaaaaaaaaaaaaagaaagaacagaaaagaaaagaaacaaacctcgtcagagtacaactttcttggcattaggaaattataaagaataaacagtgtttattactgatactttacattcattctaacaatgggccttccccaagcaactttgccagcagtctccagaccaaaaaacagaagaaagcccatttcatctttattccaaaatacatgttttaaataatgttctctaactataaaagtagttatgtaatccaaaaaacg

SEQ ID NO: 2918 - DNA, 1618 bp, Homo sapiens
tgatgagaaataaaatctacaaaaatgatacgctttcagaacatgcctaagaaaggcatgtctgtattatgcctttggggatagatttggttgctgagaagtgtattctgaataacacgtggtttcttggttctttaagcaggctattactttctctgttgctttcctcttgttttctagactgtctaatgaaattcttttacagaggaaaattagaataatatgaccagatatgttttttacaaacgaaaatggtgacaagttgaaaatattttttcaacgactggagtttcaactggagtttcaagcagtggtgtgagcatcttaagcatgtccttcagcacttggtgtgaatgacagctgatagaggtgaggtagactggcaaactgctgcctgagtccaagatggctttgaacctacgcagctggtgctttggaccataaagagaaataattgcatctgcagagttttacgtgtgtttcatttaagatttgtaagagaggatagtttactgttcccttttaaactcttggggttcagctgcctaytatatagactcttactccttctatttctggcactttttcaacatgggaagccttatttgcatttaaatgttatatacagcggggcggggggggtgggtggggatggggaggggacctttcttgacttagcagtagtgtttctaagatttccatgtgcttgtgactgatggatggatatttaaaacaatcaaatgtattttattctgtaaaactatatatatgatagtctcttgagactaagctgttatttaaaataaaaagtgtccaaaatcctttgctccaaagatggtgtgtgtgtgtgcatgcctgtgtgcatatgcacatgggtatatatttacaaagaaggaaaacagaaaatctcgctatgtgctcgtttccttgaactttaacctcacttgcaaagaggcagatctcatctgtgatgtgtctaatcaggaagtactagagttatttttgtaactcttttgcaacataaggctgtgtctttctgccttccttaaaaatatgtcctgtccctcaaataccatgacacttgggttaaaatttgaaaaaagcaaaagaataaaatacaattccatgatgccaatttgactatatccaccctactcatccgaagtcccagatgtcaggccccgaggggtcactgttaattccttccccactactggaaaaatgtaacttcctttcatgccatggggaaaattctccatttctcttttgcggcatggactagcattagcctttgtggctgtagaccattatgacagattcatggggaagtagggtgagagagataggagaactgcccaagctgtgtgaacagaacagcagacaaggcagagctaaggatgggagtttaaaggactggagattacaagtgggaggaaatattcggcaatggcaaaaagattgttcaaattggatgtcttaacatactctttaattaataaagtgttcaattacatccttaaatttatccttccaattagtctgctagaaaaattataaaaaatgattattttattattaaatctaaagttacttatataaatcatacaattaacttttc

SEQ ID NO: 2919 - DNA, 1618 bp, Homo sapiens
tgatgagaaataaaatctacaaaaatgatacgctttcagaacatgcctaagaaaggcatgtctgtattatgcctttggggatagatttggttgctgagaagtgtattctgaataacacgtggtttcttggttctttaagcaggctattactttctctgttgctttcctcttgttttctagactgtctaatgaaattcttttacagaggaaaattagaataatatgaccagatatgttttttacaaacgaaaatggtgacaagttgaaaatattttttcaacgactggagtttcaactggagtttcaagcagtggtgtgagcatcttaagcatgtccttcagcacttggtgtgaatgacagctgatagaggtgaggtagactggcaaactgctgcctgagtccaagatggctttgaacctacgcagctggtgctttggaccataaagagaaataattgcatctgcagagttttacgtgtgtttcatttaagatttgtaagagaggatagtttactgttcccttttaaactcttggggttcagctgcctattatatagactcttactccttctatttctggcactttttcaacatgggaagccttatttgcatttaaatgttatatacagcggggcggggggggtgggtggggatggggaggggacctttcttgacttagcagtagtgtttctaagatttccatgtgcttgtgactgatggatggatatttaaaacaatcaaatgtattttattctgtaaaactatatatatgatagtctcttgagactaagctgttatttaaaataaaaagtgtccaaaatcctttgctccaaagatggtgtgtgtgtgtgcatgcctgtgtgcatatgcacatgggtatatatttacaaagaaggaaaacagaaaatctcgctatgtgctcgtttccttgaactttaacctcacttgcaaagaggcagatctcatctgtgatgtgtctaatcaggaagtactagagttatttttgtaactcttttgcaacataaggctgtgtctttctgccttccttaaaaatatgtcctgtccctcaaataccatgacacttgggttaaaatttgaaaaaagcaaaagaataaaatacaattccatgatgccaatttgactatatccaccctactcatccgaagtcccagatgtcaggccccgaggggtcactgttaattccttccccactactggaaaaatgtaacttcctttcatgccatggggaaaattctccatttctcttttgcggcatggactagcattagcctttgtggctgtagaccattatgacagattcatggggaagtagggtgagagagataggagaactgcccaagctgtgtgaacagaacagcagacaaggcagagctaaggatgggagtttaaaggactggagattacaagtgggaggaaatattcggcaatggcaaaaagattgttcaaattggatgycttaacatactctttaattaataaagtgttcaattacatccttaaatttatccttccaattagtctgctagaaaaattataaaaaatgattattttattattaaatctaaagttacttatataaatcatacaattaacttttc

SEQ ID NO: 2920 - DNA, 587 bp, Homo sapiens
tttaaattcaggatttttagatgttttctgtgggaggttcaattagattatctatatgtcacatatccttaagctgatgcttttgcacatgctgttggcttgtcgtttgtcatttgtaactgcattctctgagtcagtggatatctctttaaatcttgactgattacttyttagagaattaggtgctttttttgtttccctttgaggactttttattgactaaagcataaagaccaaattttaacatggcatgaaaagcacttcttttttttttttttttttttttttttagatggaatctcactctgttgccaggctggagtgcagtggtgagatcttggctcagtgcaacctccacctcctgggttcaagtgattcttgtgcctcagcctccctagtagctgggattacaggcgcaggccactacaccgggctaattttcgtatttttagtagagatggggtttcactatgttggccagactggtctcgatctccttacctcgtgatccatccacctcagcctcccaaagtgctgggattacataaaggcgtgagccaccgcgcccggccaacatttcatttttt

SEQ ID NO: 2921 - DNA, 587 bp, Homo sapiens
tttaaattcaggatttttagatgttttctgtgggaggttcaattagattatctatatgtcacatatccttaagctgatgcttttgcacatgctgttggcttgtcgtttgtcatttgtaactgcattctctgagtcagtggatatctctttaaatcttgactgattactttttagagaattaggtgctttttttgtttccctttgaggactttttattgactaaagcataaagaccaaattytaacatggcatgaaaagcacttcttttttttttttttttttttttttttagatggaatctcactctgttgccaggctggagtgcagtggtgagatcttggctcagtgcaacctccacctcctgggttcaagtgattcttgtgcctcagcctccctagtagctgggattacaggcgcaggccactacaccgggctaattttcgtatttttagtagagatggggtttcactatgttggccagactggtctcgatctccttacctcgtgatccatccacctcagcctcccaaagtgctgggattacataaaggcgtgagccaccgcgcccggccaacatttcatttttt

SEQ ID NO: 2922 - DNA, 587 bp, Homo sapiens
tttaaattcaggatttttagatgttttctgtgggaggttcaattagattatctatatgtcacatatccttaagctgatgcttttgcacatgctgttggcttgtcgtttgtcatttgtaactgcattctctgagtcagtggatatctctttaaatcttgactgattactttttagagaattaggtgctttttttgtttccctttgaggactttttattgactaaagcataaagaccaaattttaacatggcatgaaaagcacttcttttttttttttttttttttttttttagatggaatctcactctgttgccaggctggagtgcagtggtgagatcttggctcagtgcaacctccacctcctgggttcaagtgattcttgtgcctcagcctccctagtagctgggattacaggcgcaggccactacaccgggctaattttcgtatttttagtagagatggggtttcactatgttggccagrctggtctcgatctccttacctcgtgatccatccacctcagcctcccaaagtgctgggattacataaaggcgtgagccaccgcgcccggccaacatttcatttttt

SEQ ID NO: 2923 - DNA, 617 bp, Homo sapiens
aaatctatagcctaactagaagtgagctaaacaaacacattactgggccatccaggaaacatgaagcagctgcctggaagtgggatgtgtgttttcaacctgggtagaaatatcccggggagtgatgatatggaatcggacacaaagttcacatcaaaacaacaatggagatttgcaacgggcagtgcatccaggatggacaggagatgttccagtcaagtggttcagagcaagttcagggtaggagggagasctgtgtccaatctcacttaaacttatatgccttcatttgtgcctcctcgtggaattatctcatggccgctatttgaaaaagaaatggcagtggagacctactggctagggccaaagcttcatagcttttgaataacgaaaaaattgtggtgctgcctactctttcccgttacataatataagataaaaacaataccaattcagcaacattccaagttttcctctgagactcattcaatgcttttttagaaatgcaaactatcaatttcttgaagaaaaaaaaaaggattttgtgtgcttggctagtgccctccacacaagattaattcagtgagatagtgttcagtaaagtgcttagcaaactc

SEQ ID NO: 2924 - DNA, 1026 bp, Homo sapiens
gaatatctagaaagtgtttgtttacctactgtttaaaaattgtttttccagaagataaacagatacaaatatccatggatgatttgagaagtgcataggtgataaatggggaagagaaaacccattctgcctcctcagtcatccactgatgtctgagaaagaatgatattactttttttccctctctcttgaccttcctgtgcaataaatactgatgacaatagcagcatataatatttacggtggccatgtaatttactctccagactgggactctttggagagtgaaagggagtgctaataatcattactccaggacagtagacttaaatgcaggatggtagacttaaatggaaacatatggtcatcctaataatggtggaaatttaccatggattctggagtcatgcccagatttcaatcccagcttcccacatacttacccaccatgtaattacagacatgttacttcacctccaagacctccatttcattcactataaagatgtgtggtctgtccttcaagtttataatatcttgcaatactgttatgaggattaaatgagatagttatgtaaaatcacctagcatagcgcaaggctggcattccaaatatattcatattctttgctttatagcaatatgccaggattagtgaatcagtttgtttatccatttcttcaagtacccaagagtgaattggacaagcatttattaagaccagtggttctcagtggaagcagtacgastccatggggatgctttggaaaattgtggtggtgtatgtggttgtcacagtgacttgtgtatgtggggagggtactactggcatttagcaagagggtgctggggtcgctagacatcctgcaatatccagaaaagttttgcacaacgaaggattcttcctcatccctcagggcctactagtgccccatttgatgttcctggaggccaaaaaaaaaaaatctttataattatgtgagcctagaacccaatttgattttacatataaatacaaagcatttg

SEQ ID NO: 2925 - DNA, 662 bp, Homo sapiens
ttaaagaagatgaattagcaaaagttgtaaccattcttacaatatcttcgaatagtaattttctataatgtatagactcayctaaaagtttattattgtcatggttattaccttcatgagttgttgactttagcagaaattctggggctaactaatgcctatcaaggtgtatttactgtgattttattttataaatatagtttataaaatttaaatttgtaatttataaaatttaaataaaattaaaatttaattgtagtttataaaatttaaataaaattaaaatttaaaatgatatttaactattttacagtttatgtgttattaatttttttcaacttttattttaggttcaggagatacatgtgcaggtttgttacatgggtaaactgcatgtcaccggggtttggtgtaaaaatgatttcatcgcccaggtagtgagcatagtactctcacccttctctgatcctcccgcatcaagcaggcctcagtgtctatcattccgatctttgcatacaagtgtactcaatgtttagttccacttataagtgagaacatgtggtatttggttttctgttcttgcattcatttgcttaggacaatggactccaggtgcatccatattgctgcaaaggatataattttgttttcttttatgactg

SEQ ID NO: 2926 - DNA, 662 bp, Homo sapiens
ttaaagaagatgaattagcaaaagttgtaaccattcttacaatatcttcgaatagtaattttctataatgtatagactcatctaaaagtttattattgtcatggttattaccttcatgagttgttgactttagcagaaattctggggctaactaatgcctatcaaggtgtatttactgtgattttattttataaatatagtttataaaatttaaatttgtaatttataaaatttaaataaaattaaaatttaattgtagtttataaaatttaaataaaattaaaatttaaaatgatatttaactattttacagtttatgtgttattaatttttttcaacttttattttaggttcaggagatacatgtgcagrtttgttacatgggtaaactgcatgtcaccggggtttggtgtaaaaatgatttcatcgcccaggtagtgagcatagtactctcacccttctctgatcctcccgcatcaagcaggcctcagtgtctatcattccgatctttgcatacaagtgtactcaatgtttagttccacttataagtgagaacatgtggtatttggttttctgttcttgcattcatttgcttaggacaatggactccaggtgcatccatattgctgcaaaggatataattttgttttcttttatgactg

SEQ ID NO: 2927 - DNA, 662 bp, Homo sapiens
ttaaagaagatgaattagcaaaagttgtaaccattcttacaatatcttcgaatagtaattttctataatgtatagactcatctaaaagtttattattgtcatggttattaccttcatgagttgttgactttagcagaaattctggggctaactaatgcctatcaaggtgtatttactgtgattttattttataaatatagtttataaaatttaaatttgtaatttataaaatttaaataaaattaaaatttaattgtagtttataaaatttaaataaaattaaaatttaaaatgatatttaactattttacagtttatgtgttattaatttttttcaacttttattttaggttcaggagatacatgtgcaggtttgttacatgggtaaactgcatgtcacyggggtttggtgtaaaaatgatttcatcgcccaggtagtgagcatagtactctcacccttctctgatcctcccgcatcaagcaggcctcagtgtctatcattccgatctttgcatacaagtgtactcaatgtttagttccacttataagtgagaacatgtggtatttggttttctgttcttgcattcatttgcttaggacaatggactccaggtgcatccatattgctgcaaaggatataattttgttttcttttatgactg

SEQ ID NO: 2928 - DNA, 1156 bp, Homo sapiens
gcttttacttacttctaggcttggagatcacagtctcaggtgaagagttctagaacagtagcaccagcaacactgattctaggtttcctccagtcacttaacaatcttttctatccttacttcttaatacagaaatgcaaatattggggcactaaaaaaaatcctgaatttttggactaatttcaggagaactggaaaaaaaagtgttttgaaatctaaaagggattttagaaaatggtattacgtagtttgtcttcaaagatggcaagacagagcagcatttagagaaacatatcttctctacacatgaagagttgaggaagaagaaacctaaagaatacagtgagtggtggcagagtccaagagagaagagaacacagtgagattctgggatgcttcgtacagaagaaagtaagatacatggagatgctcacttttggtaacttctcagggaccttggaggaaaaccctaaaatgatcatggattatctcccactaaatttttagatcttttgaataaagtttgagacttatttggagtcactgttatgcacattccctattgttgtccttaaagtttcaatgaatgaggaagatcagatggatgaaagaatgaaaggaagacagaagaaagagaagaagggaaggatggagaaattggggaaagaaatgaagaaaactttgaagcttctacagagcactaaagctatgatgatccattttaagagaacttctcaaattagaaaagagagtgaaacaaattatctgcaaacatcgaatagagtgcaggggtagtaaaattccagttggagttcaggtgagcctggctttgctacttatcagctagtgatgctgaccagcttatttaacatcactaagcctaaatttccccatctataaatgggcatagggtctttattacaggattggtaagaaaattgaatggaattgtgtttgtcttgttttagtaaataaatcttatgctttatcttttaaacaccttattgaggtataatcaatacactggccattatattttaaaataacctttctttctccttctctctgtcttttcctctgaaatatctgtaatgtgtatgttggcgtgcttgttggcgccccacaattcycataggttttctttaagctttttaat

SEQ ID NO: 2929 - DNA, 570 bp, Homo sapiens
ttatttgatgctttcctgttcttcaatcmcttttttttttaagatgatattttgctcttgaagcccaggctggagtccaatggcatgatctcggctcactgaaaactccctctcctgagttcaagagattctcctgcctcagcctcccaaatagctggaattacaggcacccggcaccaagcctagctactttttttgtatttttagtagagacagggtttcactatgttgggcaggctggtctctaactcctgaccttaggtgatctgcccaccttggcctcccaaagtgctgggattacaggtgtgagccaccacgcccagccagaatattttttaaataaacaaagcatatttaaggagcacaacttccctaccagttgggtatctgagtctgaggtaactgctgacattattcaaagataaaaatcactgaatgtcccttagagacagagtcatgattacagcttagtaatgtggcttctcttttgattccatggcctcctctgttgcacaacactgttctgggggttcccatcatcttctaatgccatcttagccagtttgattt

SEQ ID NO: 2930 - DNA, 700 bp, Homo sapiens
aaaacagtgaagtacaggtggcatatcgaatgacatagttcatatctctaatgtcttctccctaaagaattaatgatatatttgacagtgacaatgagtggctattgtattaattcyttcctgataatacctatattctcttcttctatcattagtcttcattattcatctttcttcctctgtttccaccaatctctctcagaataggcagttaattgttttagggcatttttagtagctggttatttgtaatctgcggttgttcaatgagaaactttaaatttataggtcttatctcctcttcatacagcttcagctaatgttgtttctaattgcccactggtacagaatgtaacgcaaaatcttatattggttcactcttctccattttattctataaaaaattgctacaaatggcttttaccagaaatgcccctaaatattaagataaaaatgccgatatatacaaatgaatagttgttaccttaagagaacagcttgtatactaacttgaaattatctcttcctatgcaaaggcttttcctctgcatcatcctatgtaacattatcaactcgcacacctgtatgtagtcacctgtttcatgaccatttgaactatgtcacttcaatttcaaaatcttaaactcagtagaaacaaaatgaaatgttaaatccattcccttcaaacctcctcatatct

SEQ ID NO: 2931 - DNA, 651 bp, Homo sapiens
taacaagaaaaaaaaaaaagttaatgagccaataaattcattcagttaattcgcgcgcgcgcgcgcgtgtgtgtgtgtgtgtgtgtgtagcagtattagaagtgcactaagtatctaatttcattcaaggatttatcatttatcaagtctacatggtttatatggatgtttagaaagaattctctgactattcatctagaatcaatcattgcaactaagttggaaaaggcaagattctagcctgtaattcattagcttaaatagcaccttaatattgtttgttttattctgattgtattctatattgctcattttatcagaaatttagtatattcaagtaatcatagacaaaattctgttaataaatttatttggctcactgtatatttttctgttcaaattttatatataaaaacaatgttaatatgtcattgtcaaaataagtttttttctttgcataatgtacattatgacaagttcagaatcatttccattattttaaytgacatttaaatacaatttaataacatggatatttataagaacttctaaaagttaaagaataaatcaaagttataagacagtaattagcatttcaaaatgcttatatgaatggtgataaaattatctttaatatcttaaaatatgtta

SEQ ID NO: 2932 - DNA, 651 bp, Homo sapiens
taacaagaaaaaaaaaaaagttaatgagccaataaattcattcagttaattcgcgcgcgcgcgcgcgtgtgtgtgtgtgtgtgtgtgtagcagtattagaagtgcactaagtatctaatttcattcaaggatttatcatttatcaagtctacatggtttatatggatgtttagaaagaattctctgactattcatctagaatcaatcattgcaactaagttggaaaaggcaagattctagcctgtaattcattagcttaaatagcaccttaatattgtttgttttattctgattgtattctatattgctcattttatcagaaatttagtatattcaagtaatcatagacaaaattctgttaataaatttatttggctcactgtatatttttctgttcaaattttatatataaaaacaatgttaatatgtcattgtcaaaataagtttttttctttgcataatgtacattatgacaagttcagaatcatttccattattttaattgacatttaaatamaatttaataacatggatatttataagaacttctaaaagttaaagaataaatcaaagttataagacagtaattagcatttcaaaatgcttatatgaatggtgataaaattatctttaatatcttaaaatatgtta

SEQ ID NO: 2933 - DNA, 632 bp, Homo sapiens
tggggaaaagggtatatgaagagttcttccaaagtggcctctaaatccacctgtgtagtaaacagtgtctgacaactaaataaataatttccatgtgtacttacggctgtgttttaaatggatgcaagggctggagtgataactacagttcaatttgtgaaaagatttatagattttgtagcacttgcagattttatggactttctctgcaattaaatatttatagttcagtgctatggtttgagtgtgttttccaaaagttcatgtgttagaaccttggtcctcaggatggcagtgtcggcaggtggggcctagttgacggtgtttggtcatgggggctctgcccttatgaagagattaacgcagttctcatggaacttggttagttcttaaagagtgggttgtaaagcaggttggcacactgtctcccctctcctgcttctccacaatgctatgaagcagcacaaggccctcaccagatgcaaccccacaatcttggacttcccagactccagaatcatgagctaaatcaactwctttcctttcaagttatccagtttcaggtgttctattatagcaataaaaaacaaactaagacattcagctagcacagaagggtcagcctgctgaaa

SEQ ID NO: 2934 - DNA, 625 bp, Homo sapiens
tgctttctgcacgacattaattttaattatatggacacagaaggagaaaatttaaaacttaaatgtcttatcattgctagaaaaataaaagttttttccctacgagttagaartcttgatctctgcgtttttctatggatcgattctcaaagtttgtgcaaatacagttggtgtttctttctaagtgtctttggttatgaactaaggatgtaaccaactcctgcttattaggtaaagggatgaggcaagagagatccagcaacagggtgtgtttttttttcaatctttggcaacatttttctgtgatgtccaaagtagtgaactccctgactagggtttcagacatggagtgttctaatccaccaaacaccaaagggctgggaagaagtgatttggacatggataaccagtgtcacctacaacatggaacagagggtcatcaaagtggtctgagtcactttaatatgtggctggagagatgcaagaacaacagaaagagccctcaggaggcatcccctacccaagggcagtgaagctcagtgcagctgcggggtgtggggtcatagggtgaccaggtgagcagggctgatggggaggagaaatgctctgttaagggtgtggtctc

SEQ ID NO: 2935 - DNA, 571 bp, Homo sapiens
aatgtagtgtaatggacaggcctggaataaagtggaatgctacggtctcgaatggaataaaaatgtatggaatggaatgcaatgaaacggaatcgaatgtcatagaatgtaatggaatgcaaaaaaatggaatccaaaatcattgactggaaaggctgggtgtcgaaaggaattgactccaatggaatggaatcgaatggaatggaagtgaatagaatcgaactaaatcgaatggaatggaattgataggaacggaatggaaaggaatgcaatgatttggcatggaatggaatcgaatggcatcgaatggaatggaatggaatgcaatggaatggaatgtattagaatgtaatgaactttaatggaatgtactcgaatggattcgactggaatggaatgttctggaagtgaatggactccaatggaatggattcaaaaggaatggaatcgtacggaatggaatctaatggaatggaattaaatggaaatgaatcaaattgaatagcacggaattgaattgaatggaatsgaatgcaatggaatctaatgaaacggaaaggaaaggaatgga

SEQ ID NO: 2936 - DNA, 870 bp, Homo sapiens
acttttaatgaaggcttcaaactaatattaaaaagacacaaaaagaagaaagaaaggtaggaaaacaggaaggaagggaggaaaaaaggaagaaaggaaagaaggakgaaagaaagcaggaacgggggaggtaggcgggagggaaagagagatgtgggcaaaaaagagggggagagagagaaagagagaagataaaaaagtacatttggagaaaatagacaaagcagagaagagtaaacttgaaatatttgattgatatctttaaaaatctaaagatggagataagctttacaaaagaaatataaagtcttcaaagcaaaaagatcctgtggaaattaattctataatgaaataaatatttaatataaacattgaactattaggtgaagaaatttctcaggaatttggggggaaagacatagcaacaaaaattcaagggaaactagagcattcgaaggttaataggggaggtgccatataataataaacttcaagaaagagagagagagaatgttgcacaggaattattaaagagaactttaggcatattctccagtaccaaagaactcaagtaccaaaacagtggctaaaaaaaaatgtcctatagcaaaagacctacacacatcctgaaatatcagaacatggaaatacgacatgatcctaaagtttctgcaaagtaaaaatccagttaaatgaagttaagagatagaatgccattttatttctaatagcatcattgaaaattagaaatagtggagaatacttttaaaatactaaacacacagtaaaacttgtatgaaaaataaaattatttactgaagcaaactcccaattgaaaacgtgatttcaataaagatattttcagacatg

SEQ ID NO: 2937 - DNA, 870 bp, Homo sapiens
acttttaatgaaggcttcaaactaatattaaaaagacacaaaaagaagaaagaaaggtaggaaaacaggaaggaagggaggaaaaaaggaagaaaggaaagaaggatgaaagaaagcaggaacgggggaggtaggcgggagggaaagagagatgtgggcaaaaaagagggggagagagagaaagagagaagataaaaaagtacatttggagaaaatagacaaagcagagaagagtaaacttgaaatatttgattgatatctttaaaaatctaaagatggagataagctttacaaaagaaatataaagtcttcaaagcaaaaagatcctgtggaaattaattctataatgaaataaatatttaatataaacattgaactattaggtgaagaaatttctcaggaatttggggggaaagacatagcaacaaaaattcaagggaaactagagcattcgaaggttaataggggaggtgccatataataataaacttcaagaaagagagagagagaatgttgcacaggaattattaaagagaactttaggcatattctccagtaccaaagaactcaagtaccaaaacagtggctaaaaaaaaatgtcctatagcaaaagacctacacacatcctgaaatatcagaacatggaaatacgacatgatcctaaagtttctgcaaagtaaaaatccagttaaatgaagttaagagatagaatgccattttatttctaatagcatcattgaaaattagaaatagtggagaatactttyaaaatactaaacacacagtaaaacttgtatgaaaaataaaattatttactgaagcaaactcccaattgaaaacgtgatttcaataaagatattttcagacatg

SEQ ID NO: 2938 - DNA, 617 bp, Homo sapiens
atggcagaaaagtttataaatgaatttgtcatagtctcaaacatttttttcagcaatttaaaatcttaaagttacgttaaatagtacttaytaaatgtctgagtaatttctaagtacgaaaacattaactagcaagcataaacctaaatacattaacaaattgtttttacatgatatgaataagacaaatatatttgcatgtgctcagaaacataaaaaattgaggaaacattcttctgaaatcataaaatgattttatctgtaaatactgctataacatagtttaaaattgcttacttcctagtttaatactgaacattgaaattacttaaagttaaaattgtcattaatgtatataattaaaactgtgtctggaattggtgggttcttagtcttgctgacttccaaaatgaagctgtggacccttgcggtgagtgatacagttcttaaagatggtatgtccggaatttgttccttctgatgttcagctgtgtccggagtgtcttccttctggtgggttcatggtcttgcaggtttcaggagtgaagctgcagaccttcgtggtgagtattacagctcttaaaggcagcgcgtctggagttgttcgttctttctgt

SEQ ID NO: 2939 - DNA, 1261 bp, Homo sapiens
catgtccaagaatttctgagaaagaagaaaggttggacaataaatataaacaacaacaacaaaaaggtcaaccatattagtatcattgaagtaaaaaatgaaaaaatgagaaaatattatttaatcttaaccaattggtcaaaattttgaatgtcataattttgagttttgatgaggatgtaaaataacaagatttgttatagaaggttgaatctcattcctagatatttaccttagaaaactctcacacgaactcaatgaataattttacctacattcatagcagcattgactataagagtaaaaatcatagaaattccctaattgaatataatatcttattataggataatcatataataaaatactctgcatatgtgaaatttaaaaaccacaactatatggagtgacataaatgaattccacaatatatatattgtaccacaaaagaaaggcacagaaaaatccaaacaatataatgtaatttatacacatttkaaaatttcaaaaattaagtgtgaaattccttataataaagccataaacattttgaaagcaaagtattacggtagtggcaaagtagcatttaactgtaaaattgaaagacataggtagtattctattaggctagtttttagatacttgttcattatgaactttataacttatgtatcttaaatctgtaattttatatgaatcaaatgttttaaataataaattttaaaattaactgacatatttgtatataaataatatataataaattttgctcagtaataatcatttagctctatagataacagtcgagattgcttacttgacttaatactttagaaagcagagtagaacttagaatgtataaaataagtaaatatgttaaagtaatcaaagaaagcatgagcattcatttaatcacataaggaaagtattttgttatttgacagtggttttcattaatgctaacttgagaatgctgcagaagtcacacatctgttctttgcaaatgaatttactaccaaacccaagaaaaaaattatatttaaaaatgccagtttataaaactgaatgaaatcttatatataaatatatacttttatttttaacctaaaattttgattctctcaattctttgcaatttaatgttctagttcaaggtagttgtattcaaaaagtactttaaaatttgataaaatttagagtttgaagttaaactattatgacacattcattgaacataaaataaaggacacataggtatgca

SEQ ID NO: 2940 - DNA, 558 bp, Homo sapiens
tgccttagatatcatcttgcagaattcggtagaatattaaattaaacataagcagaggctgggcacggtggctcatgcctataatcccagcactttgggaggcagaggcggaccaaccacctgaggtcaggagttcgagaccagcctggccatcgtggtgaaatcttgtctctacaaaaaatataaacataatccaggcatggtggcgggcgcctgtagtcccagctacttgggagtctgaggcaggagaatcgcttgaacatgggaagcggaggtcgcagtgagccgagattgcgccactgcactccagcctgggtgacgagagtgaaactccatctcaaacaaacaaacaaacaataaaaaaaacaaaataagcagaaagtgatcaaattatagtgccaacataatggcttttactttataaaagagcaagacagaaatgtgactgagacatttctatgatggacataaatacttgctttgaaaatgtactaaaatcttctcartttttctaacttctagctctacattctagcagaaaaagaaacaggagggcaa

SEQ ID NO: 2941 - DNA, 558 bp, Homo sapiens
tgccttagatatcatcttgcagaattcggtagaatattaaattaaacataagcagaggctgggcacggtggctcatgcctataatcccagcactttgggaggcagaggcggaccaaccacctgaggtcaggagttcgagaccagcctggccatcgtggtgaaatcttgtctctacaaaaaatataaacataatccaggcatggtggcgggcgcctgtagtcccagctacttgggagtctgaggcaggagaatcgcttgaacatgggaagcggaggtcgcagtgagccgagattgcgccactgcactccagcctgggtgacgagagtgaaactccatctcaaacaaacaaacaaacaataaaaaaaacaaaataagcagaaagtgatcaaattatagtgccaacataatggcttttactttataaaagagcaagacagaaatgtgactgagacatttctatgatggacataaatacttgctttgaaaatgtactaaaatcttctcaatttttctaacttctagctmtacattctagcagaaaaagaaacaggagggcaa

SEQ ID NO: 2942 - DNA, 1273 bp, Homo sapiens
ttaaaattaagcacaaatttatttagataacattcaagacctttctgattaagaaattgtgaatatcagtattatttggccagactttcttctctcttcataattaaaaggaaagtaaaaatttgaatatcaaagaatatttcttttaaaatcacaataatgtacatttttagtatgacatttttaaaatggaagcttttgtacttaatgacaaatgaatattccctaaaagaatatttgtcactttccaaaaatccatttgcttatggtgagaacaataattctagaaaattttccaaataaacacaaaaataaaaaaaaatacttaatatttaggtaaaacatgagaacaaacactttacaacagctcttcacactgaggtaacgtatatttttccttgccccttgaaaattggttttgtgacttgctttgactaatcaaatctattagaaatgctgttgtcacttctgagcaagaattcacagggcctcacagcttccttgccatcctcttagatccatgtcattagatctagatattcctgttgggagaaaacatggtagaaaaggggtgcattttgccaacaatcaacaaattactcacctgtgagatgcattaattaaagtgagaccatagtgaactatccggttccaatgaagctacggaaggctgcagcaatgtgaatattgtaaagggaaaccaccagaggaaaactatggctgagctcagcctgaaatatagaattctaagcatatttaagcacatatttttttttaagcttctaagtacaggtgtagaaaatactataaaatattatataatttttcttaaattaaaattttttctaatctctttctcttccctcttctattcctcccttcctaggtgtcatacagacaaacacacaatagagaggcataatcctgggtatgaacattagtcaatttcagtaactacaagtactaatgtgaataatcagcatataatcacactcatatattctgaaattataagtaaaatcacactcatggagtgagcacattgaaatgttaatatactctagactagtgttacaatttatatttttaatttgatagtccctgagaagcgtcctctgtaccactggcttctcaatttacyttgagtaaagtcttcatctacaaaaagccccatttaaaaggcaaacaatatcatctgcaaatatatgaacataatgggaaaatattcatagaataatttatacaaacaaaacttatgtttatttagaaaggt

SEQ ID NO: 2943 - DNA, 1215 bp, Homo sapiens
tattgttataaaacatattcttgattattgtatcagagtttatcaccactactgaagtcaaaataaagatgaatctctaaagtatgcaatttatttgggaatcacagaattgtagttctgaacaaaactgaaaaccacggtggtcttctatatgtgtgaaggacaaagagaagattgggggtttactagcragggaaatgctacatattgttttgaaagaaagctcacagacactagagaagaatttgggagctggtcaaacaagcctaatgggagacaaatcttttgagacttcccaggatcccaactagaaaatcccttagtcaattttaggtgaaaaagagttaaatttgaatttgattctggggaagtttgtcatttgtttggattcaaaaagcctaaaaatatttaattaaagtagaattacatatccttgagagataatggtcacttatttaaccagagtaataatggaaagacttcaaaaacaaattcaaaagttacatagtcaagagaaaaaaaatagttagacctgtattagagatgacttagttttttcaggtggtcaaaacccgaataaagacagcccaaaccacaggaagctatcttgaaacataaaatacctgcttattaggtggattacttagagagagagaaaaaaaaccttttgtagtatgaccatttctcttggtatatgcccttttgagtaagctggaaattaaaccccatgaaaaactactttaattcaattagacactggaagagtgtgtgtctaaggttataagtaaaccatattataggataataatacacacacacacacacacacacacacacacacacacacacacacacacacaagtagtacctccaccaggtggaatggatggcttttagaaaaagtaagagcatgtgaaatttcctggttgcatagaacaatttggatacatcaggaaaagccgagtacagaattcgtctatactggaaaaacattgtttttccagtttttttgaggcaaacattctcagtgtcaggttataataccagagtgcgaagtggggaaaaatgcaataggaactgacaaaaaaaaaagaaaaaaaaagaaaatgagagagagagtcaccactttagttaagcaaaaagatgtaatgttttaaggagagaagtaagagcagaaggcatggatgtattaactgcaaattacatgtagtgaga

SEQ ID NO: 2944 - DNA, 1215 bp, Homo sapiens
tattgttataaaacatattcttgattattgtatcagagtttatcaccactactgaagtcaaaataaagatgaatctctaaagtatgcaatttatttgggaatcacagaattgtagttctgaacaaaactgaaaaccacggtggtcttctatatgtgtgaaggacaaagagaagattgggggtttactagcaagggaaatgctacatattgttttgaaagaaagctcacagacactagagaagaatttgggagctggtcaaacaagcctaatgggagacaaatcttttgagacttcccaggatcccaactagaaaatcccttagtcaattttaggtgaaaaagagttaaatttgaatttgattctggggaagtttgtcatttgtttggattcaaaaagcctaaaaatatttaattaaagtagaattacatatccttgagagataatggtcacttatttaaccagagtaataatggaaagacttcaaaaacaaattcaaaagttacatagtcaagagaaaaaaaatagttagacctgtattagagatgacttagttttttcaggtggtcaaaacccgaataaagacagcccaaaccacaggaagctatcttgaaacataaaatacctgcttattaggtggattacttagagagagagaaaaaaaaccttttgtagtatgaccatttctcttggtatatgcccttttgagtaagctggaaattaaaccccatgaaaaactactttaattcaattagacactggaagagtgtgtgtctaaggttataagtaaaccatattataggataataatacacacacacacacacacacacacacacacacacacacacacacacacacaagtagtacctccaccaggtggaatggatggcttttagaaaaagtaagagcatgtgaaatttcctggttrcatagaacaatttggatacatcaggaaaagccgagtacagaattcgtctatactggaaaaacattgtttttccagtttttttgaggcaaacattctcagtgtcaggttataataccagagtgcgaagtggggaaaaatgcaataggaactgacaaaaaaaaaagaaaaaaaaagaaaatgagagagagagtcaccactttagttaagcaaaaagatgtaatgttttaaggagagaagtaagagcagaaggcatggatgtattaactgcaaattacatgtagtgaga

SEQ ID NO: 2945 - DNA, 1215 bp, Homo sapiens
tattgttataaaacatattcttgattattgtatcagagtttatcaccactactgaagtcaaaataaagatgaatctctaaagtatgcaatttatttgggaatcacagaattgtagttctgaacaaaactgaaaaccacggtggtcttctatatgtgtgaaggacaaagagaagattgggggtttactagcaagggaaatgctacatattgttttgaaagaaagctcacagacactagagaagaatttgggagctggtcaaacaagcctaatgggagacaaatcttttgagacttcccaggatcccaactagaaaatcccttagtcaattttaggtgaaaaagagttaaatttgaatttgattctggggaagtttgtcatttgtttggattcaaaaagcctaaaaatatttaattaaagtagaattacatatccttgagagataatggtcacttatttaaccagagtaataatggaaagacttcaaaaacaaattcaaaagttacatagtcaagagaaaaaaaatagttagacctgtattagagatgacttagttttttcaggtggtcaaaacccgaataaagacagcccaaaccacaggaagctatcttgaaacataaaatacctgcttattaggtggattacttagagagagagaaaaaaaaccttttgtagtatgaccatttctcttggtatatgcccttttgagtaagctggaaattaaaccccatgaaaaactactttaattcaattagacactggaagagtgtgtgtctaaggttataagtaaaccatattataggataataatacacacacacacacacacacacacacacacacacacacacacacacacacaagtagtacctccaccaggtggaatggatggcttttagaaaaagtaagagcatgtgaaatttcctggttgcatagaacaatttggatacatcaggaaaagccgagtacagaattcgtctatactggaaaaacattgtttttccagtttttttgaggcaaacattctcagtgtcaggttataataccagagtgcgaagtggggaaaaatgcaataggaactgacaaaaaaaaaagaaaaaaaaagaaaatgagagagagagtcaccactttagytaagcaaaaagatgtaatgttttaaggagagaagtaagagcagaaggcatggatgtattaactgcaaattacatgtagtgaga

SEQ ID NO: 2946 - DNA, 1215 bp, Homo sapiens
tattgttataaaacatattcttgattattgtatcagagtttatcaccactactgaagtcaaaataaagatgaatctctaaagtatgcaatttatttgggaatcacagaattgtagttctgaacaaaactgaaaaccacggtggtcttctatatgtgtgaaggacaaagagaagattgggggtttactagcaagggaaatgctacatattgttttgaaagaaagctcacagacactagagaagaatttgggagctggtcaaacaagcctaatgggagacaaatcttttgagacttcccaggatcccaactagaaaatcccttagtcaattttaggtgaaaaagagttaaatttgaatttgattctggggaagtttgtcatttgtttggattcaaaaagcctaaaaatatttaattaaagtagaattacatatccttgagagataatggtcacttatttaaccagagtaataatggaaagacttcaaaaacaaattcaaaagttacatagtcaagagaaaaaaaatagttagacctgtattagagatgacttagttttttcaggtggtcaaaacccgaataaagacagcccaaaccacaggaagctatcttgaaacataaaatacctgcttattaggtggattacttagagagagagaaaaaaaaccttttgtagtatgaccatttctcttggtatatgcccttttgagtaagctggaaattaaaccccatgaaaaactactttaattcaattagacactggaagagtgtgtgtctaaggttataagtaaaccatattataggataataatacacacacacacacacacacacacacacacacacacacacacacacacacaagtagtacctccaccaggtggaatggatggcttttagaaaaagtaagagcatgtgaaatttcctggttgcatagaacaatttggatacatcaggaaaagccgagtacagaattcgtctatactggaaaaacattgtttttccagtttttttgaggcaaacattctcagtgtcaggttataataccagagtgcgaagtggggaaaaatgcaataggaactgacaaaaaaaaaagaaaaaaaaagaaaatgagagagagagtcaccactttagtwaagcaaaaagatgtaatgttttaaggagagaagtaagagcagaaggcatggatgtattaactgcaaattacatgtagtgaga

SEQ ID NO: 2947 - DNA, 1215 bp, Homo sapiens
tattgttataaaacatattcttgattattgtatcagagtttatcaccactactgaagtcaaaataaagatgaatctctaaagtatgcaatttatttgggaatcacagaattgtagttctgaacaaaactgaaaaccacggtggtcttctatatgtgtgaaggacaaagagaagattgggggtttactagcaagggaaatgctacatattgttttgaaagaaagctcacagacactagagaagaatttgggagctggtcaaacaagcctaatgggagacaaatcttttgagacttcccaggatcccaactagaaaatcccttagtcaattttaggtgaaaaagagttaaatttgaatttgattctggggaagtttgtcatttgtttggattcaaaaagcctaaaaatatttaattaaagtagaattacatatccttgagagataatggtcacttatttaaccagagtaataatggaaagacttcaaaaacaaattcaaaagttacatagtcaagagaaaaaaaatagttagacctgtattagagatgacttagttttttcaggtggtcaaaacccgaataaagacagcccaaaccacaggaagctatcttgaaacataaaatacctgcttattaggtggattacttagagagagagaaaaaaaaccttttgtagtatgaccatttctcttggtatatgcccttttgagtaagctggaaattaaaccccatgaaaaactactttaattcaattagacactggaagagtgtgtgtctaaggttataagtaaaccatattataggataataatacacacacacacacacacacacacacacacacacacacacacacacacacaagtagtacctccaccaggtggaatggatggcttttagaaaaagtaagagcatgtgaaatttcctggttgcatagaacaatttggatacatcaggaaaagccgagtacagaattcgtctatactggaaaaacattgtttttccagtttttttgaggcaaacattctcagtgtcaggttataataccagagtgcgaagtggggaaaaatgcaataggaactgacaaaaaaaaaagaaaaaaaaagaaaatgagagagagagtcaccactttagttmagcaaaaagatgtaatgttttaaggagagaagtaagagcagaaggcatggatgtattaactgcaaattacatgtagtgaga

SEQ ID NO: 2948 - DNA, 667 bp, Homo sapiens
tttcctggctttcctggagtcagtggggagaacggagcctgaggaagctggggatagggagaaggtgtggagggaaaggctggaggggtgtggggggggctctgtggggaggcacgccccgggggatgtccactccattcccaccagggcctgtcaaggaagtcagggcctcgaggagaatggggcctcatggcaagtgcaagggagagaaacagggggctcaaggtccaaatgggtttgggtttttctgacaacaacrctcccctctctagggtccacagggtcagccgggtcctcgaggtgccactgggaagtctggagctaaggtcagtggtctctgcagggctccccctgacccctgcccactgagccccagctctccctcaaccacctgaccttggggacaactgaggagcagctcctcccactctgtttcccccatagggaacatcgggggcgaaggcctccatgggccccccagagacagggtgtgtgtggcatgagtgtcctctctctccatgctcccagggagcctgggtgagccagctccttcctcaccccagtgaggaccccagcccctgcccccattctcctgactcagcccacctctgtccctagggtcttcctgattaatgtgtctggtcctctgcctccctttccccaggcc

SEQ ID NO: 2949 - DNA, 684 bp, Homo sapiens
catctctactaaaaatacaaaaatcagctgggcgtggtggcgtgtgcctgtaatcccagctactcaggaggctgaggcaggagaatggcttgaacccgggacggggaggttgcagtgagctaagatcacgccactgcactccagcctgggcgacagagcgaaactccgtctcaaaaataaataaataaataaataaataaataaataaayaaacaaacaaacagttagaaactatcctctttatttttaaagtatgagtgtaataattctcaaaaatcatttatgttcttaggctcatcaactcttaataaaattacccaagattttggtaggcaaaaacaaggaaataacactccccaaaacttctgcattacagaatttgtttcttatgttcaggtttgctaagcattaagcttaaatatcttacacagtcatgtagctgcctgatgaggtttcagtcaatgattgactgcattatatgacagtggtcccataacagctgaaaaattcctatcacttagtgctttgtgttacaaatacctactgtattcaacacagtaacatgctgtacaggtttatagcctaagagcaataggctatatcacatagattactatgtagttgactatactatctaggtttgtgtaagtactgtacactctatgatgtttgcacaatgacaaa

SEQ ID NO: 2950 - DNA, 684 bp, Homo sapiens
catctctactaaaaatacaaaaatcagctgggcgtggtggcgtgtgcctgtaatcccagctactcaggaggctgaggcaggagaatggcttgaacccgggacggggaggttgcagtgagctaagatcacgccactgcactccagcctgggcgacagagcgaaactccgtctcaaaaataaataaataaataaataaataaataaataaacaaacaaacaaacagttagaaactatcctctttatttttaaagtatgagtgtaataattctcaaaaatcatttatgttcttaggctcatcaactcttaataaaattacccaagattttggtaggcaaaaacaaggaaataacactccccaaaacttctgcattacagaatttgtttcttatgttcaggtttgctaagcattaagcttaaatatcttacacagtcatgtagctgcctgatgaggtttcagtcaatgattgactgcattrtatgacagtggtcccataacagctgaaaaattcctatcacttagtgctttgtgttacaaatacctactgtattcaacacagtaacatgctgtacaggtttatagcctaagagcaataggctatatcacatagattactatgtagttgactatactatctaggtttgtgtaagtactgtacactctatgatgtttgcacaatgacaaa

SEQ ID NO: 2951 - DNA, 668 bp, Homo sapiens
aagtatgcattttgcttcaaaacagagtagaacttctatctgtaaagcttcaaaattatcctgctgtgatctgaatagaattgctttaagcatgatttgggaagaaatggcattttaactatattccatatttacttctaataacataggccaggtaattcttgtacctctgaacaacatccttgagctttcttcatatgggttcagcgtacttcctgaygaaaatgttcctggacatcttatacttatttttttgctgctatagtgaatgagctactttcttgtaaaattacattttctagatatggttggtgatatgattgggatatctgttccctccaaatctcatgctgaaatgtaacccccaggccaggcatggcagctcatacctgcaatcccagcaatttgggaggccaactgggctgaagcttaagcccgggagttcaaggccagcctgggcaacattgtgagactcggtctctacaaaaaatagaaaaatttgccaaacatggtggcacatgcttgtagtcccagctacttggcaggctgaggactgattgagcccgggaggtggaagctgcagcaagcgatgatcgtgccactgcactccagcctaagtgatagagtgagaccctgtcccaagaaaacacataaccctagtgctggag

SEQ ID NO: 2952 - DNA, 1154 bp, Homo sapiens
gcatggatatgagcaacagtcaccatagtgaattttagaatatttcatcaccacaaagaaagatccygtaccctttagctatcctttgattcctattccctgcctccagcattaagcaaacagtcatctactttctgcttctgtttatttgcctattcagtatattctatgtgaatggaatcacaacatatgtggtctttggtgactggcttctttcccctaggtttatccatgttgtagcatgtatgaatcagtactttggtcctttttgtggctaaataatattctattatctagatataccacattttgcttattcattcatctgcttaaggaaatgtgggttgttttcatcttgtaaatatcatgaataattattctatgcacatttatgtacaagtttttatttgaattcttgtttttaattattttgggcaaatacttaggagttgaattattgggtcatatgtaattccatgtataacttctagaagaagcattgcagtttttcacactgactgcatcattgtacatttccacaataagctccattttgaaactagaaaattggtatttattcatattaatgtgggtaggtataaaatggtgacttttatttttcctacccaagtattggtaaagaaagagtttcatgaattctggcatcttctgtgacagagacaatttttagctttatatttaaaggttaagttacaggttggggaactagtgaaaggtttaggtgttgcaggctatataatgaaatgaaatgaaatgaaacatagggctggggtagtcatgaatagggcatacagtgatcagaccagagtaatttaccaccactatagcttgaaatggttctgaaatggcataaaggaaagaaacattagaaaacattgattagaggaatattataacggggagcttaaacagagtatcacaacttgctaaacaatattaaaataagtagagagcccagatataaaccagtatcagttttgttaacttaaagctatgaatagccaaaatgcccacccctagtactgattcattgttttgaatgcttaacacctaaacagtgaatacacttatttggaacgttttgtattaatgaaaattagagtatctcattatcaaacattttcatctatcaa

SEQ ID NO: 2953 - DNA, 1154 bp, Homo sapiens
gcatggatatgagcaacagtcaccatagtgaattttagaatatttcatcaccacaaagaaagatcctgtaccctttagctatcctttgattcctattccctgcctccagcattaagcaaacagtcatctactttctgcttctgtttatttgcctattcagtatattctatgtgaatggaatcacaacatatgtggtctttggtgactggcttctttcccctaggtttatccatgttgtagcatgtatgaatcagtactttggtcctttttgtggctaaataatattctattatctagatataccacattttgcttattcattcatctgcttaaggaaatgtgggttgttttcatcttgtaaatatcatgaataattattctatgcacatttatgtacaagtttttatttgaattcttgtttttaattattttgggcaaatacttaggagttgaattattgggtcatatgtaattccatgtataacttctagaagaagcattgcagtttttcacactgactgcatcattgtacatttccacaataagctccattttgaaactagaaaattggtatttattcatattaatgtgggtaggtataaaatggtgacttttatttttcctacccaagtattggtaaagaaagagtttcatgaattctggcatcttctgtgacagagacaatttttagctttatatttaaaggttaagttacaggttggggaactagtgaaaggtttaggtgttgcaggctatataatgaaatgaaatgaaatgaaacatagggctggggtagtcatgaatagggcatacagtgatcagaccagagtaatttaccaccactatagcttgaaatggttctgaaatggcataaaggaaagaaacattagaaaacattgattagaggaatattataayggggagcttaaacagagtatcacaacttgctaaacaatattaaaataagtagagagcccagatataaaccagtatcagttttgttaacttaaagctatgaatagccaaaatgcccacccctagtactgattcattgttttgaatgcttaacacctaaacagtgaatacacttatttggaacgttttgtattaatgaaaattagagtatctcattatcaaacattttcatctatcaa

SEQ ID NO: 2954 - DNA, 2660 bp, Homo sapiens
tgcatatcatgtttagacttaggtcccatccccaagaaatctcattatatatatgcaaatattccaaaaattttacaaaaagatctgaattctgaaacacwtctggtcctaagcattgcagataagaaatactcaacctatatatatttgggtgaaaaagtttgatgggtttacccatttatgtttgttgtgccccatttcaactactgtttgtcctagaaaatgagatgaacaataaaatttcagatttaggttttataactttttaaatatacacttaaatgcacgcgcgcgcacacacacacacacacacagagtagctaataaatggctcctacttcaccatgttcgaattcctttataaaaaatcttcaggccgggcgcggtggctcacgcctgtaatcccagcactttgggaggccgaggcgggcggatcacgaggtcaggagatcgagaccatcctggctaacacggtgaaaccccgtctctactaaaaatacaaaaaattagccgggcgaggtggcgggcgcctgtagtcccagctactcgggaggctgaggcaggagaatggcgtgaaccccagggggcggagcctgcagtgagccgagattgcgccactgcactccagcctgggcgacagcgagactccgtttcaaaaaaaaaaaaaaaaaaaaaaaaaaaaaaaaaaaaaatcttcagaagtatagtatgggcctttcatgaagggtatacctaaaaggtacaatctaggaaggatgttagacgctgtcctgattaatacttaggaaacctgaactaacttttctgtagaataaaaagataaaaagaggctggccttcatctgaaagagggttataaataaaatccatatcatcattttacttatgacaaaaatcacaatttttttctcctttaaaatggcataccttattttgtcatttttaaaaataaataaatacagacctgggtagttaaaattgccaagggaatggaagtgggtagcgatgtgcatgcagtgtgatggcagaccagagctgtaggagctcttcacactgcttcagtgaggttgctaagggatatgagccctaaaccaataaaggttatggatcagataaaagggatcttacctacataattcccatataataaaacagaagacaccctctgaggcttgaagtagctttaaaaaagtgctgtcttacaaaggtaatagtaaacatttcagctttctaccctagaatacacagatggagaacagtttaggtaaaactatgaatgacagattcataaagtgtatttaggagggagttacaggtatttagaatacatccctcacactttgaagcaattataattgaaaacagtaattatattcttctaagtgtacctctttatctctttttaaaactataatacaaaataatcactgagataataattcatagttttatcctctgtggaagttcttatagcattccttgcttgtttagttatacaccaactcatttttgaataccttctatgcataagctgctatgctaaacctgaactagacaaatatctgttctctagaactatatattttagtgaaggtaagaaacagaaagacaagttacaaagtgacaagtatcagaacaaaagggatgtcaaatatggtatagaaatatagaaaaaaatttttgctttattcatgagtttagaagtagactagatgtccaccaagtaaatgtataatcaaactgtcactaatgagtctgaaacatggaaagaagaatttaggagtgtctttgagtaatagcaagagaattggaggagtgttgggccaagactttgtcagtattattactcaacatgagaacaagaataaaataactcagagttactttaacaggattccatggagaacctattttaaggctgtaatttaattcaggtgtaaattactagactatattttaattacaggagtaaatgtcatccatattcatgactaatgagtaggagtaaatgaatgatatagtacaacattagcattccataagtccaggctgtgacagtatctccctatttaaaaatcaactataaaccaagggaactatgaaaaacacagcactctaaagagatttcacagaattttttcttcagcatttttgctaatcttttttttttagtatggtgttttctgcaatgtctattgttcaaacttccttccaagtagatgtaaccttctaataagcctttaaatctcaaaatagagtgtgcttgatacatttgaaaacagaaaatttaaaaattctttttttaaaatattttgataacttctttgatacaagacacccgaatttgtaagaccaaatccacgactctgaagaggaatgaagagactgaggaaattagagaagtcttaaattttattcaggatgttttactattaaaaaatggctttgtaaacaatgtttaccatatgttgttaaatattaatagaagcatgagaagttatatatacattggtacagggctgatttttcaacaagcacaccagtaagtgctagtggcttttaatatatagtgaaatttctgtacaggtgagcaaataaccactgtcctgaggttctcaaatgccatatcccttaaggaccactggagcctagaccaggacc

SEQ ID NO: 2955 - DNA, 2660 bp, Homo sapiens
tgcatatcatgtttagacttaggtcccatccccaagaaatctcattatatatatgcaaatattccaaaaattttacaaaaagatctgaattctgaaacacatctggtcctaagcattgcagataagaaatactcaacctatatatatttgggtgaaaaagtttgatgggtttacccatttatgtttgttgtgccccatttcaactactgtttgtcctagaaaatgagatgaacaataaaatttcagatttaggttttataactttttaaatatacacttaaatgcacgcgcgcrcacacacacacacacacacagagtagctaataaatggctcctacttcaccatgttcgaattcctttataaaaaatcttcaggccgggcgcggtggctcacgcctgtaatcccagcactttgggaggccgaggcgggcggatcacgaggtcaggagatcgagaccatcctggctaacacggtgaaaccccgtctctactaaaaatacaaaaaattagccgggcgaggtggcgggcgcctgtagtcccagctactcgggaggctgaggcaggagaatggcgtgaaccccagggggcggagcctgcagtgagccgagattgcgccactgcactccagcctgggcgacagcgagactccgtttcaaaaaaaaaaaaaaaaaaaaaaaaaaaaaaaaaaaaaatcttcagaagtatagtatgggcctttcatgaagggtatacctaaaaggtacaatctaggaaggatgttagacgctgtcctgattaatacttaggaaacctgaactaacttttctgtagaataaaaagataaaaagaggctggccttcatctgaaagagggttataaataaaatccatatcatcattttacttatgacaaaaatcacaatttttttctcctttaaaatggcataccttattttgtcatttttaaaaataaataaatacagacctgggtagttaaaattgccaagggaatggaagtgggtagcgatgtgcatgcagtgtgatggcagaccagagctgtaggagctcttcacactgcttcagtgaggttgctaagggatatgagccctaaaccaataaaggttatggatcagataaaagggatcttacctacataattcccatataataaaacagaagacaccctctgaggcttgaagtagctttaaaaaagtgctgtcttacaaaggtaatagtaaacatttcagctttctaccctagaatacacagatggagaacagtttaggtaaaactatgaatgacagattcataaagtgtatttaggagggagttacaggtatttagaatacatccctcacactttgaagcaattataattgaaaacagtaattatattcttctaagtgtacctctttatctctttttaaaactataatacaaaataatcactgagataataattcatagttttatcctctgtggaagttcttatagcattccttgcttgtttagttatacaccaactcatttttgaataccttctatgcataagctgctatgctaaacctgaactagacaaatatctgttctctagaactatatattttagtgaaggtaagaaacagaaagacaagttacaaagtgacaagtatcagaacaaaagggatgtcaaatatggtatagaaatatagaaaaaaatttttgctttattcatgagtttagaagtagactagatgtccaccaagtaaatgtataatcaaactgtcactaatgagtctgaaacatggaaagaagaatttaggagtgtctttgagtaatagcaagagaattggaggagtgttgggccaagactttgtcagtattattactcaacatgagaacaagaataaaataactcagagttactttaacaggattccatggagaacctattttaaggctgtaatttaattcaggtgtaaattactagactatattttaattacaggagtaaatgtcatccatattcatgactaatgagtaggagtaaatgaatgatatagtacaacattagcattccataagtccaggctgtgacagtatctccctatttaaaaatcaactataaaccaagggaactatgaaaaacacagcactctaaagagatttcacagaattttttcttcagcatttttgctaatcttttttttttagtatggtgttttctgcaatgtctattgttcaaacttccttccaagtagatgtaaccttctaataagcctttaaatctcaaaatagagtgtgcttgatacatttgaaaacagaaaatttaaaaattctttttttaaaatattttgataacttctttgatacaagacacccgaatttgtaagaccaaatccacgactctgaagaggaatgaagagactgaggaaattagagaagtcttaaattttattcaggatgttttactattaaaaaatggctttgtaaacaatgtttaccatatgttgttaaatattaatagaagcatgagaagttatatatacattggtacagggctgatttttcaacaagcacaccagtaagtgctagtggcttttaatatatagtgaaatttctgtacaggtgagcaaataaccactgtcctgaggttctcaaatgccatatcccttaaggaccactggagcctagaccaggacc

SEQ ID NO: 2956 - DNA, 2660 bp, Homo sapiens
tgcatatcatgtttagacttaggtcccatccccaagaaatctcattatatatatgcaaatattccaaaaattttacaaaaagatctgaattctgaaacacatctggtcctaagcattgcagataagaaatactcaacctatatatatttgggtgaaaaagtttgatgggtttacccatttatgtttgttgtgccccatttcaactactgtttgtcctagaaaatgagatgaacaataaaatttcagatttaggttttataactttttaaatatacacttaaatgcacgcgcgcgcacacacacacacacacacagagtagctaataaatggctcctacttcaccatgttcgaattcctttataaaaaatcttcaggccgggcgcggtggctcacgcctgtaatcccagcactttgggaggccgaggcgggcggatcacgaggtcaggagatcgagaccatcctggctaacacggtgaaaccccgtctctactaaaaatacaaaaaattagccgggcgaggtggcgggcgcctgtagtcccagctactcgggaggctgaggcaggagaatggcgtgaaccccagggggcggagcctgcagtgagccgagattgcgccactgcactccagcctgggcgacagcgagactccgtttcaaaaaaaaaaaaaaaaaaaaaaaaaaaaaaaaaaaaaatcttcagaagtatagtatgggcctttcatgaagggtatacctaaaaggtacaatctaggaaggatgttagacgctgtcctgattaatacttaggaaacctgaactaacttttctgtagaataaaaagataaaaagaggctggccttcatctgaaagagggttataaataaaatccatatcatcattttacttatgacaaaaatcacaatttttttctcctttaaaatggcataccttattttgtcatttttaaaaataaataaatacagacctgggtagttaaaattgccaagggaatggaagtgggtagcgatgtgcatgcagtgtgatggcagaccagagctgtaggagctcttcacactgcttcagtgaggttgctaagggatatgagccctaaaccaataaaggttatggatcagataaaagggatcttacctacataattcccatataataaaacagaagacaccctctgaggcttgaagtagctttaaaaaagtgctgtcttacaaaggtaatagtaaacatttcagctttctaccctagaatacacagatggagaacagtttaggtaaaactatgaatgacagattcataaagtgtatttaggagggagttacaggtatttagaatacatccctcacactttgaagcaattataattgaaaacagtaattatattcttctaagtgtacctctttatctctttttaaractataatacaaaataatcactgagataataattcatagttttatcctctgtggaagttcttatagcattccttgcttgtttagttatacaccaactcatttttgaataccttctatgcataagctgctatgctaaacctgaactagacaaatatctgttctctagaactatatattttagtgaaggtaagaaacagaaagacaagttacaaagtgacaagtatcagaacaaaagggatgtcaaatatggtatagaaatatagaaaaaaatttttgctttattcatgagtttagaagtagactagatgtccaccaagtaaatgtataatcaaactgtcactaatgagtctgaaacatggaaagaagaatttaggagtgtctttgagtaatagcaagagaattggaggagtgttgggccaagactttgtcagtattattactcaacatgagaacaagaataaaataactcagagttactttaacaggattccatggagaacctattttaaggctgtaatttaattcaggtgtaaattactagactatattttaattacaggagtaaatgtcatccatattcatgactaatgagtaggagtaaatgaatgatatagtacaacattagcattccataagtccaggctgtgacagtatctccctatttaaaaatcaactataaaccaagggaactatgaaaaacacagcactctaaagagatttcacagaattttttcttcagcatttttgctaatcttttttttttagtatggtgttttctgcaatgtctattgttcaaacttccttccaagtagatgtaaccttctaataagcctttaaatctcaaaatagagtgtgcttgatacatttgaaaacagaaaatttaaaaattctttttttaaaatattttgataacttctttgatacaagacacccgaatttgtaagaccaaatccacgactctgaagaggaatgaagagactgaggaaattagagaagtcttaaattttattcaggatgttttactattaaaaaatggctttgtaaacaatgtttaccatatgttgttaaatattaatagaagcatgagaagttatatatacattggtacagggctgatttttcaacaagcacaccagtaagtgctagtggcttttaatatatagtgaaatttctgtacaggtgagcaaataaccactgtcctgaggttctcaaatgccatatcccttaaggaccactggagcctagaccaggacc

SEQ ID NO: 2957 - DNA, 1291 bp, Homo sapiens
gctgccattactaatgatcaagcacagttcaatgagtacagtcaaactttaaacataagcataaagcaaaacactaaagataaattagggctgtaacgaaactcagtttcaataaagcatctcatgaaatatctatattcagcttcagtctaatacactagaaaatacttgcttctgagtattaactgtggaaagcctacataacaaatattcacactttaacctgtcactcagcctgcaagtaaacctaaacctaaatcttgaaacataacctaaaaacctttgatggaaactctacataaatataaatttacagaatttatccttttttgtgaggcacattttatgaattggttattatctgcattagcatggtacaagaaatatgttaaatgttttaattatttgatccagatttcctgtctgctttcatactaaataaaataactaaaagcattttcaagataatattgttcatagtttacaattgtttctctaaatgtgagaaagggtctgatttacagcattatgctcctgtgttttcttatcttattaaatgatgcaattttctgcctttgtcaccaaaacagcatctgctagtcacaaaactagaaacacatcttttaattaaatgcttattttattttccctagggacaatgaattatagaattactttctcaagagttactgtttccttttcctttatctcagcccccagtatatattcagtgtgtcctctgaagtaacaaccatcccatctggctgagaagtgatggacacggctccttaaccacactgtaccctctgttcttggcacctctctaccagaaagatatcaacaaattggatggaattcagagaacagtaagaaaaatgattaaagagatggaggcagtgacttatgaggaaagatgaaaaggactaaatctatrtagcttggcaaagcaacaactgaggtggcgtatgaaaactgtctacaagcatttgaagaatataaacaccaagggaagagagggaactttttagaatggtctggggaataagcagagtaagaggacagaattgaagaaaggagagagatatgctaagttgggggtgggggcgttttctcatcaattgtaaattttgataaataacaaaattaagtctggagagaaagagttgcatctcatgcttttaggttacaatcagtgttgacctgcactgagaaaatggtaagtgagagaataaatagtatctgtttgtatgtagacatataatatttgagctgtctttttcagcttaccaag

SEQ ID NO: 2958 - DNA, 576 bp, Homo sapiens
ttgataatattattttacatacaatccaaagaggtgcctcattattaatcaaatatttatggtcaaaacaaaataacatataccattattttttaatcctcacagcaactctttacattcagttatcaatatcaccattttatgaacaatgaaaggaagaatcaaagaggttaaataactgcccaaattcatccaatcagcaagttagtaaaaggatataaagccaagtcagaaagatttcaaagcccatgatctaaacagccatgcaacactattaatttgtggagttttgaggaatttgggagatgtaatctgattgttaatagtacatgctcttaggataaatgatgatgggaacaggtaggataaactgcataaacctggagactgaagtgataaactgcrgaaaaattagagaagatgatgcataggcagtgacaagatggagaggatactcacgtgtgtgataatagataataaccctgggctatggagtatgactcaggatttattctggtacaaagcttagttccaagcgagacataatttcacttttttaattacacccatcagaac

SEQ ID NO: 2959 - DNA, 649 bp, Homo sapiens
agaagccaatctgaaaagtctacatactacgtgattccaactacatgacattttagaaaagacaaaagtatggtgacagtaaatgactcatcaatgactaagtgtcctccctgtggtaatgagttaacattagatccagttgtttaaaaagagcctggcacctcctccctctctttcttgctccctctctcaacatgtcacccrctggcttctcctttgccttctgccatgattgtaagcttcctaatgcctcaccagaagcagatactgacactacacttcttgtatagcctacagaatcatgagctaaataaacctctcttctttccaaatttcttagcctcaggtattcttttatagcaatgcaaaacagactaacacaggaactttctgttctttctgctcatttttgctgtgaacctaaagctgctttaaaaaataaagtcattcaaaataaaaataaattttagtttctttctgaataaaatgatttaactataaaatacctgacaatataatagaggagaaaagcaactgaatattgaaaatacctaagatggcaagaatggagaaagaggtaaacaaaaaataaataattttttaaagtagcaagatggtagaattaaactcaaccatatcaagtaaaaat

SEQ ID NO: 2960 - DNA, 1182 bp, Homo sapiens
tccattaatataagagactttataaattatttaaagggaagcataagggagtttacatttcagcaaagtaaacaatttccaactgaacattgaacatctcccttcttaaattagttttcagccatcctaccactatgttatttcctcaggtcccttcaccctgaagtttctctctcctccccyttccctctgtttacctccttagaaagagaacaatgaattccccttgttatgtaagggtatcaacctagccattctcctctgctaccctgagtctagcttctgatttgttctctggtttccttttgtatccctaagtgaattatcaaggtattttcacaaatagggttttttcctccttgagaagaacttgagtgacagctgttaagatcatgagtttaactttttaccccattacacaagattgaagtggaatcacttgtccctggatggggttgataaggacaaatgagtgcagatgtccatttcataaccttcagatacagcatcctggactagggagagattccacctgctcattcacaaatctgggcatctgaatatagtctgggaacagttctcagcagcctctctgatctccctagttgtagaattgattctccttaacaaattctccaaaaacaaattctgacttctggtttatcagaaaaggcactcatagacagatgttcatcatctgtgaaatctcagataatcaggtatgatcccaactagattatcatacacagcaccaagctggcttatgggagttcttgcctctgatctctgaacattccccctggcaggctctggcatgcagagaagcaggaggactttctgtgaaggcagatcccaaacttgggctgattttgctgaaatcacacagattatactggctcatgacaaagggcaaacatatgatcagagacatgggactagaaacccacaggggtcttagatcctatttactgcccctttaccaaggataacccaaggaacacaacaccgtttataccaaaaccctctgccccttttgattcagtggattcattctacagttactttatggtaataattgagacataatctttaaccactggatatttgatgttccctatacaatatgatctgaacccacatctttcatcaaaatgctaaatgggattgatatataaaagtgag

SEQ ID NO: 2961 - DNA, 1182 bp, Homo sapiens
tccattaatataagagactttataaattatttaaagggaagcataagggagtttacatttcagcaaagtaaacaatttccaactgaacattgaacatctcccttcttaaattagttttcagccatcctaccactatgttatttcctcaggtcccttcaccctgaagtttctctctcctcccctttccctctgtttacctccttagaaagagaacaatgaattccccttgttatgtaagggtatcaacctagccattctcctctgctaccctgagtctagcttctgatttgttctctggtttccttttgtatccctaagtgaattatcaaggtattttcacaaatagggttttttcctccttgagaagaacttgagtgacagctgttaagatcatgagtttaactttttaccccattacacaagattgaagtggaatcacttgtccctggatggggttgataaggacaaatgagtgcagatgtccatttcataaccttcagatacagcatcctggactagggagagattccacctgctcattcacaaatctgggcatctgaatayagtctgggaacagttctcagcagcctctctgatctccctagttgtagaattgattctccttaacaaattctccaaaaacaaattctgacttctggtttatcagaaaaggcactcatagacagatgttcatcatctgtgaaatctcagataatcaggtatgatcccaactagattatcatacacagcaccaagctggcttatgggagttcttgcctctgatctctgaacattccccctggcaggctctggcatgcagagaagcaggaggactttctgtgaaggcagatcccaaacttgggctgattttgctgaaatcacacagattatactggctcatgacaaagggcaaacatatgatcagagacatgggactagaaacccacaggggtcttagatcctatttactgcccctttaccaaggataacccaaggaacacaacaccgtttataccaaaaccctctgccccttttgattcagtggattcattctacagttactttatggtaataattgagacataatctttaaccactggatatttgatgttccctatacaatatgatctgaacccacatctttcatcaaaatgctaaatgggattgatatataaaagtgag

SEQ ID NO: 2962 - DNA, 485 bp, Homo sapiens
tgcattagagttaagtgtgttgagccaaaatgctcttacatttgccgtacagatttccgggagcaattcacagtatgtatttctgcagctataaccatttttaacccagattactctttcaggaagtttattttaagctcagtaayttaaatactgtacccaaaaaatatatagaaaggaagaaagtaagactttacaaaattattatagaggccattatatatatatagacaattattatatagacaattatccagtctaccattatgagcatttaatatagaataagaaagagctctgtactgtatcacatcaagaaccttcttcccacccttaagaaacattctgatcttaaatcaccctgcaggcccagttccaatgacttccattagctctcaattatccacgatgataatgaaccagaacaaatagtcaattcaccaattaccctcattttgcccaaatatcacagccttttccttaac

SEQ ID NO: 2963 - DNA, 640 bp, Homo sapiens
acagaattgtgatgctatgattttgtgcaaactatataatattggccggaagatttatactggtcactaatgtcctttaacactaattattatactgaatacattttttttcttgccgactctaattatgtaattttcccctttcctgacaagaaatgcaagatttcacaaaataattctttgtcttaaaataccatgttatttaaaaaagtttattatttgtccccttctctctccattgtagtatgcaaaaatgggtgtttgggtccatatcaatgctaattattgagcaaaaagtgctcaagaaatagacaaagcataattttagggtctaatgtragttaagtacacatatatctttacttctttttaacctctcatcagctttctaaggccaaaactattacacccatttgcgaatgaagaaacagtgaaggactgagtaagtctaccgcaattattgagaggttcaaaatcaagaatgcaactctgcttctagtaactcttgagcttatggatcttctcctgaaactgtccagtgccctgccacatcaccctttccatcctgcagacgaagggatgaaggggcaactcagtgtgcaggtttgacagaaatgtcagtgggtctatatagtaaagc

SEQ ID NO: 2964 - DNA, 640 bp, Homo sapiens
acagaattgtgatgctatgattttgtgcaaactatataatattggccggaagatttatactggtcactaatgtcctttaacactaattattatactgaatacattttttttcttgccgactctaattatgtaattttcccctttcctgacaagaaatgcaagatttcacaaaataattctttgtcttaaaataccatgttatttaaaaaagtttattatttgtccccttctctctccattgtagtatgcaaaaatgggtgtttgggtccatatcaatgctaattattgagcaaaaagtgctcaagaaatagacaaagcataattttagggtctaatgtaagttaagtacwcatatatctttacttctttttaacctctcatcagctttctaaggccaaaactattacacccatttgcgaatgaagaaacagtgaaggactgagtaagtctaccgcaattattgagaggttcaaaatcaagaatgcaactctgcttctagtaactcttgagcttatggatcttctcctgaaactgtccagtgccctgccacatcaccctttccatcctgcagacgaagggatgaaggggcaactcagtgtgcaggtttgacagaaatgtcagtgggtctatatagtaaagc

SEQ ID NO: 2965 - DNA, 2195 bp, Homo sapiens
gtatcaaaatatcatatgcaccccatatataagtataattattatgtatcaacagaaataaataaataagaaacacatcatgagactgctgagagagaaatgcgagcaaaaaggtggagtagctagctgccgaagaagctgggcaggacccacaggcattcagattcagctcatctcttacttccaattttaaggattctacctattttgttttgtttatttgaaacctagctgttcatcaagtttacctgcagcatttgtaaaaaatgcagattcctggacccaacccagacctactgaatcagaagctcctgcaagtctgtcttttgaacaagttcccaggtgattcttcttatgtgactgctctcataggaactgctggactagatgatacccaagggcccttccagttcaggcatcccctgatgattttagccaataaaatggatgaacccaagcctgggaaaggaagggctgcctcatgggactgttggtaaccaatggaacaagtaggtcaccctatcagctagggaggaacagagggaaagcaacaaggcccaacatataacagagctcatcaaccctgctctctcctctctcaagactgaagcctgtgaaaagacgtgggtccccgattgcttccaaaaaagtcagtggcccacatgccatatccaggccatcttgaaatggacatatgtggtaggaaggattctaagatgatcccagatttccacctactactgtccatgccctgtgtcatccctccccttgggtttgggcagggatggagaatatgatggctgtctctcccaagattagattactaatgagttcactctgacataatcaaaggtaggatttgaacctgagggtacttccagttgccaacagtgacccctagccaacaaccagacagaaaacagggacatcaatcctacaaccacaaagagatgaattctgccaacacctgaatatgcttggaagaagaccctgacttcaaatgggatcacagccctgctgacaccttgatttagcctagaaagaccctgagcaatggacccaggtaaccgtgcctggtctcctaatgcatggaaaccatgcatcgggcgatctattaggcagtaagagaaaatcaatttcacatgcaataaaataaaaacaatggcatgcacatgcccttcacgatttgcaaagccatcaccaggcccacaccttacccacctgggcctgctgaggcctgcaccttcatgcagtgcccaggagtgtccactggatgaaccttctcacactgatgctcaggcaaggctgggaggccggtggggccattttgtttttctaaatttctgcttcacagatggggaaactgaagctcaaatacatttctctggggtcgtttaaaaagtccacagaagaacctgaactcgacttcaggccttctgattccaaagccagggacctgtcctctaygccgccatccccagcatgattctctccaagaaaagagaattgttttaaactcaagtcccggggggctgaagggctataactcttttttaaaagggtaactcagagtggctgaaagaaggtgactgttgtgaggttgccagtgcccttccccctctggcacggcatcctcccctgtccacccttcggttacaaggtgggcaggggtctggcagggagaggccagtgttattgcaggctgcggctgacgcactgcccatgtcccactccaagagccctcagccgaacctccgagtgcagctcagcattcctgcccttctctgacccagggaggcagagaacccagccaaaccactcatcaacaagcccactgtcatgtgtcattaatgatgtcagatcaaatccaagcaacaattggaaaaacagattgcaacattgtgctctttattgctggtgtttctgtggagcattagcaataaaaagactccagagaggagctgtaaaggagaaagcgaaaaagagcaaaagagaaagcaagaaagatactttttcccttgctgcaagcttcacgacacagccactttgtaacatgcaccatatgcagcagccactctgcacaaggcccaataacctccttccaaatggtaataaatcccctcggaccccaacacacttgtaatttacaacttggctaaaatgaacattatttcaagctaagcgtattctcagag

SEQ ID NO: 2966 - DNA, 580 bp, Homo sapiens
gtctcattccctcatgactctgtgtgtcaaaggtcattcattcatcatttcaaaagatatttattgccaggtgagagatggtgatggcttaaaagtaaggtagaggaagagccagttgaatacatgcttgattctgactaatgacactaaaataacggccaasaaaaggcaaaacaattcagcagatccaccaagagctggtgaagaggtcacagctgacaagaaatagcaatgaaattttggaagcaattagtaaacaggtaaatgacaatagaaatagcagacaagaaaaagctaaactacattggcagcacgggagagcctcaagaaccagccacttcacagcatagtcccagaaggctcaggaattggaggtaccaaatgcctctgcagcaagggtgcagagcagggctatccatataaggactggttaaaagtctttaaaagaaggagtcaggctcacagacgccctcttctacccatgtagccaggtggccctctttgctccagtaggagtctaaaggattactccatagcagtggttttcaaagtggggacctgagaccagcagggttagtat

SEQ ID NO: 2967 - DNA, 1320 bp, Homo sapiens
tcaggtaaccagagaataatcacattagtagaaagtgttcctatgtagaactttcacacaagacctaatatttgcatgayactttgcaatttacagagctctgaaatacatcatctcctttttttcttttttttttttttttttttttgagactggctccatcacccaggctggagtgcaatggtgctatctcggctcactgcaatctccacctcctgggttcaagcaattttcctgcctcagcttcccgagtagctgggattacagtcacccgccatcatgccctactagttcttgtatttttgtagagatggggtttccccatgttgaccagactggtcttgaactcctgaccccaggtgatccacccacttgagcctcccaaagtgctgggattacaggcatgagccaccatgcccagccatcatctcctttttaaaaaatgtctatgtgaggtggtatggtaggtgttcccaattctttcctcctttttttcttgtgacctccaagtgctttccattagagtacaaggagaattcatcctcatgccctcatgtcgacatcctcatgtcgactttgggtttagccatgtgacttattttgttcaatgcaatgtaaagaaacatgacaccagcagaggcacctctgtgtgcgtttgtgatttgtcttggctctcctgctttctccatccaccttcagaggaacatgctccatgtagctgctgatccaaggagagtgagaagacgtctagaacagacttaaatccaactcacagcctggatctacatgtggctgatcatatctaagcccagtagaaccacaagtacatgtaaatgataaataaatgcctctaagtgtaagctactgttaggggaatgtttatcatgcagcaccattgcaacaatgatacacttaggtaaacaggcatttttaagctgaagcaactgagatacagacagcttaaaaattttcccaagttcacagctcaaagaagagagttgagtatgttcttctctacctactcaacagaaagactctgtaaatgttgacacatttaacagcttagaagcccacattattcaaaagaataatttttaaatgttaaaaaaataaagtactgagtttgctaataatctaagaaatgcatgttttcatatatgctgcctattaagtctgttcatatcatatcagcaaacatgtcgtcttggagagtttcctagtttttcctgtgaaatgtttttcaacgcctgagtgaatcaaaatgaatgtaaatgaggtttattaagtcaaccccacatggtgctgtattgtcagcatttg

SEQ ID NO: 2968 - DNA, 1320 bp, Homo sapiens
tcaggtaaccagagaataatcacattagtagaaagtgttcctatgtagaactttcacacaagacctaatatttgcatgatactttgcaatttacagagctctgaaatacatcatctcctttttttyttttttttttttttttttttttgagactggctccatcacccaggctggagtgcaatggtgctatctcggctcactgcaatctccacctcctgggttcaagcaattttcctgcctcagcttcccgagtagctgggattacagtcacccgccatcatgccctactagttcttgtatttttgtagagatggggtttccccatgttgaccagactggtcttgaactcctgaccccaggtgatccacccacttgagcctcccaaagtgctgggattacaggcatgagccaccatgcccagccatcatctcctttttaaaaaatgtctatgtgaggtggtatggtaggtgttcccaattctttcctcctttttttcttgtgacctccaagtgctttccattagagtacaaggagaattcatcctcatgccctcatgtcgacatcctcatgtcgactttgggtttagccatgtgacttattttgttcaatgcaatgtaaagaaacatgacaccagcagaggcacctctgtgtgcgtttgtgatttgtcttggctctcctgctttctccatccaccttcagaggaacatgctccatgtagctgctgatccaaggagagtgagaagacgtctagaacagacttaaatccaactcacagcctggatctacatgtggctgatcatatctaagcccagtagaaccacaagtacatgtaaatgataaataaatgcctctaagtgtaagctactgttaggggaatgtttatcatgcagcaccattgcaacaatgatacacttaggtaaacaggcatttttaagctgaagcaactgagatacagacagcttaaaaattttcccaagttcacagctcaaagaagagagttgagtatgttcttctctacctactcaacagaaagactctgtaaatgttgacacatttaacagcttagaagcccacattattcaaaagaataatttttaaatgttaaaaaaataaagtactgagtttgctaataatctaagaaatgcatgttttcatatatgctgcctattaagtctgttcatatcatatcagcaaacatgtcgtcttggagagtttcctagtttttcctgtgaaatgtttttcaacgcctgagtgaatcaaaatgaatgtaaatgaggtttattaagtcaaccccacatggtgctgtattgtcagcatttg

SEQ ID NO: 2969 - DNA, 1320 bp, Homo sapiens
tcaggtaaccagagaataatcacattagtagaaagtgttcctatgtagaactttcacacaagacctaatatttgcatgatactttgcaatttacagagctctgaaatacatcatctcctttttttcttttttttttttttttttttttgagactggctccatcacccaggctggagtgcaatggtgctatctcggctcactgcaatctccacctcctgggttcaagcaattytcctgcctcagcttcccgagtagctgggattacagtcacccgccatcatgccctactagttcttgtatttttgtagagatggggtttccccatgttgaccagactggtcttgaactcctgaccccaggtgatccacccacttgagcctcccaaagtgctgggattacaggcatgagccaccatgcccagccatcatctcctttttaaaaaatgtctatgtgaggtggtatggtaggtgttcccaattctttcctcctttttttcttgtgacctccaagtgctttccattagagtacaaggagaattcatcctcatgccctcatgtcgacatcctcatgtcgactttgggtttagccatgtgacttattttgttcaatgcaatgtaaagaaacatgacaccagcagaggcacctctgtgtgcgtttgtgatttgtcttggctctcctgctttctccatccaccttcagaggaacatgctccatgtagctgctgatccaaggagagtgagaagacgtctagaacagacttaaatccaactcacagcctggatctacatgtggctgatcatatctaagcccagtagaaccacaagtacatgtaaatgataaataaatgcctctaagtgtaagctactgttaggggaatgtttatcatgcagcaccattgcaacaatgatacacttaggtaaacaggcatttttaagctgaagcaactgagatacagacagcttaaaaattttcccaagttcacagctcaaagaagagagttgagtatgttcttctctacctactcaacagaaagactctgtaaatgttgacacatttaacagcttagaagcccacattattcaaaagaataatttttaaatgttaaaaaaataaagtactgagtttgctaataatctaagaaatgcatgttttcatatatgctgcctattaagtctgttcatatcatatcagcaaacatgtcgtcttggagagtttcctagtttttcctgtgaaatgtttttcaacgcctgagtgaatcaaaatgaatgtaaatgaggtttattaagtcaaccccacatggtgctgtattgtcagcatttg

SEQ ID NO: 2970 - DNA, 1320 bp, Homo sapiens
tcaggtaaccagagaataatcacattagtagaaagtgttcctatgtagaactttcacacaagacctaatatttgcatgatactttgcaatttacagagctctgaaatacatcatctcctttttttcttttttttttttttttttttttgagactggctccatcacccaggctggagtgcaatggtgctatctcggctcactgcaatctccacctcctgggttcaagcaattttcctgcctcagcttcccgagtagctgggattacagtcacccgccatcatgccctactagttcttgtatttttgtagagatggggtttccccatgttgaccagactggtcttgaactcctgaccccaggtgatccacccacttgagcctcccaaagtgctgggattacaggcatgagccaccatgcccagccatcatctcctttttaaaaaatgtctatgtgaggtggtatggtaggtgttcccaattctttcctcctttttttcttgtgacctccaagtgctttccattagagtacaaggagaattcatcctcatgccctcatgtcgacatcctcatgtcgactttgggtttagccatgtgacttattttgttcaatgcaatgtaaagaaacatgacaccagcagaggcacctctgtgtgcgtttgtgatttgtcttggctctcctgctttctccatccaccttcagaggaacatgctccatgtagctgctgatccaaggagagtgagaagacgtctagaacagacttaaatccaactcacagcctggawctacatgtggctgatcatatctaagcccagtagaaccacaagtacatgtaaatgataaataaatgcctctaagtgtaagctactgttaggggaatgtttatcatgcagcaccattgcaacaatgatacacttaggtaaacaggcatttttaagctgaagcaactgagatacagacagcttaaaaattttcccaagttcacagctcaaagaagagagttgagtatgttcttctctacctactcaacagaaagactctgtaaatgttgacacatttaacagcttagaagcccacattattcaaaagaataatttttaaatgttaaaaaaataaagtactgagtttgctaataatctaagaaatgcatgttttcatatatgctgcctattaagtctgttcatatcatatcagcaaacatgtcgtcttggagagtttcctagtttttcctgtgaaatgtttttcaacgcctgagtgaatcaaaatgaatgtaaatgaggtttattaagtcaaccccacatggtgctgtattgtcagcatttg

SEQ ID NO: 2971 - DNA, 336 bp, Homo sapiens
ctttaatgacactttttgaacaacatgatgttgaataaaaaaagcatcgcacattaaaatgacctcaactatgcaaaaaatktgtatggtcaaaaagtggaagcagacatgctaaaatgccaccaaggcaaagatggcaggactatgggtaattgttcagcatgtacaatcctttgtacagataccacacacactacaataatcttagcatggcactaaaaatatgaataataaggccgggcacaccaggcacactgactcatgcctgtaatcccagcactttgggaagctgaggctgctggatcacttgagcctaggagttcgagactagcctgg

SEQ ID NO: 2972 - DNA, 565 bp, Homo sapiens
gagtagtggtgcaaatgcaaattcaaacagtgcttttacagacattttattggtatatttgattcccagagttctaggttagccaggggaggattgtgatttaatttagccaataaggaaaccttggctcttggcagttctgatgttgccaagaccatwttcactttagggaccaggcttcaggcttccacggtccaagcagccattgtgacttctgccctggccttttggaagtaagaagaagagattcacggttcagagaggaagggaaatagagaaatggttcctaggacttcctcatcctcctagaacatgggaggtgccaggctgggcaaggggcagggtaaggagcttgtactttgtaggccataggctgaggcccatgagaggcccccgtgtgtggggacagagtcatggggagggtcagaagctgcagtctgggctcatttgtggccagagcagacctcagcatctctggaccttggctgcccagtgtctgcactcaggcctgacctcacttccttgtactgggcttctagcctgtccttctccctcctccccacct

SEQ ID NO: 2973 - DNA, 601 bp, Homo sapiens
cctagcaggcatttaataactacattatcattgaatgatcatagatagatgattgctaatgtccattgttccctcctttcattgtaagggttgtatccacactggaaaagaccagtgtggaaaaaactgtattttatagcctttttgtaccttgctgtgttgaaagttttttgccaatttttaccaatggaatttgagtaaaattgatgtatgacattcttcaattttacccttaaaataattggccatatagcccccactggccctttcttccccttcctgtagctgagacagaggaaacttggacctgacgtggaggctacatgctgaggatggtgaatctgcctctttggccttggcccatttccctctgaactgcaatttgagagagaaataacctaacttttttagtcactttattctgggatctcttgttacagcagtttcgcctaactagtatggtgtatgaatgayatagaaacacattcatgaaaggaattaaatgtaagtctttctccaaaatgaaatgccaacgatagctggaacaaggataaaataatgaatgataatataatgcttcagaaagtaattctattttata

SEQ ID NO: 2974 - DNA, 602 bp, Homo sapiens
ggtgaaagcattacatagtctggtcccctagtgttcctctcattttggggatccaggatttgatgtaaaaatgggatccttgatttttagtatctgttttgccgtccagctgtgcttgctttttaggccctaaaaactgtatgttttcttggccctgttacttaaaaggctytaccttgaagctagtaatccaattaacttacttctttaaggaaatgttcatatgtaagggtgtctgcttttcctctccatctcacctgaactttcactcacgccatttttcctttgtttgcataaaatataaattctatatcttgtttcacttaagtttgtctcttcagaaatgcagatttagagttgcccggctgggaactgtttatggcaggaagcaggtattcaagagactgttggtctaaaatggggaagagaagcttaaaactagcaattgaaaaatcttttgtctgtctgtgtaggttgtgtgtgtgatgtttccctactgaaatatataaaggtgctctaattaattggctttaaaaaaataagcacttacataaaatattttgtcagaaaaatagaaactaaaatgccttttagctcaagtg

SEQ ID NO: 2975 - DNA, 602 bp, Homo sapiens
ggtgaaagcattacatagtctggtcccctagtgttcctctcattttggggatccaggatttgatgtaaaaatgggatccttgatttttagtatctgttttgccgtccagctgtgcttgctttttaggccctaaaaactgtatgttttcttggccctgttacttaaaaggctttaccytgaagctagtaatccaattaacttacttctttaaggaaatgttcatatgtaagggtgtctgcttttcctctccatctcacctgaactttcactcacgccatttttcctttgtttgcataaaatataaattctatatcttgtttcacttaagtttgtctcttcagaaatgcagatttagagttgcccggctgggaactgtttatggcaggaagcaggtattcaagagactgttggtctaaaatggggaagagaagcttaaaactagcaattgaaaaatcttttgtctgtctgtgtaggttgtgtgtgtgatgtttccctactgaaatatataaaggtgctctaattaattggctttaaaaaaataagcacttacataaaatattttgtcagaaaaatagaaactaaaatgccttttagctcaagtg

SEQ ID NO: 2976 - DNA, 602 bp, Homo sapiens
ggtgaaagcattacatagtctggtcccctagtgttcctctcattttggggatccaggatttgatgtaaaaatgggatccttgatttttagtatctgttttgccgtccagctgtgcttgctttttaggccctaaaaactgtatgttttcttggccctgttacttaaaaggctttaccttgaagcyagtaatccaattaacttacttctttaaggaaatgttcatatgtaagggtgtctgcttttcctctccatctcacctgaactttcactcacgccatttttcctttgtttgcataaaatataaattctatatcttgtttcacttaagtttgtctcttcagaaatgcagatttagagttgcccggctgggaactgtttatggcaggaagcaggtattcaagagactgttggtctaaaatggggaagagaagcttaaaactagcaattgaaaaatcttttgtctgtctgtgtaggttgtgtgtgtgatgtttccctactgaaatatataaaggtgctctaattaattggctttaaaaaaataagcacttacataaaatattttgtcagaaaaatagaaactaaaatgccttttagctcaagtg

SEQ ID NO: 2977 - DNA, 602 bp, Homo sapiens
ggtgaaagcattacatagtctggtcccctagtgttcctctcattttggggatccaggatttgatgtaaaaatgggatccttgatttttagtatctgttttgccgtccagctgtgcttgctttttaggccctaaaaactgtatgttttcttggccctgttacttaaaaggctttaccttgaagctagtaatccaattaacttacttctttaaggaaatgttyatatgtaagggtgtctgcttttcctctccatctcacctgaactttcactcacgccatttttcctttgtttgcataaaatataaattctatatcttgtttcacttaagtttgtctcttcagaaatgcagatttagagttgcccggctgggaactgtttatggcaggaagcaggtattcaagagactgttggtctaaaatggggaagagaagcttaaaactagcaattgaaaaatcttttgtctgtctgtgtaggttgtgtgtgtgatgtttccctactgaaatatataaaggtgctctaattaattggctttaaaaaaataagcacttacataaaatattttgtcagaaaaatagaaactaaaatgccttttagctcaagtg

SEQ ID NO: 2978 - DNA, 713 bp, Homo sapiens
atcataaagttgctgagcaaactgggagctaaagaactcaggcaaattagagctagcttagaaaaataagaaacagatcaaatcctcatcggttctcttacactaaactaatactatatctgacatatgggactattgcattggattttatattgtaaactttcttcctgaacatgcagtcttaaaactctttggagtctttagagtctgtggtcttctcttcagtcatctgctgttgattttctcctcaggttctgtcaagctagttcgttttctcgggayacaggtttcctttcttccctttaaaggaagtgaatgcttggtgtttgtctagtatattatgactacaacataggacgtgcctcttaccagttggggtgcaacagaaaatgtctccttctctgtcttcctgcaaagcgagaggaagttttggcatttatagtgtttaatatatttcctgtaaatgtgtaggaaatgtctgtttgaagttctgaagtaaactaccttgatgttgacaaagatgagacaaactacctgatgaaagaaatcatattgaagaaagaatctttagagaggaaggcagcctatttatttacatgaagatcaaagaacctttgcatgaattgagactacattttttccgagtgatttgcaaaagataatcctcatggctgaatgagaaaagtggtaagtctttattgaatttattttga

SEQ ID NO: 2979 - DNA, 1161 bp, Homo sapiens
ttttcatgctgctatgaagaaatacctgagattgggtgattcataaaggaaagaggtttaattgactcacagttctgcattgctgtggaggcctcaggaaacttacaattatggctttatggcagaaggcaaaggagaagcaggcaccttcttcacagggcagcaggaaggagtgagtgcaagcagggaaaatgcctgatgcttataaaactatcagatctcatgagattcactcactatcaggagaacagcatgggggaaactgctcccatgatccaattacctccacctgatcccacccttcacatgtgattatggggattacaattcaaggtgagattttgggtggggacacagccaaaccatatcacacacatattgttttattctgctttaatgaatagctctgactagctttctaatgtttccttttatattgtatgttttatttccatcttataacttctatgtgtaaccacctgtgactaaaataatactttgcagagatttgggcttcatctctgttaagattcctcctttcctgctccctgactcataaattttagacatttcagcagtctaatttctcccttattctcaacaagaccaccgtggaaaagtgcattgaacatagcatatcctttgtaaatccttattaagtttcatcatacatgtagaatcagaaaacatggaaaatcagtgtgactgaattctttcttgaaccaacaacaaagtaaactatttctrgaagctgtcgttttcattcattcatataacatgtatttaaacttgtcctattttatactgataaaatttaaataaaacacagactgtagaagtgaaaacagacagaaccataaatgagataaattagtaataaagaaaagtactaaattctatgaaagagatccttcaactcagagaatttgacatttagattacagataggaattaacaaaatttaaaagatagtaaagggcatataagaaaggagaaatagtatataaaaaccactggggggtagaagaacatagtgttttaggacagcagttggcaaacaattttttaaaaggtacagataagaaatattttaagtgttctgggccatatggcgtctatttcaactgttcagctctactgctgtgccatgcaagcagctgt

SEQ ID NO: 2980 - DNA, 1487 bp, Homo sapiens
tggctgcttttgtgctacaaccgcagagctaagtagttggaacagagaacatatgtcctgcaaagtctacaatatttactatctggccctttacagaaaaagtttgctgacagattatttcaatacaacagggtaagtggaaatagcaatatatagtgtccagagggagcctggttggctttgtgaggtctgatttgttcactgttgttgccacaatgcctggaacagtgtttggcacagaataggtgctcaccaaagagttttccttggctagataagcsaaagaacagatactctgatgggtaggggaatgggtagatggaaaggtttttagaaagcttggcgaaggaggtaatacatatgctggatgttgaggaataaagtatctaccaaaagaggaagaggggaaaatgttttctggaagaagaaaattcacttgtcatatttacaatgcaggggcatgaaacaggatggcaaatttgaggaaaagaaagatggtggaacggaggagtctgggtcaagtcaaagggaagagggtcaccataaagacttgcatttataatcttattgaagacaggcagcatgcataccctcaggatgaagtcagtggaactgcacagagtgcccccatactttggagtatcttctttaaaatggaacttggcctccatttcttccatctggggcactcttaggctgtttaccccatgtatggagtcaaacagatgccccagggagctctagaacaatgcctatggggtcatcctgggcccccctggccgagccccagttctaggaggatgacctagcaagcaacaggctcccattggctggcatgggttttatctcacggaattatgtgagattgcaccactaaaatgctgctgccaggtggagtttaggatgactattactcatgccagacacacgctgagtttggggctttgtctgttgacagatcattgtcaatccttgggtctgttgggtgggcaccggtattggcttttgccatgttctgacagcagtgccacctgcaggatataacacccaagggcaactggatggtggcaggtgtcctttatcctgtgttcctcttagtctgctgctgatactcaggggggctactcacctcctctgaaggctccatggatagtgggattgaccatgcctatctcctctgagggctctacaatgtcagatggctttttaatcgacgtcctctcctgcctctgtccatgtgctgatgtcctgctctcctatgttaatgtcatggtggaagagaagaagatactctttgcacaaacagattactcttctttctctatccatgggcccttgtcatcctcccctgtgcttcccactgtgtggaaggccggctgccatcatcaaaagaggtcacgtgctgggagcactgtgattacagcctcaaaagttcgtaagtccacacgtctacatgtcctatgttgaaacaacaaaattctgaatgg

SEQ ID NO: 2981 - DNA, 1487 bp, Homo sapiens
tggctgcttttgtgctacaaccgcagagctaagtagttggaacagagaacatatgtcctgcaaagtctacaatatttactatctggccctttacagaaaaagtttgctgacagattatttcaatacaacagggtaagtggaaatagcaatatatagtgtccagagggagcctggttggctttgtgaggtctgatttgttcactgttgttgccacaatgcctggaacagtgtttggcacagaataggtgctcaccaaagagttttccttggctagataagccaaagaacagatactctgatgggtaggggaatgggtagatggaaaggtttttagaaagcttggcgaaggaggtaatacatatgctggatgttgaggaataaagtatctaccaaaagaggaagaggggaaaatgttttctgraagaagaaaattcacttgtcatatttacaatgcaggggcatgaaacaggatggcaaatttgaggaaaagaaagatggtggaacggaggagtctgggtcaagtcaaagggaagagggtcaccataaagacttgcatttataatcttattgaagacaggcagcatgcataccctcaggatgaagtcagtggaactgcacagagtgcccccatactttggagtatcttctttaaaatggaacttggcctccatttcttccatctggggcactcttaggctgtttaccccatgtatggagtcaaacagatgccccagggagctctagaacaatgcctatggggtcatcctgggcccccctggccgagccccagttctaggaggatgacctagcaagcaacaggctcccattggctggcatgggttttatctcacggaattatgtgagattgcaccactaaaatgctgctgccaggtggagtttaggatgactattactcatgccagacacacgctgagtttggggctttgtctgttgacagatcattgtcaatccttgggtctgttgggtgggcaccggtattggcttttgccatgttctgacagcagtgccacctgcaggatataacacccaagggcaactggatggtggcaggtgtcctttatcctgtgttcctcttagtctgctgctgatactcaggggggctactcacctcctctgaaggctccatggatagtgggattgaccatgcctatctcctctgagggctctacaatgtcagatggctttttaatcgacgtcctctcctgcctctgtccatgtgctgatgtcctgctctcctatgttaatgtcatggtggaagagaagaagatactctttgcacaaacagattactcttctttctctatccatgggcccttgtcatcctcccctgtgcttcccactgtgtggaaggccggctgccatcatcaaaagaggtcacgtgctgggagcactgtgattacagcctcaaaagttcgtaagtccacacgtctacatgtcctatgttgaaacaacaaaattctgaatgg

SEQ ID NO: 2982 - DNA, 899 bp, Homo sapiens
ttttttcccttgacagttattctttgtgtttttcaagacaaaacagatgtaaagttgttccaaattagcatttgaatactcttcgtacacatttaaaacaccaaaatattcacattctctgtgtaaatcttaagctattggccatgtgttgaacagccatatctaatgccaccattcccgtgatataattgtaatagtaaatgctctcatagkgtcaaatggaaatgattttatgattttctttcatgtatttatttattcatttacctttgtttactccatgtctgtctattatctgcaatgaataccctaaagcaatttgttattcccatgttttttatgaaagtagtatctaatacttatttaaagttcttgtaggtcagtcaccggttataagcactttaaatatattaaacacattttatactcaaaacatttctctgcagtagctcctgttatgattccataataatattttataagtggggaaaatgagtcacagagccactaagtgatatcttgctgcagtaaaaaaaaattacagtatctacatatgcaagataaacaatgaagcatcttattgtcaacctgggaatattaattttctagtttctccagcactggatttcagccaaacaaattacttgcttttcaagctgcaatacaactctgtggatcttagctccaataaagcagtggttcaattttctacagtatttacttattgaaatggacattgtgtaaggttttgtttttgaagggaagtaggcaacacttagtatctacggtgaatcaagccaaattggtaacagtcatagaatccaaatattctcagtgaaattgacttctcttcaaggtatttacattatattattcatattgttttccttgtggaattg

SEQ ID NO: 2983 - DNA, 899 bp, Homo sapiens
ttttttcccttgacagttattctttgtgtttttcaagacaaaacagatgtaaagttgttccaaattagcatttgaatactcttcgtacacatttaaaacaccaaaatattcacattctctgtgtaaatcttaagctattggccatgtgttgaacagccatatctaatgccaccattcccgtgatataattgtaatagtaaatgctctcatagggtcaaatggaaatgattttatgattttctttcatgtatttatttattcatttacctttgtttactccatgtctgtctattatctgcaatgaataccctaaagcaatttgttattcccatgttttttatgaaagtagtatctaatacttatttaaagttcttgtaggtcagtcaccggttataagcactttaaatatattaaacacattttatactcaaaacatttctctgcagtagctcctgttatgattccataataatattttataagtrgggaaaatgagtcacagagccactaagtgatatcttgctgcagtaaaaaaaaattacagtatctacatatgcaagataaacaatgaagcatcttattgtcaacctgggaatattaattttctagtttctccagcactggatttcagccaaacaaattacttgcttttcaagctgcaatacaactctgtggatcttagctccaataaagcagtggttcaattttctacagtatttacttattgaaatggacattgtgtaaggttttgtttttgaagggaagtaggcaacacttagtatctacggtgaatcaagccaaattggtaacagtcatagaatccaaatattctcagtgaaattgacttctcttcaaggtatttacattatattattcatattgttttccttgtggaattg

SEQ ID NO: 2984 - DNA, 899 bp, Homo sapiens
ttttttcccttgacagttattctttgtgtttttcaagacaaaacagatgtaaagttgttccaaattagcatttgaatactcttcgtacacatttaaaacaccaaaatattcacattctctgtgtaaatcttaagctattggccatgtgttgaacagccatatctaatgccaccattcccgtgatataattgtaatagtaaatgctctcatagggtcaaatggaaatgattttatgattttctttcatgtatttatttattcatttacctttgtttactccatgtctgtctattatctgcaatgaataccctaaagcaatttgttattcccatgttttttatgaaagtagtatctaatacttatttaaagttcttgtaggtcagtcaccggttataagcactttaaatatattaaacacattttatactcaaaacatttctctgcagtagctcctgttatgattccataataatattttataagtggggaaaatgagtcacagagccactaagtgatatcttgctgcagtaaaaaaaaattacagtatctacatatgcaagataaacaatgaagcatcttattgtcaacctgggaatattaattttctagtttctccagcactggatttcagccaaacaaattacttgcttttcaagctgcaatacaactctstggatcttagctccaataaagcagtggttcaattttctacagtatttacttattgaaatggacattgtgtaaggttttgtttttgaagggaagtaggcaacacttagtatctacggtgaatcaagccaaattggtaacagtcatagaatccaaatattctcagtgaaattgacttctcttcaaggtatttacattatattattcatattgttttccttgtggaattg

SEQ ID NO: 2985 - DNA, 899 bp, Homo sapiens
ttttttcccttgacagttattctttgtgtttttcaagacaaaacagatgtaaagttgttccaaattagcatttgaatactcttcgtacacatttaaaacaccaaaatattcacattctctgtgtaaatcttaagctattggccatgtgttgaacagccatatctaatgccaccattcccgtgatataattgtaatagtaaatgctctcatagggtcaaatggaaatgattttatgattttctttcatgtatttatttattcatttacctttgtttactccatgtctgtctattatctgcaatgaataccctaaagcaatttgttattcccatgttttttatgaaagtagtatctaatacttatttaaagttcttgtaggtcagtcaccggttataagcactttaaatatattaaacacattttatactcaaaacatttctctgcagtagctcctgttatgattccataataatattttataagtggggaaaatgagtcacagagccactaagtgatatcttgctgcagtaaaaaaaaattacagtatctacatatgcaagataaacaatgaagcatcttattgtcaacctgggaatattaattttctagtttctccagcactggatttcagccaaacaaattacttgcttttcaagctgcaatacaactctgtggatcttagctccaataaagcagtggttcaattttctacagtatttacttattgaaatggacattgtgtaaggktttgtttttgaagggaagtaggcaacacttagtatctacggtgaatcaagccaaattggtaacagtcatagaatccaaatattctcagtgaaattgacttctcttcaaggtatttacattatattattcatattgttttccttgtggaattg

SEQ ID NO: 2986 - DNA, 899 bp, Homo sapiens
ttttttcccttgacagttattctttgtgtttttcaagacaaaacagatgtaaagttgttccaaattagcatttgaatactcttcgtacacatttaaaacaccaaaatattcacattctctgtgtaaatcttaagctattggccatgtgttgaacagccatatctaatgccaccattcccgtgatataattgtaatagtaaatgctctcatagggtcaaatggaaatgattttatgattttctttcatgtatttatttattcatttacctttgtttactccatgtctgtctattatctgcaatgaataccctaaagcaatttgttattcccatgttttttatgaaagtagtatctaatacttatttaaagttcttgtaggtcagtcaccggttataagcactttaaatatattaaacacattttatactcaaaacatttctctgcagtagctcctgttatgattccataataatattttataagtggggaaaatgagtcacagagccactaagtgatatcttgctgcagtaaaaaaaaattacagtatctacatatgcaagataaacaatgaagcatcttattgtcaacctgggaatattaattttctagtttctccagcactggatttcagccaaacaaattacttgcttttcaagctgcaatacaactctgtggatcttagctccaataaagcagtggttcaattttctacagtatttacttattgaaatggacattgtgtaaggttttgtttttgaagggaagtaggcaacacttagtatctacggtgaatcaagccaaattggtaacagtcatagaatccaaatattctcagtgaaattkacttctcttcaaggtatttacattatattattcatattgttttccttgtggaattg

SEQ ID NO: 2987 - DNA, 589 bp, Homo sapiens
cagctcacctgctccagaatcacttcccatcttagcttctgggctaagacacctcaaaaccagcaaaggaaagtcctcactggtcaacgcgtccatcccaactcccccatctccccttagggtgggtttggggttcgggactgctttactgttcctttcaaagcagactgggaggtaagattttattctgcttccagaggttcaggatttctgcagacggtcagcaactctttgcatcctactggtaaaagttttatatactttgtatttatagaaatacgcattgtgtatattttatatgaatagattgatataaattattttagtaacttaaccatatgacttttatatttttatataaataaagttatatgtagtgtatatgtaaaatacttttatttctaatacataattttatagattaaatttaatatattaagcaaaaatatatgtaacatatataacatataacatcatttmtataatatataacttaatgtaaataagtatataaaattgatattatatttgttaatacataattatacatatatactgtgtaaaaataaaattacatattgtatatgca

SEQ ID NO: 2988 - DNA, 2207 bp, Homo sapiens
gcatattaatattctagctctttccaaccacttcttagtgctatgggcttggttgactcaggattgcttttccacaatgtcataaaaatggtttttaccagatgcttttcccagggataacaagggtcttcaactttccaaactacaatatgtgtacccttcctgcatgcaggaaaatctctaagtcaatgccttatgttttagagtttttgtcaagacagcaccacactaccaggattgtactaatttctgcttatttgtggtagggaaaggctgctaaagacatccaacaaggattcagtggctcagagaatacagaagtgtgcaccctcagctgtgatagtccaaggtgatcactcctgactcacaggctgttcggctccacaaggtcattcagggatctgggatccttccatcttgtttctctggcatcccctaggccattgggcttgtgggcttgatcatcccgctgggttgtaggcacatccctgtgcccccttgtgggaaggagaaagagaataccggtagggagggactggtacacccactatcttaagaccacacaagagaatctgggatgtatacattggctgcatgccctggaggaagggaaaaatcaatgttggtgaaaaattagcactctaccacgggactgggagctgaatggcsagatggcctttatgagtcaatatgcctttggcatagacagactgaaaggatgagagtctatgtgggagtccctcacccacttgcccttgtgaacccaaaatatctctgagacaagtctcaatcaatttagaaagtttcctttgccaaggttaaggacatgcccgtgacacagccttaggaggttctgacaacatgtggccaaggtggtcagggcacaggttggttttatacattttagggagatatgagacatcaatcaatatgtgtaagatgtacattggttccatccagaatgtggaacaactcgaaggtgggggcttccgggtcataggtagataagagacaaatgttgcattcttttgagtccttgatcagcctttcactgaatacacaatgtagtctggctcagtgaatctgcatttttacataaacaataaggcagaggaaagaatcagatatgcatttgtctcagttgagcagaggaatgactttcaatgtaaactatcagctcacattgccaatcagctcacatcagctcaattcaacagaattgttttagggtaaagatcttgaggcccttcctcgagggcaaattgtgagggaggtaagtatgttttgttgttgttgttgttgttgttgttgtttgtttgttttttttgagatggagtcttgctttgtcacccaggctggagtgcagtggtgcgatcttggctcactgcaacctccaccttcggggttcaagcaactctcctgtctcagcctcccaagtagctgggattacaggcgtgtgccaccatgcccagctaatttttgtattattagtagagatggggtttcaccatgttggccaggctggtctcgaactcctgacctcaagtgatccacctgcctcagcctcccaaagtcctgggattacaggcgtgagccaccatgcccggccagtaagtaactttttaatctttgtagctatctgatttagaaataaaatagaaggcaggtttgcctgacatagttcccagcttggctttccctttggcttagtgactttggggtcccaagatttcttttcctttcataccttataggtacacagaggccactctgtgcttattccccatgcagagatgcaggcccagcagaccgttgtaacacagatctgtttggtaaaatttgctatctccctgcagttcttcccaaaatggtgcccaccaccctcccctgtgccaagaaggcatggaagcaccaggaagctgctgggagttggaggggggtgccagcccaggttctccaggaagcagacaccatgatgggatgaaatgtgcgaggatctgaaaaggagtcatgcctgtgtgcagtcacacagaaggagctgggaagactgggagggcctgcaggccactatgcaaatctggccctgagagtggttgtccatcaatcatgctgcaggctcaaacagcttcagcagagccattagggaatctctgaaccaaagaccacaacaaagaaatctcatatctcccaagcacagttctgcctca

SEQ ID NO: 2989 - DNA, 2298 bp, Homo sapiens
tgcctttgctggtataatatgttcattgctttaatgggccaaaatgagaaataaaactgccagctgccctgaacagtaggcaaaatattttccacatgatgcattaccgctttcacattgggtaggatgttcaaggagagttactgaatttcgttcatcttactactgtttatcatcctggtatctagtacctactgataaagaaaacttggtttcttttttcattttttatcctaattggctgcagaattattggtaatccagtgacatttgcaaaataattttgctgacctgtatatttgagatagtctctgagatttcatgggaagtattggtagcaggatgcagatgatctgctccctctcatcccccagtgccctctccactccctgttgctgcatatcatattgccttacacactccctgctgctcaggatatcatctcatgtgtatggtattcttttattttttgagacagaatttcactcttgtcgcccaggctagagtgcaatggcgtgttctcagcttactgcaacctccgcctcttgagttcaagcgattctcctgcctcagcctcccaagtagctgggattacaggcacccaccaccatgccaggctaatttttttatatttttagtacagacggggtttcaccatgttgaccaggctgatctcaaactcctgacctcaggtgatccacccacctcagcctcccaaagtgctgggattacaggtgtgagccactgcccctggcctatgtgtatcatattcttatcatacatatgttacatatgtaatgtatgtgcataccatacatatgttacataagcatacatcaattaggctgctcaggatatcatctcatatgtattgtttttagtctttctaaggaaaatgtttagaagctagataaagattattagaacgtgagttatcacctgtctttaccattgccactgggataaaataggtgaccagggttcacaaatactccagaatgctctggctcagcatggttctttaatgcattactcacattcttttctttatgacttcgtgcctttgsgtgttgcctgtggtacatcttttgtcaaattcttcctgcacctttccccaaggtgaccttaactagaatatatgtggccctgccttggattatgatttgttttacatactttattttttatatatattataacagatatgtatattttataataaaaatgccatatctttggcatgagaaggaatcccagaatctggggcatatgtgcatgcagactagtcgcacctataactccttctcctcaaactgtgtttttggctttggtggtaacaaatataagcattctgcagtttccctgttcttatcttgtcttccccccaacgcctcctcataaggtcttggtgacctataaaatttcctctgaattcaccagcttcacctattctgttgctcttaactttccatgatacaatctccttctccaatacaatgaattcttcctttgatctgtgcccttaacgctatgtttttgatgcctgattaaagaaattatggcatagctgttctatgtaatattatgcaaggatgctatgaaatcattaaaaatgtttgtctgtatatgctgacatggaaggtcatctttagtgaaaaaaaagcaagttgcagaatagcatttttagagaaagtctggtctgtcttttgttttaaaaaaagaatacaccacattcacacaaatgccaaactcatgaaccaattctgtttgtagataacatgtagatacacatcaaaaaagatctgcaagataacagcccagacctttcactgtggctatctctgggcagtaagaaaaccaaaaatgcttattatttgagtgtcatggaccttcttgtgaattcaaatggtaaaacgtttattcctacaaaaataaatatatatacatatatatacacacacacacagaatattttgccaacaattttagggagtttaggaagtttccttactgtccaaatcattcccctgaattttaaaaatgaaattttattgtatattaagtgtaattaactaatgctttttaaggccaaatttgtgttctgttagtcacatatttataagctgtatatgtactttatagttattggatccttcagacaatcagtatttggaaacataattttactattttaaattattccagagactaatggtattatatgtgtgtatgttacagttattaggtttaactctgattgatttaataacaaattccaattataaaattgtttctgtg

SEQ ID NO: 2990 - DNA, 2298 bp, Homo sapiens
tgcctttgctggtataatatgttcattgctttaatgggccaaaatgagaaataaaactgccagctgccctgaacagtaggcaaaatattttccacatgatgcattaccgctttcacattgggtaggatgttcaaggagagttactgaatttcgttcatcttactactgtttatcatcctggtatctagtacctactgataaagaaaacttggtttcttttttcattttttatcctaattggctgcagaattattggtaatccagtgacatttgcaaaataattttgctgacctgtatatttgagatagtctctgagatttcatgggaagtattggtagcaggatgcagatgatctgctccctctcatcccccagtgccctctccactccctgttgctgcatatcatattgccttacacactccctgctgctcaggatatcatctcatgtgtatggtattcttttattttttgagacagaatttcactcttgtcgcccaggctagagtgcaatggcgtgttctcagcttactgcaacctccgcctcttgagttcaagcgattctcctgcctcagcctcccaagtagctgggattacaggcacccaccaccatgccaggctaatttttttatatttttagtacagacggggtttcaccatgttgaccaggctgatctcaaactcctgacctcaggtgatccacccacctcagcctcccaaagtgctgggattacaggtgtgagccactgcccctggcctatgtgtatcatattcttatcatacatatgttacatatgtaatgtatgtgcataccatacatatgttacataagcatacatcaattaggctgctcaggatatcatctcatatgtattgtttttagtctttctaaggaaaatgtttagaagctagataaagattattagaacgtgagttatcacctgtctttaccattgccactgggataaaataggtgaccagggttcacaaatactccagaatgctctggctcagcatggttctttaatgcattactcacattcttttctttatgacttcgtgcctttgcstgttgcctgtggtacatcttttgtcaaattcttcctgcacctttccccaaggtgaccttaactagaatatatgtggccctgccttggattatgatttgttttacatactttattttttatatatattataacagatatgtatattttataataaaaatgccatatctttggcatgagaaggaatcccagaatctggggcatatgtgcatgcagactagtcgcacctataactccttctcctcaaactgtgtttttggctttggtggtaacaaatataagcattctgcagtttccctgttcttatcttgtcttccccccaacgcctcctcataaggtcttggtgacctataaaatttcctctgaattcaccagcttcacctattctgttgctcttaactttccatgatacaatctccttctccaatacaatgaattcttcctttgatctgtgcccttaacgctatgtttttgatgcctgattaaagaaattatggcatagctgttctatgtaatattatgcaaggatgctatgaaatcattaaaaatgtttgtctgtatatgctgacatggaaggtcatctttagtgaaaaaaaagcaagttgcagaatagcatttttagagaaagtctggtctgtcttttgttttaaaaaaagaatacaccacattcacacaaatgccaaactcatgaaccaattctgtttgtagataacatgtagatacacatcaaaaaagatctgcaagataacagcccagacctttcactgtggctatctctgggcagtaagaaaaccaaaaatgcttattatttgagtgtcatggaccttcttgtgaattcaaatggtaaaacgtttattcctacaaaaataaatatatatacatatatatacacacacacacagaatattttgccaacaattttagggagtttaggaagtttccttactgtccaaatcattcccctgaattttaaaaatgaaattttattgtatattaagtgtaattaactaatgctttttaaggccaaatttgtgttctgttagtcacatatttataagctgtatatgtactttatagttattggatccttcagacaatcagtatttggaaacataattttactattttaaattattccagagactaatggtattatatgtgtgtatgttacagttattaggtttaactctgattgatttaataacaaattccaattataaaattgtttctgtg

SEQ ID NO: 2991 - DNA, 606 bp, Homo sapiens
tttcctatgaggctgtatcatgggggacctaacctagtggagtaatatccccagtgtgtgctgagtcctaggctggctgggagttttactgatataggtcaggctcagctgggaggtcagcagctaagggctggctggtctagactagccttgactccatgtggtccctcagctttgaacaagctcaccaggcatgttctaatagcagtggcagagagagagaagggggtagaggagggggtcctgaatgcaagcacacaaggacttttgaagcccaggtgtggaaattgtatgaaatcacttccacttcatttattggccaaagcaagccagctcaggttcaaggagtggggaaaytgactttatctcttgcttgcagttgttgcaacatcacatcgcagagggcacaaatactgggaagagcagagtagagtagagagagtcatttttgcaatcaatctaccacagtcagtgagaaactgaaagtgggttctgtgggagtagagagtgaggaaatgagtcatgagatggggtaaaaagaagccacatcatgaaggtgttaagaggcactaaacagtaaaagttaatttaattgcttctcggcct

SEQ ID NO: 2992 - DNA, 1283 bp, Homo sapiens
tcttttttaaaattttgtttagagtttatgaattatggctttggaatcattattaattggcatggagctctttgttctgaaaagttctttttcttttgataaattaatgtagatcaaaccaaatttattacaaaaggaaaaattttattttgaatgatataggattgaatttaaggttaagtaatatggagctgggaaaatggcaaggcagggctcttaactttcacaaaaacttaacattaataaaaagggaaatcaaataatacttggagatctcaaagcactcttagaaactttgtctaattaagctttccacccactgtgcaataaatattctattagctatacaggtgagattctaagaatttctaattaagttgtgttcttttttaccrcggtgctcaaattacacagtttgccaaaggaaatgtgtgctgtgtcattgtagcatgattttcaatggagttaccatctaatttctccaaaccaggcattgtgtaacactgttgtcactttctgtaattattttcactgttacactgtgattttgaaaaattattgttaatgattacagttgaaaacttgtttaaggtatttgcatctaagaaattgtttacttccaaattgtgtgggtacgtttttagttacttggattcagatcctatttatggtaagcaggtttctttggggtagagggagggcagatgtggacaaagtggctatttgtggtatcctaattctgggtatgaatatcctggattccagggctttgcctggattctagggtgagttgttatactttattctctccatgtgtattatgataatacaggtgattaaagcatcttgaattttaatgtaatcttttaatttgagcttttgattgtctttttgaacattatgcaatcatgttttctttgtactgttctctctaaaaaatgaccaaatgccaaagattacatgatatgagaataatttgcttatattgtatcatttttcatactaaattaatgagtgggaaaatctacattggctcctgggtataaaataaagttccttctacaaactgttgattactgacgctacaggagtaaaacagaaaaagttttattcatattaggtttcttttagaaataagattgtggaggcttttctaattgtaaaaacaatgcaagattgttgccaaaagtatgagaaatatatacaaacactaagaagaaattaagtcacttttagtcgtaactgcagatggttacattttaatataacattttcaaggattt

SEQ ID NO: 2993 - DNA, 1283 bp, Homo sapiens
tcttttttaaaattttgtttagagtttatgaattatggctttggaatcattattaattggcatggagctctttgttctgaaaagttctttttcttttgataaattaatgtagatcaaaccaaatttattacaaaaggaaaaattttattttgaatgatataggattgaatttaaggttaagtaatatggagctgggaaaatggcaaggcagggctcttaactttcacaaaaacttaacattaataaaaagggaaatcaaataatacttggagatctcaaagcactcttagaaactttgtctaattaagctttccacccactgtgcaataaatattctattagctatacaggtgagattctaagaatttctaattaagttgtgttcttttttaccgcggtgctcaaattacacagtttgccaaaggaaatgtgtgctgtgtcattgtagcatgattttcaatggagttaccatctaatttctccaaaccaggcattgtgtaacactgttgtcactttctgtaattattttcactgttacactgtgattttgaaaaattattgttaatgattacagttgaaaacttgtttaaggtatttgcatctaagaaattgtttacttccaaattgtgtgggtacgtttttagttacttggattcagatcctatttatggtaagcaggtttctttggggtagagggagggcagatgtggacaaagtggctatttgtggtatcctaattctgggtatgaatatcctggattccagggctttgcctggattctagggtgagttgttatactttattctctmcatgtgtattatgataatacaggtgattaaagcatcttgaattttaatgtaatcttttaatttgagcttttgattgtctttttgaacattatgcaatcatgttttctttgtactgttctctctaaaaaatgaccaaatgccaaagattacatgatatgagaataatttgcttatattgtatcatttttcatactaaattaatgagtgggaaaatctacattggctcctgggtataaaataaagttccttctacaaactgttgattactgacgctacaggagtaaaacagaaaaagttttattcatattaggtttcttttagaaataagattgtggaggcttttctaattgtaaaaacaatgcaagattgttgccaaaagtatgagaaatatatacaaacactaagaagaaattaagtcacttttagtcgtaactgcagatggttacattttaatataacattttcaaggattt

SEQ ID NO: 2994 - DNA, 1283 bp, Homo sapiens
tcttttttaaaattttgtttagagtttatgaattatggctttggaatcattattaattggcatggagctctttgttctgaaaagttctttttcttttgataaattaatgtagatcaaaccaaatttattacaaaaggaaaaattttattttgaatgatataggattgaatttaaggttaagtaatatggagctgggaaaatggcaaggcagggctcttaactttcacaaaaacttaacattaataaaaagggaaatcaaataatacttggagatctcaaagcactcttagaaactttgtctaattaagctttccacccactgtgcaataaatattctattagctatacaggtgagattctaagaatttctaattaagttgtgttcttttttaccgcggtgctcaaattacacagtttgccaaaggaaatgtgtgctgtgtcattgtagcatgattttcaatggagttaccatctaatttctccaaaccaggcattgtgtaacactgttgtcactttctgtaattattttcactgttacactgtgattttgaaaaattattgttaatgattacagttgaaaacttgtttaaggtatttgcatctaagaaattgtttacttccaaattgtgtgggtacgtttttagttacttggattcagatcctatttatggtaagcaggtttctttggggtagagggagggcagatgtggacaaagtggctatttgtggtatcctaattctgggtatgaatatcctggattccagggctttgcctggattctagggtgagttgttatactttattctctccatgtgtattatgataatacaggtgattaaagcatcttgaattttaatgtaatcttttaatttgagcttttgattgtctttttgaacattatgcaatcatgttttctttgtactgttctctctaaaaaatgaccaaatgccaaagattacatgatatgagaataatttgcttatattgtatcatttttcatactaaattaatgagtgggaaaatctacattggctcctgggtataaaataaagttccttctacaaactgttgattactgacgctacaggagtaaaacagaaaaagttttattcatattaggtttcttttagaaataagattgtggaggcttttctaattgtaaaaacaatgcaagrttgttgccaaaagtatgagaaatatatacaaacactaagaagaaattaagtcacttttagtcgtaactgcagatggttacattttaatataacattttcaaggattt

SEQ ID NO: 2995 - DNA, 569 bp, Homo sapiens
ggaaaataagcaagtacaagataaacctcaaagtcaggctaattgttgccgtagtgatgggaagcagaggaatgcagtagggaaataactgagagaaagggcggcttgggatgattctgttctgtttcttcaggcatgtgatggtttcgctaatggtcatttattgttttgtttcataacttaagtataaattacacgtaaactcctgtggacataaacatataatcccatttaaaaaggagcacactaagaccacaatgatactaacattgaggaaaagcacatccagatctgcgcatctttcaaggaggtgcacatgacagaggatgtgtgtcacatacaccagagtgataatgaaactttaattaaacatatgattaactttgacctgaaatagtaggtgcctctgctaaaatcacacacagaaaaatgatacttggtgtgatttattgtttacattgtacaagtgccctaaaaatcaacaaaaagtttaaaataaaatgaggtataagttttggagaagaggaagcaaaattactattatgtgyagtcaatacgattattacata

SEQ ID NO: 2996 - DNA, 460 bp, Homo sapiens
attaaacaaaataatactaagtggagaaattcagacacaaaacaggacatatgataaagttttatctataagttgacaaataggcaaaaccaatctctcgcatcttaaatctggacagcactgagtaccatggagagagtgacaggatgctgtaatgtgtttcctgacctgggtttctggttacacacagatattcacattgtaaaggtcrattgaactgaacatatagttatgcacaaatctatagatattttataatttaataaatttgtaaaagaaaaaaatgaaagtggcgtgacttggaggaaagaaatttggaataaagtcaagaatcacacattctagtaataaaatttctataagagactaatttatcctttgagactttcagaaaataatttatccttttccattcctagttatttgacttctgaatgggatgtgaatcatatggacaggt

SEQ ID NO: 2997 - DNA, 460 bp, Homo sapiens
attaaacaaaataatactaagtggagaaattcagacacaaaacaggacatatgataaagttttatctataagttgacaaataggcaaaaccaatctctcgcatcttaaatctggacagcactgagtaccatggagagagtgacaggatgctgtaatgtgtttcctgacctgggtttctggttacacacagatattcacattgtaaaggtcaattgaactgaacatatagttmtgcacaaatctatagatattttataatttaataaatttgtaaaagaaaaaaatgaaagtggcgtgacttggaggaaagaaatttggaataaagtcaagaatcacacattctagtaataaaatttctataagagactaatttatcctttgagactttcagaaaataatttatccttttccattcctagttatttgacttctgaatgggatgtgaatcatatggacaggt

SEQ ID NO: 2998 - DNA, 1116 bp, Homo sapiens
cttagatttatagctgatatggtttggatttgtgtgcccacccaaatctcatgttgaattctaatccccaatgttggaggtagggcctggtaggagatgattggatcatgggggccgatttcccccttgctgttattgtgacagtgagtgggttcttacaagatctggttgtttaaaagtgtgtggcccctcccccttctctctgttcctcctgctcttgccatgtaagatgcacctgcttccccttcgccttctgtcatgattctaagtttcctgaggcctccccaaccatgcttcctgtacagcctgtggaaccatgagccaatcaaacctcttttctttataaattacccagtttcaagtatttatttatagcagtgggagaacggactaatactctgtatttaggtccatgattctcgtttttattttgatataatcttggtctctcattgaatctgaagtaaatacagatagtttatttatgacttttttcttttttttgagatggagtctcactctgtcacccaggctggagtgcagtggtgcaatctcggctcactgcaacctccgtctcctgggtttaagcaattctctgcctcagcctcccgagtagctgggaataaaggtgcatgccatcatgcccagctaacttttgtatttttagtagagatgggatttcaccatcttggccaggctggtcctgaacccctgacctcttgatccrcctgccttggcctcccaaagtgctgggattacaggcataagccgccatgcccggcctatttatgacttttttaaggtatactacatgcacattttgtagaatctttttccacagggtttctataaagcagatttctatttgtgaaattccaagttcacatatgaccttgctaaaaatttaagatgtgctcttttagaagaaaaaatagaaatttctaatatgctaccaaattaaaatattattgcaaagtacagtggttatttaatatttgatatagtagcttgtgggagttgaaagctaaataacagctaactaaatagatcttgtcttatggaaaaatttaggttctattagtttccttttccttcttggacttccctgaaaaattc

SEQ ID NO: 2999 - DNA, 635 bp, Homo sapiens
cttcagaacaagcgtccctggtaaacaactacttcttacctgaaaggctctatatattagaatatatttaaaaagaaaaaagtagaattagatgaaataaagctaaagctattttcccaaaaattcaagaaataggagttttgaagtgtgtgtagataaaacagagatgagtctccaggcctattaattatattaagttctgacaggaaaaaaaaaaagctatgctgttagagaaataatgttaggagctactaatgtgtatgcctccagtgacaaaatataaaagaaacaagcagagcacttattccttccaactgctatggctttaggcaaaactttggccacaaggtctgctgccttctaactgtttctcttatttcaacaattgcactaaattctgggtaaattaattttccctcaaagtgaaaagttcttttaataattccttgagtgttcacatcgttgtcattaatgggctttgttctgttcactgtaggataacttctttatatacttgtcttttcaaaagctttcttccaatgaatagacatcatagtaagtcacttgaaaaatctcccgtaaatatggattttttttycaacattatcagccattgtctcataatttctttaaaa

SEQ ID NO: 3000 - DNA, 626 bp, Homo sapiens
tttacttccttgccccctttctcctaagatccatgatttctatttggacaaaacagagaaaaaaagcaaaagaacttgatcctttcttcctaagatcagggaagaactggggcagaagaagattataagcttgtatgagcatgaaaacacacttttattttacacaaaaattgaaagctcattttaaagcatttttggctgttttatttatgcctgatgattttattcaatactagttggattttaaataatctaactaatgtttttcctcttcatgaaatttgaagattattcttttatgaaacagtagttttggagtttagcttttttaaaatttttgcagtttatagatttcaggcattatgcatttttcttttcagttcagctttataatgccattttcaatgagcatttatttgtaggtttgaaatataatagagcacgtacacttttattctgtttaaattttttttcaagtttctacatacagcattgatgagcacatatagtgatgytaagagacaatgaagtattagatgtaaaagcacttcagttattagggtgaaagatgttataggcatttaaagtattaattctattaacacatataatttataattctggaa

SEQ ID NO: 3001 - DNA, 615 bp, Homo sapiens
ttttctctactgctctggctgtatctagcaaagctaaatggttttcttggcttcagagaaattcctgagtaaagcatacatatatatatatatacgtatatatatgtgtgtgtgtgtgtgtgtgtrtatatatatatatatatatatatatatggtgtagatgccagaaacatacaaaaatcagggggctcgagagaaagtggcttggtgcatgacaagtacctgctgcactcgtgaatctcaatatcctccataaagtactcaagctgctttttcagactagataataaacaaattatttgtatggcaacactgaagctttagagtatctctccctctcagtttcatctatagtccctacagaggaaacaacactagcgcttacttgaaaataagtcaccatgctcatgctatgtgacaattgtccttttgcaaaaactgattggattaggaatgatacaagtgctcagtaaggtgatctgtgggccaaccagtggtccacaaatgtaatgaaggagaggatcatgctgtcagtgttggagctagagtagaaacaaagggttgctaactgagtcctgataatgaaagagtcctgatactgtaaggatatgccaa

SEQ ID NO: 3002 - DNA, 615 bp, Homo sapiens
ttttctctactgctctggctgtatctagcaaagctaaatggttttcttggcttcagagaaattcctgagtaaagcatacatatatatatatatacgtatatatatgtgtgtgtgtgtgtgtgtgtatatatatatatatatatatatatatatggtgtagatgccagaaacatacaaaaatcagggggctcgagagaaagtggcttggtgcatgacaagtacctgctgcactcgtgaatctcaatatcctccataaagtactcaagctgctttttcagactagataataaacaaattatttgtatggcaacastgaagctttagagtatctctccctctcagtttcatctatagtccctacagaggaaacaacactagcgcttacttgaaaataagtcaccatgctcatgctatgtgacaattgtccttttgcaaaaactgattggattaggaatgatacaagtgctcagtaaggtgatctgtgggccaaccagtggtccacaaatgtaatgaaggagaggatcatgctgtcagtgttggagctagagtagaaacaaagggttgctaactgagtcctgataatgaaagagtcctgatactgtaaggatatgccaa

SEQ ID NO: 3003 - DNA, 1354 bp, Homo sapiens
ggttgaaacccctctgtgtgccctggttatcaaataactccccaaaagagaaaatgccagaacccacatgacaggcccagatctcattttattcattgtctctgacacaccgtcatccctgcccagcacacaaacctgtgctaggatttgaactttcttctgtgaattcactcaggaaccttgggcctggatgtatcactttggaaatctagctctaccatgacccatgagacaggggtmtctggtccgccttgggcgctaggcccatagaagcctaatttacctattagactagacctgaaatcttgcgcattcctaatgaaaactgttggagacagtcttctaccacctttgcctaattaccaagcagtgtaacaaggcttatgcaatttcaatgcagtgtaacaaaagcaccacaagggccaggcgtggtggctctttcctgtaatcccagcactttgggaggccaaggtgagcaaatcacttgaggtcaaggagttccagaccagcctggccaacatggtgaaacccatctctactaaaaacacaaaaattagctgggtgtggtggcgggtacctgtaatcccagctatacagaaggcaggagaatgcttgaacctgggaggcagaggttgcagtgaactgagatcaagccactatactccagcctgggtgatggagtgagaccttggaaaaaaaagaaaaagaaagaaagagaaagtaaaaggaagaaagaaagaaaaagaaaggaggaaggaaggaaggaaagaaggaaggaaggaaggaaggaaggaaggaaggaagggtcagcaatgtggtgcaggttggatcattccatgaacttggtcaaattttaacaacaacttctgtcaactctaagagccaacatcatgttatggaaaagcttgaactctgtagccaattgacactgggttcaaatcgcaagtctgccaagatgaaaggaataaatgagtttgaaagtgcctggcatatactaactagtaggtagggatatttctttagtgttataaggtcagttgcccttactgttacactaatcaggactgtaatcatggtacctgccatcctaagatactactaaaacagagactttggcagagcacattaagaattagttttattttatttccatgggaaaccaaaggaaagattttgacaaggtaatctccaattttttttaattcaaccctaattgctcctgtaattctactgcttcccagtacagctccacaatcacccatgtggtcctttaattttctaagaatgacaaaatcagattcttggacacccttttccagacttagcttttgttacagagacggtgaaagaagta

SEQ ID NO: 3004 - DNA, 1354 bp, Homo sapiens
ggttgaaacccctctgtgtgccctggttatcaaataactccccaaaagagaaaatgccagaacccacatgacaggcccagatctcattttattcattgtctctgacacaccgtcatccctgcccagcacacaaacctgtgctaggatttgaactttcttctgtgaattcactcaggaaccttgggcctggatgtatcactttggaaatctagctctaccatgacccatgagacaggggtatctggtccgccttgggcgctaggcccatagaagcctaatttacctattagactagacctgaaatcttgcgcattcctaatgaaaactgttggagacagtcttctaccacctttgcctaattaccaagcagtgtaacaaggcttatgcaatttcaatgcagtgtaacaaaagcaccacaagggccaggcgtggtggctctttcctgtaatcccagcactttgggaggccaaggtgagcaaatcacttgaggtcaaggagttccagaccagcctggccaacatggtgaaacccatctctactaaaaacacaaaaattagctgggtgtggtggcgggtacctgtaatcccagctatacagaaggcaggagaatgcttgaacctgggaggcagaggttgcagtgaactgagatcaagccactatactccagcctgggtgatggagtgagaccttggaaaaaaaagaaaaagaaagaaagagaaagtaaaaggaagaaagaaagaaaaagaaaggaggaaggaaggaaggaaagaaggaaggaaggaaggaaggaaggaaggaaggaagggtcagcaatgtggtgcaggttggatcattccatgaacttggtcaaattttaacaacaacttctgtcaactctaagagccaacatcatgttatggaaaagcttgaactctgtagccaattgacactgggttcaaatcgcaagtctgccaagatgaaaggaataaatgagtttgaaagtgcctggcatatactaactagtaggtagggatatttctttagtgttataaggtcagttgcccttactgttacactaatcaggactgtaatcatggtacctgccatcctaagatactactaaaacagagactttggcagagcayattaagaattagttttattttatttccatgggaaaccaaaggaaagattttgacaaggtaatctccaattttttttaattcaaccctaattgctcctgtaattctactgcttcccagtacagctccacaatcacccatgtggtcctttaattttctaagaatgacaaaatcagattcttggacacccttttccagacttagcttttgttacagagacggtgaaagaagta

SEQ ID NO: 3005 - DNA, 658 bp, Homo sapiens
ggaggactgtccttctgcacagtcattcatgggatgagctcaggctgcctgggcagtccatccagtattggattggtgattcatgactctgtagatgaggcctgtcagtcagattcctctcctggaaaaactaaaacacctggtggaaccacagtgggaagtgaagctgaaaagattatttccacaattgccaggatgcagaaaggctgaggccataaacatgcagaaaactttagaacagaccccaggatttracagagaaagcctgtgggcagagagagaacagagcggagagggggagggggggcagcggtgggggtcgggagggagacagaaacacagagatgggctctctctccttgcagcttgttttcagcttcagtctgcacatctctacattaaaactcttttttctaaagaaacttgagtgagttcctcacagtcccaagagccctaaggaaaacactgtctaaaacacaaaacaccatgtgctgtgcccagcacctctgaactcatctctgacaagtggtgcagcccttttcttttctgcacaatcacccaaatgggaccagaacccattaggatctttccactctgctgtgccaagaaacgggggtagggaaaggatgaaatcaatttccttaaccatcattactga

SEQ ID NO: 3006 - DNA, 1130 bp, Homo sapiens
tgcattcatcccattgctttgaattcattggattatccttatttgcctcctaaatatattatcagctctttgaaagcaaaggcatatgcttaatttaactctagagctcagcattgtgccttactcaatatgtgacaaattactattattattttgagacagagtcttactctgtcgcccaggctggagttcagtggcacgatctcgactcactgcaacctcagcctcctgggttcaagtgattctcctgcctcagcctcctgagtagctggattacaggcacattccaccacgcccggctaatttttgtatttttgtagagacggggtgtcaccatgttggccaggctggtcttgaactcctgacctcgtgatccgcccrccttggcctcccaaaatgctgggattacaggcgtgagccatgacgcccagccgtgacaaattattaatacataaatgaaatgttaagttctagtcctgggcctgtccttaaactagctgcatgagcctaggcaggtaactcactctgctctcaggatcctcttctgtaaaataagattcttaaaattttcggtccctttgagctctaaagcttcataaggagtttgctaagagtttcaagaattgcaatactaatggaaaacctagtgataaaataaaattaaatcttggcaaatatctgagtgtctattatatgcaaaatacataattttaaaaaatctggtgggaaagaaaaatgactaaacaatcttgcttatgaagaaatcagtctagtgaagaccatctgctataatactgtgatacaagacagaatgaaataagtgctataggtgctataatattataataagggctataataggcacacaaataaggcatttcagaagtacatagaaaggagcaatgcactttaattgccatctaattgtcacaactctgtgacatttgtaaccaatttcttccctcaattccatgatttaactaatacagattgcaaatatgggattgagtgaaaaatatattttaaggccatcgttattcatggcccatgggaaggtatctttaaatatttttacaggagctatcatcctttgagctgcattatcaacagtttgataatatttatgtgca

SEQ ID NO: 3007 - DNA, 1243 bp, Homo sapiens
agtcataattcacattatagtagaaccaaaacacatgacacgccaataccttgcagatgtagaaaatgaggcccagagaggttctgtgaattatccaaggtcaccacagtatgttatttgtgcagtcttttgtggtgtgtgggcctattttgcctcttttcccctgggcttgtcataactctcacaacccatgtgagacctgcagtgtcctgcagacagctgaaaaatttgcctcctcttctgctggatctctcagaaaatacatttaagtaaaagttttttgcttttatttttttttccaaaactcatgttgttcattaaaatcgctatttaatataaaaaaacaaattaaacgggagggaaaagaaagcatttcttcaatgttttttttccagttgctttttgtgcaggtgggttgctacaggagtcccctcttccaaagcccatctgggatgttagtttagctctattgatgtttaaggctctgtctttcatcgtaaccacatgccaagacaataagtaattgaaccacatgttttgccttttttaaaaggtgtaatctccttctgaagtgtagcgatgtttagcaggatttttctaatttatctgtcatcacaccatgtgggctaggctccaagccttgactgcagtgtctctttatcaccgtcttttgatgaacacctgtttccagcatataaatatatctgctgagaagcaaaattaaaataatttcaacagtataggaataattaggaaccttttttgcaaggtccacctgttccaaatatgaaaacataatatttagttgcatatacattcttttatcactatatattctttatgctagttatgtatatatttggtagtaattctctgatatttcattagctgaaaaaaaattttcacttttagatatttaattgtaagcaattttttaaaaaatcagaatttcttatgcccattaagagacgaaaggaaggaaattactccaaaacttcttaaaataagaaactttaaagtgctccattatttatgtttgttatgctttttgttaaggacttaacttcttcatgaataaaaaaagattatatgaatcctaagttggttataatagataytattttttaaataaaaatatgagtgcccttataagaaaagggtttttttgttaacgttttgtatattaacatatttaaatcaatagatttaatatgaagaattatcgtttttatgattcacatgc

SEQ ID NO: 3008 - DNA, 1133 bp, Homo sapiens
taggatgtagtccaaacttcttactatggctattggaacactccactctttgatcccaacctacttatcttaaactactacctataacccattgcatcttaatcttaggctcactgttccataatatactgacctttcctgccccttgtcacatgcagtcttccatcctggaatgcctttccagcctcaatcctcagcctagtcttcaaaatcaatcttgaattccatcccataaaacttttctagatctatctatctatcaattcaataaatgttttatgagagcctttgctgtacaccaaatactaagctacatgttggagattttaaaaatatttttttcttaaaaatcccctaggtcagtaagtaatatctacaatgtaacatgataagtcctttaatccagatatgtacagggagggaagaaaaattytgcctgtgtggagggagggcaggcaagattttatagaggaggtaatatttgagcaggatctcaaaggattaatataaatttgccaggtaaagaaaaaaagaagaatgttcctggtagataaaactgattattcaaagtgcacagaagcataaaaatatgtgcatgactggggagaaagacagtttggtaccactaaagaaagggtgatattcaaaatatttaacaatcagtatggaatgagtactggccaatcagaatagaaaatggtttcatttgtacataataactgaatattagcccagaaccaaagtcaggtgtacttggcaaaagaggagtggcagtaaggaatagatcaataacagattagcagggctatgataatgatttgaacctattccaggaggcagaagggaagcattgaaagcatttagcaagcaaaaaatatgttatcagttatattttagaaagattaaccaggcaactgtattaaaaatgactttgaatgggatgaaataaaaggctaagacgattgttggatgattgtccaggtaagaaatgaaatgcagctgaactaaacctgtggccatgaagacagagatgcaagatcacatttaaggcatgtttagaagacaacattcacaggacttgatgaacaactgaaaatgagggatgggaagctggtggatagataaatgatgca

SEQ ID NO: 3009 - DNA, 1868 bp, Homo sapiens
  misc_feature (1)...(1868): n = A,T,C or G
annnnnnnnnnnnnnnnnnnnnnnnnnnnnnnnnnnnnnnnnnnnnnnnnnnnnnnnnnnnnnnnnnnnnnnnnnnnnnnnnnnnnnnnnnnnnnnnnnnnggctcaactaaatgtgggccaggatgtgaccttgtgtggaaatagggtctttgtagatataattagctaagatgaggttatagtagattaagttgaatcttaaatcccaaaactgatgttcacagagggtcatgtgcagacacagatacagagaacaaagccacgtgaagaccaaagcagaaacggaaactgatgcaggtacaagccaaggatgctggcaactgccaaaagccaggatgaggaaagcaatgagtcttcctgagggccttcagagggagcatggtcccgacaccttgatcttggccttctggcctgctgttttaagtaatccagtttatggtaaattgttacaacagacccgataaactaatacagaagccaataaagtgaagcagacagatattacatccacattacctaaaagttaaaaaatcagaatggccaagcaaatgagcatgcatataagcaggtatcataatagcattgatacatttttagtatctcacgctgtcaggattcatccagggaaaaagagagaaagcgagagagagcaagagagctccctagacatttaaacagaatttagcatagggaaatggttaaacaggtatgggagaactgctggggcaaagagcacactgaggcagagagtacctgcagaagcagcttcttctgctttgtctgagagaacaaaggaaagaaagctgtggttacaagaacccagaataagatggtgaggttacatccagctaattctgagagtggcaagatctgaaattgaaaccaacktctgctgtcagggtgaaaaagaattgctattaaaaattggggccgggtacggtggctcacacctgtaatcccagcactctgggaggcagaggcaggaggatagcttaagcccacgagtttgagatcagcctggccaagagtgagaccccgtctctacaaaaaaataaattagccaggcatggtggcgcttgtgtatagtcccatctacttgggaggctgagctggaaggattgcttgagtcttgggagatcgaagctgcagcaagctgtgactgcaccaccgcgccccccagcctgggtgacagagcaagactctgtctcaaaacaaatatataatatgataataatataagtaatatgaattggaagaaaaagggaagaagtccttttcccatacatgtagtttgaagagtcacagccccagtgtcacatggcaagagtgtgacagggttagagcccaaagagtagaacttagtaaccggcaccctctatatttttagatgtgttggttattaattagcacaactggtgtccaagctaatatttcaccaaggcaaccaaacctatgtctgtaacatttcttaatccttcctcaatagaaagcagaggtggcaaactgctttctattaatattaatgtcatactacttgccaaattgatttttttacatctaacttctatcatatgttagaagaaaaaaaaagacccagcctgggctacaagagcaaaactctgtctcaaaaaataaaaaaacaaaaacaccactccctttgcataggaatgggtgtactaccctactcacctcttcccctagtctcctagccaggcttatcgcttatccctcatgtctggaactcacattttatgacaaaaattgcttcttccatttttcaaacaggttcaaagggggattcaaagcttttgttgcaattttaataatcagcaagcatgcaaagatattccttgggctgagagtcac

SEQ ID NO: 3010 - DNA, 1868 bp, Homo sapiens
  misc_feature (1)...(1868): n = A,T,C or G
annnnnnnnnnnnnnnnnnnnnnnnnnnnnnnnnnnnnnnnnnnnnnnnnnnnnnnnnnnnnnnnnnnnnnnnnnnnnnnnnnnnnnnnnnnnnnnnnnnnggctcaactaaatgtgggccaggatgtgaccttgtgtggaaatagggtctttgtagatataattagctaagatgaggttatagtagattaagttgaatcttaaatcccaaaactgatgttcacagagggtcatgtgcagacacagatacagagaacaaagccacgtgaagaccaaagcagaaacggaaactgatgcaggtacaagccaaggatgctggcaactgccaaaagccaggatgaggaaagcaatgagtcttcctgagggccttcagagggagcatggtcccgacaccttgatcttggccttctggcctgctgttttaagtaatccagtttatggtaaattgttacaacagacccgataaactaatacagaagccaataaagtgaagcagacagatattacatccacattacctaaaagttaaaaaatcagaatggccaagcaaatgagcatgcatataagcaggtatcataatagcattgatacatttttagtatctcacgctgtcaggattcatccagggaaaaagagagaaagcgagagagagcaagagagctccctagacatttaaacagaatttagcatagggaaatggttaaacaggtatgggagaactgctggggcaaagagcacactgaggcagagagtacctgcagaagcagcttcttctgctttgtctgagagaacaaaggaaagaaagctgtggttacaagaacccagaataagatggtgaggttacatccagctaattctgagagtggcaagatctgaaattgaaaccaacttctgctgtcagggtgaaaaagaattgctattaaaaattggggccgggtacggtggctcacacctgtaatcccagcactytgggaggcagaggcaggaggatagcttaagcccacgagtttgagatcagcctggccaagagtgagaccccgtctctacaaaaaaataaattagccaggcatggtggcgcttgtgtatagtcccatctacttgggaggctgagctggaaggattgcttgagtcttgggagatcgaagctgcagcaagctgtgactgcaccaccgcgccccccagcctgggtgacagagcaagactctgtctcaaaacaaatatataatatgataataatataagtaatatgaattggaagaaaaagggaagaagtccttttcccatacatgtagtttgaagagtcacagccccagtgtcacatggcaagagtgtgacagggttagagcccaaagagtagaacttagtaaccggcaccctctatatttttagatgtgttggttattaattagcacaactggtgtccaagctaatatttcaccaaggcaaccaaacctatgtctgtaacatttcttaatccttcctcaatagaaagcagaggtggcaaactgctttctattaatattaatgtcatactacttgccaaattgatttttttacatctaacttctatcatatgttagaagaaaaaaaaagacccagcctgggctacaagagcaaaactctgtctcaaaaaataaaaaaacaaaaacaccactccctttgcataggaatgggtgtactaccctactcacctcttcccctagtctcctagccaggcttatcgcttatccctcatgtctggaactcacattttatgacaaaaattgcttcttccatttttcaaacaggttcaaagggggattcaaagcttttgttgcaattttaataatcagcaagcatgcaaagatattccttgggctgagagtcac

SEQ ID NO: 3011 - DNA, 1868 bp, Homo sapiens
  misc_feature (1)...(1868): n = A,T,C or G
annnnnnnnnnnnnnnnnnnnnnnnnnnnnnnnnnnnnnnnnnnnnnnnnnnnnnnnnnnnnnnnnnnnnnnnnnnnnnnnnnnnnnnnnnnnnnnnnnnnggctcaactaaatgtgggccaggatgtgaccttgtgtggaaatagggtctttgtagatataattagctaagatgaggttatagtagattaagttgaatcttaaatcccaaaactgatgttcacagagggtcatgtgcagacacagatacagagaacaaagccacgtgaagaccaaagcagaaacggaaactgatgcaggtacaagccaaggatgctggcaactgccaaaagccaggatgaggaaagcaatgagtcttcctgagggccttcagagggagcatggtcccgacaccttgatcttggccttctggcctgctgttttaagtaatccagtttatggtaaattgttacaacagacccgataaactaatacagaagccaataaagtgaagcagacagatattacatccacattacctaaaagttaaaaaatcagaatggccaagcaaatgagcatgcatataagcaggtatcataatagcattgatacatttttagtatctcacgctgtcaggattcatccagggaaaaagagagaaagcgagagagagcaagagagctccctagacatttaaacagaatttagcatagggaaatggttaaacaggtatgggagaactgctggggcaaagagcacactgaggcagagagtacctgcagaagcagcttcttctgctttgtctgagagaacaaaggaaagaaagctgtggttacaagaacccagaataagatggtgaggttacatccagctaattctgagagtggcaagatctgaaattgaaaccaacttctgctgtcagggtgaaaaagaattgctattaaaaattggggccgggtacggtggctcacacctgtaatcccagcactctgggaggcagaggcaggaggatagcttaagcccacgagtttgagatcagcctggccaagagtgagaccccgtctctacaaaaaaataaattagccaggcatggtggcgcttgtgtatagtcccatctacttgggaggctgagctggaaggattgcttgagtcttgggagatcgaagctgcagcaagctgtgactgcaccaccgcgccccccagcctgggtgacagagcaagactctgtctcaaaacaaatatataatatgataataatataagtaatatgaattggaagaaaaagggaagaagtccttttcccatacatgtagtttgaagagtcacagccccagtgtcacatggcaagagtgtgacagggttagagcccaaagagtagaacttagtaaccggcaccctctatatttttagatgtgttggttattaattagcacaactggtgtccaagctaatatttcaccaaggcaaccaaacctatgtctgtaacatttcttaatccttcctcaatagaaagcagaggtggcaaactgctttctattaatattaatgtcatactacttgccaaattgatttttttacatctaacttctatcatatgttagaagaaaaaaaaagacccagcctgggctacaagagcaaaactctgtctcaaaaaataaaaaaacaaaaacaccactccctttgcataggaatgggtgtactaccctactcacctcttcccctagtctcctagccaggcttatcgcttatccctcatgtctggaactcacattttatgacaaaaattgcttcttccatttttcaaacaggttcaaagggggattcaaagcttttgttgcaattttaataatcagcaagcrtgcaaagatattccttgggctgagagtcac

SEQ ID NO: 3012 - DNA, 1250 bp, Homo sapiens
cataatctcctgcccgggtaatgccaggtagccaggagttgggtcaaagaagggagtcktcatcctgatggaaaaaataaggtcctgggtattatgaggtaggagaataaaaaggtttctggggagtaagtatgacaattactagtccccatggaggtctgatctggtcaggtggcaagggttgggtggggtatgatgtaagctcagtttatgtgtggagatgcccattgggtttggatatataggtttgagtattgagatgtttaaaggacatctaacccataggtaaaaactacttttgcttgacactgacttaacatttcaaaagtgttatttttggtcccaagatctaatgctgtctcagaacatgtgccctgttgtggctgcaagtggcactcaagttgactagagcacagtgacctgggttgtaccccaagtgcactaactcctcaatgcccttttaagtctaacttatttgggaaacacataacaaagggtaccataaaccgaatccaaattacgtgttgggccaaaaatgttgccagaactgaggcactttgtgatggagttgcaagagatagcttgagatcggctcagtctgatttattctagttaagccaaagcttaattatttgaggaggaaagtcttttaggcttgaagcagcaaaatactgtttatatatgtgttaccttcctcgttggaagattctacgattgctctgttctggtaggtggtgaaagatatgccaaagttttaggcttgtttttctgatcttatttttttaatccagtggtgccaaaaagtatttagggtatgtttaaggtatatttaaaacatcactctgaatgagtttccaacagtctggggctgtataaaagtcacactcttgtacttgcaggtgatggtgtcacagggccagggcctccagagctctacggctttctctggttttctatagggccaagggcacaggacgcagcattccagaccacactgactgcttttgctgagtttctacctcacttgtggcaagtcatctacctcatgttagcatctgacaggtctcaaaaagaatagtattaatccagtgggcagtgggtgggagtgggaagctacctctaaaagaaatgttaccataaatctacaactgatttctcccaggagaaatgttctacttaccttgaaagagaaatgtcaggcaaatgtagtcataaatccaagtagttcttagcaatctggcttttccccc

SEQ ID NO: 3013 - DNA, 604 bp, Homo sapiens
aaaattttacatagtaaaaaaatctgttagtcttttgtgaatttccctttggtgtcattttcatgaaagctttctctactgcaagatttgaaaaactgatttaatctttaatatcttaatgtatttattatcgatattaaaatctttaattagcatgtmctttatttcattatgtggtttaatgtaagttttttcttaaaatggctaatgtttattaaacaatgtctatgtttcccagcgatatgaaacacatttatcatgtactaatgctactctatcttgttcgcctaaataaatgtaacttgtcattcaaaaaggaatccttttacttacttttttattcacttagtaaaattacagactgatttatctcaagtattgtagtgggactataggatttaccaggaaaggaagaaggtgattaaaatggagtgtattactgcttagtatactggagacacaaattaatttgaaataatgaatattattgctgtgacagaggcaagcatggatgacaatcataaaggcagtacttaaagagtccccattacccagatttgatcattacacattgtatgcctgtatacaaatatcacacacactc

SEQ ID NO: 3014 - DNA, 626 bp, Homo sapiens
attatttatttcatatttgtcttcccccataacactgtacatccaccctgagagggaccacgactcctctcttcactgttctatgcccagtgcgaagcacagttcttatcacagagtagatgttcaaacaatatttgttccataactatgctactacaagaaacccagtaggatgcaaaagagtacatacagtaggtgtctcagtccgttcatgctgctrtaacagaatgcctgagactggataatttataaggaatagaaattgatttatcaccgagcatggtggctcatgcctgtaatctcagcaatttgggaggctgaggcgggcggatcacgaggtcaggagatcgagactatcctggccaacatggtgaaaccccatctctactaaaaaaatacaaaaattagctgggcatggtggcacgcctttgtaatcccagctacttgggaagctgaggcaggggaatcccttgaacccgggaggcggaggttgcagtgagccaagattgcaccactgcacaccagcctggtgacagagcaagactcttgctcaaaaaaaaaaaaaaaaaaaaaaattgatttctcacagttctggaggaggctggaagtccaagatcaaggcatca

SEQ ID NO: 3015 - DNA, 1007 bp, Homo sapiens
ccttctcttcatcatgggctcgttacatcaggtctacaagaaactgtcatgaattatttgaccccccgaccaaagactctgggcatctggctgatccttctcctgggaattcactttagtttgccatcaagttagctggccagtttggaatctcagatccacaggcattagtcaaatccaggtcagctgcgtccatctagattcagggacatgaatttcccgaggggtcctttgaaggcccctctctctgctcgaagtaaggagcaggcatggtgggtctcattatactccagcagcctttgccagatcatctccacaaacctcttcggtctccaacaacccgatccctctcacccttggtgtaggtgaatctctgacttgcttcaaatttccaggtggccgggtgtggtggctcatgcctgtaatcccagcactttgagaggccagggcaggaagatcatctgcgaccaggagtttgtgaccagcctgggcaacatagggaggccccatctctacaaaacaataaataaataaataaataaataaataaataaataaataaataaataactaggcatgatggtgcatgcctgtagtcccagccagcaggctaaggcagaaggattgtttgagtccaggagttcaaggctgcagtgagctatgattgtgccactgcactccaacctgggtgagagagtgagaccttgtctctaaaaaataataaaatcaaataaaaatgtttccatgggagagaaacatggcatctattgtcttcacacctcagtcaaacccagacaggaagtgccattttcacaytgtgtgagtaaagcactcatcacaggactgtgtttcatagctaccagctttcttgcttctcgtacctccgtctgaatttcagcccccactccctgtgtctcaaattgggatcgccaagctctctaacatagcttttaatttttattgtaaccagaatctaaaaaatttgacaaacacacagcacaagttaa

SEQ ID NO: 3016 - DNA, 567 bp, Homo sapiens
gcgaaatgatgctccagggcccccacggcccgcccccccaatgaccaggccaggcacatttgcaaattaatattgttcctggtaacgttgttccaagaattaccatcctctgcatattggatgctagtctccaactttcctttttcaygtggcacagagacggtccttgagctaccacgtctccaggaaagtcaactaggaaacccctgcggctcctgtttagagggctaaggcttatcttttggtttctgtgtggcttctgtttctaatgaaataaggagcaacacttgtttttaacattcttaaggaaagttaaatttcttttgtgttgtttattagagaatacggctaattctgcagtaatatatggggccctagaatccaagctgcacagcacaattatttatgtttgtgaaaaacaaaactgtggcggggcacggtggctcatgtctgtaatcccagcactttcggaggccgaggcaggtggatcacaaggtcaggagttcgagaccagcctggccaatatggggaaaccccatctctgctaaaaatacaaaaattagccag

SEQ ID NO: 3017 - DNA, 628 bp, Homo sapiens
tattgtgcaaccatttgctttatatttatattgttgcaaaaattttttgaattatcataatatgggtatgcctagggagtaaattatgaatgcaaatgtctattatttcttagataaaaataggctgagagtcattggcatagacccaaaaaaatttgggaaggaagagatcaaattggtatgagctggcatacttcacttaataytcattcaaaaaagaatgagtttaggcactgaaagcatgtggcatttgaataatcaaggaagaattggaaaggggttgctgatgcacctcagaagtaagcttgactgtgaaataatatgaattgaagcaggtgtcatagctgtcccttttattttagtctaagactggatttttttacctcaaaaagtaatagagaaggtacccatactacctacgtatttacaagaagataaagagttcttcagcatatgcccaaatttctcttcacacccaatacactgaagttgacaaaacatcaagatatccataattaatcagcaatattgtgattaaaaatacactactaacaatagattttctatattatgacattcaaaaggtcattctgaataattacaaaatatatgagaagatcataatcat

SEQ ID NO: 3018 - DNA, 1666 bp, Homo sapiens
ttaaagaaatcagatctttaacaaccaacgtaataaaatctgaacttgccctttttttttttttttttttttgagatggagtcttgctctgtcacccaggttggagtgcagtggtgcaatctcggctcactgcaacctccacctctcgggttcaagtgattcccctgcctcagcctcccaagtaactgggattacaggcacgtgccatcacgcctggctaattttttgtattttagtagagacagggtttcaccgtgttggccaggatggtcttgtctcctgaccttgtgatctgcccgccttggcctcccaatgtgctggtggcgtgagccactgcrcccagccctgaacttgcctttctaatagagaattagaacacggatttatctagtaatagcaatatctcaaatattcataaagaatgaggtgatccacaggaaaatcctagaaatctgcatagcactaaccaaaaataaggcatttgtactgtttgagatgataatgttagggcagcatgcaatatccagaacaggtaagcccaaacaaacagaaagcagattagagggtgccaggggcagaggggagaggagaatggccatgactggctaatggatagagggtttcctttgggggtgatgaatatgttttggaactagatacaggtgatgattgtgcaacatcatgaacatattgaatgccacttaattgtacactttaatatggttaattctgtgttatgtgaattttatcacaatttaaaaaaatgagttagggcagcatgtacctaccacactgtagaatgactgttacacaaaatgtgtgacataaacatacaaatgcagaaagatttatgctaaaagggccagctatccgaagccgcccattcccaaacacgtcaaattgtcatgatttaacatagtaccatcagacttaaaacaagagactttatacgtgggcatataatgtgattgaggagttttcaaacttaagagctcaaatacctagttagaattaaatcagtacaatgtgacccagaaaagtgagatgaagctgacaaaacaaaacaattagtttaaatatcaggagatgttgcctaatggtgaagtcaactatattctgaaaagagcagccaaagaaagttatccaaatcttataatttgggtcattaaactggatctgtaaaaaagaaaaaggatctggaaaatactctctgcacactaattttatactggcaagggcaggatacaaagacagaatgggtgttttagtttctgggtcctattgccaatggttctgcctttcttatggcttgctcataaagtctcaggtttgtttctgtcatttctactgaaggatttattttgtggagaatttgaaacatggaagatggaaaaacacttcaggaaaagaaaagaattacctcgaattaaattgctaaaacaaatcaaatttatatcgctgttggatatttttaaaatctttggtcttggcatagaatagttctgtgttttaactcattcttctggtcattttaaattaaaagcccaaataatgatgttatatagggtgagtaacatttcaggtcacataaacatatgacatcaccagctttccccatggataaacacactgaaggaaaataatgtaaaaaggagggaagaatgag

SEQ ID NO: 3019 - DNA, 1279 bp, Homo sapiens
tacaaaaaaaaatttccatacatttatttagtgttcacttttactttatgggagatagttataacagttgcttaaagtctttgtttaaaacttctgtttctgagatcatggatgctactatattttggaaatttttctaaatctttttttttttttcttttagacacaaggtgtctctctgtcacccaggctggagtgcagtagtgcaatcatagctcaccgcagcctggaaatcctgtgctcaagctatcgtcccrccttagcctcccaagtagctgggactataggtgcatgccaccactcctggctatttttctaattttttgtagagataaggtcttgctttgttgcctaggctgatctggaactcctagcctcaagcaatcctcctgcgtcggcttctcaaaatgcaagattatgggtgtgaggcactgtacctgactggttcacttctttgttaaacagctagtgtccgaaaaaattatttcattatgacattcttggacattctggagtcaatgatgtccagtaaaaagagtaatagtcaggacttctatactgttcccaaattatatagtcagacatgtgtgttcatttgtttttccatactgggaaaaccacagcagaatatcagctgtgcagtccactacaccaggaaactccataatagaactctttaccttcaattttttcttactagtcatttcttggctctgaatatttaccacccacttgtagtcatctccccttctctcagttcctcccaaccttccgctctcattcctcaatagtttcatgagtagattccatatttgggccagctctactcagaacgatcatcagcatcagcatcagcatcacctggaagcttgttagaaatgcaaattctcaggtactccccatagctactgaatcagaaaatctgggggtggggcactggaatcatcttgaacaagatttctattattattttgcgcactaaagtttgagaagcactagtctagaaattcattaagctcatttgactggttggaggaaaaatggggaggaggtaaaatttagcaagtgaaggacgggccagagttgatgtcaactaacagagaggagggtgatcagacatgacaactctcaaacagcaaggaatgggtatggcaggcactgaaaagctaatgcagctggtaaagtgtggttctaacattggctgtcagatcttttaatgatgtcagacggtaggcacatagggcaaaggaacatatttgtgcacagattatttcaggaa

SEQ ID NO: 3020 - DNA, 443 bp, Homo sapiens
aaaggtcatagagacttgaggggaagtttgaacgtgacaaagggaaagccatagcacatgtacttcaaagtttttggagaacagagaaaccatgatccaggagtgaaagccagctgttaaacaaaggagcataactcagctctgcagaaagaaaaaaggattcaagagcatgtggcctcagaggggcaggggacagagacagagacaataacaataacaatagttgcctgcctattaccctggggtctatgagactctctgttgaatttcatttactcctcttctttttttttttttcttttcartttgagggtttctgactcatgcaaccaatggtacacattgattataattccatggttggagctgctatcaaagtctggcctgatgtcagttgttaaagccaagagtcaagaactcaagagagagaggagaaggaggtc

SEQ ID NO: 3021 - DNA, 537 bp, Homo sapiens
tgcctgttgccactgaacattctaaatgtctaatccaaactctcttgctctggtgtcattcttattaagcaaactactgtttatggtttggcttcccttgaatatctatcttcggtaagagaaaatgttagtcatacagacttagagcatttcasaccacatgacaactccactattaattgggtaagtttaaaacccagtattctgatacttcagtgtgatgaacttggtatatatgagtctcccgccaaatggttccacccctgatatgcaggcaaatataaggcccatgagctttatgtgtaatatctgatttttctatgagcatttagcagtaaagaaaaagccaataaaggcaaatttcctattgaagagagacagaggggagaataaaaaggagaattcaagaagggggagagctggataacaaggaattaagcaataaatgaaatagggaaaacagagaccatgagtggagactgcaatttcagacatttaaagagcttggtggcctttttgtttttgctgaatttaaaa

SEQ ID NO: 3022 - DNA, 3049 bp, Homo sapiens
tggcaacgttgacatctagtgagagctctcttcctgggtggcagatggccatctccttgctataccctcacatggcagaaaaagtgagtgagctgtctggtgtctcttcttataaagacatgaattctttggaatcagagcccctcctgtatgaactcatttaaccttaattacttcctttctccaaatacagtcacatcgtgggttagagattcaacatatgaaatttgtgggggatgcaattcagttcatagcatcaattttgacaatttataaaaaggaaagatgttcagagcatattgttaatggaagccacaaaacagtatgtatagtatgattcatattttgtctaaaaaagcaaataatatgcgttcataggaagactgaaaagctatacagaacgttaacaaaggaaattaaggtaattttaagtttctgtatactttctgtagttttctgtattcttttttgtattccaaaatttagaaaactttaacatataataatttttaaacaggaaaattgtattttaaaaagatagtgtctggttagatcactgccctacgagggtatgatacctataaggagaaaaatgggttctagatttttggtaaatgagaaagaacaaatgaagagagagtctatagaatttgtgtaaacctgagttgaatattcgctttataatttggcaaattgagccttactctttatgaggttagtggttaaacatgtagtatctagaaatgacagtcatggtttgaatctcaacctggctgcttgctggctggctgtcctcgggcaagtttctctggctcagttggtctgcaagataggaagaacaggaatgcctattccaccggcttgttgtaaggttagggtgaattattacataaaagaccttagaacagtgcctagcacataaaagggtactcaataaattagcagttgttgttattgttattattatctttcttctaagactgcttggctttttgcattatggctttgaacaacatgccccctgatctctgggagcagcttcttaattgtttttagggttgctaaatttaggaaatgaaaatacaagacactcaagtaaatcagtatgtcccaaatgctgctgaaggcgtacttatactaacagattattcattatttatctgaaattcaaatttaattgggtgtcctgtattttatctggcaatctctattattatagatatgacgacattgaaaaggaacccagcaatgaagctttcttaatcagatccatctaagccaagcctgatcctgctgtacttctggtgctggtgttacctttatagtaagaaatatgtgaaataaattctaggtagatcctagcttggcacctggcatgtgatgtttgtacgaaaatcaggcaagagagcctgtcctttactagccatgtgactttgggaaaaattgcatgatctctttaagcttcaatgtcctcgtttgcaaaatggggctaataataagacctgctttgttgtgagaattgaataaaatgagctaatacatttagtagggcataatgtaaaatgtttggcatatggattaggtattcagctagtaatggctatcatcactactcattcaaaaacaaacaatacgtgaataaaatagatgttagagtctttaacctttttgtctttttcagggtttgtaaggcacaaaatgaggaggccactatgccttccctcaagaggttcacattggcaagtaccagagagcaaaagacaatgttctattagattctttctactgatgccggagaatccaatctgcaagacagaagaccttagaaatgtccagcaaagcatatggagaatccttgagccaaagtcacccatccaaggagctcatgtctctctgccatgcatagtcactggctggaatcagtctgtgagaagcatggctgtggtgcagtaaatgtgagcatggatttcagactgcagtagcaagactgttgtcaaccccagtccttgcagtgcagaagtgagaggtgcattgtcatggctgccacagccctatatcctcatgacttttcttacctggagaaatggtaaaaaacagggaaatggtctccacttcccacattcagatctggcatgagtgcatttaatttgcatggcaaactctagccacaagtaagccaagaaattgtaattcccctttccagctcccactaacacccgccctctgccccctgccccgccccccaacacacacacgatgggaaggcrcacgagaagcggaaatgaatactaggtgagttgggtgctgcttgatctcaaagtatcatgaaggtgaaagtgttgtagctgtctgatgagctggggccaataattgatttctgagagaaccaacatcactcccaggatcaaaagtgagttatctaacccctgttctctgggactcagccttatccttcttgcctctaggctttgtgtttgagacccagccttgattcttctctttctctggctttcaccttctttctccctaggggccagtctccttcctgacctcattctagggttcatgacttggctattggttgtcagacttctcagggctgccagcctgagttactaagcattgcttctccctgatccgtgtctttgtgccctactggcaaacaattttcctctgctctttgaagtctgccgtttccctatcagactgcacttttgcttatcacctggagcttatctgctctggcctcccctgacatcccttgtgagcctgattcaatttgtcacccccacagttttcccaatcttgctatggttaagagctgcaaaaggggtgggggagggggagagtctttatagaccaaacccaggctgtgggaatttcaagccatgaagcatgagcccagctgtagccagagtactcctgggtactgggagcaatagtagcatctcagctccaggttcacactgtcacccaatcactttgcatattaaactgctactgaactcttaaggaccagcagacacaccatttgttaaaatcacaatgc

SEQ ID NO: 3023 - DNA, 3049 bp, Homo sapiens
tggcaacgttgacatctagtgagagctctcttcctgggtggcagatggccatctccttgctataccctcacatggcagaaaaagtgagtgagctgtctggtgtctcttcttataaagacatgaattctttggaatcagagcccctcctgtatgaactcatttaaccttaattacttcctttctccaaatacagtcacatcgtgggttagagattcaacatatgaaatttgtgggggatgcaattcagttcatagcatcaattttgacaatttataaaaaggaaagatgttcagagcatattgttaatggaagccacaaaacagtatgtatagtatgattcatattttgtctaaaaaagcaaataatatgcgttcataggaagactgaaaagctatacagaacgttaacaaaggaaattaaggtaattttaagtttctgtatactttctgtagttttctgtattcttttttgtattccaaaatttagaaaactttaacatataataatttttaaacaggaaaattgtattttaaaaagatagtgtctggttagatcactgccctacgagggtatgatacctataaggagaaaaatgggttctagatttttggtaaatgagaaagaacaaatgaagagagagtctatagaatttgtgtaaacctgagttgaatattcgctttataatttggcaaattgagccttactctttatgaggttagtggttaaacatgtagtatctagaaatgacagtcatggtttgaatctcaacctggctgcttgctggctggctgtcctcgggcaagtttctctggctcagttggtctgcaagataggaagaacaggaatgcctattccaccggcttgttgtaaggttagggtgaattattacataaaagaccttagaacagtgcctagcacataaaagggtactcaataaattagcagttgttgttattgttattattatctttcttctaagactgcttggctttttgcattatggctttgaacaacatgccccctgatctctgggagcagcttcttaattgtttttagggttgctaaatttaggaaatgaaaatacaagacactcaagtaaatcagtatgtcccaaatgctgctgaaggcgtacttatactaacagattattcattatttatctgaaattcaaatttaattgggtgtcctgtattttatctggcaatctctattattatagatatgacgacattgaaaaggaacccagcaatgaagctttcttaatcagatccatctaagccaagcctgatcctgctgtacttctggtgctggtgttacctttatagtaagaaatatgtgaaataaattctaggtagatcctagcttggcacctggcatgtgatgtttgtacgaaaatcaggcaagagagcctgtcctttactagccatgtgactttgggaaaaattgcatgatctctttaagcttcaatgtcctcgtttgcaaaatggggctaataataagacctgctttgttgtgagaattgaataaaatgagctaatacatttagtagggcataatgtaaaatgtttggcatatggattaggtattcagctagtaatggctatcatcactactcattcaaaaacaaacaatacgtgaataaaatagatgttagagtctttaacctttttgtctttttcagggtttgtaaggcacaaaatgaggaggccactatgccttccctcaagaggttcacattggcaagtaccagagagcaaaagacaatgttctattagattctttctactgatgccggagaatccaatctgcaagacagaagaccttagaaatgtccagcaaagcatatggagaatccttgagccaaagtcacccatccaaggagctcatgtctctctgccatgcatagtcactggctggaatcagtctgtgagaagcatggctgtggtgcagtaaatgtgagcatggatttcagactgcagtagcaagactgttgtcaaccccagtccttgcagtgcagaagtgagaggtgcattgtcatggctgccacagccctatatcctcatgacttttcttacctggagaaatggtaaaaaacagggaaatggtctccacttcccacattcagatctggcatgagtgcatttaatttgcatggcaaactctagccacaagtaagccaagaaattgtaattcccctttccagctcccactaacacccgccctctgccccctgccccgccccccaacacacacacgatgggaaggcacacgagaagcggaaatgaatactaggtgagttgggtgctgcttgatctcaaagtatcaygaaggtgaaagtgttgtagctgtctgatgagctggggccaataattgatttctgagagaaccaacatcactcccaggatcaaaagtgagttatctaacccctgttctctgggactcagccttatccttcttgcctctaggctttgtgtttgagacccagccttgattcttctctttctctggctttcaccttctttctccctaggggccagtctccttcctgacctcattctagggttcatgacttggctattggttgtcagacttctcagggctgccagcctgagttactaagcattgcttctccctgatccgtgtctttgtgccctactggcaaacaattttcctctgctctttgaagtctgccgtttccctatcagactgcacttttgcttatcacctggagcttatctgctctggcctcccctgacatcccttgtgagcctgattcaatttgtcacccccacagttttcccaatcttgctatggttaagagctgcaaaaggggtgggggagggggagagtctttatagaccaaacccaggctgtgggaatttcaagccatgaagcatgagcccagctgtagccagagtactcctgggtactgggagcaatagtagcatctcagctccaggttcacactgtcacccaatcactttgcatattaaactgctactgaactcttaaggaccagcagacacaccatttgttaaaatcacaatgc

SEQ ID NO: 3024 - DNA, 1301 bp, Homo sapiens
tactttgaatgtaaaagcctgattgtgccacatggtagagaataaactgatctctctatgactaattcagattttatttggtcaataacatagtcgttgtagtattgggaagaaattacatgtttgtttttatttgatgtgtactttatttatgagctataagttacctcagccagtccagcaatttcccccagatctttgtaagtttaggtgaactgttagtcataaactttttcatggcataataattagtagagatacttaagcagaattgaaaatgtcatatcattaaaataaatatatttattaaatgttttttgagattctgaatgcccaygttaagtaacaaacattcatctagaacctatagccctgcttttttaaggctaacatatttacaattctgaagtcactaattttttgtttagtagacatttgtagttagatgtggacatgtataaaaagcagcatagttgagcaaagattcatttgaatggtataagaagggacatatggccttcagcttgactggacttcatagaaactcctctgcagaaaaatattgggtggtgatatctgattaacagcaatatagagagaaaacgtggggatgcagggaagtcattcatttatggaatggatgtttgtgattagcagacacccaagtaattctcaattaaaaaatagattcacaaaagtaattgagatattgggaaatggtttggtggttcctaaagaagtaaacatagagttatatggtaatataaactatagggtaatatgatccagaaattccattcctaggtatatattcaaaagaagacacacaggtggccaataaacatgagaaaaatgctcaacctcactaatcaatagagaaatgcaaataaaaaccacaagacaccatttcacaccagtcagaatggctgttactaaaaagtgaaaaacatcagatgctggagaggcttcaaagtaaaggaaatgcttatacactgttggtgggaatgtaaagtagttcagccactgtggaaagcagtctggagatttctcaaaaaacttaaagcagagctagtatttgacccgcaatcccactactgggtacatacccaaaagaaaataaaatcattccaccaaaaagatacatatatttgtatgttcactgtagcactattcacaatagcaaagacatggaatcaacccaggtgccatcaatggtggattaaaggaaatgtggtacacacataccataaaactcttacatagtcataaaaaataatgaaatcatgtcatttgtagcaaca

SEQ ID NO: 3025 - DNA, 666 bp, Homo sapiens
cgatatggataaacaagcacactgttgatgggactacattcctgaaagtcagtttggtatttattgtgtagcaatttgtaaaaggttcagggacttttacctcagctatctaatttccaggagattctattccaagaggaagccaagtgtgagaaaagatgtatacacaaggatgttaaaaagatagaggtatttaaggatattccagaaagcactatttataagaaataaactataaacaatgaaaatggtcatcattagagaactggttagtaatactacagtgcatataggttacattataatatagattgtgatatgctttggctctgtatccccagccaaatttcatctcgaattgtaattcccacgtgttgagacagggacctggtgggaggtgattggatcrgcaaggtttcccccatgctgttcttgtgacagggaattctcaaaatctgatggttttaaaagtggcagtttctcctgcacattctctctctctctctctctctcctgctgccacataagatgtgccttgcctcccctttgccttctgccatgattttaagtttcctgaggactcccaggccatgtggaactggttcaactaaacctctttcctttacaaattactcagtctcaagtagttatctttatagcagtgtg

SEQ ID NO: 3026 - DNA, 1303 bp, Homo sapiens
aatttaggagtgcattttcaagcaattagcgtatctgtaacaatcccactttactaggtcatgagtaaaggagcagatatataatggtgtagaaatacagtatttgttatcatgttaaaaaataaaaatgtttaaacacaagaatgtaaacaaaaatagaaaaatccactggcttgcaaaatgattcaatagaatcatttttaaataattcacttactttacaacaaaataatacaaatgttgacctactggttcgccccgaaaacacccagaaatccctacataacgcctgggacaaaacataccacatcaaattatagaaacaatattatggcaatattttaatgatgtcaaatgttgcatttaaaagaaaacagagagggctcatgcctataattccagcacggtgggaggatcacttgaggctaggatttcaagaccagcctgggcatcaaagaaagaccccatctctaagaatggatggatcgatggatagataggtagatagatacagatagatagatgggcatggtggggcacacttgcagtcctagctactccagaggctgaggcgggacaactgcttgggcccaggagttcgaggctgcagtgagctatgatcatgccactgcattccagcctgaggaacaaagtgagaccctgtctctgaaaaataaataaataaactgggcggtgtggctcatgcctataatcccattactgtgggaggtcaaggcaggacaatcacttgaggccacgagtttgaaacyagcctgggcaacatggtgagaccccatctctacaaaaacaaaataaaataaaataataaaaaataaaataaaatattaactgggtgtggtggtgcacaccagtagtcccaacagctactccagaggttgaggcaagagcactgcttaagctcgggaattcaaggctgcagtgacctatgataatcccactgcactccagtctgagtgacagagtaagaccctgtctctaaaaaatgaataaaatttaaaaataatacaaggaaacaaagaatttgttattattgctgtatatcttgctacatcttgcttaggacaaaggtgtaagaaaagctaagatgaaaagacaagctgaaggaagagcaagaaataatggcatccatagaattaatggcaatttttttatcaccttacttttacacgcccataacattttgaacaccacacaaccagtttagttgttttaagatttgtgaagttcccgccatactgattgtggattagagccatgtgtcacttaatgacattctgagaaa

SEQ ID NO: 3027 - DNA, 968 bp, Homo sapiens
gcatgatatttactgtcctggttatttacctattgtctctcagctccaaacctacccttttatgctgtgctctgtgacaatggggccaagattctgcaaacttcatttccaagactcctttgctagctccttcctgttctgttcaccaaaccggaaggcagaaaggtaagaaaagggccttccttcctatttcccagctgttatcagtattgctccagctgtaacagaracttaattccagtctctagcttctttcaacagtctggtgaaaagccatagaggtaccagcagcagtgggttgtggctctttggcagtcagaatatcaaccttgccatgctcactcatcctctggacctcactgcctgggcctatcaatcacctgtcaggccaaggatctgagtaccagctacccaaagcttatgcccagaggtccaggcaccagccctccaggagatctccaccaagctcctagttctggtaacactacctccccttttgttctcccagacttagaggtgatagctacttcctctagttattaactctggggtacctcagcatgccttttttgttgttgttcttttattcttctaacacccaattatgcaattctcgctattgaatgttctctgtttataacacctactacaatttattttccttgtgactgcaccttgactgatagaccctccaaaagagtgttcagaggattaaataagatagtggacataagctcctttgtacaccgtttgatagacagctgttttcttttcctattcccaccttttcttcccttcccctacaatttaaacttgatggggcagtaaggtgtcttttcaaaataagaaggtatgattaaaatcttcccacatgcagcacaatatctagctttctgtgcacatatagttttacatatacatacataaataagaccagtctttctttcttctctgagtgtctctatgca

SEQ ID NO: 3028 - DNA, 968 bp, Homo sapiens
gcatgatatttactgtcctggttatttacctattgtctctcagctccaaacctacccttttatgctgtgctctgtgacaatggggccaagattctgcaaacttcatttccaagactcctttgctagctccttcctgttctgttcaccaaaccggaaggcagaaaggtaagaaaagggccttccttcctatttcccagctgttatcagtattgctccagctgtaacagaaacttaattccagtctctagcttctttcaacagtctggtgaaaagccatagaggtaccagcagcagtgggttgtggctctttggcagtcagaatatcaaccttgccatgctcactcatcctctggacctcactgcctgggcctatcaatcacctgtcaggccaaggatctgagtaccagctacccaaagcttatgcccagaggtccaggcaccagccctccaggagayctccaccaagctcctagttctggtaacactacctccccttttgttctcccagacttagaggtgatagctacttcctctagttattaactctggggtacctcagcatgccttttttgttgttgttcttttattcttctaacacccaattatgcaattctcgctattgaatgttctctgtttataacacctactacaatttattttccttgtgactgcaccttgactgatagaccctccaaaagagtgttcagaggattaaataagatagtggacataagctcctttgtacaccgtttgatagacagctgttttcttttcctattcccaccttttcttcccttcccctacaatttaaacttgatggggcagtaaggtgtcttttcaaaataagaaggtatgattaaaatcttcccacatgcagcacaatatctagctttctgtgcacatatagttttacatatacatacataaataagaccagtctttctttcttctctgagtgtctctatgca

SEQ ID NO: 3029 - DNA, 968 bp, Homo sapiens
gcatgatatttactgtcctggttatttacctattgtctctcagctccaaacctacccttttatgctgtgctctgtgacaatggggccaagattctgcaaacttcatttccaagactcctttgctagctccttcctgttctgttcaccaaaccggaaggcagaaaggtaagaaaagggccttccttcctatttcccagctgttatcagtattgctccagctgtaacagaaacttaattccagtctctagcttctttcaacagtctggtgaaaagccatagaggtaccagcagcagtgggttgtggctctttggcagtcagaatatcaaccttgccatgctcactcatcctctggacctcactgcctgggcctatcaatcacctgtcaggccaaggatctgagtaccagctacccaaagcttatgcccagaggtccaggcaccagccctccaggagatctccaccaagctcctagttctggtaacactacctccccttttgttctcccagacttagaggtgatagctacttcctctagttattaactctggggtacctcagcatgccttttttgttgttgttcttttattcttctaacacccaattatgcaattctcgctattgaatgttctctgtttataacacctactacaatttattttccttgtgactgcaccttgactgatagaccctccaaaagagtgttcagaggattaaataagatagtggacataagctcctttgtacaccgtttgatagacagctgttttcttttcctattcccaccttttcttccyttcccctacaatttaaacttgatggggcagtaaggtgtcttttcaaaataagaaggtatgattaaaatcttcccacatgcagcacaatatctagctttctgtgcacatatagttttacatatacatacataaataagaccagtctttctttcttctctgagtgtctctatgca

SEQ ID NO: 3030 - DNA, 636 bp, Homo sapiens
tcacagcagccccctgagcccagctctctaacttgctaagctcctctccggaaaggaaattaaccgtgggtgccttcccaggcttgggtcaggaggctgacatttcacaaaatactaaacgtatctacctgcccagtgtctccatctgtatgtccagcctggctgttcctkctccgatgaaggttcatcaatagtcacacctgcaatgtttcccgaatgacccctgaaaacccagacaccctggacatacccagcttctcaggaactgtttccagaggggatttgtttcgaaaatgcccacaggcataagaaaaggctcataaatgacaggcaagagaagcaagaacaaaacaaagaattgattccagtttttagaaatacaaaaaattatctaggtttggaagtgcagtgaccttggaagttactacatctctctgagctcatccccttgcctgtcaaagggagtgatacaggcactacctcctagcacaggcagcggtggagcactctgggcacacagcaagcattcagtgaacactatactaaagtggcatgttggtgctgttaatgctcaaactgtggcaggcaagcaaggtctttcacaccccacacccctgagtggctcagaagatagtg

SEQ ID NO: 3031 - DNA, 636 bp, Homo sapiens
tcacagcagccccctgagcccagctctctaacttgctaagctcctctccggaaaggaaattaaccgtgggtgccttcccaggcttgggtcaggaggctgacatttcacaaaatactaaacgtatctacctgcccagtgtctccatctgtatgtccagcctggctgttcctgctccgatgaaggttcatcaatagtcacacctgcaatgtttcccgaatgacccctgaaaacccagacaccctggacatacccagcttctcaggaactgtttccagaggggatttgtttcgaaaatgcccacaggcataagaaaaggctcataaatgacaggcaagagaagcaagaacaaaacaaagaattgattccagtttttagaaatacaaaaaattatctaggtttggaagtgcagtgaccttggaagttactacatctctctgagctcatccccttgcctgtcaaagggagtgatacaggcactacctcctagcacaggcagcggtggagcactctgggcacacagcaagcrttcagtgaacactatactaaagtggcatgttggtgctgttaatgctcaaactgtggcaggcaagcaaggtctttcacaccccacacccctgagtggctcagaagatagtg

SEQ ID NO: 3032 - DNA, 1946 bp, Homo sapiens
taaagtcttgtcatactgaaactcgtactgaaatgcttggtggctcacatttgtatctgcttgataaccaaaacatagcatataatcattcaacccactcaactaccatgtattgagcacctataatttgctagatacagcctgctcctctcaaaacatactcctttggggctacatctactcaatttcaaattcaggtaattttggaaaaaaagttatgtggatttytaaaaaaaaaaaaaaaaaatccctagaaatcactaagcaaaattcatttaaccacaacaagtttaggcagtatgttttgttttgccttttttttttcttaacacaggaaaactgctcttaccttttgagcatttagatgttttgaaatgccataaacattcacaaatgaatatttcactgtgcacacgtgctgtggattcaggggccacattaaagtgttgtgaggaatgatatggacgtgaaatagcatactttagagaaaccttttctaagtccacactgtgcactgctgaaaagtggataaaatgcagagaggcaattgctggttctgggaaaatagtggtaggtgcctgaggcactccctgatggaggcccacactcatctttggcagagaggccaactttttaaaaggctacctccctcacacactttatccactttctccaccaactctccttttgctcatttccttctctgcccctccctcactcgcttacctttgccaagtctgtaagccctgccagggttcttgttgaacccttttttaatgctgtgataaaatgtgcttatgactccacttaatagaggcctgaagggtaattctggtgactcagggcagatggtaaattagcggtaagacaatggaaatccagcatccctcttcagaatctgtggctttcaccaacacaccacactgcctcttctcacagttccagccctgtcatatttgccattgtgaacttttaatctagaaatgcatcttggttatgtaatcatctcttacgtcttgcactcactacattggtgccagccagtatttttatacacagcataagtgtgtacacttcagcatcaaatgaggcagatttctaagaccttaacagctaagcgactctggtgaattgcttgcaaataaacgtgtgtgtgtgtgtgtgtgtgtgtgtataaaaatcatatgatagtcactgtgggtagtttgtataggtagacatagcatctgttaaatagagttccatatttcccagttctcacgtaccacaaataaaacctacaaaaatgataatttttcaaacattgaatcctctatctctgtgtaatgaggcatgtagagaggaggaaaagaatttttgtgctttcttgcctttggtgaaaattctccaaggagtaatttcatctttaagtgaaaagttttctaccaggtgattcttcaagcttcagaaatcactaaagcctgggttcagacatgagtgtgcacatgggttcacatgcacacaccgcaacacacacctatcacatacgtaaggcataaggcaaaagaatgttaaaaaatgaatctaatggttttttaattacattgtaatggaatttaaagcagcctggctgtaagatatatttttaaaatctgctatcccttaaagattttgcccactgtcctgcaatcagcatgcttcattctcctctcaatactcaggcgctgggctgctatggcaggcagtgagggtggggaccttaggaagccaggactgaataccacagaacactttcccaatgctgcttaaaaccctagttttcaacagcctggtgtcttttaggtctccactctaacattttcaggaatttattaacctgcacagttgaattaatttacccaataaattacaagtgaatcaactatgctaagcagaggtctacagatgtaaaacaacactcagaatat

SEQ ID NO: 3033 - DNA, 1277 bp, Homo sapiens
tataacagaaattgtgtcaaagaagagtttaaattgaaggtattattttcttcaagaaaatggcacactacttytaacaagttgtaaggatgaggggctatgtcaatgtagtctgtaattgcaatgagcctgtgctctgttgcagcttttgtacttaatttaatcactagcttcacatgtttttgagggcaagatcaggaatttccctaaattatggcttgggacctgagcattggtaagactctggacatcactatgtttttcactcatgttgtcagatttctcaacggacagagatttctgtctgcttcacaggcctgctgtctatattttgagatactgaagaattttctttgctctccgctctgcccctaactttccacatctcagaagatagatatatattatttcagctttctgggttttgcagctttgcttttggtaaaagccctgtgaacctccgggctttcagttatcctgccctgtctccatcctttggtaggctgctgccattgctctacctaccctatgtgagttggggcgacctctatcaattttcattccctgtgtttagcctttggtgttcttctgccttgcaatcagtgatggcccagcgtggctcagaggattttttactctgctctcttcctacattttgaagtgtacttggtcaaatctcagtgcatttcaggaggatttctttcagacctcctgccctgcccctgccgtttgctacactattgacatgatttagcgaaggtcaaatggggaattggtgtgtagctgacttgttcttttataaggcataccagaattctagactgttagaccagcccacacagtactgttaaaagtttattaacacttcagcagtttttccttattcctattaattatgagtttgttcttcctgctatgtttccaggtatcattaagatttttttcctctctcttaccgctcataaattaaaaaaaaaacaaccattatttggtagcttttctgtttttgtattggttagagtgagagtgacaatctcttctgactacaacctaagtggacatcacattatttttagacttttgaagttttttgtttgaaagatattttatttctttctctaccatatttaaaggctgaagcaaataaatacagcaatgataaacacactttaaactgaattgaggttttgagagcttaagaggttttattctattttatcttattttttaatgtttgagattcgctttattttttttcctaggtttattgagataaa

SEQ ID NO: 3034 - DNA, 1330 bp, Homo sapiens
tgcatatgaatcagatgtctgttagctcgttcttggtctcaaacctaaagtcagcaactgctttatttatttggcttcatgacccagattagatttcctgttctttcaacttgtaatacgtgtagctcacactcacacagaatttggggtagagtgtaatgatcctcccatccattcacaccatcttttattttggccagttgctggggcaaaattgccatgtctatcacctacagcagaaatttggtcttccagccaaatattaggaagcacagtagtgactgctatggcaacagactaaacagaccatctaaaaggtagctggaagaagaggtaagctatttcaaatacagagaggtaggaaagtttaaatttctcaaatcctaaaatatgaaaaccaagagcatacacatcatagttatggcaatcttgatgaaaatataaataattattttctattattgttttatcaatattactttctaagaatttgttaaatgacttaatctcagcttctaatgagctacaaattcaaaagaaaatttcaaaataataacgcttgtccagtttccaaatgctgactccttaaataagattacatacaaataatttgaaatgatttcattcctttagagttgttcccatctagccttccagttgaaaagaaaaatattagcagcaccaaatgtaagcaacaaaggaagaaaggacaccacctgtccaaaccctaccttcagtttttttctctgaaagcttttagttttcttggtccttccattataaacaaacacacacacagacagatacacacacatacatgcacacacacacacacatacacactastttaccaactttttatcaggacaaagtttttttagtcacttgtacaaaagtataagatgattgcctgctgtatttgtggggttggctgaaactttaaaactgatcacgaagagaaacagcatttatggttcaccgactagttctctaaaacagtgaatctaagccctgtctggctcagtcttctttataaaaaatatttttttaacattcttgtactatcatgaaattttcagaacatataacttacacacatacctaattttaaatccctatattgttctaattacataagaacaatataatctaattaatccctatattgttctaataagaaatttaaaaggaatttaaaataaaataagtatttcaatattcagatcctcaaccatgatgacactagatgatggggactaataagattctcattatcaaccaatatggatttataataagtaggacaatattcatctggttattgcagatg

SEQ ID NO: 3035 - DNA, 1330 bp, Homo sapiens
tgcatatgaatcagatgtctgttagctcgttcttggtctcaaacctaaagtcagcaactgctttatttatttggcttcatgacccagattagatttcctgttctttcaacttgtaatacgtgtagctcacactcacacagaatttggggtagagtgtaatgatcctcccatccattcacaccatcttttattttggccagttgctggggcaaaattgccatgtctatcacctacagcagaaatttggtcttccagccaaatattaggaagcacagtagtgactgctatggcaacagactaaacagaccatctaaaaggtagctggaagaagaggtaagctatttcaaatacagagaggtaggaaagtttaaatttctcaaatcctaaaatatgaaaaccaagagcatacacatcatagttatggcaatcttgatgaaaatataaataattattttctattattgttttatcaatattactttctaagaatttgttaaatgacttaatctcagcttctaatgagctacaaattcaaaagaaaatttcaaaataataacgcttgtccagtttccaaatgctgactccttaaataagattacatacaaataatttgaaatgatttcattcctttagagttgttcccatctagccttccagttgaaaagaaaaatattagcagcaccaaatgtaagcaacaaaggaagaaaggacaccacctgtccaaaccctaccttcagtttttttctctgaaagcttttagttttcttggtccttccattataaacaaacacacacacagacagatacacacacatacatgcacacacacacacacatacacactagtttaccaactttttatcaggacaaagtttttttagtcacttgtacaaaagtataagatgattgcctgctgtatttgtggggttggctgaaactttaaaactgatcacgaagagaaacagcatttatggttcaccgactagttctctaaaacagtgaatctaagccctgtctggctcagtcttctttayaaaaaatatttttttaacattcttgtactatcatgaaattttcagaacatataacttacacacatacctaattttaaatccctatattgttctaattacataagaacaatataatctaattaatccctatattgttctaataagaaatttaaaaggaatttaaaataaaataagtatttcaatattcagatcctcaaccatgatgacactagatgatggggactaataagattctcattatcaaccaatatggatttataataagtaggacaatattcatctggttattgcagatg

SEQ ID NO: 3036 - DNA, 707 bp, Homo sapiens
ttatcaatttatagctggttgtcagaagttcccgaggcctgtactagtgagtgatgtctgaaggtcaggggtggtcttgggggactaagcccccaacccctgggatctgacgctgtctccaggtagagagtgtcagaacttaactggaggacccccagttcatgccggtgtccatgtctgggcagtttgctcggtggtggggagaaatccccacacatttggtcgtagaagccttctgtgttgattgttgtggcgyggcgtgagaacagaagaactgttggagttttttcaccctcagagagtgttctcacttctggctccacttcctcccaaggtgtctggggcacgagttctgccggatggcagcgtaactggctttggtgttgatttatgagtcaccactggggtgagatgagggaggcagactcaagtacgtgattacagggcaccaagagaccacctgcccaacagatcttcactcattgccttaccaaacctgaaattaccttagcaaaagcaagtaaatgtggccactctagggccccgacctggattcctagccagaccagccactggtgctctctatctgatgcagccaggttggtctctctcaacctccccaaacatgcccatgccttcctgctcctctctacctgggcatgggctatgcccacctccaggaggtccaccatgaaggcgtgagccca

SEQ ID NO: 3037 - DNA, 707 bp, Homo sapiens
ttatcaatttatagctggttgtcagaagttcccgaggcctgtactagtgagtgatgtctgaaggtcaggggtggtcttgggggactaagcccccaacccctgggatctgacgctgtctccaggtagagagtgtcagaacttaactggaggacccccagttcatgccggtgtccatgtctgggcagtttgctcggtggtggggagaaatccccacacatttggtcgtagaagccttctgtgttgattgttgtggcgcggcgtgagaacagaagaactgttggagttttttcaccctcagagagtgttctcacttctggctccacttcctcccaaggtgtctggggcacgagttctgccggatggcagcgtaactggctttggtgttgatttatgagtcaccactggggtgagatgagggaggcagactcaagtacgtgattacarggcaccaagagaccacctgcccaacagatcttcactcattgccttaccaaacctgaaattaccttagcaaaagcaagtaaatgtggccactctagggccccgacctggattcctagccagaccagccactggtgctctctatctgatgcagccaggttggtctctctcaacctccccaaacatgcccatgccttcctgctcctctctacctgggcatgggctatgcccacctccaggaggtccaccatgaaggcgtgagccca

SEQ ID NO: 3038 - DNA, 1719 bp, Homo sapiens
taatggaacaatcaataaaatgaaaatgaattagttatagatgccaataaatttgagaattgagtatgagacaaaggtatgagacaaatagttcaagcccatctgaaaaacaatcattgctcaatataaggtgctggcaccactgactctctatccagaagaaaataaaactggatccttcccttcctgatagaatagtcactgtgggccaaggagaacaaggagacagctgtataaatggaggacaaggataacaacgtatttgacagaataackgatgggagagacagaaacacacagtcatgaagaggagaggtactgggccacattcgtctatctgctagaggaaaaaatgtctgtttagggaccagactgtaagtatcaaaaagggaagaaattgctgtagatcgggtggccacacataccagtttcctgggtcaatcctcacgtgtacctgctgtgtcagtattcagtggagttggtgccctgtttgactttccaaagtgtcttggtgaagacaacaaattgtgctgtcacccttcctatgaaacatcttcctggagagtgtggtccaaactccaggtgaaggcaatgaccttaaacagtaagaggggcatcttgtcttccaatatatgaaagaaaaaaaatggcagaagtgatgctgaagtcttcagtataggatgcccaagactccacagtcagctttagctccttgttcagtgggaagagaacaggctgaggcatgccctacctgtaacattcttcaaaacatgtcaggagcttccacagtgtaaaacttccaccctttcccatcggggttttggggaggcaactgaagaaagaatgctattgtgctctgtgagcacctatcttgatatagaacaaggatcaaagttaattttctgaaatagtaaatgttagtcattacgccaggtagattaattccaaatcaagagacatatgacttgataagaaggaggcaaaaggaagaattaaagataacagggacagacatggcttataatttatcccaggactcaagaggtgggataccaaatctattcctttttttagcaactcctttaatgagaatgccctagatcctgaccctctagcaatattacagactagttaatgcatacaaataaaatgtttcaaaaatcagtgaggggatatagctggtgttgtaaggggtagaactggaaaaaaactggctctatggtaatggaaatagaagccgcatgtaaagtttgaggatagtatgtaaggaagtgaagattgcgagggtacacaactctttcaagaccaacaggaaagaatgtgatagaaagtgaatggacaggagggtgcagtcagaaaagaaattttttttttttttttttgagatggagtctcattctattgcccaggttggagtgcagtggcgtgatttcagctcaccacaacctccgcctcctgggttcaagcgattctcctgcctcagccttctgagtagctgggattacaggcatgtgccaccatgcccagctaatttttgtatttttagtagagacatggtttcactatgttggccaggctggtctcgaactcctaacctcatgttcctcctgcctcagcctcctaaagtgctgggattacaggcgtgaggcaccgcacccagcgagagaaatttcttttacattagaaataactaagtgcatttaaatgtgaattgataag

SEQ ID NO: 3039 - DNA, 1719 bp, Homo sapiens
taatggaacaatcaataaaatgaaaatgaattagttatagatgccaataaatttgagaattgagtatgagacaaaggtatgagacaaatagttcaagcccatctgaaaaacaatcattgctcaatataaggtgctggcaccactgactctctatccagaagaaaataaaactggatccttcccttcctgatagaatagtcactgtgggccaaggagaacaaggagacagctgtataaatggaggacaaggataacaacgtatttgacagaataacggatgggagagacagaaacacacagtcatgaagaggagaggtactgggccacattcgtctatctgstagaggaaaaaatgtctgtttagggaccagactgtaagtatcaaaaagggaagaaattgctgtagatcgggtggccacacataccagtttcctgggtcaatcctcacgtgtacctgctgtgtcagtattcagtggagttggtgccctgtttgactttccaaagtgtcttggtgaagacaacaaattgtgctgtcacccttcctatgaaacatcttcctggagagtgtggtccaaactccaggtgaaggcaatgaccttaaacagtaagaggggcatcttgtcttccaatatatgaaagaaaaaaaatggcagaagtgatgctgaagtcttcagtataggatgcccaagactccacagtcagctttagctccttgttcagtgggaagagaacaggctgaggcatgccctacctgtaacattcttcaaaacatgtcaggagcttccacagtgtaaaacttccaccctttcccatcggggttttggggaggcaactgaagaaagaatgctattgtgctctgtgagcacctatcttgatatagaacaaggatcaaagttaattttctgaaatagtaaatgttagtcattacgccaggtagattaattccaaatcaagagacatatgacttgataagaaggaggcaaaaggaagaattaaagataacagggacagacatggcttataatttatcccaggactcaagaggtgggataccaaatctattcctttttttagcaactcctttaatgagaatgccctagatcctgaccctctagcaatattacagactagttaatgcatacaaataaaatgtttcaaaaatcagtgaggggatatagctggtgttgtaaggggtagaactggaaaaaaactggctctatggtaatggaaatagaagccgcatgtaaagtttgaggatagtatgtaaggaagtgaagattgcgagggtacacaactctttcaagaccaacaggaaagaatgtgatagaaagtgaatggacaggagggtgcagtcagaaaagaaattttttttttttttttttgagatggagtctcattctattgcccaggttggagtgcagtggcgtgatttcagctcaccacaacctccgcctcctgggttcaagcgattctcctgcctcagccttctgagtagctgggattacaggcatgtgccaccatgcccagctaatttttgtatttttagtagagacatggtttcactatgttggccaggctggtctcgaactcctaacctcatgttcctcctgcctcagcctcctaaagtgctgggattacaggcgtgaggcaccgcacccagcgagagaaatttcttttacattagaaataactaagtgcatttaaatgtgaattgataag

SEQ ID NO: 3040 - DNA, 1719 bp, Homo sapiens
taatggaacaatcaataaaatgaaaatgaattagttatagatgccaataaatttgagaattgagtatgagacaaaggtatgagacaaatagttcaagcccatctgaaaaacaatcattgctcaatataaggtgctggcaccactgactctctatccagaagaaaataaaactggatccttcccttcctgatagaatagtcactgtgggccaaggagaacaaggagacagctgtataaatggaggacaaggataacaacgtatttgacagaataacggatgggagagacagaaacacacagtcatgaagaggagaggtactgggccacattcgtctatctgctagaggaaaaaatgtctgtttagggaccagactgtaagtatcaaaaagggaagaaattgctgtagatcgggtggccacacataccagtttcctgggtcaatcctcacgtgtacctgctgtgtcagtattcagtggagttggtgccctgtttgactttccaaagtgtcttggtgaagacaacaaattgtgctgtcacccttcctatgaaacatcttcctggagagtgtggtccaaactccaggtgaaggcaatgaccttaaacagtaagaggggcatcttgtcttccaakatatgaaagaaaaaaaatggcagaagtgatgctgaagtcttcagtataggatgcccaagactccacagtcagctttagctccttgttcagtgggaagagaacaggctgaggcatgccctacctgtaacattcttcaaaacatgtcaggagcttccacagtgtaaaacttccaccctttcccatcggggttttggggaggcaactgaagaaagaatgctattgtgctctgtgagcacctatcttgatatagaacaaggatcaaagttaattttctgaaatagtaaatgttagtcattacgccaggtagattaattccaaatcaagagacatatgacttgataagaaggaggcaaaaggaagaattaaagataacagggacagacatggcttataatttatcccaggactcaagaggtgggataccaaatctattcctttttttagcaactcctttaatgagaatgccctagatcctgaccctctagcaatattacagactagttaatgcatacaaataaaatgtttcaaaaatcagtgaggggatatagctggtgttgtaaggggtagaactggaaaaaaactggctctatggtaatggaaatagaagccgcatgtaaagtttgaggatagtatgtaaggaagtgaagattgcgagggtacacaactctttcaagaccaacaggaaagaatgtgatagaaagtgaatggacaggagggtgcagtcagaaaagaaattttttttttttttttttgagatggagtctcattctattgcccaggttggagtgcagtggcgtgatttcagctcaccacaacctccgcctcctgggttcaagcgattctcctgcctcagccttctgagtagctgggattacaggcatgtgccaccatgcccagctaatttttgtatttttagtagagacatggtttcactatgttggccaggctggtctcgaactcctaacctcatgttcctcctgcctcagcctcctaaagtgctgggattacaggcgtgaggcaccgcacccagcgagagaaatttcttttacattagaaataactaagtgcatttaaatgtgaattgataag

SEQ ID NO: 3041 - DNA, 432 bp, Homo sapiens
attgttcctcccacatccatccctgcgtccagattgtgcactcagggatcacgtctgtctttttcaccctggtaagcagcaccctatgggtgttcagtttaggtctgttgaatgtataaccaaaggactcacccttctctaacaaacacactttcttttgagcacctcctatcttcctggccccatactagggtactcatayatacaaactcaatgtaattcttacaacaaacactgaggcagagagaggttatgcagcatgtctgaaaccacacagctgaggaatggggacatgggtcagaacccaggcattcagacttcacagtccttgctttccactagaccacagcctctagcccacccttgagtgtctttatctgggggtgggggtcccagcccaaggtgtctccaggacacgagtgccctggccaa

SEQ ID NO: 3042 - DNA, 649 bp, Homo sapiens
gaaactatcacgtgaaaagtgcagatttatgaaccatgccaaggccttgggtgtcaaggtagtccatgaagccaaactgaaagtaacaatcaagcctttattcacttactgtagtaagagtgaggcaccagcccaccagggttccttttttttttttttcatatgcaggtgaaggtctaatgacatgcagggcaggcaaagggaactgtctaactgcccaggagccacaaacaagaggctcctgcctttttataaaccccaggggtctccagagcaagaaacrgagagaactaagtgtaaaaagtactgagtcagagtggagaaaagtggcttagttggaatcctccactaagaaggtcttggcagagtctcctgaagagtacctcagctgagtccctctaataaagaggcctccaaatggcggcgcctgggctagggatactcgtgggaatgctcagcctgaggtaccctgaattgttgactgcgactctctacagaaaacagtaatgactggccgtgcaccaagtctggtgtggacaaggcagttttcccccgaggcctaccgggcacagccctgagattgcctctggatcacacagaggattctggcctggtgccagagtcttcaaactaatagtgttagatcaaa

SEQ ID NO: 3043 - DNA, 649 bp, Homo sapiens
gaaactatcacgtgaaaagtgcagatttatgaaccatgccaaggccttgggtgtcaaggtagtccatgaagccaaactgaaagtaacaatcaagcctttattcacttactgtagtaagagtgaggcaccagcccaccagggttccttttttttttttttcatatgcaggtgaaggtctaatgacatgcagggcaggcaaagggaactgtctaactgcccaggagccacaaacaagaggctcctgcctttttataaaccccaggggtctccagagcaagaaacagagagaactaagtgtaaaaagtactgagtcagagtggagaaaagtggcttagttggaatcctccactaagaaggtcttggcagagtctcctgaagagtacctcagctgagtccctctaataaagaggcctccaaatggcggcgcctgggctagggatactcgtgggaatgctcagcctgaggtaccctgaattgttgactgcgactctctacagaaaacagtaatgactggccgtgcaccaagtctggtgtggacaaggcagttttsccccgaggcctaccgggcacagccctgagattgcctctggatcacacagaggattctggcctggtgccagagtcttcaaactaatagtgttagatcaaa

SEQ ID NO: 3044 - DNA, 1125 bp, Homo sapiens
attaatgaggagaatgaggttaataaaatgcgaagtaagctataatgtcattatagggacatctacaaatccgggacaatgctaaaaaagtttcaagatggtcattcaatagttaaaagtttgggaaatgttaagttaggcaaagataagcagacatctttcctgaaggatttctcatgcacataacatggttgtgcaatgttaaactctaggattaagatttaccatgtagtggttcatgaaaatattggctcataaaagtctttgttgttgctgttgctgttttcagacagagtctggctctgtcacccaggctggagtgcagtggaacagtcatggctcactgcagcctcgatctcctgggttcaagtgatccttcctcctcagcctgccaagtagctgggaccacaggtgcatgccacyacatccatctaatttttggatttttagtagagatggggttgtgccatattgcccaggctggtctcaaacttctgagctcaagcaatctgcccaccttggcctcccaaagtgacataattatgggtttgagccactgttcatatcattcttttaataacttcaaggctagtgatttcaagagaagtagtttgggaaaagcagtttctgaagatcagtcagagcaggcaggtaaaagagaggtaaagattttggaggttgctggtcaggcaaggtgtgagatgatatttttgaaatgtatgggcagaaagtttattattagtagtagtagtattatccacctaggacattctaaccagtctttcaacccctcaaaaggcgtatccaatatcaaccaggagtggaacaaggaaagactcaagtgttgttatctactttgataccaagtcattttcccctattttatacattttattttcttcattgcatatatttctcaacattatcttatacatttacttatttattttcttactctcccattagattatttagcccacgtgcactaaagcaatgcctggcatgagaaagtaggcattcagtctacattctggaatgaataatgtaataaaaaatgtgataatgtatagcttgaggtttttttgaaaaagcgtgtattttgcttatttattcagttattgattg

SEQ ID NO: 3045 - DNA, 1227 bp, Homo sapiens
tgcattaggtatttgtcctaatgctctccctccccttgctccctaccccccgacaggccccagtgtgtgatgttcccctccctgtatccatgtgtcccatttttcaactcccacttatgagtgagaacatgyggtgtttgattttctgttcctgtgttagttttctgagaatgatggtttccagcttcatccatgtccctgcaaaggactaaactcattctttttttatggctgtggatactggcatttttgtttcttgatatttttctacatacttttaaaaacttagctgagatcatacggcataagtgaggttttttctcttcatgtatcagaaattctcagaagtcatgaagaacatagttgccattttgaagacataatcatgcttcattacccaaatacgccataatgggcttaactgttttctctcttttgtatatctgtacactcttggaatgttttattattgcaattaatgaaaaaccatccctgtcaaaatatgaaagaattttacctttatttatttgtgtgactatgtgtacatctcaattttgagtgccgacatcagacattctgatttatctaatatttgttttctttgatgtagtccctcaaaaattaagaggagtatacaaagtatgctcttaatgtatacaaagtatcctcttaatgtatctagagcataaaaagaacacctacaattcaatcataaaaatacaggccaggtacagtggctcgcacctataatctcagttgtttgggaggctgaggcacgaggatcacttgagcccaggagttcaagactggcctaggcaacatagtgagaccctatctctacaaaaaataaaaaaagtatccgactatggtggcacacacctgtagtcccagctacttgggaggttgaagtgggaggactgcttgagcccaggaggttaaggctgcagtgatctgtgattgtgccactgtactccacagcctgggtgacagagtgagaccctgcctcaaaataaataaataattaagaacaaatttttttctaaaaaaaaagacaaatcattccattttaaagtaggcaaactaggccaggtgccatggctcacgcgtgtaatctcagcactttgggaggctgaggtggggggatcacttgagcccaggagtttgagaccagccttggcaacatagtgagaacttgtctctacaaaaactaaaattaaaaaaaaaata

SEQ ID NO: 3046 - DNA, 1023 bp, Homo sapiens
aaaaaagaaaaaagaaaaaaaaaagagaaggaaatcctgtcatttgtgacaacataaattaatctggaggacattgcgctaagtgaaataagccaggcacagaaagacaaatgctgcatgatctcacttctatgtggaatctaaaaaagctgaacccacagaagcagagagtagaatgatggttaccagaggctgggaatgggggcagtgagagtgggaaatgctggtcaagggatccaaaatttcagtgagataggaggaataagttcaagagatctattgtacaatatgttgactgtagttaataacaatgtacatattgtattctagaaaattgccaagagggtagattttaagtgttcttaccagaaaaaaaaacataactgtgtgatgtaatgtatatgtaaattagcctgatttagccatttcaaatgcattcatatttcaaaatataccatattaaactgtaccataaatgtgtacagtttttacttgtcaatttaaaattaaaataaaattaaaactctagggaaataagggaaaagtgaagagagcatacataaatttacctatgggagagagtagtgtgtgtacagtttttatttgtcaatttaaaattaaaawaaaattaaaactctagggaaataagggcaaagtgaagacagcatacgtaaatttacctatgggacagagtagtgtgctaaggtcacctgtcacctcggtcctagctgtcccattccccagaaatgagaaaatgaggtctgatactcacctataaatttctgaagtttagctttgggaactagtaagtcgtaaggggttgatgaatagtagctacatatgaaatcatcaattggataaaatttttccctggtaatcctactgtctctgagatcccagggtcattatgagtgactaacaatgatcttgggtgatgactggaaggggaagcagagtttggatgaaagaaggttgctttgtgaagtgctatgggtaacaaggatgtgatgaagtaaatgcttg

SEQ ID NO: 3047 - DNA, 540 bp, Homo sapiens
agtttatgtaaaaaaaaaaatctttctccactgccttgatatatttggcaccctttctgtgaagtgctcaaaatatcattttgggggtacattttagagatgtgaagggaaatgtctgagctataaaatccaaatcgggatctcctttttagtttcaagctaaagaaagaaattcatcaytgaatatacatgcatcttacatgttctagggcctggtagtgttggagattgtttatgtagcgtatgtagtttacattcaataaatgctttctgattgacagatggactagtgaaatgcttcaaggtagtatggccagtcatttggaattgtctgtttgatctgcagaaggcaagacacacagaaacctcccactgctgggtagggtttaggacagggcaaggaagtacgtttatggtctgcaagcaaagattcctgattgagaattccctttatagtgaaagctgggtaataacagcttttaaaagcttcaatttccaatgtcaagaggttttttttttttttttttttttttttttttt

SEQ ID NO: 3048 - DNA, 544 bp, Homo sapiens
tcggatgtcaaaatcctacctcccaccaaagtgatggtattaggagacagggatccccaagggagacccctggcctcttataccatataaggacacagtaagaaagtgctgtctatgaaccagaaaacaggccctyggcagacacagaatttgctggcaccttgattttggaccccctagactctagaactctgaaaaataaatatctgttgtttataagacacccaatttatgagatttttttaatagcagactgaatagactaagacaccaattgatgcaatatagcactgcctctgtgtattagaggaagatgcccctgccccactgagagatggacaggctctgagaggagaggtttccaggaacctttctggggatagctatatacacattcttgagtccacctgtgaccattatattggccagatgggctagctagagcttctaaaacttttaaatgttcttgttctttttagaaggcaaattttttggtagatgtttttaattaaaaattctttttgaaaataacctgtttccaatt

SEQ ID NO: 3049 - DNA, 1274 bp, Homo sapiens
gtagagccagcactgggtttctctctatggaatcccgttgactgcactcatcccctgctgctgtcctccctccatgggggcacaatctcagaggtgacaatctgttcaaaccctaccattttaggattctgaaggacagcaatatcttcttgctatcatttatatttgacagtggactaggtattgatgccactcccaagatgtgcgactgtgattgaaagacatgaacgggtcagcacagacctggaagaactatgctctgctcagctgttgtagcygttgtgttattattttgactcaggtttgttcctttaagagttacgcttttcagagatactggctggaaggacaggcctcctttcctagatccagggccagccagttactcttgtgctgagctcccatgaactgcagccagtgccttccagctgacaaagcagcttctcaatggtaagtgtttatgttgcactttagatttgcagagttctttccctaagttatttcttacctcattttggcgggtgaagaaaccagagcccatcaagatggtgactgactggtccagagtcatctgaccaattagtggcaaagctgatacaggggacttagagcctctgagtttctgggtcattacttacccagtcagtcatgcagcttctctaaaatatgttctgtgctcctcaccagcttctttgtcctcctgaatttagctggctacttttagagtgggccataaagctctcctgtttcaaagctgcagctttttttttttttttttttggttgaccagaaagttctaagtacctagagaaactcatcccaggctgctgcaatgtgggacctgtcctaggtcacctgagttgcggtgtggagcagcaggtggagggagtctgacgtttctatttgggttttggggaaaagaccaatgccacttcaggattattaaagatttgtgcatgggaaggggatgaagaatttacgtgaagacattggctgttgcttaaagttgatttaaaaacattcaactaaagagcattaaacatttcacatctaaaagttgagaagtttttggcttccttttcaaacttcaccagttgggacacagagctcttttcttgccagtgaggcagagagacttcaacgagaatattgaaaacttttactatagaaattcccacaagaaatcttaccatctgtttattctagtcatttttttcttcacattgggtgtaaagattttttttatgactcattgcccttttgacttaaatgca

SEQ ID NO: 3050 - DNA, 1274 bp, Homo sapiens
gtagagccagcactgggtttctctctatggaatcccgttgactgcactcatcccctgctgctgtcctccctccatgggggcacaatctcagaggtgacaatctgttcaaaccctaccattttaggattctgaaggacagcaatatcttcttgctatcatttatatttgacagtggactaggtattgatgccactcccaagatgtgcgactgtgattgaaagacatgaacgggtcagcacagacctggaagaactatgctctgctcagctgttgtagctgttgtgttattattttgactcaggtttgttcctttaagagttacgcttttcagagatactggctggaaggacaggcctcctttcctagatccagggccagccagttactcttgtgctgagctcccatgaactgcagccagtgccttycagctgacaaagcagcttctcaatggtaagtgtttatgttgcactttagatttgcagagttctttccctaagttatttcttacctcattttggcgggtgaagaaaccagagcccatcaagatggtgactgactggtccagagtcatctgaccaattagtggcaaagctgatacaggggacttagagcctctgagtttctgggtcattacttacccagtcagtcatgcagcttctctaaaatatgttctgtgctcctcaccagcttctttgtcctcctgaatttagctggctacttttagagtgggccataaagctctcctgtttcaaagctgcagctttttttttttttttttttggttgaccagaaagttctaagtacctagagaaactcatcccaggctgctgcaatgtgggacctgtcctaggtcacctgagttgcggtgtggagcagcaggtggagggagtctgacgtttctatttgggttttggggaaaagaccaatgccacttcaggattattaaagatttgtgcatgggaaggggatgaagaatttacgtgaagacattggctgttgcttaaagttgatttaaaaacattcaactaaagagcattaaacatttcacatctaaaagttgagaagtttttggcttccttttcaaacttcaccagttgggacacagagctcttttcttgccagtgaggcagagagacttcaacgagaatattgaaaacttttactatagaaattcccacaagaaatcttaccatctgtttattctagtcatttttttcttcacattgggtgtaaagattttttttatgactcattgcccttttgacttaaatgca

SEQ ID NO: 3051 - DNA, 1274 bp, Homo sapiens
gtagagccagcactgggtttctctctatggaatcccgttgactgcactcatcccctgctgctgtcctccctccatgggggcacaatctcagaggtgacaatctgttcaaaccctaccattttaggattctgaaggacagcaatatcttcttgctatcatttatatttgacagtggactaggtattgatgccactcccaagatgtgcgactgtgattgaaagacatgaacgggtcagcacagacctggaagaactatgctctgctcagctgttgtagctgttgtgttattattttgactcaggtttgttcctttaagagttacgcttttcagagatactggctggaaggacaggcctcctttcctagatccagggccagccagttactcttgtgctgagctcccatgaactgcagccagtgccttccagctgacaaagcagcttctcaatggtaagtgtttatgttgcactttagatttgcagagttctttccctaagttatttcttacctcattttggcgggtgaagaaaccagagcccatcaagatggtgactgactggtccagagtcatctgaccaattagtggcaaagctgatacaggggacttagagcctctgagtttctgggtcattacttacccagtcagtcatgcagcttctctaaaatatgttctgtgctcctcaccagcttctttgtcctcctgaatttagctggctacttttagagtgggccataaagctctcctgtttcaaagctgcagctttttttttttttttttttggttgaccagaaagttctaagtacctagagaaactcatcccaggctgctgcaatgtgggacctgtcctaggtcacctgagttgcggtgtggagcagcaggyggagggagtctgacgtttctatttgggttttggggaaaagaccaatgccacttcaggattattaaagatttgtgcatgggaaggggatgaagaatttacgtgaagacattggctgttgcttaaagttgatttaaaaacattcaactaaagagcattaaacatttcacatctaaaagttgagaagtttttggcttccttttcaaacttcaccagttgggacacagagctcttttcttgccagtgaggcagagagacttcaacgagaatattgaaaacttttactatagaaattcccacaagaaatcttaccatctgtttattctagtcatttttttcttcacattgggtgtaaagattttttttatgactcattgcccttttgacttaaatgca

SEQ ID NO: 3052 - DNA, 2364 bp, Homo sapiens
  misc_feature (1)...(2364): n = A,T,C or G
gcctcagcctccaaagtgctgggattacaggcgtgacgaccatgcccagcctccaccaagggagccctccaccaagggctccaccatgcccctttctccaccaaggggggaaaaraagtgaaaaagtacataaagttcacaatgtacaagtagactctaatccaaaagttgtttggaattagagaaggccttttctatagaaatcattattagagctggcagtttaattccctggacagctcctagccacatctttcacacatatcccaaccaaaacacagctgaaacacattcacaatcaattactaacaatgttggcatttaaattaaaaatcaaaaataaatactttcaaaataacaatctacctctcttgaatgctggagactgaggaaaaacagggaggcaaatgaaaatttttgtggaaatgctcaagattttcaggcacttccgttactttacagtttgctgttatttgtatattatactcaatttcacttccgaaggtggagtttatcttttcctctggtacagacatgttgtcagcgcctttctcctattaactcctcagcattcagaatgtgaaatagccctcagcaaatgtttgcagcatgactgagtgtggatagaattctcccccagcctgaggcaatgccactaaagttagaagatgaaggaggagaagtgttttgaagagggtatgaacgtgaatttgaggagattgacagaaggagacacaggaaggggagtgggtgcggtgatgctgaaaagagcactttcattccatttgaagaaatccaacgtaggcattaggaacctaaaggacctccaagaaggggcaggtggtccggagctgctcacagcaagtcagaggctcgtgtacctcaaggcatgcacacattgtcgaagcaccctgcctacggtagaaaagtttatcccacagtttctttctctagttaacactcccctaatgttttaaataatnnnnnnnnnnnnnnnnnnnnnnnnnnnnnnnnnnnnnnnnnnnnnnnnnnnnnnnnnnnnnnnnnnnnnnnnnnnnnnnnnnnnnnnnnnnnnnnnnnnntttctaataggcctccatttgcatattaaaggttgctggcctggctctaagagctgcatttaaaaacaaaaacttccctaggaccccttttcctctctatctgcctaaaataacttcttaataactctttcaacaatgatatagtacagagagagcaagagcaagttctctagtctctgcttataaaggcactaatctcattcatttgggctcaaccttcatgacctaattaccttccaaggccccaccttctaataccatcacactgggggttagaatttcaatgtatgaattttttttttttcctttttttttgagatggaggttcgctcttgttgcccaggctgaagtgtaatggcccgatctcagctcactgcaacctctgcctcccgagttcaagtgattctcctgcctcagcctcccaagtagctgggattacaggtgtgtaccaccacacccagctaatttttttgtatttttattagagacagggtttcaccatgttggtcaggctggtctcaaactcctgacctcaagtgattcacgtgccccagcctcccaaagtgctgggattgtaggtgtgagccaccatgcctggccatggaatttttttttttttaaagaaagagtttcaccttgtcacccagtctggagtgcagtggcctgaacatggctcactgcagcctccacctcctgagctcaagcgatcctcctgtcagccttcaatgtagcttggaccacaggcacatcatgccaccatgcctggctaatttttttactttttgtagagatggagtttcaccatgttgcctaggttgttctcgaactcctgacctcaagtgatctgcccacctcaggataccaaaatctccataaagttgagattacaggcttaagccatcatgcccaacctcaatgtatgaattctgggaatactcaaacgttcagtctgtaacacctgtctcattgtctccatcatattttttagaatatgattatatgtatttatatgttacttgtccatctgttctcaacggctgtctaaatgtagagcccttgtctgtcttaactactatattctcaatacctagcacaattcttggcttttagtacgtgctggaagcaatttactaaatgattcaatgaactgatacttccaaagaaaggctcaggaaatacacttagtgaccactagcattgtgtccctatgatctctcactgttccaacaactgctgaagctgggtgggtagtgttcgccttactttaccaatgcggaaaccg

SEQ ID NO: 3053 - DNA, 563 bp, Homo sapiens
cccacctcggcctcccaaagtgctgtgattacaggcgtgagccaccacactcagccttgatggttttataaatgggagtttcgctgcacaagttttcttgcccacggccatgtatcttcctttgccttctgccatgattatgaggcttccccagccatgtggaactgacagtccattaaacctctctcttttataaattacctagcctcaggtatgcctttattagcagcatgagaatggactaatacaggggcctacttgagtgtggagggtgggaggagggtgaggacccaaaaaccacctattgcctactatgctcattacctgggtggcgaaataatctgtacgccaaacccctgcaayatgcagtttattcatgtaacaaacctgcacatgaattccctgaaacgaaaataaaagttggaaagaaaaaaataataaaataaaaataaatgaataaacaaacaaacaaaaggaatcatgatataataaagtgatttaggcctgttttaccgatagggtagattagccttaaaatactctccacccattgaaatgaccaa

SEQ ID NO: 3054 - DNA, 1228 bp, Homo sapiens
  misc_feature (1)...(1228): n = A,T,C or G
tgtgcagaacgtgcaggtttgttacataggtaatagtgtgccatggtggtttgctggcacctaggtattaagccctgcatgcaccgtgccctcccacygctactggccccagtatgtgttgttccccccgggccgtgtccatgtgttctcattgttcagttcccactgatgagtgagaacatgtgggtttggttttctgttcctgtgttagtttgctggggatgatggcttccagcttcatccatgtccctgcaaaggacgtgtagtttcaatttcttcagggaagtgaaaatgggaagaagtgagggaacaccatgagtaaggaaccaaggtgagattgagtatgttctattcagtgtctgatatgcaggctggtgaaggagggtagaagatcctcgcttgtcagactataaagtactgtttcttcccttgttcctcacctctttccagtatgcagtagttttactcataaatattaactgagcagctgtttattagttccaaaccacattattatgaaaattatatcgatttagctatgtaacatgtgctctctagacaatagcatagtacttagaaatatcagatgctcatgtgagcatttctccctaattatacctttcttgctgtcaaggccaagggaaaactttccctttcttgctgttggggccaagggagaaaaggcatatatatgtatggatagttttatgtgacataggaacctttaaaatgaagacccaaagatacaggggaaattgtccatttttatgctagggttcaagaaattatgaacagttgtgtagaaatatgactggaggctgggcgtgngtgcacgcctgtaatcccagtactttgggaggccaaggcaggcagatcacttgaggtcaggagtttgagaacagcctggccaacatggtgaaaccccgtctctactgaaaatacaaaaattagctgggcatggtgcacacgcctataatcctagctacttgggaggctgaggcatgagaatcacttaatcacttgaatccaggaggtggaggttgcagtaagccaagatttgccactgcactccagcctgggtgacagagcaagactctgtctcaaaaaaaaaaaaaaagaaagaaagaaatatgattggacaaaaagggtatgatctacggttaatagactcagtggggaaacccgagtaaagcccgtctatctagattcttcttggcctttctgagca

SEQ ID NO: 3055 - DNA, 634 bp, Homo sapiens
tgcccctcaatcctctgtgtcccccaaagcactggataaaggtctctgaagttccttacctgcctaagtctggacctgycaaagaagaaaacaatttacctctggttccttccctgagttttcattaactgaactcatatgacaggaagaaagactgaagtctgtggacaaacctggtcagacttttgccaggtctgctctgctgacccaatggacttagtagcaggcccttgtatattcttcaagcctactgaagcctcctaaaaatcaatcacacttcctcatctcccgttcctctaagaagtaggataggtagcctctgtaccccattggaatattaggtaatcactctggttctcctggtgtacacactaataaattggtttgctttttctccaattaatctgtcttttgtgagttgatttttcagccaaccttctttttttttttttttttttgagacggagctcgctactgttgcccaggctggagcggtggcgcaatcttcgctcactacaagctccgcttcccaggttcacaccatcatcctgcctcagcctcccgagtagctgggactgcaaagcgcctgccaccatgcccggctaagtttttttgtatttttagcagagacggg

SEQ ID NO: 3056 - DNA, 1196 bp, Homo sapiens
  misc_feature (1)...(1196): n = A,T,C or G
tttctgtatgcccttttttgctccccttttcacttgatgttatactgtgaacatttccatatgtcattaaatattctttttgtactttattttaatggctgcatgggaatccatgatacggctctaccataatgaactgaataagagaccagtcccctgttggacattcgggttgtttccaatggctttgctaatagacacgttgctgtatggatatccatctccacattctcgctgtacatgtctctgattgcttcccttgagtaacttccagacagtatgattgctaagtgcaaggatgtttctgtttcaagcctttggatatatattgccagttgcccccaacaaagctgtaccagttcatgttctgcactgcactgcaccttccagacagtggatattgtctgtttgcctgattgtatttttgctgcttcaagttctttccttttaggagaaacctagggagagagggaggttaggagatgagttcagatggcttcaggagatgtgggttattgtgaggaaaggcagggaagaaaagaagcttagaaagaggctaggaggaggccgggagtggtggctcacgcctgtaatcctaccactttgggaggctgaggtgggcagatcatgaggtcaggagatcgagaccagcctggccaacatagtgataccccgtctctactaaaatacaaaaaattagctgggcgtggtgtcacgcacctgtagtcccagctactcgggaggctgaggcgggggaatcgcttgaacccaggaggcaggggttgcagtgagccgagatagtgccacrgcactccagcctggtgacagagcaagactctgtctcaaatagtaataataataataataataggaaagaacataaaagtaaaaagaaaaagcctagcagggaatgggaagaatggaccttcctggctccctgctcaggtgacaacagcattgctgcaattcagtntctccctgcctactgccgccactgcttctgtgcactccactcactatgctgtgacttcgaccaccccattgtctcagctcagccatcctgatctctgcaagtggcttccaaactctgcaggagagactctaattttctgtcaccacctacagggagcactcccactgagcagtgctcctgcacagcaacttcatgagcctctggcagggcttgcagctccggt

SEQ ID NO: 3057 - DNA, 1331 bp, Homo sapiens
tctaagtcagttggcttgagccctggaattcaaagctccattatgattgtacgactgccctccagcataggcaagagtgagactcagtctatttttttttttttaagaaaagttattttcttaaaataacttttatttttttcttaaaatatatttttcttaaaataactgttatttttttaagaaaaaaaaaaaaaaagaatcctccaaggccggmggattgcttgagctcaagctctcaagttcaaaaccagcctgggcaacataaggagaccctgtctctacaaaagtaataaaaaattttacctgagcctgggggcgggcctctgtgatccaagctacttgggaggctgggtgggaggactgcctgagcccaggaggtcaaggctacagtgagtcttaattgtgccactgcattccaactcgggtgacacagtgagacccagtcttaaaaaataatactgacacctctgtagatccatctaccctcaaatgtcttactgttgagtctctttatcatcaggctatggggcatgccaacagtttcagatgcaacattgataataataactaatcttgaaaccaggtgtggtggctcatgcttataatcccagtgctttaggaggctgaggcgagagcatcacttgagccctggagttcaagaccagactacgcaacacagtgagaccccatctctacaaaaagtagaaaaaattagccagctgtggtagactacaggctgcacacacctatagtcccagctactcgggagactgagatgggaagatagttcaagcctgggaagtcaaggctgcagtgagctttaagggtgccactgcactccagcctgggcaacagagcgaggccttgtctcaaaaaaaagaaaaaaggaaagaaaaaaatcctagaatactattcttgccattaaccacatctccagtattaagaggaaaacatcttgaggcaagacctctctaaagagcatttttctgtttttaaaccaacacattataggtaactttatacaaatcaagtcatcgtcctacatctgggaaaaaaatgttcttactgaatataaatgaatgtgtgtaatcagccttatctgactgctatcacttatttggataaaactacctctacgctggacactgctgccataatacatatggacagtggggttccaagcagtaagtcattcatcctcccagcttgcaatatgagtgtgatgttgggttgcacattatttcctaagagtacaccttttgaagataaaattaagtcttcaacatcctccaggacacagtaagcactgggctagatttaaaatgtta

SEQ ID NO: 3058 - DNA, 589 bp, Homo sapiens
tgagcagctgtgattacaggcgtccaccaccacrcccagctaatttttgtatttttagtggagacaaggtttcaccatgttggccaggctggtatggaacttttgacctcaagtgatctgcccaccttggcttcccaaagtgctgggattacaggcgtgagccactacgcctggccaagaaaattcttaagatagttggtatcacttctctgcttccaaaaaccctaacagatacatcactcctaactcaaataagatctctaaagcatttctttctttttttttttttttttgagacggagttcaaagcgatccccctgtgtcagcctcccaagtagctgggactacaggcgtgcaccaccacacctggctaattgttgtattttttggtaaagacagggtttcaccatgttggccagactggtctgaaactcctgacctcaagtgatccacccgccttagcctcccaaagtgctaggattacaggcgtgagccaccgcacctagccaagatctctaaagcacttttaaagaattactcaatcttcctgctcaaaaactttaacctacaagttctcaatattatataa

SEQ ID NO: 3059 - DNA, 614 bp, Homo sapiens
tatgtccaatacaacctgccagtgagattcttctcaccagcctctccctagaggacaactcctttttccagttgccacactaagcaagtccctctgggaatattctgatgatcagatgtgtgagaaattactgacctcagagacccagaatggaagtagtactggaggcactagaagccatgagcacttaatccaggaggatcgggcaatggacgttttccagtaaagaagaaggaggggagctcatggaaatctctgccattgatgaggatcttagtttttgccatttctgcctgtgtcctctacatctctkaaacttttttttacattttccatccttttattccttactgatggctcctgagaacatttcacaatctacattgttggctcacaaattcactctttaccctaaatcatttgctctttagtcaatctggtgaatttttaattttcacttttatgtttattatctacagttgtacagtcttcttgtgcatgcttatatacccaaaattcttatctatttgatgatattcaatatgcttacttcaactatttgttctgcttgcatccattaattttgcatcccatgctgtagatggtttaatgca

SEQ ID NO: 3060 - DNA, 896 bp, Homo sapiens
aattttagatactagatgtggaactaatgataagaggatattttgatcacctttatgccaataagctcagaaaacagatgaactggaacaatttccagatcactgttgttgcctaatgagtggttctctagacttggtcgttttctcctctcagtccattatccacatagaaaaktcatcagtttacaaagaaaatctaattttgctcctcttctgcttaaacataagccttgtatacttctcaatagtttaagaagaaaatataaaatcctccttctttgcaagacccagcatcttgcctcacctgcttttctaccttcatccctctccactctgtccttgctgctctcctgacacactgttttcctttccctgtgttccccaaatgtgttgaatttccttctgcctcaaggccaccactcatgctatcctctctgctgatggcatttttcactacattctctagggtaattcttatctttcagattgcaactaaaatattacattctcaatttgatcctccaaatatctgggtaccatggccgagcccattgacacacataaaattaacaattgctgatggttagtgaccagttgaccttaggtgagtatgacacagaaagggttcatgtccgtgcatttcctgtgctcctcattcaacattgtacaatgggcattgcgtaagttgactcctttcaacagctcttcccaacactaagtgagtaagtgaacaccctgagtatgtaaggcagcatgggtcttatgttggcctctgaaggcagacctcaaggccggcagcattaaaggctaaagggtatgtatgtaggtcatctaagttaactgtgtaagataagtgatttcttaataaatccccaaatatttttaactcatgtttt

SEQ ID NO: 3061 - DNA, 2299 bp, Homo sapiens
atcccagattttcacatcacattggctttatcagcttccacagctgctggagagtgcaaggtcctaagaggctctaagagacacttagacacctgtcaaaccaggtgcactggggcagcaactgcccactaaacatccaggctggcatgcagccaactccttctctaccctaataattttttttaaaggccaatgtgatcacatttaaataacacaacgctttcccagagagaaatttttacaggcactgaaaagagagaaaagtgtgctttttaaaaaatctgaagcaaagttaggacagaatccagaaatgaagcttactcagccagttctgaaatgtaacctgcttgttaatcattaatgagatgttaaatttatgaaatcttgaagtgaaacacaagactaagattttggcatcaggtttcatttgaatcaactttctggagaaaaaaaacagctcagtaagttgaactgcaggctgcgggggctaccccagggcatcagcgttgtgctgtaaaatcacactatatcatcagcacacatgtgcacaagggagaaaacacattagactgtaagataatcgtcaagcagagaaaataaaatatgccctcaggcgtcccatttgtaattcccttgaatccatgttcacaaggctttcttttctatacaatttgacaagttaatgcaaaccactttatgtagtcactacaacgccccaaatccctgaagttttgtagggataatttatggtcagctaaagcaaatgccttagagaagtcaatagaaattgcttctatcacacagtcttcatctattgcattggagatagtgtggrtaccagatcctgggtgattggtttgctgtgaagcctgacaagaaaggagtcagcaagtcctttggctgtagatagtttgaaatgtgtacgtgtacattttttttaacaggtagagccaaaatagctttctgctgaatcaaacctcttaatttcctttttgtggaggtgaactatactgacaatgtcttcagacttgaatgaagggaagacctcagaacggagatattttctttgctattaccagaattggcaagtgaagaaatgcaggctcttcacagatactgtatcacaatttagtattcaccaggaaataattccaaattttccaatgcataaatgaatctctctcagtaaaaatccacattaatccctctgagtgcatttatttgtttgaaggcaaagccctcaccaccatcaccaaaagacattggtataaatgataatgacattaagaatctggtgtttgtcagtcttactgttttaaatctttacagttgaaatggttatagttaagtattttaaaataattttcacatatatgtatgtgtgaataaggtatatatatatatatatatatattaggaattatctccattctcagaaaaaaatccagatgtttccagagattaatttcctagttttttatatatgtatatatttcatatatatattttaactatatattattaaagagcaggcagattacaaaatatttctcaaagaacaatataacatttttaaattttattttttatttgttcattttaatctgagtgtttctctctttgactctgtagtacctctggtctaccagcacaggagaattgaaagtagggtggcctaccattcaagaaagagtactggctaggttctctaacttatccaaaacatataacaatcttgtcctctacacatctatcatgtatagattctatcatgtgtattggctctcaaataaggggaaatatttttgtaatagtcaatgtttggtcatgaaaatagaagctattttattattccaagtatgaaggatttcaatagaagaaactaaaagtttttcaaaaccattgtatggatcggagagtaaagaaagggaagctctcaccaatatttccagcctatggcactaaagtagatggttcttaaaaattcctccagaagtcactgaaatctcaagaactgctgagtggcttccactgactatttgaatctgcaataccaaggagaacaattctccagaagtcaccatgagctatctaagctatacaaagcctaaagcaggtgagatgtaggatgttgtcagcaagctgctgtgaacttcttgtctgtcatctgcccacacccttggcttcaaaggcttctgaagaataatcctcttttttcttctaccttccaaatctcagtttagttcatctcattgtcagactgtgacctaaaccatggggcaaagatagattgaagaaa

SEQ ID NO: 3062 - DNA, 201 bp, Homo sapiens
taaaaatatctatgccattttacaaccagtctattttattgttcatattctaatttttaaataatccataatcacaaacagcagtgataagggatttcttagtcccaaaatttgcatctgaycttaggcaaaattaatctgtggtaaaaggctgagaatagtggttacctttggggtcaggggatgttcacttgaaaagga

SEQ ID NO: 3063 - DNA, 626 bp, Homo sapiens
gaagggaccacagctggaacagtgcagtgatgagatgaaaaagcccacctgcccacagacaaaacaagtcggcgaatccatactcagggaactaaaaataatagtgaartcaaaagaaacttgagaaccggcatggtggctcacacctgtaatcccagaactttgggaggccaaggcgggcggatcgccagagatcaggagttcaagaccaacctgggcaacatggtgaaaccctgtctctaccaaaaaaaagaaaaaaaaaaattaaccaagcgtggtggtgcatgcctgtagtccccagctactcgggtggcagaggcaggagaattgcttgaacccaggaggtggaggttgtagtgagccaagcgagccaagccaagatcatgccactgactgcactccagcctgagcaacaaacagagtgaaactccatctcgaaaaaaagaaaaaagaaaaagaaacttgaaataagtctgtttacagggtgtccaaactattggtttccctgggccatgtgggataattgtcttgggccacacataaaatacactaacgttaacaatagctgatgagacaaaaaaatcgcaaacaaaaatctcataatgttttaagaaagtttatgaatt

SEQ ID NO: 3064 - DNA, 1061 bp, Homo sapiens
attcatatacaattgaacatactaataaatagaacacaatttaagcaggttatttgtttttacacagtctttacaaaattggttatttctctctcaacgttaattgatgcctaagtataatttaccatggtaatgctgctaaatatttgtgaatctttgttgaagttcaaactacaaaattacattatcttggctaattctcattcaggttgctcttgtccacttaccctgatcatccccacttggtccactgttttcttgtccacctcatatccccaaatccattcccactcacattgtgtgtgtgtgtgcacgtgtgtgtgtgwatgcacacgtatatgtccgttttagccacccacatctatggctacaatgtggaactgaaaattactttcaacagctcaaatgtagagattcagtttttttaaacccactatattaccctctgttaaatacaaaggattctttcttccttgtggcccttattgtgttttctggtttcttgattattttctgccaattcattagtcatatcctgattttcttgatcttcaacccactttaataaatgtattaaactgtaaactaatacaattaatacatgtatcttttaatttgctttcctgttttcaaagtagtacatatttactaaagacaatgtagcaggccgggcacagtggctcacgcctgtaatcccagcactttaggaggccaaggcaggcagatcacaatgtcaggagatcgagaccatcctggctaacacggtgaaaccctgtctctactaaaaatacaaaaattagctgggtgtggtggcgggcgcctgtagtcccagcttctcaggaggctaaggtaaggcaggagaatggcgtgaacccgggaggcagaggttgcagtgagctgagatcgcgccactgcactacagactgggcaacagagtgagactccatctcaaaaaaaaaagacaatgtagcaatgcagaaaagataaaaggaaagaaatgaccaatgagcaaagtatccaaacgcaattgctgccaaaattttagtgtattttgtgtattt

SEQ ID NO: 3065 - DNA, 496 bp, Homo sapiens
atggtttgctgcatttcaaaataatcctgaatgcctgagggkaatattggggaggaggaggctactttaaaggcaaggctgtcctgattcacccaccctctgagcccctgtgttgagaagcgagttgaaggatggacatggttacatgctcaaaatctccaggtgctcaatccctcacactagaggtttgttaaaaacatcccaactcaactaggagagggaaatggtttaatcaacacggggagcgttatttcctgcttaccttttctaactccaaaagatgaaaccttagtacttgtattgcttgtatcatctgaaagaaaagttcagggaatggagttagagctctgtgactctgaggtcctgtcttggggttgggagtggggtgaggatggtggtgagaaagttgggctggggagaagaaacgggcaggtggccaggaaaaacttaaacatcaagaaatagtcagaaaaatcaagtgattactgatcatctc

SEQ ID NO: 3066 - DNA, 675 bp, Homo sapiens
tgggttctgaaggcagcacttgcagaaatttctgacgactaaacatagtctgtgggcagagtgtatttaaaattttggacacttccctcttcaactctttctctcataactcccaccttcactgtatttcagctgtaacaattggtatttttccctttgccttgaaaaatctttccatcatcttccaccttataaacatactttttaagaaccaagtcaaactttacttctatgaactattcctttctgctaaaccttatacaaactttgatcgtggcatgtatcctaagacactataagtatttatttgcagttggcctcctcttataaactgttagctcattgagggcaggacggattcttctttaatcggtgtatccctgtggatggaacccacactcagtaaactttgtggaataaataaatgaataaataaaacttctcattattgatatctatactctgttcttatgccaaaaagcagtcccaattttatcattgagccacaagtatttatgggaaccttsaaggtaccaaagactcatgcttgcaggtattttggcagatgcaatagcttacatatgagacacagacttcatcatggataaatttgcagcttaatttgggaaacaagatatatgtttatgaaatcagtaggaaacatagaagatagtg

SEQ ID NO: 3067 - DNA, 647 bp, Homo sapiens
tactctaaatcactagacatcagcattgctatcagaaaattagttttacaaacactttcaaataagatgaaggcagaaactaagaccgtggcagaagatcattaagtatagggttgttaattaagtagaattgacacatttcattaccaaataagaaaaaggcaatactttaagtaactctaccgtgtgtcttgcacacattaatctaagaaggtaatatagaaaggaaaattaaagaagaaaaataattaaatattaagtactggaagtacctgttaaaagttcagaagttctcagcagacagatgtgtttgtagaaattttaaagaaataagtagtaacaaaagtgatgcgtgatcaccaaagaggaccaatttcagaacactggtaaaaataatatttaatgagtgaatcaaacaacagaagtgtataatatgttctccaaagacttgtacataatgttcataacagttttcattataatacagtaatatttgggaaacaactcaaatgttcatcaaaagtagaatggataatttgtgtttactcatacaaaagaggtaagaaaatgaatgttmctataatgatatgtaacattgaagcaatcttccaaacattagatttatcatgctgagcaaaagaagccat

SEQ ID NO: 3068 - DNA, 655 bp, Homo sapiens
acctagctacggtttccagtgctggctatgcttgagaaccgtctaaaaatacgggtgcctgaactgactccaacctgctagatcaaaaccttcagaagttccaaattgggaaccactctagatactcagaatccaaggggtctacagctgtagctggattttcatttgaagtaaagaaaagcttatggcttatagcatacatttaagataggaaagagaatacttttgggggactggttttttggccagatatcaaagttaacaatatggagctattattaataatagcaactccaatttcaaaaattcatcagtgaaatacaaaaaataaaaatgaagtgacctctgtttttacatgtaaatacccatcactttgttgttgttttaaagaaagactatttcatgtgaatttttttccctgaagataaataatycatattggtatacctcaatactacgttctattacattcttcctaagagcggagtggcaatttgtgaatcagtaggtatatattgcaggtgtacctaaaatccttgcctgtttaagtttttttcttacgtatttagctgctgagatccttgtgggtttatatctttgctttgaattttcatgtgacagtttaaaataatataatctctaggatgactatgca

SEQ ID NO: 3069 - DNA, 738 bp, Homo sapiens
gacaccaacatgggccttagtggcctcacaaagtcctcatgatctgaggtatgtgaatgcacagtgaaaattataaagtgatttacaattaattagctgcttttagaacctgatattaaaaagatagatggagagtattaatgaaaagagagagggagagttaaccaaaacrctccacctgatttaattgtgtttttcacaatattaaactggtcagaggtggcaatctctgtcaatgggttgctacctaataacaaataaattatctagctggtttttcccctaaattgactgaaaagatgagttgttttggcaatatgtaaacacagccagagagaaatttaaccttccctaacctccattatctatctgaatttgaaaccaaatgcagatggagaactcattattgtagtgacaacctcggttgtaattaaaaaacatgggatctatcgctaaaagaggaatatagcaaagggcaaggaaaggtctggcccttttcatgcattatctccaggcttcttaccacgaaaatgtctcagctgtttggagcagatatattgacctatgactgactagctaatacaactatgacagaaatttttaagtgctattaattagccactggagtacaatagtcaaaaggtgaacactggaatgccaggatatctgtggcttcctcttacaaaactgcatcaacttcagcgtgctctgttaatggatacgtttgcaccaatgcaa

SEQ ID NO: 3070 - DNA, 738 bp, Homo sapiens
gacaccaacatgggccttagtggcctcacaaagtcctcatgatctgaggtatgtgaatgcacagtgaaaattataaagtgatttacaattaattagctgcttttagaacctgatattaaaaagatagatggagagtattaatgaaaagagagagggagagttaaccaaaacactccacytgatttaattgtgtttttcacaatattaaactggtcagaggtggcaatctctgtcaatgggttgctacctaataacaaataaattatctagctggtttttcccctaaattgactgaaaagatgagttgttttggcaatatgtaaacacagccagagagaaatttaaccttccctaacctccattatctatctgaatttgaaaccaaatgcagatggagaactcattattgtagtgacaacctcggttgtaattaaaaaacatgggatctatcgctaaaagaggaatatagcaaagggcaaggaaaggtctggcccttttcatgcattatctccaggcttcttaccacgaaaatgtctcagctgtttggagcagatatattgacctatgactgactagctaatacaactatgacagaaatttttaagtgctattaattagccactggagtacaatagtcaaaaggtgaacactggaatgccaggatatctgtggcttcctcttacaaaactgcatcaacttcagcgtgctctgttaatggatacgtttgcaccaatgcaa

SEQ ID NO: 3071 - DNA, 738 bp, Homo sapiens
gacaccaacatgggccttagtggcctcacaaagtcctcatgatctgaggtatgtgaatgcacagtgaaaattataaagtgatttacaattaattagctgcttttagaacctgatattaaaaagatagatggagagtattaatgaaaagagagagggagagttaaccaaaacactccacctgatttaattgtgtttttcacaatattaaactggtcagaggtggcaatctctgtcaatkggttgctacctaataacaaataaattatctagctggtttttcccctaaattgactgaaaagatgagttgttttggcaatatgtaaacacagccagagagaaatttaaccttccctaacctccattatctatctgaatttgaaaccaaatgcagatggagaactcattattgtagtgacaacctcggttgtaattaaaaaacatgggatctatcgctaaaagaggaatatagcaaagggcaaggaaaggtctggcccttttcatgcattatctccaggcttcttaccacgaaaatgtctcagctgtttggagcagatatattgacctatgactgactagctaatacaactatgacagaaatttttaagtgctattaattagccactggagtacaatagtcaaaaggtgaacactggaatgccaggatatctgtggcttcctcttacaaaactgcatcaacttcagcgtgctctgttaatggatacgtttgcaccaatgcaa

SEQ ID NO: 3072 - DNA, 738 bp, Homo sapiens
gacaccaacatgggccttagtggcctcacaaagtcctcatgatctgaggtatgtgaatgcacagtgaaaattataaagtgatttacaattaattagctgcttttagaacctgatattaaaaagatagatggagagtattaatgaaaagagagagggagagttaaccaaaacactccacctgatttaattgtgtttttcacaatattaaactggtcagaggtggcaatctctgtcaatgggttsctacctaataacaaataaattatctagctggtttttcccctaaattgactgaaaagatgagttgttttggcaatatgtaaacacagccagagagaaatttaaccttccctaacctccattatctatctgaatttgaaaccaaatgcagatggagaactcattattgtagtgacaacctcggttgtaattaaaaaacatgggatctatcgctaaaagaggaatatagcaaagggcaaggaaaggtctggcccttttcatgcattatctccaggcttcttaccacgaaaatgtctcagctgtttggagcagatatattgacctatgactgactagctaatacaactatgacagaaatttttaagtgctattaattagccactggagtacaatagtcaaaaggtgaacactggaatgccaggatatctgtggcttcctcttacaaaactgcatcaacttcagcgtgctctgttaatggatacgtttgcaccaatgcaa

SEQ ID NO: 3073 - DNA, 738 bp, Homo sapiens
gacaccaacatgggccttagtggcctcacaaagtcctcatgatctgaggtatgtgaatgcacagtgaaaattataaagtgatttacaattaattagctgcttttagaacctgatattaaaaagatagatggagagtattaatgaaaagagagagggagagttaaccaaaacactccacctgatttaattgtgtttttcacaatattaaactggtcagaggtggcaatctctgtcaatgggttgctacctaataacaaataaattatctagctggtttttyccctaaattgactgaaaagatgagttgttttggcaatatgtaaacacagccagagagaaatttaaccttccctaacctccattatctatctgaatttgaaaccaaatgcagatggagaactcattattgtagtgacaacctcggttgtaattaaaaaacatgggatctatcgctaaaagaggaatatagcaaagggcaaggaaaggtctggcccttttcatgcattatctccaggcttcttaccacgaaaatgtctcagctgtttggagcagatatattgacctatgactgactagctaatacaactatgacagaaatttttaagtgctattaattagccactggagtacaatagtcaaaaggtgaacactggaatgccaggatatctgtggcttcctcttacaaaactgcatcaacttcagcgtgctctgttaatggatacgtttgcaccaatgcaa

SEQ ID NO: 3074 - DNA, 738 bp, Homo sapiens
gacaccaacatgggccttagtggcctcacaaagtcctcatgatctgaggtatgtgaatgcacagtgaaaattataaagtgatttacaattaattagctgcttttagaacctgatattaaaaagatagatggagagtattaatgaaaagagagagggagagttaaccaaaacactccacctgatttaattgtgtttttcacaatattaaactggtcagaggtggcaatctctgtcaatgggttgctacctaataacaaataaattatctagctggtttttcccctaaattgactgaaaagatgagttgttttggcaatatgtaaacacagccagagagaaatttaaccttccctaacctccattatctatctgaatttgaaaccaaatgcagatggagaactcattattgtagtgacaacctcggttgtaattaaaaaacatgggatctatcgctaaaagaggartatagcaaagggcaaggaaaggtctggcccttttcatgcattatctccaggcttcttaccacgaaaatgtctcagctgtttggagcagatatattgacctatgactgactagctaatacaactatgacagaaatttttaagtgctattaattagccactggagtacaatagtcaaaaggtgaacactggaatgccaggatatctgtggcttcctcttacaaaactgcatcaacttcagcgtgctctgttaatggatacgtttgcaccaatgcaa

SEQ ID NO: 3075 - DNA, 619 bp, Homo sapiens
ccaccaaaagaaaacacacctgccctcatggagattgcctcctggaaggaagaaaaaaatgtacatgaataaaatacatgcttattagatagtaaaacatactaaagggaagaataaagcaggggaaaaggaaaggatatgttcacgtaggtgcttcaatttcagataggtaagccaaggaaggactgtcttaaaaatatgacaggtaagcaaacagcccaggaggtgagggagtgagctatgtggttatgggagatgagaggagccctccagtgtgagattacataagtgcaaagagttgggagaacactgacccgagttgggagaatgctggcctgggtggggaggacgctggcctgttggagttwagtcatgagacccacgggctgcagtggaataatcaaggggataagcagtaataaaaagggtcaaggaaggaaagagatgaaagaccaagccaaaacttcagcatttactcagtcattgtaagaacgttggcttttactcaaagctgaatcaaaggagggtgcagggtattggaaaggtgtggtgtgacttatattttaagagaatcactttgcccgttttgttgggaatagatggtagggacctaagggca

SEQ ID NO: 3076 - DNA, 619 bp, Homo sapiens
ccaccaaaagaaaacacacctgccctcatggagattgcctcctggaaggaagaaaaaaatgtacatgaataaaatacatgcttattagatagtaaaacatactaaagggaagaataaagcaggggaaaaggaaaggatatgttcacgtaggtgcttcaatttcagataggtaagccaaggaaggactgtcttaaaaatatgacaggtaagcaaacagcccaggaggtgagggagtgagctatgtggttatgggagatgagaggagccctccagtgtgagattacataagtgcaaagagttgggagaacactgacccgagttgggagaatgctggcctgggtggggaggacgctggcctgttggagtttagtcatgagacccacgggctgcagtggaataatcaaggggataagcagtaataaaaagggtcaaggaaggaaagagatgaaagaccaagccaaaacttcagcatttactcagtcattgtaagaacgttggcttttactcaaagctgaatcaaaggagggtgcagggtattggaaaggtgtggtgtgacttatattttaagagaatcactttgcccgttttgttgggaatagayggtagggacctaagggca

SEQ ID NO: 3077 - DNA, 558 bp, Homo sapiens
tatggttatccctaaagaaaccactaaaaaatgtaaagagttgtcatttaaatgctagtaaagaaattaaattatatatgaaaaagtatttgtaccagaatgtttatagaccttttagtcataatagcttaaagcagaaaacaacccaaatgtccatgtctaggaagatgaataaacaaatcatagctcattcatacaagagaaggctactcagccatagaaagaaacaaactgaagcacacaccttggatgaatctcataaacctgctgagacaagcttgaaataaaataatacaaattgtataatgtctgraaaaatgaactaatggtaaaaaaaaaaaataccaagtagcctcggtagagattaaaattgtctgaaaaaagcaggagggaattatctgagaataataagaatattctatcattttattataaattctattaatagagaagggaaacattctatttattcttaaaagatatgaaggtcatatgggtgtatttatttgtcaaaaatcttcagttaggatttgtgccttccaatgtatgtacatatga

SEQ ID NO: 3078 - DNA, 617 bp, Homo sapiens
ttctttccttctttctttctttctttctttctttctttctttctctcttttctttcctttcctttcttttyctctttctttctttctttctttctttctttctttctttttcttttcttttctttctttctttctttctttcttctttctttctttctttccttctttttctttttttgagacagagtcttgctctgttgcccaggctggagtgcagtggtacggtctcagctcactgcaacctccactttctgggttcaagtgattctcctgcctcagccttctgagtagctgggattataggtgcctgccatcacgcccagctaattttttgtatttttagtagagacagggtttcaccatgttggccaggctggtttcgaactcctgactttatgatctgcccgccttggcctccaaagtgctgggattacaggcatgagccaccgcgcctgaccaaagtataccaccatttctttcagcagtttatgttgtgggaagctaaatccagcatctggtaatatcctagaagccagaaataaagatgtatgtgccaatatatttcttgtcttttaaaaacaaaatgaggagctggcaatttacttccaaaggcactg

SEQ ID NO: 3079 - DNA, 549 bp, Homo sapiens
ccgggagagctcgatgggcttctcctgcgcgccgcccggtgtctggccgagtccagagagccgcggcgctcgttccgaggagccatcgccgaagcccgaggccgggtcccgggttggggactgcaggggaaggcagcggcggcggcggcgggagcccaccggggtctgggactggggaacacttcgcggcttcacggtcagttgggaagggaaactggggtaggggtgaagaagctggggtgaggcgagcctcacgggccgggggactcccagtgggagaggcgtgcggcgtagttgctcagagctggagttgacttaggagcgtgtgtgtgtgtgtgtgtgtgtgtgtgtgtgtgwgagagagagagagagagagagagaccccgactaaggaggggcggacgtcgtgattggcccgggggtgctgtttccctgctcttctcccctccatttctctagtccctaggatggctggagaggcgatgcagccctccctaggtagttcttggtgggaagggtccgggaatgggggacactagtcctaaggcg

SEQ ID NO: 3080 - DNA, 658 bp, Homo sapiens
gtaccatctgccatcccatagcatagcaaattgctccctcgtctatgagtccttacgatttcctgccttcctcttaatcacatcccatcttcagtttgcccctgtctggactcttgcaccctttgaggatgctatatggagttgtcttcctttccttaccacgtggtacaggaaccrcagccaatgggccacaggggaaatacaaatctgtcagattgaggaacatcaagaacagaggcagcgtatgagcctgtggatagtagagattgcaaaggagacagttcagttagggaaagcataagcagaggtttggccaggggtgaaagtagccagcattttcaggtaacagcaggcagcatggctaggggatgaacttaagctcaggaagggagccagaggccagctctgcaggggccagaaagccaggctgagaagatgtctaatttactgggcactggggagaacggacagtcttagcaaggtgaatgagctggtcaaacaatgcaaaggcctcaattaggatttgtctttttgtttgtatgagacagggtcttgctctgtcacccaggctggagtgcagtggcatggtcatagctcacagcaacctcaacctccctggctcaagcagtcctcccaccttagcctcctgagtagctgg

SEQ ID NO: 3081 - DNA, 618 bp, Homo sapiens
gtggcttttaaatcttttattcatttaaaaataaacttttctttaatttcaaaattaatatttgaaacaaccagaaactcataaggagatcaacattaagactcaagtagataaatgggtaaatgagtatgcaattcacagaagatagaattgaatgacataattaaaaagaatgttcagcttacttgtaagcatagagatgcaaattaaaacattattaatttgaatttgaaaactgacatagayaacactcaatgctggtgaatatgctgtaaggtgggactcaaagtgtagcaggtgtgtacctaaatgcctataatcttctggaaattaattaaatgctatgtatgattgacttctaaaaaccttacaatttttgtttcagtatttctttacaggaaggcattccaagaaaacacctaggcacacaaaactgcctacaaatgctaaataaaattccttaaatggcataaaaatttaaaaatggataaagattaattccataaaacaaaggtgggattaaatggactatgttacagtcatggaatagtatattatatagctgttcaggaataaatgcaaactacttttaaaattcaatgttttatgcacatatct

SEQ ID NO: 3082 - DNA, 1217 bp, Homo sapiens
tcagtaaatttcttatgaattgaaatgaaacagcatcttgaaacagaattgttatgaatttaaaaactgattctcacagtgttaaaatttggttctttgtgcgattagagtcttttctctaaatcaaccaaagtactgtaatgccatagccaaaattaatgagttaaatttagatcagttaatgctattgtttctaataagatattagcatatcattgggaagtatttttgttactgttgatggtggtggtattgttgttagctgaattgattatctttttagggaaatactataagcatcatgtttgtgttaaaccaagtcaaaatttagtagcatagagcttttattgtatgtaaaatactggaaaataagaggatgacactaaaactatcaactagaaaattacttcagtactgtggcgtatcattttctcatrcataaactctataaagttgagtatgaaaaaaatccaataaatccctgtggcaatggggaatggaattaaaacccaagtgaaattaaattctagaagattaatgttgccagttatattttgatgacaacaataaacataatgcaattttgttaacttattgctttaaaatgcaagttgatagccaacaatggtaccattttagcacaggtaactaactacttgcatttgagtgtcccgacaggtaacctgaatttcaataatgaagaggcacttaactaactaatgttttttatagtcttttacataacattaaaattaccttagagtctctagtatatttaacaattatatgaagaatctcttgtctatttccttacctagacatttgtctacttacctttatttggatcttcatttaaatataatttctaccagtgtattaagcatgtatagatgaatcctcagttacacaatcagagcattataagggagaaactcttttaaaagatacacttagtttgtaaatattgctcatttgtggggcccacaaaatttaggatagaagaaatatcctttagtgttaaaatcagataaattcacatgccattaacctcaaaattataaaaaatctgtgttaacactttgttcagatccttctggtactggttccaaatgtggtcccagaatctacatcagtaccactttgaagctggttaaaatgcaattctctggcctcactcaggatatactcaatcagaaattctgggggtagggaccagc

SEQ ID NO: 3083 - DNA, 595 bp, Homo sapiens
aaaattgatatgcgatgaatcactacagaatagaaccttcaatmgaaagcagtgaaggatttactatcagctcttggctttgtacatataattagaggaggtatccacccaaggagtggatctggtagttgtcagcgtcagtagttacatgacacaaacatatctagagatgatggattgtgattggatttttcacttttaattcagttattttggcatgagttagaaagaaatgagaaatatttcgaaaatatattgagttcttcgggctagaatttcctgggtgaatcaaatcaatattagcaagtcattcaacctaaatgcctctctattaagtgaatagaaattactaggtgaaatcctaaggtaggtttagctactcctgtctgaaaaaaagcagcatagcatgattgaaagagaatagcctttagaatcacacactcctggtttgggttcccaaagctgatatttatctgctataaaacggtggataaatagtgcctctgattctaaatttcttcagttctaaaagtggaacaaacacatacctcaataggctgtttaggatttaaaaattgcatttgaaaaaaaggca

SEQ ID NO: 3084 - DNA, 595 bp, Homo sapiens
aaaattgatatgcgatgaatcactacagaatagaaccttcaatagaaagcagtgaaggatttactatcagctcttggctttgtacatataattagaggaggtatccacccaaggagtggatctggtagttgtcagcgtcagtagttacatgacacaaacatatctagagatgatggattgtgattggatttttcacttttaattcagttattttggcatgagttagaaagaaatgagaaatatttcgaaaatatattgagttcttcgggctagaatttcctgggtgaatcaaatcaatattagcaagtcattcaacctaaatgcctctctattaagtgaatagaaattactaggtgaaatcctaaggtaggtttagctactcctgtctgaaaaaaagcagcatagcatgattgaaagagaatagcctttagaatcacacactcctggtttgggttcccaaagctgatatttatctgctataaaacggtggataaatartgcctctgattctaaatttcttcagttctaaaagtggaacaaacacatacctcaataggctgtttaggatttaaaaattgcatttgaaaaaaaggca

SEQ ID NO: 3085 - DNA, 1358 bp, Homo sapiens
tgcatatgagtgtgtatgatatgcccatcattcagtgaagtttattaccttgatattcaaaggggaatgagtttgccatgtgccctatgaggacttgatctgcctagacaaggaggtaccttttttgagtttcacaaaggtgtcacttgggttaaaggtgaccttgcaaaatagtgtcttaaaaaccaaactaaatgggatgaagttgaggtcagaaaagccayggatgcagatatatccaccaaaagcttgtcgctggagttagttggcttgtgtcatgaccggcttcctggaagggcattctgtgcagtcatacagtgcctgtgatcagaaggaccctgcatttagtttaatgttctgctatcaccatcttgaaattctaataattttatttttgattttgtgttttgtaagtgaagcatggcaatgaagtacacacatggacagaggggatacttgcaataggcatcttccttgaggccacatttgcatatggcagacttgctgccctgtgagcacagaattacagtggacacatgatgtgtggtagctcagcaaaactgaaaactacaaattaaatgtggttacctctatgtctgagtaagtggaggtgctcacagccttgagaggccacatgtgtcatttgaaccagaacttgctttttattttgcactggccatgtctgttgtgctgagtaaaccagaaactgagatttccacacttcaagtacaatgaatttgaccccaaagcaagaggaactctgtaccttcctcccagagaactgagaattcagaggatttcgggaagaaacacatatacctaggagtgaacaaatagtgaccttgtttgcagaatgtaggctagataagaataaacagataaaatgaatccttgaaggtatgaaacataatacacaaggggaaaaatacacactaactttggcaataagcattcctatctaaacacacacatccaaacaaagcaaaaaccaaaaaagcaaaaagaccaaaaaaacccatagaaaattgataagaaactaatgaacgtgggccaaatatgatagacaataaatcactaaaattttacaggtaaaaacacagttaaaacttttcttcataaataatgtgttcatgagaaatggtaatttgaattccagacagtataacttttattggtctctagaagcatacttgtaaatttctttcttttttaaattaagagctatataacttgaggttgatgaaaatgtactgtatcagtgatcttaaataagttgaacaggtgaaccatctctgaaacaaaactgtccaaaatgagttacagctaaccaagactaatgtcacagccatggggatgca

SEQ ID NO: 3086 - DNA, 630 bp, Homo sapiens
cagtgagttctcactctggtatactggatttgttcttgcaggaatggattagttccctggagtgtgggttattataaagccaggatgctccttaggacttctttttttggcacatgtccagtttccctttaaccttctctttcatgttatgaagcagcacaggagccctccccagaagccagggccatgtccttgaacttctaaggctacagaaccatgggctaaataaacttcttctcttataaattacccagcctcagatattctattatagcaagacaaaacagaataggacaggtgggttccttaggaacctgtcttgagatgagtttttgtgtgatatcttaggaattgttcatagaaaaatctggcaagggaggatagaggtgggaaagwaagggaaggacatcggacaagaatgaattgtcacatagcgtacagagtagagttggatttaatcctatacaagactgcgatgacgatgtaaggcacatatcagagttgactcaaccagggaacaagagaaatggagaatatataatctgcactatcagccatgggttaagactctcttgggggaatgtcccaagaacttgcctctccacgtccatgggcaaaggagtctggcaa

SEQ ID NO: 3087 - DNA, 630 bp, Homo sapiens
cagtgagttctcactctggtatactggatttgttcttgcaggaatggattagttccctggagtgtgggttattataaagccaggatgctccttaggacttctttttttggcacatgtccagtttccctttaaccttctctttcatgttatgaagcagcacaggagccctccccagaagccagggccatgtccttgaacttctaaggctacagaaccatgggctaaataaacttcttctcttataaattacccagcctcagatattctattatagcaagacaaaacagaataggacaggtgggttccttaggaacctgtcttgagatgagtttttgtgtgatatcttaggaattgttcatagaaaaatctggcaagggaggatagaggtgggaaagtaagggaaggacatcggacaagaatgaattgtcacatagcgtacagagtagagttggatttaatcctatacaagactgcgatgacratgtaaggcacatatcagagttgactcaaccagggaacaagagaaatggagaatatataatctgcactatcagccatgggttaagactctcttgggggaatgtcccaagaacttgcctctccacgtccatgggcaaaggagtctggcaa

SEQ ID NO: 3088 - DNA, 2139 bp, Homo sapiens
gagtaccactctctgtgaaatagaagacagtgcaggcatttgaagaaggaaactgtcaacttcattctgtttaagaagagaaatgtgatggctatatgaatcatagattagaaaacatgagattggaagtaagtgcaggaattaggaaactattacaatagtcctggcacacaggttgggaccgctggttcagaagcattggcaatagaagagagatcacaaaaataagaggtaagaaaaagatataagagcataagagacagagtttgagaagtgtattagagagaaaaactgatggtgactcaaaccttagtaaaggcagagtagcagacttggaaaaggcgttactgaggttacttctggcctgtgagagtggaactggcagaatgcttacattcagatatttaaaagctagttaggaatcaaggcttaaagatatgaacttaggagtcgtcatcaacttaaaagtcaaaattgaaactctgaccttacgtgatactatcaaaggcaaagtgctaagcaaaagtagagaaaggtgatattcaaatagcggggaacttaacattaaaaagcaattacaggaagaagcaacaaaggcatctacaaaagaatattcttaaaagtatgaaaaattggatgaatacagttattaagaaaggaaaaggtagagggtgacattttataattttataaactaaagtcatgaatatattctataattttaaaaagtaaagtcatgaatatatctattggggagtcactagttccttctaagagatcattatcagctgagtttttccagactgtgtggtgtgtgggtatattgtgaaacaacagtgaaacagattcctgttttgaattactcagcagtaaatggtaagtaatttggaagtgaagtcgagtcaggaaaaaggatattttaaaagcatagagaagttcgattccaaaagatgttgtgtcttaggccaaggagtaaagaatgtgtgaatgataaactgcagaaaaatgaaaaaggaaagatgactttgtggcaagaacatcaagaaaaatataaggtgttgttggaaaacataattgaaaagagttggaagagtatgcaaagtggcatgtttaaaaatatagaaataaaaataaaaataaaaaaacatttttgaaatacatagagtgtgattgaagcaatttatataaaatgatgtcaattaatgttattctgggagaacaagaataataaaaattagattgggaaccaaaaaagtgtgggaaatatttggaattccagctaggaagaatggaatggaccttactttgagataaatactagaattggataacagcagggctgcctggcaaaggccattgattacatgaatcttaatcattctataactttctttctactgcaagcagatagaaggaagaaagaatacaatgaaaatcacaaaacactgtgacttggaagataaaccattctaggtgaaaattggcaatataaatactaatcaattttagatcacaatctcaattaatatttgtattgtaagtagactaataatgaaaaaatacagttaacccattccttatgacactaagtggtataaggagtttgtgttctctgttatattgttgactttcataaaataatgactgtgatttggacaattctttgacactttagggtagaagatacggtttcttcacctagttgtccaaatcctcacctgttctaagatttttaagaaggaataatttttatattaatataaaaatagctaagatctaacactacaggtagaaacactggttcaacattgaaattctgggctttatatctagttttgggtctttgtgtagaacgaaggtaccaaaagccaaatggtgaagaacacagatcttcagtctgcgtgtgtgggttccagctttaccacttcttagttgcgtgcctgtggggaaattactgaaactcwcaattttctcatctgtaaaattgaaataattaaactatcaaactcaaaagagtcaatgagttttcttaaaagattccatttaatgagcaattcatggcccatagtaagtactgagtaaacatagactgttattaatactattatcatgtatgatgcagaaattatatttacagca

SEQ ID NO: 3089 - DNA, 628 bp, Homo sapiens
gcagtgtctctgttgtggcttccaaattatccctagaatagattaagaaattctaggaaatatcaagtcaggaagagacacaggtcctcagaaacataattggagataattcgcttcctagatcagcatccagactgtagactcctctttgtcttaataaacaaacaaggaagtaaataaagaaatcagaagcagttacatttgctgccagagagcactaaaaaataataataatttcaagacgcaagaaatattttatagaacaagagacaaaacaacaatagaggaattttgttgaggtgtgcaaactgttatttaaatacacatcagctgaagagtctatcacaaagagtatagagagtacaagaagattaagaaatatattacaayaagaacttcagaggttaaataattactagcatcaaatttcatatttaaaataaaactccagacattcatttagttgaaacatacagttaaatggcggccaaaagaaaatctaattgctatggatagaacatttgcaaatgtcatatgagaaagtcattttttcaggcaacatattatacatttttaaatatcaaaaaaatgaggtctggagttaaacaaaattaaatcaaatgaaaat

SEQ ID NO: 3090 - DNA, 607 bp, Homo sapiens
gaaattaatggcacaagaaaaaacagctggaaatatttgtatctaaccaaactctggagggaagttacctttgctaagttcatctcttttctttctttttctttttcccttcccttttttttttttttttttttttcttgacagggtcttgctttgatgcccaggctggagtgcagtggtgcaatcacagctcactgcagcctcaatctcctgggctcagatgatcctcccacttcagcctcccaagtagctgggactacaggcacctgccaccaagcccagctaattttttgtattttttgtagagatgacgttttcccatgttgcccagcctggtcttgaacttctaggctcaagtgatctgccagccttggcctcccaaagtgctgggattacaggyatgggcattacaggtgtaagccaccacacccggccataaactcgtctttcatagtaggaattgtttccgatgctgttagttcttcaataaccaccccttcctctatctttagtcacagaactcttacatctcagctggacaccacctgacatggctacccagacaaaaattatatttcccagcctccattgcagctacatgtgatca

SEQ ID NO: 3091 - DNA, 586 bp, Homo sapiens
tgccaaaccagaactttacacccagagaaaatctctttaagattaaaatcaaaatacagacattttcaaaatgatgaagtttattatcaatgggccctaaactgttaaagaacgattttaaggaaaatgatccccaaaagaaggtcagagatataagaaaaagtaagcaaagaaaaaggtaaatacaaggtcaggagatcgagaccaccctggctaacacagtgaaaccctgtctctataaaaatagaaaaaatagacgggcattgtggcacacacctgtactcccagctactcaggaggctgaggcaggagaatcacttgaacccgggaggcaaaggttgcagtgagtcaagattgcrctaatgtactccagccttggagactctgtctcaaaaaaaaaacaaaaaaaaaggtaaatacagctggatgcagtggcttatgcttgtaggaggaccaagtgagaggatcacttgaggccaggagttgaagaccagccagggcaacacaacaagaccccatttctacaaaaaaaaaaaaaaaaaaaattatccaggtgcagtggcacatgcctgtagtcccagttact

SEQ ID NO: 3092 - DNA, 1171 bp, Homo sapiens
ctaggtcctttgacaactctgttcctctgcaaaggcagttcttgattatctctcaaatgattaaccatttggtccagttacccagtttctaggggccttcaaccagagttggccacagataaagctggttaaaaaaaaaatggtctaatgtacttcccacctttctaaataacatgctagcatttaagcaaggccttgcttcctcaagcaaagggagtgactaatacgtctcctagcaggctggtggaatcggtacttttgaacacatgggctgtgtggctgcacgtcatccctactccattgcctgatgcaaaactactccaggactgggacaggcagaaggtgctgggctcttgcacaaggggtatcttggtgaatgcctgaaaattatacctgaattccaaaacaaaagtatttgggggactgagcacagtggctcatacctgtaatcccagtactttgggagctaaggtgagaggacggcttgaggccaggagtttgagaccagcttgtgcaacaaagcatgactctatctctacaaaaaaattaaaaaattagccaggcatggtgccacaaggctgtagtcccagctacttgggaagctgagatgggaggattgcctgagccctggaggttgaagcagcagtgagccatgactgcaccactgcactccagtctggagtgagaccatgtcaaaaaaaaaaaaaaaaaaaaagtactggggagattatgtattatttttatgttattcatatcaatcaacagttaatcaaaacaagaatcattcttataccctcttttagtttatctcttccaacagaaactgattctcagtgtatccctaaggggattaggtactctcaaaaaataaccatcttataataggaaacataaaagaccagaaagaaagatycatttaaaatacataataattagtaaactagcaaactgagaaaatatctcctttaaaagaaaaaatgatacttcttataaggctgagacataaggaaggggaaaaaaaggaagaaaggataaataaatgaatgaaaaattgagaggcagggtaaactaagaacttaacttacagtcaaatgttagggccccaaactaataggcgaataggaaggtgaacaaaacctctttctgcctgctggattcttaagagtctaaa

SEQ ID NO: 3093 - DNA, 627 bp, Homo sapiens
acatggcaaaaccctgtctctactaaaaatacaaaaattagccaggtgtggtggcgggtgcctcccagctactcgggaggctgaggcaggagaatcacttgaatctgggaggtggagattgcagtgagccgagcttgcaccactgcacttcagcctgagtgacagagtgagactctctctctctcaaaaaaaaaaaaaagtgggtataaatgtgactgcaaaactgtcctgggctgctcctctgcctgtgggggtagccttgcttggaaggagcagtcacagagctgtaacactgcctcttgaataaagctgctttcctctatctctggtttgcccttgaattctttcctgagcaaagccaagaacccttgcaggctaagattcactatggggctcgcctgccctgcgtcatctccactgcaaaactccttatccaagtaccatcttatccaagaaccatctcatgttattttctcattttatctttaactcattccatcagttatccccactttctactacacattaatccactccagtgctactaacctttctccttaagttgttaagtttgtcaastgtctcccaacattgaaaaaaaattttttaacttaggtaataagttaa

SEQ ID NO: 3094 - DNA, 631 bp, Homo sapiens
  misc_feature (1)...(631): n = A,T,C or G
ctactaaaaatacgaaaattagccgggcatggtggcaggcgccttgtatcccagctactagggaggctgaagcaggagaattgcttgaacctgggaggcggaggttgcagtgagccaagatcatgccactgcactccagccggggcaacagagcaagactcaggtgtcccgacctgacgagtgccattcaagttggatttagccatgaaataagttacaaaaaactttacatttatcagcactttgggaattttgaaactacagataagggattatagatatataatgctgaaatatttactatcatattggttctgatccacaatattggaaaatawtaaaagtggaaaatatagggcctgaccctggtgttacaatcattggcttcacttgagttctcaagtgtacccactgtggcagcagcaatcctcaacacatttgctgttagccagatttttaatacagacctacatggccttaactcattcttgtttttcttggcacttattctcttttttaaaatttgtttannnnnnnnnnnnnnnnnnnnnnnnnnnnnnnnnnnnnnnnnnnnnnnnnnnnnnnnnnnnnnnnnnnnnnnnnnnnnnnnnnnnnnnnnnnnnnnnnnnna

SEQ ID NO: 3095 - DNA, 800 bp, Homo sapiens
cctatgctcccaaccgaatgtcctcttggaaatagctaatattcaaagcatattgactgtgcccccagatcctgttctaagttcattacatggattaactcatttaactctcccctataaagtaagtatactgtattactaaccccatttattgctgaagattctgaggcacagagtagtttgtctaagaccacacagtagtaaataatagtgtcaagatttgaagtcaggcagaccagctccagagttctatctctaattgattaggcattgttgcttctgatgctctcatcaacattctgtattgtcctccttattcttattattttgaaagtaaataatgtcatccttttgttcaactttgtttgtgtacttagtagtagaattaaacactttgtcactttttcaatttcagttattccatgagttcsaaatcccttgattctcttttccactggaatatcaatgctgttatttatttttaaaagctcttttcacattaaggctacaacagtgtctgttacaatagctatagcattttttctcatcttgatatttgttttaaattgcatttttgtataaacaaaagtactatttttattcatcttttcatacacctatcagaatcctttaattttttttggcatttctcttccatggcttttatctaagaaaatagtttttttgcccgaatgtctgttaactattcacctatattttcttctgtttttgttgttgttgctacatttctatatttgctttttaaattcatgtgaacattatttttatgtaaataagag

SEQ ID NO: 3096 - DNA, 800 bp, Homo sapiens
cctatgctcccaaccgaatgtcctcttggaaatagctaatattcaaagcatattgactgtgcccccagatcctgttctaagttcattacatggattaactcatttaactctcccctataaagtaagtatactgtattactaaccccatttattgctgaagattctgaggcacagagtagtttgtctaagaccacacagtagtaaataatagtgtcaagatttgaagtcaggcagaccagctccagagttctatctctaattgattaggcattgttgcttctgatgctctcatcaacattctgtattgtcctccttattcttattattttgaaagtaaataatgtcatccttttgttcaactttgtttgtgtacttagtagtagaattaaacactttgtcactttttcaatttcagttattccatgagttcgaaatcccttgattctcttttccactggaatatcaatgctgttatttatttttaaaagctcttttcacattaaggctacaacagtgtctgttacaatagctatagcattttttctcatcttgatatttgttttaaattgcatttttgtayaaacaaaagtactatttttattcatcttttcatacacctatcagaatcctttaattttttttggcatttctcttccatggcttttatctaagaaaatagtttttttgcccgaatgtctgttaactattcacctatattttcttctgtttttgttgttgttgctacatttctatatttgctttttaaattcatgtgaacattatttttatgtaaataagag

SEQ ID NO: 3097 - DNA, 800 bp, Homo sapiens
cctatgctcccaaccgaatgtcctcttggaaatagctaatattcaaagcatattgactgtgcccccagatcctgttctaagttcattacatggattaactcatttaactctcccctataaagtaagtatactgtattactaaccccatttattgctgaagattctgaggcacagagtagtttgtctaagaccacacagtagtaaataatagtgtcaagatttgaagtcaggcagaccagctccagagttctatctctaattgattaggcattgttgcttctgatgctctcatcaacattctgtattgtcctccttattcttattattttgaaagtaaataatgtcatccttttgttcaactttgtttgtgtacttagtagtagaattaaacactttgtcactttttcaatttcagttattccatgagttcgaaatcccttgattctcttttccactggaatatcaatgctgttatttatttttaaaagctcttttcacattaaggctacaacagtgtctgttacaatagctatagcattttttctcatcttgatatttgttttaaattgcatttttgtataaacaaaagtactatttttattcatcttttcatacacctatcagaaycctttaattttttttggcatttctcttccatggcttttatctaagaaaatagtttttttgcccgaatgtctgttaactattcacctatattttcttctgtttttgttgttgttgctacatttctatatttgctttttaaattcatgtgaacattatttttatgtaaataagag

SEQ ID NO: 3098 - DNA, 1118 bp, Homo sapiens
ctggcctattgactatgttatcttgtgtaaaaatgcagattcactgagccagataaaggcatgaatgactgttttcccctgctcccttctcacatgaaaattaagtatttttcaatatcccacccttttccctttaagtactgaagccctcaaaatcatctttggagaagcgcatagacctgtcttctgggcatgcaaccttagctttggcaaagaaacctccttaaatgattgagacttgccttggtattttccttgactgacaccagttggatgaggtttttttcttcataaatagatactaaaagttatcaaatactttttgctaagtttttttgagatgatcatatgctttatctccttcattttgtttacatgatgaatgacaaagaaatgtccctttttgaaatggttatttttgttattgcattttacctcatttagtaggtgatatgtactttcttactattttttagtggttatcttacatattacatattttctcaatttattgatgtctaatgcaaatcaggactttcatctctttctgcaaaatgcaagaacttacaagttttgttttacctttgttctcctttccaacctatatgctttggtttcaagtattttaattctctatgagtaaaactcacaggcattactcatattttggccaataagtagatttgtccatatattcctttcttttagtatttcctttagtgaacaagtaatgttgacaattctcttagtttttatttgtgtgaacatgtctgagatggtttggctatgtcctcagccaaagtstcatcttgaattgtaatccccataaatcccacgtgtaaggggagagactaggcagaggtagttgaatcacgggggcagtttcccccatactgttcttataatagtgagtgagttctcataagatgtgatggttttataagtgtttggtagttcctgctgcattctgttgccttgtgaagaaggtgctttgcttctcctttgccttctgccatgattgtaagtttcctgagacctccccagccatgcagaactgcctttcctttctaaattacccagtcttgggcatttttttatagcagggtgagaatggacta

SEQ ID NO: 3099 - DNA, 1118 bp, Homo sapiens
ctggcctattgactatgttatcttgtgtaaaaatgcagattcactgagccagataaaggcatgaatgactgttttcccctgctcccttctcacatgaaaattaagtatttttcaatatcccacccttttccctttaagtactgaagccctcaaaatcatctttggagaagcgcatagacctgtcttctgggcatgcaaccttagctttggcaaagaaacctccttaaatgattgagacttgccttggtattttccttgactgacaccagttggatgaggtttttttcttcataaatagatactaaaagttatcaaatactttttgctaagtttttttgagatgatcatatgctttatctccttcattttgtttacatgatgaatgacaaagaaatgtccctttttgaaatggttatttttgttattgcattttacctcatttagtaggtgatatgtactttcttactattttttagtggttatcttacatattacatattttctcaatttattgatgtctaatgcaaatcaggactttcatctctttctgcaaaatgcaagaacttacaagttttgttttacctttgttctcctttccaacctatatgctttggtttcaagtattttaattctctatgagtaaaactcacaggcattactcatattttggccaataagtagatttgtccatatattcctttcttttagtatttcctttagtgaacaagtaatgttgacaattctcttagtttttatttgtgtgaacatgtctgagatggtttggctatgtcctcagccaaagtctcatcttgaattgtaatccccataaatcccacgtgtaaggggagagactaggcagaggtagttgaatcacgggggcagtttcccccatactgttcttataatagtgagtgagttctcataagatgtgatggttttataagtgtttggtagttcctgctgcattctgttgccttgtgaagaaggtgctttgcttcycctttgccttctgccatgattgtaagtttcctgagacctccccagccatgcagaactgcctttcctttctaaattacccagtcttgggcatttttttatagcagggtgagaatggacta

SEQ ID NO: 3100 - DNA, 549 bp, Homo sapiens
  misc_feature (1)...(549): n = A,T,C or G
ccttgaaactgcacacactcaccccaacttctcacttccactaagtaccacattcaacttacctttccccatctctttacctttatattcgctagttaccaattaactttacaaagcccgcttcagcanccctgaaagncctcctgtcacaaatattgtcaaatattcctttgcaaccccacagtacttaagatactccactctatttcaactgttttatgtcacgctttactgttgtttttatcaagctgtcatttcttttttcttttttggagacagagtcttgctctgtttcccaggctggagtgcagtggcacaatctcggctcactgctacctccgcctcccgggtcaagtgattctcctgcctcagcctcctgagtagggataccaaggcacctgccacaacacggctaatttttgtgtttttagtagagayggggtttcaccatattggccagtctggtcttgaactcctgacctcgtgatccacccacgtcggcctcccaaagtgctgggattacaggcgtgagccaccgcgccaggccca

SEQ ID NO: 3101 - DNA, 549 bp, Homo sapiens
  misc_feature (1)...(549): n = A,T,C or G
ccttgaaactgcacacactcaccccaacttctcacttccactaagtaccacattcaacttacctttccccatctctttacctttatattcgctagttaccaattaactttacaaagcccgcttcagcanccctgaaagncctcctgtcacaaatattgtcaaatattcctttgcaaccccacagtacttaagatactccactctatttcaactgttttatgtcacgctttactgttgtttttatcaagctgtcatttcttttttcttttttggagacagagtcttgctctgtttcccaggctggagtgcagtggcacaatctcggctcactgctacctccgcctcccgggtcaagtgattctcctgcctcagcctcctgagtagggataccaaggcacctgccacaacacggctaatttttgtgtttttagtagagacggggtttcaccatattggccagtctggtcttgaactcctgacctcgtgatccacccacgtcggcctcycaaagtgctgggattacaggcgtgagccaccgcgccaggccca

SEQ ID NO: 3102 - DNA, 549 bp, Homo sapiens
  misc_feature (1)...(549): n = A,T,C or G
ccttgaaactgcacacactcaccccaacttctcacttccactaagtaccacattcaacttacctttccccatctctttacctttatattcgctagttaccaattaactttacaaagcccgcttcagcanccctgaaagncctcctgtcacaaatattgtcaaatattcctttgcaaccccacagtacttaagatactccactctatttcaactgttttatgtcacgctttactgttgtttttatcaagctgtcatttcttttttcttttttggagacagagtcttgctctgtttcccaggctggagtgcagtggcacaatctcggctcactgctacctccgcctcccgggtcaagtgattctcctgcctcagcctcctgagtagggataccaaggcacctgccacaacacggctaatttttgtgtttttagtagagacggggtttcaccatattggccagtctggtcttgaactcctgacctcgtgatccacccacgtcggcctcccaaagtgctgggattacaggcgtgagccacygcgccaggccca

SEQ ID NO: 3103 - DNA, 549 bp, Homo sapiens
  misc_feature (1)...(549): n = A,T,C or G
ccttgaaactgcacacactcaccccaacttctcacttccactaagtaccacattcaacttacctttccccatctctttacctttatattcgctagttaccaattaactttacaaagcccgcttcagcanccctgaaagncctcctgtcacaaatattgtcaaatattcctttgcaaccccacagtacttaagatactccactctatttcaactgttttatgtcacgctttactgttgtttttatcaagctgtcatttcttttttcttttttggagacagagtcttgctctgtttcccaggctggagtgcagtggcacaatctcggctcactgctacctccgcctcccgggtcaagtgattctcctgcctcagcctcctgagtagggataccaaggcacctgccacaacacggctaatttttgtgtttttagtagagacggggtttcaccatattggccagtctggtcttgaactcctgacctcgtgatccacccacgtcggcctcccaaagtgctgggattacaggcgtgagccaccgcgccmggccca

SEQ ID NO: 3104 - DNA, 563 bp, Homo sapiens
tttttaaaactagaactcccatattgagtatctttatataaaattctgtgtatacttttgattatttctttaaggttttctttttctttttttttttccttaaaggttaacttcttggccaaatagtcaatagtgtggtgctgctgctgagcagccactcttgatttagcatttcctttggccaacttacagagcagagtttctgtggctgaggatgttatttctacctaccctctttctctctgcctgtcctcagggatatttctcccttcaggaggtcacgatgttcccatgggttatggcaacaggtctcctagcagggaacccaagatggtkggaaagctggttgaccaactcagtctcaccttttccagtgtagaatctgtgagttgggaaagatgttcctaatgcttgttgtttggcagagaaagtgacgtagggcctcccagatatataagtttgattctcctaccatctgcgtggagtttcttcacctgtctgtggccctgggatctgcctcatctgcatatttgagttctggattgttgctgatgaaaatcccc

SEQ ID NO: 3105 - DNA, 622 bp, Homo sapiens
aggcattgaggttatctcccattttgagctatcatgaatggttcttcactgaatatttttggacatatcttacagtaggcatatttatacttatttcagttgggattatatctaggaatgaaatttctgggtcgtgtagttgttttttaaggctacatattaaaatgtatcctgtaaacacccctacaatatttagtgaggaatagaaactcaaagtcactcaagtaaaaaggagtttatcaaagctgcacaaactccaaggaataaaaaataggaaactatcaaaaggggacacataaactcagaaagtatagcatttcatgtttaaacagctctacatacttcagtagaagaagcatttaaaattttataacttggatgctyattagaaggccaatgagtcatcaagagcaagttaaattggtaagggtgtataatacattttagaaaaaaattttattaaaatattaagatataattttgttcttaatgagaaaaatatttaacaatatgggaaaatctaccccagtcctactttactaaggagtctgaaaagctgctatttaattgacagcggggaaaaaaaaactttttatataatgagaaaaaaatataatgggaa

SEQ ID NO: 3106 - DNA, 622 bp, Homo sapiens
aggcattgaggttatctcccattttgagctatcatgaatggttcttcactgaatatttttggacatatcttacagtaggcatatttatacttatttcagttgggattatatctaggaatgaaatttctgggtcgtgtagttgttttttaaggctacatattaaaatgtatcctgtaaacacccctacaatatttagtgaggaatagaaactcaaagtcactcaagtaaaaaggagtttatcaaagctgcacaaactccaaggaataaaaaataggaaactatcaaaaggggacacataaactcagaaagtatagcatttcatgtttaaacagctctacatacttcagtagaagaagcatttaaaattttataacttggatgcttattagaaggccaatgagtcatcaagagcaagttaaattggtaagggtgtataatacattttagaaaaaaattttattaaaatattaagatataattttgttcttaatgagaaaaatatttaacwatatgggaaaatctaccccagtcctactttactaaggagtctgaaaagctgctatttaattgacagcggggaaaaaaaaactttttatataatgagaaaaaaatataatgggaa

SEQ ID NO: 3107 - DNA, 622 bp, Homo sapiens
aggcattgaggttatctcccattttgagctatcatgaatggttcttcactgaatatttttggacatatcttacagtaggcatatttatacttatttcagttgggattatatctaggaatgaaatttctgggtcgtgtagttgttttttaaggctacatattaaaatgtatcctgtaaacacccctacaatatttagtgaggaatagaaactcaaagtcactcaagtaaaaaggagtttatcaaagctgcacaaactccaaggaataaaaaataggaaactatcaaaaggggacacataaactcagaaagtatagcatttcatgtttaaacagctctacatacttcagtagaagaagcatttaaaattttataacttggatgcttattagaaggccaatgagtcatcaagagcaagttaaattggtaagggtgtataatacattttagaaaaaaattttattaaaatattaagatataattttgttcttaatgagaaaaatatttaacaawatgggaaaatctaccccagtcctactttactaaggagtctgaaaagctgctatttaattgacagcggggaaaaaaaaactttttatataatgagaaaaaaatataatgggaa

SEQ ID NO: 3108 - DNA, 592 bp, Homo sapiens
atatatttatttaaaatgagaaaaaacaaattatagatttttagaagctgtgaaataccacaaacatcacaaatccmgcccccctaaaaaagaaccctcaaaaatcgaatttttataaatgagtatattggcataactctagactggtacttcaatgtgctgagaagtcttataagctgcctcagaatcaaggttccttcaatctttttatccaccctccacatttccccttgccaaatgtggggaggagctctctttggaatttccttatctgacgaagaaaaacttctttccaacagaaatgcaattgtcttgaaggtcctctctagcgatctcactgaataactaggaaaaaaagtcaaccactggagaaaagaagagcctgggagtcatcagtacacccagacaaactttttctctattctccttctgcagctccaagagactacctggggcactttatctgcataagacaacctttgctcctgtgcagttctgttcctcacctttccataatgtctgcttttgcctttgtgcatctatcccctatgaagagactacttaaccatcaaccatccggttcctctttgag

SEQ ID NO: 3109 - DNA, 638 bp, Homo sapiens
aatttaagaatgtgtttccctttcagcaaacaaaaatatgacaaaatcatattggttttctagtcttgagwtcagctaaatctgggttcttgtcccatgaccaggaaaatttaggcacatagtcacattgaagggtgaggaggacagaatttattagacgaaaggaaagctctcagcaaagagagggattctccaagcaggcttccccatcacagataaatactaggccatgacacatgagctaaagatgccaggctcctcccctgcaaaaggcatgaattcctggtggcttcacaccatttcgccagtggatgtgggcctccagttcattgagggcatgtccaggcaagaccctgtgcaggctcccaaatctgcacaaaaatatctggtgtaaacacttgttggggggggttggagattctccaggaacccttccttatcttcctagtcatttgtttgcctcctgcctctatcagtctcatcaccaaaatgcaaataaaaactgagtggagaaactttttgttctcttctcaaaagtaggtagagggagtgcctactatcatactgggcattttgtgtattagttcatttaattgttcatatagcatctatctgaagaaggagttatttcccctttt

SEQ ID NO: 3110 - DNA, 638 bp, Homo sapiens
aatttaagaatgtgtttccctttcagcaaacaaaaatatgacaaaatcatattggttttctagtcttgagttcagctaaatctgggttcttgtcccatgaccaggaaaatttaggcacatagtcacattgaagggtgaggaggacagaatttattagacgaaaggaaagctctcagcaaagagagggattctccaagcaggcttccccatcacagataaatactaggccatgacacatgagctaaagatgccaggctcctcccctgcaaaaggcatgaattcctggtggcttcacaccatttcgccagtggatgtgggcctccagttcattgagggcatgtccaggcaagaccctgtgcaggctcccaaatctgcacaaaaatatctggtgtaaacacttgttggggggggttggagattctccaggaacccttccttatcttcctagkcatttgtttgcctcctgcctctatcagtctcatcaccaaaatgcaaataaaaactgagtggagaaactttttgttctcttctcaaaagtaggtagagggagtgcctactatcatactgggcattttgtgtattagttcatttaattgttcatatagcatctatctgaagaaggagttatttcccctttt

SEQ ID NO: 3111 - DNA, 1304 bp, Homo sapiens
ggttttggattttatatggcattaaaatgacaggtggtttcatctaggtcaatttaaataaacttttacaaaacaacttaggagctatttgtctccattctgggaccgtgatggtggtgtgtgacacacccagaggaaagttctctgcccaaggttctgaagagctgggtgaatgacttcctcactcccttctctgggttgtggcctggaggatcttctatggcaacagtgttggtttccacctgagatctagtttgggtatttggtatcctacctccaggtgccaagtgtggctaaggctcctgaggagatagccagggacctagggattcccaaccctcttggttctctggacaacaactctgccctttagttgtgactgagttgtcccttctgaccttacatctggccctcaatgttgtagtgggaaggcctgggggctttcaagccacaaggatgcaaatggcagctctgccacttaccagcttggtagctgggtgaatgacctgatctttctgaccctcagatcctttatttgtacattcagttgacagccatttttacctaatcacattataaaaggctttaaaaaaaacgaagatcataggttcttaattcaggagaccatcaatgtatcattccttcaaaaaatattcaagtgatacctatgggctggatgctatttaagtgccaaagatacagcagtgaataaggtggacaaagccccaccttttgggagtgtaccttctggtttagggagtcagacaagaaagaaaggataagtattacaaaggcaactaaagcaggatcaggagtgcttttataaataaggtagctatggaaggcctccctgatgaagtgacatttgagcagagacatgtgggacatgaggacgcagtacatgagcwtattggagcaaaggtgttctaggcagaagagactgcatgtgcaaaggccctggggcgggtcatgcttggcatattcagagaacagcaaggagccccgtatggccaaagcagagtgaatgacaggaagagaggtggaagatgaggtcacagaggtcacaggagcctgatcatgttaaccacagtaaggattctactctgtataagacaagatcaatgggtgggttttgtataaaggagcaatctaatctgacttcgatttcatgaagacaactctggtaattgtgtggagagtaaactatgagggcacaggtggaggaagcagcggccagttatgagattactgcaataataataattggcaccaagttattattgatgttttagagaaacaaaaaa

SEQ ID NO: 3112 - DNA, 697 bp, Homo sapiens
gatgtcacgactcaaagccttgtaccttaagactcgttttcaaactgagcatacttcttcaattcctcccatcaaacaaaatgctcacacagtagacagctcactggggcctgtgtctgatcacagtccacagttcagcaggagagatcttctaaagccaatatctaaaggtaaactttgcatattttcatgaacactactggataatagcttacatttaatcacttcaaatgctgcatttctttctctgatagtttctattttaattttcatctgcagtaatcaaaaaagaggaaagaacgcaaacttataactttctcctagcactttgtcattgactggagctacatttctaaacttttcccacactgttatccttaagacagatagagatataaatcttatraaatccaacaaggtcaaagtttttgtcaggtagcatatatgtaaaatgacctaatgcattctatctcatttcatacagatgaaattatatggcaaatgttgaatatcttgcacatagtagatgctcagtaaatagtagttattattttctaagagtggcattttaaaggttggcagttcagaagcagaatagaacatgatgatactgagagcatcaatgataacaattagcctgcatatagtattttacaatggactgcacactttatacaaattatcacacaactctgtg

SEQ ID NO: 3113 - DNA, 697 bp, Homo sapiens
gatgtcacgactcaaagccttgtaccttaagactcgttttcaaactgagcatacttcttcaattcctcccatcaaacaaaatgctcacacagtagacagctcactggggcctgtgtctgatcacagtccacagttcagcaggagagatcttctaaagccaatatctaaaggtaaactttgcatattttcatgaacactactggataatagcttacatttaatcacttcaaatgctgcatttctttctctgatagtttctattttaattttcatctgcagtaatcaaaaaagaggaaagaacgcaaacttataactttctcctagcactttgtcattgactggagctacatttctaaacttttcccacactgttatccttaagacagatagagatataaatcttatgaaatccaacaaggtcaaaktttttgtcaggtagcatatatgtaaaatgacctaatgcattctatctcatttcatacagatgaaattatatggcaaatgttgaatatcttgcacatagtagatgctcagtaaatagtagttattattttctaagagtggcattttaaaggttggcagttcagaagcagaatagaacatgatgatactgagagcatcaatgataacaattagcctgcatatagtattttacaatggactgcacactttatacaaattatcacacaactctgtg

SEQ ID NO: 3114 - DNA, 326 bp, Homo sapiens
aagatggagtctcgctttgtcatccgggctggatgtggtgcgatcatagctctgcctactcgaactcctgggctcaagcgatcctcctgcttcatcctcgcaagtacctgggactacaggcacatgccaccacacccagctgagagcttattttgttggatactaggtatatttgcttatattgagattgtgttttcttcttcactactaataccctgactgaattagtgatagtcatggaaaaaggtcttgtaacttcctgyatgttttattgatcatgagcagtctaagttacataaacaattaataaaagaaaactaaaagca

SEQ ID NO: 3115 - DNA, 1899 bp, Homo sapiens
tgctttcctcaggttggaatgcactgktgcacacatccgatttcaatttacaaaactggaattaaaccgtatgcaatgtaccttttaaaacttaacattatactaagtatattttgacacataattacacatcctttgaaactgcatataattccaccatagaggtgtatcataatttatgattggacattttgattaaaagccagcaatacaaacctttatgtgtatatctctgactgttcccttaggataagttccctaaaatagaattattgaattgaaaggtacaaataattgtaagtttcttgactgtgatcttgaacattttttatacagatttatttctcttaattaaagtagcactattatgataagtagtgactagtaaccatttccaggtacaaaccgtgacatattcttgtgaacttcatatctataaccatacttaaaatttttaaaaataactcatgacagagcaagtcctggcagcaaaatcaacagttctggctgttagtgttaattcccttctgcaccaaccagctattttcccttcagctcagctatttgctcttgcaaacttactttttcaaaccctagcaaaatttcttcatcttctctaaaattaatgtgttgaatagtaatcctcaactttccttctaatggtaaaattctattattttattctttgtcacttggtcataaaaattgtttcaaaagaaatacaatgttaagatatttctgaaacaaagtacaggctcaataaatatttgttgaataagggggaaatgaaattataaaatgagatatatataattaagttaaatattttttaaaaatgtaattaaacaaattaaattccactcgaagaataatttacagagtgtcttctctgggaaataatctatgttaagtattatggaagacggaaatacaaacagaaaaatagttcctgccctgaagtatttttgcaacaagaaccatacttttttttttttttttttttttgaaagagtctcattgtcacccagctggtgtgcagtggcacgatctcggctcactgcaactttcacctccctgggtcaggtgatcctcctgccttagcctcaccagtagctgggactacaggcatataccacatagcccagctaatttttgtatatatacatttttttttgtagagatggggcttcactgtattgcccaggctggtctcaaactcctgcactcaagggatccacttgccttggcttttcaaagtgctgggatttcaggcatgagccactgcatctggccccatacattaattttgatgggggaaatttataaataaataggaattataccaattgctcttagggtgtttaatctcataaagagacccaaagtttgtgtactcagatgaaataacactaataaaatgtcaagaaaaattttgaacaatttttagcataaccaatacaactaagaaattttgcaggaggtgttatatttatcctaagtgcaaaatattaggataaaaatatcagaaaaaaataatagaaaaactgttctcagttttggtaacatgactactcaggggacaactaagaaagccacaaatcctaaatcagagtttagaaatatccctgagtctcaaaatataccttcacacttacaactatattaaagtggcaaaactcacatttcaggcatcttggaaatggtttctggataaactatgcaaaaacagatatgcatttgcatggtatgcctaattgtcagtttcctattttgccatcgctctgaagatctttttggccacattcagtgaaaacaacatgatattcagcaaattaatcttctggatgttttaacttgggctcttgtggtttattcttgttgttaataatttttaatttg

SEQ ID NO: 3116 - DNA, 1274 bp, Homo sapiens
ttgtcttccccaaccagttgtcaagtaaattgcaaaatgtggctggacatctcggggtatctgtgaagacacatatctctggggttcctttgactatttatttttatcttttcaataaagaaaaatgtcaaacacacaagagtagaaagagtagtataatgaactcccaggtaccaaaactctaccataaaaatgatcaacttacagtcaatattgtttcatctgtattcccttccattcctacccccaccccccatattatttggaagcaaatcgcagagagcttatctcatccaaatatttcagcttgtacctctctaaaatatagactccttaaaaacataattccaataccattattttagagggtaataataatcactcaacatcttaaaatatctagtcagtgctcaagttctcaactattctctgagctatttgaagaccctcaatcacccctaggggctagaaggttttatgtatataacagtattgggaaaatcagggccctgagaagaaaatgcacgtaagaagcatattgagtctataacatttcttagaagactagaaagaggccagagatgaaatggtggtgaacacagaaacccacaattaagaaactattttcaagatcatatttctttttgaagaaaacagcatctacttctcacacacatgcaacagagttcgattcctttattcctggattccacacttacctctctcctatccctacctgccccagtcaaatccagattgttacggtcaaatcagaccatgagcaattctaggggtccagaggtgaaataatggctcagggtggagccccccacaatcatccctcttttacgtcagcasaggaagggctcaaacaagcaaagatgacgctcctatcccagagactgacctggacagcataagagatggcgagacccgcataggctgggggaatctgcccgtgcataagaacgatcatcagccccgtggtggtgatgagggcgatgctgatgaggtccagccgcacagccagccaccgcatcgcacacgtaaacaaaaaaaaaggagcttggttgtcatccagcagctcctggtatctgtgagaaagacaacacttaatgggcaaagaaagtactacacaaccccgcgcatggacaaagcttcagcgaatcagatgatggagggcacgtatttaaatacttcctgtttctaactgagagaatgccctggaaactccaggagggtattctaggaattctggaggtattctaggccgc

SEQ ID NO: 3117 - DNA, 641 bp, Homo sapiens
atttaaaagttaccaaaggtttaccatgaaaggtcaagtctgtctcattcccatcttccagctacccagttctcccttccagtggcaactaacaggttttttttttaatcctttcagagatattctaaatttttatttttattttttttgagatggagtctcgctcttgtcgcccaagctggagtgcaatggcatggtctggcctcactgaaacctttgtctcctgggttcaagtgattctcctgcctcagcctcctgagtagctggattacaggtgcctgccaccacgcctggttaatttttttgtaattttagtagagacaaggttccaccatgttggccaggctggtctcgaactcctgacctcaggcgatccgcccacctcagcctcccaaagtgctggcattacaggcgggagccactgtacccagcctgatattctaaatgttatacataaaaacacatactcaaaggtagcatacaatatattaatacacacatctrtactctgctgtttcactaatatatgctggagatcattccctatcagtacctatagagctccctcattctttttaagggccacatagtactctatggatataccatagcttattcaacctgtcctatattgaagaaca

SEQ ID NO: 3118 - DNA, 1935 bp, Homo sapiens
tctcctggttgaatgtggagacagggtcatccatggcctggcgagtcgggggtgggcgagtggggggcgcagctccaggtctaaaattctctcctgacagagccctggggtttccttgaagcctgatctgagacctgtgcggccagaacttgaggttccaaccccttgagagggcctgattctcaggactgcattgatgttggtgggtggctgccctggtgttctggccctgacatcagccaggtcttctgcttcccaccctacccatgtctgtagaagccagccctgccctgggaaaaagtagggaggaaaaccctgttttaactcacattttcagcgtgctttggaagctcgtagatagagtcaaagatgagaaactgagaccatggcttagaaaggaggtgctcagaaacgaggtgcagcccaaaaagatggcccctcctttcctgagcagctgttccaggctcaccttggagatctgggccaggtagcagctgatgaagtccctgggggcctccggtgccctgagtttgtgcctggtgatctcctggtggattaagctcagcacgacctcttggtacctaaatatctcctggtggggtcctgggaggtggcagagggcccagggaaacacgtcatacagctgtggagagagacgcccacccagggcctactcaggagccagcctctgagtcggggggctccaaagtgggctggagcctttgacttgagtaacccagggctgcctctcatctggagactccccaaataatttagacagaaatgagagctgtggtcagagcagctgtgcttagggcttcgctgggatgttgcaggtccagaaagctgtatgtcctaggatataaccagcctctgattccttgcccatgcattcatgctgaaccacaacaaaggtttgatgctctgaatgtgtcagctcaccaggcagaagccacggtctccctcctgcccaccttgcaccctccctgccaggccctggctgaggcccctgcctgcctcgggcccctaaggtaatggcctgcacacctgcctccccaaatgccaattacccggcgccacacagtgctgacaaakgccaggccaaagtcgatggcttgagtcagttcctggaagatgggatcctctaagaggaagtggtggccaaacacaagggccccgatgactctgactgtggacctgacaatggatacctgagggtcgaagggtctacctgagggtagaggggcagggctcaggacgaggaggcacgagaagcactaccctgagcacccatctgatctcgtatctagtcgctcatttactaactcagtcctccattcccattcctcactcatgcactccgcaaatgcttaccagccgggcgcagtggctcatgcctgtaatcccagcactttgggaggctgaggcaggtggatcacctgaggtcaggagtttgagaccagcctgaccaacatggtgaaaccctgtctctactgaaaatacaaaaattagctgggtctggtggcgcacacttgtaatcccagctgcttgggaggctgaggcaggagaatcacttgaacccgggggatagaggtagcagtgagccgagattgtgccactacactcagcctgggcaacaagagcgaaactccgtctcaaaaacaaaacaaaacaaaacaaacaaaaacaaaaaaacccaagtgcttaccagcccttctacgagccaggtcagagagaggcatgggagacagacaacaatttgaatgacaacagaatgacaacagaatgtggggcaggtatggcacagcagggaatgggagaaggtttggggcctgcagtcaggaggagtgctcagggcaggtgaccgcagctggtctccacgaaggaaccagtggtgtctgcagtggggagggaaggcaccatgggctggggcgt

SEQ ID NO: 3119 - DNA, 1935 bp, Homo sapiens
tctcctggttgaatgtggagacagggtcatccatggcctggcgagtcgggggtgggcgagtggggggcgcagctccaggtctaaaattctctcctgacagagccctggggtttccttgaagcctgatctgagacctgtgcggccagaacttgaggttccaaccccttgagagggcctgattctcaggactgcattgatgttggtgggtggctgccctggtgttctggccctgacatcagccaggtcttctgcttcccaccctacccatgtctgtagaagccagccctgccctgggaaaaagtagggaggaaaaccctgttttaactcacattttcagcgtgctttggaagctcgtagatagagtcaaagatgagaaactgagaccatggcttagaaaggaggtgctcagaaacgaggtgcagcccaaaaagatggcccctcctttcctgagcagctgttccaggctcaccttggagatctgggccaggtagcagctgatgaagtccctgggggcctccggtgccctgagtttgtgcctggtgatctcctggtggattaagctcagcacgacctcttggtacctaaatatctcctggtggggtcctgggaggtggcagagggcccagggaaacacgtcatacagctgtggagagagacgcccacccagggcctactcaggagccagcctctgagtcggggggctccaaagtgggctggagcctttgacttgagtaacccagggctgcctctcatctggagactccccaaataatttagacagaaatgagagctgtggtcagagcagctgtgcttagggcttcgctgggatgttgcaggtccagaaagctgtatgtcctaggatataaccagcctctgattccttgcccatgcattcatgctgaaccacaacaaaggtttgatgctctgaatgtgtcagctcaccaggcagaagccacggtctccctcctgcccaccttgcaccctccctgccaggccctggctgaggcccctgcctgcctcgggcccctaaggtaatggcctgcacacctgcctccccaaatgccaattacccggcgccacacagtgctgacaaatgccaggccaaagtcgatggcttgagtcagttcctggaagatgggatcctctaagaggaagtggtggccaaacacaagggccccgatgactctgactgtggacctgacaatggatacctgagggtcgaagggtctacctgagggtagaggggcagggctcaggacgaggaggcacgagaagcactaccctgagcacccatctgatctcgtatctagtcgctcatttactaactcagtcctccattcccattcctcactcatgcactccgcaaatgcttaccagccgggcgcagtggctcatgcctgtaatcccagcactttgggaggctgaggcaggtggatcacctgaggtcaggagtttgagaccagcctgaccaacatggtgaaaccctgtctctactgaaaatacaaaaattagctgggtctggtggcgcacacttgtaatcccagctgcttgggaggctgaggcaggagaatcacttgaacccgggggatagaggtwgcagtgagccgagattgtgccactacactcagcctgggcaacaagagcgaaactccgtctcaaaaacaaaacaaaacaaaacaaacaaaaacaaaaaaacccaagtgcttaccagcccttctacgagccaggtcagagagaggcatgggagacagacaacaatttgaatgacaacagaatgacaacagaatgtggggcaggtatggcacagcagggaatgggagaaggtttggggcctgcagtcaggaggagtgctcagggcaggtgaccgcagctggtctccacgaaggaaccagtggtgtctgcagtggggagggaaggcaccatgggctggggcgt

SEQ ID NO: 3120 - DNA, 1935 bp, Homo sapiens
tctcctggttgaatgtggagacagggtcatccatggcctggcgagtcgggggtgggcgagtggggggcgcagctccaggtctaaaattctctcctgacagagccctggggtttccttgaagcctgatctgagacctgtgcggccagaacttgaggttccaaccccttgagagggcctgattctcaggactgcattgatgttggtgggtggctgccctggtgttctggccctgacatcagccaggtcttctgcttcccaccctacccatgtctgtagaagccagccctgccctgggaaaaagtagggaggaaaaccctgttttaactcacattttcagcgtgctttggaagctcgtagatagagtcaaagatgagaaactgagaccatggcttagaaaggaggtgctcagaaacgaggtgcagcccaaaaagatggcccctcctttcctgagcagctgttccaggctcaccttggagatctgggccaggtagcagctgatgaagtccctgggggcctccggtgccctgagtttgtgcctggtgatctcctggtggattaagctcagcacgacctcttggtacctaaatatctcctggtggggtcctgggaggtggcagagggcccagggaaacacgtcatacagctgtggagagagacgcccacccagggcctactcaggagccagcctctgagtcggggggctccaaagtgggctggagcctttgacttgagtaacccagggctgcctctcatctggagactccccaaataatttagacagaaatgagagctgtggtcagagcagctgtgcttagggcttcgctgggatgttgcaggtccagaaagctgtatgtcctaggatataaccagcctctgattccttgcccatgcattcatgctgaaccacaacaaaggtttgatgctctgaatgtgtcagctcaccaggcagaagccacggtctccctcctgcccaccttgcaccctccctgccaggccctggctgaggcccctgcctgcctcgggcccctaaggtaatggcctgcacacctgcctccccaaatgccaattacccggcgccacacagtgctgacaaatgccaggccaaagtcgatggcttgagtcagttcctggaagatgggatcctctaagaggaagtggtggccaaacacaagggccccgatgactctgactgtggacctgacaatggatacctgagggtcgaagggtctacctgagggtagaggggcagggctcaggacgaggaggcacgagaagcactaccctgagcacccatctgatctcgtatctagtcgctcatttactaactcagtcctccattcccattcctcactcatgcactccgcaaatgcttaccagccgggcgcagtggctcatgcctgtaatcccagcactttgggaggctgaggcaggtggatcacctgaggtcaggagtttgagaccagcctgaccaacatggtgaaaccctgtctctactgaaaatacaaaaattagctgggtctggtggcgcacacttgtaatcccagctgcttgggaggctgaggcaggagaatcacttgaacccgggggatagaggtagcagtgagccgagatygtgccactacactcagcctgggcaacaagagcgaaactccgtctcaaaaacaaaacaaaacaaaacaaacaaaaacaaaaaaacccaagtgcttaccagcccttctacgagccaggtcagagagaggcatgggagacagacaacaatttgaatgacaacagaatgacaacagaatgtggggcaggtatggcacagcagggaatgggagaaggtttggggcctgcagtcaggaggagtgctcagggcaggtgaccgcagctggtctccacgaaggaaccagtggtgtctgcagtggggagggaaggcaccatgggctggggcgt

SEQ ID NO: 3121 - DNA, 1935 bp, Homo sapiens
tctcctggttgaatgtggagacagggtcatccatggcctggcgagtcgggggtgggcgagtggggggcgcagctccaggtctaaaattctctcctgacagagccctggggtttccttgaagcctgatctgagacctgtgcggccagaacttgaggttccaaccccttgagagggcctgattctcaggactgcattgatgttggtgggtggctgccctggtgttctggccctgacatcagccaggtcttctgcttcccaccctacccatgtctgtagaagccagccctgccctgggaaaaagtagggaggaaaaccctgttttaactcacattttcagcgtgctttggaagctcgtagatagagtcaaagatgagaaactgagaccatggcttagaaaggaggtgctcagaaacgaggtgcagcccaaaaagatggcccctcctttcctgagcagctgttccaggctcaccttggagatctgggccaggtagcagctgatgaagtccctgggggcctccggtgccctgagtttgtgcctggtgatctcctggtggattaagctcagcacgacctcttggtacctaaatatctcctggtggggtcctgggaggtggcagagggcccagggaaacacgtcatacagctgtggagagagacgcccacccagggcctactcaggagccagcctctgagtcggggggctccaaagtgggctggagcctttgacttgagtaacccagggctgcctctcatctggagactccccaaataatttagacagaaatgagagctgtggtcagagcagctgtgcttagggcttcgctgggatgttgcaggtccagaaagctgtatgtcctaggatataaccagcctctgattccttgcccatgcattcatgctgaaccacaacaaaggtttgatgctctgaatgtgtcagctcaccaggcagaagccacggtctccctcctgcccaccttgcaccctccctgccaggccctggctgaggcccctgcctgcctcgggcccctaaggtaatggcctgcacacctgcctccccaaatgccaattacccggcgccacacagtgctgacaaatgccaggccaaagtcgatggcttgagtcagttcctggaagatgggatcctctaagaggaagtggtggccaaacacaagggccccgatgactctgactgtggacctgacaatggatacctgagggtcgaagggtctacctgagggtagaggggcagggctcaggacgaggaggcacgagaagcactaccctgagcacccatctgatctcgtatctagtcgctcatttactaactcagtcctccattcccattcctcactcatgcactccgcaaatgcttaccagccgggcgcagtggctcatgcctgtaatcccagcactttgggaggctgaggcaggtggatcacctgaggtcaggagtttgagaccagcctgaccaacatggtgaaaccctgtctctactgaaaatacaaaaattagctgggtctggtggcgcacacttgtaatcccagctgcttgggaggctgaggcaggagaatcacttgaacccgggggatagaggtagcagtgagccgagattgtgccactacactcagcctgggcaacaagagcraaactccgtctcaaaaacaaaacaaaacaaaacaaacaaaaacaaaaaaacccaagtgcttaccagcccttctacgagccaggtcagagagaggcatgggagacagacaacaatttgaatgacaacagaatgacaacagaatgtggggcaggtatggcacagcagggaatgggagaaggtttggggcctgcagtcaggaggagtgctcagggcaggtgaccgcagctggtctccacgaaggaaccagtggtgtctgcagtggggagggaaggcaccatgggctggggcgt

SEQ ID NO: 3122 - DNA, 1031 bp, Homo sapiens
  misc_feature (1)...(1031): n = A,T,C or G
tgcatatatgcttagctttacttaataatgtcaaagagttttgctaagtagtttaccaagttattctcaaactagagcttatggaagtgctgttgattcaaaaccttaccaacacttggtatcttatgtctttctcattttatctataatctcgagtatatgcaggtatcttataatagtcttaatttgtattttcctgatgtatacagtacattttcatatattgtttgatgatttcaatatccttttctgtaaattgtctttctgagtctttcgcctatacttctattaattggtaggtgtttttatattttggatttgaaaaaaaaaaaatgtatttaaaaacttttatagtatacatatgtctatacccacatatatatacacacacaaactttaagacttctattaatgtcttttgatgaacataatttcttaattttttttttttgcggggagacagagtctagttactgttgcccaggctggagtccagtggncaattttgggtcaccgcaaccttcccactcccaggttcaagcaattctcctgcctcagccttccgcgtagctgggattacaggtgcccacctccacacccggctaatttttgtatttttagtagagatggagtttcaccacgttggccaggctggtctcaaactcctgatctcatgatccacctgcctcggcctcccaaagtgctgggattacaggcatgagccactgcacccagcctgaatttttaatataaccattttactgagatattcataacctataaaattaacacattaaaagtatgcccttaatttttaatataaccattttacygagatattcataacccataaaattaacacattataagtatgcaattcagtgattttcaatatattcagagttgtgcaaccattgccacaatcaattttggaagattttcctcatgccaaaaggaaatcctatacccattagtagtcacttctcatttctccccatcctccaaacccaatcataggcaaccattaatct

SEQ ID NO: 3123 - DNA, 725 bp, Homo sapiens
tccatcttgcaggtcagctgcacagtccgcttctcagaaaccttcgaagtgctaagcagcggtttcctgctttctgtatacaacgctgttacagcaattacaaaactgttgcaactatttcagagaaaggagcttctgtcgttttatgatgaaatatttttgctttttgaaaagtaaaggaaataagtaacaacaacccaggaagctaccactcacaaatatagctgagacctcctgagtacatctccctgaccccaagtcctacggtgatgtttacttttaccgtgtgtgtcctcacactttagccttcatactcacgtataaaataatcaggcaagtttacatgcttgtaccttcatattaccagtatactatatggatacttttgcatcttaatcttttttttttttttttgaaacggaatttcactcttgttgcccagactggagtgcaatggcgcgatctcggctcactgcaacctctgcctcccgggttcaagcgattctcctgtcccagcctcccaagtagctgggattacaggaacatgccagcatgcccagttaatttttgttttttttcttttaagtagagacggggtttcatcatatttgtcatgctggtctcaaactcctgatctcaggtgatccgcccasctcggcctcccaaaatgctgggattacaggcgtgagccaccatgcccggccacatcttgctcctttttaatc

SEQ ID NO: 3124 - DNA, 649 bp, Homo sapiens
ccagaagcccttagtggcatttcaagattttaatacaatttgggaaatttctgcctctggagtactccagaatcattcagataaaatatttttttaagtttaaaaataatttctaactacacaagttttaaaaacaggagtaagactagagtcactgaagtgctggagtctgcttgtatggcttggaaaagacagttgttaaaattttaggtattttatgagccattaaatcatctacagttggtgtatttactccccagaaatcagcagacacagccaagggagagcaggtggctaaagctttatcagcacccttaggctgggttcttctcggactagaatgctcatccagccctgccactcccaagatttaccatcaagctggtgtgcatctcctatattacttcctgtgtattacatttattttggggttcccaataaaacatataacattgttagcaattttttctgtttattttttaaagtgtcaccataaacttgttgatttatagcttgcttttttactccctcagcaacatcttagagatctatgttagctcrtatctgcctcactttaaaaactataatattctatatttcatacatatggtgtacatatactatcatataggttaatttgtgtaacaat

SEQ ID NO: 3125 - DNA, 619 bp, Homo sapiens
aactgcatgtacatttcaaaaatatcaagggtaagaaacacaaagcaaggctgagaaattgctactattcaagcaatacaactctaaaattttcctaaaaacattccttttttccattctctgtgtttctacctactgtagtctccccacaattatagttattttaaaaaaacctaacaagcaaggtgttccaagatggctgaataggagcagctccrgtctgcagctcccagcatgattgatgcagaagacgggtgatttctgcatttccaactcaggtacctggttcatctcatggggactggttggacagagggtgtagcccacagagggtgagctgaagcagggtggggcattgcctcacccgggaagtgcaaggggttgaaggatttccttttcctagccaagggaagctgtgacaaattatctggagaaacgggacactccccgcccaaatattgagcttttcccaaggtcttagtgaccagcagacaaggtgatcctctctcgtgccttgctcagcaggtcccatgcccatggagccttgctcactgctagcacagcagtctgagattgatctgcgaggaggcagcctggctgggggaggggcatccaccat

SEQ ID NO: 3126 - DNA, 619 bp, Homo sapiens
aactgcatgtacatttcaaaaatatcaagggtaagaaacacaaagcaaggctgagaaattgctactattcaagcaatacaactctaaaattttcctaaaaacattccttttttccattctctgtgtttctacctactgtagtctccccacaattatagttattttaaaaaaacctaacaagcaaggtgttccaagatggctgaataggagcagctccggtctgcagctcccagcatgattgatgcagaagacgggtgatttctgcatttccaactcaggtacctggttcatctcatggggactsgttggacagagggtgtagcccacagagggtgagctgaagcagggtggggcattgcctcacccgggaagtgcaaggggttgaaggatttccttttcctagccaagggaagctgtgacaaattatctggagaaacgggacactccccgcccaaatattgagcttttcccaaggtcttagtgaccagcagacaaggtgatcctctctcgtgccttgctcagcaggtcccatgcccatggagccttgctcactgctagcacagcagtctgagattgatctgcgaggaggcagcctggctgggggaggggcatccaccat

SEQ ID NO: 3127 - DNA, 1288 bp, Homo sapiens
ctctggtgtacctgctgtaggctgatattcactgatattgcatctaatgatcatcacacttttggaaattcatgaacttgtaataatcggccctagccttaacatcactttcctttgtgatttatgtggacaatatgtgatccaggaaaaattaaaagatacaaaattgtacctatattttgccagaaataagtcataaagtaaactacaatcgcatacacttatacacgctcacacagcctctctcatacacacagagatgcacacttayctctctctgtgcttcacaataactgcattaaggaatttcagattatcttggaagaaaataatttttttctaaacagaagctttaagaaatttttactgattttttgcaaggggtctctaaacatgctcagcttctaataaagctagtgttgattctattcaacaacatgatttacttcatcctagtacatatgagaaaaatcagagtccagtgatactacagatttgtagaagatggtatagcacaccaacagaaaaattgcacttgctgtactacaaatggcagctcttcaaaatacagtaattttcctaatagccacagaacaaagcaaacaaaattccatctgttaagcaatacccaagagtgatttccattttcatctcaaccacagaaatccctctattaaaaagagacatagccatggtcattggcaagcacatctttgtgcatcagtttcattatttgcagttcattagcctccagaggtgacacatttgctaggaaccatgcaaaggaaagcctgacatggttcccacaccatggggcttacaatcaagaagaaacagctaggaaatattcagcaagagcaaaaatagaagtaaagagatggcacagagaggagagaaattcaaaaagggaatttaaggcatggagagaaagggcattgaaatttgaattcctcttcagggttaagttcatcatccaatattagaaaggagctcaaatgcttgaggaaatacaatattctagtggaccagaaggaaaaggtggaaataaaagaaatggtaaattccttcacgtcagaggcagtagtttaatctctacaatctttaaccaaagagtagcaacacgaaacacatagtaggctcacaataattgtcaaataaaaggattagtggaactactttttagagctgcattgcttaaagatttttctgaagcacattgtgcaagctaagtggtctgtagacaaagggctttgtggtcaagtaagttcactagtgctgtccaatgtca

SEQ ID NO: 3128 - DNA, 1288 bp, Homo sapiens
ctctggtgtacctgctgtaggctgatattcactgatattgcatctaatgatcatcacacttttggaaattcatgaacttgtaataatcggccctagccttaacatcactttcctttgtgatttatgtggacaatatgtgatccaggaaaaattaaaagatacaaaattgtacctatattttgccagaaataagtcataaagtaaactacaatcgcatacacttatacacgctcacacagcctctctcatacacacagagatgcacacttatctctctctgtgcttcacaataactgcattaaggaatttcagattatcttggaagaaaataatttttttctaaacagaagctttaagaaatttttactgattttttgcaaggggtctctaaacatgctcagcttctaataaagctagtgttgattctattcaacaacatgatttacttcatcctagtacatatgagaaaaatcagagtccagtgatactacagatttgtagaagatggtatagcacaccaacagaaaaattgcacttgctgtactacaaatggcagctcttcaaaatacagtaattttcctaatagccacagaacaaagcaaacaaaattccatctgttaagcaatacccaagagtgatttccattttcatctcaaccacagaaatccctctattaaaaagagacatagccatggtcattggcaagcacatctttgtgcatcagtttcattatttgcagttcattagcctccagaggtgacacatttgctaggaaccatgcaaaggaaagcctgacatggttcccacaccatggggcttacaatcaagaagaaacagctaggaaatattcagcaagagcaaaaatagaagtaaagagatggcacagagaggagagaaattcaaaaagggaatttaaggcatggagagaaagggcattgaaatttgaattcctcttcagggttaagttcatcatccaatattagaaaggagctcaaatgcttgaggaaatacaatattctagtggaccagaaggaaaaggtggaaataaaagaaatggtaaattccttcacgtcagaggcagtagtttaatctctacaatctttaaccaaagagtagcaacacgaaacacatagtaggctcacaataattgtcaaataaaaggattagtggaactactttttagagctgcattgcttaaagatttttctgaagcacattgtgcaagctaagtggtctgtagacaaarggctttgtggtcaagtaagttcactagtgctgtccaatgtca

SEQ ID NO: 3129 - DNA, 599 bp, Homo sapiens
tctcaaaataaataaattaattaaataaaataataaagtggacaatattaagagacattttcagcatatgcatagtggatttgataagaagtttcctctcaatagtaaaaaaaaaaaagaatcaacaaaattagttacctaaaaacagagttaacattaaacaaaaatttgttgagtgttttaaacattcgacaaaaatttgttgagtatttaatttttctcctatgtgagaagatatcaagcaataatgtttattttatctgagacaggttctcattctgtcacccaggctggagtgcagtggtacaatctcagctcacagcagcctcttcctacctgggctcaggtgatcctcccacttcagcctcaagtataatagctggaactaaaggcatgtgccaacatacccagctattttttttctttcttttctttttttttagacatgaagtcttgccatgttgcccaggctggtctcaaactcctgagtcaaggtatctgcccgcctcaacttccyaaagtgctgggattagaggagtgagccactgcgccaggtcatcaataatgtttaattttaaaataattgttaaacaaatcta

SEQ ID NO: 3130 - DNA, 780 bp, Homo sapiens
tgcatttattttaaaaaattagcagactcatagctttcacacagcatagttctatccttttccatatttaattgcattttcattgagtctcctgagtctcccaccagtatgcaagatcagtcaagaatttccacgtagtgtatagtcagattttaggtccaattctcttccaaaactagattcggttttttgacatcttaagctagtaaggcagttattttctgctgccacggtaatgaagtgtgccctgtagtaacaaaggcacaaacttgcaattattaccattttcagttggaatttttaaggaataaactctttactggcttctgttattggatattttcaagtgcttttaagtgattgttttctatactgtgtctaggctttacactactcatctgaggcagtagcttatgagcacttcacctcactgagtaccagaaatcctctgcctgtgggtattggagaatggtgacaatgccggcaggctcctcagagtgttttgtaggatataaaagccgaccttgaagagaagatgacaggaccatatgccaaatctaccaatcatgggaagtgctcagaaggttgataataagtaccatagtgcagttaaatagaaaagactcctaagaatatgacatttttaaaaggtggccaggaaataattcctgggaacacctctgggaatcagagaggacatgaacccaacctccaaattataaggacgaatgaacaaccttagtggactacagatgaaatagtgtcttcataawtgaattc

SEQ ID NO: 3131 - DNA, 1589 bp, Homo sapiens
tttgctcaacatatttgggcttatgttatagtaattcctgtacaacttctttcttatgcactatcgaactctcaaggaaataaattttgtctcatttacctttatatttccaatagagacctacacatcacagttagtaaaggagagcatgttgaatgaatagatgagcatgaacggatactcagacaaataaaggctatcgtgtaaatgtgcattacagtaggaaaaaatttctggctttagggacagtcgttccttttttaatttaaaaataatttgttgaacatctacttcatctcaagcacagctcaaatcctggattttctaataagctgtgcagttttggacaaattgcttaacttctctgagtgtcagtatcctcattcacaaagtggagattgtagtctctaagtcacaagggtttcattagtactcagtgagaaaaattacataaagctccctcagtacaatatttgctgaaagtttggcatattccttcttccttgctcttctatttgacattttgttttcaaataaaaaaaaaacagaataagaaaattagttctcaaaaatagtctctagcctcatcttgtcttctaggacatataaggattatttctaatactagaatatgtaatgatatgcagggtaggtataagaaatacatcatgattatttctaatactagaatctgtaatgatataaagggtttatataaggaatataaaggatgatttgtaatactgaatatgtaatgatatacagggtaggtttaaggaatatatcacaattatttctagtactagaatctgtaatgatatatagggtttctataaggaatacaaaggattatttctaatactagaatatgtaacaatatacagagtatatataaggaatataaaggattatttctaatactagaatatgtaatgatataaagagtatatgtaagaaatatataatgattatttctaatactagaatatgtaatgatatacagagtataagtaaggaatatataatgattatgtctaattctagaatatgtaatgatatgcagagtatatataaggaatataaaggattatttctaatactagaatatataatgatatacagagtatatgtaaggaatatacaatgattatttctaatactagaatatgtaatgatatagagtatacataaggaatataaaggattatttctaatactagaatatgtaatgatataaagagtatatgtaagaaatataaaatgactatttctaatactagaatatgtaatgatatacagagtatatatgaggaatatataatgattatgtttaatactagaatatgtaatgatatacagtgcccttacatttctgtggcataccattctcaatcttgtgagtagaaaggggcttaatattatttttcacaatgtggaaactgaggctcagagaagtcagktgacttcctcatggtgatgtaggcaggaagcctcaacgccagaaggcatacctcctcctcctgatacccagcagaactctttccagtctgaaacctctgtccataagaagtgctgctgcctaaacatgc

SEQ ID NO: 3132 - DNA, 1196 bp, Homo sapiens
tgcatttaggagtgattatgctttgttgaaacattaataaacctgagaccttcaactctaattgatactcattcctatcttggtttgttggttggaatttcagtgggaaacagggttgagcttgtttccatcccaaatctccagcaatattttaaagatagagtattaatatctctttcttaataaagatatattttgatatttaatcaattgaagtatagtaagtgtgttaacattagagcatagatractaagctgaatgaaaattttaattatttaataagaacacttagtgtctctcaaaacattgcatttaatatgatatcaattgttagccactaactatatattccagatgtggtgagaacctactgatgtgtttatcctgaatggcgtctacttcttctgtgaattgcttctttgaaaagttttcaaaaaaatatgcccttttctatctccctgtccagcatgactatatctgatgagtaagacagatgagcaagacagatgagtaagaattctttcccagagtttttcatactggagctacaggaaaagagacatttccattgatatattgatatcatgttagtgtgagccggtaagctgtctatgatcacatatgccttgctatatggaaaagccagtttgtggtaggggaatatggaatcaacatgcaccccaaaagaagagtggaggttgtaaaaaagaaggtactcttttcagtcctgtgatctccattccgctctggctcctgctatgtggaggtttggttgttcagcccatctgtgtgattttcctgtatccttctaataaatcctcttgtcaatttgtttgaattgtgttgctctctattgcaaccagaaatactgattaaatataccaggtacttgaaggtaatttctgctatatttgtgaaatttctacaagatagatatttattccatttatatatgaggaaaattaggttaaatcacctgtatcatttcaaagtctatgttattttcactccagctttctgcttttctaatgagttttggaagtccttttactgaagataacataataaaggaagcagttgatcacaggctaagatgactgattaacctgaagccttatggtagaaagacagtagttatcaaaatccacatattctatctactaactactatcttgaattctatctctgctatgca

SEQ ID NO: 3133 - DNA, 1295 bp, Homo sapiens
gcattatttagaaggaattgtgtagcctctggtggtaaggacctttgaaattatgggggagggtttccaagtgtgtccaatcagcctttcctggcttatctcccctcacagctgactgctggttcctggcagcactgggatccttgactcagaacccacagtacaggcagaagatcctgatggtccaaagcttttcacaccagtatgctggcattttccgtttccgggtacgtgtgcccttgcagcgctcattatatgatggggttctctgtgagtacagggaaggtgaaagtcttaagttttctcgtggccgggaagcctgagatgaaagtgacagttgtgttagttaccctccctaccttcaaaaaaaggattcaagcttataatctgacaacacacagggaagatgagagttgaaatgtttttgtgtaaataaaaagaaatgacagaaatgattagcaaagagtcactgatcgagaaccctgtaactaacatcgagtttttgtctctgtctattcctgtgccatatcgtgctattttgattacagtagctttataggaagtggtaacatctggtaggataagttctccttcattattcattaccattttctcaaaaatatcttggtaattcttgcacatttattcttccatgagaattttaaaattattttgtctattttttttaaaaaaagccactgtgatacacaatgcagcagcatttatgtattaatttagaaaaattacattttgtattggtttaagttttcctttccagaaacacgggatacctttccatttattcagaactagttttctgtccttcaataaagtgttatatttatattggtggtgtatctttcttgattaattcattctcaaacattttatgattttgtggctcatgtaaatgaggtctttttcccctcattttgaacttggtgctgctaaaaaagagaaaagctactacttaccatatattaaactgcatctagccaacttaccaaattcttttattagttcttaattctttctttaacagaatctggaatggtttagttatctaataatattatctgcaaatagataattttctatctccttttaatatttgcagaacttcttytgctctcttgctttgtcacattagctagaacctcagaattttgaatgagtgacaagagccaaatcctgccttctcttgacttcagtaatgtgcttccttgatttactcttctttcagtacattcaagttgctaaaaattgtcttggaatttttgtacctatatcatgca

SEQ ID NO: 3134 - DNA, 1063 bp, Homo sapiens
  misc_feature (1)...(1063): n = A,T,C or G
caggagaatggtgtgaacccaggaggcagagcttgcagtgagccgagatcgcagcactgcactccagcctgggtgacagagcgagattccatctcagaaaaaagaaaaaaaaaaaaaaggaatacttgataaaaaagttatccatatatcagataagaagatgtaaaatttatgtgctatctacttctggaatttccaccataagggaataataatgatgtaggggttcacttgaaggacagaacttgtacttggttacttatgtacacaatctctgccttactcacttttggtggatcatattgtgtcatttcaatgtggccattattgtcttttatgaacatatacaacaaagtaatatacctttacataatgtctacatctctactgtaatttaaactttaatggctcaaaaatgctaaattacaaaatagagaaagatgtgtgttaaatgcagattaatataatttaaataatattatatatgataagggtttgtaaaacttaaccattaagatggatagatgagaaagatagaaacctagaatacaatactagnnnnnnnnnnnnnnnnnnnnnnnnnnnnnnnnnnnnnnnnnnnnnnnnnnnnnnnnnnnnnnnnnnnnnnnnnnnnnnnnnnnnnnnnnnnnnnnnnnnnatttaagaatagaagcaagttttgtgaatttgaattcattaaataacgctttctattttgttttgttattcatcatttaactttttttaaaaatataaagaattctcataagtatttttaaactagaagacaaataagtggaatgaaacatctaaatgtcaaattttggtgtgtacttcctattaatttctaagcagggacacctggcaarcagaaataactctgaggacatgtgggattttgaatttttggacacctctgtaaagttatttggcaagcaataataaagctaccacttatttatcaagtgtttactaatgtactaagcattgccatatatggtttattacttctatcctatttagtattcaaatcaatatgatgtctatttttgttctgttttaa

SEQ ID NO: 3135 - DNA, 679 bp, Homo sapiens
ctccaagccttggataatttagagaacataattcagaattttccctttcagcatgtatcctccatcaagggggtgttttcatctagagtcagcacaatgcttgtgtgacccaggaatgcacagataaggttaaaaagaaagaaagaaaaagtgcattttattctttctctctctctaagcatcttttggatctcgcatatgtgtgttagtatgcctcattgtgagtatctctacttagaacagagaattgaaatcatggtggctcttggtattacttcatatttaaagcttttggtgggagggagttttccattataaacccttagcctaagggatatcagccttagataatttattcccagcaggtctaatataggatgcaaaactttcagccgaagagctgttaattcctgcttttcacctcatttccagaaagtgccatctactgtagtgttttgctgtagagataaaattttgtgttcctatgtacagaaacaacagcttcatttgcttaaaaaccggcatgaygcctattatttaatccttcagactctattcactaggttgctctaaaaaaggagccccagtggaaaacatcttggtcatttaagtacaaagagcttgagattttacagcaattttccaatactaattacatttcatactatgtatcatatgc

SEQ ID NO: 3136 - DNA, 636 bp, Homo sapiens
ttttataagcactatcatgtgtttagaaaattcatgtgatgcagtaaagttccctgttttagagattcagagagtctgaaaattatatttatattgacatatctataaatctacagctatatctatatctatgtgtagtcgtgttctgcagcaaagttttgcctctggttgtgtttttttaaagttaattttgaaatctgaccaaagctagtctatatggataagaataatcaccttgaattatttgtttttatatttgaggctagtaacaagtttctttgtgaagcaagttcactgtgcactggtcttcaacttgtctctctgtcttgtgaggcgaacacactcatacacagcaagtaacaggaagtggatttattgcttccatgtaggtaacaagggcaaacagaagcctaggacccattgtcagctagtccctcacagcttaagaaagtttcctgggtcagakggagactcagctgcatgtgccccactagcacaaccattcagagaccctgatagggagtccactctggtttatagtcctcaggagccatgtgacagattgtgaaaagcttcgaaggaccttctgcttccagaagagaataacaaagcctggactctctcaagtagtttatt

SEQ ID NO: 3137 - DNA, 636 bp, Homo sapiens
ttttataagcactatcatgtgtttagaaaattcatgtgatgcagtaaagttccctgttttagagattcagagagtctgaaaattatatttatattgacatatctataaatctacagctatatctatatctatgtgtagtcgtgttctgcagcaaagttttgcctctggttgtgtttttttaaagttaattttgaaatctgaccaaagctagtctatatggataagaataatcaccttgaattatttgtttttatatttgaggctagtaacaagtttctttgtgaagcaagttcactgtgcactggtcttcaacttgtctctctgtcttgtgaggcgaacacactcatacacagcaagtaacaggaagtggatttattgcttccatgtaggtaacaagggcaaacagaagcctaggacccattgtcagctagtccctcacagcttaagaaagtttcctgggtcagagggagactcagctgcatgtgccccactagcacaaccattsagagaccctgatagggagtccactctggtttatagtcctcaggagccatgtgacagattgtgaaaagcttcgaaggaccttctgcttccagaagagaataacaaagcctggactctctcaagtagtttatt

SEQ ID NO: 3138 - DNA, 1908 bp, Homo sapiens
tattttatacatttttaaataagtaactatatatagttctatatctaatatatacatatttatatgcttttaatattttatatatcgtggtaaataggaatagtctttattgggaataaagaaaactgttatcacttaaagaaagctaggcatatagaggtctaacttacttgtaacattacctatctctgctttctctcttttcctattgttacataatacttcaatgttgaatgacattctacatttctttttcttttttagcaagtatacgcaattttttttgacatagtactttatgagatggggatgctttgactcccaaaatctcactaccatttctctgctatctgttttcataggctctgtcatgggaacatccacttttatagtaaatataataataggtatgttttgctctggaaccaaaagtatactctgtgtgatttgtgtttaaaagtttaatctaaggttgaaaaacagtacataattttttttctgtatatcacaaaataaatatcgtttaccacaggtccaagtaatatacaaaggacttaaaatacttgagttatcaaatctatatgagcaaatctagtcaactcttttttaaggggtcacataatctgtgggtcaggaatttggatgaaaaatgacttgttctgctctgcttatggccacaattgggaagattttcatgcctaagcataattaaaatgaccaggagctgaaaacattggacagtttcttttttcataagtgtgatgcttgtgctgtgctgaaacaaagactgggctcaactggaactgccaaccagagctgctacacatggcttcccatgtacccatatggtttgagcttcttcataccatggatgcttcagagtagctgaacttcttgcattgtggctaaaagatcaatgaaaacaacagagatgttacacgatcttttatgacccagtctcagaaattacaaaatatcactttcactatttattggtgaaataagtcattaataaggaaacctgacatcttaataggtgacatgtcaaagaattttgagtatgtattaaaaataacacaatattcacatattcaaagtgttatctgaagacattatatgtaagcaaaataggatattttagcattccaatgatacagcatattttagtttgcaaatttaatgaaattccgtacttcaactttggaaaactgtaatgccacatgatcctgaagcagctttgtcatctgggataaatacccaggattcattgtctcgtgccaagaaaatttaggacatgtacacccacgaggacttttagaagtggagatttaatatgtaaaagaaagagaaaggagacagctctctctctagtgagagagagggacttctgaaaggaaagactggctatcagcgaagtttgtcagattttataggcaggcttgaggaggtggtgcatgatttatgtagagcccacagwttggtttgatcaggtgggacgtttacatagtgcacaggaaggctggccaccccaccctaatcttattatgcaaatataatttccagttgactggcaccatcttatctgctcttcactgtacacatggctgacaaagggaagggaagatgaagcctccagtatgaacatatctagtctcaggcagttctctcctgctggcattcaccattgtaagcctccagcttgcttgtctgtatccacagctcgattttacaggctgctcttcgtcagaaaatgatttgaggctgcttttcattaaaaaggaaaaccataccgaggactccagtaccctcactatcagcctaagtaatttctttttaactcctatatcaatcctaaatgtggaagaaaattataagaatattcatggactggatattatagttacctga

SEQ ID NO: 3139 - DNA, 745 bp, Homo sapiens
aggaagttccaaactttcccacattttcctgtcttcttctgagccctccaaactgttccaatctctgcctgttacacagctccaaagtctcttccacatttttgggtatcttttcagcaacgacccactcgactggtaccaatttactgcattagtcggttttcacgctgctgttaaagacatacctgagactgggcaatttgcaaaagaaagagatttaattagacttacaattccatatggctggggaagcctcacaatcatggcagaaggcaaggaggagcaagttccatcttacatgaatggcagcaggcaaacagagaatgaggaagacacaaaagcagaaagaaccctgataaaactatcagatctagtgagacttattcactaccatgagaacagtatgggcaaaaccgccccaccccatgatttcattatgtctcactgcgtccctcctacaacacatgggaattatgggagtacaattcaagrtgagatttgggtggggacacagccaaaccatatcacacgttaaaatgcactttgttttttcaaatttcgcccctgtcatcccttttttagtactatcttatccttctagtgattagacaggttgaagggtactgcatgtagtatttatgtgataaaaactatatttttttaaaatatgaatttagaaacatgatgaaagcttaatgttttcttaaatatggatttggatatatcacaatttaaaacgtaatgc

SEQ ID NO: 3140 - DNA, 745 bp, Homo sapiens
aggaagttccaaactttcccacattttcctgtcttcttctgagccctccaaactgttccaatctctgcctgttacacagctccaaagtctcttccacatttttgggtatcttttcagcaacgacccactcgactggtaccaatttactgcattagtcggttttcacgctgctgttaaagacatacctgagactgggcaatttgcaaaagaaagagatttaattagacttacaattccatatggctggggaagcctcacaatcatggcagaaggcaaggaggagcaagttccatcttacatgaatggcagcaggcaaacagagaatgaggaagacacaaaagcagaaagaaccctgataaaactatcagatctagtgagacttattcactaccatgagaacagtatgggcaaaaccgccccaccccatgatttcattatgtctcactgcgtccctcctacaacacatgggaattatgggagtacaattcaaggwgagatttgggtggggacacagccaaaccatatcacacgttaaaatgcactttgttttttcaaatttcgcccctgtcatcccttttttagtactatcttatccttctagtgattagacaggttgaagggtactgcatgtagtatttatgtgataaaaactatatttttttaaaatatgaatttagaaacatgatgaaagcttaatgttttcttaaatatggatttggatatatcacaatttaaaacgtaatgc

SEQ ID NO: 3141 - DNA, 587 bp, Homo sapiens
taagtatttttgagtagcaaaaaatactaagtatttttgagtagcaaaaaatactatgtataaattgtgtcatttatttcttacaatgactctatgaggggcatactattactatctccatttaatacaagagcaaactgaggttcatagaagttaaatagattgcctaattagtttatactttattgttcagctttgtatatgacattccccttccagactgaaaaccaaaagrtaaattattcaatagttagatgatcattgatggtttatattggcagttctaatgtcacattatatacataaatgcatatgccttttctacacaagaaaaatcatatggatatattttagataaacgtatgtaaaaatgtatttttgaccatatattgaagtaacattgatcattcggtaccaattcatcttttgatgatttactaattgttatttcttaacatcaaactgatacatattgagtatgtgatgagcagtgttgtatgtgctagagatgtatcagttgaaccaaacaacagtcctttcctttaaggagtttatatcataaaaggtcagtgatctgtgaaaaaaga

SEQ ID NO: 3142 - DNA, 587 bp, Homo sapiens
taagtatttttgagtagcaaaaaatactaagtatttttgagtagcaaaaaatactatgtataaattgtgtcatttatttcttacaatgactctatgaggggcatactattactatctccatttaatacaagagcaaactgaggttcatagaagttaaatagattgcctaattagtttatactttattgttcagctttgtatatgacattccccttccagactgaaaaccaaaagataaattattcaatagttwgatgatcattgatggtttatattggcagttctaatgtcacattatatacataaatgcatatgccttttctacacaagaaaaatcatatggatatattttagataaacgtatgtaaaaatgtatttttgaccatatattgaagtaacattgatcattcggtaccaattcatcttttgatgatttactaattgttatttcttaacatcaaactgatacatattgagtatgtgatgagcagtgttgtatgtgctagagatgtatcagttgaaccaaacaacagtcctttcctttaaggagtttatatcataaaaggtcagtgatctgtgaaaaaaga

SEQ ID NO: 3143 - DNA, 1238 bp, Homo sapiens
tataacagcagatgcacaaatcatacatgtagagtttgatgaatttttaaaatttgaacacctcgctaaaaaacagctctcaaataaagtaagagaagattacccgcccacaaaaactctatacatgcctctttccaatcactaccccagaggtgatcactatsctgacatctaacacaatgtattcattatgactgtgtgtgaagtttttataaatggaattgtatagaaggtgcctgaggttttctgtttaaaattttgtttattagattctccaatgttgttccataaagaaatagctcttacatgctcacttctgtataatctttatgtatgtgagtgtaccaaagttacctgtctattctattggtaatagatattttggtcgtttctaacttggggttattacaatggtgctgaagcgaacatatgtattcttttctgttggtcatgtacttaggaatggagttttacagcatatgactacgttctgctttagaaaattctgctagttttccaaagttaattgtagcaattcatattcccaccaatgtatatgagagttctagctgcttcacatccttgccaacactgccattgtctgtctttttcatttcagccactctgtttgggaatgtcttttgtccattgtttgattatttggtaaggctttttctcattggcggatagttctttcaatattcttcagagtcaccatttccctccacttgcctctgtgagggagcccagggctcctcctccctcagctcttctaagcccagatgaagcctggcccttctgagcacatcccaaggccacacctgcattctaggcgactcccttgtccctttgattcactgggtagtctggtgcctgaaaggcagggtcagtgatgagagtggttaaacatcgcaggcaggggagtttgaaaccagctctacctcttccccactccccagatctagccacgtcattcagcctgtctcagcttcagtgtccccatgtgaaaataggaatactaaaagcatctccctcataaaattgttagaacttaatgaagtaacttataaagatgcttagaacagtgcccagcacataggggctgctcaatcgatattttttgaacgaaggaatgggtgtgtgaattaataaatgaatggatgtaagattttcagtacaaggccaaaccatacagtgaaaactcagtcaatattaactattattgttattgtttccat

SEQ ID NO: 3144 - DNA, 602 bp, Homo sapiens
tgcatcagcgcactcttcrtcctgaatgtgtcaagccagtaggtgagttttatcttaaaaggcctcatccctatgggccttttgtttatcttttgctatcttaagcccatttctgagaatagattctcacagaccatgaagatgcctcctctaccatctctctagaaatacctcttgcttgtatagtaaaaatctggaaaattaacatctgggctttaaatggcttgtggattgagtagcccttttggctaagcacaacattaaaagaaaaaggaccagacaactctattgaaattaagttctgttaggaagaaatgtttaaatctgtatttgttctgaggattcaagagagtttattttgatgagcaatcagaaccagcaaacctgacatagaccattccactttattgacatctggtcaaatgccctgagatattctcaccactgcaaatcagtaaccccagaaaggaagaaaagcaatagccaccagggaagaaaagctcatttcccagcttgagttaagttttgttttcagatttataagaaagtatctccaagttattttttatctattaatagtctaaattttcagcttctttgtt

SEQ ID NO: 3145 - DNA, 602 bp, Homo sapiens
tgcatcagcgcactcttcatcctgaatgtgtcaagccagtaggtgagttttatcttaaaaggcctcatccctatgggccttttgtttatcttttgctatcttaagcccatttctgagaatagattctcacagaccatgaagatgcctcctctaccayctctctagaaatacctcttgcttgtatagtaaaaatctggaaaattaacatctgggctttaaatggcttgtggattgagtagcccttttggctaagcacaacattaaaagaaaaaggaccagacaactctattgaaattaagttctgttaggaagaaatgtttaaatctgtatttgttctgaggattcaagagagtttattttgatgagcaatcagaaccagcaaacctgacatagaccattccactttattgacatctggtcaaatgccctgagatattctcaccactgcaaatcagtaaccccagaaaggaagaaaagcaatagccaccagggaagaaaagctcatttcccagcttgagttaagttttgttttcagatttataagaaagtatctccaagttattttttatctattaatagtctaaattttcagcttctttgtt

SEQ ID NO: 3146 - DNA, 1707 bp, Homo sapiens
aaaaaaggaccataccaattgtcatctcaaaggctaacaatgacatttgaagttttaaaaccacattatatagttgtatttcagagatgtgacctttagtatatgtaaatgtcccactttataattttacaatctaagttggaaaatctaggttcctgaagggggaaaaaaactcttgtctttattgtatctggctcttggctcttaccatgatttcctttgatatccagccacttggttttttccatgactcttgtcttcttcagaataccctggtaggtttgccattctacctcatgctgcctggatcccaactgttcctttgttttggcatctgtcaggtctcctgtaggtttacacaagaattgaatcacaatgcaaaataaactactgggggttccattttttttagatatgtacactgaaggaacaaggatacttaaagcactcaacgtgtataagcataactgctcaygagaccaccaatgtccaaatcgagccatctaaactaacaagattttctcagcaaggactttgtttcttataggttagcaaatgcctgttcaatctcctgtgatattcgaaatgggttgttaaaaaaatctttaaagagaacagtacaaaatgcatcaatagactctgataaaatgaaaatgatttataagaaattccagtactctgagtggctgcctaatatctatggcaaccatattttccaaaccacaaaatcagaatatgtgatttgaccaagtattatttttacagcaagaagcaatgtggcaggtggaattggacaacaaaataccaaaatttatagagaactaaacagaaaactttttatggaggctcatccattaaatcagaactgataccctttcatgtcagcagagatgcttcaataaggtggatgagtgatgaattccccagtaagcaagatagatagatgctcctttagcttcttctccccattacagtttgaaagcaaataaagtgtttgaagagtctagaaaacttaagtcataaaactatcaaaggatgaagaaaaagtgccctgggtcaccggaagcctcaaacaactgaaaatataagattaataatgtaaagaaaatagaaaagttagcaaaagaagagaacttctgattcgtggttacaggcttttccctaattctcacaaccagaactgtaacaacaacaagaacaaaaaccagatacaaatatatcagacaacagactgacatgagaaccaggagccttgcttctactgctttgacaaaaccttgctacgtcaaatcattttgcctggatcttgactcattcagttatccataggcaaaggggttagaatgtccaatctcttccacctcacagagctcacctggggctgtggctatactgctcccaacgtccccaaaatgaaaagccacagccctggctagagttctaccatgcggaccacagaccaccaccacagcacggcaagcctccctacctgttgctaggacgagagctggttgaatgatgtcaatagtttcagaacagaatttctctaagtctaccgctctgcctggatctcgaaacctgctcaggtgaatgtcggatatctgccgaaaacaggtattgaacagagagatctgagccaggaagaggcagcatggggaggggcggctcagcggctctctcgggcagaaggaaaaggcaaagaggcaa

SEQ ID NO: 3147 - DNA, 1707 bp, Homo sapiens
aaaaaaggaccataccaattgtcatctcaaaggctaacaatgacatttgaagttttaaaaccacattatatagttgtatttcagagatgtgacctttagtatatgtaaatgtcccactttataattttacaatctaagttggaaaatctaggttcctgaagggggaaaaaaactcttgtctttattgtatctggctcttggctcttaccatgatttcctttgatatccagccacttggttttttccatgactcttgtcttcttcagaataccctggtaggtttgccattctacctcatgctgcctggatcccaactgttcctttgttttggcatctgtcaggtctcctgtaggtttacacaagaattgaatcacaatgcaaaataaactactgggggttccattttttttagatatgtacactgaaggaacaaggatacttaaagcactcaacgtgtataagcataactgctcacgagaccaccaatgtccaaatcgagccatctaaactaacaagattttctcagcaaggactttgtttcttataggttagcaaatgcctgttcaatctcctgtgatattcgaaatgggttgttaaaaaaatctttaaagagaacagtacaaaatgcatcaatagactctgataaaatgaaaatgatttataagaaattccagtactctgagtggctgcctaatatctatggcaaccatattttccaaaccacaaaatcagaatatgtgatttgaccaagtattatttttacagcaagaagcaatgtggcaggtggaattggacaacaaaataccaaaatttatagagaactaaacagaaaactttttatggaggctcatccattaaatcagaactgataccctttcatgtcagcagagatgcttyaataaggtggatgagtgatgaattccccagtaagcaagatagatagatgctcctttagcttcttctccccattacagtttgaaagcaaataaagtgtttgaagagtctagaaaacttaagtcataaaactatcaaaggatgaagaaaaagtgccctgggtcaccggaagcctcaaacaactgaaaatataagattaataatgtaaagaaaatagaaaagttagcaaaagaagagaacttctgattcgtggttacaggcttttccctaattctcacaaccagaactgtaacaacaacaagaacaaaaaccagatacaaatatatcagacaacagactgacatgagaaccaggagccttgcttctactgctttgacaaaaccttgctacgtcaaatcattttgcctggatcttgactcattcagttatccataggcaaaggggttagaatgtccaatctcttccacctcacagagctcacctggggctgtggctatactgctcccaacgtccccaaaatgaaaagccacagccctggctagagttctaccatgcggaccacagaccaccaccacagcacggcaagcctccctacctgttgctaggacgagagctggttgaatgatgtcaatagtttcagaacagaatttctctaagtctaccgctctgcctggatctcgaaacctgctcaggtgaatgtcggatatctgccgaaaacaggtattgaacagagagatctgagccaggaagaggcagcatggggaggggcggctcagcggctctctcgggcagaaggaaaaggcaaagaggcaa

SEQ ID NO: 3148 - DNA, 873 bp, Homo sapiens
  misc_feature (1)...(873): n = A,T,C or G
annnnnnnnnnnnnnnnnnnnnnnnnnnnnnnnnnnnnnnnnnnnnnnnnnnnnnnnnnnnnnnnnnnnnnnnnnnnnnnnnnnnnnnnnnnnnnnnnnnngctttcaagttgggacatcagccttttccccgccttttccatttttaacagctctaatatttgcagaatattaatcttctgttaagtttagcctaaagctgcctccttccatattttaagttcaacataaaggtttctccatagatagtaaactgtaacctaactggatgtgtaaacaaactgtaagctaattttatgccaatcaccgagtttcagccaatcaaagtagaccaactgttcaaaccatgttcaaataaggcaaacatggagccataaccaatccagctgtttytgtacctcacttccagtttctgtatgtcactttcctttttctgtccttaaatcttcaaccacatggctgtgctggaggctctttgaacctattttgtttcagaaactgcccaaatcaagaataattttttgttcaattaaactctgttaaatttaatttgtttaaggtttttctttttacacctgatatagatttattatattttttcccagttgggtttttttttttttttgccatacaatttgtttttatttcatcacctccagtaagacatcacataaatatcattgtttggtaccagtctcttgcgtttttggctgtgaaaagtggaagggccacatctctctttctggaaaaggtttaaaaaatgtgctacaaaggaattatttatttgggattttggtcttgtatgatatagtcaggaaatcaacaccaggaagaagctggctcctgagaggagggcaatacagcagctggaaa

SEQ ID NO: 3149 - DNA, 873 bp, Homo sapiens
  misc_feature (1)...(873): n = A,T,C or G
annnnnnnnnnnnnnnnnnnnnnnnnnnnnnnnnnnnnnnnnnnnnnnnnnnnnnnnnnnnnnnnnnnnnnnnnnnnnnnnnnnnnnnnnnnnnnnnnnnngctttcaagttgggacatcagccttttccccgccttttccatttttaacagctctaatatttgcagaatattaatcttctgttaagtttagcctaaagctgcctccttccatattttaagttcaacataaaggtttctccatagatagtaaactgtaacctaactggatgtgtaaacaaactgtaagctaattttatgccaatcaccgagtttcagccaatcaaagtagaccaactgttcaaaccatgttcaaataaggcaaacatggagccataaccaatccagctgtttttgtacctcacttccagtttctgtatgtcactttcctttttctgtccttaaatcttcaaccacatggctgtgctggaggctctttgaacctattttgtttcagaaactgcccaaatcaagaataattytttgttcaattaaactctgttaaatttaatttgtttaaggtttttctttttacacctgatatagatttattatattttttcccagttgggtttttttttttttttgccatacaatttgtttttatttcatcacctccagtaagacatcacataaatatcattgtttggtaccagtctcttgcgtttttggctgtgaaaagtggaagggccacatctctctttctggaaaaggtttaaaaaatgtgctacaaaggaattatttatttgggattttggtcttgtatgatatagtcaggaaatcaacaccaggaagaagctggctcctgagaggagggcaatacagcagctggaaa

SEQ ID NO: 3150 - DNA, 657 bp, Homo sapiens
tgaaaacagacaactctagctgtattccatttccctctgtctggaagccagctcttttgaaaaagttcaaaggaaaactgaactgtgactccctttctaaataaacaacatcatccctgtgtgtcaataagttaaccatcccccagtccctgatgtccaaacctacaccccctaatttgctattcacattcctgagactaccccttggttacaaatctgctattgttgttctttagttccacactgacaggcagtctcctggggagcacccatagtagtcaattgtcgccaggatctgaaaatagcttgaaaatattatttggattgtttgcagttcatcattttaaatgaaagtaaggagagagagcagcaaaaatgacaatagctaaaaatatcrgcaataaaccttattttctgtttgtgcaaagtgttgctaacgtaacatattgtgcatgattttaaaaacaagaatgaatggcaggccaacagtgaagattaccatgcccacaagtgaaatgagactggaagaaaaaaaatatgtctggctaagggaaaactaaattaattgctccatcttcaagatatttagccaagattcttcctccttccatctcctaccctcttcccagcagtagctttagcatccattaaaatcgg

SEQ ID NO: 3151 - DNA, 1627 bp, Homo sapiens
gcagaattgctgggactccattaaatatttttacagttttactggtgcacttttgattaaataacctttgaatgaaaacatgtagggattatgtaataaagcagatgaacacacattattttgaccaacacaagccatcctagggatcttttgcattacaaaagcatcttatgtaatttgaaacacaactggacacaattagtagtacagaacaaatgagcactgaaagaaaatactatcctcatacttttaacacggaatcgattactttaaaaagcaaatccacagcggcaaagcatcggagaaaccgttctaaagaaaatctgcaaattaaaaccagggcatcagaaagttcttgcttgaactaacaaatgatgctcttcttaattcaagtctgcacaaatatgggctgcaggaggcatttaaattgatgtaacaatattggcccggttaatgctgtgttcatttaatgcatggcttaagcttctgtaaagtcatttttcaaatttcaacatcggacagaattagcaccctcatttttatgataatattgttaatttaatgcatggcttgaagttagacttcaaagtgaatcagaaaaatatgccttttctcttgtcagagacatctctcttcatgcaccagtggtttgaccttaaaattttaacttcaactgcacaaaattactctcatatttcaactattctttcataattcaatcagttagtttgtccattttagatagatcttgtaataccttgcccatgagagctaaaacaatttttaacattatctctttatgtttatactctggatagatcaagatcagaaacttttcagtataatattaaacatgcagttcacaatgaacttaataaaacctgcaaaaccgaaagacgaacttaagtggccaagggaagtctttcccactatttaaatctctttcctccgacctccattatggcactgaaaatcaagaggcaatgatgaattagatttgcacaaacaaaaacctacagtacacgagggcttccggcactgaaaatattggattctttacttttcctctaaaacagtgagctatctccacaaacatctacccggcaagcaaaggaaggctgacagtgtaatggagggtgaaatgataatgtcctctttcgtaaatggaatccagccgatgataacaatgcactcacacagatttgcagggcgttctggatggcgtttcaaatatcccatycccctgcactttaagaacctgcagttgggtcgccctctacacaggagacaagtgaccattttaaacagactgagggaaaacctacaccatattactagagcaattatgtcagggcagaaacagaaggaggtgatggaggaaaaaagaataagaattcaacgaggcaaaattcgcagaacacacttaggattgggagagacaattcaagggaatgcaaatgaaaattagccagctaggaatctcctattatttagaagcctcaaactgttggtaactgtgtaaacattatgccctgtttggtagacattctggtaggtgcctgtgtgtataccctttggtgcataaatttcacttctagattttattcaatagaagcacacccaacct

SEQ ID NO: 3152 - DNA, 1627 bp, Homo sapiens
gcagaattgctgggactccattaaatatttttacagttttactggtgcacttttgattaaataacctttgaatgaaaacatgtagggattatgtaataaagcagatgaacacacattattttgaccaacacaagccatcctagggatcttttgcattacaaaagcatcttatgtaatttgaaacacaactggacacaattagtagtacagaacaaatgagcactgaaagaaaatactatcctcatacttttaacacggaatcgattactttaaaaagcaaatccacagcggcaaagcatcggagaaaccgttctaaagaaaatctgcaaattaaaaccagggcatcagaaagttcttgcttgaactaacaaatgatgctcttcttaattcaagtctgcacaaatatgggctgcaggaggcatttaaattgatgtaacaatattggcccggttaatgctgtgttcatttaatgcatggcttaagcttctgtaaagtcatttttcaaatttcaacatcggacagaattagcaccctcatttttatgataatattgttaatttaatgcatggcttgaagttagacttcaaagtgaatcagaaaaatatgccttttctcttgtcagagacatctctcttcatgcaccagtggtttgaccttaaaattttaacttcaactgcacaaaattactctcatatttcaactattctttcataattcaatcagttagtttgtccattttagatagatcttgtaataccttgcccatgagagctaaaacaatttttaacattatctctttatgtttatactctggatagatcaagatcagaaacttttcagtataatattaaacatgcagttcacaatgaacttaataaaacctgcaaaaccgaaagacgaacttaagtggccaagggaagtctttcccactatttaaatctctttcctccgacctccattatggcactgaaaatcaagaggcaatgatgaattagatttgcacaaacaaaaacctacagtacacgagggcttccggcactgaaaatattggattctttacttttcctctaaaacagtgagctatctccacaaacatctacccggcaagcaaaggaaggctgacagtgtaatggagggtgaaatgataatgtcctctttcgtaaatggaatccagccgatgataacaatgcactcacacagatttgcagggcgttctggatggcgtttcaaatatcccattcccctgcactttaagaacctgcagttgggtcgccctctacacaggagacaagtgaccattttaaacagactgagggaaaacctacaccatattactagagcaattatgtcagggcagaaacagaaggaggtgatggaggaaaaaagaataagaattcaacgaggcaaaattcgcagaacacacttaggattgggagagacaattcaagggaatgcaaatgaaaattagccagctaggaatctcctattatttagaagcctcaaactgttggtaactgtgtaaacattatgccctgtttggtagacattctggtaggtgcctgtgtgtatacccyttggtgcataaatttcacttctagattttattcaatagaagcacacccaacct

SEQ ID NO: 3153 - DNA, 709 bp, Homo sapiens
caaattagcacacatttagtggcttaaaatgaaagaaatttattctctcccagttctagaagccagaagtctaagattgaggtgtcagcagggccatgctccctctgaaggctctaggggagaatccttcctttcttctattttgcttctaatggttttggtcatccgggctgtctctttggcttataactacatcactccagtctcgtcttcatcttcacatggccttctgtttctccgtgtgtccttttctgtctcttttaagggtagtcacattggatttatgacccatcctcatccagtatgatctcatttcaagattcttatctaattgtctgtgcaaagagcctttttccaaataaggtcatcttctaaggttctgggtagacatgattgcctgagtgggagtcacctctcctttctcccttctgagacaaaaaaatgaagccactcctttgtatcctggcttagctgggcttatgtttattgctggcatcctgcttcatagtttattgctaaacaggtgagaagcccaggtcagcgtgatgctttatctgatcatccaggcacccaggagccagagaggcatagcagcatgtccagtgtcacagagcaaagtgatagacctgatctgaagttctgcagggttcckgctgcaacgtttggccctttgtctttcccccatagtacgtgatagggaagagtcaca

SEQ ID NO: 3154 - DNA, 708 bp, Homo sapiens
tgcataccataacaataaataccaggcaataatagaggagaatctatgttttgaagataacacaataggaattgagaaytctgacagtaaaaaaatatttctgtatatacatttatgtgtgtatatatagagagatgcaaatcaaagacatatattaagtttttcaagggcttttaaaataaccaatgttctcagtttgaaaaattattcattaataaactctagtcattggggaatgatacactagggaaacatttataaatgagacactgtagaaataatataataataaagcatatacaaactatacttgctatctataacttcataaaattatcccaaccaacaaaatgaatggcataaatttgtctatattttgttagtcagaatcaaatcattaagtctagccctcatgaaagagggagggaattgagggtatgaacgcgaggaggtggagatcaatgggaccaccttagaaccaaccacaaaatctgatgctgagctagaatttcactatatgtaaagtctccataatattactaatattatgataaacaataggcaaatcaaaatagttattaaatatgaaagcatattttataaaatagtcatttagcaataggcatgatataaatttcataattatttctgtggggacttgagataatgggttctaaatgttttattttctatggaggaatgacagca

SEQ ID NO: 3155 - DNA, 708 bp, Homo sapiens
tgcataccataacaataaataccaggcaataatagaggagaatctatgttttgaagataacacaataggaattgagaactctgacagtaaaaaaatatttctgtatatacrtttatgtgtgtatatatagagagatgcaaatcaaagacatatattaagtttttcaagggcttttaaaataaccaatgttctcagtttgaaaaattattcattaataaactctagtcattggggaatgatacactagggaaacatttataaatgagacactgtagaaataatataataataaagcatatacaaactatacttgctatctataacttcataaaattatcccaaccaacaaaatgaatggcataaatttgtctatattttgttagtcagaatcaaatcattaagtctagccctcatgaaagagggagggaattgagggtatgaacgcgaggaggtggagatcaatgggaccaccttagaaccaaccacaaaatctgatgctgagctagaatttcactatatgtaaagtctccataatattactaatattatgataaacaataggcaaatcaaaatagttattaaatatgaaagcatattttataaaatagtcatttagcaataggcatgatataaatttcataattatttctgtggggacttgagataatgggttctaaatgttttattttctatggaggaatgacagca

SEQ ID NO: 3156 - DNA, 1563 bp, Homo sapiens
gtggtgatggattattgatgaagtagaaacatgggaagttaataagaaaatatatcagaggtaggtgcgtgttgcctgagaccagagcagaggacactcctctagggtgtaaatctcacctgaaaaatgtgagtgaggctgagaatttactctggagagtatacaagtgagaagttaatattgtttatgatagaaaatcaaactaaattgtaagaagaaacttgcctctgtgttgatgtctctaggcatttatggggtgctactggagtagaattgactttaatatgaaatcaatgaaaagtcactgagtcatcagaataattaattgtcaaaaaagccacatctgaagaaaatcatgaatatagcaatatagacatagggataagaaatgggaggacagttgcatcaaataggagtcaccttagactatcgtagaatgaaactgtgccccttcatctaaagatgaatttagaattagaagaaagtgagcctgtgctatcattgacaactggttagtagtttactagcatggaaatccaaggagcctctctcttagttatacactctgggattctgacttgatttccccactgtctcttaccacagtggttcaaaatgtatggttctcaggactgctctgtgatcagcacctggaaactatgaaatgcaaatccctgggctttgccccacatctactggatcagcgtctttgactgggggttgggggacagcaatgtgtgtttcaacaagcactcaggggctttctgatgcagtcagtgtgagaactcctgtctcagaaagtcacctccacttacaccaattaactttattccatagacactctcccacactccactagttaacccttccttctgtacataagtgcattgaaattctattctaaatctttatatcaggaccttttcaatctaatctgttcatttcccccctgtaaatcctgtcagaatgacagagagcattttgaccctgtcagttgttacattagaaaagccgatggttgaaaaataataaaattgtcagagttactggaggatgcaaaaaactagggttactttcatctgttaagtaactgattgaattgacagcacaccaaagatcttgccacataatcttgtgcattgggtgaagtgaattaatttaggaaagagttcagtacattgccatatataagcatttctagcaggacctgacttgcacctgttaaactatttcgaataataaaaatgcctgtgcactcaacccaggaaatgctactcactgccaactccacagtgaggtaacatgcaattgacaactttcagagaagtaagcaactaattctttccccagactgctacttaaaataaccttttttttttttttttttttctggtaggaaaataaaattcaaccaacaatttgtcactcttcttatttgcttttgccaagcagctgtatttacagaaaacaatgtcctgatttttttttttattatttttttaaggtcttgatttcttatcaarcagtttggtggtctaatgattttagtttgtgaaactcata

SEQ ID NO: 3157 - DNA, 683 bp, Homo sapiens
acagaacttgcacaaaacttgcacaacttcttctctcttggattctaccgggtaaagcaactcataattgatataccattttagaccctcaagactgacaaaaagcaaaaaagtcttacgaagtgttagtgatggtgtggagactgctggtggaagtgtaaattgttacaagaggttttagaggttgatcagccaacattttataaaattttaaaaccacatagttccaaaactaacaatttcactgttaygtgatatgacctagaaaagtcttatgtacatacacaaggacacaaatacaaaaatgttcatagtagctttgtttgcaatagaaaaactagaaaactaagtctattaatgtgagaatggacaaactgtggtaaagtcatgcaatggaatagtatacagcaatgaaaataaagtagaaccgcatatatcaatatggggaaaaataatccaaaaaacaatgttaggttaaaaaaagtaagttgctaggagatatatatatatatatatatatatatatagtatgatactaaaatatgcaaaatgatactatatattatttagcaatacacatttcagtggtaaaagtatgcaaatatataggaggttaaacaacaaattaaaaatagtggttaccttgaggcatgatctaatgcaatgaaattatcataccatgc

SEQ ID NO: 3158 - DNA, 683 bp, Homo sapiens
acagaacttgcacaaaacttgcacaacttcttctctcttggattctaccgggtaaagcaactcataattgatataccattttagaccctcaagactgacaaaaagcaaaaaagtcttacgaagtgttagtgatggtgtggagactgctggtggaagtgtaaattgttacaagaggttttagaggttgatcagccaacattttataaaattttaaaaccacatagttccaaaactaacaatttcactgttatgtgatatgacctagaaaagtcttatgtacatacacaaggacacaaatacaaaaatgttcatagtagctttgtttgcaatagaaaaactagaaaactaagtctattaatgtgagaatggacaaactgtggtaaagtcatgcaatggaatagtatacagcaatgaaaataaagtagaaccgcatatatcaatatggggaaaaataatccaaaaaacaatgttaggttaaaaaaagtaagttgctaggakatatatatatatatatatatatatatatagtatgatactaaaatatgcaaaatgatactatatattatttagcaatacacatttcagtggtaaaagtatgcaaatatataggaggttaaacaacaaattaaaaatagtggttaccttgaggcatgatctaatgcaatgaaattatcataccatgc

SEQ ID NO: 3159 - DNA, 744 bp, Homo sapiens
aactgatcaagcaggggaaataattgttgagcttgaagacaggttatttgaaaatgcactgccagaggagacaaaagaaaaaagaatgaaaaaaaaaacaacaaaaaaaamcaaaaaacgaagcaatgttgagacttgggaacttggtagatagatgcagggctgacatgcaacttccatttggatggatggaacagtgtgtggagacccatactgtgcacttttgctccaggaaccactgcaggagcataccaggaaaactaataattcacagattctttaaataaaaaagcaccaagccactgcaaatcccatgagacaagcaaaaaactgcgagttcccaaagtgcgagagggggaaatcctgcctctgaacacatgtcccccctggaaacccaaaaatccagattacaggagaaggatttaaccttacccagagctgaaatgaatttagaataaaatataaaactagaagcagcagtggaagaagccttgtaggcacagccattctccagctcaagcccagggaagccatccctgactaagtctcatggggacactcggaaaaggcaactggtgcagtttgggaggggtcacaaggtgaaagaaacttccagccgaactttgtaataattttgactgggtaaaactcttttgagcgtaatttgggtgtgaatgggaactgctccagaaagaagagcaagagtagtgacagacagtgtgggcagacaggaaggggcatggc

SEQ ID NO: 3160 - DNA, 913 bp, Homo sapiens
tacagataagttagctccaactgtcactttacttaaaacaaaagacttgtgtcctattctgcatagtttgtaaaatgaaaacctcttgctttagaggttacaaaatgctcccaggagttttgccactccagaatcaatttattcctctggatttcagctgttcagttattatgtggtacatatacacaaatacgtatacacaaatacgtatacacaaattcagctgtttgtgtgtgtgtgtgtgtgtgtgtgtgtgcaatttgttttgttttcttttgttgttccataatttcttgagcccttaggtgttttatagctttattttattttatttgtttcaaattgggggaggttttcagaatatttaatgaaatatatgacaaaaatgggagtctctattactttcatattcattttaaaaacaataacagatttattttccatttatcttaaggtttcataaattgctgtgttattaccatcttgcctgcagtttttgttttttgttttagtaaagagtctatggaaatttgtagatatatgtggcaaaagcaagtttccgyagcagtactaggatagaatgtcaatttgagattatggcttaccaaagtacaggcaaaacaaggttgcatccagtgtagtggctcttgtcctagagtgctgattattaaatggaacaaaacgaaacaaaaaacagggaaaacaaaacaaaagttcccaccaaaataatatggtggagagtttatgagaaaccaccagagactcctgaaaccctgtgatgtttgtgtccagaaatgcccactggaacctggcaactctcatgaatctgaccattctctacatcttcatttttcaaatacacacttgttttctatttcatgtcatttcctcaagttctgctgtgtcttaatgc

SEQ ID NO: 3161 - DNA, 543 bp, Homo sapiens
aggcttccattccccaatcctctctgctttgtcttcttaaatctttgccttaccaatttctgacctacagctgcctgggccttgagacttcatgaatattctttttcactttttttttttccagtaagataaaaggagttatggagtcactgagttgaagaaattttaaagccagaaatgttttttgcctacraagaaacagaatttcagagaggtactcacttgccaaaattacaaaacaagttagtaagaaagccaagagactactttttgtttattttaaaaattttaaaattttaaaatttcttagtatagatgcagggggtacatatgcaggtttgttacatggatatattgtgcaattgtgagatggtttttcccaccatactcaggtatctaccataaggatagggacaaagaagcaaaagcaaagaggcaaatgtgcaaaaagaaagaatatggacttcgtccttttaaatgaaaactagtttgaaatttgctttacttttttcttaattcttgctaagtatgttttcttgctta

SEQ ID NO: 3162 - DNA, 617 bp, Homo sapiens
tggagagaagatattctggtgactgaaagtatggtcaggtgtcagatataaatgtgcaaatgccttcttgctgccctgtcagtctcagtacattcactttatagctgctggcaatattgaaggttccttttttgtttgtataaactctaatttctatcaaggtgtcatggatttttaaaattagtatttcattacaaatgtctcagcattggttaactaatttttggcaggaccattattgatcaagcaaataaattcaacagccacttgggaaaaagaaaaagaaaaaaaaaaacagatattcatcacaaatctcattgttagcataaactctctggygtggttcaaggtctcctgtatataaagacactcttatcagacaagatagtccaaagcctcagagtttatcttccaggaaccagttgagggacagtgttttctttaaaatgtgaagggttggagtaccacaagcctgctgacttaacccctttaatgcctccattgtgtcatgatatttaactgtccaaccatattttatgatccttgggtatcagtgtagagcatggctgacactgattttttatttttatttttagttattatgcaatatatatttg

SEQ ID NO: 3163 - DNA, 1562 bp, Homo sapiens
gccctgctggatccttaagttcagacttctagcctccagaactgtgaaaaaagaaaattctattgttttaagcyaccaccttgggttgttatggcagctttaggagcctaatacacgatatataaaattagtagtaaaataaggaaaaatactgtttagctagtttgttttcaactgagttacacaaaaatcaaatatattcatctatttatttttactttacaaaagatgtcaatatctagccactattagtttaaatataaagttaattgatgacaagtagtcattaaataagattcctgtaactattaagatcattgctctatgagtatcctaactacccaaatcatgagtaccgtaactagttgatttaggaaactagagtgtacaaaatcaaataaatgcctatagacattaagcaggtgatttaaatgagtgaatttagctggatctggcatataatagtgtttgaagagatctctagagaaccggtgtattcatgctatacataaaacagaactcagctattcaactccagtgcttattgtcagtggaaatgtgagtttccagatcctctgatttttctgaggagaagtcaggaatccagatttttatgtgatagccctgaaattttaaatgttgtctcaaaaaataaaaaggaaaaagaaaaggaaaaaaaaggttatctgcttctgcacaaatctgcgacctctgctttaatataataacttgtatcggtaaacgtttgtgtcaatttgcttttgaccactgaaattgctttttaatgcttttaattaccaatgctcgacaataaaagtaggtttaaaattcctcatcctttattctcttggtcaaagtagttaagagtggccagtggtctatggagaggaaaatctttaatatcatgggaatttgttttctaaaacaattttgaagtaaaggttttcacacaatgagggtcttttcaattacaaaacaatagatttcttttgtaaatttaggttttcatatatagcatttcaggagattaaagtttccataataaaaaattgttattttatgaagaattccaacctctcatctcatgtttgaagcccatagctttcagaactagttattatgtcttaaaaatgtcagccatcccagttgaaagaaagcccattttctcaattttaaacacacatttgagggatgtatttttagctgtggggacaaaggcaaaatggtttgctctaccaggtgtcatgctgtctttaaattttatgaaaagaaggaattaggaacaaattctggacgatgttctgcagcacatagaggttgaggttaatttattttaattccgtattgctacctgctggtaggttacaatggatgggtgacagtttacagtatctagaggcacggctctcagtagaggactaaagacaccgtcacagtatctagaagtcagtgttctgagtctgaaggctctgagaaggtgccatagaagtgggccaggcaagtcctgcctgcaaagggagtaaaccagcgaggcataacattataccgacaaatcggaaaaa

SEQ ID NO: 3164 - DNA, 1562 bp, Homo sapiens
gccctgctggatccttaagttcagacttctagcctccagaactgtgaaaaaagaaaattctattgttttaagccaccaccttgggttgttatggcagctttaggagcctaatacacgatatataaaattagtagtaaaataaggaaaaatactgtttagctagtttgttttcaactgagttacacaaaaatcaaatatattcatctatttatttttactttacaaaagatgtcaatatctagccactattagtttaaatataaagttaattgatgacaagtagtcattaaataagattcctgtaactattaagatcattgctctatgagtatcctaactacccaaatcatgagtaccrtaactagttgatttaggaaactagagtgtacaaaatcaaataaatgcctatagacattaagcaggtgatttaaatgagtgaatttagctggatctggcatataatagtgtttgaagagatctctagagaaccggtgtattcatgctatacataaaacagaactcagctattcaactccagtgcttattgtcagtggaaatgtgagtttccagatcctctgatttttctgaggagaagtcaggaatccagatttttatgtgatagccctgaaattttaaatgttgtctcaaaaaataaaaaggaaaaagaaaaggaaaaaaaaggttatctgcttctgcacaaatctgcgacctctgctttaatataataacttgtatcggtaaacgtttgtgtcaatttgcttttgaccactgaaattgctttttaatgcttttaattaccaatgctcgacaataaaagtaggtttaaaattcctcatcctttattctcttggtcaaagtagttaagagtggccagtggtctatggagaggaaaatctttaatatcatgggaatttgttttctaaaacaattttgaagtaaaggttttcacacaatgagggtcttttcaattacaaaacaatagatttcttttgtaaatttaggttttcatatatagcatttcaggagattaaagtttccataataaaaaattgttattttatgaagaattccaacctctcatctcatgtttgaagcccatagctttcagaactagttattatgtcttaaaaatgtcagccatcccagttgaaagaaagcccattttctcaattttaaacacacatttgagggatgtatttttagctgtggggacaaaggcaaaatggtttgctctaccaggtgtcatgctgtctttaaattttatgaaaagaaggaattaggaacaaattctggacgatgttctgcagcacatagaggttgaggttaatttattttaattccgtattgctacctgctggtaggttacaatggatgggtgacagtttacagtatctagaggcacggctctcagtagaggactaaagacaccgtcacagtatctagaagtcagtgttctgagtctgaaggctctgagaaggtgccatagaagtgggccaggcaagtcctgcctgcaaagggagtaaaccagcgaggcataacattataccgacaaatcggaaaaa

SEQ ID NO: 3165 - DNA, 538 bp, Homo sapiens
ttttaatctaattatatgaaatgttccagcaaacataaataaaatttgttaccttttattttaggttcaggggtacatgtacaggtctgctatacatgtaaacctgtgtcacaggggtttgttgtacagattgttttgaaacccatgtattaagcctagtactcgatagttattttttctgctcttctccctcctcccaccttcaagtaggctccagagtctgttactcccttctttgtgtccatgagttttcatcatttagctcccacttataactgagaatatgcggtatttggttatctgttcctatgttagtttgctaaggataatagcctccagctctatccacattcccgcaaaagacatgatcttattcttttcctagctgcatagtactcccactacatgttctttatccaatctgtcattgttgggcacttaggttgattccatatgtttcctattatgaatagtgctgcaattcacatgyatatgtctttatggtagaatgacttatatttgtctgggtataatacca

SEQ ID NO: 3166 - DNA, 562 bp, Homo sapiens
tttctcttcccgtatgattggaacaggaagtgaattcctggttttttaaggaaaagtatctctattctatgaattacctgatcagacaaccttatctgaatatcatgttaaagtaccttttatacttttaacccatgatcctcatatgttacaagtttatagtttcaaaagactactggtatagcaggaattttaacacttgttaatcaactataggaggagatttacttttgattggaattgatgtaaaatagcattgttgttagaaataattatttctttcctcttgtttggaaaggaaaccaacactaagattgttgaagtttacataatgtcccttgattacaatcactcaggagcctaagaggtattgctcactcaaggaataagacttatcttaggaaataatgtgaatgagaagttaytcttactttgaccagtgaggagaaaaaggatatcagggacggagatctggaatacttacacactagtgatccatacacaaattttctaatataaccagtaacttattgtctaagtgatgtaggcactttcttatctg

SEQ ID NO: 3167 - DNA, 615 bp, Homo sapiens
atatacccggtagtcttttttgatcatctcaagtcatttacagtttttttcctgtgagaaggcaagtaacttttttgaactttaaatttattattccataagatggagataatggtaatagagaagatgttaactattagaagcagtgtgtgtcagaagactagtactatgtagtagcagctcaataaatggtcatcattttattttttattgataaaacagttttaactattggttttgtgattaccagtttctcaactatcattcttttttctcacttttgtgtctttwtaaaggttgttccttcagtctgaaatactttcttctctacttttcttgccagttgctattcatctttttgggttcattttaaatttcatttattttgtaaagtattcctaactcctcaagagtgtgctgagtacccttgcagttaattcccattgtatttgtacctaatctgaacagagttttgtaatgttacgattacaaattaccttgtctgtcttagttaacattgtatttacttggattatagtaagtactcaaatatttgtagaatgaataatacatgtttattttgaagttgattttaggtaattaaatccagcttag

SEQ ID NO: 3168 - DNA, 705 bp, Homo sapiens
  misc_feature (1)...(705): n = A,T,C or G
cattaatactaataatattccagggagtttggatgtattagatgatacaactcatgggaaagacttggcacagtgcctagcttataatgtgtataagctaatattagtgtcaaagccagagaaaattgatcagaaaaataaacattcagctataacacatataaggataaacacttaatttttaagggttgttaatattcattcctagatataacatttggggttccttttgtaacccatatattatttcattggtttcaaaattatgaatattcatagcttgagtctatggtagtaaatgtgtgtatctgtgtgaataaatctctattagatttttaagtgtaatntgcaacgtgtgtgtgcgtgtatatatatatatatatatatatatatatatatatatatatatatcttctaagtcttttttgaagaatctgttccattagtgcttagacacaaagttacatatacaacaatgttcctggaagtattactttctatagaaaaacygtagaaaacaatctaaaggatcatgagtagttactctattaaataaattatagttcaccaagatatgatattccagaaaacctttaaaattgacacgcaaatagctctaatttataatgttaagagttaatcacaagtagcagagcaatatatatggtatgctcccattgttggcaaaaaagtatgtgattacat

SEQ ID NO: 3169 - DNA, 1336 bp, Homo sapiens
tcagattgcaagcccttaagttctgattcaccttgtctccatatcttctagcatatttcttaattttgtaggtgctcaataaatatattgaattaaattatgttgtcaaataaaaatgccaaaacatattccatatgaactatgtaagagagaaagaaagtgtgatgtatttttggaagttttaatccatatagtaattaataaagttaaggttctcaaagaagaaaacactcagctcattggaaaaccatggctacctagaatctckggacttcaatgtaattttattcctgcctctagttaaatttcattatcttagataaaaaaatctctggctcattggcaaagctatcaaaaatattatcatacaaaaattaagaaaaaaagcatagctgtacctctgaaagctgcattcattttatccttgtgccccaaatgtgcaagaaatatagactaagagatataaaatgctatgacaactaaacaagttctgacatatttcttggtagttgttggagggcttactgaagtacagctgactaatgaaagaccatgaacagctttagagatgatcccgaagatgactaaaggactggaaactaaggttaacattgagaggttaacaaagctggaactatacaatttgatgaagaaaagacccaaaagtcatttcatgccaatttttaaatgcataaagagactttattcagtgagtactggccatctgctttcaaactctgatgtgcacagaacatgacaaaatgggtttagaccaaattagaaggtatttaattttatttggaataattttccataagcaatgaagttataaataaatcttcttctctagaaaagatgagcatttcacttccatatttgtggggttcaatgtgtttctgttgaaggaggtgcacttattcagtgtgtcttgaagatacctcaagggttctcacagtttaatattgtcaaaatgtcaatagataaggctatcctaaagtaaattcttcccctggtaacttctcatttacttcaccttcaaagctacctttacattttacgtctgtgagaaatttttattataccagttgaagcctactgtgacctagaagttttgtcaatgagggagatgagattctggtttctgatcaaccaatcaacaataacaacaacaacaaaagatttatatgcactttaagaaataagcataagctatcatgattgatattttatcatagtatattttcttaaaataatttatgtttaattagattttttgtaaagacttatgttttgtattactacagtggcatttgacccagttctgtatagttttgga

SEQ ID NO: 3170 - DNA, 1336 bp, Homo sapiens
tcagattgcaagcccttaagttctgattcaccttgtctccatatcttctagcatatttcttaattttgtaggtgctcaataaatatattgaattaaattatgttgtcaaataaaaatgccaaaacatattccatatgaactatgtaagagagaaagaaagtgtgatgtatttttggaagttttaatccatatagtaattaataaagttaaggttctcaaagaagaaaacactcagctcattggaaaaccatggctacctagaatctctggacttcaatgtaattttattcctgcctctagttaaatttcattatcttagataaaaaaatctctggctcattggcaaagctatcaaaaatattatcatacaaaaattaagaaaaaaagcwtagctgtacctctgaaagctgcattcattttatccttgtgccccaaatgtgcaagaaatatagactaagagatataaaatgctatgacaactaaacaagttctgacatatttcttggtagttgttggagggcttactgaagtacagctgactaatgaaagaccatgaacagctttagagatgatcccgaagatgactaaaggactggaaactaaggttaacattgagaggttaacaaagctggaactatacaatttgatgaagaaaagacccaaaagtcatttcatgccaatttttaaatgcataaagagactttattcagtgagtactggccatctgctttcaaactctgatgtgcacagaacatgacaaaatgggtttagaccaaattagaaggtatttaattttatttggaataattttccataagcaatgaagttataaataaatcttcttctctagaaaagatgagcatttcacttccatatttgtggggttcaatgtgtttctgttgaaggaggtgcacttattcagtgtgtcttgaagatacctcaagggttctcacagtttaatattgtcaaaatgtcaatagataaggctatcctaaagtaaattcttcccctggtaacttctcatttacttcaccttcaaagctacctttacattttacgtctgtgagaaatttttattataccagttgaagcctactgtgacctagaagttttgtcaatgagggagatgagattctggtttctgatcaaccaatcaacaataacaacaacaacaaaagatttatatgcactttaagaaataagcataagctatcatgattgatattttatcatagtatattttcttaaaataatttatgtttaattagattttttgtaaagacttatgttttgtattactacagtggcatttgacccagttctgtatagttttgga

SEQ ID NO: 3171 - DNA, 654 bp, Homo sapiens
gtgaggattgggtatgaggtgctgcaaagttccttctaattctgaggttctaaagctttctcacctgtatttgtatggcataacaaatacatacagaacaaagtactttcacatgtatctctaatttcagttttatgataaccttaagtcagagcacatgagccccacagagaaagaaactgaggctgagggatttgggatgatttccccaaagtcatcaatttcttgtcatggttgaattctgattacaatcaaggtttcctgactctccatccaatgttttactgcccttggttcacacaatactcacgaaaagatatgagattggttatatcaatcttggaactttggaacacctctctgcttagatatggttgtaagttaagcaaatttgtgcagataaacttrctaaagctgtttttattctgttgccatattcgtgtgccaaaatgtggtagacatacggtccctacctcaagaattttagctgttttaaacaatagaattgtaaattagtttcctttccacacatattcattacgctctttcagcatgcagagagcacatatgctcaagtttcctctgaaaagtggagtttatagttggaatacaagagaagtaagaaaggaccaaacacagtctcctaaggcctta

SEQ ID NO: 3172 - DNA, 654 bp, Homo sapiens
gtgaggattgggtatgaggtgctgcaaagttccttctaattctgaggttctaaagctttctcacctgtatttgtatggcataacaaatacatacagaacaaagtactttcacatgtatctctaatttcagttttatgataaccttaagtcagagcacatgagccccacagagaaagaaactgaggctgagggatttgggatgatttccccaaagtcatcaatttcttgtcatggttgaattctgattacaatcaaggtttcctgactctccatccaatgttttactgcccttggttcacacaatactcacgaaaagatatgagattggttatatcaatcttggaactttggaacacctctctgcttagatatggttgtaagttaagcaaatttgtgcagataaacttactaaagctgtttttattctgttgccatattcgtgtgccaaaatgtggtagacatacrgtccctacctcaagaattttagctgttttaaacaatagaattgtaaattagtttcctttccacacatattcattacgctctttcagcatgcagagagcacatatgctcaagtttcctctgaaaagtggagtttatagttggaatacaagagaagtaagaaaggaccaaacacagtctcctaaggcctta

SEQ ID NO: 3173 - DNA, 601 bp, Homo sapiens
cattaatacaactaatggaagttatcaagtggaattatagccttagagaagaataaaaattataggaataacaaaagaaatgaagtttaaaaactattgttatattttatgataggtttaagagtaagcaataggttttgtaataattttctttgggtatatttgctacttaaggtgtttgaggtgctcaaaagacttagcttaactaaatctgtaattgtagtttaaatttgtataggacttaagtaattttgtataggacttgagtaattatgttgaaatcactattcaaatgtttgaatagcttkctttcttttttttatttttttaagacagggtttcttgctctgtcacccaggctggagtgcaatggtgcaatctcagctcacctcaacccctggctcccagctttaagcgattctcatgcctcagcctcctgagtagctgggattacaggtatgcaccaccacacccagctaattttgtatttttagtagagacagggtttctccatgttggtcaggctgatctcgagctcctgacctcaggtgatccgcccgcctcggcctcccaaagtgttgggattacaggcgtgagccac

SEQ ID NO: 3174 - DNA, 1013 bp, Homo sapiens
tggtgttaaaagatgtgggttaaatttggaccttaggcaagtttttttagaccctttgtcttctcagatatgaaaacagaggcaaagctagggaaatgatgcagtcactacagcattattaaagtctatgaatattttgtgggttttgtctctaaagaatattaggtttgtcaactaatttatcagtaccccaacccaggaacctgggagtaatagcaagaggagttaaggtttttctgctacacttggcctctaataagcaaaccttctatagtcacacctggggctgccatgtgcagaacacagcagtgaccatcaactgtaatatgtgatccattaagtttaccaactagagatgcaaaatattcacacattcctctagacttttccttgcctactaacacctcatcttctgcatgttgtgagactagtcatattcagccaattaatattcagccaattmggctaaggaaggtttactcaaacagctgtttaacatcttttctgtacttctcactttattccctgcagggaagaagaacaaacaacaaaccaattgcagtgtgtataagaaaataaaggctgggcacggtggcatatacctataatcccaacactttgggaggctgaggtgggcagatcacaaggtcaggatttcgagcaccagcctggccaatatggtgaaacccagtctctactaaaaatacaaaaattagctaggtgtggtggcgggttcctgtagtcccagctactcgggaggctgaggcaggagaattgcttgaacctggaaggtggagggtacagtgagcaaagatcttgccactacacttcagcctgggctacagagcgagactccatcttcaaaaaaaaaaaaaaaagaaggaaaaaaaaagaaaaaaaaaaagaagaagaaaacaaggagtcatgcaggctgtggaaacacaaagaaacacacagacacattgtggtttccccccttaaccccttaagtgattactagtttcacagtagaa

SEQ ID NO: 3175 - DNA, 1013 bp, Homo sapiens
tggtgttaaaagatgtgggttaaatttggaccttaggcaagtttttttagaccctttgtcttctcagatatgaaaacagaggcaaagctagggaaatgatgcagtcactacagcattattaaagtctatgaatattttgtgggttttgtctctaaagaatattaggtttgtcaactaatttatcagtaccccaacccaggaacctgggagtaatagcaagaggagttaaggtttttctgctacacttggcctctaataagcaaaccttctatagtcacacctggggctgccatgtgcagaacacagcagtgaccatcaactgtaatatgtgatccattaagtttaccaactagagatgcaaaatattcacacattcctctagacttttccttgcctactaacacctcatcttctgcatgttgtgagactagtcatattcagccaattaatattcagccaattcggctaaggaaggtttactcaaacagctgtttaacatcttttctgtacttctcactytattccctgcagggaagaagaacaaacaacaaaccaattgcagtgtgtataagaaaataaaggctgggcacggtggcatatacctataatcccaacactttgggaggctgaggtgggcagatcacaaggtcaggatttcgagcaccagcctggccaatatggtgaaacccagtctctactaaaaatacaaaaattagctaggtgtggtggcgggttcctgtagtcccagctactcgggaggctgaggcaggagaattgcttgaacctggaaggtggagggtacagtgagcaaagatcttgccactacacttcagcctgggctacagagcgagactccatcttcaaaaaaaaaaaaaaaagaaggaaaaaaaaagaaaaaaaaaaagaagaagaaaacaaggagtcatgcaggctgtggaaacacaaagaaacacacagacacattgtggtttccccccttaaccccttaagtgattactagtttcacagtagaa

SEQ ID NO: 3176 - DNA, 1013 bp, Homo sapiens
tggtgttaaaagatgtgggttaaatttggaccttaggcaagtttttttagaccctttgtcttctcagatatgaaaacagaggcaaagctagggaaatgatgcagtcactacagcattattaaagtctatgaatattttgtgggttttgtctctaaagaatattaggtttgtcaactaatttatcagtaccccaacccaggaacctgggagtaatagcaagaggagttaaggtttttctgctacacttggcctctaataagcaaaccttctatagtcacacctggggctgccatgtgcagaacacagcagtgaccatcaactgtaatatgtgatccattaagtttaccaactagagatgcaaaatattcacacattcctctagacttttccttgcctactaacacctcatcttctgcatgttgtgagactagtcatattcagccaattaatattcagccaattcggctaaggaaggtttactcaaacagctgtttaacatcttttctgtacttctcactttattccctgcagggaagaagaacaaacaacaaaccaattgcagtgtgtataagaaaataaaggctgggcacggtggcatatacctataatcccaacactttgggaggctgaggtgggcagatcacaaggtcaggatttcgagcaccagcctggccaatatggkgaaacccagtctctactaaaaatacaaaaattagctaggtgtggtggcgggttcctgtagtcccagctactcgggaggctgaggcaggagaattgcttgaacctggaaggtggagggtacagtgagcaaagatcttgccactacacttcagcctgggctacagagcgagactccatcttcaaaaaaaaaaaaaaaagaaggaaaaaaaaagaaaaaaaaaaagaagaagaaaacaaggagtcatgcaggctgtggaaacacaaagaaacacacagacacattgtggtttccccccttaaccccttaagtgattactagtttcacagtagaa

SEQ ID NO: 3177 - DNA, 524 bp, Homo sapiens
aaatttgtattttaccatgtcatttctaaggtgaactttaaaaactccagccttggaattggatatccttttgattttacatctcctctcttcattttgaaaaaaaaaatcagtcattatctcttctgtcattacttctcttcccttttttggcagggaaaacaagtggtggagaaagtcctattcaatctatcttgtaaattttcaactatttcctgtgtctgcaaactgtcttctttcttctctttcttccttcatccctctctttctcccctcctttccttcttctttttttcctttcttcctttccttcttttctttctaaatattttaacctctgccttctgtttgtagtgaatactctatttttaaaattctaaaaatatgccactttttattgtaaactgacaatttataattgtgtaaatttatgggttacaaagttatatcataatctatggataaaatgtygaataattaattaaatcaagttagttaacatacccatcactttaaatacttaa

SEQ ID NO: 3178 - DNA, 650 bp, Homo sapiens
gagatagattttatccgaggtctttgatttatgtgttttgaaaacatctctaagactattcttgaagagaaggacaagacaaaaacatgttaaaatcttcaagtgggtttcatagttcaaaatcaaaggcmctccacacaattacaaagaggaaaatcggaaaatcacagagatatatcaagctagagtggcttaattaaaatgataaaaatatgaaaactttctttttttatattcttagttttaagaaatgtattggtctcatggctgccaaacatgtggtcacatgatcactcatgttttgtcaataatactacgcaatttgagaagctgttaatatccacagctatccactctcctttgaatcctcaattcttcttcccaatattttttatcacaattaagtatctaactctttattcacccattttttacatctatcttaatttaccaaataattttcttttcagagaataaattgacatagctatttcctttcattttaagaatatttggcctccaatatggtgatatattcagtttaaaaaacctagaaaaattttctattaaattcaagagatctggatttactttctttagaaccatcaatggttaacatttcatgaggatgatgggttcacacaggttta

SEQ ID NO: 3179 - DNA, 1205 bp, Homo sapiens
aaataagcacaatcaacaactcctctcatgaggaaatgccagggcagaagcatttcagtttcctaaaagaagtctctaaaatcctggacataccatattttagatgtcttacccaaaagtcccacagaaaaaagagttgtgtatgaaaataatattattggccgggcacagtagctcacatctataatcccagcactttgggaggccaaggtgggtggatcacctgaggtcaggagttcaagaccagcctggccaacgtggtgaaaccccgtctccaccaaaaaataaaaaaattagcgaggtgtgatgatgcgcacctgtaatcccagctacctgggaggctgaggcaggagaattgcttgaacccaggaggccgaggttgcagtgggccaagatcacaccactgtactccagcctgggtgacagagcaagaatccatctcaaaaaaaaagagagaaagagagagagagagagagagagaaaaaaaaaaagagagaaaaagaaaatgatattattaacagttcacaaggtactgagcatcttggtaatagaaatctcctgtcaccttggtactggctgacatgtggactctgacagaagagtgggtatccatgccatagatgcttcagtggtgtcatcacaggcatagttttagtctcacctgacacaaaatrtgattatagttttaaagaataatcatgaaggcaagtaatttacatttcagtctaataaaaacactaagaccttccttagccaagcagctgaaatcctgctaatgagattcatcattggcctgcttagttacctcatacatctttatctgctgatttcagctctcttcacatgcagaactacacatcattcttataaattatgtgaatctcttaagagtgaaacatttccgagcaaaacactacaagcttaggtaatgtagcagaatgatctctgaagcacccaccaagagactcaactattaagtatattcctggacaagttattttaattaatgttccatgagtaaatctattggaagcactgtggtagttaaccctggagaacagaaagatgactctaatgatagtttggacctccaagtcaagggtatgggtacatcatagtgtatgtgtatttctacaatctcatagaaagaaagaagatatggacacatagaactataatattactgtattcactgccacagtaag

SEQ ID NO: 3180 - DNA, 1241 bp, Homo sapiens
tacttttcccaaagttgttctagaatgcaaatctaatcatgtttttttctctgtaaataaatacacaaattacaacaacaaaaagcctttgtttgtgtctcatttcctataggataacactactaccgccattactacaatttcactgctagttttcttttggctacccgtaatactacaattactgctactgctactatgatttctaacttccatttattgagcatgtactatctactgggcaatgactactttatgtaatataccacttaaaaacaagaactttagtttagacacatctatgttttaatcatactgcagccatttaatagaaaattatttaatctcagtttcctcaactgtaaaatgtggataataataatatctaaggtataacattattctctgagaattgaatgagataatcatgtaaagcacatgacattatatagtaagtggtcaatacatagtagctatagtattaatattataacaattgttataaacacattatctatcatttctagctcaatcctgagtcttatcctcaacttgacaagcaaataaattagggttcagagatattaagtgtagagatgttaagtccaagttcatacagctaagtagcccagctagcatacaaaaccatgatcttttcactgtcccttcatgccatatttgtacatttcaaaaagctggttgtacctaatttcccaggatcaccttttctgctttttctctaatcctctcttcttgacccaatgaaccaattcttgtctgtcctcacagcagatccctcagtatccctgaatatgtgatgacatttccctcccacattccttgccccctctcctccagctttgtccttccccaggctcagtgcttgtgacatctcctctgccaagctgttctarcatctgcctgctgcctgctctctcttcacctcccactaccgcacctctttaaacttacatgcacgtcagactgttattcatttatttgcttatctttccagttcgctgagtttctctaggacacgaagtttggatttactaattggcaaattcctaggcctataattagtatttactgtgtgtttccttaaataaataacaaatgaataaatgaaaaaacgaatgagtgaaaaatatgtttaaaggcatttgaagttgagagaagaaatcagagttaggaagggaagtatctcatctttcccttctgtttcctgtgctaaagttatg

SEQ ID NO: 3181 - DNA, 730 bp, Homo sapiens
tgtttttatttattttgtatagttcaaagtgtttctttttcctttggaatagttataaaatgatttgggtgggggggacattagcgggcatttaatttgtagttaaaatcaatatccaaatccaagatggtgattttttttttccccagccagtggtacaggagtacaatggtatgttttgaagagtagaagttactttttattttgttacatgacgctctgtcagtatttactggttttctgaattaaaagttgtcagtatcattgtaccttaaacatgaagcagttcattgtgagactatttatgttgccatccttccatccttaatgtattttacacagtgacagaataagtgagatgattgcagttgaatatagcatacagtcctgatgtgaaacttyccattgaggtcctttagagtgattattttcagggcaagttgaatgatgacagaagatttatttgtgacattttcagaagagcctatatttaattttattatttgtcagatgaaatgaaaataagcgtatgacagcaagcatttctttcttctttaactttcttggctatcattgtgcccagagagtattatttcatatatgaagaaaatagtttttttccctaattgtttgtcgaatatagtccttaccacatttaagctagatgttccccaacttaaggtggtttgacttactattttttgactgtccgatggtgtgaaagccatat

SEQ ID NO: 3182 - DNA, 730 bp, Homo sapiens
tgtttttatttattttgtatagttcaaagtgtttctttttcctttggaatagttataaaatgatttgggtgggggggacattagcgggcatttaatttgtagttaaaatcaatatccaaatccaagatggtgattttttttttccccagccagtggtacaggagtacaatggtatgttttgaagagtagaagttactttttattttgttacatgacgctctgtcagtatttactggttttctgaattaaaagttgtcagtatcattgtaccttaaacatgaagcagttcattgtgagactatttatgttgccatccttccatccttaatgtattttacacagtgacagaataagtgagatgattgcagttgaatatagcatacagtcctgatgtgaaactttccattgaggtcctttagagtgattattttcagggcaagttgaatgatgacaraagatttatttgtgacattttcagaagagcctatatttaattttattatttgtcagatgaaatgaaaataagcgtatgacagcaagcatttctttcttctttaactttcttggctatcattgtgcccagagagtattatttcatatatgaagaaaatagtttttttccctaattgtttgtcgaatatagtccttaccacatttaagctagatgttccccaacttaaggtggtttgacttactattttttgactgtccgatggtgtgaaagccatat

SEQ ID NO: 3183 - DNA, 1187 bp, Homo sapiens
gtttccaaaataccaatgagctcatttgtaattggcaaacaggaattttgtactagtataatgcagaagttgtgtagctttatatacaatttattctaggcaaagggaagcagaatagtcagcgtagaattataaccttgggtgggcaaagaagccctcagtttgaatgttgtatagtcagcaggagcccttttggctcagttttaagaaaactaaaaacaaaaacaaaaatgaatgcctgcatctggggcttcctcttcaaaggggcatgcccctggccttgtgcagctcttaaatatttgcagttgccctgaccctgtacccatttcaatggcaagcctactggcttggagtttgccttccaaccggatttcttccaccaattctggttaaagtgttgccagcatttatacccaattatttttttatgtaattctgagtcacttccttgagtggtccaaattattttctgaggtgccaatattatttttgctagcaatatactcccaaagttgcatatgttttgagtgaacttcctagaatcaatttttcccacaagttctattatttaggtgctgttttgttttgcattgtgaggattacaagttgcatatgtcttattatgaactaaacctcattttacgaacatgaacctctccaactctgtattaccttatagtttctgaaagttataatgtgttgaatggtttgcaaattgcaaaataacttacttcctcagagagattatttcatttctttgataccactagtgttgtatttgttttgtattaccccgctgtgtaaagcccacttgggttactatttttaaagcctgcaagacttctaacttacatttcctgtcttctatgctgcatcagcagaacatatacttttagttattggctctttcatctataaattactgcttcttagataaaagtacrtagtgatttaaagacctggaaacagtaggccaaagatgaccatttcttcactaaagaaagacattttctataaaaaatggttacgatttaataatttccatgattcattgtgtctatactaagtgtccaccactcatttttctaagacctttggttgcattattactaatttttatatttggtgtatataattgctctctgtatccattttctgagtgcaatcagtttcagaacaataatgca

SEQ ID NO: 3184 - DNA, 267 bp, Homo sapiens
tgagactctggactctgcccatgtgtttcctctgtctgtcctgtacagggtaataaagatattacccctttggcttccttcctgggagacactatttcccatgacaatgtacagtgccaggaggtctcctaaacagagattgggatcctaattgtaaaagagcttggatgttaggcagacagatgtcttcctaagaggcattaagrtgaagaagtaggaggagggaggggacaaaagaaggcaaagggacaaacaaaaaagtaacct

SEQ ID NO: 3185 - DNA, 267 bp, Homo sapiens
tgagactctggactctgcccatgtgtttcctctgtctgtcctgtacagggtaataaagatattacccctttggcttccttcctgggagacactatttcccatgacaatgtacagtgccaggaggtctcctaaacagagattgggatcctaattgtaaaagagcttggatgttaggcagacagatgtcttcctaagaggcattaaggtgaagaagtaggaggagggaggggacaaaagaaggyaaagggacaaacaaaaaagtaacct

SEQ ID NO: 3186 - DNA, 665 bp, Homo sapiens
actgaataataaatagcacagcctggatagactccaacccagagcatcctgagtgatttttcccaggaatcttttcatttttatgtctatttaattctgatgtcccattcatatggagacatatgatatggacttccgtttgctaccatataaataaagagcaatatgaagatgggataagggaatgtccagaatgccagagtcaaactagcatcaatagtggcaattatccaaatgactggggagaacaccaggatcttagaaatggtattttagatgttaccaagcaaggccatctaaagtaagccttcaaagagttccagaagcaaagaaaacagatgaaaaggcatgaaaacatgaacactctaataacagttaaagtaaatgggattgctcttgccaagacctatgaactatatctgattgtagagaaaaataaaacagcgggtgaggtggtgcatccattctgcagatatatctttcaatagggaaggcagttataaacgaggtgactctctcttgatttccatgattttaattttgtgacataatgtgtattcatttatattttctattgagtatgagtccatacacaattaatggttaaatttttgaaaatataaagatttttactsataaaatttatcattcaaggttgggatgca

SEQ ID NO: 3187 - DNA, 588 bp, Homo sapiens
aaaagatactactttttctcccctatcctgagctggaagagaattctgtttttamttatattttcccaaccacagtttgctagtgtgaggacaagtaaaggaccaaccagttatttcccatggattacagaaagtaagcctttgaaatctaccagtgcttttaccaggacgttttctcatatttaattgtttgctaaaatatttaggttaaaatatgtcttttctgcatacattgaagttcataaaactatgtgtagacattttcatagtcaactgaatttgggctagtattgtgcttccattaacatttcagaccaactctgaaacttaaaactaaaggtaaacgctattttttcaatcacaactaatttactctgtcatattctgaaaaagatgaattactgaaagtacctgaattccaattaattctggagctaatttgtggtgtaacttggaataaattttggttctccagtaaatgcttatgatttccaaaactaaactgttgaaagtaaaaagcaaaatataggcaaaaattgtgaaatcttttatgactatcccagtacacagctgcctatgtacatgaat

SEQ ID NO: 3188 - DNA, 588 bp, Homo sapiens
aaaagatactactttttctcccctatcctgagctggaagagaattctgtttttacttatattttcccaaccacagtttgctagtgtgaggacaagtaaaggaccaaccagttatttcccatggattacagaaagtaagcctttgaaatctaccagtgcttttaccaggacgttttctcatatttaattgtttgctaaaatatttaggttaaaatatgtcttttctgcatacattgaagttcataaaactatgtgtagacattttcatagtcaactgaatttgggctagtawtgtgcttccattaacatttcagaccaactctgaaacttaaaactaaaggtaaacgctattttttcaatcacaactaatttactctgtcatattctgaaaaagatgaattactgaaagtacctgaattccaattaattctggagctaatttgtggtgtaacttggaataaattttggttctccagtaaatgcttatgatttccaaaactaaactgttgaaagtaaaaagcaaaatataggcaaaaattgtgaaatcttttatgactatcccagtacacagctgcctatgtacatgaat

SEQ ID NO: 3189 - DNA, 477 bp, Homo sapiens
attccactccatccctcccccaccccaccccggcaaccattcttatactctctgcctcgatgagtttgcctgtttgcctctattagactcagtagccactttcttttctttctttttttcttttgagacagagtttcacttgttgcccatgctggagtgcaatggcgcgatctcagctcactgcaacctccacctcccgggttcaggcrattctcaggagccagtttcttagccactgtgacttcctgccacctgtcagcacccaggcagctaccctacatgagaaaacagaagcaaagtattgtgcatagcagttgttcagcagtcagtttttagttctgagataaaccggttcaatatgtttttttcgagaatgcagctccaccctgccatccctgttattacctattgtgcttaatgactaaatggaatgggagggattgctcttatggacctgccattgtggatatagaaaaa

SEQ ID NO: 3190 - DNA, 619 bp, Homo sapiens
tgcatggctgattttgtatttttagtagagatggcgtttctccatgttggccacgctggtctcgaactcccagcctcagatgatccacccgcctcagcctcccaaagtgctgagattacaggcrtgagcaaccaagcccagcctaccacgtatctctttaagagatgcccctcctctaggagtaagtcacgccctcgaccccattccctgtaacttctcccttggagaagttctcccttagagcaatttgcaaaactgtaattcggtatgtgtgtatattttatacccacacggcttcaagttctgtaagtgtgtttgctgtgctgtaatccacttagcacagtgccagacgcatgataaaaacctgttgaccacatgagatatcacctcacacccatgaggatggctatagtcaaaagaaattgaaaataacaaatattagtgatgatagggagaaactggaacccttgtgtaccattggtgagaatgtaaaatagtgtagctgttacagaaaacagtatggcagttcttcaaaacattaaaaagagagttgaaagcacggcctcaaaaagagacttgtatacctattttcatagcattattcacaacagccaaaagg

SEQ ID NO: 3191 - DNA, 1185 bp, Homo sapiens
actcgctgcattggtttgctagggctgccataacaaagcactacacactgggtgtttcaagcaacagaaattcattgactcacagctctggaggatagaaatccaagatcaaggtgttggcaggattgattccttctgaggactgtgagggagaatctgttccctgtctctctcctagcttctggtagtttgtggcacctttartgtttgttggcttgcagttgcatcatcccaaacttcagatggcattctccctctgaatgtacctgtctctgtgtccaaattccccctttttgtaagaacaccagtcatattggattagagcccaccccaatgacctcactttaatttgatcatctacaaagaccctatgtccaaataggtcacattcacaggtactgggggtcaggactttgacatcttttagggaaacacaagttaacccacaacagtaacttaataattcttagactagtggttctcagctgatggtacattatcaattgtggaatgtgaagtttactagattaaatgaacatttttcataaaatttattttcatttgttttctcctatttccaccttaacaataaaatatatccccaataatagtactgaaacttactgtttttgtgttttccaagttatcataacatttaaatgtatactccaaagtattatttcaattttaaaaaacagtaatagagttattattttggtttgtttgtgcattatagtttagcagaaactcccaacaagataactgcaatggtataaattatattcttataattgatatccttataattataaccttacaatttttatccttataattttaaattctttaaaaggcataaattatatctccaatagtagaatgcctctaaacatataaatatccttctagaaaaaaagagatttgctatttgtcatggtgggatccaggttctctgatagaatcaatggtgagttccaatatttgaaaagtaatttataagggcattaccttaagcattgcccacttggtccataactagaactgatgtttcaggacatgagaagctgctctacattacgtccttacttctgtttttccttgctttaaagaagctagaaatatttgaggactatgcaaatactgaacaccatggggattttgttgtaattgttttttaattacttt

SEQ ID NO: 3192 - DNA, 1185 bp, Homo sapiens
actcgctgcattggtttgctagggctgccataacaaagcactacacactgggtgtttcaagcaacagaaattcattgactcacagctctggaggatagaaatccaagatcaaggtgttggcaggattgattccttctgaggactgtgagggagaatctgttccctgtctctctcctagcttctggtagtttgtggcacctttaatgtttgttggcttgcagttgcatcatcccaaacttcagatggcattctccctctgaatgtacctgtctctgtgtccaaattccccctttttgtaagaacaccagtcatattggattagagcccaccccaatgacctcactttaatttgatcatctacaaagaccctatgtccaaataggtcacattcacaggtactgggggtcaggactttgacatcttttagggaaacacaagttaacccacaacagtaacttaataattcttagactagtggttctcagctgatggtacattatcaattgtggaatgtgaagtttactagattaaatgaacatttttcataaaatttattttcatttgttttctcctatttccaccttaacaataaaatatatccccaataatagtactgaaacttactgtttttgtgttttccaagttatcataacatttaaatgtatactccaaagtattatttcaattttaaaaaacagtaatagagttattattttggtttgtttgtgcattawagtttagcagaaactcccaacaagataactgcaatggtataaattatattcttataattgatatccttataattataaccttacaatttttatccttataattttaaattctttaaaaggcataaattatatctccaatagtagaatgcctctaaacatataaatatccttctagaaaaaaagagatttgctatttgtcatggtgggatccaggttctctgatagaatcaatggtgagttccaatatttgaaaagtaatttataagggcattaccttaagcattgcccacttggtccataactagaactgatgtttcaggacatgagaagctgctctacattacgtccttacttctgtttttccttgctttaaagaagctagaaatatttgaggactatgcaaatactgaacaccatggggattttgttgtaattgttttttaattacttt

SEQ ID NO: 3193 - DNA, 1231 bp, Homo sapiens
caactcagactggaaaatacactcagctatagacctaaaggttgtatttttagtttggattcgaatgtttatttgcccttcacaatatttcatgaagaccttgaacttatgaacccataccattctacatggctggtttaacatgtgcaatgtttgattgcttttctgaatggccactaatattaatttgtgtatacagttaagaatattstattttgaaatccagcataacatttcatttcaatctactgatttagtcctctagagaggacagaggctattaaattttcaaagcctctcggtgctattcctgtatctaatagaaatagccaattgaaaataactaccgtggtttccccagggattctaactgtacctcattacataatgttcattttctgagacataatgtaatcataattaattttgggcttattaaattgctgtactagtctttatggatgatttttttatgagaataaatccttaaagtttctaaagaagcaatgaggtcctgcttgttgttactgtcatacagctgctgttgtgaaatgcagtgctttcagtaagtgagtttcctaggtgacaagttgtttctttaagtatcaaacatgacatttttaatagcatgtattttaaagtcagctatagacctgaggtctatatttaaattaacattacaattaataaaagtaaaatgaaaataaaataagcattttacttaagtaaacagttacttacttgcttttataaacaaaaaatatcaagcataatcttgctcttaacaatttagagtcattttcatgaccatcgatttttggcttagcattaatattattgtttttctattccccccttattgttatttagttattgtgtaatattttagtttgccagtgcattgctgagcacatgggaagtttttaaattttatggaatgaatatatgaattcccaagtgaagctttcaattattctccttttaacttgacatagtcagcaaaataagataagcatgattgccaaaaatgtgtatttattatattgaatgttgaatcaaaggaccagccaataaagaagatactcaaatcttgaaatacttattattttgttgggccagaatttttttcacttcctgtaaagttctcagatttcttacaggtgttcaagttgccaaaggttgaagtcaccactgaatgaatcagattttatttcaatgagaaaatgacatg

SEQ ID NO: 3194 - DNA, 1043 bp, Homo sapiens
acaggaaattagtatgctggtttatcaagcaccaattcagggcagccttactatctttatctgacatttccataatggaatgcaaattcaaatgccaaagaagtttgaaagcagtgactgagaaaaacacattgtttacctgaaaatcattagttatataaaaggcattatgttcttctcatgtatgggggttgggggggatatataatacctaatataataattacattcaagaaacatttgtaactgaattagatataaaatcagtgtggctattcttatcattaatcmtagatctccttttaaaaatagactctaggccgggcatggtggctcacacctgtattcccaacaatttgggaggctgaggtgggcggatcacctgaggtaggagtttgagaccagcctggccaacatggtgaaacctcgtctctacaaaaaatacaaaaattagctgggtgtgatggctcacacctgtaatcccagctactcaggaggctgaggcaggcgaatcccttgaatcccagaggcagaggttgcagtgacccgagatcgcgtcactgcactccagcctgggtgacagactgagacttgtctcaaaaaaaaaaaaaaaagaaaagaaaagaaaaagaaaacactctatagaaaatatatgttatacgtatgttaaaatggaaaagatcttaaaggttacccacgccagtctccagaaaaatgcaaaaagaaatcctgtatgtgagctcacctccatacctgcataagcattttagaaattctaaaacattaatttcattcatattaaaaataagaacaaaacactcatgtttcttattaaaaatgttcagaatttattgtttttatttgcaattaaaatgtcaaatgcaagaattcacatggcagagagtgagttgaagaaaacacaggtgcctaattcacaagctacaaaaaacagtataaaggtgaccatctggggaaagctggctgacttaattttcctatgagcttaccgtctgttccttatttctcttccagactccatattc

SEQ ID NO: 3195 - DNA, 1043 bp, Homo sapiens
acaggaaattagtatgctggtttatcaagcaccaattcagggcagccttactatctttatctgacatttccataatggaatgcaaattcaaatgccaaagaagtttgaaagcagtgactgagaaaaacacattgtttacctgaaaatcattagttatataaaaggcattatgttcttctcatgtatgggggttgggggggatatataatacctaatataataattacattcaagaaacatttgtaactgaattagatataaaatcagtgtggctattcttatcattaatcatagatctccttttaaaaatagactctaggccgggcatggtggctcacacctgtattcccaacaatttgggaggctgaggtgggcggatcacctgaggtaggagtttgagaccagcctggccaacatggtgaaacctcgtctctacaaaaaatacaaaaattagctgggtgtgatggctcacacctgtaatcccagctactcaggaggctgaggcaggcgaatcccttgaatcccagaggcagaggttgcagtgacccgagatcgcgtcactgcactccagcctgggtgacagactgagacttgtctcaaaaaaaaaaaaaaaagaaaagaaaagaaaaagaaaacactctatagaaaatatatgttatacgtatgttaaaatggaaaagatcttaaaggttacccacgccagtctccagaaaaatgcaaaaagaaatcctgtatgtgagctcacctccatacctgcataagcatyttagaaattctaaaacattaatttcattcatattaaaaataagaacaaaacactcatgtttcttattaaaaatgttcagaatttattgtttttatttgcaattaaaatgtcaaatgcaagaattcacatggcagagagtgagttgaagaaaacacaggtgcctaattcacaagctacaaaaaacagtataaaggtgaccatctggggaaagctggctgacttaattttcctatgagcttaccgtctgttccttatttctcttccagactccatattc

SEQ ID NO: 3196 - DNA, 1043 bp, Homo sapiens
acaggaaattagtatgctggtttatcaagcaccaattcagggcagccttactatctttatctgacatttccataatggaatgcaaattcaaatgccaaagaagtttgaaagcagtgactgagaaaaacacattgtttacctgaaaatcattagttatataaaaggcattatgttcttctcatgtatgggggttgggggggatatataatacctaatataataattacattcaagaaacatttgtaactgaattagatataaaatcagtgtggctattcttatcattaatcatagatctccttttaaaaatagactctaggccgggcatggtggctcacacctgtattcccaacaatttgggaggctgaggtgggcggatcacctgaggtaggagtttgagaccagcctggccaacatggtgaaacctcgtctctacaaaaaatacaaaaattagctgggtgtgatggctcacacctgtaatcccagctactcaggaggctgaggcaggcgaatcccttgaatcccagaggcagaggttgcagtgacccgagatcgcgtcactgcactccagcctgggtgacagactgagacttgtctcaaaaaaaaaaaaaaaagaaaagaaaagaaaaagaaaacactctatagaaaatatatgttatacgtatgttaaaatggaaaagatcttaaaggttacccacgccagtctccagaaaaatgcaaaaagaaatcctgtatgtgagctcacctccatacctgcataagcattytagaaattctaaaacattaatttcattcatattaaaaataagaacaaaacactcatgtttcttattaaaaatgttcagaatttattgtttttatttgcaattaaaatgtcaaatgcaagaattcacatggcagagagtgagttgaagaaaacacaggtgcctaattcacaagctacaaaaaacagtataaaggtgaccatctggggaaagctggctgacttaattttcctatgagcttaccgtctgttccttatttctcttccagactccatattc

SEQ ID NO: 3197 - DNA, 611 bp, Homo sapiens
taaagtctgtatatgatctttaactaaaatatcccttttataacgtgatctgaaatacagcatctaatctctgctgttgttatataggaagtttcctgtattacaaatgagcccatttgtaatagttgggtatttctagttatccttggttatctggttatccttggttattcttccatttttcatccagtgttctggcatggttaattctcttgccmtttatcccatcaactattgggtggtaaatcttatgttacacattacttttctctttatgtggctgaatatcaccaagttcttaacttcttgtcatctaacaaggtatccagatctctttctatgctggttgcctttttctacaaccactacaatgtgttaacatctatctgaaaatttggagccatccatttaaaaatattgcattttttgaatgatcaagaactacatacataggtacatattttattgaatatataggagtgaaattatataaagaaatgcaatgctaatggtttctctaaatattcttttggatttttacatatacgatcatatcatctgtgagtaataacagtactatcatttttctttcattcttttttttttttttt

SEQ ID NO: 3198 - DNA, 571 bp, Homo sapiens
cactgactgctgttaccatcatactggcctcagtgtgaggacaaacactgtctcacctgtttctctgcatgccataagtgaaaatacctcacccaaacatggaatggacccttgctttaatttcccacaacacgtctaaagacaagactcggcagtattccattaaagtctagaggtgatgaaaacacagaataaattacagttatcatgatataaggctgctttggaagagtactagtccagggccatccttgaagagtcccaatcacagggtacctcctggtctggtttctgtcttgcctctatatggctggggccgggttactcttaccacatagaatgttttcaagtctgtctattatcagagccctggcttgctatccaagtctcatttaaggaaggagtcccttgctcacttcaacttaagactgaatttcccagacttatttcctttccctcgctaagaaaaagtatttaaaatctaggatgtaaaaggatgactgcgmcttcttcttgaggcctaaaaaagcactaacagggctgccccaggtttatctaattctctaagatt

SEQ ID NO: 3199 - DNA, 1254 bp, Homo sapiens
gagccttaacattctctgaaagacagagaaagggaagaaaacgggcctcatatcctgcagttaattcttttttttttttttttccttgtttgagatggagtcttgctctgttgccaaggctggagtgcagtggtgtgatctcagctcactgcaacttccacctcccarattcaagcgatcctcttgcctcagcctcctgagtaactgggattacaggtgcgtgccaccacgccctgctaatttttttgtatttttagtagagatggggttttgccatgttggccagactggtcttgaactcctgaccccaagtgatcctctcacctcggcctcccaaagtgctgggattacagacgtgagtcactgtgcccagcctccagttaatcctttatgagtttcttcatttagtgattgattcttctgatggcctgagtctttgcaccctgacagcagggactgtatatgtctggttaatccaggcatgagatggagttcagtgggtggcatatgataggagtttagtacatgtcttagcttcacttttatttgagtcctccagaagccaattccaagatgagggttgggatgcaaggaatttctctgggaggtgatctcgggaaacacagataggagaatggagaagcgagacagagaaggcaaggagccagtgaaggatgtattaccagtcatgggaaccaatggagaaaacacatctcagagttagtccactcaaggggtgtattagtctgctctcatgctgctaataaagacatacccaagactgggtaatctataaagaaaagaggtttaattgactcacagttccagatggctagagaagcctgaaatcacagaagaatgtgaatgagaagcaaagtcatgtcttacatggcaacatgcaagagagagcttgtgcaggggaactcccctttataaaaccatcagatctcatgagacttatttattgtcatgaaaacagcacggaaaagacccacccccatgattcaattacctcccactaggtccctgccatgacaggtggggattattaaaattcaaggtgagatttgggcggggacacagagccaaaccatatcaaggggcaaggaagtattcgggtatttatacccccaatcttgtcaatctctggttaagtgttcttgggtgaggaggggggtgggggagtatgaattccctgacatttttttagcaaaagagttgcagatgctgatagctggcagctagatcagcatg

SEQ ID NO: 3200 - DNA, 1000 bp, Homo sapiens
atgggatataatctcctggtgtgccatttgctaagacggttggaaaagcgcagtattagggtgggagtgtcccaattttcctggtaccatctgtcatggcttcccttggctacgaaagggaattccctgacccctgaccccttgcgcttccctggtgaggcaattcccggccctgcttcggctcacactccatgggctgcacccactgtctgacaagccccagtgagatgaacctggtacctcagttggaaatgcagaaatcacccatcttctgcattgctcatgctgggagctgtagactggagctgtccctattcgaccatcttccctttatattttttctaccctggccaccccagtctatgatagtgacctccccattttttcactctacagtgtactgttattctcaataaagtgggtcaatctgctatagggagtcaaattttcaatattttatccttccttctgatttttctcttactatcaacaatctaattattatcatggatctgtgggtccacaaacaacttggagaaaataattaataattatcacataagaggttaggttaaagagcagctttagcattgaaaatgtgcaactaaacaatgaaccaaacaaagttaaaatgaatgttcgggtgccttaatttttgcaaacaagttgggacagaagattcagatatgggaaatgattatcagatttcttttgattaggtggtgttttctttctaagtactttaaccrcatacaaagatatcatgtgatcttagaaaaccagataaaacattgatttcattacagttgctgaatgtttatacacaaatccagttaaatgactgcttctatggtccatttccaaaacgtgaaataactggacaatattataatgacaagggcatggtaaaacatgaagagttttccaaatagcaagtacttttcctctccttttttaaacaactaaaatagaagaattgaagtacggtagattattaaat

SEQ ID NO: 3201 - DNA, 695 bp, Homo sapiens
cacacacacacacacacacattttataggcaaatccttgctaggtgtgtgagataatgagaattcagctgccaggaagatggaattgaacagcaaatgaaagtttctttcacctagatgacttgggaggcctcctgttgcgtgcagcagagctgaaagggcacagtcaggccgcccaagcctataaatcaccaagatggtttacagcaagggcagtctgtgctgatgtgatcgatgctctccaaagcatcaatgggacatttatcactgtgatgagatgtgaatgctgccaggggtcatgagaatcctggatttatcagactattttcaattctgaatagcttcgacaagtgagtttccacacccccagccccatttttaaccttcagatgcacgagatttcaagtctatgagctacacatgatgcaatttagaggggaacatctgctacttttgtaatgctctcctaattgcttttgcagccttttacttttcacctatgtaatgcttgtttcattctcccattgagtttcatgtaataaaaagctggtccctctcttctttgctgttttgcatattcctctgtaagacattctcatgtgagaaagatcatacattracaatataaggtgtctgttgctttaatagaatactgagaaatgaaagataaatgtcagattgtcatttgatggtgta

SEQ ID NO: 3202 - DNA, 695 bp, Homo sapiens
cacacacacacacacacacattttataggcaaatccttgctaggtgtgtgagataatgagaattcagctgccaggaagatggaattgaacagcaaatgaaagtttctttcacctagatgacttgggaggcctcctgttgcgtgcagcagagctgaaagggcacagtcaggccgcccaagcctataaatcaccaagatggtttacagcaagggcagtctgtgctgatgtgatcgatgctctccaaagcatcaatgggacatttatcactgtgatgagatgtgaatgctgccaggggtcatgagaatcctggatttatcagactattttcaattctgaatagcttcgacaagtgagtttccacacccccagccccatttttaaccttcagatgcacgagatttcaagtctatgagctacacatgatgcaatttagaggggaacatctgctacttttgtaatgctctcctaattgcttttgcagccttttacttttcacctatgtaatgcttgtttcattctcccattgagtttcatgtaataaaaagctggtccctctcttctttgctgttttgcatattcctctgtaagacattctcatgtgagaaagatcatacattaacaatataaggtgtctgttgctttaatagaatactgagaaatgaaagataaatgtcarattgtcatttgatggtgta

SEQ ID NO: 3203 - DNA, 645 bp, Homo sapiens
aaaaaaagaaggcagaaatgtccaagcatttatttcaaagactcagaaaaacaagattcaaagtagaggaaaagataataaagataaaagcaaaaatgatggaatataaaacaatatacaatagaaggaatcactaaagccaaaagctaatttaatcaagactaatgcaaagtataaacatctagttaaaccattcaagaaaaaattagagaaagtcataacttactaacatattaagaactaaaatatagacattwctatagatagtacagatattaataaaggaattacaaagaactttatgccaatcaatgtagttattgcaaaacagaaaaatatctttcaattaaacacagtcagccttttgtatccacaggttctctactcatggattcaacctactgcagatcaacaatattttttacaaatggacagtcgcatctgtactgaacatgaacagacttttttcttgtcactatttcttaagcaatgctatataacagacatttacatagcatttgtattgtattaggtattctcggtaatctaaagatgatttaaagtatatggtaggatgtgcatagataatatgaaaatactacatcattttatagaagggacttgagcagctatggattttgctat

SEQ ID NO: 3204 - DNA, 645 bp, Homo sapiens
aaaaaaagaaggcagaaatgtccaagcatttatttcaaagactcagaaaaacaagattcaaagtagaggaaaagataataaagataaaagcaaaaatgatggaatataaaacaatatacaatagaaggaatcactaaagccaaaagctaatttaatcaagactaatgcaaagtataaacatctagttaaaccattcaagaaaaaattagagaaagtcataacttactaacatattaagaactaaaatatagacatttctatagatagtacagatattaataaaggaattacaaagaactttatgccaatcaatgtagttattgcaaaacagaaaaatatctttcaattaaacayagtcagccttttgtatccacaggttctctactcatggattcaacctactgcagatcaacaatattttttacaaatggacagtcgcatctgtactgaacatgaacagacttttttcttgtcactatttcttaagcaatgctatataacagacatttacatagcatttgtattgtattaggtattctcggtaatctaaagatgatttaaagtatatggtaggatgtgcatagataatatgaaaatactacatcattttatagaagggacttgagcagctatggattttgctat

SEQ ID NO: 3205 - DNA, 645 bp, Homo sapiens
aaaaaaagaaggcagaaatgtccaagcatttatttcaaagactcagaaaaacaagattcaaagtagaggaaaagataataaagataaaagcaaaaatgatggaatataaaacaatatacaatagaaggaatcactaaagccaaaagctaatttaatcaagactaatgcaaagtataaacatctagttaaaccattcaagaaaaaattagagaaagtcataacttactaacatattaagaactaaaatatagacatttctatagatagtacagatattaataaaggaattacaaagaactttatgccaatcaatgtagttattgcaaaacagaaaaatatctttcaattaaacacagtcagccttttgtatccacaggttctctactcatggattcaacctactgcagatcaacaatattttttacaaatggayagtcgcatctgtactgaacatgaacagacttttttcttgtcactatttcttaagcaatgctatataacagacatttacatagcatttgtattgtattaggtattctcggtaatctaaagatgatttaaagtatatggtaggatgtgcatagataatatgaaaatactacatcattttatagaagggacttgagcagctatggattttgctat

SEQ ID NO: 3206 - DNA, 2678 bp, Homo sapiens
acaacctacatttacacaagtgccaccaagacctgaggaagaaaataagttttaatgcttctttgtgtgtctagtttcacacatytgcaatcatattatattaaaacatgtggaaatgacaagctcaatggtgggggggatgacaccccaccccaaaataagacacaagggattaacccaaattttccaactacgggttcacagaagagacccaaagatgagtaaaaatacagatgtgcatgtgagaagttttctgggcacagcatccaaaactttcacttcagtctgatccacagagatcagaatgatctaagattaattagatatgtactacaccaagggtgagaatctcagctcccagccctgtactctccataactctgactcctcggagccacgttgtcaactgcaagctgcctggtcacatttactctgagtcctgaacaacacaaaatggattacgcaaaacggagtgcccctttgcagggcaggtctcagattctctctgactgcaggtgttctggtatcccagataagtaggattatttctggacaagaaagggagaaagggaggagaaaaagaggaaagaggccagggtgagggacagaaaacaagtgttcacacaccacaagaacattatgagaaaaatcgaagtagattagcttttgtacttaaaattctaggctataactttctgagtaagtttgaattttaaaaattgatttttacactttatgtgaaaaaaatctgccagaaaattttttctagcagaaaagagaagacacacttgagttgggtaactgaaggattaacagagaaattatcacaaaggtgtaagcaggaagagcaaaaagggatagaatagttccctaaactagtgacagcagtgtaccattggcagccccatgtgaaggggcaaggagactgagtgccaccacccagagggagccagccatccaatggagggggtggccttccacaggaagatgcagggacccagcagggaaggagccaggggaataaaatcccaactccactcttcctctgccctcttccccttaccccaaagtggccaagctgccccagaagccagagggcaaggctgccaacagatcagtcttatggagcgtacagcagggcagaggcagagggggaatgcatttaaagaataaatggaaaacatccagcacaaaatctatgtgctcttttcactgtggaaaaacaacatggaaaggtgagcactctagtctacagtagacagcagagtcacagggctggtcattggtctccttgttaagctaaactgtaattattacatacactcactccatcagctattgtgcagctaatatagtcaattatgaaaccgacacagaaacaaagaaaagtgtttctggcaaacttacgtgaccacgacacagtacatacactgtgacctcaactatacactcaaaaaaatactacggcagaagtgctgaaatactgtggtcatggaatttttttttctttttgcaaaatcttccttattaatgtttatattatctttccaacatcactgcttgttaactatatcctcactaagactcagtttcttttttttaatttttttaaaatttttttatttttttgaatagagacaaggtctcactatatttccgggctagtctggaacttctgggcctctcaaagtgctgggatttcaggcatgagcctctgggccaggcctagactcgcttgttttcttatccaagaaacaggcgagttatacctcttgagattgttgtgaggattaaatgagattacataaagcaaacaacatatgtaaagagcagagaggaacaacagagaaaaacaacttaccccaggatgtgccctgaggtgacgggacaacaaagtctagcaccataactttctttcccaaaatggcagcttcctacaaacgaacaacaacaaaaattacgtataaagatcttgtcactttcctgacactccctcaatctttgtcttccgtaaaagactgtttttgtgtgacacacaatcttttacctgaattataccagctattacaacaaaagcttaaactgtaacattagtttgtttttttttaagtagcagaagaaatagctatggcagtcatcaggaaaattatctacgagtttcatttctatattcataccttcgcacatgaaaggcctccagaaccaccaccgatgatgatgagatcataatcatatgccaaatcttcctgaaggagcttctgtaacaaaccactctgatatgcctatggtttaattacaggagaaagaacactgcagaatttaaagttttacagctatttatgtacaccctatgttcaactggtatggatttcttttataaaaatcttaggaaaaatctataattcatctaagttggagttgtaaatttatctggatgctatttaaaaacagggtccaactagttagaacttatactaaagtacatatgtttttgtcccttcttacacctgacagctaggaatgtgtcaaataacctagaaggttgtggctctgtacctatgtaagatgaggtcattttccttggtctaattatcaaaatattatagtcaagtgcagtggaatagccaagtatcatttttcattagctcacttgtgctagtcttcattttgaaaacaat

SEQ ID NO: 3207 - DNA, 945 bp, Homo sapiens
ccaataaagctttttttttttttttttcaagagatggggtcttgctacactggactcgaaccactgggctcaggtgatcctcctgcctcagcctcccatgtagctgggactacaggtacataccactgcacctggcttacaactgttggtttttgtttttaaagaaaaatcagtgtcaccagacagaacctttccaaagctctgctcctgaccagagaactgcagcgtggcctccaraataacatgttcacagccctgcctggcatttgggccctgagtctggcctcaccacctgccacatcctcaagcatcctaccctccttgtggctgccaagcacatgggctatggagtcagagaccctgaggttccagcactgtgaccttgggttacttcacctcactgaacctgtttcctcacttctgagatggggataatgacccctcacaaggtaagcatgtggaatttctggggtgatgctctgaatacacttggcagagtgcttagcacagagtgaatatgcactcttcatagggctggctcaggccacagtcaacatctcctcctgagaggcactgcctgaccatcccacctcaagcaggcagccccagtagcttttgcaccctttttgtttcctccttagctctggcagctctttgagtcttttgcctgtgtctcttcctttctggtccattctccctactgggctgaggtctctatgatgacagggtcctcggctttgtccctcattgtctcagcaaggccaggcccagtgctgggcaagtaacatgaaggcagtggacattcactgaggtgaggaataactggcagttgcaggtgcagcgctctggcacacggcctctctggcactggcacaatgggggactctcttgtgtgtctgaccacattcttcttgatcttcccctccaccgtggtccagaatcagc

SEQ ID NO: 3208 - DNA, 646 bp, Homo sapiens
ggctaattatcggacacctattaccaccactccggggacagcatcaatgaatcaaactccacaggactagaaatattctgactagtgtccaggataacaggagagctaccagggcttttggtgccacacacctgggtttattagggccagaattgctctccataacctaagaaccacccaaacatccgcaggataaatgcaaaaccctgggaaccctcttttttttgagaraagaaatatggaaggaaaaaaactttcctctattttgtagcttctaattaaaaggaatccatgaaagaattaattgcacctaaacgtattttactacgtcttacgttgtactgcagtaagtcttaagatgagctgcagaggggaatggattatgccttactaaggcatggaaaaaggtttttttggttatattttaaggtctcaggtaaggcactgattaagagccagttggcctgggctggaaacctgcccaccacttgcctgccacacacctgccctgtgcctcagcttctcttttggctaggatgataacagagttgtctcactggggtgtcataagaagtaagtgcagcaggcatctatctgaacagggcccagcatatagcagtttcccaccacgcttgttattgtggaa

SEQ ID NO: 3209 - DNA, 646 bp, Homo sapiens
ggctaattatcggacacctattaccaccactccggggacagcatcaatgaatcaaactccacaggactagaaatattctgactagtgtccaggataacaggagagctaccagggcttttggtgccacacacctgggtttattagggccagaattgctctccataacctaagaaccacccaaacatccgcaggataaatgcaaaaccctgggaaccctcttttttttgagaaaagaaatatggaaggaaaaaaactttcctctattttgtagcttctaattaaaaggaatccatgaaagaattaattgcacctaaacgtattttactacgtcttacgttgtactgcagtaagtcttaagatgagctgcagaggggaatggattatgccttactaaggcatggaaaraggtttttttggttatattttaaggtctcaggtaaggcactgattaagagccagttggcctgggctggaaacctgcccaccacttgcctgccacacacctgccctgtgcctcagcttctcttttggctaggatgataacagagttgtctcactggggtgtcataagaagtaagtgcagcaggcatctatctgaacagggcccagcatatagcagtttcccaccacgcttgttattgtggaa

SEQ ID NO: 3210 - DNA, 1238 bp, Homo sapiens
ggaaaaagcgaaggtacatattctacccctttttctctgagaaagagaatgtgggcacgtatgttcttatttgtttatattttcataaaggaagtatgataggttattttatatgtcagcttggccaagctatggtgcctggtcatttggttaaacactagtctagatgttgctgtggctgtccttttagatgtaattcatatctacaataaatagactcagttaagcagattaccctccatactgcggggggcctcatccaatcagtcaaaggccctcagagcaaagactgaggttccccaagtagaaggaattcctttcaagactgtgacatagaaagcccagctgagtttccagcctgcagaattcagactcacaaatgaaacctcaacacctacctaacctccagcctccctgctgccctacagatttcaggcctgccagcccccacaatcaggtgagtccattcctttaaaaaaaaaaccaggcgctctctctctctttctctctctttctctctccctctctgtctcttcctctcattggttctgttactctggagaaccctgattaacacgggaacacttggaggattccacaaaaaatgagtacagtaactgtgtgtgggaaggatgagggaggggtggtaatgggaattctcagtttaggccttgttatagttagaaactttaagccgtgtaaatatctcacctactcaaaacagaaagtaaaatttggggcaaaatcaacttttaggtataaaataaaataaatgctctataaattaagcaataaaggttatttgttttatagaaatttaagatacaaaaaaagagaattatccaggtttatccaaaagatgaactgctcaggaagaagacaatttttaaaagcactgagatgcaattcttttaaacatgaacctatataccatatttaaatccatataatattctacaaatctggtgtatcctccaagcatttgatacaaggtttaactctcaccaactcttccactcctgaccccaccaggtgggcaaacataacttgtggcaatctgcaaagaggccaggccacgacctgggctggagtggccagcctgtggctggggagactttccagggaacaggtgccacctccccaaaacgcttcacgctgcgtgcaaggattcagagatgtccagggtaaaccarcactttttaagccaaatctaaatgtttaataaaaactaagaatga

SEQ ID NO: 3211 - DNA, 697 bp, Homo sapiens
ttcagagaaatgagaccctaagcagggaggagcctactggccatctgagaaaccctctagagtaacagagaaatgtcatgggcctcagggaagaaaagaggcctgtaccaggcaacatcttagatgcctggttgccaacttctcaaaacaacccataacaaccagcagggttggtaactggctgacattcattaacacactcatatggctgtttgtgaacagatcccaaatgcaaagcgtccttcacacacttctacccactccccrtctccacacccctatacaagatcttttcattcaaccaaaaggataagaaatgtgctacagaaatgtgaacatcaacacaaatacagattattttttcatcaagagagttaaaacattcccattatcaagaggggtcttcaccagaatgtaacaaaatgaatttcagctttcacaccagtaaccagtgaaagtatggcctagagctagttacacggcataaagtgactagtggtcagttattgttcattagttcagatgagtaactgcagaaactctacccagagctgagcacatatggctatcatgatgtcagatgtcagttaagagttatgttcctgtaaaccaaagcaccagagctaaattaacaatttccctttctggccttaattgaccaacagtttaagtactgtggtgctaccagcacgatcct

SEQ ID NO: 3212 - DNA, 1821 bp, Homo sapiens
aaaaatcaggtactatgatagataattcacctgatttttctattcttataaaggtattttcttgcatagacaattgttcaatttggtgttcctgcagagggatgattggtccagtattctatttacccatcttgctctgcctcatcctcaaaatctatagcaattttaatgtttctctttatgacaattttttaaagtttataataatctaattatcaatgtaattgtcttctgactaaactgggactccttgtttaaaactatctcccactggaactaccagtatctggcacatagtacagacactcaataacaataaatatatctttaattaaaatattaataaaagtccttcattcaatggctgccttgggacaagaatatgttgtatcagaaaatgcaattacattttaactatggagtatctatacatgttttgtgtgaatctatttttgtatagagctaggaattatttatatcaatagattacatatttgtcttatgtatttgcacatttattcaaaagtgtgtcttctagaaaatgaactataaagcagtgtgtaattcatgagcttgcattgtagttcaacaaactaaactcataaagtcagatttgctagggcataagaaatgctgagaagtaaaataaaaggatataaattgatggagaatttcttaaagaaagtgttgttgcatgtatttgtatagatgaaagacttttctgacagggtagcatttgagcaaggccatgtcttaagtgaggatgtgggccaagtccccatcagagaaagagtccagaccaaggggatttccattacaaaggtcctcaggcaggagtgtgtttggatgatttaaggaagagcaaggaggccagtatgctaaagcagtaatgagtaattctgtataccactttgccagttttcataaatttatcttaaagaaaaaataaaataaattggcctgacactatgtaattgactcttatctctgttctacatcattttcacaaacatgtttgatttttttctcttattattactcatgaaataagctataaatatgacagaagctcttcattccttgattagtgaggcaccatgaacagccctagtgaatctacctgctaggataatgcatactgtgaatgacattttagtttctaagatgtttggtaaacatctaaatagacatgatagtaatatttgtactatgactaattgtaataaatgctggtttatttatttctgtgaccttccttttttgtgtggttaattgtggctgatctgtaaaaaatgtttcaaattgcctaggaaatcaatttttttcttcttatatagatagtgtataccttcaccccctggtatccatagggtattggttccaggatgccttttcacccctagtggatacaaaaatctgtagatacttaagtcccttatttaacamccttcaaaatggtgttgaatttgcatgtaacctacacacatcctctcatatattttaaatatctctaggttctttaaaatacctaatgcaatgcaaattctatgtaaatagttgatacactgtattctgctttatttgtattacttattattgttatatttttatttttatggctttttttccgaatattttagaactatggttgtttgaatctacagatgtaaaatccagggatgtgaaactcacagatacagaggtccaactctatttacacagtattttttaaaagagaaaaactgaaactaaaaaaaatcttaaaagttcaaaaaaataaaaaagacaaatgaattcaatagtttttaaaataaagctata

SEQ ID NO: 3213 - DNA, 1821 bp, Homo sapiens
aaaaatcaggtactatgatagataattcacctgatttttctattcttataaaggtattttcttgcatagacaattgttcaatttggtgttcctgcagagggatgattggtccagtattctatttacccatcttgctctgcctcatcctcaaaatctatagcaattttaatgtttctctttatgacaattttttaaagtttataataatctaattatcaatgtaattgtcttctgactaaactgggactccttgtttaaaactatctcccactggaactaccagtatctggcacatagtacagacactcaataacaataaatatatctttaattaaaatattaataaaagtccttcattcaatggctgccttgggacaagaatatgttgtatcagaaaatgcaattacattttaactatggagtatctatacatgttttgtgtgaatctatttttgtatagagctaggaattatttatatcaatagattacatatttgtcttatgtatttgcacatttattcaaaagtgtgtcttctagaaaatgaactataaagcagtgtgtaattcatgagcttgcattgtagttcaacaaactaaactcataaagtcagatttgctagggcataagaaatgctgagaagtaaaataaaaggatataaattgatggagaatttcttaaagaaagtgttgttgcatgtatttgtatagatgaaagacttttctgacagggtagcatttgagcaaggccatgtcttaagtgaggatgtgggccaagtccccatcagagaaagagtccagaccaaggggatttccattacaaaggtcctcaggcaggagtgtgtttggatgatttaaggaagagcaaggaggccagtatgctaaagcagtaatgagtaattctgtataccactttgccagttttcataaatttatcttaaagaaaaaataaaataaattggcctgacactatgtaattgactcttatctctgttctacatcattttcacaaacatgtttgatttttttctcttattattactcatgaaataagctataaatatgacagaagctcttcattccttgattagtgaggcaccatgaacagccctagtgaatctacctgctaggataatgcatactgtgaatgacattttagtttctaagatgtttggtaaacatctaaatagacatgatagtaatatttgtactatgactaattgtaataaatgctggtttatttatttctgtgaccttccttttttgtgtggttaattgtggctgatctgtaaaaaatgtttcaaattgcctaggaaatcaatttttttcttcttatatagatagtgtataccttcaccccctggtatccatagggtattggttccaggatgccttttcacccctagtggatacaaaaatctgtagatacttaagtcccttatttaacaaccttcaaaatggtgttgaatttgcatgtaacctacacacatcctctcatatattttaaatatctctaggttctttaaaatacctaatgcaatgcaaattctatgtaaatagttgatacactgtattctgctttatttgtattacttattattgttatatttttatttttatggctttttttccgaatattttagaactatggttgtttgaatctacagatgtaaaatccagggatgtgaaactcacagatacagaggtccaactctatttacacagtattttttaaaagagaaaaactgaaactaaaaaaamtcttaaaagttcaaaaaaataaaaaagacaaatgaattcaatagtttttaaaataaagctata

SEQ ID NO: 3214 - DNA, 607 bp, Homo sapiens
gcatgcaccaccacacccgtctaatttttgtattttttgtagagaaggggtttcaccaggttgcccaggttggtctcgaaatcctggggtcaagcaacccaccggccttggcttcccaaattgctgagactgcaggcatgagccaccaggcacattcacggtacatcttttgacttctaagtaagckcactgttcatggtgtataatctctattgcacttttatcagaaataaatttccactttagtaacttttactgtttataaatatcatcaacacacaactattcttgattttctcccaatttgttttctgtataggatattattttcatctaaattatcatacttagctttttgtaatacttaaaattcattgagataaataatgtcttactaaaaagtataatttgataagaataacaaccttagtgatttaaaaatatttagcaacttccagtgagacattttactttagagaatggcaagatttctgaagatctgaaaatgtggatcttcttgttttattcttcaattgatttctaaagagtatatatatatctgggcctttttcagtgttttcagaactagtttcatttcaatattatt

SEQ ID NO: 3215 - DNA, 2005 bp, Homo sapiens
ttcaacaaaataatttctatcattgagtgttgatatgggaatctcacatgcacaattaactgtatttggtagttgcagtttacaacaaggttgtcttgtggccagaaagagttaatggagtttctgtagtgcccaatctattatagagaatcattgaattacctctgtgtggcatggaatcaggtaatctgagaatataagttacstaaagatgctctaacatcattctataacttaaaaaatgaaggaatttacattcagaaaggtgatgtgactagctcaaaatcaaaattagtggaagtagatccagaattcaggcctgagactctggttccgagggcttcatgcctagtgagccctctttaaaaatatgagaaatgagcaaatcaactgtacaaaatcacattcatctatcagttactctgaggtctgtctaggaaattatcaattaagcaagacttcagcattggtaacactaagaagcctcagaaagtaattcccaggagaattacaaaagcatattgactttcatttggcaactctaatgttactttctgtaagattagttaaatttgtaaccatggcagccctaactgtaatattaaaaatatttttacaggcagcgattttatttttcaaatagcttcattttgtaaccatgttattaagtcacagtacatttgctctaaatataatctgctaaaactttgttttgatcctttcttgttttctgttttgttgattggttcgttggttgtcaggttgctttgctcgctgatttatttattctgttgtttgcggtttgtggtctaatatcagtgctacgtaggatatggtgagtttgcagttaatgctaattaaatgtacatatttcgggattctttaatcactgatccttcaccttgatgttgaactgctcattataccctggagcacagaaaaatgctcctttttagacatcaagtacatccacttagtactgagaattagcgtgggtttagttctctttaggcattttatggtcaactgtataaaagcacagtgaaaataatcagaattctggaggttttttatagagcagaaataatgagcctggttctctgactcacaggtcacagatgcatcccactctcaggtcagcttgagaggaggaaagcagaaaaaagcttcctcttgcctggtggttggtatcggatgtcttgtttctaaaatcccagaaactactgtgtacctgaaactgagctgcccataaagcccctttgctctggcactgcagactcatcactgttcagagtagcttttgagatcagcacagagagctccagggttcacctgaacccatgccctacaagagccaccaggcaaagccaggcttcattccttcttcgtttcctatacatagggggggcttccctgagctcgtgacactgccaatgtctttgtgatggtcatttcggataaaggagcaaatgagtttttgttcgttagtgtttactgatgattatttttaatcttatttaggacagaattgatttttgtttttttgttttgttttattgagacagggtctctctctgttacccaggctggggtgaagtggcatgatcacggcttactgcatcctcaaactcctgggctcaagtgatcctcttgcctcagcctcccaaagcgctggcaccataagcatgaaccactgtgctcagcctgagtttttaaattatagttcgatgactatgaggaagctaaggaccaaaagacggggcctttcccaaggtctataaccagcaagtgagtggcagggttggcattcattcctttttctcccatttcagcttttattcctttttctcctcagcatgtagtacatactggttactcaatacattgttactggattagttatttatttatttatttatttattttgagacagagtctcattctgtcgccaggctggagtacagtggcatgatcttggctagctgcaacctctgcctccttggtt

SEQ ID NO: 3216 - DNA, 1130 bp, Homo sapiens
  misc_feature (1)...(1130): n = A,T,C or G
tttgrgannnnnnnnnnnnnnnnnnnnnnnnnnnnnnnnnnnnnnnnnnnnnnnnnnnnnnnnnnnnnnnnnnnnnnnnnnnnnnnnnnnnnnnnnnnnnnnnnnnnaaagattgtgcttcccacatacaagaagtgagccccagggaagagctctctcttgctctgctccctacagttttagacacaatcaagtgagaagtgatgtctggcgcttaggcagccatcttgcaaccatgaagtgacaagcttcacagggaggaaaacaggcactaaagatagtagttcagaggaagggaaagatgatggtatcactgagctgagaccatttatctccagacttcttttaaacaaaaaatttctctatgatttaagccaccatatgttgtgctttctcttacttgcagccaaaagtgtcagaggtgggcagagtttatatcagtttgcccacaaacgtgtctcctgtcctcagcacagtgcttagcaaacaataggaatgcaattagtgtttgtggcataaaagcaacatggggtgttgggtctggctgagagaactgaagcacctaactttcagatgctacatacacctgtttttctaggattttcccatgtagagaggttttggccccaaagaaaagtccctagttgcaaaggccgtcggttctgcctctgcctgtgagtttttggtatcttgaatgctttctggctctacagcctgagatgaatcaaagtagagttcagtgcagccagtgcaggtgtgaatgctcaaaactggatactactgtggacctttcctttcagttctattctaggaaaactttggaaagaaaagctttgacagataaaggacagtaaaattatttgtgaaaatcattcaatcaaccaatcacaatcactgattatgttagacacatttctgggcatcggagaagaaatagaaagataccattcttatagttttcctgaattctaagttcccagtttcctttctctgcttgtcttccatccaaagatgggcttaatgcaatcatctggacccaaaagagaaaatgtgaagtttctcatggattccagtgtgatcgctttccagagctagatttcatgtagttttacggtgttcgtcagaaagtt

SEQ ID NO: 3217 - DNA, 1130 bp, Homo sapiens
  misc_feature (1)...(1130): n = A,T,C or G
tttgagannnnnnnnnnnnnnnnnnnnnnnnnnnnnnnnnnnnnnnnnnnnnnnnnnnnnnnnnnnnnnnnnnnnnnnnnnnnnnnnnnnnnnnnnnnnnnnnnnnnaaagattgtgcttcccacatacaagaagtgagccccagggaagagctctctcttgctctgctccctacagttttagacacaatcaagtgagaagtgatgtctggcgcttaggcagccatcttgcaaccatgaagtgacaagcttcacagggaggaaaacaggcactaaagatagtagttcagaggaagggaaagatgatggtatcactgagctgagaccatttatctccagacttcttttaaacaaaaaatttctctatgatttaagccaccatatgttgtgctttctcttacttgcagccaaaagtgtcagaggtgggcagagtttatatcagtttgcccacaaacgtgtctcctgtcctcagcacagtgcttagcaaacaataggaatgcaattagtgtttgtggcataaaagcaacatggggtgttgggtctggctgagagaactgaagcacctaactttcagatgctacatacacctgtttttctaggattttcccatgtagagaggttttggccccaaagaaaagtccctagttgcaaaggccgtcggttctgcctctgcctgtgagtttttggtatcttgaatgctttctggctctacagcctgagatgaatcaaagtagagttcagtgcagccagtgcagstgtgaatgctcaaaactggatactactgtggacctttcctttcagttctattctaggaaaactttggaaagaaaagctttgacagataaaggacagtaaaattatttgtgaaaatcattcaatcaaccaatcacaatcactgattatgttagacacatttctgggcatcggagaagaaatagaaagataccattcttatagttttcctgaattctaagttcccagtttcctttctctgcttgtcttccatccaaagatgggcttaatgcaatcatctggacccaaaagagaaaatgtgaagtttctcatggattccagtgtgatcgctttccagagctagatttcatgtagttttacggtgttcgtcagaaagtt

SEQ ID NO: 3218 - DNA, 869 bp, Homo sapiens
atttagcttggcacaaagattacatattttccccaagaatttttctttaagaaagtataaattttacaactctctttttatcatactgattggaaaatggtggtgttgagtaaattggatgctgaggttcattaattggatttttgaggggcagaaccagtagtttttgtcgtcaaaatagtccaggcagctctccatgtgaagaggatggaggaccgtgtctggcagggatgtccagaggagagaatacagtcatgggttcttagtttctgtttctggttggaccagtaaagccctttcctcatccctcttttccacttatcactggagacagaaactaaaaaccatggcttcaggctgctaaaagcctaaaacaaaacaaaacagagcaacaagaacaaaattagctgggtttgacaagcttggcgctgtaaacccactggcaggctacaggtttgccaggcctagcagataccagcaggttttaaaattcagaggacatgctcttgactratgtgtctgcgactggatactatttttggagttttgaccgtttgtgtttcttcccacctcaccctctacttggccttttccccattatgaatttggggcctcacttatttatgggacacaaggtaagctgtcagggctctcctcattccttggaacctattcttggaaaatactagatgaaaccatatttctctgtctagaatgtattgttgtatgcaatttgagaaaattgtaatttttctttttgcataatgatctatcatcacaatcacactttaccaaatatttatgaaataatgttttcctactaattttgatatcaccttctataatataaatattcattatatgaaaaa

SEQ ID NO: 3219 - DNA, 1256 bp, Homo sapiens
gctctacaattctcagcctctcgtaaccatccttctaccctctatgttcatgagtttcatcgttttttatttttagatcctacaaataagtgagaacatgtgatgtttgtctttctgtgcctggcttatttcacttaacataatgatctccagttccacccatgttatcgtgagtgactggatctcattcttcttttatggctgaatagtactttattatgtacatgtatcacattttctttatccgttcatctgttgatggacacttaggttgcttctgaatcttagctattgtaaacagtgctgcaacaaagagagttgtgcagatatctcttcaatrtacttgatttcctttcttttgggtacatactcagtagtgggattaataatattttcttatctctcgctgactttattgtaagaatatagtatataatacatctaacatacaaaatatgtgttaggagactgtttattattattgggaaggcttccagtcaacaataggatattagtagttataatttgaaggagtcaaaatttatacataagttttctaatgcacaggggtcagcaccccaacccctgcattgttcaagggtcaactgtattctcaatgttagcaagtctacttctgcagttagcagagatagcctcagtaattattcaacaagattttacactatatttgcaaatcatcaaatgtcaaacaattgtggttttcagactactatatgctttggaggtcttttaccctattataaaaattatactgagatagcaaatgtaatgatttagaacatcattatgatctctaactatggggttaggaagttctttaccctttaaattgtaatttaattttaagtaaatgttcacggaattatgtttttttcctggaaggaaatgtggttgtctttgggaaaatggatgttagaagagttgagaaactcttatttttcttttgtacctttctgtagagttttaattatacatatcctggagttatctgggtagtaagataatgttccattttttctttataatataaactttttaaagtgagggaactgggaataaagatttttaaaaagtcaaaaaataagatgaaagtgtagtaaatttgaaatacaaaaggaatgtctgaaagtctatgaaactgctgaagatgggccacaaatttggctctgatttctctagcagccaataacataaggaaacaccatcacatatgtaattcattatatctgtaagat

SEQ ID NO: 3220 - DNA, 1256 bp, Homo sapiens
gctctacaattctcagcctctcgtaaccatccttctaccctctatgttcatgagtttcatcgttttttatttttagatcctacaaataagtgagaacatgtgatgtttgtctttctgtgcctggcttatttcacttaacataatgatctccagttccacccatgttatcgtgagtgactggatctcattcttcttttatggctgaatagtactttattatgtacatgtatcacattttctttatccgttcatctgttgatggacacttaggttgcttctgaatcttagctattgtaaacagtgctgcaacaaagagagttgtgcagatatctcttcaatgtacttgatttcctttcttttgggtacatactcagtagtgggattaataatattttcttatctctcgctgactttattgtaagaatatagtatataatacatctaacatacaaaatatgtgttaggagactgtttattattattgggaaggcttccagtcaacaataggatattagtagttataatttgaaggagtcaaaatttatacataagttttctaatgcacaggggtcagcaccccaacccctgcattgttcaagggtcaactgtattctcaatgttagcaagtctacttctgcagttagcagagatagcctcagtaattattcaacaagattttrcactatatttgcaaatcatcaaatgtcaaacaattgtggttttcagactactatatgctttggaggtcttttaccctattataaaaattatactgagatagcaaatgtaatgatttagaacatcattatgatctctaactatggggttaggaagttctttaccctttaaattgtaatttaattttaagtaaatgttcacggaattatgtttttttcctggaaggaaatgtggttgtctttgggaaaatggatgttagaagagttgagaaactcttatttttcttttgtacctttctgtagagttttaattatacatatcctggagttatctgggtagtaagataatgttccattttttctttataatataaactttttaaagtgagggaactgggaataaagatttttaaaaagtcaaaaaataagatgaaagtgtagtaaatttgaaatacaaaaggaatgtctgaaagtctatgaaactgctgaagatgggccacaaatttggctctgatttctctagcagccaataacataaggaaacaccatcacatatgtaattcattatatctgtaagat

SEQ ID NO: 3221 - DNA, 1256 bp, Homo sapiens
gctctacaattctcagcctctcgtaaccatccttctaccctctatgttcatgagtttcatcgttttttatttttagatcctacaaataagtgagaacatgtgatgtttgtctttctgtgcctggcttatttcacttaacataatgatctccagttccacccatgttatcgtgagtgactggatctcattcttcttttatggctgaatagtactttattatgtacatgtatcacattttctttatccgttcatctgttgatggacacttaggttgcttctgaatcttagctattgtaaacagtgctgcaacaaagagagttgtgcagatatctcttcaatgtacttgatttcctttcttttgggtacatactcagtagtgggattaataatattttcttatctctcgctgactttattgtaagaatatagtatataatacatctaacatacaaaatatgtgttaggagactgtttattattattgggaaggcttccagtcaacaataggatattagtagttataatttgaaggagtcaaaatttatacataagttttctaatgcacaggggtcagcaccccaacccctgcattgttcaagggtcaactgtattctcaatgttagcaagtctacttctgcagttagcagagatagcctcagtaattattcaacaagattttacactatatttgcaaatcatcaaatgtcaaacaattgtggttttcagactactatatgctttggaggtcttttaccctattataaaaattatactgagatagcaaatgtaatgatttagaacatcattatgatctctaactatggggttaggaagttctttaccctttaaattgtaatttaattttaartaaatgttcacggaattatgtttttttcctggaaggaaatgtggttgtctttgggaaaatggatgttagaagagttgagaaactcttatttttcttttgtacctttctgtagagttttaattatacatatcctggagttatctgggtagtaagataatgttccattttttctttataatataaactttttaaagtgagggaactgggaataaagatttttaaaaagtcaaaaaataagatgaaagtgtagtaaatttgaaatacaaaaggaatgtctgaaagtctatgaaactgctgaagatgggccacaaatttggctctgatttctctagcagccaataacataaggaaacaccatcacatatgtaattcattatatctgtaagat

SEQ ID NO: 3222 - DNA, 1176 bp, Homo sapiens
tgctacaaatagtacatttaagaggtataaggtgctccagtgctggatggtaccagctgaatgtataaaagcacattttccaagctgcttttttctccaaacaagagtctgacatattcatgatggtgaaatggcagccctgtttctcagccaccatcttctttctcctctgctctgctgtgtcccgatctgtgtagccaacatttcagtaagaaatgagaaactcacactttacaaattaataacttatatgcccaaaccaaagaaagtcactagcagaatggtgattaatctctttattatcaaaggtataagagcctcttcctgttgagcttatgactgttggctcatcctccagtggcaaaaaggaaaatatcataaagaaggaaagccactgccaccctctatggaggaggctctttaaggtttgcctgtcattcttcagtttctctggttcctgtgacaagtgtgtcgcaagttgtcatttcatttgctggagctaaaccatgatggatttttatgctgactcagcaaaatctaataggcaaaaagctagctggggaaatgatctagtttattgattcaatttgaattttctatgatatcaggaaaagatcagataatcacaataactttctggttcatggtttctgactgtatttgcattttaaaacacgaaatcaggtaatgtgaatctgaaaataattttttaatttttataattcaattgcttttgatttccaggttcatactaatctctattttctcccattctctaatgaagttgattacattttcatgcaaaagttgttaataggcaataattagaacatagaaaccttttaagaatacattgaaggactaaaaactataatgttaccattaattaataagtaaactataacaatataatttttgaaagagaatttttggaattttagtttctctcattaattgaatttattgtggtatgatttatgtacagtaagctgcacagatttaagatgtacaatttagtgagctttcttcagctgtgtacacttttraagccaccacaattaagataaataaatttttgtcactcctaaaagtttcctctctcccctgtgcagtccctccttctatccttggcatccaggcagcttctgatctgctttctgtctctatggattagta

SEQ ID NO: 3223 - DNA, 1200 bp, Homo sapiens
atcagtgtccatttctaaatttaaatttaactttaataaaattaaataaaatttaaaataaaatttggtttcttattcacattagccacgttttaagcactcagtaaccccctgtggagtggctgccatgttggacagcacagaaaggactgctttctctagccttttccttcacttccacatgtctcagattggaagacctgtgtgagaactcggatgggaagagaatctcatttcgtaagtgtggaaccacagacaaagagttgatgttcttaaaaggaagtttccattcaggctatattagaacctgcctggcaaggagttatctgtctggtaaaccacactatctccacccttgttcctagatacacccctcattgtctccccaatagataaaatcatgccaaccttgacagtctgcctccctcaggctcctcttgtcttccactccaggctggctcatttccattatgtcagtgtatttcctggttataggccccctttatctttctcattgtttcaatttccacatttggccttaatttctatgataccttagtgtagcattcaaatgtttaaattccagtttagttcttaattaagatcatgtatatcaaggtcaatgttgttgatttatgttaatttgaataagaaacatttcctttgccccttgctccagatttctagagtggctgggccgagaaactttacttcctgttcacctaggtaggtatcttgctttgggcaaatcaggattcttgaatataatcactctgtggtgaatcagacctgtgaaacttaaagaacttatctgttccctaragaggaagaattaagaaatatcaggtggatggataaagacttagccttgccagaagttttgccccacaccttgcttgggtctgaaacttggttggtacatagtataacagtaactctatcactcataggttaaagagcacagaagtctgtcattttctcttgggtacctggcacttgcaagggacatcactgataaaattcatccactctgttttgaatatatcaagtgaaaagcacttacattgctttttcaggtctggagaatgatgaccttagaatgggcccttgttcaagacaattccaagtcctcccttagcaagaaagttagcttggaaattaggaaataaatatttgacctgtcgaatcattttaaattaa

SEQ ID NO: 3224 - DNA, 1080 bp, Homo sapiens
tgcatcacctcatatacttacaatttgttgttctgagtaaacacaaaatctactcccttagcaattttcaagaatactatagattgtttttaactatagtcacgtcgttgtacaatagacctcttaaacttaattctcttgtctaactgaaattttgtgccttttcaccatctccccaactactccgttgatccactctgctgccacagtcctaggtaatcaccattctattctctgcttctatgagtttaccttttaaagatttcccataaaagtgagatcattcaatatttatctttctgtgcctaccttatttcacttaacataatatcctccaggtctgtccatgttgttgcaagtggaagaattttctccttttttaaaggcaggatagtattctgctatgtatatataccacaatttctttatccattcatccattgatggacacttaggttgattgtatatcttggcctttataaataatgctgcaatgaacataggagtacagcagtctcttcagcatgttgatttcatttactttgggtatatacccagtagtgggattgctgaatcatatggcccactgagcataatgacagaataataataggagtgacttcttgaaagattaacacatcacaattaatatcagagggcagacaggcaagggggactattctggcytcattgagagaattagttaaggacttctgttgccacattcacttgagcagatggtgcattgtgatgtaagttacatccagtaaggctgtgcaggtacaacatgaaagttgttttgcttgtggacagagacaattgggtgaataaagaatcatcttatctgccatggaaatcatagcttgatttttataaaataccccccaaaatcaataaaactatatatgtacattagtatttaaactatatatccactaacatgaacatcttaaaagtatgttgttgtattatgtccacacaaacacttgtacaagaatgcctatagtagcattattcacaatagctcaagactagaaaatacccaaaagtcatcatgaggtggatggacaacaagctgga

SEQ ID NO: 3225 - DNA, 698 bp, Homo sapiens
atttaaggaacaaaaagtccaaactacttagagtatgatgtgttttatttaaaaattatacataagaaaatcagtaaaaataatctctaagtttccaagaaaatacttaggtatgtgagccgctagttttttatgacttgttttggactgagagaaaccttttatcataagaacttgcttaaatgtgaataagaattgtcayacatgaggggcattacgatgagctctaagtcagagtcatgtcaggaaccatgatggcaaggaggttctccctgggtgcccattctgattggttgaagagggatgccaataacaatgtgttgatgagtatgaagctacattcaggtttaggagaataatattaataatacctatcatttatttagcattgcctacatgcaaatacttctttagcactttgtattatttaattagctcattaacaactataagacagtgtagtggctcatgcctataatcccaacacttcgggaggccaaagtgggtggactgtttgaggccaggagttcaagaccagcctggccaacatggcaaaaccccatctctactaaaaaattataaaaattagctgcgcatggtggcgcgcacatgtaatacaagctactcgggaggctgaggcaggagaatctcctgaacccagagaaggaggttgcaatgagccgagatagcaccactgt

SEQ ID NO: 3226 - DNA, 1295 bp, Homo sapiens
catgtaaattataccggaagaaaaaactccaaactgctaaccaatgagtttctgtggatgctgactgcatgggagattgccccactcttaaaaatgcgcctttgaaatttcttacgataattcttaagagaatggtagtgcattgacttctcaagctttacttggcaatatatgaatatattatttctttatagtaatgcgaaatgacttactgatgcttactgatggctttgtcccaaaagtgtctgcctacagctgagatgggaaagaatcctaaagatacaagggcctcacgcccctattacttaatcccaacaatacagcagctatgtaatagttcccttttaaattaaatgggaggaaaaagactcctgaagaattgttatgtttatcaagcaataagaatgacatcactgccttgaaatgccagagagttcaagaaatgctccctgatgaccttttgcttggttccaggtgttttgtatgaaagatttcagggaagttttttgtttcgttttaatgggaaagactacagatcctacagtgacaatctacatgtttttaaaacaatgatctctctctcaggtaatgattcattttgtacttaggcactggccacaaagtttccagggtttcagtaacatgcctctaaaacccactggccaccaccttccattgttaaggtgttcttcatgcttgctggtctcattttaatctacaacctatgttcaacccacagggctgacagagtaagaacttgcctttaaattccagtagctgagcccttcatttttgcatagtttgattcaggaataaattctacatattaaacacatgctaaattgacatttaattgaacttgaaactcttacaaatgctgatatacagccagcaaacaaatctatttgctgtctattcaagatagtcagacctgccttcagcaggtcagtttatgaatgaactaggttttcaaccagaccattagcattttttcctaagaatcagaaaacaagagatagcttgcacctctgaaccatgcagcctggtattaatctgggattatagaaggtagacaatcattaagccaacctttttcctgctcccaaacatcttttctcctctctgtccttgtcaagttcactgtttcttcagttactatttatatgaagtgacaacctataattggygtcactagactcacctgcccatagagcaccacatgagtccatgaggcacattcagagtaaagtggaccaaaaaacaactatcaaaaatgaattaactacagccaaaaa

SEQ ID NO: 3227 - DNA, 1053 bp, Homo sapiens
caggttcgacaggtataaatattgaaggaaaaaaactagaaaacagaaatagtgtctcaatgcaatactctcaacttttattatgtttaatatgcttgktcttgaaatcaatataataaagatggagaaaatttgtccttcatattctgcttctcagaatctttgtgaaatggagtgagattccttaaaataagaaatgttagcattgaggcttctacaacaaaagttgcataaaggaaccaaataatgaggtagttaaatgcaaggcacctttcccttcctcttttctcaagccaccctccatcccagagagtcgtggtctcacagacatagcgttggaggcctatgggtccctctgctagaaactgggacaggcacgtctcctaaatcattcctaggcagtaggctctcccaagcccttgtcctgacaagtctgcgtaagacctttaaaagcaagctctgattgcagagtgtgtcaaaaataaccccatttcaaagactggatgccttacttatcactagggtgggtgtcatgctgtggatgctttctacctcatgaaaaaatacattaattatctggcttttagaatgttcttacttggataagaaatctccatattacacatttaccatcattgtctagtgagcacaaaatttctagacacatttccttggtccccagacattctggcttatgcaatatgaatcaacggtcggctggtgtcccactacaactgtcccaggttattctcacatctaagtggaaaaaaattaattattccaatcagtaaaagactcaaacaagacaaaatgagtatcagacatgaagaatacttagtagtctgagcatttttatatgaaatatataaatgatatgaaatataatagagcaaatgctcatgcacctaccacggacttaaataaagcatctaagtacctaccacaaactttaataaagcataaagcattccaggggaagttccttggtaccactcccagcagcatcccttcccctccttcctgagttatctccttctctctgagtttggtggt

SEQ ID NO: 3228 - DNA, 596 bp, Homo sapiens
gcatcaccatgcccagctaatttttgtatttttagtagagacggggtttcaccatgttggtcaggctggtctcgaactcccgaccttasgtgatccgcctccctcggcctcccaaaatgctgggattacaggtgtgagccaccacgcccggccagaacagaggattcttgaccctcagtgcaatgctttctcctccatgacacaaaaatattatctatttggtattatactgtaaagccacatcaacatgctgtagctagccagcattactttttaatttataaagtaaatttttataacaatattgaaaacaaatgttcatgagtcttagatgttcatactggtgatgcaggatttttttgctccttagctcagctaatctgggttcttttctcatgaccaggaagaattaggcatgcagccacattgaaggatgaggagagtggaatttattaagtgaaaagaaagctctcagcaaagagaggggtcctgagagcaggttgtcacctcccaaattgaataccagggccaccacacatgagttgaagaggccaggctcctcccctgcataaggcgcaaattcctggtggctccac

SEQ ID NO: 3229 - DNA, 596 bp, Homo sapiens
gcatcaccatgcccagctaatttttgtatttttagtagagacggggtttcaccatgttggtcaggctggtctcgaactcccgaccttaggtgatccgcctccctcggcctcccaaaatgctgggattacaggtgtgagccaccacgcccggccagaacagaggattcttgaccctcagtgcaatgctttctcctccatgacacaaaaatattatctatytggtattatactgtaaagccacatcaacatgctgtagctagccagcattactttttaatttataaagtaaatttttataacaatattgaaaacaaatgttcatgagtcttagatgttcatactggtgatgcaggatttttttgctccttagctcagctaatctgggttcttttctcatgaccaggaagaattaggcatgcagccacattgaaggatgaggagagtggaatttattaagtgaaaagaaagctctcagcaaagagaggggtcctgagagcaggttgtcacctcccaaattgaataccagggccaccacacatgagttgaagaggccaggctcctcccctgcataaggcgcaaattcctggtggctccac

SEQ ID NO: 3230 - DNA, 542 bp, Homo sapiens
ggtccctaggcaagagttcaagaatctgggttttgcctgagaaaagcttacttttgagaagcagaaaagaaatagagatttcaattcattcagaaggctaaagagacttgagaaacaacaacaaaaagcaataaaaagagaaccctccagtgaatgtcccactttcaggaaaatcaaattgaacaactatccacacaagaaaataccttcattaagaactaaaaattaggtaagcaatcacagtacttggttttaatatcatatcaagaaaagaggcactgaagatggtaggaaagacartcttggattgcagaaactaccccttccccattcccccagaagcaactttgtggtgcaaaaagggttccagtaagctccaccaccatagcataaagcactctggggtcgtacacttgaaggcagtttaggccacaggatagcaattcctgggcaaatcctggtgctgtgctggtcttagagccagtggacttgcagtgcacaagacctagtgagacaccagctagaacagtcatgggaatgct

SEQ ID NO: 3231 - DNA, 568 bp, Homo sapiens
aaaatacccactagattgcagttaaaagtgaaattcttctttgatttttctcataagttgaaattttaaaatattgggaatagttaaaagttatcctttttgatttaaatacaagagaagttttataggaaataatatgtgcaatctaatttggctaaggatagagcttggcagtagtactgtcaaccttattattaacagctacagaaatatttatggtggccattgttttcatagactatagaggtataaagattaccaaggtgaaagaagacatttaacaactgcatgcttcttgacaggactctaaatgttaacacactgagtctgtctaacttgacaggaaacacacacacacacacacacacagaagaaattattttytgtgagcctgttagctcaaagagtatcttcttacacaggctgacggtaattgaaattagcgtgaccagttatatttttattccaaagacattttctttgtaggcagaagtaaaaagagcccaaagcaaggactcttagcattttttccattcagagatttctttgaaaaatctgatgaaagcta

SEQ ID NO: 3232 - DNA, 915 bp, Homo sapiens
tttttacattggcacattgtgtgatgctgaggcttggagtatggatgatcttgtaacccagatagaaaacataatacccaatagacagtttttaaggcctttgtccccaccttcccttccccctctagtagtccccagtayctgttgttccgatctttacatccgtgtgtaaccaacgctttgttctcacttataactaagaacatatggtatttggttttctcttcctgcattatgttagaataatggcctccagctgcatccatgttggtgcaaaggacataatttttttatggttgtgtagtattccatggtgtacatatactgtattttctctatccactgtaacattgatgggcatctaggttgattccatgtctttgctatacgaccttggggaaagagagtcttgctgcttgcttgtgggacttgccttggaaggtagataagttcactgcatcctccaactttttatttctggtgagttctccaagcactgagatgtgaactggcctcattcccttacaatggtactgttaccagtagaagagattccagtttctggcagcgtatctgcatgggtccataagcaacttcagtccttgcctcctcagaagaaataatttgactgaagggcatacagcagaaaaagagactgagcggtaagtttcagagcaggagtggaagtttatttaaaaaggctttagaacaggaaggagaggaaaattctcttggaagagacccgaacagatgcctgaatgtccaagaaagaaaagagaagagcctttaaccttgatcctgccatgggttttcctctttcccatgattctaactttagggagcgtttccggcttgcacagtgctttccttaccctttgaaattgagcatgcacggtgtgtttagggagttatatg

SEQ ID NO: 3233 - DNA, 915 bp, Homo sapiens
tttttacattggcacattgtgtgatgctgaggcttggagtatggatgatcttgtaacccagatagaaaacataatacccaatagacagtttttaaggcctttgtccccaccttcccttccccctctagtagtccccagtatctgttgttccgatctttacatccgtgtgtaaccaacgctttgttctcacttataactaagaacatatggtatttggttttctcttcctgcattatgttagaataatggcctccagctgcatccatgttggtgcaaaggacataatttttttatggttgtgtagtattccatggtgtacatatactgtattttctctatccactstaacattgatgggcatctaggttgattccatgtctttgctatacgaccttggggaaagagagtcttgctgcttgcttgtgggacttgccttggaaggtagataagttcactgcatcctccaactttttatttctggtgagttctccaagcactgagatgtgaactggcctcattcccttacaatggtactgttaccagtagaagagattccagtttctggcagcgtatctgcatgggtccataagcaacttcagtccttgcctcctcagaagaaataatttgactgaagggcatacagcagaaaaagagactgagcggtaagtttcagagcaggagtggaagtttatttaaaaaggctttagaacaggaaggagaggaaaattctcttggaagagacccgaacagatgcctgaatgtccaagaaagaaaagagaagagcctttaaccttgatcctgccatgggttttcctctttcccatgattctaactttagggagcgtttccggcttgcacagtgctttccttaccctttgaaattgagcatgcacggtgtgtttagggagttatatg

SEQ ID NO: 3234 - DNA, 915 bp, Homo sapiens
tttttacattggcacattgtgtgatgctgaggcttggagtatggatgatcttgtaacccagatagaaaacataatacccaatagacagtttttaaggcctttgtccccaccttcccttccccctctagtagtccccagtatctgttgttccgatctttacatccgtgtgtaaccaacgctttgttctcacttataactaagaacatatggtatttggttttctcttcctgcattatgttagaataatggcctccagctgcatccatgttggtgcaaaggacataatttttttatggttgtgtagtattccatggtgtacatatactgtattttctctatccactgtaacattgatgggcatctaggttgattccatgtctttgctatacgaccttggggaaagagagtcttgctgcttgcttgtgggacttgccttggaaggtagataagttcactgcatcctccaactttttatttctggtgagttctccaagcactgagatgtgaactgrcctcattcccttacaatggtactgttaccagtagaagagattccagtttctggcagcgtatctgcatgggtccataagcaacttcagtccttgcctcctcagaagaaataatttgactgaagggcatacagcagaaaaagagactgagcggtaagtttcagagcaggagtggaagtttatttaaaaaggctttagaacaggaaggagaggaaaattctcttggaagagacccgaacagatgcctgaatgtccaagaaagaaaagagaagagcctttaaccttgatcctgccatgggttttcctctttcccatgattctaactttagggagcgtttccggcttgcacagtgctttccttaccctttgaaattgagcatgcacggtgtgtttagggagttatatg

SEQ ID NO: 3235 - DNA, 915 bp, Homo sapiens
tttttacattggcacattgtgtgatgctgaggcttggagtatggatgatcttgtaacccagatagaaaacataatacccaatagacagtttttaaggcctttgtccccaccttcccttccccctctagtagtccccagtatctgttgttccgatctttacatccgtgtgtaaccaacgctttgttctcacttataactaagaacatatggtatttggttttctcttcctgcattatgttagaataatggcctccagctgcatccatgttggtgcaaaggacataatttttttatggttgtgtagtattccatggtgtacatatactgtattttctctatccactgtaacattgatgggcatctaggttgattccatgtctttgctatacgaccttggggaaagagagtcttgctgcttgcttgtgggacttgccttggaaggtagataagttcactgcatcctccaactttttatttctggtgagttctccaagcactgagatgtgaactggcctcattcccttacaatggtactgttaccagtagaagagattccagtttctggcagcgtatctgcatgggtccataagcaacttcagtccttgcctcctcagaagaaataatttgactgaagggcatacagcagaaaaagagactgagcggtaagtttcagagcaggagtggaagtttatttaaaaaggctttagaacaggaaggagaggaaaattctcttggaagagacccgaacagatgcctgaatgtccaagaaagaaaagagaagagcctttaaccttgatcctgccatgggttttcctctttcccatgattctaactttagggagcgtttccggcttgcacagtgytttccttaccctttgaaattgagcatgcacggtgtgtttagggagttatatg

SEQ ID NO: 3236 - DNA, 1090 bp, Homo sapiens
tgtacatacttttgaaaaaagtctgtacagttcggatcttcattcctggtaagccaaggaacctggacaaacaccagaattctgtccctctgagaatgccggacaggtttaccttcatcascataaaattttggaacaaatgtggtaactgcaggttctctccacaatgagtaactgaaaattgaggcagtatttcagatcctaaaaaactgatgaagtaattcaccacacatttgggttgtttttgacttttcctactatgaagagtgctagtaggaagaatggtgtacaagtatctgtttgattccctgcttttagaatcctttgcttgtttgtgggtttgtctgttctttcttgagacaggatgtcactccagtcagccaggcttttccagtgtgtaatttttgttgtttccttttgtcaagttttagaagttgttattttatttctattgaattttaaggcatttttagatatgtattaaaacattatcacacaggccgtgtgttacattgcaattatttttatcgttcttttaagaaacaaaaggttttagcttagatatcttccaatttgtgaagcttttctgattttgactttttaaaaaatgctgtcatatacaagaaacccttggattaaaaatgccatgaatatttctcttttcttgcagtcataacttcggtggatgtcatcaattagtctccgggttatagcatgttttcttgaaagtgtttcgcaatctattttgggcattgagaatttcatcaaacttaagtgaatgtttctacattcactattgaggggaatagtcccatctgatgctttattatttgcatatcttgcttccacaagaccatttcatgcaaagacttgtcttctccccaatgccagatcattacaacatgatatggaatcaactggccaaaaatgggaaggttatctctggaatgtctatttgactccattgatctctccatcttaattaagacaaagtatatgctgtattaatgacataccattgctgcaaattctcaagtcagaaagtgtagttataacttcttgtcatttagtcgctgaatcttatgtcaca

SEQ ID NO: 3237 - DNA, 1090 bp, Homo sapiens
tgtacatacttttgaaaaaagtctgtacagttcggatcttcattcctggtaagccaaggaacctggacaaacaccagaattctgtccctctgagaatgccggacaggtttaccttcatcaccataaaattttggaacaaatgtggtaactgcaggttctctccacaatgrgtaactgaaaattgaggcagtatttcagatcctaaaaaactgatgaagtaattcaccacacatttgggttgtttttgacttttcctactatgaagagtgctagtaggaagaatggtgtacaagtatctgtttgattccctgcttttagaatcctttgcttgtttgtgggtttgtctgttctttcttgagacaggatgtcactccagtcagccaggcttttccagtgtgtaatttttgttgtttccttttgtcaagttttagaagttgttattttatttctattgaattttaaggcatttttagatatgtattaaaacattatcacacaggccgtgtgttacattgcaattatttttatcgttcttttaagaaacaaaaggttttagcttagatatcttccaatttgtgaagcttttctgattttgactttttaaaaaatgctgtcatatacaagaaacccttggattaaaaatgccatgaatatttctcttttcttgcagtcataacttcggtggatgtcatcaattagtctccgggttatagcatgttttcttgaaagtgtttcgcaatctattttgggcattgagaatttcatcaaacttaagtgaatgtttctacattcactattgaggggaatagtcccatctgatgctttattatttgcatatcttgcttccacaagaccatttcatgcaaagacttgtcttctccccaatgccagatcattacaacatgatatggaatcaactggccaaaaatgggaaggttatctctggaatgtctatttgactccattgatctctccatcttaattaagacaaagtatatgctgtattaatgacataccattgctgcaaattctcaagtcagaaagtgtagttataacttcttgtcatttagtcgctgaatcttatgtcaca

SEQ ID NO: 3238 - DNA, 1090 bp, Homo sapiens
tgtacatacttttgaaaaaagtctgtacagttcggatcttcattcctggtaagccaaggaacctggacaaacaccagaattctgtccctctgagaatgccggacaggtttaccttcatcaccataaaattttggaacaaatgtggtaactgcaggttctctccacaatgagtaactgaaaattgaggcagtatttcagatcctaaaaaactgatgaagtaattcaccacacatttgggttgtttttgacttttcctactatgaagagtgctagtaggaagaatggtgtacaagtatctgtttgattccctgcttttagaatcctttgcttgtttgtgggtttgtctgttctttcttgagacaggatgtcactccagtcagccaggcttttccagtgtgtaatttttgttgtttccttttgtcaagttttagaagttgttattttatttctattgaattttaaggcatttttagatatgtattaaaacattatcacacaggccgtgtgttacattgcaattatttttatcgttcttttaagaaacaaaaggttttagcttagatatcttccaatttgtgaagcttttctgattttgactttttaaaaaatgctgtcatatacaagaaacccttggattaaaaatgccatgaatatttctcttttcttgcagtcataacttcggtggatgtcatcaattagtctccgggttatagcatgttttcttgaaagtgtttcgcaatctattttgggcattgagaatttcatcaaacttaagtgaatgtttctacattcactattgaggggaatagtcccatctgatgctttattatttgcatatcttgcttccacaagaccatttcatgcaaagacttgtcttctccccaatgccagatcattacaacatgatatggaatcaactggccaaaaatgggaaggttatctctggaatgtctatttgactccattgatctctccatcttaattaagacaaagtatatgctgtattaatgacataccattgctgcarattctcaagtcagaaagtgtagttataacttcttgtcatttagtcgctgaatcttatgtcaca

SEQ ID NO: 3239 - DNA, 1090 bp, Homo sapiens
tgtacatacttttgaaaaaagtctgtacagttcggatcttcattcctggtaagccaaggaacctggacaaacaccagaattctgtccctctgagaatgccggacaggtttaccttcatcaccataaaattttggaacaaatgtggtaactgcaggttctctccacaatgagtaactgaaaattgaggcagtatttcagatcctaaaaaactgatgaagtaattcaccacacatttgggttgtttttgacttttcctactatgaagagtgctagtaggaagaatggtgtacaagtatctgtttgattccctgcttttagaatcctttgcttgtttgtgggtttgtctgttctttcttgagacaggatgtcactccagtcagccaggcttttccagtgtgtaatttttgttgtttccttttgtcaagttttagaagttgttattttatttctattgaattttaaggcatttttagatatgtattaaaacattatcacacaggccgtgtgttacattgcaattatttttatcgttcttttaagaaacaaaaggttttagcttagatatcttccaatttgtgaagcttttctgattttgactttttaaaaaatgctgtcatatacaagaaacccttggattaaaaatgccatgaatatttctcttttcttgcagtcataacttcggtggatgtcatcaattagtctccgggttatagcatgttttcttgaaagtgtttcgcaatctattttgggcattgagaatttcatcaaacttaagtgaatgtttctacattcactattgaggggaatagtcccatctgatgctttattatttgcatatcttgcttccacaagaccatttcatgcaaagacttgtcttctccccaatgccagatcattacaacatgatatggaatcaactggccaaaaatgggaaggttatctctggaatgtctatttgactccattgatctctccatcttaattaagacaaagtatatgctgtattaatgacataccattgctgcaaattctcaagtcagaaagtgtagttataayttcttgtcatttagtcgctgaatcttatgtcaca

SEQ ID NO: 3240 - DNA, 941 bp, Homo sapiens
gcattgtgtcttggaacttaggcatggactcagcattcataggtcctgactgttttgaatttccttttcctgatggccctttggtttggatttattttctagtctcaagttgggtcagaaaaatcctggggagttttctgtgttctaggtcttgtggcctgagctgaccttcactgtttttattcttccttgatagcctgccttacacttggtgataatgcacatttattgacagtgaactcaaaacacatgtattctttccactaacagggtaccagataagcaaatcctatataattttgcagctggagcaaggaaaagagctgtggygggaaggaagagtatttcttcaagaccagaatccaggtaagcaacagggtcctgtgtcctaataggaggaggtgctttctcaatgaataatatcagttgaatattaattagtggttttattaaatgagtgataatttctaaaatgtaggttaggctactggagcagaattccttagatgttattatcattttgttcatgtgtcagatgttactcttgtgtcctcttttttttcttttcttttacttttgggaaaaagacaattcatgtacttggctggggttaaactttcatatgctgaccctttccctgatacccctgtgaagactatccctctatttacttgcctgatatctcatctccattttaactcttttcacattttaattttaaaaatcttttctaattgctgacactgtacaatctatttcttctattcaagtagtttcttcatttgacacacttgccacatctaagtgtcaatttttgaaaaaaagtaaatgggccttggggcttttcaaacaattttattaccataataccaatgtaacaatttatttttcaattatttcagacagggaaagtgcccttaagaaaaaacacatgatatcca

SEQ ID NO: 3241 - DNA, 941 bp, Homo sapiens
gcattgtgtcttggaacttaggcatggactcagcattcataggtcctgactgttttgaatttccttttcctgatggccctttggtttggatttattttctagtctcaagttgggtcagaaaaatcctggggagttttctgtgttctaggtcttgtggcctgagctgaccttcactgtttttattcttccttgatagcctgccttacacttggtgataatgcacatttattgacagtgaactcaaaacacatgtattctttccactaacagggtaccagataagcaaatcctatataattttgcagctggagcaaggaaaagagctgtggcgggaaggaagagtatttcttcaagaccagaatccaggtaagcaacagggtcctgtgtcctaataggaggaggtgctttctcaatgaataatatcagttgaatattaattagtggttttattaaatgagtgataatttctaaaatgtaggttaggctactggagcagaattccttagatgttattatcattttgttcatgtgtcagatgttactcttgtgtcctcttttttttcttttcttttacttttgggaaaaagacaattcatgtacttggctggggttaaactttcatatgctgaccctttccctgatacccctgtgaagactatccctctatttacttgcctgatatctcatctccattttaactcttttcacattttaattttaaaaatcttttctaattgctgacmctgtacaatctatttcttctattcaagtagtttcttcatttgacacacttgccacatctaagtgtcaatttttgaaaaaaagtaaatgggccttggggcttttcaaacaattttattaccataataccaatgtaacaatttatttttcaattatttcagacagggaaagtgcccttaagaaaaaacacatgatatcca

SEQ ID NO: 3242 - DNA, 1780 bp, Homo sapiens
catctatgtggaaaagccttcactcagtgttctcaccttagaagacatgagaaaactcacacgggagagagaccatataagtgtcatcagtgtgggaaagcctttattcaatcctttaaccttcgaagacatgagagaactcaccttggacaaaagtgttatgaatgtgataaaagtgggaaagcctttagtcaaagctctggctttagaggaaacaaaataattcacattggagagaaacctcatgcttgtcttctatgtgggaaggccttcagtctgtcttccgaccttagatgacatgagagaacacgcactggagaaaagccatatgaatgccatttatgtgggaaagccttcagtcaatgtactaatattaaaaagcatcagaaaattcaccctggagagaaaattataaacttcttcagaacatattcggactttagatgacacagtgttaggaatgacgaaggtaaggaatgtggaagagacttcagctgtagttgtagcatctaaacatgccaaaggactcacattttgaagaaatactgtaatcaacatggaagatacttcagttgcctttattcttcagcccacatcaataaattcatatggaagagaaattgtatgacatgtatgtaccaaagacttgttagtgatctgagcataaatgacatgagagagctgaaactgtcagcataatcaactaaaagtcttcagcaacagctttaacttaaaacatgtgggactttcaggtagagaatctctaactctgcattcagtgtgaaaatgtttttatttgcaatttattgtcaaataacatgagaaaactttacttggatgaaccctttatttgtatttttctgtgaatgaacattcagccaagcaccaggcttgatrttcacaagagaagagtgacaaaatgctgctaaaatggaaaataagagaggaaagccttcataagctaaataacaagggaaagtctttccaagggcaatgaattctcttggaataccaaatacttcttactggagaagttatgcaatgaaaaatcatgagaaatcctttcttcatagagcaacacatgtggcacatgtgagatttcacactggacaaaacagggttagcatcttgaaagaagaaaattctttagtggtaattcatttcttagttgacattaagtttctcacgttgaggagctatcaaacttgaaaatcactgtggagaaacctgatagatttctcatcagaaaagtgagtcaagaaggtggacctctagaaaaaactcttaacacatactttagcaaaataattcagaaatttgagaaaatatctattcataaaaatgtggcatgtaaatgcataatagcaaagtgaccaaggaataaattgaatgcagaattatataagaaatctcattaaacttttccaaaagagcaatacttacaaatattgaaagaatacaatctgttgttgaaaaaacttagtatgttggtgaagcccttgtttcatttatgcagccctaacaaactgatttgcatctgaactccttgggtgagattcttggtggagattctaccccaacttctgagtctccccagtcttcaacagctctttcctcacagctcacctccctttacttcaacgtccaccaaaaccacttgtttccatccaaccctcgagttgacacaccagggatcttcagccccacttgctagatttctcagtttgtcattgcatagatttagcagggaaatggaggctgtatcaaagacccctagtat

SEQ ID NO: 3243 - DNA, 828 bp, Homo sapiens
gtttgataaattctctacaatgatcaagtattgcttttataattagaaattatgtacaaaagtgtaaaaagcctctacaagttaaagaaagagtgaattagtaataaaaatactaaccaacatacatgtatttggccattcttgcattgctattaaaaaatgcctgagactggataatttctaaagaaaataaatttaattggttcactgttctacaggctgtacaggaagcataccagcatcttctcagcttctggggaggcctcatgaaacttccaatcgtggcagaaggcaaagtgggagcaggtgtctcacatggaagagcaggagcaagagagagagtgatgggggaggtgccacacacacttttaaatgacccagtctcacaagaacttactctcacaaagacaggaccaagtcattgaaggatccgcccccatgacccaaacacctcccacgaggccccacctccagcaccagggattacaattcaacatgagttttgtgtgggatcaaatatccaaactatatcaatatataraagagaaataccaatggctaataagcatatgaaaaaaatctaacctcactggtagttaaataaatgtaaattaaaaccattacaaattattaaagcgagagaaataaaatgctcattgccagcagggtatcctcatctcctgctccagtgggaattaattgttacaggcttctggacaattgttcctgtgactccaattcaagctactttaacaagaagaaggatttgggggagtctacttcaatccaagggaaagttaaagaatctggccacaaagaacaaggata

SEQ ID NO: 3244 - DNA, 1030 bp, Homo sapiens
tttattctgcatgcacaacacagcagttaagggtgttttcaaagtttttaccttcaaactaagtaaaaatcatcccagatttcctacaaaaagacttccagatgaaatgtaaatacagaataaaataaatattaaaggccaatagcaacattaatggcaggtttaattcattttagcttagaaatgggattcttttcttgggctcatataatatccacataattctaggattaatcttgggtccagaatcacaaggaataatattttgcttaaatataatattccacataggaaactgagtcaatattttacattttccctaggctccagcttctgattttattgtgctatagyattgcaatcaccttttattttagttgttaaatggaatatcactttggaatgaaaatacctgagagatagaatgatatagtatataggacaagtcccataatataattaaatatggcactgatgtttactgcattctatttgcttgtgttagctaaaatttaaatagccagtgtggaaaaaggaaataatttattcaaatgagttttcaaaacgttgaaataattcccttttatgcctagattaccagctctcttaaatcttcatagttctgtgattctccaacaaattttcctttctctgcttctgtttaaatcagatctccccaagagagttgtctaaactcaatgtcttcaatttctttcttttcttttgttaactaagtgaatgctaattaggcttcatctcagtcattattcctaactgtatcatgccaattgcccaggataaagaaattgggagtcattctagaccctcttgtgtcttgcataccccacatccaatccatcaacaaatcacatcagttcttcctgtaaatgttatccaggatacaacagactgactcaccacttctacagctaccatcttggtctaacttgtggcactaatgttgccagactcataggacccaaaataaaatgaatgcaaatataatgtttattgctggtaaagcacagga

SEQ ID NO: 3245 - DNA, 1030 bp, Homo sapiens
tttattctgcatgcacaacacagcagttaagggtgttttcaaagtttttaccttcaaactaagtaaaaatcatcccagatttcctacaaaaagacttccagatgaaatgtaaatacagaataaaataaatattaaaggccaatagcaacattaatggcaggtttaattcattttagcttagaaatgggattcttttcttgggctcatataatatccacataattctaggattaatcttgggtccagaatcacaaggaataatattttgcttaaatataatattccacataggaaactgagtcaatattttacattttccctaggctccagcttctgattttattgtgctatagtattgcaatcaccttttattttagttgttaaatggaatatcactttggaatgaaaatacctgagagatagaatgatatagtatataggacaagtcccataatataattaaatatggcactgatgtttactgcattctatttgcttgtgttagctaaaatttaaatagccagtgtggaaaaaggaaataatttattcaaatgagttttcaaaacrttgaaataattcccttttatgcctagattaccagctctcttaaatcttcatagttctgtgattctccaacaaattttcctttctctgcttctgtttaaatcagatctccccaagagagttgtctaaactcaatgtcttcaatttctttcttttcttttgttaactaagtgaatgctaattaggcttcatctcagtcattattcctaactgtatcatgccaattgcccaggataaagaaattgggagtcattctagaccctcttgtgtcttgcataccccacatccaatccatcaacaaatcacatcagttcttcctgtaaatgttatccaggatacaacagactgactcaccacttctacagctaccatcttggtctaacttgtggcactaatgttgccagactcataggacccaaaataaaatgaatgcaaatataatgtttattgctggtaaagcacagga

SEQ ID NO: 3246 - DNA, 1210 bp, Homo sapiens
ttcttcttatttatttatttatttatttgagatggagtttcacccttgttgcccgggctggagtgcaatggtgtgatmtcagctcaccgcaacctctgcggttcaagcaattctcccaggttcaagcaattctcctgtctcagcctgcagagtagctgggattacaggcatgtgcccccaggcctggctaattttttttgtattttactagagaggggatttctctgtgttggtcaggctggtctggaactcccgacctcaggtgatctgcccacctcggcatcccaaaatgccgggattacaggcgtgagccaccatgcccggcctgaagtgattatttttaaggaaggtgataggatagttaaaaaccacacaactttttcatattctccacccaccagccactctgcaattatcagtaggtagcaaagccctgaacttggtcttatatcttattttaggtacagcaacagactaaattgtaatcataatatctgcctcaggaatctgctccaattttgatacaattgtatattttgtagtatggagtaactatcggctgagctttgattctgtgatctggctccctttcaacttgtgatctttggaggtggaatagattatatattttccaattgcaagaggattaatgagatcttcttttaaatcattaatgtaaggaaatcttggaaaataatgtgagccaaaatttggattattgtaagaatctatactctcttctttgttttagttgcatcttccacagctcctctaagcaaaagcaccacattgcatattatttcctgttgagcaggaaagaaatatagcatatggtcatgttaatgggaattgggagtaaaagttttgtccaggtttggaccagagcttataacagcaacaacaaaaataagaataacaagtatcaggttgaattatgagttctctaatggggatatatatatatggttttgatttgttcatttctttaagcaaagataagcagtattgtaagaaatacaatcaagaaacccagccatgaatatggacttaagtgttttccctttactgtcatccaacaattcaatgaggctttgaaatttaaaaccacacttattttaatagccatttgtatatatttccatttataatccaatcatattttaagtaaatcaacttgctttatatttcttacttcttgttcccaaatgca

SEQ ID NO: 3247 - DNA, 1263 bp, Homo sapiens
ctttcctatttgttggaggagaaaatgtttgaagagtcacttatgcagtgtttggctcattgtgtgcacagctcaataaatagtatgttattgcagtggcatatatttctaagaattaatctatgccgcctacttgcagccactgaacttcattccccaagtccaaacaactggattgggcctacgcactacagaacttcccccaaaaaaactataaatactcacatgttagccaaaaaatccatgcaccagagcacaggtcagaaaagtggggttgcattcttatagagggcaacattctcttcctaaaagacaattttaaaagacacacagcaytggggaaaggaggaggaagaaaacttttggaatagagaggataaaatggagaatttgtaaaccacagcaagctattgcttgcattaccagcaaagaagagctttgagtaaaccaagatggtgctaagttgttatccttcccattgccttctgatgaggaccacaaattacctacagccaatccattactctttgtcatctgtgtggagtaatacttgtcagatcttggaaattctgtccagcctccatccaaacaattctatgtggactaccacaatctgatagcctgggttccttataagtctttttcacccctgtccccatcatggatgatagggatgaatattggggaccatggtgacatgagtggaaggtatgaaatacactccccccacatgttcttctgtcttgcctatgatcagcccgtttgaattctacatttacacaagactccaagaaacactagatgctgtttaggactgcacaagtccaccacctagagggaactcagccaatgtgcccactctactctgcccacagagttgtttgggagacgagcagtgggatgtaacaatttatacttgaattttttctttatttgtgtagaatgtggtgtccccttccctttctccttctcctttcaccccagctccaattagaaaattttattgtacaaaattccactccagaggaatctatttcaaatttaggaagccattggtgcgtaaagaacacttattctaagagggcaggacagagtgtgccatgtaatcaaaggcaattaaagacattcatgcaattgtgaatatacatcctctgcatatacaattgttcaaaaagcctacatactgtggcactggatggttttcaaaagacatttaaggcacaataagcatttatttggggcttgggaacatgagttttgttt

SEQ ID NO: 3248 - DNA, 1263 bp, Homo sapiens
ctttcctatttgttggaggagaaaatgtttgaagagtcacttatgcagtgtttggctcattgtgtgcacagctcaataaatagtatgttattgcagtggcatatatttctaagaattaatctatgccgcctacttgcagccactgaacttcattccccaagtccaaacaactggattgggcctacgcactacagaacttcccccaaaaaaactataaatactcacatgttagccaaaaaatccatgcaccagagcacaggtcagaaaagtggggttgcattcttatagagggcaacattctcttcctaaaagacaattttaaaagacacacagcattggggaaaggaggaggaagaaaacttttggaatagagaggataaaatggagaatttgtaaaccacagcaagctattgcttgcattaccagcaaagaagagctttgagtaaaccaagatggtgctaagttgttatccttcccattgccttctgatgaggaccacaaattacctacagccaatccattactctttgtcatctgtgtggagtaatacttgtcagatcttggaaattctgtccagcctccatccaaacaattctatgtggactaccacaatctgatagcctgggttccttataagtctttttcacccctgtccccatcatggatgatagggatgaatattggggaccatggtgacatgagtggaaggtatgaaatacactccccccacatgttcttctgtcttgcctatgatcagcccgtttgaattctacatttacacaagactccaagaaacactagatgctgtttaggactgcacaagtccaccacctagagggaactcagccaatgtgcccactctactctgcccacagagttgtttgggagacgagcagtgggatgtaacaatttatacttgaattttttctttatttgtgtagaatgtggtgtccccttccctttctccttctcctttcaccccagctccaattagaaaattttattgtacaaaattccactccagaggaatctatttcaaatttaggaagccattggtgygtaaagaacacttattctaagagggcaggacagagtgtgccatgtaatcaaaggcaattaaagacattcatgcaattgtgaatatacatcctctgcatatacaattgttcaaaaagcctacatactgtggcactggatggttttcaaaagacatttaaggcacaataagcatttatttggggcttgggaacatgagttttgttt

SEQ ID NO: 3249 - DNA, 946 bp, Homo sapiens
tgtgcctgggaacccagtcttgctttccaatggagaaatcagatgacaaactgcccagtatactccatgagactctagagtgctctctagcctctagccccaacgcagtggttgaaatcctctgatggcctgggtttggtgatatttctggagcaatttgatgatgggatgggacacaatccaagtatagggccrttgaaaaacacacgtaaaaaatcacagtatattctgctcaaaactcagccatttctgatggacaaaacttggaaactattaacttgactgaggggtgagagtcggggcaggaaatccatttgtggattgaagattctgatttggatgactgtgaatgactttaatatttgaatatggcatttatgaatactggggaaataacaagggctcagggaaaatgcagggatgccaactgctaaatgtctcatttgttctgtagttctgtctattgaacagaatcagatataaaatggaagatatatacctctatatattaagtgactgaggcaaacctggaaagctgaattgtgcaaagccacagtgcacacattttcactatttttcctttctgctttgcttttctccggattttattttttcaacaaatatttaagatttttaaatatttaaaactacaaattaagcacttactatgtgcctgggactgttccaggtgctgaagatgtggaagcaaaccaaattctgtcccctcaaataaacttacattctagaaatcctaacatagatcaagattaggatagccactctagcagtatcaaatcatagatatatgtgtggcactctaaccagaaagttctattctttaccatcctacactgtagataaatgggagattatgattttgcggctattgagactgttgaagctgattattctctttcagtcaaaatctacttagtatggaacacac

SEQ ID NO: 3250 - DNA, 407 bp, Homo sapiens
gaacccttgtcyaatgtgctgtattttcagtaaacaatagaaagtggtcagacataattttgagtcttggagctcagatcctgcagttcgttgggcacagtttcatcacttggcaatcactgatatctttacagtgtgatgtaaatatttaagattaatacgccctatgtgaatgctaagctcctcatctgttgacacattctttctgtactcagcaactactcccagcgattcctcttcccccaaaaatactaaatattgttgaaagaacaaacagctgcaaatattgaaaacctgtctttttaagaggttgaatggaaaaacacaaagtgattttactgtgaagtgaagctgacctttaagaagttgttatttctagttgtaaatcaataaaattttattgagca

SEQ ID NO: 3251 - DNA, 2940 bp, Homo sapiens
actacaggaatacagatgcagtgtctgcagaagcgtacagaagccacatagcactgcttggaaagatccgtcagcaccagccatttgctttttctcatctttgcttagaaaatttctcttccagccaccacaactgggatatctcctgctcagtggtaaatcacttctatttmataaaatggcctcttagagcaatttttaatctattttactaccatgatgatctgcctgatcacgctgatgtcttcaaggtgacagcacccactgcataattctcagcctcctggatcacaccacagcccctcactgccttcactgctgcaacatagcaaaaagcaaattattcttgaattgctgaaaaaaaggatgaaaaaatttataaaaacattcaaaacaattccaaaaaagcatgaataaattttataatactttcaagacaatttgtttgatatttattttctagataattgatctacataatttaaccattgtttcctccgcccaaataaaacctagaaagaagaaatgatatgaaagggaggtaactctggagaaagaaacacagtcaagacactctatagattggccccttgaaaatatattctctcactctgcctgaattgtcacattgaattagccagactacataaaactccactgttggagatattttgggttaacatatatcttcctttaaagcacaaacaatcttggagtcttatgtttaaatcagcttattttcatactaaaaggtgattaggaagagttcataaaagatggattttatttgagaggtatgatgggttttcacaggggagaaacaggtcatattgaagcaaggaggccttccatgagaagggcaagatcaaagattttacttataaacctaggaaagcactgaagagagcatctaaagaggttggaaagtatgagtagagagttatgatacaaaagatgctctgtgagcattataattttacccagagcagtgttttgccctggaaaagaggaggaagtgtcttctagcactgaatactacccacagaccctcttcatggatgagccctcctccctgtctaacttctattcagttattcacttaagcaacatttattaataatcctctgtttataaattacaagaagagttagatggggatttggaggactggtggataagctagctatcatctgcagctctacttcatggggaaatgtgcaccaagtaccctaatatatgaactcaacttattgtgagaaatgcatataagaaataagtcagaatatttttagaaagcatgcagaaagaggaaaaaatttagctacttataagtagctaaatagaatgcatacattttattgtcctactgaaacaatatatattttttagtcatttatacagtaatataaattagtttaacacaattgattttttcctaattcttaagctgatactattgccaggaaggggaatttttattttggtttgagatctatgcagaagacatcattttgcaatatggatcatctttggaggttgtacaggccgagatacagagatgaagaaaaacaaacaaacaaaaacttagggcagtttaaatctaaaggtctgctgaaaacccagtaggaactcaaaaatgtttttggacaaataggctatatatgatcaactcaggagtgaaacattaagtagagagatatttcttctcgtttgtatttattagggactactctatgaaaaaagaagggaagattgctggttgatgagtttgagaaggtgccacgatccagcgtatcctacctgatatattaactcagccagaacaaaagaagcagaggggatagggtttcttatggggttataaaaagtaattcaatgctagcattaaatctttaaaggagtttgttgttaaaaggaatgaggaactgaggcttaacatgacttaacaaaatacatttcacaccctgaactaggccctctattttagaccagttgtacatctctcagtttgtctccatttatagacagaagaacacactgcattaggtcattaacaagacacatacaatgcactgccttctcagtataagcaaccataaaaattcattctggggaagagtaaacctgcccttcaacatttcagttgttgaaggttgtgctgaattagattgcaaagattacataatgtctttgggggttgcaggcctttcatcctctcagctggcatgaaaactgctaggtgctctcaaacagcactagaattaatatgtgcgcatgtcctatcacttcgtttatacaacacatccttggcttttaagaaacgaacttgattagccttcctccaaataatgttctgtcattgtccaagacaaggggaagtaggttctgactttaagagattttaatccctgtaaagaagagctcttcaaacgatcagaattgtagaatatcagagttcagtagatcttagagtattttttagactaaacccctctttttatagatgaagccactgaagatcagaaaattatttgtccagaatcacacacctagctcatggaagaagagacaccaggtctttgcctattgagattcaggtttagatacttaaatactaaaactatgctgtacagtctccagggaactctttaaaagtgaaattcccatatgccactccagacaaatcatcaaaacctctgggtgaggaaacttagcttctgtatttttgtaagtttcccaggcaattctaatgtggaaccagtttggaaaccactagtctaggaaaagagtctatcatctttggcaaagacaaacaaatatctccctttctctagcatgttcttggttcttggtgttcttgttcttggtgttctcggacctattgtcctgggtctaactgttgatagaaacccctttcacactcagaaatatcccagtatg

SEQ ID NO: 3252 - DNA, 2940 bp, Homo sapiens
actacaggaatacagatgcagtgtctgcagaagcgtacagaagccacatagcactgcttggaaagatccgtcagcaccagccatttgctttttctcatctttgcttagaaaatttctcttccagccaccacaactgggatatctcctgctcagtggtaaatcacttctatttaataaaatggcctcttagagcaatttttaatctattttactaccatgatgatctgcctgatcacgctgatgtcttcaaggtgacagcacccactgcataattctcagcctcctggatcacaccacagcccctcactgccttcactgctgcaacatagcaaaaagcaaattattcttgaattgctgaaaaaaaggatgaaaaaatttataaaaacattcaaaacaattccaaaaaagcatgaataaattttataatactttcaagacaatttgtttgatatttattttctagataattgatctacataatttaaccattgtttcctccgcccaaataaaacctagaaagaagaaatgatatgaaagggaggtaactctggagaaagaaacacagtcaagacactctatagattggccccttgaaaatatattctctcactctgcctgaattgtcacattgaattagccagactacataaaactccactgttggagatattttgggttaacatatatcttcctttaaagcacaaacaatcttggagtcttatgtttaaatcagcttattttcatactaaaaggtgattaggaagagttcataaaagatggattttatttgagaggtatgatgggttttcayaggggagaaacaggtcatattgaagcaaggaggccttccatgagaagggcaagatcaaagattttacttataaacctaggaaagcactgaagagagcatctaaagaggttggaaagtatgagtagagagttatgatacaaaagatgctctgtgagcattataattttacccagagcagtgttttgccctggaaaagaggaggaagtgtcttctagcactgaatactacccacagaccctcttcatggatgagccctcctccctgtctaacttctattcagttattcacttaagcaacatttattaataatcctctgtttataaattacaagaagagttagatggggatttggaggactggtggataagctagctatcatctgcagctctacttcatggggaaatgtgcaccaagtaccctaatatatgaactcaacttattgtgagaaatgcatataagaaataagtcagaatatttttagaaagcatgcagaaagaggaaaaaatttagctacttataagtagctaaatagaatgcatacattttattgtcctactgaaacaatatatattttttagtcatttatacagtaatataaattagtttaacacaattgattttttcctaattcttaagctgatactattgccaggaaggggaatttttattttggtttgagatctatgcagaagacatcattttgcaatatggatcatctttggaggttgtacaggccgagatacagagatgaagaaaaacaaacaaacaaaaacttagggcagtttaaatctaaaggtctgctgaaaacccagtaggaactcaaaaatgtttttggacaaataggctatatatgatcaactcaggagtgaaacattaagtagagagatatttcttctcgtttgtatttattagggactactctatgaaaaaagaagggaagattgctggttgatgagtttgagaaggtgccacgatccagcgtatcctacctgatatattaactcagccagaacaaaagaagcagaggggatagggtttcttatggggttataaaaagtaattcaatgctagcattaaatctttaaaggagtttgttgttaaaaggaatgaggaactgaggcttaacatgacttaacaaaatacatttcacaccctgaactaggccctctattttagaccagttgtacatctctcagtttgtctccatttatagacagaagaacacactgcattaggtcattaacaagacacatacaatgcactgccttctcagtataagcaaccataaaaattcattctggggaagagtaaacctgcccttcaacatttcagttgttgaaggttgtgctgaattagattgcaaagattacataatgtctttgggggttgcaggcctttcatcctctcagctggcatgaaaactgctaggtgctctcaaacagcactagaattaatatgtgcgcatgtcctatcacttcgtttatacaacacatccttggcttttaagaaacgaacttgattagccttcctccaaataatgttctgtcattgtccaagacaaggggaagtaggttctgactttaagagattttaatccctgtaaagaagagctcttcaaacgatcagaattgtagaatatcagagttcagtagatcttagagtattttttagactaaacccctctttttatagatgaagccactgaagatcagaaaattatttgtccagaatcacacacctagctcatggaagaagagacaccaggtctttgcctattgagattcaggtttagatacttaaatactaaaactatgctgtacagtctccagggaactctttaaaagtgaaattcccatatgccactccagacaaatcatcaaaacctctgggtgaggaaacttagcttctgtatttttgtaagtttcccaggcaattctaatgtggaaccagtttggaaaccactagtctaggaaaagagtctatcatctttggcaaagacaaacaaatatctccctttctctagcatgttcttggttcttggtgttcttgttcttggtgttctcggacctattgtcctgggtctaactgttgatagaaacccctttcacactcagaaatatcccagtatg

SEQ ID NO: 3253 - DNA, 2940 bp, Homo sapiens
actacaggaatacagatgcagtgtctgcagaagcgtacagaagccacatagcactgcttggaaagatccgtcagcaccagccatttgctttttctcatctttgcttagaaaatttctcttccagccaccacaactgggatatctcctgctcagtggtaaatcacttctatttaataaaatggcctcttagagcaatttttaatctattttactaccatgatgatctgcctgatcacgctgatgtcttcaaggtgacagcacccactgcataattctcagcctcctggatcacaccacagcccctcactgccttcactgctgcaacatagcaaaaagcaaattattcttgaattgctgaaaaaaaggatgaaaaaatttataaaaacattcaaaacaattccaaaaaagcatgaataaattttataatactttcaagacaatttgtttgatatttattttctagataattgatctacataatttaaccattgtttcctccgcccaaataaaacctagaaagaagaaatgatatgaaagggaggtaactctggagaaagaaacacagtcaagacactctatagattggccccttgaaaatatattctctcactctgcctgaattgtcacattgaattagccagactacataaaactccactgttggagatattttgggttaacatatatcttcctttaaagcacaaacaatcttggagtcttatgtttaaatcagcttattttcatactaaaaggtgattaggaagagttcataaaagatggattttatttgagaggtatgatgggttttcacaggggagaaacaggtcatattgaagcaaggaggccttccatgagaagggcaagatcaaagattttacttataaacctaggaaagcactgaagagagcrtctaaagaggttggaaagtatgagtagagagttatgatacaaaagatgctctgtgagcattataattttacccagagcagtgttttgccctggaaaagaggaggaagtgtcttctagcactgaatactacccacagaccctcttcatggatgagccctcctccctgtctaacttctattcagttattcacttaagcaacatttattaataatcctctgtttataaattacaagaagagttagatggggatttggaggactggtggataagctagctatcatctgcagctctacttcatggggaaatgtgcaccaagtaccctaatatatgaactcaacttattgtgagaaatgcatataagaaataagtcagaatatttttagaaagcatgcagaaagaggaaaaaatttagctacttataagtagctaaatagaatgcatacattttattgtcctactgaaacaatatatattttttagtcatttatacagtaatataaattagtttaacacaattgattttttcctaattcttaagctgatactattgccaggaaggggaatttttattttggtttgagatctatgcagaagacatcattttgcaatatggatcatctttggaggttgtacaggccgagatacagagatgaagaaaaacaaacaaacaaaaacttagggcagtttaaatctaaaggtctgctgaaaacccagtaggaactcaaaaatgtttttggacaaataggctatatatgatcaactcaggagtgaaacattaagtagagagatatttcttctcgtttgtatttattagggactactctatgaaaaaagaagggaagattgctggttgatgagtttgagaaggtgccacgatccagcgtatcctacctgatatattaactcagccagaacaaaagaagcagaggggatagggtttcttatggggttataaaaagtaattcaatgctagcattaaatctttaaaggagtttgttgttaaaaggaatgaggaactgaggcttaacatgacttaacaaaatacatttcacaccctgaactaggccctctattttagaccagttgtacatctctcagtttgtctccatttatagacagaagaacacactgcattaggtcattaacaagacacatacaatgcactgccttctcagtataagcaaccataaaaattcattctggggaagagtaaacctgcccttcaacatttcagttgttgaaggttgtgctgaattagattgcaaagattacataatgtctttgggggttgcaggcctttcatcctctcagctggcatgaaaactgctaggtgctctcaaacagcactagaattaatatgtgcgcatgtcctatcacttcgtttatacaacacatccttggcttttaagaaacgaacttgattagccttcctccaaataatgttctgtcattgtccaagacaaggggaagtaggttctgactttaagagattttaatccctgtaaagaagagctcttcaaacgatcagaattgtagaatatcagagttcagtagatcttagagtattttttagactaaacccctctttttatagatgaagccactgaagatcagaaaattatttgtccagaatcacacacctagctcatggaagaagagacaccaggtctttgcctattgagattcaggtttagatacttaaatactaaaactatgctgtacagtctccagggaactctttaaaagtgaaattcccatatgccactccagacaaatcatcaaaacctctgggtgaggaaacttagcttctgtatttttgtaagtttcccaggcaattctaatgtggaaccagtttggaaaccactagtctaggaaaagagtctatcatctttggcaaagacaaacaaatatctccctttctctagcatgttcttggttcttggtgttcttgttcttggtgttctcggacctattgtcctgggtctaactgttgatagaaacccctttcacactcagaaatatcccagtatg

SEQ ID NO: 3254 - DNA, 2940 bp, Homo sapiens
actacaggaatacagatgcagtgtctgcagaagcgtacagaagccacatagcactgcttggaaagatccgtcagcaccagccatttgctttttctcatctttgcttagaaaatttctcttccagccaccacaactgggatatctcctgctcagtggtaaatcacttctatttaataaaatggcctcttagagcaatttttaatctattttactaccatgatgatctgcctgatcacgctgatgtcttcaaggtgacagcacccactgcataattctcagcctcctggatcacaccacagcccctcactgccttcactgctgcaacatagcaaaaagcaaattattcttgaattgctgaaaaaaaggatgaaaaaatttataaaaacattcaaaacaattccaaaaaagcatgaataaattttataatactttcaagacaatttgtttgatatttattttctagataattgatctacataatttaaccattgtttcctccgcccaaataaaacctagaaagaagaaatgatatgaaagggaggtaactctggagaaagaaacacagtcaagacactctatagattggccccttgaaaatatattctctcactctgcctgaattgtcacattgaattagccagactacataaaactccactgttggagatattttgggttaacatatatcttcctttaaagcacaaacaatcttggagtcttatgtttaaatcagcttattttcatactaaaaggtgattaggaagagttcataaaagatggattttatttgagaggtatgatgggttttcacaggggagaaacaggtcatattgaagcaaggaggccttccatgagaagggcaagatcaaagattttacttataaacctaggaaagcactgaagagagcatctaaagaggttggaaagtatgagtagagagttatgatacaaaagatgctctgtgagcattataattttacccagagcagtgttttrccctggaaaagaggaggaagtgtcttctagcactgaatactacccacagaccctcttcatggatgagccctcctccctgtctaacttctattcagttattcacttaagcaacatttattaataatcctctgtttataaattacaagaagagttagatggggatttggaggactggtggataagctagctatcatctgcagctctacttcatggggaaatgtgcaccaagtaccctaatatatgaactcaacttattgtgagaaatgcatataagaaataagtcagaatatttttagaaagcatgcagaaagaggaaaaaatttagctacttataagtagctaaatagaatgcatacattttattgtcctactgaaacaatatatattttttagtcatttatacagtaatataaattagtttaacacaattgattttttcctaattcttaagctgatactattgccaggaaggggaatttttattttggtttgagatctatgcagaagacatcattttgcaatatggatcatctttggaggttgtacaggccgagatacagagatgaagaaaaacaaacaaacaaaaacttagggcagtttaaatctaaaggtctgctgaaaacccagtaggaactcaaaaatgtttttggacaaataggctatatatgatcaactcaggagtgaaacattaagtagagagatatttcttctcgtttgtatttattagggactactctatgaaaaaagaagggaagattgctggttgatgagtttgagaaggtgccacgatccagcgtatcctacctgatatattaactcagccagaacaaaagaagcagaggggatagggtttcttatggggttataaaaagtaattcaatgctagcattaaatctttaaaggagtttgttgttaaaaggaatgaggaactgaggcttaacatgacttaacaaaatacatttcacaccctgaactaggccctctattttagaccagttgtacatctctcagtttgtctccatttatagacagaagaacacactgcattaggtcattaacaagacacatacaatgcactgccttctcagtataagcaaccataaaaattcattctggggaagagtaaacctgcccttcaacatttcagttgttgaaggttgtgctgaattagattgcaaagattacataatgtctttgggggttgcaggcctttcatcctctcagctggcatgaaaactgctaggtgctctcaaacagcactagaattaatatgtgcgcatgtcctatcacttcgtttatacaacacatccttggcttttaagaaacgaacttgattagccttcctccaaataatgttctgtcattgtccaagacaaggggaagtaggttctgactttaagagattttaatccctgtaaagaagagctcttcaaacgatcagaattgtagaatatcagagttcagtagatcttagagtattttttagactaaacccctctttttatagatgaagccactgaagatcagaaaattatttgtccagaatcacacacctagctcatggaagaagagacaccaggtctttgcctattgagattcaggtttagatacttaaatactaaaactatgctgtacagtctccagggaactctttaaaagtgaaattcccatatgccactccagacaaatcatcaaaacctctgggtgaggaaacttagcttctgtatttttgtaagtttcccaggcaattctaatgtggaaccagtttggaaaccactagtctaggaaaagagtctatcatctttggcaaagacaaacaaatatctccctttctctagcatgttcttggttcttggtgttcttgttcttggtgttctcggacctattgtcctgggtctaactgttgatagaaacccctttcacactcagaaatatcccagtatg

SEQ ID NO: 3255 - DNA, 1146 bp, Homo sapiens
aatataatgtgtgtgttaatattgaagttaaagtataaaactacaaataaattttgcatgagttggatttcttatgactggccctgctcccagaatctgcataggcatggatgcactctcaatcactgtgggtatctttggtggaagcgtgtaagaagcatgatgtatattamtcagtttacatttctgtgaactaagtaggtatactcctatcatttacttacttttttagataaagaaacgaaggctcagagaggttaagtaacttatctaagctcacacagctatggtacaaacactataggaacttttcaaagtcttcaaatactatgttcttttcattttctgatgaattaataggcagggttaggtctgggtaaatttttgagaaaggtgaaaatttgtcttttctttctttaatttttgtactatctttattctctcctcgtgtaacccctcttcccagaaataaaaaaacacccagtgctctttctctgttcagatatgaacatccatctgctaagcattgcaggtctgcttatttattaactggaagaaatggctgatatttcagaccttgtacagtggttctacatggtgatggtgatggaggtgacagtagcagtaagtgcaagagtttcccttaagtcacgtatgtagtcaaatctgttcttgttgaggctaacctagagagtggaggtcagtagtgggcagagattgaaaccagacaaacctctctgtgtgacttcaaagacttccttgtctttaactccaggagtctagtggtagtagggtcctaccacttatctggtagggaagatcaaattgtcttgaattctagaaactcccagatggaacaaaacaaaagaaagtaattgggaggcacaaactgtaccctcctggcgccttcgtgggagtcttaccatatttttttccctttccccttctcagcactgtgctgtcgcccaagcaccaggggaacccagctgcctggttttctttggcggggtcttgtggctgctttttagtctgtcttgttatctctctcctcagctgaccctagaaatgcttaatttggctgtgtgaaagtaatgctaatttcagtcatttaagtaatcatttgccatttatactaaattgccgtgt

SEQ ID NO: 3256 - DNA, 1146 bp, Homo sapiens
aatataatgtgtgtgttaatattgaagttaaagtataaaactacaaataaattttgcatgagttggatttcttatgactggccctgctcccagaatctgcataggcatggatgcactctcaatcactgtgggtatctttggtggaagcgtgtaagaagcatgatgtatattaatcagtttacatttctgtgaactaagtaggtatactcctatcatttacttacttttttagataaagaaacgaaggctcagagagkttaagtaacttatctaagctcacacagctatggtacaaacactataggaacttttcaaagtcttcaaatactatgttcttttcattttctgatgaattaataggcagggttaggtctgggtaaatttttgagaaaggtgaaaatttgtcttttctttctttaatttttgtactatctttattctctcctcgtgtaacccctcttcccagaaataaaaaaacacccagtgctctttctctgttcagatatgaacatccatctgctaagcattgcaggtctgcttatttattaactggaagaaatggctgatatttcagaccttgtacagtggttctacatggtgatggtgatggaggtgacagtagcagtaagtgcaagagtttcccttaagtcacgtatgtagtcaaatctgttcttgttgaggctaacctagagagtggaggtcagtagtgggcagagattgaaaccagacaaacctctctgtgtgacttcaaagacttccttgtctttaactccaggagtctagtggtagtagggtcctaccacttatctggtagggaagatcaaattgtcttgaattctagaaactcccagatggaacaaaacaaaagaaagtaattgggaggcacaaactgtaccctcctggcgccttcgtgggagtcttaccatatttttttccctttccccttctcagcactgtgctgtcgcccaagcaccaggggaacccagctgcctggttttctttggcggggtcttgtggctgctttttagtctgtcttgttatctctctcctcagctgaccctagaaatgcttaatttggctgtgtgaaagtaatgctaatttcagtcatttaagtaatcatttgccatttatactaaattgccgtgt

SEQ ID NO: 3257 - DNA, 1773 bp, Homo sapiens
  misc_feature (1)...(1773): n = A,T,C or G
ccacatggggccattccccacacataggttaattctgagcctgaattcagggtttatttccagggcctgaagaaagtgaacgtgaagtagtctgggagttctagagggccacaatacaaagaacaatgctgggtaatcgcagtccaaactagttcatctgtggatgctgtggaggctctacgctaggaatacacccctttacctgcccaaatccactgcttctcaggctcactctgcattgggccctgtgggaagagtcttcaaagggcactgaagacaccaagtgggagtgattaaatgtttcaaattcatatcaaaacttcagatctttcataaagtcatctttagcttggctaaaagaagtttctgaaatattttcatattagcacttattcagattccttgaaggcagaaactctgtcttattcattctatatccttagtactcaacaataggagctaatacaatagtaggcactctgtcactgtttgttgatagagcagttattgctaggtgatgaactaattgcannnnnnnnnnnnnnnnnnnnnnnnnnnnnnnnnnnnnnnnnnnnnnnnnnnnnnnnnnnnnnnnnnnnnnnnnnnnnnnnnnnnnnnnnnnnnnnnnnnncatcagcaatacatttgaaaaatgacacaatctaaagcctttcctgtcccttttgccaacatactttcctgtaactggcttgccctcaggctactggacaagtagctccgactttcaaaaactgtactagttcttcaacctgccagatgatttaataatgttctctccaaacgtggttaatgtacaataagacaaagaggtgattttcagatccttttgttgttgttgttattcaaacctaatgtttgggatttcattaacacaaacagataaatatattgaacatgctctgtgtgttcacatttgagccacagcaggaaagaaaaacagcaacgtccatgtgatttcttcttgctgccttgggacattggagcctttgaggataataacacgataaatataggataactctaatgggtatagaattgaatttctacacagttaaatggatgtattaattaggtttctttggctgcaggcaacagaaagtaattcttggtaacttggtcggggagaaagatactaaaaatctatgaggataggccgggtatggtggctcaggcctgtaatcccagcactttgggaggccgaggccaagagttcacaacccacctggccaatgttgtgaaaccttgtctctactaaaaatacagaattagatgggtgcagtggtgcatgcctgtaatcccagctactcaggaggctgaggcaggaaaatcacttgaacccgtgaggtggaggttgtagtgagctgagattgcatcactgcactcctgcctgggagacagactgagtgagactctgtctaaaaaaaaaaaaagtctataaggatagttcaaaaaattgaataaaagctacatagaacaaggcttcaggaagggcaggaactgaggaagctccagggatcttagtaacagtaattaatatgctatttattgagagtataagtaccaagtataaatcagtcccaactggttattcaggaaaacagcatccaacgcctaggggaagactaaggtaccactcgcaaaaggattgagggagtttccccaaaggaaagttaaggactatttcaaaaataacaacccaagaatgttragcaaaatcaagaatgtcaccataatgaaaaaattacaaaggcc

SEQ ID NO: 3258 - DNA, 581 bp, Homo sapiens
atatgctgataaataagacacatagaaatccaatagcagagaaaggagagatattaagaaagcctttttccctaaaacaagagtactgcatttactctttcctcatctcgctgccttaaatcagatttaatatctgaaggtgcaaaagtcatcttgtgrtcaagtgtatataaataaagatgctaaagatggcggggtaaaaagacagaaaagctctggtctctgatggcattgtgatgcaatgtacaagtcctggtttatctaattctggattaggtatgagaaatggaatataaaactctgatttgttaagctactgtattcaaagtttctgttatagatagcaaaaaacatccttaacacaagaatcaaagcatgactccatttctggatggggcatatggtggaaacaaatagaaatataccagtgagtgaaaacaaatagtaaaggatagaacaaggagcagaggagacctgacaccagaccacagttcctactgttttagaattcattatttccagttcgtagtgacgggactgagcccagagaaagggaagagtgaagcacaactgtagaatcc

SEQ ID NO: 3259 - DNA, 552 bp, Homo sapiens
acggcctgactccctgctgccgctgtgatccctcagttcccaaggcgctcctgctttctagtttataaggccctttttgtacttcactcacctggcccttgatgggctcaggagtagaggctcaacaggcagagaagaggtttatcagctctactttacaatgggctaaaaggaggcccagaggagcctggagactggaacttggggctcttgcctttatccagggtgctttccatggcattgttctgcccgcctcctggggtaggtaggtctgcgcacattgaagaggctgcctcactccctgggccttctccttctgggctgggccaagtttcgagctgcagctgcctggcccaagaccttttttcctaagtttcagatgccatgaggctggccctcttcagtgagactcagctcagaggtcasctggtattgaagaacagtttctggccaggcccggtggttcacacctctaatcccagcgctttgggaggccaaggcaggtggataaccgaggtcaggagtttgagactagcctggccaatatggcga

SEQ ID NO: 3260 - DNA, 663 bp, Homo sapiens
tggttcctgttcttgggagaaggcactagaggccaggctcactctcatggtttgcaaactgaggcattagataagttagcatctttctcgaagtcacatggccaagcagggtggggatgtaatacagtccttggcttccagtttcccaggccctttgcctgaattgtgtgcctgttgtcttgtagcagtggtcagcaatgtcaccagcacaagtggcagctctggcagtagccgtggagtttttggaggggtcagtggcagtggcagtggtggctacaaaggcggcagcagcagcagcagcagcagyggctatggagtcagtggcggcagcggcagtggctatggaggggtcagcagtggcagcactgggggcaggggtagcagcgggagctaccagagcagcagtagtgggagcaggctcggcggtgcaggtagcatctccgtgagccacagtggaatgggctccagctctggcagcatccagacttctggaggaagtggctacaagtctggtggtggaggcagcaccagtatccgcttctcccagaccacgagctcaagccagcatagctccaccaagtgatctactgttccaaatctctataaccacctgcttcccactcagcctgcaatagtgtttcccactctctgcttggcatcaat

SEQ ID NO: 3261 - DNA, 1162 bp, Homo sapiens
cattaatcagatttatcacttatagtctacatactgctctccttaactgtagcttgagttaatctagccactgaktttatagttgtagatagttcaaaataaatcattaacagtgacaggtattctccctgtagagcacgactcacacaccaagatcccacagcataaaagacaaggcctcaagaccaaaaccatctccccctagacccaacaagcaagaagaagggagaccacatacaggtttgttgctgagctgagaagaaatgggagcatggctacttgaccacagggacaataaaaacagtaattgaacccttatccagctaggcaatacagttaagagatcaagagccaagattgtttcatcaggctagaatattggatagatacaatcaagacagtattagtcaaaatagggtaactgctgaaacaaacagtcctcaaatctgagtgacttaatgaaagtttatgtttttgctcatgtcacactccaatacaatttatgagagacataaaaggagattgcttcatgaaatcattcaggaccaagactcctacctcatcactgccattccttagggcctcagagtcctggatcctggtagacaagggaagagaaagagcatgaaggatttcatgagaggtttgaaggactagacctggactcatattccactgtagaattcagtcacatggctatgtttaaatgcagaggaagctgtgggggtgggggtgggaaattgtccatctgtgagcccaggaggaaaatggaaacatctttggaaacaactttccagcctctgccacaaggagtggaatgcaaaaagagggcgaaatgtaaagccctaaactgaagttaaaaatgtcaatgtcacaaatatcagagacctgacttggctgtgatacttgtgaaaaaaatttctggggctggaaagaaatatgggatactggctgatgatatgattatggttagcaaagaatatttttgtctttaaaaaatgagtgtaatattcaagtacattaataaagaaaatatatatagcagcaacagcatacactgccttcacgtcttacttatctttgtgtccttgtgtgtgtcctaaattatctgagcctcaacaagcttagctataaaataggactaaagcttgtggtgtgtgtc

SEQ ID NO: 3262 - DNA, 1147 bp, Homo sapiens
ctgggtgctgggtcagccttaagccctcacatcrcctggacttcgtgagctagaagccctcacgcccacctgccttgatgggtttttggggagtcagcaggaccgcagccaggaagcggctctgtggagtcccggatgtgtgttgggtggggacgggaggcagctgctctggtgagtccttccctccaactcccccgtactcagaccacacgaggtacagtcccattggagctgaggggtggggacaccctcaaggccatgttcctgcagggctttgtccaggccgcaggtgctgcgcggcattctctgcctttgcacgggtgtcgctgatgccagcgaggtggaaagtgggcggctgggaggccaggctgctcccgcccacctaccatacagtttggctctggatgccacagtctgggtttcttgtcatggtttttctgttcgcaagcccataagtggggcagagaaagggggtgtgtgatttcttggttaaaatctaggttactggctgtgacgttgctggcgtcgctgggtgtgctgggttggcggtgccatggggggagcaggtagagggaggggccgtcgcctgacctggagctgcccctgggtgctagctccccgtgccctccgtgtcccgggctcgtccggggaacgtcctcacacccacgcaggaggctggctgctgccctcgccaggccgtgcaggagtggaggcaggtagctgtctctctgggctggtaggactagcgtgttctaaggtccctgcaggctgagctcctcctcctccctggcctcagtctccctacctgttgagtgagaggcgggcctgagcgattgccgagggtcccggagctgcaccttggtgtgtggtaatgcgtgtgcctgttccaccctctctcgcgttaagaaccatggacagtttgtcctgtagggctgttctcctgtttttgaaataagtcaaaatattacagataaagttaattgccttttgtccccgcacagcccccgcctcatggtctgtgtcgtgacggcaagggtctccatgcggtgtctgtctcgtgcctctcctccctccctccaggtcccgcgtcaccacccgtcagaaggagccgccacgtttgatttctccagtgccttatcaaaggaca

SEQ ID NO: 3263 - DNA, 1147 bp, Homo sapiens
ctgggtgctgggtcagccttaagccctcacatcgcctggacttcgtgagctagaagccctcacgcccacctgccttgatgggtttttggggagycagcaggaccgcagccaggaagcggctctgtggagtcccggatgtgtgttgggtggggacgggaggcagctgctctggtgagtccttccctccaactcccccgtactcagaccacacgaggtacagtcccattggagctgaggggtggggacaccctcaaggccatgttcctgcagggctttgtccaggccgcaggtgctgcgcggcattctctgcctttgcacgggtgtcgctgatgccagcgaggtggaaagtgggcggctgggaggccaggctgctcccgcccacctaccatacagtttggctctggatgccacagtctgggtttcttgtcatggtttttctgttcgcaagcccataagtggggcagagaaagggggtgtgtgatttcttggttaaaatctaggttactggctgtgacgttgctggcgtcgctgggtgtgctgggttggcggtgccatggggggagcaggtagagggaggggccgtcgcctgacctggagctgcccctgggtgctagctccccgtgccctccgtgtcccgggctcgtccggggaacgtcctcacacccacgcaggaggctggctgctgccctcgccaggccgtgcaggagtggaggcaggtagctgtctctctgggctggtaggactagcgtgttctaaggtccctgcaggctgagctcctcctcctccctggcctcagtctccctacctgttgagtgagaggcgggcctgagcgattgccgagggtcccggagctgcaccttggtgtgtggtaatgcgtgtgcctgttccaccctctctcgcgttaagaaccatggacagtttgtcctgtagggctgttctcctgtttttgaaataagtcaaaatattacagataaagttaattgccttttgtccccgcacagcccccgcctcatggtctgtgtcgtgacggcaagggtctccatgcggtgtctgtctcgtgcctctcctccctccctccaggtcccgcgtcaccacccgtcagaaggagccgccacgtttgatttctccagtgccttatcaaaggaca

SEQ ID NO: 3264 - DNA, 1147 bp, Homo sapiens
ctgggtgctgggtcagccttaagccctcacatcgcctggacttcgtgagctagaagccctcacgcccacctgccttgatgggtttttggggagtcagcaggaccgcagccaggaagcggctctgtggagtcccggatgtgtgttgggtggggacgggaggcagctgctctggtgagtccttccctccaactcccccgtactcagaccacacgaggtacagtcccattggagctgaggggtggggacaccctcaaggccatgttcctgcagggctttgtccaggccgcaggtgctgcgcggcattctctgcctttgcacgggtgtcgctgatgccagcgaggtggaaagtgggcggctgggaggccaggctgctcccgcccacctaccatacagtttggctctggatgccacagtctgggtttcttgtcatggtttttctgttcgcaagcccataagtggggcagagaaagggggtgtgtgatttcttggttaaaatctaggttactggctgtgacgttgctggcgtcgctgggtgtgctgggttggcggtgccatggggggagcaggtagagggaggggccgtcgcctgacctggagctgcccctgggtgctagctccccgtgccctccgtgtcccgggctcgtccggggaacgtcctcacacccacgcaggaggctggctgctgccctcgccaggccgtgcaggagtggaggcaggtagctgtctctctgggctggtaggactagcgtgttctaaggtccctgcaggctgagctcctcctcctccctggcctcagtctccctacctgttgagtgagaggcgggcctgagcgattgccgagggtcccggagctgcaccttggtgtgtggtaatgcgtgtgcctgttccaccctctctcgcrttaagaaccatggacagtttgtcctgtagggctgttctcctgtttttgaaataagtcaaaatattacagataaagttaattgccttttgtccccgcacagcccccgcctcatggtctgtgtcgtgacggcaagggtctccatgcggtgtctgtctcgtgcctctcctccctccctccaggtcccgcgtcaccacccgtcagaaggagccgccacgtttgatttctccagtgccttatcaaaggaca

SEQ ID NO: 3265 - DNA, 1147 bp, Homo sapiens
ctgggtgctgggtcagccttaagccctcacatcgcctggacttcgtgagctagaagccctcacgcccacctgccttgatgggtttttggggagtcagcaggaccgcagccaggaagcggctctgtggagtcccggatgtgtgttgggtggggacgggaggcagctgctctggtgagtccttccctccaactcccccgtactcagaccacacgaggtacagtcccattggagctgaggggtggggacaccctcaaggccatgttcctgcagggctttgtccaggccgcaggtgctgcgcggcattctctgcctttgcacgggtgtcgctgatgccagcgaggtggaaagtgggcggctgggaggccaggctgctcccgcccacctaccatacagtttggctctggatgccacagtctgggtttcttgtcatggtttttctgttcgcaagcccataagtggggcagagaaagggggtgtgtgatttcttggttaaaatctaggttactggctgtgacgttgctggcgtcgctgggtgtgctgggttggcggtgccatggggggagcaggtagagggaggggccgtcgcctgacctggagctgcccctgggtgctagctccccgtgccctccgtgtcccgggctcgtccggggaacgtcctcacacccacgcaggaggctggctgctgccctcgccaggccgtgcaggagtggaggcaggtagctgtctctctgggctggtaggactagcgtgttctaaggtccctgcaggctgagctcctcctcctccctggcctcagtctccctacctgttgagtgagaggcgggcctgagcgattgccgagggtcccggagctgcaccttggtgtgtggtaatgcgtgtgcctgttccaccctctctcgcgttaagaaccatggacagtttgtcctgtagggctgttctcctgtttttgaaataagtcaaaatattacagataaagttaattgccttttgtccccgcacagcccccgcctcatggtctgtgtcgtgacggcaagggtctccatgcggtgtctgtctcgtgcctctcctccctccctccaggtccygcgtcaccacccgtcagaaggagccgccacgtttgatttctccagtgccttatcaaaggaca

SEQ ID NO: 3266 - DNA, 609 bp, Homo sapiens
atgatttttttatttggattcactttaagctgaaatttagagagtataaaaagatgtttagttaattgtatattaaccttaccattttagttacacaagtttcctttttttttttttttttttttttgagacagagtctcactgtcgcacaggctggagtgcagtggcgtgatctcagttcactgcaaccgacacctcccgggttcaagtgattcttctgcttcagcctcctgagtagctgggactacaggtgtccgccaccatgcccagctaatttttgtatttttagtagagatggggtttcaccatgttggccaggatggtctcgacctcttgaccttgtgatctgtctgcctcggcctcccaacatgctgggattacaggcatgagccacggcgcgtgatcaagtttccttttttaatgttctcccatgaagtatttttttttcaaattgcaacagaaatcagagtaatgcttgttatacaaaggagataatacaatggaaacgtgcacaarggcaaaaaaacaacaaaatttcacctgcccgatcactaaacctctgtcagcctcattctgaagcttcattcaatgtttaaagccttgatagac

SEQ ID NO: 3267 - DNA, 651 bp, Homo sapiens
gagaaaatttaagttactttctgaaattatcttatcatctcatacatgagccaaatcttctcattgcttttgtttctttttatttgtctccatctgggctgctctggttgtgcctattctccagcagctgaagccaggtcagtctcctgctggaactatcatagctctttcagcatttccaaagctagattattctaaaacaaagtcttgaatgtgctccgtctgtccaagttttagagtcattgcaacataaaactccggagtatttaaaagatacaactgaagaagkgtcaggaactctaccagaaaccaaaatcatggtgtttttttgttgtttgtttggttggctttttttttttttttgacagagtctctatcacccaggctggagcgcagtggtgatctctgctcactgcaacttccacctcccaggttcaagcgagtctcctggctcagcctcccaagtagctgggaccacaggcatgtgccaccaagcctggctaaattttgtatttttagtggagacggggtctctccatgttggtcaggctggtctcaaacttctgacttcaggtgatttacccacctcggcctcccacaatgctgggattacaggtgtgagcccccatgcccggcccaaaatcatgcttt

SEQ ID NO: 3268 - DNA, 651 bp, Homo sapiens
gagaaaatttaagttactttctgaaattatcttatcatctcatacatgagccaaatcttctcattgcttttgtttctttttatttgtctccatctgggctgctctggttgtgcctattctccagcagctgaagccaggtcagtctcctgctggaactatcatagctctttcagcatttccaaagctagattattctaaaacaaagtcttgaatgtgctccgtctgtccaagttttagagtcattgcaacataaaactccggagtatttaaaagatacaactgaagaagtgtcaggaactctaccagaaaccaaaatcatggtgtttttttgttgtttgtttggttggctttttttttttttttgacagagtctctatcacccaggctggagcgcagtggtgatctctgctcactgcaacttccacctcccaggttcaagcgagtctcctggctcakcctcccaagtagctgggaccacaggcatgtgccaccaagcctggctaaattttgtatttttagtggagacggggtctctccatgttggtcaggctggtctcaaacttctgacttcaggtgatttacccacctcggcctcccacaatgctgggattacaggtgtgagcccccatgcccggcccaaaatcatgcttt

SEQ ID NO: 3269 - DNA, 1028 bp, Homo sapiens
gcattatcatctctgatttatagatgttgagaaactgcagctctgagacaaagtcacagaacttgctggcaaatggagtcaggatctgagctctaatctggctggttctgaacccacatactttcaacttcaaccattctcactgtgggacacctacgtagaaatccgggagcaccaagctgtgggccgggaggtaggccaagccatggggtgagcatagcatggcttttggagcatcttttttctgcaaaattttgagaaaaacagccaaaatcaaaacattatttttatgttaaaaatataaattacggagtagaatgcaaagttcacaaacattttctaagataaagcacacggcttcaaagaaagttcacactgacagttagctgccttaggaacactcccagacccctgggataggatgttcctgcctctgctattgggactccatccaaggaaagctcagccatgctgtcctatattcgagcatgcagtcttgggctttggagacctaccagcctaggtctgaattctggttctcacttgccatccatgggaatttgagctttttctttttccttaggcaagtgatttaacacatctgggcctcatttttcttatctgtaaattaggaaaaaaaaacagcatacctattttatacagttactatgaagattaaataagtaatacacataaaggatttatagttgtgccaggcacatagtaagaactctacaagggttctttatctgatcattatttactctgagcctgtttatctataaaatcgtaaaattttatctatataccttgtatatacyatatacataagtatatgttatatatactaacacgtaccttgtaagggtgtcatgggcattacatgaaatgttacatacacaacacagtgcctggcaggtagtaagtactccacaaatactacatatactggtagttattatatcagcactgtggctatggcatcacgacaccattcccaagagaagttcaagttatgaccttaatct

SEQ ID NO: 3270 - DNA, 1219 bp, Homo sapiens
attcttcttgttccatatccagtagctatcccccacctacacaaaaagttttagtttttactgagtccttagtgatttcaagacataaagaggtcctgaaatggaaatgttttacagctgctgttttaatgttgtccctgaaataaacacaacagtcgtgatgataatcccagtgacactgattgatccaagtaagacaatacagggtcttagagttaactctctccaccttccatgtgccctgtgaggctggtgctgctgttcctattcataccactgtacagacgagcagatggacattcagctttggcagtccttctgcctcctgggagtgtgccctgtgggtggggaggtcagaagccccagggacacccagatgggtgagaggtccacccttcctggggagaagcagctgctggggggaatctagcacattccagagggctgtccgtgatggtctgcatggcggttaagggaggtgccgtgggaataaagggagttggggaagatgccccatggagatggcattccagccggaccttgaatgatcatcctgtagggttggctcagtgaagcagacaggagggatggacccccgaaggggaaagaggccatgagcgaggtatggggaaagggagaaggagatcaatgtgagcctggtcccagccctcaagactgtgctgaccacgcaagggtgtggcctgggcgggaaggtggtggcccaggtgcagcatgtcttgccagcgctctgtggccaccagtgtctagaggtggtggagccagcagtggcgctcacagcctctgtagcgctgtctcttaccatgtgccttgcccttccctgaaggagaaccactgtcgccgcatcaagattctcggggactgctactactgcgtgtcgggcctcacccagcccaagactgaccatgcccactgctgtgtggagatgggactcgacatgattgataccatcacgtaagtaccccgtggggctgagaggagtggcctggggcatctacacattgaaatcctagaagctgagccaccttctgccccatgtgggctcccctctcagggtctcgctttgtcctgatgggtctgtctgaggctgcagagaatgatgccagcattaggaggatgctgggttcaggaaagcatgaaaggatgcttccgtgattccctgcctttacrtttcgtgtgtggctgtatttctttgtccaca

SEQ ID NO: 3271 - DNA, 1612 bp, Homo sapiens
tcccctggccaaataaggatggcagaaaggaattctccaaatccccagtgactttcagggtcagcaacgctcttggtaacagaaactggggttgtctttctgctgtgttacgtgtccttctcccaggtggatcacccacaactaggacaaaaggcaacaggaatggggagtgctcagatgctttccccaagctggctgcctgacttggttatttatggtaacactgggacctaagctgatgagcactaaatggatttgtgtaagccatcctgggggctgaagatggaggggaggccaggagggccggacagtcaggcctaccctgaaatgcactgggaaaatattcaaaatagggtctggctcgggagagcggagtgtggcggaaagtcggctctgacagctgcgtctgaaaggccggaggagcttcagcctgaggatttgcactaaaaatagaatcgctggcttgtgggtagagaatttgacccaattagagattaccagtttcaggaattactggaaaagaaatctcattagataggttaaatataggagccagaagcttaaaaggccatttgggattaaaaggaaaaccaaaacctcagagagattttaaaataaatgttgcatctcctttaagggtaggggacttagactgtataaatgcagcggctgcactgaagggacctgagagatgagccgtgaggttcatggagagggccagcggctcggcagaccgctcagcagagcctcactgctgtccctggacctgtgcccagcgtggtccctgctggccgcttttggggttctggctaagctggcccttctcatgctaaagagccaggaaagggtggcagctccaatcacattgaaggttcgtgacaacgcccatgtcagcatgtggcccacccaatccattctggatcctttgcatctccatacaccacctaaccccagccaggaacccagcagccacactccackcctccctctcctccccacaccaaatctgtcaccaagtcctatagatgtatcctgaaatagcttcctcctgtgcgtctctgccccttgcccaccgctgctgccttcattcaggtctttgccaattcctgccaggactactagagctgccaccagttgccctctgtctccagcctcctctccctccgccgctcagtcaccagcacatctttcctaaaatgtagagcgggtcttacccatttcttgctctaaaaaaattgctgacttcctagtgcctcaaagcatcccctagggtgtgtttttacagcactcaagtcctgaggaaaatcctaaaaaaagaaatgctgtgcttgaatgcattggaggaatgctacagccaggaaacccacttatgggaatcctggtggaatcctgacagtgctgtctcagccctgggcactccctcccccagcacacctgccttccagtcacctgcatcccccactggggactcttgatctgttccttgccttctctatatgtaccttgctgttctccatgggagactgggccccctccgaatcatttgtcctccttgcaaagtatataggaaaataccattatttttcccaactgtgtatttacactcaacaca

SEQ ID NO: 3272 - DNA, 1387 bp, Homo sapiens
ctgcctcccaggttcaagagattctcttgcctcaacctcccaagtagctgggattacaggcgtgtaccaccacccccaactaatttttttatttttagtagagacggggtttcacccatgttggccaggctagtctcaaactcctgacctcaagagatccacccaccttggcctcccaaagtgttgggatcacaggcgtgagccactgcacccggcggagtgcatgttttaacgtaactccagatgtgagtagcagaaatgtggacaccaggaaagatcagcccactagacccaaaagtgttaccactaagtgaggctgcattgctattttatgtgttatgccaaatttgatcccattccatgaacatgaaataatcttaaaaactgggtttgaaataagaaataacagaaactcaacacagaactaatttcaccaaaatactaagttttgttggtcaaacaacaagtatgtggcccttgttgcgcttatacatcttataatttgttttaaaatctgaagtcatcacacagaacagcctaagaattctgtcttgttaatgacttgagcataaactcacattcctcagtctctgtaccaaagggtgagcaccgtacatttccaatgcatgtggggactttaaaaggacagtggagggtctgcgatgctaccgtggagattcctgccctgtagcaggctgaaccagatgacctctggagttccttacaccccttaggatttcaagccctgaatccgagccctatctagctttactgaccaagtaggaggtggaatggtcaattcaatgctttataaaatgtcttttgtttaaaaaaaaaaaaaagtctttgaatgtaagccaggttgaaagcaactgtctcctctggctctccagtggttacacaacctcaaaggagaggctcggatcctctcccttcctgccacatgaggtaggagcccaaagctcggcatctgccctgcccaacctttcacacacagtgccggtatgtgccggcaccttagcatgacccttctggaagctggccaactccattttaacagaaaataagacagccatgaacactcgggctgtcctgatcctggaccaccctgctttcagttttaccacgtttcktctccctccacaagccttacttttggcctggacatagaagaacacaggatctgtccacgacccattcccagagagagatgtggcctgaatccgggctgtgtagttccccgggtttagccggtttagcttggcccctccatacttcctgtattcctgtctggacacacattctcgctgatcctggggaaataaaacatacatgtcaatttcccatgaatgcaggagaaatctggggcctgccaactaaactcacc

SEQ ID NO: 3273 - DNA, 1663 bp, Homo sapiens
aagcatatccttatggtttttttaatgcaagaagacagactcaattatgtgtgtttttgattttttttttcttcttcaacagcatgtactgcatcccttgtgaaggtccttgcccgaaggtctgtgaggaagaaaagaaaacaaagaccattgattctgttacttctgctcagatgctccaaggatgcaccatcttcaagggcaatttgctcattaacatccgacgggggagtaagtattccatccccctggaaaaacggctagatctcatggttttcttttgttgatgcttttcatgctcccgtccctgagtcaccactaaaatatgggcttagataaacaacatggtgtgtaagcctcacgcatgacgtctcttctttgagtttccctgaaagataaagaacagattgaaaggcaatctgtcttttagccattggcacgtcatttattcctgtaaagagggtcatcgctcatctttttgttagtcacatcttgcataggagaggcaagccctgacacatacaaaccccagaagagaccattggatcagacgtgtgactcagcagactccagctgtagccaaatccacacatctttcaagtctaaagagttttggttacttgaatttactgagaagactgagcaaagggaagtttagtgatatcacgttaaaattttatgaagtccaaaagaatgctagatttccaaatttacttgtgagagacaaaaggatacaagtgtgtgtcattgtgtacataaagtttcggtctcacccctgtacaatgacctttatttgcaatagatggcattcctggtaagttgcttctgagttggatttgtgcaaaggatttcccactgacttagcctatgatctcttcacttctttggttttttgtgtgtttgttttttggttttgttttgagacagggtctcactgtatcacccaggctggagtgcaatggcataatcatagctcactgtaacctggaactcctagtctcaaacaatccttctgctcagcctcccacgttgctgggaccacaggcacacactaccatgtctggataattttaaaaatcttttcacttctgatttttcattgccaagggcttctagtaatggtgccttaaattctctgccactgggaccacttggtcaaggtactgatagttttataagctagaataaatatcgtaaaatggctttgaagttgaaaggaattttggggggggaatccttttatgaagaatttttttttttttttacagtttgagaggaaaaataatgtattttgagaatgtgttttccttaatatttgttaaatgagtagactgtattcttaaggtttagaaaggacagaaacaagtttgtgcttagttcttctgaattmgttgatatcccttgttgctgttcacaatacacccactcccagccctccgtgatggagataactctgttccccacaactagggcttgcccactctcatggtacttctgatgtttaattcttttggctgtgtctgcatttcctcatttacttttaatttgcttatccctagaacataccttttgagtgcctaaacttttttatcttcctgtcctgaagacaaaaatttaatctgtgaattaaacccatggagaagtatcatttatgaagggattg

SEQ ID NO: 3274 - DNA, 1663 bp, Homo sapiens
aagcatatccttatggtttttttaatgcaagaagacagactcaattatgtgtgtttttgattttttttttcttcttcaacagcatgtactgcatcccttgtgaaggtccttgcccgaaggtctgtgaggaagaaaagaaaacaaagaccattgattctgttacttctgctcagatgctccaaggatgcaccatcttcaagggcaatttgctcattaacatccgacgggggagtaagtattccatccccctggaaaaacggctagatctcatggttttcttttgttgatgcttttcatgctcccgtccctgagtcaccactaaaatatgggcttagataaacaacatggtgtgtaagcctcacgcatgacgtctcttctttgagtttccctgaaagataaagaacagattgaaaggcaatctgtcttttagccattggcacgtcatttattcctgtaaagagggtcatcgctcatctttttgttagtcacatcttgcataggagaggcaagccctgacacatacaaaccccagaagagaccattggatcagacgtgtgactcagcagactccagctgtagccaaatccacacatctttcaagtctaaagagttttggttacttgaatttactgagaagactgagcaaagggaagtttagtgatatcacgttaaaattttatgaagtccaaaagaatgctagatttccaaatttacttgtgagagacaaaaggatacaagtgtgtgtcattgtgtacataaagtttcggtctcacccctgtacaatgacctttatttgcaatagatggcattcctggtaagttgcttctgagttggatttgtgcaaaggatttcccactgacttagcctatgatctcttcacttctttggttttttgtgtgtttgttttttggttttgttttgagacagggtctcactgtatcacccaggctggagtgcaatggcataatcatagctcactgtaacctggaactcctagtctcaaacaatccttctgctcagcctcccacgttgctgggaccacaggcacacactaccatgtctggataattttaaaaatcttttcacttctgatttttcattgccaagggcttctagtaatggtgccttaaattctctgccactgggaccacttggtcaaggtactgatagttttataagctagaataaatatcgtaaaatggctttgaagttgaaaggaattttggggggggaatccttttatgaagaatttttttttttttttacagtttgagaggaaaaataatgtattttgagaatgtgttttccttaatatttgttaaatgagtagactgtattcttaaggtttagaaaggacagaaacaagtttgtgcttagttcttctgaattagttgatatcccttgttgctgttcacaatacacccactcccagccctccgtgatggagataactctgttccccacaactagggcttgccsactctcatggtacttctgatgtttaattcttttggctgtgtctgcatttcctcatttacttttaatttgcttatccctagaacataccttttgagtgcctaaacttttttatcttcctgtcctgaagacaaaaatttaatctgtgaattaaacccatggagaagtatcatttatgaagggattg

SEQ ID NO: 3275 - DNA, 1663 bp, Homo sapiens
aagcatatccttatggtttttttaatgcaagaagacagactcaattatgtgtgtttttgattttttttttcttcttcaacagcatgtactgcatcccttgtgaaggtccttgcccgaaggtctgtgaggaagaaaagaaaacaaagaccattgattctgttacttctgctcagatgctccaaggatgcaccatcttcaagggcaatttgctcattaacatccgacgggggagtaagtattccatccccctggaaaaacggctagatctcatggttttcttttgttgatgcttttcatgctcccgtccctgagtcaccactaaaatatgggcttagataaacaacatggtgtgtaagcctcacgcatgacgtctcttctttgagtttccctgaaagataaagaacagattgaaaggcaatctgtcttttagccattggcacgtcatttattcctgtaaagagggtcatcgctcatctttttgttagtcacatcttgcataggagaggcaagccctgacacatacaaaccccagaagagaccattggatcagacgtgtgactcagcagactccagctgtagccaaatccacacatctttcaagtctaaagagttttggttacttgaatttactgagaagactgagcaaagggaagtttagtgatatcacgttaaaattttatgaagtccaaaagaatgctagatttccaaatttacttgtgagagacaaaaggatacaagtgtgtgtcattgtgtacataaagtttcggtctcacccctgtacaatgacctttatttgcaatagatggcattcctggtaagttgcttctgagttggatttgtgcaaaggatttcccactgacttagcctatgatctcttcacttctttggttttttgtgtgtttgttttttggttttgttttgagacagggtctcactgtatcacccaggctggagtgcaatggcataatcatagctcactgtaacctggaactcctagtctcaaacaatccttctgctcagcctcccacgttgctgggaccacaggcacacactaccatgtctggataattttaaaaatcttttcacttctgatttttcattgccaagggcttctagtaatggtgccttaaattctctgccactgggaccacttggtcaaggtactgatagttttataagctagaataaatatcgtaaaatggctttgaagttgaaaggaattttggggggggaatccttttatgaagaatttttttttttttttacagtttgagaggaaaaataatgtattttgagaatgtgttttccttaatatttgttaaatgagtagactgtattcttaaggtttagaaaggacagaaacaagtttgtgcttagttcttctgaattagttgatatcccttgttgctgttcacaatacacccactcccagccctccgtgatggagataactctgttccccacaactagggcttgcccactctcatggtacttctgatgtttaattcttttggctgtgtctgcatttcctcrtttacttttaatttgcttatccctagaacataccttttgagtgcctaaacttttttatcttcctgtcctgaagacaaaaatttaatctgtgaattaaacccatggagaagtatcatttatgaagggattg

SEQ ID NO: 3276 - DNA, 601 bp, Homo sapiens
tatagaaggctcactgtggatccagaactttactgaaaattctacaagaactgaatgtaatcattcctcacatcaacactatgaggtaacgaactactgttacccctgctttacaggtggggaaatgaggcccagataccaagtagctgtactaaaagcacagagatttaacctcctggaccttattcaccagaacgcaagccaaacctccatatayattttacttacttcccaaaattttatgtgtacatcaagagctgatcataaatagaaggtcaaagtgacctattgtgacatcaaatcttggagccactttaatgtgacttcactaaattgccttcgtccagtgcctcacagacagcatcccagcacatcatggagagctaagtgacagaacaggcagctcctcttctccctggtgaggccccttctgctgtgccctggctctcttttgcccctcatttgtccatattcctctctggtttgctccaaactcctcctcctaccttcaattaagatggtgctttagaacaatacaaggtaagatctcttcttcataaaaacagagaactcatcacacctcaggaggtgcagaagccaa

SEQ ID NO: 3277 - DNA, 244 bp, Homo sapiens
  misc_feature (1)...(244): n = A,T,C or G
tggtatgtccaaaaggagtgacagaaagtgtggagggaatttggactcacrttgatagtcactgcaatggggcctaaacatgctaagcaccttccacacgagaggtatagagagccagcaaaagctcgactcttccatctaacaagcaccacaaacctagagtcatgctctacttttttggagaaaacatgttggcttcccactgagcctgccatcatgaggcacaatagtgggcatnttggtg

SEQ ID NO: 3278 - DNA, 609 bp, Homo sapiens
ctgggctcaagggatcctcctgcctcagcctttcgagtagctgggaccacagccatgcaccaccatgtctggctaattttttcaattttttggtagagatgggatcttgctacattgccttgctacattgctacattgcctggtctcaaactcctggcctcagtaagagcaatccttccgcctcaacctccaaaggtgttgggattacaggcatgagctaccatgcccagctcatcttacccttttaaaaaatctaacagatacacaacagcacttcctatatgccagatgctctttctaagcactttataaaacattaactcaattagtgctcacaacaatcctatgacataggtacaattattactyacattttaaagataaggaaattggggcacagggaggttaaccaactcacccaaggtcagctagtgacctaagttcagaatttgaacttaggcaagtctagctccagagtacacactctcaaccacatgttatgctatgtcccatcaaccaggggatctgccctcgtaacatcctgaaatccccaaacattttccctgtgaaatgttaatatcatgtacctcaaatgtattttttgtcaca

SEQ ID NO: 3279 - DNA, 604 bp, Homo sapiens
tatctatcwatctatctatctatctatctatctatctatctatctatcatctatctacctatcatctgtctttcatgtatctaacctataatctattatttttctatcatctatctagttagatagcttataaaatctagaccaaaagttatttgtataggaactctgttgcagacatttcatttggaagggacccatgggaaagagtctgcatgaaggaggtggaatgaaaagaccataattttaggtagggaaggactgggggttcaagctcacttaccaactctgtgactttgggacaaataaataactcctctgctcttcagtttcctttaacaaaaggaactgtcataaagattgacagaatacatgcaaaacacaaggcctagaacctggaacaaaatagatcaatacatactatttttaaaatccttttctttttccctttctctttgggaacataataatcattcaataaattttcattaaaggataaatgactgctactgtataagcaacttttaaatcaatttgttaattatcatctccttatcatcatttttttcataatctttcagcatcctaccttttaaatttctctaaa

SEQ ID NO: 3280 - DNA, 598 bp, Homo sapiens
ttttttcttataaaagtcaaatgttatgataggctcaccaactgggaaaacctaactctagctgacccagtatcattaatgctcaaattctaaaatctaccaggtttaactaacatatgagagcttagacagtagccaattaaatcatctagtatgagattaagaagataaagtggaaaaagcagcactactgtaggagaacttcctgagcgggaagtggcagcaaagtgatcacaagaactgctatgaccaccagccatcccacactatccaaccaaactccacrtgcctcccgaggccatggtctgaggggtttgtgcaagaggactgcggaagacagagggataccagcagcctactctgcatgccaaggaaaagccaaggatagacttttgcacgtttaatcgtatttcttcatttgtccaccagtaaatgtgaaggaaaaagttgtcccagatcctccataggaaattcttacttataattggattaaaccttaagtttgagaacgactcacagtattgcagaggaagagggaaaaggtaataaaaattcaaaatgcaatgaagcctaatatgtactctttcttgcaaaaccc

SEQ ID NO: 3281 - DNA, 598 bp, Homo sapiens
ttttttcttataaaagtcaaatgttatgataggctcaccaactgggaaaacctaactctagctgacccagtatcattaatgctcaaattctaaaatctaccaggtttaactaacatatgagagcttagacagtagccaattaaatcatctagtatgagattaagaagataaagtggaaaaagcagcactactgtaggagaacttcctgagcgggaagtggcagcaaagtgatcacaagaactgctatgaccaccagccatcccacactatccaaccaaactccacatgcctcccgaggccatggtctgaggggtttgtgcaagaggactgcggaagacagagggataccagcagcctactctgcatgccaaggaaaagccaaggatagacttttgcacgtttaatcgtatttcttcatttgtccaccagtaaatgtraaggaaaaagttgtcccagatcctccataggaaattcttacttataattggattaaaccttaagtttgagaacgactcacagtattgcagaggaagagggaaaaggtaataaaaattcaaaatgcaatgaagcctaatatgtactctttcttgcaaaaccc

SEQ ID NO: 3282 - DNA, 598 bp, Homo sapiens
ttttttcttataaaagtcaaatgttatgataggctcaccaactgggaaaacctaactctagctgacccagtatcattaatgctcaaattctaaaatctaccaggtttaactaacatatgagagcttagacagtagccaattaaatcatctagtatgagattaagaagataaagtggaaaaagcagcactactgtaggagaacttcctgagcgggaagtggcagcaaagtgatcacaagaactgctatgaccaccagccatcccacactatccaaccaaactccacatgcctcccgaggccatggtctgaggggtttgtgcaagaggactgcggaagacagagggataccagcagcctactctgcatgccaaggaaaagccaaggatagacttttgcacgtttaatcgtatttcttcatttgtccaccagtaaatgtgaaggaaaaagttgtcccagatcctccataggaaattcttacttataattggattaaaccttaagtttgagaacgactcacagtattgcagaggaagagggaaaaggtaataaaaattcaaaatgcaatgaagcctaatatgtactctttcttgcmaaaccc

SEQ ID NO: 3283 - DNA, 606 bp, Homo sapiens
gtcagaattgagaggtggggaaggaaggaaagatgacaaacacatatcaattgcccattaagtgttaagcactttgcatatgttatttcattttattctaacagccctgcaaagtaagtattatttcatctcattttacagattcaaaccctacctgtccttgcaatactaccactttattctttctcatacaccagtttattcaaacttcagctactgtctcctatgtggatgcattctatattatttagaatggaggttccttgagggcagtggcatgtctaacttctctctgaccatctcagtgtctatctgactgtataaagcccccagtggctttatacagagaaaaaaaagcaataaggagatgtttcttgaatatcaagtcctacaaatacttttttaatccagccaatctcctgcctcacacaaaatacaacttgcactgtcctttcatctttccctgtatctcacactattgtgctgtgcccccttgggataactcattgcctagctaggttcatcatctctctcaaagacatagatcaaaatttattccaycaagcagccatccctccatataaatcatatcactccctgttttgt

SEQ ID NO: 3284 - DNA, 990 bp, Homo sapiens
acaaatgagcaggggtggggtgagggaaggagagagaagtgcccccaggggacaactggcaatgtctgcacacattgttggttgtcacgaatgggagtgtgctactgtctgtcatctactgggtagaggccagagatgctgctgaacatctcacattgtacaggactgttgcccacgacaaagaattacccaatccaaagtatcagtagtgctgaggttgagaaagccagctctaagaggtaatgtatttttattaaaaactcctttgttccataggtttcagtttaaattccaggcactggtcaggctgaatggagctgtgttttggagcagataaccatcaaatcacatcccaagaaggtacctatcttccattcatatataactagttctaactgtcagaataaacattagctgaatgactactgatgttttatttggttggggttttctcttttttatgtttacaatataaatgtaaccccccaaagatgagtttaacaagaaaaaaaatactcattgtcatatttgcttcagatagatagatagatagatagatagatagatagatagatttttttttttttttttttttccgagatggagtctcactctgtctcccaggctggagtgcagtggtgcaatctcggctcactacaacctctgcctcccaggttcaagcgattctcctgcctcagcctcctgagtagctgagactataggggcrcaccaccacgcccagttaattttcgtatttttagtagagaccgggtttcaccatgttggccaggatggtctcgatttcttgacctcgtgatccgcccgcctcagcctcccaaagtgctgggattacaggcatgagccactgcgcccagcccaggtatattttaaagaaaaaaaattataaatacagttaaagcccctcctcaccacctcttgctctccctcctgaagataacctgtcccagccaggcgcaatatactgcccta

SEQ ID NO: 3285 - DNA, 1257 bp, Homo sapiens
tgcattaaaagacatgagattttgtatctaaattttaaaactttaccaaaaaaatgagagcgttgataaatgaatcaagcatggcaaaatctcgacaaatgttgaatctcgtgatatggggctcatttactattttctctacttttgtgtatgtctgaaaattgtcatcatcatcatcatcatcatcatcagacacaatattcacaaatagggatagactaatgcaatcagggggacatttggccatgctaaagaaaaactcagctgggtgtgggggctcatggctgtaatcccagcactttgggagacggatgcagatggattgcttgagcccaggagttcaagaccagcctgggcaacatggtgaaacctagctgtatattttttcaattctttaaaatatatttgaaaaaaaagaaaaagaaaaactcagctgggcatggtggctcacacctgcaatcctagcacctagggggccgaggcaggagaatcacttaagaccatcctgaggagttcaagaccatcctgggcaacatagtgagacctcatctctatttaaaaattaaaaaatgggctaggcgtggtggctcacacctgtaatcccaacactttgggaggctgaggcaggtggatcatttgaggtcaggagtttgagaccagcctggccaacatggtgaaaccccatctctactaaaaatacaaaaattagccaggtttggtggtgcatgcctgtaatcccagatacttaggagactgaggtgggagaatctcttgaacccaggaggcagaggtttcagtgagccgaaatcacaccactgcactccagcctgggcaacagagccagactccatctcaataataataayaataataataataataaatatatacaaaaattagccaggcgtggtggcacaccctgtaattccagctactcaggaggctgaggcaggagaattgctggaacccgggaggcagaggttgcagtgagccaagattgccccactgcactctagcctgggtgatagagtgagaccctgtcttaaaaaaataataataatatatattatgtattaatcatatatatttcacatactaatacataatatttcatatatatatacatacacacacacacacacacacacacgcaaaataaaaaagaaagccccaacctataatccttccaaccccataactgaattatgttgctctctacaagtagctagacaagttcctgtattttagcaataagat

SEQ ID NO: 3286 - DNA, 1257 bp, Homo sapiens
tgcattaaaagacatgagattttgtatctaaattttaaaactttaccaaaaaaatgagagcgttgataaatgaatcaagcatggcaaaatctcgacaaatgttgaatctcgtgatatggggctcatttactattttctctacttttgtgtatgtctgaaaattgtcatcatcatcatcatcatcatcatcagacacaatattcacaaatagggatagactaatgcaatcagggggacatttggccatgctaaagaaaaactcagctgggtgtgggggctcatggctgtaatcccagcactttgggagacggatgcagatggattgcttgagcccaggagttcaagaccagcctgggcaacatggtgaaacctagctgtatattttttcaattctttaaaatatatttgaaaaaaaagaaaaagaaaaactcagctgggcatggtggctcacacctgcaatcctagcacctagggggccgaggcaggagaatcacttaagaccatcctgaggagttcaagaccatcctgggcaacatagtgagacctcatctctatttaaaaattaaaaaatgggctaggcgtggtggctcacacctgtaatcccaacactttgggaggctgaggcaggtggatcatttgaggtcaggagtttgagaccagcctggccaacatggtgaaaccccatctctactaaaaatacaaaaattagccaggtttggtggtgcatgcctgtaatcccagatacttaggagactgaggtgggagaatctcttgaacccaggaggcagaggtttcagtgagccgaaatcacaccactgcactccagcctgggcaacagagccagactccatctcaataataataacaataataataataataaatatatacaaaaattagccaggcgtggtggcacaccctgtaattccagctactcaggaggctgaggcaggagaattgctggaacccgggaggcagaggttgcagtgagccaagattgccccactgcactctagcctgggtgatagagtgagaccctgtcttaaaaaaataataataatatatattatgtattaatcatatatatttcacatactaatacataatatttcatatatatwtacatacacacacacacacacacacacacgcaaaataaaaaagaaagccccaacctataatccttccaaccccataactgaattatgttgctctctacaagtagctagacaagttcctgtattttagcaataagat

SEQ ID NO: 3287 - DNA, 1257 bp, Homo sapiens
tgcattaaaagacatgagattttgtatctaaattttaaaactttaccaaaaaaatgagagcgttgataaatgaatcaagcatggcaaaatctcgacaaatgttgaatctcgtgatatggggctcatttactattttctctacttttgtgtatgtctgaaaattgtcatcatcatcatcatcatcatcatcagacacaatattcacaaatagggatagactaatgcaatcagggggacatttggccatgctaaagaaaaactcagctgggtgtgggggctcatggctgtaatcccagcactttgggagacggatgcagatggattgcttgagcccaggagttcaagaccagcctgggcaacatggtgaaacctagctgtatattttttcaattctttaaaatatatttgaaaaaaaagaaaaagaaaaactcagctgggcatggtggctcacacctgcaatcctagcacctagggggccgaggcaggagaatcacttaagaccatcctgaggagttcaagaccatcctgggcaacatagtgagacctcatctctatttaaaaattaaaaaatgggctaggcgtggtggctcacacctgtaatcccaacactttgggaggctgaggcaggtggatcatttgaggtcaggagtttgagaccagcctggccaacatggtgaaaccccatctctactaaaaatacaaaaattagccaggtttggtggtgcatgcctgtaatcccagatacttaggagactgaggtgggagaatctcttgaacccaggaggcagaggtttcagtgagccgaaatcacaccactgcactccagcctgggcaacagagccagactccatctcaataataataacaataataataataataaatatatacaaaaattagccaggcgtggtggcacaccctgtaattccagctactcaggaggctgaggcaggagaattgctggaacccgggaggcagaggttgcagtgagccaagattgccccactgcactctagcctgggtgatagagtgagaccctgtcttaaaaaaataataataatatatattatgtattaatcatatatatttcacatactaatacataatatttcatatatatayacatacacacacacacacacacacacacgcaaaataaaaaagaaagccccaacctataatccttccaaccccataactgaattatgttgctctctacaagtagctagacaagttcctgtattttagcaataagat

SEQ ID NO: 3288 - DNA, 1257 bp, Homo sapiens
tgcattaaaagacatgagattttgtatctaaattttaaaactttaccaaaaaaatgagagcgttgataaatgaatcaagcatggcaaaatctcgacaaatgttgaatctcgtgatatggggctcatttactattttctctacttttgtgtatgtctgaaaattgtcatcatcatcatcatcatcatcatcagacacaatattcacaaatagggatagactaatgcaatcagggggacatttggccatgctaaagaaaaactcagctgggtgtgggggctcatggctgtaatcccagcactttgggagacggatgcagatggattgcttgagcccaggagttcaagaccagcctgggcaacatggtgaaacctagctgtatattttttcaattctttaaaatatatttgaaaaaaaagaaaaagaaaaactcagctgggcatggtggctcacacctgcaatcctagcacctagggggccgaggcaggagaatcacttaagaccatcctgaggagttcaagaccatcctgggcaacatagtgagacctcatctctatttaaaaattaaaaaatgggctaggcgtggtggctcacacctgtaatcccaacactttgggaggctgaggcaggtggatcatttgaggtcaggagtttgagaccagcctggccaacatggtgaaaccccatctctactaaaaatacaaaaattagccaggtttggtggtgcatgcctgtaatcccagatacttaggagactgaggtgggagaatctcttgaacccaggaggcagaggtttcagtgagccgaaatcacaccactgcactccagcctgggcaacagagccagactccatctcaataataataacaataataataataataaatatatacaaaaattagccaggcgtggtggcacaccctgtaattccagctactcaggaggctgaggcaggagaattgctggaacccgggaggcagaggttgcagtgagccaagattgccccactgcactctagcctgggtgatagagtgagaccctgtcttaaaaaaataataataatatatattatgtattaatcatatatatttcacatactaatacataatatttcatatatatatayatacacacacacacacacacacacacgcaaaataaaaaagaaagccccaacctataatccttccaaccccataactgaattatgttgctctctacaagtagctagacaagttcctgtattttagcaataagat

SEQ ID NO: 3289 - DNA, 1257 bp, Homo sapiens
tgcattaaaagacatgagattttgtatctaaattttaaaactttaccaaaaaaatgagagcgttgataaatgaatcaagcatggcaaaatctcgacaaatgttgaatctcgtgatatggggctcatttactattttctctacttttgtgtatgtctgaaaattgtcatcatcatcatcatcatcatcatcagacacaatattcacaaatagggatagactaatgcaatcagggggacatttggccatgctaaagaaaaactcagctgggtgtgggggctcatggctgtaatcccagcactttgggagacggatgcagatggattgcttgagcccaggagttcaagaccagcctgggcaacatggtgaaacctagctgtatattttttcaattctttaaaatatatttgaaaaaaaagaaaaagaaaaactcagctgggcatggtggctcacacctgcaatcctagcacctagggggccgaggcaggagaatcacttaagaccatcctgaggagttcaagaccatcctgggcaacatagtgagacctcatctctatttaaaaattaaaaaatgggctaggcgtggtggctcacacctgtaatcccaacactttgggaggctgaggcaggtggatcatttgaggtcaggagtttgagaccagcctggccaacatggtgaaaccccatctctactaaaaatacaaaaattagccaggtttggtggtgcatgcctgtaatcccagatacttaggagactgaggtgggagaatctcttgaacccaggaggcagaggtttcagtgagccgaaatcacaccactgcactccagcctgggcaacagagccagactccatctcaataataataacaataataataataataaatatatacaaaaattagccaggcgtggtggcacaccctgtaattccagctactcaggaggctgaggcaggagaattgctggaacccgggaggcagaggttgcagtgagccaagattgccccactgcactctagcctgggtgatagagtgagaccctgtcttaaaaaaataataataatatatattatgtattaatcatatatatttcacatactaatacataatatttcatatatatatacatayacacacacacacacacacacacgcaaaataaaaaagaaagccccaacctataatccttccaaccccataactgaattatgttgctctctacaagtagctagacaagttcctgtattttagcaataagat

SEQ ID NO: 3290 - DNA, 2308 bp, Homo sapiens
atccagtttcaagtttcgtttataaatctttccttgtttacattctttcttaaaggctaacaactgtaattataatatctctgttaaattaaaataatctttgggaacatcaaacatgtaataggtaatatctttaggggtcactgatgtgtgttcaactttccagttgtgctacaataattggacctatatgaaaggacttttcattttttttaaattaattttcatagttttgttttccctattatttattattattgttgctattggtgtgcacgcctgattcttgtagccaattatatatcggtatgctctaatctgttatgagtcgggagactagaggaccaggctttttgtattgggtctacaatgagaatacctaggctataaactacgttatgacagtgtatgatgaaattaagctatcctttttgttttctcagtacttctcagtatttaaagtcatcagaaaaaaatgacatttgtttaaataaaaagacacaattgtaagaataccagttggttgttgatattttaggttatttctttaaaaattatgattgcctgttctctacattaaaagaacattgctgggcagaataactggattcaaggtaatgtctttgtcttcacatagtctttactctcaagtgactccagtgagtcagcaaaacatgtgtgggcttcagaaagaacgattccaccataatttgcaaattagaacagtgggatatgctatgtactactttccaagtctgcacttcacatatcattttaatgacccatcaatagaaaatacgtgtcatgatttatctttccagtcatggcaatttaggtaaaaggttggaaaaatacctatamgaatagtggtattagaaaggaacagggacaaagataagctagggttaccttttgaaaaaaaatggggagaatcttgacaaaagattactgggaagcatcaaatttcaagtatttaaatctttaaaatgcatcctcatagtttcatattgtctttttttttcctttctatgtactctctggaccaaacagggtatgtctgtctgaataactccatgacttactcaggtaatcgtatcagaaaactttctggcaaagtttagatttaggggatctatggagatttctgtatccataaccactttctgcaatgcacacatcttaatgcacatatctaatgcagtcagtcacattatcattttagctttctttgtgaatgagaaaaatttcatttcccctcctgtttgcagatacataaagtgataaatgtgatggaatgctttgttagcaccctgccacatggaatagtcctcctggtttgactctattttctcctcttcctcttatttaaaacttaagtgatcttctttggtatagtactgggtagaatatcaatttaaaaataaaataaatataatattttaaatgacgttaatgctgttctgctgatattacttccaaaataaaaaagtagtcgggactaatcctgccaagtttcactgtaaaattaagtattactgtcttaattatctgtgctagtatggaaaataaatggactgcacacatgattatggtgattaaggatgttgtatcattctcattcacttttagcctatttttttcttttactttttgataactaagaaccgaatacttgtttttttgttgctttaaatctgagattcttaaataatgcaggcaaaaataatcactactaccaataccaatccacctccagaaaatgggtatttctgccgtatgaacaactagagaaggtacacctgcaagcttccatcataaacaaccagggaatgtaaaagagcagcctttttgtagcaaagccatactgtaactgaaatagcaatcgccttccagagaacaaaggcactgccatgaaaagtccaagtatttgctctttggcaacattcccccaattctgcagacatgtttagaaagaatgcctacacctcctattcagaaattaaaaggcagctcttctaagctttgaaaggtaatatttgggttgtatcagagtctggcattttatttctttgttctgcttgggatttcatattgacatacaaatcatttagtttctttaagtattttaaagtaatgtctttaaaatactctttaagtaattcttttaagtgctttaagtattaaatgtataagatagctttagatgtggggattaaaagtgacatgagaggaaattgttatcatttgagaggttttatttaaacatcatgaactcacatagtattcactaagacttttatttttaagg

SEQ ID NO: 3291 - DNA, 1025 bp, Homo sapiens
  misc_feature (1)...(1025): n = A,T,C or G
agcttcacagctcgctagtaccaagtttaggctctagttcaaatattttgctgtattttaaatataagaactcgattttatcaatgagtccattagtaagagcctgaaggattaatcaactttgaccaaacacttaagacgctgatttttaaactgcagcccaatatactaactaacctatagtgaatagttagttctgtccctgagaccaggagacacccttctgggtgtgaggtccaaacaggaatatactcggagttagtgaggattaagtttggtcgcaggctacagcanacccagactaagagtgacttgaaccccaaggctttattctctcacgcacaaattcagccgtgtgcattccagtacagccagttcacaaaatcatcagggactccctgcagcttgcagcttcccantgtctggagtgaggcttcgatcancatggagttccagccactgctttacatcacaacgggaggaaggaggaaagagaaggagaaaagttttgccctccctttaagggcacttccaaaagctgcatattacactgtccctaagtcccactggccaaaattcaaccacatggccttatccagccacaagaggggctggaacatgaagtctttactcyagatggtgtgcgcccctcactgagggctgtggggagaacagatagtggacaagtagcaatctctgccacaagttatgagaaaaacaaacaggcaatatagaacccatgtaatgtgagggtattcacatttgacttgctccatcttctctatttttaagagcaatttcatcttaaaaacaaacaccaattgcatggaaataaaaacacctcctctcctagtcagtgcaaagataaatctctcagattatacctgcagccgttcttcttttctctacattatttgcccactttctaagaaacttcatcaagtaaaacctcccctgttgacttgccgtaattcccaataactcatctgatgttagttttacttttgacaacttttacagatgca

SEQ ID NO: 3292 - DNA, 1025 bp, Homo sapiens
  misc_feature (1)...(1025): n = A,T,C or G
agcttcacagctcgctagtaccaagtttaggctctagttcaaatattttgctgtattttaaatataagaactcgattttatcaatgagtccattagtaagagcctgaaggattaatcaactttgaccaaacacttaagacgctgatttttaaactgcagcccaatatactaactaacctatagtgaatagttagttctgtccctgagaccaggagacacccttctgggtgtgaggtccaaacaggaatatactcggagttagtgaggattaagtttggtcgcaggctacagcanacccagactaagagtgacttgaaccccaaggctttattctctcacgcacaaattcagccgtgtgcattccagtacagccagttcacaaaatcatcagggactccctgcagcttgcagcttcccantgtctggagtgaggcttcgatcancatggagttccagccactgctttacatcacaacgggaggaaggaggaaagagaaggagaaaagttttgccctccctttaagggcacttccaaaagctgcatattacactgtccctaagtcccactggccaaaattcaaccacatggccttatccagccacaagaggggctggaacatgaagtctttactctagatggtgtgcgcccctcackgagggctgtggggagaacagatagtggacaagtagcaatctctgccacaagttatgagaaaaacaaacaggcaatatagaacccatgtaatgtgagggtattcacatttgacttgctccatcttctctatttttaagagcaatttcatcttaaaaacaaacaccaattgcatggaaataaaaacacctcctctcctagtcagtgcaaagataaatctctcagattatacctgcagccgttcttcttttctctacattatttgcccactttctaagaaacttcatcaagtaaaacctcccctgttgacttgccgtaattcccaataactcatctgatgttagttttacttttgacaacttttacagatgca

SEQ ID NO: 3293 - DNA, 622 bp, Homo sapiens
  misc_feature (1)...(622): n = A,T,C or G
tcgccagtgccttataaaaatgaaagacacataaaacgtattgttggcttgagctgcctggagagggctcagttatttgtgagggaccgttatctttgttggtacagccctgcatgcttcaaatcccctgtgtttcagatctgtgtctatacccatctgtggaaggaagtgaagacttgagtctcctcactggcatgtggccttaactggctgatgctcacaggtaacccacagcccatgtgcaggaaactgcacamacaaatagcccttctgctgctgagaggcttttctgactatgtagatggtaatctcagctttttcctgcttgcagagtgatgagcatccctccaggctccagtagaggcacttgacaagggctgcatatggatattacaaagggaacaggaagtacaccccagtaattaatattatatcttgtccccaaagacattctgctccctttatatgttagttgactgatcatctgactcctctgagaggtaatgatgaagttaatataaacactgagcttntatacctaatttctactattaaaagcaggggaggagggagggcagatacccacacagacgcagaaagctgactgttaatgcttaagaga

SEQ ID NO: 3294 - DNA, 569 bp, Homo sapiens
tgcaawcagggcacaatgacactcactaataacaactgaaccactgcacccgccataatgctgtgcagctcccagactcaccaccgccgagccccagcaatgtggaacggcgtccctgtgcagaggctggctcccctccacagctgcatctgttccccattctcccctcagagcatccactgtgaagcataacccctgatgaacacatgtagaccaaaacttggtcgtattttccccctgaaattctcagatcctaaaattctagttctttatttctaatacttagacaccacgagccattgaaacaattctgtggttcagaagaaatcatgttcattttattttcattaaaagcattttccactgacagaaacagttgaaagaggctggtctgacttttgtgacatacaaaatatatttttatttttgtgataggtggtgaagaaattgaatctttaatacagacgatatgaatgcaaagattgtccattttgggggagctgtgacaccccctcaattgtattctttttcaatgcctagcttcatccccatagtcaagcttgtcttgt

SEQ ID NO: 3295 - DNA, 597 bp, Homo sapiens
ggcctttgtgtattttaactttgaaaatattgtcgaattgacctccaaaattttaatccatttataacatcccccattatgtattatagtgtatattttcttaccyttttgtcaaaatgatataatagtcaactttcaaatctttgcaagactgatagatgaaaaaataaggcattttcttgtagtcttaataagtgcatttctcttattgcctgaagttggacattgtttcatatgtttaaaggtcatttccttttctttgaattgtctgttcatgttcttggctcattcttcttttgggttaagattctgttttaaaaataaaacaattcttgaaagtattatgtcaaggaaagaaatcttattcaagtcaaactttgtagacaggaaaaaaaaaaaaagaaacaaactggtgttgatcaaaggttttgatgactttaccagaaacaagaattttccccacttagcttcctttgataccatatcctgagagattcacacaagtctatgtgatctataattaatattttggtgacacatcttccctattgaataatcaattactggctcaaactctaaattaaaaactttggaagt

SEQ ID NO: 3296 - DNA, 698 bp, Homo sapiens
tcccgggttcacgccattctcctgcctcagcctcccgagtagctgggactacaggggcccgccactgcgcccagctaattttttttgtatttttagtagagacggggtttcaccgtgttagccaggatggtctccatctcctgacctcgtgatccgcccacctcggcctcccaaagtgctgggattacaggcatgagccaccgcgcccggcctagtctgttctattcttaaatgtttcttttactcataattttaaggaaccataagtagcatgatcaattttatggactgcaattaaccatgttggtttctgagaagtttcaaaaaaaaaaaaaaacttttgatgagttttttgtaagcacaattaagtagactgacatttatmaatgcttatagtatgtgaattcataaactgaaattgtgtataaacatattccagaaaagccatctcctcaaattctttcattttgtttttgttcaaagtaatcataaatgatcagtgatggtataaagaaaactttttattaaggataaaagagcttcattaaaaaaatcctgtggtaacaggtagaataagaaatctagccagttcagtcacattaaagagataagaaagtggagtcaatataagcaatgatagttgatcacaatttatatgaaaaaggcttttcaaataatggaattatctgtttgttttc

SEQ ID NO: 3297 - DNA, 1125 bp, Homo sapiens
cattcagtgaaatctcctggtacacagtagatatcgttatataccaggtatttcctattgttttaggsagctctagccacagtcagtaaattttcctgggtaataacagacctcaatttcccaccacctttccactggttcactgggcccttcaggctgaccttctctttgttcctggataatgcttcaaggcctttgcctttgctactccctcagcctggggtactcttccctagctgcagggcttacttctttctgtttctgttgtatgttgccttttcagagtagtcacctgtataccttatctaacatagtatgtccctatcctattctttttgtgtcctggtgattaatcctaatttgtaattattttattttctttcttgaatacaaaatccacaaacatagggatttgtgttttgttctctgtggtttcactggcatacagaaccatgtctggtataataagagatcaattaagttttttaagaaattaatgtagataaagacctttgttttttaacttttcaaaatgaacccatattctacatatgattctgcaactggatatttcccacataataatatacattgactttcattgtgcattagtaactatagacctattttttacatttccattgtttttaaaatttccaactaagttcagggatacatgtgcaggatatagaagtttgttacatgggtaaacgtgtgccataatggtttactgcacaaatcatcgcatcacccaggtattaagcccagcttccattagctattcttcctgaccccctcccttttcccaccaaaaccctcccacaagccccagtgtgagtttttccacccccatttgtccatgtgttctcatcatttagctcccacttataagtgagaacacgtgatattttgttttcagttcctgtattaatttgctaaggaacatggcctccagctccatccatattcctggaaaaaatatggtctccttcctttttatggctgcatagtattccatggtgtatatacacatatacaaatgtatatgtacattttctttatctaatctgcaattgatggaaatgtgggttgattccatgtctttgctattgtgaacagtgctgc

SEQ ID NO: 3298 - DNA, 1125 bp, Homo sapiens
cattcagtgaaatctcctggtacacagtagatatcgttatataccaggtatttcctattgttttagggagctctagccacagtcagtaaattttcctgggtaataacagacctcaatttcccaccacctttccactggttcactgggcccttcaggctgaccttctctttgttcctggataatgcttcaaggcctttgcctttgctactccctcagcctggggtactcttccctagctscagggcttacttctttctgtttctgttgtatgttgccttttcagagtagtcacctgtataccttatctaacatagtatgtccctatcctattctttttgtgtcctggtgattaatcctaatttgtaattattttattttctttcttgaatacaaaatccacaaacatagggatttgtgttttgttctctgtggtttcactggcatacagaaccatgtctggtataataagagatcaattaagttttttaagaaattaatgtagataaagacctttgttttttaacttttcaaaatgaacccatattctacatatgattctgcaactggatatttcccacataataatatacattgactttcattgtgcattagtaactatagacctattttttacatttccattgtttttaaaatttccaactaagttcagggatacatgtgcaggatatagaagtttgttacatgggtaaacgtgtgccataatggtttactgcacaaatcatcgcatcacccaggtattaagcccagcttccattagctattcttcctgaccccctcccttttcccaccaaaaccctcccacaagccccagtgtgagtttttccacccccatttgtccatgtgttctcatcatttagctcccacttataagtgagaacacgtgatattttgttttcagttcctgtattaatttgctaaggaacatggcctccagctccatccatattcctggaaaaaatatggtctccttcctttttatggctgcatagtattccatggtgtatatacacatatacaaatgtatatgtacattttctttatctaatctgcaattgatggaaatgtgggttgattccatgtctttgctattgtgaacagtgctgc

SEQ ID NO: 3299 - DNA, 1125 bp, Homo sapiens
cattcagtgaaatctcctggtacacagtagatatcgttatataccaggtatttcctattgttttagggagctctagccacagtcagtaaattttcctgggtaataacagacctcaatttcccaccacctttccactggttcactgggcccttcaggctgaccttctctttgttcctggataatgcttcaaggcctttgcctttgctactccctcagcctggggtactcttccctagctgcagggcttacttctttctgtttctgttgtatgttgccttttcagagtagtcacctgtataccttatctaacatagtatgtccctatcctattctttttgtgtcctggtgattaatcctaatttgtaattattttattttctttcttgaatacaaaatccacaaacatagggatttgtgttttgttctctgtggtttcactggcatacagaaccatgtctggtataataagagatcaattaagttttttaagaaattaatgtagataaagacctttgttttttaacttttcaaaatgaacccrtattctacatatgattctgcaactggatatttcccacataataatatacattgactttcattgtgcattagtaactatagacctattttttacatttccattgtttttaaaatttccaactaagttcagggatacatgtgcaggatatagaagtttgttacatgggtaaacgtgtgccataatggtttactgcacaaatcatcgcatcacccaggtattaagcccagcttccattagctattcttcctgaccccctcccttttcccaccaaaaccctcccacaagccccagtgtgagtttttccacccccatttgtccatgtgttctcatcatttagctcccacttataagtgagaacacgtgatattttgttttcagttcctgtattaatttgctaaggaacatggcctccagctccatccatattcctggaaaaaatatggtctccttcctttttatggctgcatagtattccatggtgtatatacacatatacaaatgtatatgtacattttctttatctaatctgcaattgatggaaatgtgggttgattccatgtctttgctattgtgaacagtgctgc

SEQ ID NO: 3300 - DNA, 1125 bp, Homo sapiens
cattcagtgaaatctcctggtacacagtagatatcgttatataccaggtatttcctattgttttagggagctctagccacagtcagtaaattttcctgggtaataacagacctcaatttcccaccacctttccactggttcactgggcccttcaggctgaccttctctttgttcctggataatgcttcaaggcctttgcctttgctactccctcagcctggggtactcttccctagctgcagggcttacttctttctgtttctgttgtatgttgccttttcagagtagtcacctgtataccttatctaacatagtatgtccctatcctattctttttgtgtcctggtgattaatcctaatttgtaattattttattttctttcttgaatacaaaatccacaaacatagggatttgtgttttgttctctgtggtttcactggcatacagaaccatgtctggtataataagagatcaattaagttttttaagaaattaatgtagataaagacctttgttttttaacttttcaaaatgaacccatattctacatatgattctgcaactggatatttcccacataataatatacattgactttcattgtgcattagtaactatagacctattttttacatttccattgtttttaaaatttccaactaagttcrgggatacatgtgcaggatatagaagtttgttacatgggtaaacgtgtgccataatggtttactgcacaaatcatcgcatcacccaggtattaagcccagcttccattagctattcttcctgaccccctcccttttcccaccaaaaccctcccacaagccccagtgtgagtttttccacccccatttgtccatgtgttctcatcatttagctcccacttataagtgagaacacgtgatattttgttttcagttcctgtattaatttgctaaggaacatggcctccagctccatccatattcctggaaaaaatatggtctccttcctttttatggctgcatagtattccatggtgtatatacacatatacaaatgtatatgtacattttctttatctaatctgcaattgatggaaatgtgggttgattccatgtctttgctattgtgaacagtgctgc

SEQ ID NO: 3301 - DNA, 2196 bp, Homo sapiens
gtaatatctatatgtttatgtatctatagtaatatctatatatatttatatatatgttatatatatatacatatcatatatatttgtcctgtcatttctaaatttatactagttttaagtattgtaaatgtaaaaagtatatttyatttttaaaaatgttttttttttaattttaggaaagggtaaacagacaaacattctataatatgccatttctttatagaaatgtgtatgctaaccaaattactatcaatacttttgataattttgtaattttaatagaacattattttagataaaaatgtgaatttatttttgatgtaaacagttaagaaactttattttaaaatatctaaaataaaagtaaaaaagaatatattccttaaaaagttgagtgtaaactgatctactcatctataaagttgctctataaagttcaaaaacaaaccaatttcccacctgaatagactaggaaacatgagtgtgtgtgtgtgtgtgtgtgtgtgtgtgtgtgtgtgtgtgtgtagaggggagtatttaagttaataccataatttctgtgtatgctctaggttcttttctagttcatgcaatttgatatacaaaattgtataatattgtttctattttactaattatttatctcttctgatctcatattttaaattatattactaatgtctatatataactattatataactaacgtctataactacttgttttgaattatttaggttcaatagtagtatatttccgtcaagtaaaaatgccataaacaagatgaaatacttatatgctgaagacacattaccttttataaatttagaactacagcgttgtactcttaattgttatgcattatattagaagtccatgacagatgctatgggtgatagtcattaggtatttacaacacataaaaagaattttatagtacaatctcaatgagtaccaaccattttattaatgaagaaacttggctccctggttccctccatttgtgacccattcccttctcaatttttattccatactgtgtaaagaaaataggtgcaagtttctaaaaataacacttcttagaaatacaaataggcttcagtcaagtgagtgcatgtagaaagactgctccaacagtactatttttaagatagatttttttcttttttaaaaatagaaaaacatttctaaaagtttatccactccttccctccaatttccttcagcctccaatctcattttaataaatggcacccctttcactaactcaggcaaaaatctagtcagtcaactattctctctttccataacccagttataaaagccacaaaaccatatgcaaatccatcagctctttcttcagaatatctatcagctccaccttgctatctctatttcaagccacgaaagtccctatttgaatattgccatgtctttccatctgatgtccctgcttttcttcttgtcttcctcaagtatattttatatcagatataaaacaattttacatcttttaacctataaatcagatcactaatcttctttgctcaaatatctccaatggtttctcatatcaatcagaataaaattaaaagtccttatctagacctactacaaggcacttagaccatctatctgctacttttctgatatcatctcctaggatgtttcacttactcagatctggccacaggggccaccttacttgtctttgaacattgctataaaagtttcaaaatgctgattatcaatttatggatttatcttgtgtaccagtaacagactagcattgacctgtgtatgacactttgagtagcatcatttcaaaacattatattttttatcacttatcaccagctgccatattatatcttcatttaccatgtaagccctatgagggcaggaactctgttttgttcattactatatttatagcatttggaagtacttgacccatagtaggtactcaataaatatttaatgaatgaatggatggatggatggatggatggacgcataaatgaatgactgttgatattttggaattctggctagaattcctcattcattataacccaaatgttatttctgatgctcagaatgttaggaccagaaagatctttagagatcattaagtccagattatgcatatagatgagaaaacagcattcaagataagttaaagaactcagaaaa

SEQ ID NO: 3302 - DNA, 545 bp, Homo sapiens
aagtggttactgcagacactgcagcttgcatgcccacagtcatactcctcttttacatttttaacagatacattattttggtcccaactgcagtgtcatctgggaagtcraatgcctctttgaatgtgccgattgttaagtactataagctccagacctatcctctgttcttttctttatgattgttatggctggaattctgcaagccattcttttcctttgcccgctgactccctgttaggtcctgccaatagggagcattaaaggaagtgaagaagagacaagcaccttccagattgcttgctctaataattcgctcttcatctcagcatttggtttgagtaacagcagttgctaccagtttccaatcttttctgtatttcaagaactagcttcatcatgccagctcagaggtatcagtgccagatggctcaagttccctctacagaagtctgagtcccagctctgtaggatgttcctttgaactgttaaggcactagcaccagcagcaaacttctgttttaggcttgaactggtatctgacc

SEQ ID NO: 3303 - DNA, 623 bp, Homo sapiens
cctgcaacttctggacacacagtgtaactgctgtccccctcatgataaatcccatatgtcacctccttatttgcaagactggcttctaaattaaagtctccagctggttggcatgataaccctccagtagtgaagcaaggtattgagggagtggatttgtgactttaattctatgaaataatgagcttacaaagtaagaaatactctaggaatagaaagagtgtttataggtagcaggtggcaaacgataatttgtaaatgtccattaaagagtacttctttatatttacaccctactttagtacttaaatgtgcaaatggcaagagcaaatatattcttccaaatataattcaattatcactccactaataaaaatttctttatgccctcctcagagggagatattacagccttccatcaaaatagccaaatccaggacttctgaataatcattattccaagatcattctatccaagatcattactaatctagttttstcgtaagtgtctcttgttgctggatattctgtaaactatgagttaagagataaagtttcccaccatgaagatatcctatataaaagagaaaaagcaaaagggggagatatgctagaatagtcaa

SEQ ID NO: 3304 - DNA, 622 bp, Homo sapiens
caaattaatttcctctccaggttgctggctgcttagaggagcaggacaaatttacactcccaatcacataaaagattacctgtgggaacattatttaactctctgaccctttaaaagggccctggagaaaattcatcaagttgttagacacagaagctacaagaggggagtcaaagaattctcgtaattttccaacctgggtgatgtggagcgtgatgatgtgcctaaatagacacaggaaatgctgaggagtatggacgataattagttcatttggagtaaactgagtttgaaattacaactagcytgtggttgggaaatgcaggactgaagcacaggacacaagccagcataaaagcggaagatgtaatagttatttttttggagataatattgaagctgtaagattgttaagaaagagcttacaaagaagaatagatctctggtaacaatggtgcatggtggactgccggctgaagaaaacctcagactgaagatgggcacagggccactggcattaaactttggcgagattctgctgattgaagtagtggctcatacaatgtgtgtctgtgtgtgtgcgcgcgcacaagcgcgcatgtgcaggtttagtatgaatgca

SEQ ID NO: 3305 - DNA, 622 bp, Homo sapiens
caaattaatttcctctccaggttgctggctgcttagaggagcaggacaaatttacactcccaatcacataaaagattacctgtgggaacattatttaactctctgaccctttaaaagggccctggagaaaattcatcaagttgttagacacagaagctacaagaggggagtcaaagaattctcgtaattttccaacctgggtgatgtggagcgtgatgatgtgcctaaatagacacaggaaatgctgaggagtatggacgataattagttcatttggagtaaactgagtttgaaattacaactagcctgtggttgggaaatgcaggactgaagcacaggacacaagccagcataaaagcggaagatgtaatagttatttttttggagataatattgaagctgtaagattgttaagaaagagcttacaaagaagaatagatctctggtaacaatggtgcatggtggactgccggctgaagaaaacctcagactgaagatgggcacagggccactggcattaaactttggcgagattctgctgattgaagtagtggctcatacaatgtgtgtctgtgkgtgtgcgcgcgcacaagcgcgcatgtgcaggtttagtatgaatgca

SEQ ID NO: 3306 - DNA, 622 bp, Homo sapiens
caaattaatttcctctccaggttgctggctgcttagaggagcaggacaaatttacactcccaatcacataaaagattacctgtgggaacattatttaactctctgaccctttaaaagggccctggagaaaattcatcaagttgttagacacagaagctacaagaggggagtcaaagaattctcgtaattttccaacctgggtgatgtggagcgtgatgatgtgcctaaatagacacaggaaatgctgaggagtatggacgataattagttcatttggagtaaactgagtttgaaattacaactagcctgtggttgggaaatgcaggactgaagcacaggacacaagccagcataaaagcggaagatgtaatagttatttttttggagataatattgaagctgtaagattgttaagaaagagcttacaaagaagaatagatctctggtaacaatggtgcatggtggactgccggctgaagaaaacctcagactgaagatgggcacagggccactggcattaaactttggcgagattctgctgattgaagtagtggctcatacaatgtgtgtctgtgtgtgtgygcgcgcacaagcgcgcatgtgcaggtttagtatgaatgca

SEQ ID NO: 3307 - DNA, 601 bp, Homo sapiens
tgatcaaatatgtaatgtgctctcgtgcttccctctctagctaagaaaactgattgattcttgacaggagtatgaatggtgattcttgactgttgttctcccgctataccattcttcttwtctcccctaagccaattcatcattatttctggaaaaggaatattagggaatccaaataattcagctaaatctgaatgttgaaatgggcctagaatatagccaacagtgaagagccagatccactaattttattgttatatattgcctctcagtttggcagcccttatgtttttgtcattatttgattcattaaaatatattaagccagtggcttgagcaaaatcatataatatttcatgcaaaataacacaattattaaaaatcttcagactcttgctaaattgtacttccaccctacttccatcactgctcaaatttgacttttatatgttttttattattttcagaaatttattttcatggattcacagtttagtataatagacagccagcaacaaagtattgttttgtcagtgatgaatgaccaatacggtttccttaatactaataaaaaatggatgtacttttctgtcattacccc

SEQ ID NO: 3308 - DNA, 590 bp, Homo sapiens
tacacatctagctttcctccttttctttcttgtttctatgaggatgtacagttattagtatgtcagatatgaaggggcaacaagcatttcaattacattttcggattggttttgttgcttttcagttaaaaacctttctggtgggcccagcgtctgcaactgttgtgtcaatgaatgatcctagaatgtgtgccctagtctccctgtggcgtttctgtcttgaacatgctgtggctttatggctgtactgattggtgcacgggaaatcggtgacagattcaaggaggacgtgacaagctgagtctcctcctcgccagtgtgctctgccagttgccttccaagtattgggaggcctactgagtttttcctctattcctttgaaaatctgacagattacaaatcatttaacatcaaaactaatttttatttttgtgactgaattcaaagagcagtagaaacaatagcaactatttgctcctcaaactaatatactagcaaagatgccattagtaattcaaagtrgtttctgaaagacattctatgcagtggaaataagggatgagattttagatagtacttaggacgccaac

SEQ ID NO: 3309 - DNA, 1274 bp, Homo sapiens
tgcatcaccctattagtatttgtgataaatggtacttttgacattagtttctttaatgtttccacaaatctgatatttttgccagcatttattgttcagaagaaaaccccacatatacaaatttaatttaaaaataatgaccaatgttggaagaaaatgaagtaaagatacctataaaatttctgaagctttcccctcttaacaatgctttctcatttctgtttaaaccaaagggttctttatggactcagttgtgattctgctggggatatcaggtccttttactcaaacttctgctagaatttaatatacatgagaatcaattacagagcaagtttacttctctaatattacattgcccaaaagtccataccaagcttttagattgtatcggaacaaaatttctataaaagtgaatacacagtataaagcagaacactggagaaaatacagactttccttggacttgacgtcgatgctgtgctgaaaggcagtacggtctccacctattagacagagtgagatgagattgcatacagcctccgtgagagggtggagaagtggaaagattcctgcactacgtaacactggggaatgcagctggagtggaattgtcagttcatctctttcacttattgtctattttaccaagtagcaagtggccagtcatgtgatatgggattgcaacagtataaaacatgtcctcaaacttcttcaaatgataattttcctataaaattgattatagttaaaataacagcaggaatccatcccagcggcgtgctttgtttccacaaattgctgccacatggagagaggcaatgcagttactttccaagatgtgaatttccaccccttcccacttgaacatggccttccttcccaccttcactgggagggagagcagctcctccctcatcatttcataagmaccacatccagtactctgggccagtatccccctgtggattgtgagtgcacgcaagtagctagaatatctcaaggcaccaagttacccttaaacgtcgtgaaattgaggacacgttgaagtctcctactcctccctgggtctgttagcctttttaaataggaactttgttctcagagggtgttgttaatctagctatcacttagttacataaagataaaatcagaaaatagagaaaaattcaaataaatcaatgcaaattctgctattttcctcctctcctgtcttgtgttttattatctccattcagtttcagccttacccttagaactattcactgagccca

SEQ ID NO: 3310 - DNA, 578 bp, Homo sapiens
aatttactgtgtctcatatacttaatgctagcaattaggattacattttggctttattagtatattgttgggttttagttattcttatacataggaaatgattagtataacatttatttgttcagaacttccatataatcatatttgtttacttatcttccccattctactttaggggagagtgtggaggaaaatgcaaatgtcgtggtgagattgctcattcggaggcctgagtgttttggtcctgctttgagaggagaaggtgggaatgggcttcttgcagcaatggaagaagccatcaaaatcgccgaggatccttcccgagatggtccctcaccaaatagcggatccagtaaaacactgtaggtctaatatacacaccctcacgagtgatccatactacttgatgtgaaattttayaaaatatattctgcatcctatgaattgtaatataacttgtggtacagaagatttctccctttgaaaatataatgtcttagatttggaagaatgaatggaatttggtgctggaataggtcgaatgaacaaagagagctgaagaagatggtgtagattta

SEQ ID NO: 3311 - DNA, 667 bp, Homo sapiens
ctctggtaaagatgtaacatagggctttattgaggcacatttctaaagaaaaaaaagagttagagggcacgcaatcctgcaaaccctttgtcttttacatataaactgggcatagatgttccatgtacaccatagccggatttgcagactgggagcactcctagagcaagaatgagcactccccaccacacacacacacaccatgctacatgcttatcagtttcccatgaaggaaccagggagctcttaggttctctcagtagtagaaaatgtatccagagacctctggcccaggaccacactagcaagggtacacctgagggcctcacggacasccttgcatgcccaggaatgaggctgtcattcaaagcctcactgtcactctgcagactgctgtattcagtggagacagctgtctgctgagttaccaaggagggaggatgtgagcctctagggccatccagatttggctctcatcagcaagagaacatgtaattatattttccctgcagagatggggagggagatatgttgagatatgttggattctttggcaggggttgcaggaggttgagtagttggtacagaggtaggtgagcaagtgcaataacatttataaagtacttgctctgggcaagcactgtactggatgccttacatgtgacct

SEQ ID NO: 3312 - DNA, 1005 bp, Homo sapiens
ttagcattttttggaacataagtcagtctccctatgccattaaacagattgcctgggggggcataataataattttaaaagtgcagcattggaggtagaataggttaatatagaaggcgaaatgatataaggaacactacttttttatatttcttaggtgaaactggaccaatggtagcagctactctgaaacttggaattgctattttaaatggtgggaactccacagtacagcaggtaacagcttccagtcattcatataatgtacttttcagacaaatggaccatatagtaaagaactatttgttgtaaaatgttttattttctatgtacaatatggctcaattttagtttaccacagtactgaagagagagcaaaagagggaaaaagtaattatgtgatagtgttacaaatccaaacataaaatgatgtcaaaatatctgaaaacatcaagtgtgaccttttatcatgtcaaatgaattctggtgctgaggtatgaaccactctctcaccatgcgtttaccaaactgtggctctctggttatggaacctggcaggggtaaccagctcgttctgttcccagaataagtgattatatagctttgaaaaaagaaaaaataaaacacttaatctctccaaaacatttatcaaaawataatgtctcctgcttatgttttacttaagaagaccctcattacttagtatgtatattcagaagtccttagatccagagacaggagtgagagatcctgtaatgtatacttcttgtctatgtggaacttgtctgttttctttataacttcaaatatatatcccaccatctcctttgatcctgcaagccacatccctttgtttgaaaaaaaacaatgattgtttcattttttatttgaccaaaagttatcacaccccccgtaaatggctatatggttttgtgtctatgtgcgtatatatgtgtgtctgtgtatctgtgtatcatacctacactacgtgtatatttgctattt

SEQ ID NO: 3313 - DNA, 1005 bp, Homo sapiens
ttagcattttttggaacataagtcagtctccctatgccattaaacagattgcctgggggggcataataataattttaaaagtgcagcattggaggtagaataggttaatatagaaggcgaaatgatataaggaacactacttttttatatttcttaggtgaaactggaccaatggtagcagctactctgaaacttggaattgctattttaaatggtgggaactccacagtacagcaggtaacagcttccagtcattcatataatgtacttttcagacaaatggaccatatagtaaagaactatttgttgtaaaatgttttattttctatgtacaatatggctcaattttagtttaccacagtactgaagagagagcaaaagagggaaaaagtaattatgtgatagtgttacaaatccaaacataaaatgatgtcaaaatatctgaaaacatcaagtgtgaccttttatcatgtcaaatgaattctggtgctgaggtatgaaccactctctcaccatgcgtttaccaaactgtggctctctggttatggaacctggcaggggtaaccagctcgttctgttcccagaataagtgattatatagctttgaaaaaagaaaaaataaaacacttaatctctccaaaacatttatcaaaaaataatgtctcctgcttatgttttacttaagaagaccctcattacttagtatgtatattcagaagtccttagatccagagacaggagtgagagatcctgtaaygtatacttcttgtctatgtggaacttgtctgttttctttataacttcaaatatatatcccaccatctcctttgatcctgcaagccacatccctttgtttgaaaaaaaacaatgattgtttcattttttatttgaccaaaagttatcacaccccccgtaaatggctatatggttttgtgtctatgtgcgtatatatgtgtgtctgtgtatctgtgtatcatacctacactacgtgtatatttgctattt

SEQ ID NO: 3314 - DNA, 1005 bp, Homo sapiens
ttagcattttttggaacataagtcagtctccctatgccattaaacagattgcctgggggggcataataataattttaaaagtgcagcattggaggtagaataggttaatatagaaggcgaaatgatataaggaacactacttttttatatttcttaggtgaaactggaccaatggtagcagctactctgaaacttggaattgctattttaaatggtgggaactccacagtacagcaggtaacagcttccagtcattcatataatgtacttttcagacaaatggaccatatagtaaagaactatttgttgtaaaatgttttattttctatgtacaatatggctcaattttagtttaccacagtactgaagagagagcaaaagagggaaaaagtaattatgtgatagtgttacaaatccaaacataaaatgatgtcaaaatatctgaaaacatcaagtgtgaccttttatcatgtcaaatgaattctggtgctgaggtatgaaccactctctcaccatgcgtttaccaaactgtggctctctggttatggaacctggcaggggtaaccagctcgttctgttcccagaataagtgattatatagctttgaaaaaagaaaaaataaaacacttaatctctccaaaacatttatcaaaaaataatgtctcctgcttatgttttacttaagaagaccctcattacttagtatgtatattcagaagtccttagatccagagacaggagtgagagatcctgtaatgtatacttcttgtctatgtggaacttgtctgttttctttataacttcaaatatatatcccaccatctcctttgatcctgyaagccacatccctttgtttgaaaaaaaacaatgattgtttcattttttatttgaccaaaagttatcacaccccccgtaaatggctatatggttttgtgtctatgtgcgtatatatgtgtgtctgtgtatctgtgtatcatacctacactacgtgtatatttgctattt

SEQ ID NO: 3315 - DNA, 2075 bp, Homo sapiens
  misc_feature (1)...(2075): n = A,T,C or G
tgggcatagacagaaatggaagaaatgctgaagaaaattaaaagagatttcagagcaagaattatagtaacgggataaagaatgataattattttcatgggtaaaactttaaatgcttttatccttttaaaagcaattccaatatgttcctaacattgatgcttagaaagcagctaagtgtgttgtagggtacaaagtgtctgtaatttttctctggagactataaaatgtgacctggatctggcccataggtttctgtggcagtctatctaatgcaatcagaagagagtggatggctgaagttactatcatctgtgaggtttatgttttggaagagttaatctaggaggctcttcttattttttttccacttgcatcttatcagtaagagctttttttcaaaaaaaatgagatagcttcttgctctatcacctaggctggagtgcagtagcaagatctctgctcacggcaacctatgcctcctgggctcaagggatcctcccacctcagcctcccaagtagctggcaccactggcatgcacaccgtgcctggctaatttacgtattttctatagagaagaggttctgctctgttgtccaggctgatctcaaactcctgggctcaagtgatctgcctgcctcaacctcccaaagtgctggtattacaagcatgagccaccatgcccggccagtaaaacatttttgaatagcccacatatatatctggttatttataagcttaatttatgggctatagtcattttgtatataaacattagttaatttaattcttttccttagataaaaataaacataaatcaacattaaattttgttctttgtgcctcaattatcttgcatattttgggggcatgtggccttctaatcttttcatttaagaagtcattaatttagatctctctctagggtgtctatctctctagacagagacctactagagttccagagacacctgaggcgtatataaagcttagctaaattcagtgtctctttagagtacagcgagagacaactgtcaatgggtattcccttttcggccgcgcnnnnnnnnnnnnnnnnnnnnnnnnnnnnnnnnnnnnnnnnnnnnnnnnnnnnnnnnnnnnnnnnnnnnnnnnnnnnnnnnnnnnnnnnnnnnnnnnnnnnttaaaaccacgagccacgtgccacacgcttgcactgcctgcaggctccgactcctagagcgatccccgtcttttatctcttagaaaaatatacacaagaaataaagagcgttggatatggagcatcattaaaactaatctgcaaattaacacctcgtatctctcatgcgtgttcactgcaaataataatttccactctagctgtttacagcctaaagggatttattatgggatataaggttgcttatgtaatttcctggagtgtcagataaccaagcgtgtatactgtgctatgacatgggactcttccagtggaatccactgttgccgctgtacctgcttcttggcaaccagaaaactagggactgaaccttaagaaaacctcttctgccaccaccatcacaggagaccacagaagagcttgaagcccatggtgccgacttccatcttccaagtctcagcggctatatctgcttagtagatgttagttcacatgcaaaatccttgctttaggggagactatgaaatacagtttgaaattttctaggctctaatcttagaaaggcatactgtgttggaatggtgttgacctcagcatggttgttgaatggttatacaataccatgtgcatgctgtctgggagagagtacgggcctcaggaattggctttttcattctctatgatatgttagtatggaaaagtttataagaatgttaatattattttggaaagggaargggatgaggaaccaagaaaatatattttgtataaaatatgttttgaatggtaataggagaaaaatatgctaaattcaattatgtaacttgtatattcagtcaattctattttaatgctagaagtattaagcaagagattagaatataggcagttcttactttgcatagttccaat

SEQ ID NO: 3316 - DNA, 1220 bp, Homo sapiens
atggtatatcaacttgaaaaacagggtaacactttcttatcaaattaaaccaacatttatcataaaacccactaatgtcactcttagtcatttgccagaaaaagaaaccatatgtccctacaaagacttrtccctgagggctgtttatggcagctttattcattattgataaaaactggaacaacctacatgtccatcaaccagagaatggttaaactcagcaataaaaaggaacgtattaatgatatacacaagaacatggacagattcaaaatcatcaagctaaatgaaagaagccacacagtaaatgacattcttaaaaaaatagcaaattataatgacagaaagcacagtggttactggaagctggaagtaacgagtggggatttattgcaaaggggtgcaagaagttttggaagtgatgaaaatagtttaatatcataattacacagtgattcaaacctcatcaatttgtacacttaaaattggtcaattttatgatatagaggttacaactcactaaagcttatttttaataaataagtaggcaaacacatgtaagtattgacataaaagtattgaggatatggaacagtatttacttaatgtatactttaagctgcctaagtataaccaaatctacttctcactgtggtcaaatggccagtcagagggctactgagtatgaagcctagaataaaggctgcacaggaggctctgggccatgtatttaggggaatgcaataaagtattaagccttggtgctggagtggtataggagagagagagagctggcaaatgtaacatttctgtagaaaactatgtccatctgccaagaaaaactaaacagcagcagcaccagctgttcttgttgcgccacagattgcaagccatgtttcccaaattaacatctcaccaacgcttccccatcgagtttacacaagacaggaactaagtcaagataggatccaggaagaaaaataaagtaacaaggaagcctgattacaaattaagaagcaaacagcaagcctctgtgtatatgaagggcaagttacatgatctacagagaaattagtgtaagatcaatttacagaggcaggtagggaggggggagctggtgtttgtgaagtgaaagtcaggtagtaagactacagtctagtcctttgcctccctatttcagaaatgagtgggagaaatgaagactaaatcagcagagcatg

SEQ ID NO: 3317 - DNA, 660 bp, Homo sapiens
atctctccttctctgtgtaaggtttatggaagatatctcctttttaattgatttcaattattgctgcaagaaaaaaaaattgatgtctgggcaacatgctttattagctgatgttaaaccaacaattaattccatgtgttgatccaagatgaataagtaaatttctagaacatcgccaatgtcaatgatagctactctccttgggcaaacaccttcagtagaggagaactgagtagtttattggagacatttcaaattttaatccaagattttgcacatactagaaaactgtagggctgggcttgagaaacaagagaaggagtaaaagaacaattttgtgctgctgctaaatccagttcttatttcctctaaccttactgcttcccttgtccaaggtttagggaccagaaggaaagggaaaggatgaaaagagaagcaaaagaaaagatargggagagaaggaaaggagagaaagggaagagaagagatgtggtgagggaggggaaagagagagggatatggaaggagggaaggaagaaatgaaagaaggaaggaaggaaagaagaaaggaagggagggagggagggagggaaagacaaacagtgggaagaaaagctgtgaaaagatttctgctggatttctcctgaaaaactactgaaa

SEQ ID NO: 3318 - DNA, 651 bp, Homo sapiens
ccttctgaaataataattttgtagtttactcagctaacagccaattttaacagttaggtttatcaagtgtttttaatcaatgtatgacaacattatttctctagacaccaattgctgggaataaaaaaaatcagctcaaatcataaaaaataatttccttattgtgtataattaatgtctgaggtaggaaatcttttaagaatgagatttcacatactacttatagaaataccttttggtgagtgaaaaaaacaaaaaacaaagaaaatctgctacagctgtgagtagggctacgctcactagctatttcctcttgaaaaattggagagaggtaatatcaatactttaaaatattacttataatacaaaaatgcaaatgataacttgaaatttatcttataaagtatctggtaattcaggtttgctttgttacttatagaaaatgattacatcatttaaaatataatcatgtgtatataaatataagttaaattctaactttaaatatatatatmatatgataattttaatcaagcatttattttatcttcaaggtagatttacttcaactctagccacctgtataaagccatatattaatttttttgtatgataaaatataactttaaaaaattttgcctatatttcccc

SEQ ID NO: 3319 - DNA, 615 bp, Homo sapiens
gtggcactttatgatgtagccctaggaaacgaatacagctggactcctatatctcagttaactgaaaaagattgaaaatgcctacaatggaaaaccaaaacgtttctccactcttacatgtattctaaaaatgatgggtgtycaaaaagtgttaacatagcaagtctgagagtgctatccttataaaggcctgcttccaaggttgccttggctgtcacttgggaatttggttttcagagtgtttacaggcaacatttaactgataagggttactcactgtgcctagaccttttgtgtaaagaatgtggttaatgatgaccttatggtttaccgaaaacacctgcttttcttctgggaatctggaattttgctattttctagacagaaagtggttgtatcactaggcctcagcaaatcctcggaagatgaatctctaatgggcttccatgtagaaatattgcacacattttgctgcttttcttttactggaagaaaagtatactctgatcttggagtgagggagcataaggaagccttcacaaggatttctccagactgacttgacttgtgtctttgtccttcatgatctggatgtgtattctgagaacatcactg

SEQ ID NO: 3320 - DNA, 584 bp, Homo sapiens
taattatttctgtctctctctcccttcctctttttgggggggatgtgggagatggtagggatagagcctaattttatctaccttccacatatagacattaggatctttagatgtgacaaacaagygttttctgtttatttttcctaaatctgtactttccatctgactatatcctttctcatctatgaacctctctagctatctaattagctaattactgctgcctgtcacttatttatcattgatataaatgacagttattttgctagatgtattccagattttatctgagaaattctctactcctggaagacactgtcaagtttatcttgaagggaacattttacaagcccagtaaatctccagtgtctcggtaaatttcttgcttttggactcatgagttcctctgtctgctcctatttgggtgctgctctgttcttcacctcttttcatcactacgtccagataggctttgtgcagtaaattcaaatcacagtgaggacatctatctcctagttttgctagcactttcccctctgagctgcagaaacagatctcaaggctacctaaaaagctgtaagcat

SEQ ID NO: 3321 - DNA, 1309 bp, Homo sapiens
aaaatacaagaaatattgtgagcagcacaaaatatttatattaatttagatatttattactttttagtggcatgttctctattctccattatattttaaacatctcaaaactggttttgtcatgcaatttataaccaagtgtacctaattcactgaatttaggaaaactattctctttcttacctctaatcttctatctctattcccttgatatgttagcttttaccagcttcctaaagtagggcacttgtttcccccagagcttgcaaaacaatatacaataaatggagggttggcataaaagaacatctgtgcagaaatgagataaaagcagattgtccaaatgaataaaaaaaaatacaacaccttgctcatcttgcttccttatattttcagagaaaataatatattaactgctttggtgaatagcagtcctcatgaagaatagtcttatttttcttattttttgaaactttttttgaaagggaatttgacaggaaagtaacgattaagattttataggaaggagaatctttcatcttacaagcttttttatttatttgtaaataaaatatggcaaatcaggtctaagagatcaaattattccatctgaattttttttcttttttgagacagagtcttgctctgtcgcccaggctggagtgcagtggcgcgatctcagctcactgcaagctccacctcccaggttcacgccattctcctacctcagcctaccaagtggctgggactacaggtgtgcaccaacacatccaggtaattttttgtatttttagtagagacaaggtttcacaatgttagccagtatggtctcgatctcctgacctcatgatccgcccacctcggcctcccaaagtgctgggatccatctgaattttttaaaagttaaacacttgggatataacctaaaatttgttttgaaacatttttctggattatattttctttcagtaataaatttttgtaaaggaagtaaataaaatgaartagcactaatactgaactttgtttctagaagttgacatccaggagggtttggatccaataagacttttgttgagtaaattatatgagtaataaacttgacaccctttggaataatccagagcagagtagatatatctcctttagaatggtaggcttgggtgtccatatgatattgttcattttttcatacatagataacatgattttacacactacttaagccaatctttaatactcaaattgaagatatttaagcacagaatattacttatttgaacctaggtactaagaaggtattttcttt

SEQ ID NO: 3322 - DNA, 1309 bp, Homo sapiens
aaaatacaagaaatattgtgagcagcacaaaatatttatattaatttagatatttattactttttagtggcatgttctctattctccattatattttaaacatctcaaaactggttttgtcatgcaatttataaccaagtgtacctaattcactgaatttaggaaaactattctctttcttacctctaatcttctatctctattcccttgatatgttagcttttaccagcttcctaaagtagggcacttgtttcccccagagcttgcaaaacaatatacaataaatggagggttggcataaaagaacatctgtgcagaaatgagataaaagcagattgtccaaatgaataaaaaaaaatacaacaccttgctcatcttgcttccttatattttcagagaaaataatatattaactgctttggtgaatagcagtcctcatgaagaatagtcttatttttcttattttttgaaactttttttgaaagggaatttgacaggaaagtaacgattaagattttataggaaggagaatctttcatcttacaagcttttttatttatttgtaaataaaatatggcaaatcaggtctaagagatcaaattattccatctgaattttttttcttttttgagacagagtcttgctctgtcgcccaggctggagtgcagtggcgcgatctcagctcactgcaagctccacctcccaggttcacgccattctcctacctcagcctaccaagtggctgggactacaggtgtgcaccaacacatccaggtaattttttgtatttttagtagagacaaggtttcacaatgttagccagtatggtctcgatctcctgacctcatgatccgcccacctcggcctcccaaagtgctgggatccatctgaattttttaaaagttaaacacttgggatataacctaaaatttgttttgaaacatttttctggattatattttctttcagtaataaatttttgtaaaggaagtaaataaaatgaagtagcactaatactgaactttgtttctagaagttgacatccaggagggtttggatccaataagacttttgttgagtaaattatatgagtaataaacttgacaccctttggaataatccagarcagagtagatatatctcctttagaatggtaggcttgggtgtccatatgatattgttcattttttcatacatagataacatgattttacacactacttaagccaatctttaatactcaaattgaagatatttaagcacagaatattacttatttgaacctaggtactaagaaggtattttcttt

SEQ ID NO: 3323 - DNA, 1196 bp, Homo sapiens
ggagctcaaaaaggaaagggagaagagaatatgacaaaagcaatatttgaatagataatgatcaagaattctactaaagtggctgggcgccatggctcatgcctataatcgtagcactttgggtggctgagatgggtggattactgaggtcaggagtttgagaccagcctagccaacayggtgaaaccccctcgctacaaaaatacaaaaattagccaggtgtggtggcatacacctgtagtcccagctacccaggaggctgaggcaggagaatcacttgaacttgggaggcagagattgcagtgagctgagatcatgccactgcactccagcccgggcaacacagcaagactccatctcaaaaaaaaagtattcttctaaaatgaaggaacacattaattcacaagtccaaatttctacaaaccttaaactgagtacacacaaagaaaattggactaggcacatcgtatgaaagtgctgaaaatgagagaaaaaaagataatcttgtaagcagccaaagaaaaagatacatttttatcaaataagtggtaatagcaatgagactggcttctcaacaaggtggaaccaacggcaacatagtaacatcttctagcgcaaaagtcaggcacagtgataagaggagctaaagtgttcaaaggtgctggcattctctgggaagtagtaaaaggaccaattgatattagactataataaagcaagaatacaaactgtgttatctaagataacatcaaaagcttagcaaagtaatgtgtatctaacaactaacatgaggaaaagtgaagtagtaaaactacttaatcacaaagaaatgaaaaattaatttaaaacaggttggatagataaacacaaggtagtagatataaacctaatataataataactacataaatatgaatgaactaatattctaattaacagagagagattgttagactggagttaaaagttcaattatataatgcacacctaacatataaaggtacagaaaagttgaaacagtgggagatagaggcatattctgcaaatgtgaaccaaagaaagctggtgtgattataataatatcagacaaagtaaacttaaagacaggaagcattactggaaagtaagaagaacattttgtaatgataaaagtgccaatctaacaggaagatataaaagtagtaaatttggatgca

SEQ ID NO: 3324 - DNA, 614 bp, Homo sapiens
aacaccatctcctggcacgcctgacctgtcggcccatgcagcaagtctgtttgaattacactgtaacttctatagggtggagaccttgtttttatggtttgtaaaacatcatgaataaccatggcactctgtaaataaatagaaaccacatgaaacagaaaatagatgctgttcaatggccacctccccagcacattcaggaatgtatcccttgttccaaagtgcttggagtaaatgaatgccactctggagaggcggcctatgtgatactgtcagaacctttatccctctttaaaaggaagtgtaatcgtgttttctagtattttattcatctttaggggcactctacraggagagtccttggtgttgctcttgttaatgaaagagtaaagatcagtgcacagagagatgaaatgatttgcataaagccatagagcaaaccagaggtgaaatgggaccttgtccaaatttggttccaatttcagcctgttgttcttcctgtaatacttctggaatagagtagtagcagttcttcataagaagccccatcatggctctcagagagcagctatgactttggcccccgctacccgcttcagccatgaagtggtgac

SEQ ID NO: 3325 - DNA, 1253 bp, Homo sapiens
ggtgcctctttcacaacttagaaccttatttgttcccttgatttgcccaatgaccttaacaaaaacatttttacatcactttgtgcttaatattccccatttgttgctaagggaatagatataacactactttgaaagtatctgggccaggcgcaatggctcacacctgtctgtaatcccagctattcaggaggctgaggcaggagaattgcttctcctgccagcggcagggtcgcggtggcagaggttgcggtaagccaagatcgcaccattgcactctagcctgggcagcaagagcaaaactccatctcaaaaaaataaataaataaaaaaataaaatacctgataccccctggaactgagttcaaagaccaatttaaaacatctattcgttggaacacctatagaagtttcacaattttttttttttttttgagacagagtctcactctattgcccaggctggagtgcagtggcacaatcttggctcactgcaaccttcatctcccaggttcaagtgattctcatgcctcaggctctctactaggtgggattacgggcacccgccaccgcacccggctaatttttgtaattttagtagagatagggtctcaccatgttggccaggctggtctcgaactcctgacctcaggtgatccacccgcctcggcctcctaaagtgctgggattacaggcatgagccaccacgcctggcctagagctttcacaattttttgtgttctttttggtcatttggttttaattactattttcagataaaagtgataggattctgaaaggattgtgtagayggtagtctttgggtatttgtggacatgaaggttgatttcagctatttgaaatgacctcagaagtcaggggagtggcacggtgtggtggctcatggctgtaatctcagcactttgggaggccaaggttggagaattacttgaggctaggattcaagaccaccccggccaacatagcaagaccctgtctctaaaaatatttaaaaaataaataaataaaacatcagggacacacacaatttgtcattttacagaggcatgaagtcaaatcattgatattgcaaggctgggagacagagactattactgagctagtgagtgagcctagccagcctcgcagcactcacacgtctcatattgtggtctataattcattataacatctgcaatagctcttgtgcagttacttttcaaacagaagaacattgatttctttacatatac

SEQ ID NO: 3326 - DNA, 1253 bp, Homo sapiens
ggtgcctctttcacaacttagaaccttatttgttcccttgatttgcccaatgaccttaacaaaaacatttttacatcactttgtgcttaatattccccatttgttgctaagggaatagatataacactactttgaaagtatctgggccaggcgcaatggctcacacctgtctgtaatcccagctattcaggaggctgaggcaggagaattgcttctcctgccagcggcagggtcgcggtggcagaggttgcggtaagccaagatcgcaccattgcactctagcctgggcagcaagagcaaaactccatctcaaaaaaataaataaataaaaaaataaaatacctgataccccctggaactgagttcaaagaccaatttaaaacatctattcgttggaacacctatagaagtttcacaattttttttttttttttgagacagagtctcactctattgcccaggctggagtgcagtggcacaatcttggctcactgcaaccttcatctcccaggttcaagtgattctcatgcctcaggctctctactaggtgggattacgggcacccgccaccgcacccggctaatttttgtaattttagtagagatagggtctcaccatgttggccaggctggtctcgaactcctgacctcaggtgatccacccgcctcggcctcctaaagtgctgggattacaggcatgagccaccacgcctggcctagagctttcacaattttttgtgttctttttggtcatttggttttaattactattttcagataaaagtgataggattctgaaaggattgtgtagatggtagtctttgggtatttgtggacatgaaggttgatttcagctatttgaaatgacctcagaagtcaggggagtggcacggtgtggtggctcatggctgtaatctcagcactttgggaggccaaggttggagaattacttgaggctaggattcaagaccacccyggccaacatagcaagaccctgtctctaaaaatatttaaaaaataaataaataaaacatcagggacacacacaatttgtcattttacagaggcatgaagtcaaatcattgatattgcaaggctgggagacagagactattactgagctagtgagtgagcctagccagcctcgcagcactcacacgtctcatattgtggtctataattcattataacatctgcaatagctcttgtgcagttacttttcaaacagaagaacattgatttctttacatatac

SEQ ID NO: 3327 - DNA, 1253 bp, Homo sapiens
ggtgcctctttcacaacttagaaccttatttgttcccttgatttgcccaatgaccttaacaaaaacatttttacatcactttgtgcttaatattccccatttgttgctaagggaatagatataacactactttgaaagtatctgggccaggcgcaatggctcacacctgtctgtaatcccagctattcaggaggctgaggcaggagaattgcttctcctgccagcggcagggtcgcggtggcagaggttgcggtaagccaagatcgcaccattgcactctagcctgggcagcaagagcaaaactccatctcaaaaaaataaataaataaaaaaataaaatacctgataccccctggaactgagttcaaagaccaatttaaaacatctattcgttggaacacctatagaagtttcacaattttttttttttttttgagacagagtctcactctattgcccaggctggagtgcagtggcacaatcttggctcactgcaaccttcatctcccaggttcaagtgattctcatgcctcaggctctctactaggtgggattacgggcacccgccaccgcacccggctaatttttgtaattttagtagagatagggtctcaccatgttggccaggctggtctcgaactcctgacctcaggtgatccacccgcctcggcctcctaaagtgctgggattacaggcatgagccaccacgcctggcctagagctttcacaattttttgtgttctttttggtcatttggttttaattactattttcagataaaagtgataggattctgaaaggattgtgtagatggtagtctttgggtatttgtggacatgaaggttgatttcagctatttgaaatgacctcagaagtcaggggagtggcacggtgtggtggctcatggctgtaatctcagcactttgggaggccaaggttggagaattacttgaggctaggattcaagaccaccccggccaacatagcaagaccctgtctctaaaaatatttaaaaaataaataaataaaacatcagggacacacacaatttgtcattttacagaggcatgaagtcaaatcattgatattgcaaggctkggagacagagactattactgagctagtgagtgagcctagccagcctcgcagcactcacacgtctcatattgtggtctataattcattataacatctgcaatagctcttgtgcagttacttttcaaacagaagaacattgatttctttacatatac

SEQ ID NO: 3328 - DNA, 1253 bp, Homo sapiens
ggtgcctctttcacaacttagaaccttatttgttcccttgatttgcccaatgaccttaacaaaaacatttttacatcactttgtgcttaatattccccatttgttgctaagggaatagatataacactactttgaaagtatctgggccaggcgcaatggctcacacctgtctgtaatcccagctattcaggaggctgaggcaggagaattgcttctcctgccagcggcagggtcgcggtggcagaggttgcggtaagccaagatcgcaccattgcactctagcctgggcagcaagagcaaaactccatctcaaaaaaataaataaataaaaaaataaaatacctgataccccctggaactgagttcaaagaccaatttaaaacatctattcgttggaacacctatagaagtttcacaattttttttttttttttgagacagagtctcactctattgcccaggctggagtgcagtggcacaatcttggctcactgcaaccttcatctcccaggttcaagtgattctcatgcctcaggctctctactaggtgggattacgggcacccgccaccgcacccggctaatttttgtaattttagtagagatagggtctcaccatgttggccaggctggtctcgaactcctgacctcaggtgatccacccgcctcggcctcctaaagtgctgggattacaggcatgagccaccacgcctggcctagagctttcacaattttttgtgttctttttggtcatttggttttaattactattttcagataaaagtgataggattctgaaaggattgtgtagatggtagtctttgggtatttgtggacatgaaggttgatttcagctatttgaaatgacctcagaagtcaggggagtggcacggtgtggtggctcatggctgtaatctcagcactttgggaggccaaggttggagaattacttgaggctaggattcaagaccaccccggccaacatagcaagaccctgtctctaaaaatatttaaaaaataaataaataaaacatcagggacacacacaatttgtcattttacagaggcatgaagtcaaatcattgatattgcaaggctgggagacagagactattactgagctagtgagtgagcctagccagcctcgcagcactcacacgtctcatattgtggtctataattcattataacatctgcaatagctcttgtgcagttacttttcaaacagaagaacattgatttctttayatatac

SEQ ID NO: 3329 - DNA, 946 bp, Homo sapiens
aaacagtgataattgagagtcctgagattggtgcaagcagtattcatgtaggggtggtcctgcagccagcctggctgacaccagtggtctccaggtgactttgtcttttgtttctctatgaatattcggaaatcttagctttggcatgggtatggctgctggctgtgtttcagatatattttaaagtttgaatataggtgtcaacaaagagggtacatatgagtgggaagggagcaaaggaacatctgtcatgtaatctacatactcaatattaccagcataggaaggtggataagcctgggcaaatttctcttaatattgaagtattttgtcatatataagcacatgcagataagtataaattgcagtagaaaactatattttcaaacatattaaacatgttaatttactgaatgcttataatatatgtaaaccagggattatgatcctaattttacagatgaggatgggaaacctaggctcagagagattgagaaacaaacctgaaacctaatagtaaataaaagaacttggatttgaagcctgatctattctacactatgtgtgtgtgtatgtgtgtgtgtgagagagacttgtgggtagcagataaaaatctcgctaagactcagaaatgtaaaaaaatacaacaattttgtataaataaattcaatctctattttgagcctacatttcactcagtggcagaaatatagttttagttggtttgtaccccttttcttaggctgcatctaagttccaggaagcttgccttggaatacagccagagagggacacttcatccttaatattgtatatccctaaatrtattcatgtaaacaactcttgtttttatggagatcatatgatttattatctcaagcagacactttccagaataaaaggagatactggaaataactatgccaagacaatgaatacaaggcat

SEQ ID NO: 3330 - DNA, 584 bp, Homo sapiens
tgctgaattaaaacatccttactccaagtttacaaaataatcacttctatcatctaccaatacctaaattattatgccatttacaaaccagctagacttaacttttgtgtatggtttaagataggggtaaagttatattatttttcatcatatggaaatacaattgtatcataataatttattgaaaactaagaatacggtgtcttgtaataataagaagtgtgaaaaaggtgaataagtcaatgtatcaaattatgttgctatgtaagacaacatggagacagaatttgtcatttgtggatgacatcatgaaaagaaaaatacctctgaactaagaacaaagatcatatttgggagttaatttcctgtgttttcatttctctgatactccataaatggtgtatatgtgattatggtgtcaagggtagaaaatgaagacactgatrtaaaaaaaaagatcatgagacatttggagaggcaatataagctaaataggatttgacaaaatgtaatatttttacctgaacttgaattcatagcaggtactcttgaatcatctgcagggactgaaacgttaagaaagc

SEQ ID NO: 3331 - DNA, 584 bp, Homo sapiens
tgctgaattaaaacatccttactccaagtttacaaaataatcacttctatcatctaccaatacctaaattattatgccatttacaaaccagctagacttaacttttgtgtatggtttaagataggggtaaagttatattatttttcatcatatggaaatacaattgtatcataataatttattgaaaactaagaatacggtgtcttgtaataataagaagtgtgaaaaaggtgaataagtcaatgtatcaaattatgttgctatgtaagacaacatggagacagaatttgtcatttgtggatgacatcatgaaaagaaaaatacctctgaactaagaacaaagatcatatttgggagttaatttcctgtgttttcatttctctgatactccataaatggtgtatatgtgattatggtgtcaagggtagaaaatgaagacactgatgtaaaaaaaaagatcatgagacatttggagaggcaatataagctaaataggmtttgacaaaatgtaatatttttacctgaacttgaattcatagcaggtactcttgaatcatctgcagggactgaaacgttaagaaagc

SEQ ID NO: 3332 - DNA, 1034 bp, Homo sapiens
accttcctaaagcagaccctggtccggtctctgtacaccttttgcatagttggtggccatccaaccccctctcaggctgtggctgtgttcctccaggggcctcggtggtccaggagcctggccragctggctccctctcccacgtggcttactccatcagcttcaccttgtttatatctctggatctcctcttttttctttctgtttgtgtcttgtctctttctggaaagccccttacctctactcacccctctgtgtgcaaacatcacccagttcaggtgcccccaacccagccaggaggggttttcattccttaggctcccatcgtaggctagctgtgcctgtctttcagcacatttcatttcctgcctggtatttcagtcgtgtgtgtgtcttcattctcctcatgtaagccttgaggtgcggagtgcatgcctgttcacctctgccctctctagaggtcagaatatgaccagtgttcagcccccatcggaaagagcccaagaaccccaagtccccagcctgttctgctctgctgtgggcccacatgcctggagacgaggcacctttccttccctgacattgactagtacaggatacagggtagaacccaaacattgagcaattgtcaaactgcctacttatgatgaacaaaatagcttttcagaaggtgagatcacagtacggttatggtgaatcctgactcgcacctcaggtctttcatcaggatttttgtttttcctggttggcacagatgtgcgtggagcagatcagaggcctctcaggttcttgatcactcatggcaaattcaggcccaccaggagcgaggtgagagatccagacagcaggggagagaagggaggtgcagggaaccctcagccccacatgctccagcaggtctgtgtgattaacctgaattgcagcattcagaggctcggccaccagccatggcggttccagatgaaatgcagcttagaaggcagtgtggcatagtagctttggtgccagctgctcccagagtttggattgtagcc

SEQ ID NO: 3333 - DNA, 1034 bp, Homo sapiens
accttcctaaagcagaccctggtccggtctctgtacaccttttgcatagttggtggccatccaaccccctctcaggctgtggctgtgttcctccaggggcctcggtggtccaggagcctggccaagctggctccctctcccacgtggcttactccatcagcttcaccttgtttatatctctggatctcctcttttttctttctgtttgtgtcttgtctctttctggaaagccccttacctctactcacccctctgtgtgcaaacatcacccagttcaggtgcccccaacccagccaggagggrttttcattccttaggctcccatcgtaggctagctgtgcctgtctttcagcacatttcatttcctgcctggtatttcagtcgtgtgtgtgtcttcattctcctcatgtaagccttgaggtgcggagtgcatgcctgttcacctctgccctctctagaggtcagaatatgaccagtgttcagcccccatcggaaagagcccaagaaccccaagtccccagcctgttctgctctgctgtgggcccacatgcctggagacgaggcacctttccttccctgacattgactagtacaggatacagggtagaacccaaacattgagcaattgtcaaactgcctacttatgatgaacaaaatagcttttcagaaggtgagatcacagtacggttatggtgaatcctgactcgcacctcaggtctttcatcaggatttttgtttttcctggttggcacagatgtgcgtggagcagatcagaggcctctcaggttcttgatcactcatggcaaattcaggcccaccaggagcgaggtgagagatccagacagcaggggagagaagggaggtgcagggaaccctcagccccacatgctccagcaggtctgtgtgattaacctgaattgcagcattcagaggctcggccaccagccatggcggttccagatgaaatgcagcttagaaggcagtgtggcatagtagctttggtgccagctgctcccagagtttggattgtagcc

SEQ ID NO: 3334 - DNA, 1034 bp, Homo sapiens
accttcctaaagcagaccctggtccggtctctgtacaccttttgcatagttggtggccatccaaccccctctcaggctgtggctgtgttcctccaggggcctcggtggtccaggagcctggccaagctggctccctctcccacgtggcttactccatcagcttcaccttgtttatatctctggatctcctcttttttctttctgtttgtgtcttgtctctttctggaaagccccttacctctactcacccctctgtgtgcaaacatcacccagttcaggtgcccccaacccagccaggaggggttttcattccttaggctcccatcgtaggctagctgtgcctgtctttcagcacatttcatttcctgcctggtatttcagtygtgtgtgtgtcttcattctcctcatgtaagccttgaggtgcggagtgcatgcctgttcacctctgccctctctagaggtcagaatatgaccagtgttcagcccccatcggaaagagcccaagaaccccaagtccccagcctgttctgctctgctgtgggcccacatgcctggagacgaggcacctttccttccctgacattgactagtacaggatacagggtagaacccaaacattgagcaattgtcaaactgcctacttatgatgaacaaaatagcttttcagaaggtgagatcacagtacggttatggtgaatcctgactcgcacctcaggtctttcatcaggatttttgtttttcctggttggcacagatgtgcgtggagcagatcagaggcctctcaggttcttgatcactcatggcaaattcaggcccaccaggagcgaggtgagagatccagacagcaggggagagaagggaggtgcagggaaccctcagccccacatgctccagcaggtctgtgtgattaacctgaattgcagcattcagaggctcggccaccagccatggcggttccagatgaaatgcagcttagaaggcagtgtggcatagtagctttggtgccagctgctcccagagtttggattgtagcc

SEQ ID NO: 3335 - DNA, 1034 bp, Homo sapiens
accttcctaaagcagaccctggtccggtctctgtacaccttttgcatagttggtggccatccaaccccctctcaggctgtggctgtgttcctccaggggcctcggtggtccaggagcctggccaagctggctccctctcccacgtggcttactccatcagcttcaccttgtttatatctctggatctcctcttttttctttctgtttgtgtcttgtctctttctggaaagccccttacctctactcacccctctgtgtgcaaacatcacccagttcaggtgcccccaacccagccaggaggggttttcattccttaggctcccatcgtaggctagctgtgcctgtctttcagcacatttcatttcctgcctggtatttcagtcgtgtgtgtgtcttcattctcctcatgtaagccttgaggtgcggagtgcatgcctgttcacctctgccctctctagaggtcagaatatgaccagtgttcagcccccatcggaaagagcccaagaaccccaagtccccagcctgttctgctctgctgtgggcccacatgcctggagacgaggcacctttccttccctgacattgactagtacaggatacagggtagaacccaaacattgagcaattgtcaaactgcctacttatgrtgaacaaaatagcttttcagaaggtgagatcacagtacggttatggtgaatcctgactcgcacctcaggtctttcatcaggatttttgtttttcctggttggcacagatgtgcgtggagcagatcagaggcctctcaggttcttgatcactcatggcaaattcaggcccaccaggagcgaggtgagagatccagacagcaggggagagaagggaggtgcagggaaccctcagccccacatgctccagcaggtctgtgtgattaacctgaattgcagcattcagaggctcggccaccagccatggcggttccagatgaaatgcagcttagaaggcagtgtggcatagtagctttggtgccagctgctcccagagtttggattgtagcc

SEQ ID NO: 3336 - DNA, 611 bp, Homo sapiens
  misc_feature (1)...(611): n = A,T,C or G
tttgaaaatggccttctgcaattaaaactacaaaaaaagattgaaagtggccaacttaaactccactctgtttctntttgatttgggnagactggtgtgcacagaagggaagtgtcacctaatgaaactgtaacctcaccacagatgcctgcccatggctggtggagctcccaagcctggccacaccctatgtgccccatgcccagcaagtggaggggggtgtggtcagtacatgtttgtaagataaagaaaaacatgyttcccaatcagccatattacccagagggcgatattgatttagatcttatttcagcttggctacagaggctcaggtgccagtgagcagaagtctggccattgtggtggattctggaagataatgtgctatactattagcaggggtgcaatttggggtgtgagaccaccagagctttgattccccctgccacacttgtattatttggagttgttttgttgttgttcatggtaattacctatgattagacaacaatctagttccatttgcaatagggaataatatgtctgtgacactcacagcctctagacctggggaacctctggccacccgagggggcccggtcatcctgctg

SEQ ID NO: 3337 - DNA, 604 bp, Homo sapiens
ttgaccttctttcattttgcractttgtcaaatacagctccagactgtcttctctttctcctctgctctggccacacacatgcccttccaccctgtgtctgcccatagaaatctcgcatcccttccagtattcctgcgcaccgtggcctctgttaggagattcctgtgcagtctcctagcagggcagcccttctgggaattgctccctggtgctcgtgtgcactccatcccagcccttagagctgctttcctggcttttgtctcgtgtcctctgaccacctatcagggcctgtccatggggctgtgtctgcatgggagcagccccaaacacagtccttgtcagcaccccgatctggacctgaattgggcccttgtgctcactacctgtggaccaaagacaaatcaggttctccccatccccagagtggggaaagcagtagtgtgggcctccctggggtccccacgacagtgtaatgagtacgggcacggagcctgctgcatgtctctatggacatttccataacttttctttttttttttttctctgagatggagccttgccctgtcacccaggctggagtgcagtggcacaatcatggctccc

SEQ ID NO: 3338 - DNA, 604 bp, Homo sapiens
ttgaccttctttcattttgcaactttgtcaaatacagctccagactgtcttctctttctcctctgctctggccacacacatgcccttccaccctgtgtctgcccatagaaatctcgcatcccttccagtattcctgygcaccgtggcctctgttaggagattcctgtgcagtctcctagcagggcagcccttctgggaattgctccctggtgctcgtgtgcactccatcccagcccttagagctgctttcctggcttttgtctcgtgtcctctgaccacctatcagggcctgtccatggggctgtgtctgcatgggagcagccccaaacacagtccttgtcagcaccccgatctggacctgaattgggcccttgtgctcactacctgtggaccaaagacaaatcaggttctccccatccccagagtggggaaagcagtagtgtgggcctccctggggtccccacgacagtgtaatgagtacgggcacggagcctgctgcatgtctctatggacatttccataacttttctttttttttttttctctgagatggagccttgccctgtcacccaggctggagtgcagtggcacaatcatggctccc

SEQ ID NO: 3339 - DNA, 806 bp, Homo sapiens
ctccagcctgggcatcagagtgagaccctgtctcagaaagaaacaaaaaatatatagtgtgtggttgcaacttttgcacatcacctggagttctgggcaaggggagaggaactgaggttggtcacttcttgcatggatggctttgggacttgggtgggttttttgctccacagtacttttcaccctgtattttctcataggttttgccccactagagctttatgtagagattggggctctcaggtcccatatggaacttactagcgagagttccaagtggcaagtccctttcctgccccggcattggtacaaggctgccttgctgttggaccacaatactccaagagtccagctcccctgtttgctcaagtctgaagcaaggtcccacttgggagttacagatcagagtcctttgatgtcagagcatcacagcggaattctaggccaccccggcagtgagtgctctctgcagatctgcgagcggtgctggtccgccccrccacctccacccctagcaccgtatctgtgtgattaaagctgtgacctcccccttgggtggaagccttccagtccttggaatgagaatcttagctgcttctgtctgcagaggatctctttgtgggatttttttttttttttttgagatggagtcttattctgtcacccaggctggagtgcagtagcgtgatcttggctcactgcaacctctgccttctaggtttaagtgattctcctgcctctgccacctgagtagctgggactacaggcacccaccaccacacccggctcatttttatatttttggt

SEQ ID NO: 3340 - DNA, 1004 bp, Homo sapiens
gatatgatgtctggcatttgctccagaaaagagaaaaacatttggaaagttgatagatgaaataaaaacaacagaaagttgctagttcttaaagctgcaggatgaatctatggaggttgaccattctttctacttctggatatatttgagaagttccagaacaaacagctttttgaaaaggtgagcattgcttttgtatcacaccatttgtttgattgtcctctcctctcatcagggcaccacagcccgctattaagaattaaagagaataagacagtaactcatctcattttccaagctctcaagcagaaataggcctatttcctgaagatctgttccatgattcccagatactgcttttgctcagtctctgtttaatatggactttatgggatagggctccctaaaatgacaaaggcttctaatggttatcagtttaaaactttatttttgcctcattcattttctcaaggtcatgtatccattggaatagaaaggcatttattgaaagaattgaatacatcataatatgggctataaatagttcttacatggtgggagtcatattcaacatttcaaggttgagctgacagttggttgaccataatattactttgmaaatttctttggaattaagcatttcatagcattttctaatcaggagcaaattttctataaatgttcaaatttttagaatccttagggagctgggataatagtcattgcttaaaatgtatgaagactaaaagccagtcctaaacaagtattgcctttctcttgtgctgtgcattttcagtctcagttttgatcccagagatagaggtgaataactttcttgcccatttccccttactaaacgtgcactgaaccttttctttttactcatcagattggcattttttatttctaatccttttcagccgttctgaccaacttaaagtttcataataattcaaggacacttccacaatgaaatactatgtttgtgcacacacccgcagagt

SEQ ID NO: 3341 - DNA, 1195 bp, Homo sapiens
tgcattacctgttccaaaaaataagtaagtagttacatttaayaaaaaatattgcaagaagaggaggctgctttctcattccctagttacatgttacattttctggtgtgctctttctgcctatctgaggaagatgaggaaagaaatggtaagagaagacccagcagggagcagtaggagcctggtagggctgggaagcttgagactctcaggggccagtgaactcggaagatgtcttgaacaagaggcagtagttgatggaagtcagaaagaggtggggtcggaggctgtctctgccttcagaagattgtgtcaagggagagcccaggccacccatggagaagcctttgcataccacaatatcagccaatccgtcttagcaggagacaaagacagccaagataaactaaatctgcagttaagtaacagatgcttttctttccatcatcttcctctgcaaggcaacactccaggagaaaaagggagccagaagatgggtgagagaaggagagagaggacagatgatgcccgtctacacatccggtcccttagtctagtccagagggcaaagaaagaagtagataagcagtaaagtgggcatgagatggagatgtggaccttttaatggacctttcacttattatctttttcaataccttgttcatctatgcaataagtaagtaagatgttagtaataaagcttgataatgtaacaaatatccatgaggccactatccaacccaagaacaaaaacattacaatatcatttttaattgtactaaaatacacacaacataaaatgtatcattttaaccatttttgaatgtatagttcagtagcattaagtaaattcacattgttgtgcaaccatcaccaccatccgtctccagaattcttttcgtcttgtaaaactgaaaatttgtacccattaaacaataattccccattcctccctcgccactgccctggaaaccacaattctactttctgtctctataaatttgattactctaggtacctaaaaaaagtgtaatcctaaaatatttttctttttgtaactgtcctttttcacttactgtaattcaagtttcatccatattgcagcatgaccacaaagtttggaaaccagcccaaaatattaccaagccataggaaaaggaggatccacaaaatacagttgatttaaaaatgaatg

SEQ ID NO: 3342 - DNA, 583 bp, Homo sapiens
tgcagtggtgtaatctcagctcactgcaacctccgcccctgggttcaagtgattcttctgcctcagcctcccgagtagctgggattacaggtacctgccactgcacctggctaatttttgtatttttttagtagagacggggtttcaccatcttggccaggctgrtcttgaactcatgacctcgtgatccacctgcctctgcctcctgaagtgttgggattataggcacgagccaccgcgcccggcctgaggaattttcttaaatgaatttttaagttgtttcatatcaaaaaggtcagcatcttcacctggtcctttactcgtctgaaaagcatcccaaactttcttgtgctgatgaaattgagtataaactgtgtctcaaagggctgcgtcatagggatatttgcatgcttctcacacagcagaaccaagtgctgaacgagagagtcctttctctgccggaaatttaaagtctgcagttgattttcagacaaaaaatcccaggctttaggattgttgtcatttccgtcatggggttcctctttctctcttttctttctttctttctttctttctttctttc

SEQ ID NO: 3343 - DNA, 583 bp, Homo sapiens
tgcagtggtgtaatctcagctcactgcaacctccgcccctgggttcaagtgattcttctgcctcagcctcccgagtagctgggattacaggtacctgccactgcacctggctaatttttgtatttttttagtagagacggggtttcaccatcttggccaggctgatcttgaactcatgacctcgtgatccacctgcctctgcctcctgaagtgttgggattataggcacgagccaccgcgcccggcctgaggaattttcttaaatgaatttttaagttgtttcatatcaaaaaggtcagcatcttcacctggtcctttactcrtctgaaaagcatcccaaactttcttgtgctgatgaaattgagtataaactgtgtctcaaagggctgcgtcatagggatatttgcatgcttctcacacagcagaaccaagtgctgaacgagagagtcctttctctgccggaaatttaaagtctgcagttgattttcagacaaaaaatcccaggctttaggattgttgtcatttccgtcatggggttcctctttctctcttttctttctttctttctttctttctttctttc

SEQ ID NO: 3344 - DNA, 985 bp, Homo sapiens
ataatgaactaattgatatagacttgtgatttaaacgcagatacaacaatgtctataaaagctttgaaatatgaaagaggattatgcttcactgtgtttatgtgctttcctttaagatatttaaaagtattaagtactttgggaaagtttttcatttagacaactgacacacttcaaaagattgttgaatatattaaatttacaaaattagtttttaaatgtatgaaggaatttacttaataagtgcataaatattattacacacattcaaagttctcctaaatgtggttactaaaattctttagatttacaaatagaataataagatcaggaagctgcatttaaaaattgtgagaagccggtgaaactgcgtctytactaaaaacacaaaaaattagctgggcgtggtggtaggctcctgtttgttgtctcagctgctcaggaggctgaggcagaagaatcactcgaacccgggaggcggagcttgcagtgagccgatattgcaccactgcactccagcctgggcgacagagcaagactccgtctcaaaaaaaaaaaaaaaaaaaatgttgtgagaagcagtttttggatttttaactttaataaattgattgctaaatttttaagcaaaagtgagcctttgaatagtctgttttgtatacaaaagtcactttgagaacaaaaatattcacatttaataactgacacttgcactatcctcctcatatcaactcaataggactaagaaatacatttttaaaataagctcctacatataaataagagcaatctattagaaaaattggctactttgtataaaaataaaatagaaataaccaaacaatatgaagttatatttcactcatagtttagaaaattataaaaatcaaaagtattatcccacacagtgtcagccaatgagagtgcaaagatgcaggctcatatgaagataagaatgcaaaatatatatgcaagttttaaaatg

SEQ ID NO: 3345 - DNA, 630 bp, Homo sapiens
agagaaaagcaacaagaacaagttgtttgctgaatatgttttgtgatttcaaaaatctaaaaaaaatccataagaaataattacattaattattgctcagtcatacaattaaattgatctataagtgttgtctaacaatgatgcaaattatatcttgattagtgataaaaagccatctatctgttatgtacgcactgagcttatatctttaaaagacaaaaaagataaatccttatctaattgtgtttattttcatatgggcattgagatatagtaagcagagttccattctataccattgatattggtgaatttgaacaaggtatgaggtatgagtgatgttgtcaagagttctagtaattctatttcattgtattttctcagttgtgacaataaacacatttttttwaaatttcaaaattaaacaagcttcaaaaaatgttaaatatgaaaaggtaaatggtaccaaacatattctcccaccagaaacaatttaaaagtggacaaacaatataagtcaaggttttcaggattgaatgacaaagtatgtaaaattacaatccttgaaggaagaaaatcacaaaaagtgatacctacttttatcaaagctttcgttggcatatggagatg

SEQ ID NO: 3346 - DNA, 641 bp, Homo sapiens
aaaccataagagggctcattggtatgctgagcctggcagaacagaaagatgaacacctggtgccttgatgacatggtagagctgctagattaaccaacagggactatggccaggcttctagttgtgaaataccaaatgcccccactctacaaaccactgctgtagggtgagatggggagggaggacagtgaggtctgttcctggcggctgaaagtatcttgattgactcataaactccatggaaggggaggttgaatagaagacacactgatgagcaaaggagccagctgaactcataattaggcctaaataattgttattattgaggctgaaatgaaagggaaagtattcccagaaggtgagaagcacaatgttaaaaaaaaaaaaaaaaagaacaaatcttgaagaaataaaattccaggtgttttcaagaaaacctgggggatatggtggtgcagcggagaagtaaatctgtgctaaagattttgtgcattgggtaggataaacgggaaagttctagatcagcagttctcagccctggctgtacgttaacattacgtggtacattaagtgctgacwttcaggccccaccttggacctaaactctggcagtggtgcctggttatcatgttttttaaaat

SEQ ID NO: 3347 - DNA, 538 bp, Homo sapiens
tggttgctattccctttccaggagagcatcctttccactctcttcccattgmtaactcctagacacccttcaaggctcagctcacacatcagctctttcggcaagccttcgtgggtgcttccacaaccttctattattgcactcatcccagtgcattataatgtttttgtttatgtggttcctcaactacacataaagtgggaactctctcaggatcacataagtgttttttgttttgttttgtttttgtatttgtgtttttgtttctttttgtttgtttgtttgagacagagtctcactctgtcacccaggctggcgtacagtggcgcattctcagctcactgcaacctctgcttcccgggttcaagccattctcctgcctcggcctcctgagtagctgggattaccagacacctgccaccatgccctgctaacttttgtatttttagtagagacagggtttcaccatgttagccaggctggtctcaaactcctgacctcaagttatctgcccgtctcagcctcccaaattgctgta

SEQ ID NO: 3348 - DNA, 515 bp, Homo sapiens
gtataagcttggaaaattaacatttattgagtatctggccaggcactttacataaagygttatcgccatccttagttcaccagaggaggggtggttttagagatgagggacagtctcagagaacttaggcgtaactacgccagcatttcactagtagtgaaataaatgacgggcgtgtgaagtccaggtctgtctggattccccaaagccccttacaccatactacctttggaaaagcaatggaaaagaagaaatcaggcaagtgatgtatggacccattatacttcccccactctcattttaatatcaccttggcaaagctgaagagcagacatcttcgtgcctccatcagttatgccctctgggagtctcagttcatcccttcacacgcgggatacttaactctgcgggatctaaaccctggccaaaataaattttaaagctggaaaaaatccacactgtaccctttgcattgccctaataggctgaaaatagccatgataaccaaattaagg

SEQ ID NO: 3349 - DNA, 515 bp, Homo sapiens
gtataagcttggaaaattaacatttattgagtatctggccaggcactttacataaagtgttatcgccatccttagttcaccagaggaggggtggttttagagatgagggacagtctcagagaacttaggcgtaactacgccagcatttcactagtagtgaaataaatgacgggcgtgtgaagtccaggtctgtctggattccycaaagccccttacaccatactacctttggaaaagcaatggaaaagaagaaatcaggcaagtgatgtatggacccattatacttcccccactctcattttaatatcaccttggcaaagctgaagagcagacatcttcgtgcctccatcagttatgccctctgggagtctcagttcatcccttcacacgcgggatacttaactctgcgggatctaaaccctggccaaaataaattttaaagctggaaaaaatccacactgtaccctttgcattgccctaataggctgaaaatagccatgataaccaaattaagg

SEQ ID NO: 3350 - DNA, 1238 bp, Homo sapiens
gggattcctatgtttacaaaagttaatttgggcatctcctgagcttggcagaaaaggatgaggatgatgtttctgtaaaatctgaaaatcaaacaaaggcaattttgtttactatagatggtttttaacacaccttagtcatggccttgacaaacctgatgtgatttaagattctgttgatagctrttgcccaagtgagatctttgaatacctactttcaattaatataacttgtaatttctctctggaaaggatagagtcctaatcttaggttcattctttttacaaattaattatgtagggtagaatttacaggattgcaacactgttgtgttagaaatctttatatagtaagaaagttatttgcttctaatattcgatgttttggggcagctgataacttgtgtagccatgactattgagtcagaactgttacaattcaggcaccctctataggtggactttccagtagttgctttaatgaaaacgtggtttttgtggcaatacttttttcctttaagtaaaaaattttaaaaaacaaaaataaaaagtctgtgtatttagtagcatacatcttacagatcttgggaaaaaaccccaagtccctttgtttatgactaaataactttcttcctatatgtagaaatgagtattgtcctgataataagcataggacaactccttgacttgagattaactccaatggcatatatggtctgtagatatttttgtgaaaaattacagttgtagatgtttcagggtttatttgtgaactcagtttcactactaacaaggcaattatactacttaacatgttaaacaggttttagaaaatagttttgtaattataagggtaataagtgaaaagtaagagaaacaaaaggcataaaacaaaacaatgaatattttaatctttatttttaaattgttttcttacttttttaaatactatcggtgaatctggttactgccagctgttgttatgtcagtcgaagacttagccagctatcaagtcatgatccgctgtggagaagacattgcaaaaaatactggctgatatctgagtgagtattcgaggaatatgtacttctgaaaactggcccttggcttcttccataacactagtttgtcctgattctcctctctaacccttgtctctttatctcctttggtggctcttctcgtgcctgctagtaaatgttggtatttgccaaggttctgtccttagcccactgctg

SEQ ID NO: 3351 - DNA, 1238 bp, Homo sapiens
gggattcctatgtttacaaaagttaatttgggcatctcctgagcttggcagaaaaggatgaggatgatgtttctgtaaaatctgaaaatcaaacaaaggcaattttgtttactatagatggtttttaacacaccttagtcatggccttgacaaacctgatgtgatttaagattctgttgatagctgttgcccaagtgagatctttgaatacctactttcaattaatataacttgtaatttctctctggaaaggatagagtcctaatcttaggttcattctttttacaaattaattatgtagggtagaatttacaggattgcaacactgttgtgttagaaatctttatatagtaagaaagttatttgcttctaayattcgatgttttggggcagctgataacttgtgtagccatgactattgagtcagaactgttacaattcaggcaccctctataggtggactttccagtagttgctttaatgaaaacgtggtttttgtggcaatacttttttcctttaagtaaaaaattttaaaaaacaaaaataaaaagtctgtgtatttagtagcatacatcttacagatcttgggaaaaaaccccaagtccctttgtttatgactaaataactttcttcctatatgtagaaatgagtattgtcctgataataagcataggacaactccttgacttgagattaactccaatggcatatatggtctgtagatatttttgtgaaaaattacagttgtagatgtttcagggtttatttgtgaactcagtttcactactaacaaggcaattatactacttaacatgttaaacaggttttagaaaatagttttgtaattataagggtaataagtgaaaagtaagagaaacaaaaggcataaaacaaaacaatgaatattttaatctttatttttaaattgttttcttacttttttaaatactatcggtgaatctggttactgccagctgttgttatgtcagtcgaagacttagccagctatcaagtcatgatccgctgtggagaagacattgcaaaaaatactggctgatatctgagtgagtattcgaggaatatgtacttctgaaaactggcccttggcttcttccataacactagtttgtcctgattctcctctctaacccttgtctctttatctcctttggtggctcttctcgtgcctgctagtaaatgttggtatttgccaaggttctgtccttagcccactgctg

SEQ ID NO: 3352 - DNA, 624 bp, Homo sapiens
ttttttataggtcagcccacatgagtttttatacagcaaaaatcaatatctccctacccccacctaaaagcatacaaacctttccaatattactttcaaggagacctaagtggcttatcatgatctccaaaatcacacataatttggctcctgcataccctatcacccattcacgttaccaatctaacttactcagacccaatcacaatggattttcttctttctgtcttttgaccacagaaatcttagttccccttgcaattcctttgccctggaatggtctatttcaaggtgaggtctcaacactgacttctttttaaattattttctttcctagttttttacttctttgtttatctccctcctgcttattcacatgtaaaatagaatagaagctgagaggtgacaatgtgttagcagcccttgctcrctctcagtgcctcctcggcctcgaaaggcatctgctctggccacgctttaggagcccttcagcccgccgctgcactgtgggatctcctctctgggctggtggaggctggagccagctccctctgcttgcagggaggtgtggagggagaggcgctggcgagaaccagggctgtgcatggcgctcgcaggccggcg

SEQ ID NO: 3353 - DNA, 638 bp, Homo sapiens
aatcacagcttgtacaaactccatccccgtcacctctatgctaggacaagtgccttaggaccaagtccttaagatacctcatggctttctgtagctccttgaattgcatcacaagacgtttgtagtccgaggttagagactggttctcctcctgaaactgctttatttgcttggcatattttgatctcagattgttaagtatatcatgcaggctggttgaaggagaaaaaggttagtctgcagctgaatagaaggtattatgtatgttcctctcatccacctgattcagctctaccacaaacccaggagcagatctgtggaagagcagaaaaccctcccatatattccaaaacacagatcccattttgatcaacaaaaggaaggcaacaggagatcttgggacagtccaaaacgaaacgcattgaaaacaatccagagcccattcccaccaagaggcagcctcctactcaagactgtggacagaacctacttcacaatacatcatttgtcagaatgcccatacccatacctagggccagcctcacatatttaaataatctatctcaacgatttcattgtcatgacttggatgtttaattcaatcatgaagcaagraaattttaaagaaaaaaaatgca

SEQ ID NO: 3354 - DNA, 819 bp, Homo sapiens
cagtggctcacacctgtaatcccagcactttgggaggctgaggtgggcaaatcacttaggtcaggagtttgagaccagcctggccaacatggtgaaacccgatttctactaaaaatacaaaaaatagcagggcacggtggcgggcacctgtaatcccagctattcggcaggctgaggcagcagratcacttgaacccaggaggtggaggttaaataaatacataaataaatagtcattactagataaacttttcctaaacaagttagttgtttctatgtatgtatatatttacctatttctttgtttgacacagggtctcactctgtcactcagcctgaagtacagtggtgtgatctcagttcactgcagcctcaacatcctaggctcaagcgatcctcctgcctcagcttcccaagtagctgggactatagggatgcaccaccacgcccggctaatttttgtatttttatttgtagaggtggggggtctatgttgtctaggctggtcttcaactcctgggctcaagcaacctgcccaccacagcctcccaaagtgctgggattctaggcataagccaaaatgcaggcccttctaaacaagttaatatattttaattttccagtactaaagaatgtggtaataaataacctttagatgcaagcttttgggtgggtacttctcactctacacattttccattcacacatgcctataaacgcttattcaaaattcagacctctctcctgaattacagttccattattccaaatatctgaatgtcctcatacatctcaaattcaatatgtcctaaaataaac

SEQ ID NO: 3355 - DNA, 819 bp, Homo sapiens
cagtggctcacacctgtaatcccagcactttgggaggctgaggtgggcaaatcacttaggtcaggagtttgagaccagcctggccaacatggtgaaacccgatttctactaaaaatacaaaaaatagcagggcacggtggcgggcacctgtaatcccagctattcggcaggctgaggcagcaggatcacttgaacccaggaggtggaggttaaataaatacataaataaayagtcattactagataaacttttcctaaacaagttagttgtttctatgtatgtatatatttacctatttctttgtttgacacagggtctcactctgtcactcagcctgaagtacagtggtgtgatctcagttcactgcagcctcaacatcctaggctcaagcgatcctcctgcctcagcttcccaagtagctgggactatagggatgcaccaccacgcccggctaatttttgtatttttatttgtagaggtggggggtctatgttgtctaggctggtcttcaactcctgggctcaagcaacctgcccaccacagcctcccaaagtgctgggattctaggcataagccaaaatgcaggcccttctaaacaagttaatatattttaattttccagtactaaagaatgtggtaataaataacctttagatgcaagcttttgggtgggtacttctcactctacacattttccattcacacatgcctataaacgcttattcaaaattcagacctctctcctgaattacagttccattattccaaatatctgaatgtcctcatacatctcaaattcaatatgtcctaaaataaac

SEQ ID NO: 3356 - DNA, 2777 bp, Homo sapiens
  misc_feature (1)...(2777): n = A,T,C or G
gtttttctttytttccttctttttcttatctatattttctatagtgaacatgttactcttgtaataacgggggggagtttttttttaaagtgttatccacacccagtaaaaatgattatacaatcttttaactaaatcttattttcatcacctaaaaactaagttatagactgtgcgttctgcaaggaaaaatacatacatatgtacatacatacatacatacatagacacatacatacatacatacatgcaaagaaccagagtcaaaaatcaaatactttatgaagtcttcttcataaagtcttatgaattccctctgaagtcttcttgtattatgattttatctcacatgcttcttaaccatcttgaaattcgtgtgcgctgctccacataatttaatacttgttctttaattgctccatttctggaaattttatttattccacaaataattattgaggacttacatgctacacacagtacttttttctgagtgggagccatctgttacgtttccactgcatctctgttttacctactccagctctggcataaaattcagtgtttaaaaaacacacagtcattgatttttctcatctgcattacaaacatttgtgagcacctaccatgcatcataattatgctaaccgctaaaatgaagctttgaagagattttttaatcctgataaaataaaaagagcactgtagattagattagcaccaactctgtcattaataagttgtgtgacgttaagtaaatcattcaacctttcttgagcctccttttttctcttatctgtaacatgggggaatgaaagtcagactaaatattcttaagattccttttggctttcaaaattaaataatatacctggcatgaccaaatcttaagcaatctaacaatttggacacttctatgaggctgggaagaatatattgcatatagtgtcacatcagggtatatctgctttctgtgtctctactctgtcttcattttgatgattagactatttgttctctggggtctgattcatgcctatgactcacagaccctcacacataagtagggctcaggagataacatcagtattgtctccttctatgttttaagaacaaaaacaaatgtctaatatgctacttttataaataagcgccatgggaattaaatatctaggaactaggaatgagcctagatttgatttttttgtatcaaataaataactaaagctaagaaaatatactttgttatgtctannnnnnnnnnnnnnnnnnnnnnnnnnnnnnnnnnnnnnnnnnnnnnnnnnnnnnnnnnnnnnnnnnnnnnnnnnnnnnnnnnnnnnnnnnnnnnnnnnnntcaatcaccctctctcacctttttgctgataccactcccacgtttaactacacaactttgcagggactgaaaacagagtaagtcatgtcacaagactttgaagataaaattatgatgtgccaaaaggaggtagcaggttataaatgagtgtcatttattcatatctaaggaccatatctgcagactctaggaattctgatgccaatctcttgaggctatgtattagcaacagtatctggatttgtgtagtttgtgttcctgactgctgacttgtaacaggaggattaaaaacacatgcacacacacatatgcatacaaataatcacatatgattacaattaattttggtggctgacaaaccaaagtgcctgccaaccctctaaagaaagagtagcaactaattacaaatatataaatgagtagtaatgtggttattattgttcagagaagttcatactggtaaatgacctttacaattaaaagttgggtaactttatatcttagaagatcttgttcatacacaatacttaaaattttaattcattttctatctttcatagctcttaaattggaccatttaatgaacttcagtgaaaacaaaaagcaaagaacactctttgtttctttttctttctctctcttgctgtatcatttcacataatagtaggtactccaaattctcaaaattattattcattgatttctctgcatgtctatgtgccatttcaaatccttatataatttactcacatacattatagagcctaaattcacatgacagagctaaaaaaaaaaaactttaaagaccacccaactgagccttggcccaaccccctcgttttagaagtatgaaaacttaggctcaaagtgtcaggtgactttcctgaaatcacacaactggccagtcagaatttacactagaacttagctttcaatacttagctaaggcattttatataaatgaagtgatgccataagtgtggatgttagtattttattttttattaattaaaatgagcaacaaatgcaaaaggccataattcttctctcaatataagttggaagagttccttttaggaaataatgacttgtcttgcatatcattcagcaactgagcatttatgtgatgggtaaaggccaaatctcacccagatttgtaacatataggcaggtcagcatttcattttgaggtggtttcctagggcctaccattacaagcctgcatcttctgtctggataaaccnataatgtggcttttatgattaaaaaatgagacagagagaattttgctttctttattattggtcatgtatcatgtaagcactatccgagtattttccatcaatgatatgtagctctctcctcaagacttgtctggtagtccaaacagcatgatcctggaaaatatacagctggtgttagt

SEQ ID NO: 3357 - DNA, 1225 bp, Homo sapiens
cctgtttttattttatgggtttgtgaaagatttttctgcattttttcccatttttatatgagcaaaccttttcaaacctttttatggcttataggcttatagattgtgtcatccttagaaaagcctactccattagaagacataaagaaaaattatatattcttctagtactttttctagattcactttaacatgtataaattatatccatctagaataaattttatagtagggcatgtagtagaaattcatatttactcaaatgcctagccaatttctccaccattatttgtttacctacacrtgtttttcaactaattttcataggttaaagcaatttatgtgtgagaggtgattttcaggttctctattatgctccactgatatgtcagtctactctataccaaccatttattaactagagctctatcatttgatgtccagctgtactatttcctctgccattatcccagtccttctctttgacagataatttccaatttttcttagatatttcttttttcatttcaacttaaagaacagttttcttacttgatacagataaagcagtattacataaaatattaatttagaaaaaatgacattttgaattatttaatccttctatccaataacagaatgtgcttttaccttttattaaggtagtcatctctggattgttttgttttggtttggtttgtatttttgttattctgaaagagtttgtagtagggcatttgatgtatttagattgtcaattgtaaatataatatttgaatcaatttctttactcactgattattattgtactagcatatatgaaattttatatgtttgtctaagttatttataatcaaagcatattactgattgtacttattacttgataattttttatatctatttgctgcattctattttgtaaacatgtatatataatcaaactatatagaagaaatatagtttacttccattttttccagtcatatacatctttttaaaaatattttacaaatatatatgttactgtggagacactctttttgagacatttagaattctacactccattgtctttactcttcctgttcttaatatttattatctctgctactctcagaaaagacttgagcagaaaataagggaataaacaaaaagcagtagcacctggttcatatttgctatcacctctgtgtcatcctcatcagtcatcctacctgaagcg

SEQ ID NO: 3358 - DNA, 1241 bp, Homo sapiens
aaatgtttgtcttttgaatatatttagctcttttaattttcattttggaagggaacaatcaacacttgactatttaacccaaaccacgttttcccaaagtgtgatttgcagaaccctgatttaagcagctgtttgataggaattaagtggtagaaagacttcaacaatcaaacacatttggaatcacatagctaagcaaggttaaataagtttcttctcttcatgagttagagcattagatgtgcaaacatacctttgaatctgttggcatatgcagattttccacagtttttgaatatggcactttttaatggattgtctcacgataaaaatattttatggatttcatgttacatacagcatgctttgcaaagtactactgtagactaaccgtatatatttttctatgttttcctaacatttctgcctttttataaaactattttcctttcatcctctgttcctgtttgcttagttttctgaccttacaaagcccccactgagcatggcttagcaggaggtagaagctatttattgtggtgacaagctaagtaacctaagagggtaagtgcataagaagagataaaaggatgttattcttaaaaaaaaaaaaaaaatcactgtttttttcctggtctactagatactttgtagactcatttcactataatacaaattactacatagaatgtcaacctaaagtacatcttgcctccaaatcccttctgggtagccatataagctattcagcgatttcattagcctctgaattgtcataatccacatactattaatagcatttaggtacttgggtttaagtaaaatataaaatctaaaaawaagaaagacaaaggaggttaaaagtgctatgaaacttcactatagttaatagtacatgggttctttttcatcaataccatcctaaccctcctattgagtgattattatgttggattattaattcaatgattatggcttccttttatactaaaaagttcaggtgtaaattatgatggatataattctgcaattatttgcgaaattcagcctgatattccttgtgactcatttattatagaattaataggtgattttccaagattcagtatttatgataaacaagattgttctggaatgaaacaacttcccgtaaaagtaaattacatacactaaagcacagaaccccacaatgacttttttctccctttctatgactgtaaatcagatgaaatcatactatg

SEQ ID NO: 3359 - DNA, 2637 bp, Homo sapiens
tgtcagggtagcttggtgaatctcccccaatctcttaaattaaaaaaagatagataaattaatatagcaaaaccaaatgtcccattgaaatatctacatagaatcacatgaaaaaatggtttcataaactctgaaatatgtgtgtgtagtcaaacctacaaaacccatgtggaataagaaactgcaagaggagaatcagaagaaaagtaaataggttcttgcagccctggaatctgatgaaccctcaagtcacccaagataatcttcccagwttaaactgagaagagtatccaaaactgagagggggattttaggcctaaacaaatgggtgattttaaggagactgtttgaaggacagtctgagccctttgaaatctagaacctaaaaagccgaagttcacatccaggataagaccctccgttacaaagaaagtgttggaaatatgatggaaatgagcaggacagagacacaggggaaaagagaagagtttaggggaatgatatctcagaaagcatgtgaacatgtttgataattttataaaaataacagaagaaaaaagctctagaatggtggagttagaaaaactatgctggctcatttttacattttgaaaaatacaaaaacattaatctcacttaaaaatgagtatctgaaatgtgttatatataaataagggaatactcacctgtaatctcagcactttgggaggccaaggtgggaggatcatgaggtcaggaggtcgagaccagcctggccaacatgtttaagccccgtttctactgaaaatacaaaaattagctcagcggctggtgcacacctgtaatcccagctactttggaggctgaagcaggagaatcgcttgaaccagggagtcggaggttgcagtgagccgagatcgccccactgcactccagcctggtgacagagtgagacttcatctcaaaaataaataaataaatagtacttaaataattatgtttccataaaaaataattataaagaaaagagaataaaaagcaggataacattcataaaagagtaaaagcataatagaaagacctgctcacaaatttaaaaatatatcctggtattttaaaatgatctaaaattagtgccaaaaaaaaaacaaaaacaaaaaaagaatgagttcatgtcctttgcacggacatggatgaagctagaagccatcattctcagcagattaacacaggaacagaaaacccaacactgcatgttctcactcataagtgggagctgaacaatgagaacacatggacacagggaggggaacatcacacactggggcttgttggagggtgtggggcaaggggagggagagcattaggacaaatacctaatgcatgtggggcttaaaacatagatgaggggttgatgggtactgcaaaccaccatggcacatgtatacctatgtaacaaatctgcatgttctgcacatgtatcctagaactcaaagtaaaattaaaaaaattagtgctaaaagaattgaagctgtgaaagaacaaattaaatcacaagtcaaagaaaataagaaatgaggtcaagaaagtatttgaaagaaagagatataaaaacaattaaaattttttaaaaaatagtcatagataatttcataagatatataaaatacggaaatatgaaattttaatattcttaaatgaaaaattcaaatggatttgagttaaagtattagatatagcatatgagacatgataaatgaacaaactaaaataggattttttccccctacaaagcaaaacaattcaacagaaagaaatgtaatttttaaatgtaactgaaaaaaaatctactgtaaacaaaattttgcagtgtcacagttcatacataaagtaacacgaagtgacccacagattgacatatcacaggaaaagtagtgttttagtagaaagggaaagaaaaaaataatctttggatatttaggcagacaggttacataatgtacaaagaaaggaaaatcagcttgtcatcaatctttttgacaatgcttaagaccataagacaatgagataatatatttagaatattcaagcaaagaaaaactaatattttatatttagtcaaactggacgagatatttattaggaccatacaacactcagaaaaaaaaattttctatgatttttttagaaatacagcaggtgaaatatttcctacaattaatgatgagatttgtaatttattttaatagttgatgattatcaaattgttatagcatgttgatttttggatacatttaaatcatgctttaagacaggactataacaatgaggtaagcattacataatttacagttatttaaggttttcaggaaaaatattagatttcctcctaaaatgtgcaggggagtggaataattatttaaagctttgtgaactactttaaaaaaattctgatagcctgtgatagtagcagattggataaattataaacacagttaaaacagaagaaaggaggtaaacgtaaggatgttgcaattatctaggtagaaacaatggtgattatctttctggaacctctggtaaacatgaagaaggttcaaactggaatttattttaaagaaataattagcgggattcagtgatatagagaacataaag

SEQ ID NO: 3360 - DNA, 1324 bp, Homo sapiens
tgcatgattcagttctttggatctaggcctttggttccaagtatggaaagacctctgcagtgggatttgtagtatatgcagtaaatcctaaaacttttttttttttcttagctcttcctacagcaggagctaagaagccatactgagcacaatttctgagttgctttcacctttccttcttccatgtaatctcttccttcttagtcttttagacagctctattttcagctttgcatccgcagagtgaaccagagaagatctctggaggccagcagtcatgttcgattttgtgtgagcaaggactaattgtatatttgaacattgctctcatggggcatttgcttcttattttaataataaagcttgcagtgattataactactccacaaaggcaaatttcattcakattgcccctcaaataaacatcatggtactaacagtagtttagtatgctttagataaagattttgaaaaaaaaaattctgccttctctgtcattcctttgtgtctgcaagaaataagaatgcaacaaagaaaccaaagcatactgaattagttttctgatggtatcaataagggaccttttgtgggtaggtgtgcttggcatttctgacaactccttgaatacctccaatagctctaatttgaagcttatgatttcctatggctctcctgtccatagatttatttaaagctctttgtttttagctcacaccaaatttctggtaatgaattagttatgttcccactttcatattgcaatataatttagtattttcttaaattattcactaataactttgtttctcctttttaaagaactgttatttttcatgaacaggaagtatctcttactttaatttcttatttctcttctgaaaagcagtccactccttgccaaataaatgtgagttctgaggattggtaggcatctttcttggaagctcttctcagccaagtagaaagtctctcatgggactcagttttatagttagttctcttctctacatttagtatgaggctctcaaaagcaaactttggaacttatgttttgcagctctgcttgagcaaagagtatggttttggctggtcttaccagaggatgcagttcaaacacaataatttttgaagacttttcaggctgtcaagcttcttcccatcttttgacttctaaagagctacatctgggctctgaaagtagttcagaacagtgcctgaaaaagaacagctttaatagtcaaaagggaaaaatatgtaaggaacaagttaaagaatgggcaaaatcttcatgtttttgctctttaacccatataaactaatgaga

SEQ ID NO: 3361 - DNA, 747 bp, Homo sapiens
  misc_feature (1)...(747): n = A,T,C or G
aaggttccagttatgacctaaatgtctcccaaagattccacctgctaatgctatcacattgatgattacatttcaacatataaatgttggaggcacacaaacattcagttcataacagagatctactcacagcataggantttgcttctttcaagccagcagccaagaaaatctcacttcagtctgctgtaggtaacatggcatgatcaygggagtgatatttcatcacctttgccatggtctgttgactagaagctagccagtattcattcaaagaggttttcttcaagggcataactcatttagggtcatgttagaattctgctttcccaagacagaggaaaagttcagagaggatgaatgtagcagacgatatcaaactgaaagtgacagaatgttcatataggtgtgcattcaggaattacctggtgtcatgggtcttagctgtggctgaacattagcatcaccgaagagactttaaacaaataaccccatgcctggagagtctgatttaattagtctaggttaagacctgggcatcacatttaaaaaaaaatctccccacataactcaaatacatccagggttgagaaacctgatctagtccaactaccttgttttttagatgaggaagttgaagcttcattgttttttagatgaggaagttggaagagacgagggagtattctaagaaaataaactctgttctaaaaaccaggtaggttatgtcttcttgaaatacatgca

SEQ ID NO: 3362 - DNA, 504 bp, Homo sapiens
tgcctaaatgttccggaaaaagcagaaaggggagaattttgccaaaatcagrgcatttccccaggaatatatctagtatgtgaacattatttcccatgtattatggcagaatacagggttggaaccattattttagagtgccaagtgcctatattgtaatatgatcttgcctgtatggtactcctaaaagctgaacttctaggttcatgtcatggtaataacagcagtacctccaaactcttctagaacaaataacaatgaaactattttacattacttgtattaaaaatccccttgttctatcttttattactaaattgtatcaataatttattttctacaaattatttcaattaaataatagattgcaattccctgccaatagaaaacttaggaattcatatattatacaaatgaaaatattaccagtaattaatatgaataactgaatgaagaaacattttaacatgttaattattttagctctgttttcccagctttagt

SEQ ID NO: 3363 - DNA, 1208 bp, Homo sapiens
catataaaatatagtgtaagatcattcaccagacacctgggtggacaaacagctcagtaaatagacagctagacaataagttagagaaccgagaaggaaatatagcaaaacaataacagtgatattttctaggatgtatgcaagaattatatgtgacattaatttttaatttttttaaatctgtgttttctaaaatgaacttgttttacttgtattaaaatagttaccaaaaatttttatctctaataaattatgtctattaaatatcattagtcctagaaaatttgccatgtaaaaccacaacttggggtagccgtccttcttgcatgagtctccctagtagctggggctactctagactcctaaagcctgtgttaacacacagcttttatgtccttagtttcttctatgtcactgcttccagatcttggaggcttagtaaaacttgtaacttccttactgttatattcatttgtatatgcaagaatttttctctccaagcagccccaggccattttgtcaatctgctaatctgtcctcagatttcatgctacttggcacaaaagtacaacatcggaacttgtaaaaktaacagtagcccagcctggagggcccatgttgtaggcaataaattttccttcctgggtctgtctttcaaagctttcactcccttaaagtacacatatttacatttccaaatgataccatgttatagaaaataccgcatgattgattgacaatagccctcatgaggaagttgttcaactcataacagacttgtagcagatataaaagatgaaaagaaaggctttcatttttgttttgtttttgaaaaatatatatgctattatgatatcattgtgcttttttctttgaactattaataggagaatgatggcattcaatttggaaacatcaagttatcctggcacttgtgaacccaaagtgtctgagacaggtctcaatcaatttagaaagtttattttgccaaggttaaggacatgcccgtgacatagcctcagtaggttctgatgacatgtgcccaaggtggtcagggtacaacttgcttttatacgttttaggaatacatgagaagtcagacactatgtgtaggaagtacattggtttggtccggaaaggtgggacaactcaaagcagaactgggtggggggcttccatgtcatgggtagataagagactaacatgca

SEQ ID NO: 3364 - DNA, 574 bp, Homo sapiens
tggcaaagagcaaagtgttactacctaaaggggcaacaagccctgctacaattgatcagatactgaattttgataatctctcttttaaatccttgcttttaacaacagtgaaaatcagtaagattgctgattgattttagaaacccagtgataagaaactgttgattttgcccagatctacccagcctttacttccagcttctgactcctgactttygattccgtatggcttgtctcctgtaatgctaaattattatctccacctccgtggatcactgtgttatcgaaaatacttttttagttgcatgccatataagacttagcccacactggctcaagcaaaaagagactttatttgataatataactgaataggtcaggtgtagccctggctagacaaccccatctttgcatttctcccctctgctctcttctgaatttaccccatttctaataggacccctttcctggtggtgacgagctccagcaactccatccttgtcaccttgctgctccaaggggtgcagagaaggtctgagcctcttgtcctgactcttcaggggtagccttgggt

SEQ ID NO: 3365 - DNA, 576 bp, Homo sapiens
ccagatacttgtttttccctccrctctttaatcataagaaggggaaaaaagcaagtttgcaaatctactttttttgttaagtaacagatcattttggtgaaaaatcatgtttctgcagctgacagcaaaagtccccttttctttcaatgaggacaatttggtttaaaatagcttctttacttaaatgaaccatgaatcaattttatacatcctgacaaggaaagatgaagatgtaggctttaaaactcaaaaaataactaaacataagcacagtgatgttgagacatgatagcacctgcaaacatgcttccttcttgttttgcattcaagagaaacaaagtgaactgattctcctttttaccttataaatacaatgaatcaaaaaacatgaattctgatgctacaaataagacagaaccaatccacctatagctaccttataggaaaaaaaaataggagagattttctaatctttcaagagagaattactataatttattataaatgtccaaagaggggaaaaatacacaacaccaacttgttgactcagtggttattttggagaaactatgaatt

SEQ ID NO: 3366 - DNA, 1266 bp, Homo sapiens
tatacaatctcgtgtatccaaccaagtagaaatggttagataaactgcgatatatttatacatagctataaagtaataataatgttgctatatatcaattgttacagagagatatgggtaacatttttaaatgtttaaaaagtaggaaaaatgtagcatactcctggcaagagaaaactgttatgtgtctataccaaactgcccaataaaaatagaatgcaggccaggcgcrgtggctcatacctgtaatcccagcactttgcgaggccgaggcaggcggatcacgaggtcaggagatcgagactatcctggctaacacagtgaaaccctgtctctactaaaaatataaaaaattagccgggcgtggtgatgggcgcctgtagtcccagctactcgggaggctgaggcaggagaatggcgtgaacccggaagtcagaggttgcagcgaactgagactgcaccactgcactccagcctgcgcaacagagtgagactctgtctcaaacaaaaaaaaaaaaaatagaatgcaagccacaaatgtaatttaaattgttctaatgggtactttttaataactaaaatgaagtgaatgaatcaattttaatagtatgttttaattcaatatatttaaaacattatcatcattttaacctataatcaacacccaaaattatccggtattttacaatatcttttttttttttttattttttgagacagagtcttgctttgtcccctaggctggagtgcagtggtgcgatctcagctcactgcaacctccgcctccctggttcaagcgattctcctgcctcagcctcttgaatagctgggattacaggtgcccaccaccatgctcggctaattttttttctatttttagtagagacagggtttcaccatgttggacaggctcgtctcaaactcctgacctcaagtgatccacctgcctcggcctcccaaagtgctgggattacaggtgtgagccaccatgcccagcctacaatatcttttttttttgttttcaaaataattcaggttacccacatttcatcttctcaagagctgcctatggtaactggctaccatattggacggcccaggtctattccataatcagtgagcagagacaaatgtttagaaggatggtctccaaaatggtccaagttgtgatcctgggggtgaatttatggtaatgtttgctttcgtatttatgttttccttactgtttgtttgttatgataagagttatcctgtataggtaaagaa

SEQ ID NO: 3367 - DNA, 1235 bp, Homo sapiens
ttacttaaattaactccaagactttcattaactcgtggtaggaatgtaaattagtccaagcattgtggaaaacaatttggagatatctcaaagaactaaaaatagaactaccattcaacccagcaatcccatgaccaggtatatacccaaaggaaaataaatcattctactaaaacagcaccaacactcatacgtctatcacagcactgttcataaaagcaaagtcatgcaatcaacgtgggtgccaatcaatggtgaactggataaacaaaatgtggtacatttatgccatggaatattatgcagccataaaaaagaataaaatcatgtcctttgcagaaacatggatgtagctggaggtcattatcctaagggaattaatgcagaaacagaaaaccaaatatcacaatgttcccacggataagtaggaagcaaacattgggtacatgtggacataaagatgggaatgatgaacagtggcaactccaaaagcagggagcgagaaagggaagccagggttaaaaaatactttctattggtactatattcactatctgggtgatagcattaatagaagcctaaaccccagcatcacacaatattcccttgtgacaaacctgagcatgtaaaccctgaatttaaaatctaaattgaaaaaatgacaagataagtttacggatactgytattatcaagttatcttagaaaaaatatctcaacgttggatcttaaatacacaggttttgtacatcagttatagaaactggaggttatattagtccaactctataactcttggcaaagactcttacatcttaaaatcgcagagtagcattaagttcaagcagaatagcattcagaagataaccatgtttgtcttataaattctctgagtcttgttaaataagatatttacttattatcaatgcttataaagcaattaaaattctttctggcacatgttattactgatttaaacaaatttactggttaaagagaaaacgtggttttggagacaaatctggctatcaatcccaatgtgttcacttgatagctgtgtgaatttaaacatattacatgaaaatttttagacatcagtttcctcatctgtaaaacaggtataaattcaaatggactgtaagattattgtataaaatgtgtgtgtaaaacaactaacagggtggccaacccagactaagtactagctcaacacattctatcttatcttgtttccct

SEQ ID NO: 3368 - DNA, 1725 bp, Homo sapiens
tctgtaactcatttttatgcccttagaagtatcttttgatgaacaaaagttgataattttgatgaaatgcaatgtatccattttcttcactgttttatgtttctttcactgttttatatgtgatttaagaagtccttgcctacccactaaagtcatgatgatttttttctgtattagctgttggcatctctatcgttttaccattcatatgttaacgtatgctgtgagccatgtgatcaggttcacattgctatagcacttttgatgtaagtctattgtatatatgggtctgtttctataatctggtttattgctatatttatcattgttccaataccatattgtcttaattaccatagctttaaaataaatcttaatacctaataattcaaattgtcaacttttgttcattttcaagattattctggcttgacagacttgatgcttcccatttccacagaagttttagaatcactttatcaatttctctgaaaataccttaatgggattttattgggattgcattaaagctatagatcaattatgagaaaaatttatatctatactgtattaactcttccaatcttctctggttatatattgctgtatacaaaccatccccaaatggtgacttaaaccaataataatcatttcctttcctgatgactctgggaattgtccgagctcatttgggctcagtttttcatgtagtagcagtcagatggtggcaggggtagtgttcaactcctcaaaggcttcttcactcatttgtctggtccctggtctgggaagacacaagcagatgtagacatgaactgcctaatgacatagaactcatagtatctcggttttctatttcatgaatttctgacttcatccttattttctgccttctattctctttgtctataatttgcttatcttttattgagatataggcttacataattgattttcagtgtttttcacttctaatattagcatttaaatctataatgttctctatctatttctcaatttttgatatatactttttttataattactgtcaggttcaaagtattttctaatttctgccttgatttttctgcatttcttgccgatttaaaatgagtattaattcaaaaacatcctagatcttttaggtaaccttttatttctagcttaaatttttgggtaatggaaaatactttttagaattttaatcctttgaaacttattaagacttcttttatgaaatagtgtatagtttgttaaatgtttcatgtgttcttggaaaaaatgcatattttgccaatgttgtatgcatgtcttacgtcaattaggtcaagtgtgttattccaatcttctgcatctctgctatttatatccttgtactgtcagtcactgacaagttaaatatttgtgtaaaactggggttgtctgttcctttcagctatgtcacttttttgcttcrtatgttttgacactacattattaaatgtatacacattatacttattataccctcctggttgaataactagtgtagctatcaagttttttgtgttagtatagttatacctagtttatttttccatgtggcattcttttcaacttttctcatctttatatgtaagacattaaagcatcttatagttgggttttattataaatctactgaaatattaaatttacttacaattaatagaattactaggacatttgggtttaaatcgactattt

SEQ ID NO: 3369 - DNA, 1620 bp, Homo sapiens
tgatatagagttaccacctgtaaatttgagaaactgtgaagatgaaatttagaatttccataggaaaaagttttcaattccagattgttgcaagctagcatggaagaaattggccaggaagcacaaacagctaatttctgattcactgcaattgccaccacaaaggccagtcttgggctgactgatgtacacaggactatttggttacagtttccttatcttctaattaaagactctgaaatgcagttgtggaaaccagggaaagattataagcaagaagcagagttgaattcaaatttgcaaagcacttggttggcaataagacaccaattctttgttgaaktgaattcagttcttgtttccagttcttcagcctttaaccacagggattctagcctgtatttctgtaatgattcacagtagaggagcttgaaggcatgagtgcaggtgaaagtaataaacacgtgggggcactgagtgaaaggtcaatcccagcccctcaaaaataggtcagtatccacaactcaaaaaaaaaaaaatgtagatctggattactcagtgaatcctctagaagcctaaaacagggcatcagttgggaaaagatcaagaaactttgccacggtcttttgatctttaaaggtgtacatgtctactagaaaatgagaagctgccaagaaattgataatttttgatgtaacgactccagaatacaactcccagcagcttacgtatgctctgaatttaccatgttagtgggtatgaataaatgttattgggcataaatacatttcagacccctactggaagtcagggaagctaaaccatttgattggtatcttaagaaggatcccttaatacttcctgagaccgagtttcccagagatgccctgagtcctgctcttctaaggtttggggcactaggatactccaatatcctacaactttttgaaaaacacctggctagttcactgtcatatggaaccaaatgaaccttagttgattaattgaactttaattggtcaatatgaaagtcgttaataatgtaagctttattcatgtatgtagattattggatactaataataaacattctaaaaaccagaagttaaagtctaatttttaattttcttcaaaagtttaatttgtaatttccttcaatctaacctaaaatgtgaataaactccaagcctggaagtcgtaagactttttttttttttcataagcaacctgataaggaaaaaggtaacaattatgaaatatttgaactagtcaagttgtatttttctaaacatacataaagaacttattttgtttgctattgataatatactattttatttaattacttatttcatgtgtattatcttgtttacatatatagcctatggaagtaattatggattaactttgcctgatatttccaatgaattctccatagcatcaagcacaaatgatgatctcctaggacagtggcagcttctgagaatgcacaggaaagtgaccagggaaagaatgattccatctccaggaatccctggtgatcttcagagcccagacaggaccctgctgggccatggtaactgagaaactgagaagcagatacagtggtccctatgttgg

SEQ ID NO: 3370 - DNA, 542 bp, Homo sapiens
aaccctgcactacaataaactggatcagtctattacgcctgcagtatttgcawgagatttttgttttgtttgttttgctttttaaaatctcctctgtactgtctcacactaaaaagacttcgggatggcccttcatctttccgatttgctacattattctgctgtggctcggaaaacatttgtttcaagcttcaggcattcatatagcctatgaaagatgacattagagctatcttatgagtaaagcttagcagctcagaggcatagagtaataaaataatttaatattttctaagcttactttggttcatatctattcaattagcagaggtaaataaaataatattttctaagcttatttttggttcatatctattccaattactagaggtcactggacttcaaatatgtgaagaaaagtttctggtttattcaaaactaaagaaccaactaacaaatgaaaactcataaaacaaaataatagaaaccctacattaatttgtactctactaatatgactaataacatcttgaaaaaggttg

SEQ ID NO: 3371 - DNA, 542 bp, Homo sapiens
aaccctgcactacaataaactggatcagtctattacgcctgcagtatttgcatgagatttttgttttgtttgttttgctttttaaaatctcctctgtactgtctcacactaaaaagacttcgggatggcccttcatctttccgatttgctacrttattctgctgtggctcggaaaacatttgtttcaagcttcaggcattcatatagcctatgaaagatgacattagagctatcttatgagtaaagcttagcagctcagaggcatagagtaataaaataatttaatattttctaagcttactttggttcatatctattcaattagcagaggtaaataaaataatattttctaagcttatttttggttcatatctattccaattactagaggtcactggacttcaaatatgtgaagaaaagtttctggtttattcaaaactaaagaaccaactaacaaatgaaaactcataaaacaaaataatagaaaccctacattaatttgtactctactaatatgactaataacatcttgaaaaaggttg

SEQ ID NO: 3372 - DNA, 1254 bp, Homo sapiens
tgcattacaataagtcaaggaatgtctagatataattcaagagcacaccaattggttgtccaagatgggacaaagtagttcacaggatcttttcctatgactaggacttgtcatatcaagcagtttacagatgttctatgaacatttgttgttttcctaatgattaatcttaacaagtatatttttaaagcatctttaatggtgttgaacaggtgtcatcctgttttatatatcagagtattctacatcaaaaggagacttaagtgattgagaaaaacatagtggaatccggaaagaatgacacctgaaacaaagatggtgagtataataacccatctatcctgtgtgtggttgttttttctcagaatgagggagaagytataaagcaaatatctttatctttatttacaataactcataagtaatataaacactgacttggctcttattataactgtatctagggtaccatgaactttgagtgactgagtgaagatggcagacccatactgtatctaactatagacactttttgaccaataaacaatggggcttgcagccaggcacagtggctcatgcctgtaatcccagcactttgggaggtcaaggccggtggataacttgaggtcaggagtttgagaccaccatggccaacatggtgaaacaccttctctactaaaaatacaaaaattagcctggcgtggtggcacacacctgtaatcccagctatttgggaggctgaggcaggagaattgcttgaacctgggaggcagaagttgcagtgagctgagattgtaccattgcactccagcctgggcgacagagggagactccgtctcaaaaaaacaaaacaaaacaaaacaaaacaaaaaaacaaagaaacaatagggcatgctttaaccatcagtacacagacctatacattcaatttgtcctatcctgaaggcaaattttcaatgcttaattagcataaacaatatacactcccttgttttggaacttaaaatactctgacttctctcctttagtaaactactcagtgaatttattcaatggcatgtgctcccttgccaagcatgctaataaatgcagctctgtaatttttttaattgcaaaaataagacagtttgtctacagaaagtacaaccatttctcttctggaattgaacaattttcctattaatatgttaatatttctgggtccaggcaagggttgccctgtcccagatggtacacaacctaactttagacttc

SEQ ID NO: 3373 - DNA, 647 bp, Homo sapiens
tcactctgtcactcaggctggagtacagtggcaccatctcggctcactgcaacctccgcctcccgggttcaagtgattctcctgcctcagcctcccgaggagctgggattacaggcgcccgccaccaccccctgctaatttttgtatttttagtagagacggagtttcatcatgttggccaggctggtctggaactcctgacctcaagtgatccacctgcctccgcctcccaaagtgctgggattataggcgtgagccactgcacctggccctctctgtgtttttatccctctaatgggaatagtagtcatgcctgccttttagggtgtagcaacaattagagctaaggtacagaaagcacctacacaggacctgatgtgttgcattctgcattctgtggttaggagtcattattctaataagctctgggttgcaccttccacactgttgtgggaagtcagggaccctgaatggagggaccagctggagytgcagcagaggaacataaattgtgaagatttcatggacatttatcagttcccaaataatacttttctaatttcttatgcctgtctttactttaatctcttaatcctgttatcttcataagctgaggatatacgtcacctcaggaccactgtgataat

SEQ ID NO: 3374 - DNA, 554 bp, Homo sapiens
gggcatccagttacatttgaatttcaggtaacaatttttttaagtgtaagtatgtagccaatattgcatgagaaatactcatgctaaaaagttattcgtcgtttatctgaaatgcragttcaaatttaaccgagtaccctgtatttttatttgctaaatctagaaaccctctccaagaggctccttggcccactcacagggagagcccgatctccctctagacaggggaggccccctttctcaggccagaaaagatcttgtagtaaactactcaagaggctgaggcaggaggatcgcttgagcccaggaattcaagacctgcctgggcaacagagcaagaccctgtctctagggaagatatcctaccgtagcctccctcggggactcccattcctcccacctcagggccagtcaagggaacaggcctctgctctgggcagaagtgccggcagccgctctctgaaaagctaggtgttgcctcaggggctcccggtgtcctgtggaaaatgcctggccacggtttccatggttcccaggctccaaccctgcagttc

SEQ ID NO: 3375 - DNA, 1258 bp, Homo sapiens
catgaccacctgcggggcacaaactgacagggttcctgcactcactgcaaaatagatactctggtagcaaagaacatcaagaccatctcttctgacctccagtctgggagagaagccgcttcgacaccatctgctgacagaagcatccagctttgttcaaacacttccaggaactgggagctcatcgccttccaggacagttcatcccatctctgggcagcttaatctatcagaaagctccttttcttaytaagcaagaatcacatacacaacattcacactctaggttatgtaaacaggatatcctttagaagtgtacatttctattactgagggcttctaacacaataattaatccaaaaagctacgctttggaaagcaactataaacttaaaaagagccccaggaagagctccttcctacccaccttccactcttgaaaatacaaatgcagtttttccatgaacatgttgtgacttcatggtcagagactggtgtcctgaaaaccgttctagagcaaaatgcaattgacggtgaaaagggcagaatctgctgggaggagactggtttgttgctaagttaacgtatgcagatagaaacagaccatcttccccagctgtctgagatccagatgagagaggagggcacggtctccagctttacatggtgataaacagagaaagtacttgggaacatcagagcacagttcccagaatccctggcctgttgctcattgtcctgtttctaggacatccgtcaccactaaccatagcattaacctactgactttcttttttttttttaattgtattttagtagagacggggtttcactgtgttggccaggctggtcttgatctcctgaccttgtgatccgcccccccttggcctcccaaagtgctgggattacaggcgtgagccaccacgcccggccaacctactgactttctaacacatacgactgctctaatttcagttggcctccctgctctgccttgaggattgataaacagacatcctctcctctgttggcttcctaggaagagcaccctgatgccttagcaccctccctttggtgcctccatctccacacctttccccttctcccaagttcatggggccattgggagtcatctagaaagcaggctcattcaaagaggtgaaagtattgcatccaatctaagcccccagcttttaagacacaccactgcgttatatgccactaagaaaggaatgacactgctaattgtcaggtgaca

SEQ ID NO: 3376 - DNA, 1258 bp, Homo sapiens
catgaccacctgcggggcacaaactgacagggttcctgcactcactgcaaaatagatactctggtagcaaagaacatcaagaccatctcttctgacctccagtctgggagagaagccgcttcgacaccatctgctgacagaagcatccagctttgttcaaacacttccaggaactgggagctcatcgccttccaggacagttcatcccatctctgggcagcttaatctatcagaaagctccttttcttattaagcaagaatcacatacacaacattcacactctaggttatgtaaacaggatatcctttagaagtgtacatttctattactgagggcttctaacacaataatwaatccaaaaagctacgctttggaaagcaactataaacttaaaaagagccccaggaagagctccttcctacccaccttccactcttgaaaatacaaatgcagtttttccatgaacatgttgtgacttcatggtcagagactggtgtcctgaaaaccgttctagagcaaaatgcaattgacggtgaaaagggcagaatctgctgggaggagactggtttgttgctaagttaacgtatgcagatagaaacagaccatcttccccagctgtctgagatccagatgagagaggagggcacggtctccagctttacatggtgataaacagagaaagtacttgggaacatcagagcacagttcccagaatccctggcctgttgctcattgtcctgtttctaggacatccgtcaccactaaccatagcattaacctactgactttcttttttttttttaattgtattttagtagagacggggtttcactgtgttggccaggctggtcttgatctcctgaccttgtgatccgcccccccttggcctcccaaagtgctgggattacaggcgtgagccaccacgcccggccaacctactgactttctaacacatacgactgctctaatttcagttggcctccctgctctgccttgaggattgataaacagacatcctctcctctgttggcttcctaggaagagcaccctgatgccttagcaccctccctttggtgcctccatctccacacctttccccttctcccaagttcatggggccattgggagtcatctagaaagcaggctcattcaaagaggtgaaagtattgcatccaatctaagcccccagcttttaagacacaccactgcgttatatgccactaagaaaggaatgacactgctaattgtcaggtgaca

SEQ ID NO: 3377 - DNA, 1258 bp, Homo sapiens
catgaccacctgcggggcacaaactgacagggttcctgcactcactgcaaaatagatactctggtagcaaagaacatcaagaccatctcttctgacctccagtctgggagagaagccgcttcgacaccatctgctgacagaagcatccagctttgttcaaacacttccaggaactgggagctcatcgccttccaggacagttcatcccatctctgggcagcttaatctatcagaaagctccttttcttattaagcaagaatcacatacacaacattcacactctaggttatgtaaacaggatatcctttagaagtgtacatttctattactgagggcttctaacacaataattaatccaaaaagctacgctttggaaagcaactataaacttaaaaagagccccaggaagagctccttcctacccaccttccactcttgaaaatacaaatgcagtttttccatgaacatgttgtgacttcatggtcagagactggtgtcctgaaaaccgttctagagcaaaatgcaattgacggtgaaaagggcagaatctgctgggaggagactggtttgttgctaagttaacgtatgcagatagaaacagaccatcttccccagctgtctgagatccagatgagagaggagggcacggtctccagctttacatggtgataaacagagaaagtacttgggaacatcagagcacagttcccagaatccctggcctgttgctcattgtcctgtttctaggacatccgtcaccactaaccatagcattaacctactgactttcttttttttttttaattgtattttagtagagacggggtttcacygtgttggccaggctggtcttgatctcctgaccttgtgatccgcccccccttggcctcccaaagtgctgggattacaggcgtgagccaccacgcccggccaacctactgactttctaacacatacgactgctctaatttcagttggcctccctgctctgccttgaggattgataaacagacatcctctcctctgttggcttcctaggaagagcaccctgatgccttagcaccctccctttggtgcctccatctccacacctttccccttctcccaagttcatggggccattgggagtcatctagaaagcaggctcattcaaagaggtgaaagtattgcatccaatctaagcccccagcttttaagacacaccactgcgttatatgccactaagaaaggaatgacactgctaattgtcaggtgaca

SEQ ID NO: 3378 - DNA, 993 bp, Homo sapiens
acagagtcttgctctgtcgcccaggctggagtgcagtggcgcgatcttggctcactgcaacctccacatcccgagttcaagcaattatcctgcctcagcctcctcagtagctgcgattacaggtgcgagccaccacacctggctaatttttgtatatgcagtagaaacaggaatttcgctacgttggccacgctggtgtcgaactcctgacctcaagtgatctgcccaccttggcctcccaaagtatgggattacaggtgtgaaccactgtgcccagccaacatggggcaggttttctgatcttagtttcctcatgtgtaaaataagattaaaaagtgtccgcctcatcaaattgttacaagcataaaatgaggtaataaatataacacagtgtctgccgtaaagtattaaataaatatacactattaaaagtaacaaagcaacacagctatttctttggatgcagaacatggaaaaagaaatatcactaccccacaatagaaattagtataaaatattagaatattttataaaattgtaaaatctgctcttctaatccatcacttcacagagcctcagacctcctggtgtgttggcttctgcaaaacatgattaaatcacccatgagggggcacttttctaaagtactattaaacctacagattagtgcaatttatgtatttgagaagctgatggctgtattaacacattaaaatgaccgcctgcctctctgaaccaaccctcctcctgccccagctatacccgttacactttatgtatagcaaaagtgtgaatgctggtaataaatgcagtttgaaaaattacatgtgagcttaggaagacgtggccaatgttttcagccaattaacaagtgttttcttaaagaataactgaatgtgaaattggcaagatacagacgtcctttgacttattayagagttacgtcttgataaaaaccatcatacgctgaaagtatcataagtctaaaatgca

SEQ ID NO: 3379 - DNA, 1179 bp, Homo sapiens
  misc_feature (1)...(1179): n = A,T,C or G
ttctcttctattatttagagcttatttttgaacacacacataaactttctttcttactattgtcaytgctatataattattaatttaattttatttatttatttatttatttttatttttatttttttgagactgagtttcactcnttgttgcccaggctagagtgcaatggcgtgatcttggctgaccgcaacctctgcctcccaggttcaaacaattctcctgcctcagcctcccgagtagctgggattacaggcatgtgtcacacgcccggctaattttgtatttttagtagagacggggttgctccatgttggtcaggctggtctcaaactcccggcctcaggtgatctgcctgccttggcctcccaaagtgctgggattacaggcgtgagcaccgcgcctgaccgctatataatcattttcttcaaaattcaccttttttcctatactgcccttttcctgtcttgtgatttctgcttcatttaattaataaacttttaaaacattatttttaaaatttattttagattcatcttaatatctacaacttgggggtatgaatcattcaacttgttgagctttactcttctttttgatggtttatatccttgtatggtttcaattatcagaactgagattttcctcagagaaagttgttttgtgtttccctggactgtgaaacacatggaaagcttttgtattggcctcttgtagtatttcacggatttccccagctagagagaagttcttacgttaacttctcagactggaattccaacttaacaaggagagtttgatattgaacctcacccaggaagtggtccccgtttgggtttctaattcctcatagacaacactttccacccattgccctaggtggacacatcaagttccttttagttttccttggcagatagaaaatttttctagatcaccatctctcagaaggagcactgtctctgtacaggcccctgcctgcctcacacgggtctgacacccagtctcctgtgcccacataaaggttaagcctgatgctcacctgttgatgcctatgccattctagtaatcgctacctgaagtacagaaactcagttcctgctcatctcgataaatataaattcctcgtcctttctggcacatagagatttccctttttggttttgagcgcaactatgc

SEQ ID NO: 3380 - DNA, 1179 bp, Homo sapiens
  misc_feature (1)...(1179): n = A,T,C or G
ttctcttctattatttagagcttatttttgaacacacacataaactttctttcttactattgtcattgctatataattattaatttaattttatttatttatttatttatttttatttttatttttttgagactgagtttcactcnttgttgcccaggctagagtgcaatggcgtgatcttggctgaccgcaacctctgcctcccaggttcaaacaattctcctgcctcagcctcccgagtagctgggattacaggcatgtgtcacacgcccggctaattttgtatttttagtagagacggggttgctccatgttggtcaggctggtctcaaactcccggcctcaggtgatctgcctgccttggcctcccaaagtgctgggattacaggcgtgagcaccgcgcctgaccgctatataatcattttcttcaaaattcaccttttttcctatactgcccttttcctgtcttgtgatttctgcttcatttaattaataaacttttaaaacattatttttaaaatttattttagattcatcttaatatctacaacttgggggtatgaatcattcaacttgttgagctttactcttctttttgatggtttatatccttgtatggtttcaattatcagaactgagattttcctcagagaaagttgttttgtgtttccctggactgtgaaacacatggaaagcttttgtattggcctcttgtagtatttcacggatttccccagctagagagaagttcttacgttaacttctcagactggaattccaacttaacaaggagagtttgatattgaacctcacccaggaagtggtccccgtttgggtttctaattcctcatagacaacactttccacccattgccctaggtggacacatcaagttccttttagttttccttggcagatagaaaatttttctagatcaccatctctcagaaggagcactgtctctgtacaggcccctgcctgcctcacacgggtctgacacccagtctcctgtgcccacataaaggttaarcctgatgctcacctgttgatgcctatgccattctagtaatcgctacctgaagtacagaaactcagttcctgctcatctcgataaatataaattcctcgtcctttctggcacatagagatttccctttttggttttgagcgcaactatgc

SEQ ID NO: 3381 - DNA, 1301 bp, Homo sapiens
  misc_feature (1)...(1301): n = A,T,C or G
catttcagttctattgttaaatgtaataagataatgaaaatgtagaaaacacaaaagacaggaataamctataacaaaaactaattttcaatagttgggaagagctgaatattccacacagtaattacagatttttttatgaatttagaaatgaactgtatgacatattttcatttctcaggaaataattttggtttttttcccacagcttcagaacctttgtgataagctcccaggtatcacttgtggcacacgacttgccagcttgttatctgtatgaactgagctcaacccctgttagtcgctgaaggccttacattatttacatatcgtcatatccctcacaaggccaaacacggaagcttaagatcagtagatgcctggtaagtaagtcgctccacagagtgctggtgacaagtggttgtcttttcccagaccctctgctccctgttcatcttcctcacctaaacattaagagaagcaaattccacgatcttgtaatcccttttggatacaaatatgtatgaagctaaatttgtggacttttcagaagtgtcagccaagtggcgacaggcagcatgtttggtaaaatctttctatcacagtaatattagccagtcaggacagagagggggctgtttcagcagaagccatgtggctgaacagggtgtatatgggagccacagccagaccttaggagtatcagcaatgccaacagacatctaggaaggccaatcagccaggcaggaccaccagcattaatcaagctgacacccaacttacaccagcctcatgctccaacagcagatgccaaaagaatgccaagaacagttatatctcaggggcacaaaggagctggctgcctatccactcgcaagaccagtgaggatgaaaaaatgcctactctgacaggagagcctcccctgtcctcctctgccaaggtcaaggcgcccagaccactcgccatgtacccagaggctaccttgagaaacagggagaaatacagagactgggctcttttactaaaagacactaaaaagttaactagagagactttttanattcctgtattagaataactttactaaagggtgcttcttccccccaccccacccccgccttttttttttttggtcattctgcaggatggcagttcatgtagacaaacatcagatcacttagagaaaacaaagaagctacatttttctttccatatttgagggccatatgaggtaattttagcagtcctctctatcttaatcacagcataaatgttaactaatgtgtaagtgtaggataca

SEQ ID NO: 3382 - DNA, 798 bp, Homo sapiens
tatactctgaaatataatttttatttaactctaattccaagagcctagagaaattatttctcagtatttgaaatggtatgaaaaacaggcaagcttctcactagtttttgtaagagaggctagttttgcaatttcacatttaatagcaaaacgattggaagcattttcaactggggacctttttcttaagtcatgttggaagttgttccacttttatttcaagattttgaaacagagacaaaatctggttaagcattaaccaatggcaacacagtaaaaatgaaccaggctktttcaaatcagtttcagaatcacatctatggacattatcccttttaagtttcccttgatgagagaactgttgtagtagcttctgtatttttatcaattattgaccactgtgtaaaaatataaaataaaatacatgaaaaatatactcagctaatgttctggggaaataaaacacaaatacatacacacacacacacacacacacacacacacactttagatatttttaaagaagtagcaaaggacccaacattcaccaatacagaagtttaacatccttgaagtgtgaaattgttaatgaagacattttatctaatgtggagctcaagatgaagcttacccaccatctgtgagttcatttgtacatgtccaatgacaaggaactcattaccttacaagacagccccttccatggcagaaaagttatgactgctagaaagttttctgcagctgaagcctgtattcccataagtaccacctataagtcctacctgtgccctctagaat

SEQ ID NO: 3383 - DNA, 798 bp, Homo sapiens
tatactctgaaatataatttttatttaactctaattccaagagcctagagaaattatttctcagtatttgaaatggtatgaaaaacaggcaagcttctcactagtttttgtaagagaggctagttttgcaatttcacatttaatagcaaaacgattggaagcattttcaactggggacctttttcttaagtcatgttggaagttgttccacttttatttcaagattttgaaacagagacaaaatctggttaagcattaaccaatggcaacacagtaaaaatgaaccaggctgtttcaaatcagtttcagaatcacatctatggacattatcccttttaagtttcccttgatgagagaactgttgtagtagcttctgtatttttatcaattattgaccactgtgtaaaaatataaaataaaatacatgaaaaatatactcagctaatgttctggggaaataaaacacaaatacayacacacacacacacacacacacacacacacactttagatatttttaaagaagtagcaaaggacccaacattcaccaatacagaagtttaacatccttgaagtgtgaaattgttaatgaagacattttatctaatgtggagctcaagatgaagcttacccaccatctgtgagttcatttgtacatgtccaatgacaaggaactcattaccttacaagacagccccttccatggcagaaaagttatgactgctagaaagttttctgcagctgaagcctgtattcccataagtaccacctataagtcctacctgtgccctctagaat

SEQ ID NO: 3384 - DNA, 980 bp, Homo sapiens
tgtgtttacyctatgggtcaaatgagatggtgttggagcaatcaaaggatacagaccagtacccagcctttcttgtcaagactttgcctctccttgggatgttcacacacacctacccctattttctttagggatctagttgcttacttattttagacagtacatcctttatggccttgctgaaatgtaactccttgatggaatctcctctggtttctttctatctgtccacctcaattgagaactgatttccttcccctgaacccctcaccttcccatagtgctttagctgtagcttctttattcaatgtttcactttttactttggaccagagatatttatgaactttacaaaatctcttttaaggcagatatttcagttctctttgcattaacacaggacttgttggatgattgagtaagcgtgtgggggggtgtgaagagagggttcatttgttccttcctcgtgacagagctgagaggggaagggcccttgctggtggtggatgggccctgagggttaattgggctgagtgtggccacaaagcagaaagacttgctgtgctttctgaacttacgtaagttacaaacactattaaaatgtcacaaacaaataagagaatgaggactgtacttaggttccatacttgtggtatggaaagctatctaaaataaaattagctacatatctctgcagatttctctgattcactctacaaagaagcaagtgtttaatctaattctgcaaatatttgagactctttaccaggcgttgtggaacatgctttatgactggaaaagatgataaaggcatagtttctgccctaaggagctgtttgtgcatctgttggaggatatagatattttaacaggaagattctaacactaggtaggctgggtcctttgtgataaagtctgcattagaaatatgtgagaagaaaaaaaaaacatgagtgcggtctctcatgaagttgctagta

SEQ ID NO: 3385 - DNA, 1128 bp, Homo sapiens
cacatgcatatatatatatatatatatatatatatatatatatatatawagctcatataaattggctaaatttatatgagccatttggtgtgttaccaggaaggtaacacacacatatgctatatatgaagctcatataaattggctaaatatgctaatgcaataatatacaatcaatttaaaaatattttttaaaaaggataacatgaaggggcagtagcatatcaaactgaagagtatcatattttgagtaaactccaaatgtgacactaattagcttcacttcattagctacattagttagtatctctgtttctcagttaccccatcttcaaaatgagaataataataataataataatgtctattttaaaagttagtttttcaaaaaagagacgtaattcttaaggagaatttagcacagtgactgactacatgtaccaaatctataactagtttacaaacgtgaaaggaagtgttgccctattaataattgaagaaaagccattctcataaaattagcacattttttaaaacaaagcaataggcactattaaatattactaatgcaagtataatttggtaacttttggattaaaatttggtaaatatcaaactttaaaacttcattgtaccatttgatctaataattccacatatggaaatcaatttgaaatattgtgagaaatatgagtgaagaaatgggtgtggaggggataggaaagctacaagcccaaagattttaacagataaaaactgaaaacagcctaaattttccaatgttagaatagcaaaattcccttaaaacctcattaaggtgctgcctacaataactttgcaagactaggcatatataaaaatctgtggacaataaaaagagagctatttaagcctgagtcaaaaaacgaaaaccacaattaaaaatacttaataaattctgtgtggttccttttacatatgatacaaaaataagcaaaactaatctatgctgttagacatcataatggtgtttttcatggggagatgaagtagtctgagtgactagtgaggttctatttcttgatctgggtgttttttaaacaaaaatgcacaatttgcaaaaattattgaacatatcacctatgatac

SEQ ID NO: 3386 - DNA, 1128 bp, Homo sapiens
cacatgcatatatatatatatatatatatatatatatatatatatataaagctcatataaattggctaaatttatatgagccatttggtgtgttaccaggaaggtaacacacacatatgctatatatraagctcatataaattggctaaatatgctaatgcaataatatacaatcaatttaaaaatattttttaaaaaggataacatgaaggggcagtagcatatcaaactgaagagtatcatattttgagtaaactccaaatgtgacactaattagcttcacttcattagctacattagttagtatctctgtttctcagttaccccatcttcaaaatgagaataataataataataataatgtctattttaaaagttagtttttcaaaaaagagacgtaattcttaaggagaatttagcacagtgactgactacatgtaccaaatctataactagtttacaaacgtgaaaggaagtgttgccctattaataattgaagaaaagccattctcataaaattagcacattttttaaaacaaagcaataggcactattaaatattactaatgcaagtataatttggtaacttttggattaaaatttggtaaatatcaaactttaaaacttcattgtaccatttgatctaataattccacatatggaaatcaatttgaaatattgtgagaaatatgagtgaagaaatgggtgtggaggggataggaaagctacaagcccaaagattttaacagataaaaactgaaaacagcctaaattttccaatgttagaatagcaaaattcccttaaaacctcattaaggtgctgcctacaataactttgcaagactaggcatatataaaaatctgtggacaataaaaagagagctatttaagcctgagtcaaaaaacgaaaaccacaattaaaaatacttaataaattctgtgtggttccttttacatatgatacaaaaataagcaaaactaatctatgctgttagacatcataatggtgtttttcatggggagatgaagtagtctgagtgactagtgaggttctatttcttgatctgggtgttttttaaacaaaaatgcacaatttgcaaaaattattgaacatatcacctatgatac

SEQ ID NO: 3387 - DNA, 1128 bp, Homo sapiens
cacatgcatatatatatatatatatatatatatatatatatatatataaagctcatataaattggctaaatttatatgagccatttggtgtgttaccaggaaggtaacacacacatatgctatatatgaagctcatataaattggctaaatatgctaatgcaataatatacaatcaatttaaaaatattttttaaaaaggataacatgaaggggcagtagcatatcaaactgaagagtatcatattttgagtaaactccaaatgtgacactaattagcttcacttcattagctacattagttagtatctctgtttctcagttaccccatcttcaaaatgagaataataataataatartaatgtctattttaaaagttagtttttcaaaaaagagacgtaattcttaaggagaatttagcacagtgactgactacatgtaccaaatctataactagtttacaaacgtgaaaggaagtgttgccctattaataattgaagaaaagccattctcataaaattagcacattttttaaaacaaagcaataggcactattaaatattactaatgcaagtataatttggtaacttttggattaaaatttggtaaatatcaaactttaaaacttcattgtaccatttgatctaataattccacatatggaaatcaatttgaaatattgtgagaaatatgagtgaagaaatgggtgtggaggggataggaaagctacaagcccaaagattttaacagataaaaactgaaaacagcctaaattttccaatgttagaatagcaaaattcccttaaaacctcattaaggtgctgcctacaataactttgcaagactaggcatatataaaaatctgtggacaataaaaagagagctatttaagcctgagtcaaaaaacgaaaaccacaattaaaaatacttaataaattctgtgtggttccttttacatatgatacaaaaataagcaaaactaatctatgctgttagacatcataatggtgtttttcatggggagatgaagtagtctgagtgactagtgaggttctatttcttgatctgggtgttttttaaacaaaaatgcacaatttgcaaaaattattgaacatatcacctatgatac

SEQ ID NO: 3388 - DNA, 980 bp, Homo sapiens
tacctttcaagtgtcagtgatcaccgggatgaatcttagatttgtcagtccttttaggaatgtattcatcttccttgtaacggcagcctttcccagacaaaacttgggtcactggctgaacttcccttgacaacaggtaggcaggagagtgagaaggatatttggaggtggagtgataagggaagaagtgatttgacctggactgaagccgaaaagatgccaattacaatgcacagggctgtaaatgactcctcagggtttttgcagaatgttagttgctagctgtctccttagaattttgtttcagtgatttcctctgatctcttttttatttcccttccttcccaaagtcttgccgaaagaaaattctaacttcgtgaaacaagcaatattcatttatgctttccaatggaggaaagaaagcaaggggaatttagaggaaggataataatgtttgtacattccagcaatgcaatgtactccatctaaaatcaaaattcaaattgtgctgagcagttttttataaagttaaacatacacctgccattcgactgggcaattctactcctaggtatttacccaagagaaataaaaacatatgtccacgtaaagacctgtacgggaatgtttatagcagccttattcatattacctaaaaacaggaaacatccaaacatccatcaggggagaacagataaacaaattgtggtttattcatacaatggattatgccccagcattgcaaatgaatgaactcaacaacacggatgaacctcaaaagcattatattgagcgaaagaagccagacrcaaaagagtacatagtgtatgaaatcttaggaaaggcaaatttaatctatagtagcagaaagtgattgcctggggctggctggtaagggtgtgatgattgcaaaggagcgtaaaggagcatcttggggagccagaaatctttttcattataattgtgatggtgtgcacttt

SEQ ID NO: 3389 - DNA, 684 bp, Homo sapiens
tgaaggaaaatccaaatctcttggttggctccagaagaacccctaacatgcgagaacctacagatataagaatacccttgtgttttaatatgtaccctttgactattttccctcaaaatcctcatcgtcttgacaaacacagacaatggtaggtgccaccctggcctcgactacccatgtaaactggcactgcccttaggactctgaccttttatttatttattaattattattcttatttttttgagactgtgtctcactctgtcacccaggctgsagttcagtgacacgatctcggatcactgcaacctccgcctcctgggttcaagtgattctcttgcctcagcctcccgagtaattgggattacaggtgcacaccaccatgcctggctaattttttgtatttttagtagagatggagttttgccatgttggccaggctggtctcaaactcctggccccaaatgatctgcccatctcagcctcccaaagtgctgggattataggcatgagccactgtgcctggcaagactctgcctcttgatttcatcaaaagcaggggctaccaggaggaatctgcttctgtaaggagggacaagaaagcctctaggagccagtcagtgcctgagaaggcaattgctaaaagctgtgcagtggtaggtagatgagaaaatagtcacaact

SEQ ID NO: 3390 - DNA, 655 bp, Homo sapiens
tgcatcaccaaccctagagtttaggtcctgcacattgttagctctgctgtgcgaaaacatgaattaaagcttaaaagatcatagaagtgaaaccatgtactagaaactaccacaggtgcgttggcaggggaaatatatgcaaaatactacatctagtttgttgtggaactaattaggaaaaagtttttcaggagccagttgccatagctattcctctaagkgtgactgaggtatgagcagtaagtgtacgttttaatctctgctaatgtgtcttcctctgatggctggagaaatatgtctcaaatactgtatatgaatcttctaaaatccaaggcttttttaaaataaaaaaacccccaggaaagccaacacatcagacacctgaccatatttcagaagaggagtcttaaccatgtttcagggagtccaccacatctaaaagtcgctgtgttttggtcctgctggggagctgtcacccactggggctgccctccagtggaacagtttgctaaacagttcgttggccagatttatatgagaacagggtgacatgtaactaaccagtctctacttcatagattatcctccccagaccccccattctaattgaggcttccttggtaccagtaacagagaagggagttttagtgaatga

SEQ ID NO: 3391 - DNA, 1608 bp, Homo sapiens
  misc_feature (1)...(1608): n = A,T,C or G
tgggattacaggcatgggcccctaggctggccaatactgtgtttatactgtatctgtgtttagatacgcaaatacttaccattgtgttcaactgtctacagtattcagtaaggtaacatgctgtagaggtttgtagtgtaggagctatcagctataccatatagcctaggtgtatagcaggctatccccatctaggtttgtgtaagtacactctgtgatctctgcacaatgacaaaatcgcttaatgatgcatttttcagaacgcatccctgtcattaagtgactcatgactgtatctctatttcacaactgaggaaactgaaactcagcgaagtacatcacttgcccaaggccacacagtgggtaaatgggactaggcatgggatgcaggcagcctgtcttagatcccacgctcggatcccataccctgcctccagggtctcagactttacgttttactgaaaagacagcctaattcatgagcagctggatctcagaaagggagccaagctccttggtacamagatggcccaaccacgaatggtatctgaagggctcaataacaggagccagccgggtatcttcttcaccctctggggtgaccaaagacacgaaggactgagagaaagcctttagaggcctcccccaaaatttaatccgtttttgtgattgtttctcctggactagactgccttgaggataaaataaacatgagcgcctggtggcagtgcaatacctgagtggtacgtgggctctgcaggccaactgcctggagggaggaagccccatcaccactacttgtgtttctgttccccatttgcaccacacccctcctttgagggtaactgaagcctctgagttgtcaagatccttaaaagatgacagtttgagagagagaatagtagaattagaaaccccaagaggccaggtgtggtggctcacacctgtaatcccagcactttgggaggccgcggaccccgaggtcaggagatcgagatcatcctggccaacatggtgaaactcggtctctaataaaaataaaaaaactagttgngtgttggtggcgcgcgcctgtagtcccagctactcaggaggctgaggcagcagaatcgcctacnncggaggggggggagggtggcccatgagccgagattgcaccactggaattccagcctggcgacagagcaagactctgtctccaaaaaagccagaaaaaaaaaaaaaagaaacaccttggacaggaaacatgtctatgggaggaagtaaggccagatgcttgcaaaataggggggaaagtgagaccgggagggaacacttccaaaagttacccccatggggtctgaatttggggcctgggaaggaatttgggtgcatttagatccaccactgatagtctctattttggcaccctgttttgttcccgtatagcacttaccactgttctaactaaacaattaatttcattatgggttgtgcaaagtctatgattctcatgcgggaccccaggtgtgttttttgttcatgtagcacaaagctcattgcctaagtagtaggtaggattggtagataaaatacaagaagtccagttgtttaaattttaataaacaa

SEQ ID NO: 3392 - DNA, 1608 bp, Homo sapiens
  misc_feature (1)...(1608): n = A,T,C or G
tgggattacaggcatgggcccctaggctggccaatactgtgtttatactgtatctgtgtttagatacgcaaatacttaccattgtgttcaactgtctacagtattcagtaaggtaacatgctgtagaggtttgtagtgtaggagctatcagctataccatatagcctaggtgtatagcaggctatccccatctaggtttgtgtaagtacactctgtgatctctgcacaatgacaaaatcgcttaatgatgcatttttcagaacgcatccctgtcattaagtgactcatgactgtatctctatttcacaactgaggaaactgaaactcagcgaagtacatcacttgcccaaggccacacagtgggtaaatgggactaggcatgggatgcaggcagcctgtcttagatcccacgctcggatcccataccctgcctccagggtctcagactttacgttttactgaaaagacagcctaattcatgagcagctggatctcagaaagggagccaagctccttggtacacagatggcccaaccacgaatggtatctgaagggctcaataacaggagccagccgggtatcttcttcaccctctggggtgaccaaagacacgaaggactgagagaargcctttagaggcctcccccaaaatttaatccgtttttgtgattgtttctcctggactagactgccttgaggataaaataaacatgagcgcctggtggcagtgcaatacctgagtggtacgtgggctctgcaggccaactgcctggagggaggaagccccatcaccactacttgtgtttctgttccccatttgcaccacacccctcctttgagggtaactgaagcctctgagttgtcaagatccttaaaagatgacagtttgagagagagaatagtagaattagaaaccccaagaggccaggtgtggtggctcacacctgtaatcccagcactttgggaggccgcggaccccgaggtcaggagatcgagatcatcctggccaacatggtgaaactcggtctctaataaaaataaaaaaactagttgngtgttggtggcgcgcgcctgtagtcccagctactcaggaggctgaggcagcagaatcgcctacnncggaggggggggagggtggcccatgagccgagattgcaccactggaattccagcctggcgacagagcaagactctgtctccaaaaaagccagaaaaaaaaaaaaaagaaacaccttggacaggaaacatgtctatgggaggaagtaaggccagatgcttgcaaaataggggggaaagtgagaccgggagggaacacttccaaaagttacccccatggggtctgaatttggggcctgggaaggaatttgggtgcatttagatccaccactgatagtctctattttggcaccctgttttgttcccgtatagcacttaccactgttctaactaaacaattaatttcattatgggttgtgcaaagtctatgattctcatgcgggaccccaggtgtgttttttgttcatgtagcacaaagctcattgcctaagtagtaggtaggattggtagataaaatacaagaagtccagttgtttaaattttaataaacaa

SEQ ID NO: 3393 - DNA, 570 bp, Homo sapiens
taaaattatttattttacacttttcaacaacacagattaaaaattttttaatttttttttttttgagatggagtttctactcttgttgcccaggctggagagcaatgctgcaatcctggcacactgcaacctccgcctcccaggttcaagatattctcctgcctcagcctcccaagtagctgggatcacaggcatgcgccagcacacccggctaatattgtatttttagtagagactgggtttcaccatgttggccaagctggtctcgaactcctgatttgaggtgatccacccgcctcggcctaacaaagtgctgggattacaagygtgaggcaccgcgcctggcccagatgaaaaattattaaaaactctagcaaaataatttttaaaaatgtaaccttaaatgtatcacagtggtaacattactagcccttgcattttgtgctgtacagggagcaccactagtaaatttgtcactagttttttttaaatgcacccataaaaggacagattcctttttccttcgaattggcaattaaaaaaaaattaaagaatttctgtaaaagcaga

SEQ ID NO: 3394 - DNA, 570 bp, Homo sapiens
taaaattatttattttacacttttcaacaacacagattaaaaattttttaatttttttttttttgagatggagtttctactcttgttgcccaggctggagagcaatgctgcaatcctggcacactgcaacctccgcctcccaggttcaagatattctcctgcctcagcctcccaagtagctgggatcacaggcatgcgccagcacacccggctaatattgtatttttagtagagactgggtttcaccatgttggccaagctggtctcgaactcctgatttgaggtgatccacccgcctcggcctaacaaagtgctgggattacaagtgtgaggcacygcgcctggcccagatgaaaaattattaaaaactctagcaaaataatttttaaaaatgtaaccttaaatgtatcacagtggtaacattactagcccttgcattttgtgctgtacagggagcaccactagtaaatttgtcactagttttttttaaatgcacccataaaaggacagattcctttttccttcgaattggcaattaaaaaaaaattaaagaatttctgtaaaagcaga

SEQ ID NO: 3395 - DNA, 586 bp, Homo sapiens
gtagacaaatgatggtatcactaaataaatgagaaatgtcaaaggaggagcaaaagagtttacagccattataggaaggagaagtaagcaagagtttattttagagtaggttatgtttaagattcttcagcatagcattttaggagagagatcgagagatatacattcagggatcatcatacagatgttattttaaagccatgggagtagataaagttcacagagacaatctgataaaagaatagggccaactcctcaaggaattcgaaggtgtgaagttcaagcagagrtaaagagattaagttgagggagcaaattaaaaaaaaaaaagttaaaattttctaaattcttctatctcctgaattttcaatttctttcaaataaacttacttttatacaaacactaaagaagtttatcttattataaaagataaaagcttgatactcattataaatcatttaaaatcaatcacaaaatgcaaactattcagaacctaccatttaaagttatctcaaatgcacctgttgacatacactggttctcaatcatgttgctcaagaagaaaaccatcatacatgcataaac

SEQ ID NO: 3396 - DNA, 840 bp, Homo sapiens
  misc_feature (1)...(840): n = A,T,C or G
tgggttgacaggtgcagcaaaccaccatggcacacatttaccttatgtaacaaacctgcacatcctgcacwtgtaccccggaacttaataatttttaaaaaattattttgcttatgtattagtttcttctctgtaaaatggggctaacagtggtactcccttctgttagggcatttgtgaggattaagtgaatttctagaggtaaagcttttagaaaatacttggtgtctaataagcacactgtattgctgtcattttttgttatgtgcttagttattatgtttccacctcggactctaagctggctagaggtcatggctgtttccttcaacaccgcatcccaagtatccaggattatgcccttcctgtaatcgacactagttaaacatgtgttaaacaaaatatataatggtgtcataacagatggacttgaacccagggagacatatgcaaaacatatacagatgctcctcgacttaagatggggtcacgttccaataagctcatcgtatgatgaaaatattgttaagtcaaaagtgcacttaatacccggataaacccatctgaagttggaaaatgtgaattgaaccattgtcaccaacagnnggtttctnttccacccacccgnnnnnnnnnnnnnnnnnnnnnnnnnnnnnnnnnnnnnnnnnnnnnnnnnnnnnnnnnnnnnnnnnnnnnnnnnnnnnnnnnnnnnnnnnnnnnnnnnnnngctgcgcctgtatttactgattctaactatattaaattctatactctagcagcctcttaaatccgtttatggcccatgctagaccctgagctataataataataaaaataaaa

SEQ ID NO: 3397 - DNA, 840 bp, Homo sapiens
  misc_feature (1)...(840): n = A,T,C or G
tgggttgacaggtgcagcaaaccaccatggcacacatttaccttatgtaacaaacctgcacatcctgcacatgtaccccggaacttaataatttttaaaaaattattttgcttatgtattagtttcttctctgtaaaatggggctaacagtggtactcccttctgtyagggcatttgtgaggattaagtgaatttctagaggtaaagcttttagaaaatacttggtgtctaataagcacactgtattgctgtcattttttgttatgtgcttagttattatgtttccacctcggactctaagctggctagaggtcatggctgtttccttcaacaccgcatcccaagtatccaggattatgcccttcctgtaatcgacactagttaaacatgtgttaaacaaaatatataatggtgtcataacagatggacttgaacccagggagacatatgcaaaacatatacagatgctcctcgacttaagatggggtcacgttccaataagctcatcgtatgatgaaaatattgttaagtcaaaagtgcacttaatacccggataaacccatctgaagttggaaaatgtgaattgaaccattgtcaccaacagnnggtttctnttccacccacccgnnnnnnnnnnnnnnnnnnnnnnnnnnnnnnnnnnnnnnnnnnnnnnnnnnnnnnnnnnnnnnnnnnnnnnnnnnnnnnnnnnnnnnnnnnnnnnnnnnnngctgcgcctgtatttactgattctaactatattaaattctatactctagcagcctcttaaatccgtttatggcccatgctagaccctgagctataataataataaaaataaaa

SEQ ID NO: 3398 - DNA, 840 bp, Homo sapiens
  misc_feature (1)...(840): n = A,T,C or G
tgggttgacaggtgcagcaaaccaccatggcacacatttaccttatgtaacaaacctgcacatcctgcacatgtaccccggaacttaataatttttaaaaaattattttgcttatgtattagtttcttctctgtaaaatggggctaacagtggtactcccttctgttagggcatttgtgaggattaagtgaatttctagaggtaaagcttttagaaaatacttggtgtstaataagcacactgtattgctgtcattttttgttatgtgcttagttattatgtttccacctcggactctaagctggctagaggtcatggctgtttccttcaacaccgcatcccaagtatccaggattatgcccttcctgtaatcgacactagttaaacatgtgttaaacaaaatatataatggtgtcataacagatggacttgaacccagggagacatatgcaaaacatatacagatgctcctcgacttaagatggggtcacgttccaataagctcatcgtatgatgaaaatattgttaagtcaaaagtgcacttaatacccggataaacccatctgaagttggaaaatgtgaattgaaccattgtcaccaacagnnggtttctnttccacccacccgnnnnnnnnnnnnnnnnnnnnnnnnnnnnnnnnnnnnnnnnnnnnnnnnnnnnnnnnnnnnnnnnnnnnnnnnnnnnnnnnnnnnnnnnnnnnnnnnnnnngctgcgcctgtatttactgattctaactatattaaattctatactctagcagcctcttaaatccgtttatggcccatgctagaccctgagctataataataataaaaataaaa

SEQ ID NO: 3399 - DNA, 840 bp, Homo sapiens
  misc_feature (1)...(840): n = A,T,C or G
tgggttgacaggtgcagcaaaccaccatggcacacatttaccttatgtaacaaacctgcacatcctgcacatgtaccccggaacttaataatttttaaaaaattattttgcttatgtattagtttcttctctgtaaaatggggctaacagtggtactcccttctgttagggcatttgtgaggattaagtgaatttctagaggtaaagcttttagaaaatacttggtgtctaataagcacactgtattgctgtcattttttgttatgtgcttagttattatgtttccacctcggactctaagctggctagaggtcatggctgtttccttcaacaccgcatcccaagtatccaggattatgcccttcctgtaatcgacactagttaaacatgtgttaaacaaaatatataatggtgtcataacagatggacttgaacccagggagacatatgcaaaacwtatacagatgctcctcgacttaagatggggtcacgttccaataagctcatcgtatgatgaaaatattgttaagtcaaaagtgcacttaatacccggataaacccatctgaagttggaaaatgtgaattgaaccattgtcaccaacagnnggtttctnttccacccacccgnnnnnnnnnnnnnnnnnnnnnnnnnnnnnnnnnnnnnnnnnnnnnnnnnnnnnnnnnnnnnnnnnnnnnnnnnnnnnnnnnnnnnnnnnnnnnnnnnnnngctgcgcctgtatttactgattctaactatattaaattctatactctagcagcctcttaaatccgtttatggcccatgctagaccctgagctataataataataaaaataaaa

SEQ ID NO: 3400 - DNA, 1031 bp, Homo sapiens
gcttacagaagctatctctgggtggtggaattaggttctttaaatttttttcattgttttattttatttctcagttttctacaggaagcataactcaactgaacaataaatatcatgaagaaatcttagagtaagsggccataatattttgagagaagggtacatttacatgcaagctgtgtatagaactagaggtcccttaaagcagggtggtttgttttaaaggttcaatctcccactccactagtcagtcagtcatcctaataaaaagtggatgttggtgacctagccacatgtatttccttctgctatactgagctatcactttttgcacctgaatttccttacatagggatcatgacattttagtagatctcaagtttttccaaatcaatcactaagtgggttacatggtatattagccagctggtgctgcaagaatgctttcagcattcaacagttccctccctcaccaccaaattcaatggtttaaagtaacaagcatttatttcttgctcaagaatccaggagctgactgtagttcagctgctcatggctgggctcagctgggagggctccatttccagattgggatagggtctgatttatcatctctctcattccttcttggaccgtggccactcaggatatgttcttaacatgaagaatgggagaagcataagaagcaagcatttatagcctctacttgtgtcacattccctaacatttcattggccataccaggtcacatgccaaaactcatgaaagtggagcagagtctacccattctagtgggaaatcttgcaaagtcacatgtcaaagagtgtggatgtgtatatcaagtatagggaacttatattgctaataacgactccatctatcacatgtgggaaacccagtatctgtccacggctaactttcacttttccttgtctttgtcaaagatcacaacacttcagagacatcaaaggttcctccattcagattacagggccttagccatatgtatttggtcgtgtcctgcatatcca

SEQ ID NO: 3401 - DNA, 1031 bp, Homo sapiens
gcttacagaagctatctctgggtggtggaattaggttctttaaatttttttcattgttttattttatttctcagttttctacaggaagcataactcaactgaacaataaatatcatgaagaaatcttagagtaaggggccataatattttgagagaagggtacatttacatgcaagctgtgtatagaactagaggtcccttaaagcagggtggtttgttttaaaggttcaatctcccactccactastcagtcagtcatcctaataaaaagtggatgttggtgacctagccacatgtatttccttctgctatactgagctatcactttttgcacctgaatttccttacatagggatcatgacattttagtagatctcaagtttttccaaatcaatcactaagtgggttacatggtatattagccagctggtgctgcaagaatgctttcagcattcaacagttccctccctcaccaccaaattcaatggtttaaagtaacaagcatttatttcttgctcaagaatccaggagctgactgtagttcagctgctcatggctgggctcagctgggagggctccatttccagattgggatagggtctgatttatcatctctctcattccttcttggaccgtggccactcaggatatgttcttaacatgaagaatgggagaagcataagaagcaagcatttatagcctctacttgtgtcacattccctaacatttcattggccataccaggtcacatgccaaaactcatgaaagtggagcagagtctacccattctagtgggaaatcttgcaaagtcacatgtcaaagagtgtggatgtgtatatcaagtatagggaacttatattgctaataacgactccatctatcacatgtgggaaacccagtatctgtccacggctaactttcacttttccttgtctttgtcaaagatcacaacacttcagagacatcaaaggttcctccattcagattacagggccttagccatatgtatttggtcgtgtcctgcatatcca

SEQ ID NO: 3402 - DNA, 1031 bp, Homo sapiens
gcttacagaagctatctctgggtggtggaattaggttctttaaatttttttcattgttttattttatttctcagttttctacaggaagcataactcaactgaacaataaatatcatgaagaaatcttagagtaaggggccataatattttgagagaagggtacatttacatgcaagctgtgtatagaactagaggtcccttaaagcagggtggtttgttttaaaggttcaatctcccactccactagtcagtcagtcatcctaataaaaagtggatgttggtgacctagccacatgtatttccttctgctatactgagctatcactttttgcacctgaatttccttacatagggatcatgacattttagtagatctcaagtttttccaaatcaatcactaagtgggttacatggtatattagccagctggtgctgcaagaatgctttcagcattcaacagttccctscctcaccaccaaattcaatggtttaaagtaacaagcatttatttcttgctcaagaatccaggagctgactgtagttcagctgctcatggctgggctcagctgggagggctccatttccagattgggatagggtctgatttatcatctctctcattccttcttggaccgtggccactcaggatatgttcttaacatgaagaatgggagaagcataagaagcaagcatttatagcctctacttgtgtcacattccctaacatttcattggccataccaggtcacatgccaaaactcatgaaagtggagcagagtctacccattctagtgggaaatcttgcaaagtcacatgtcaaagagtgtggatgtgtatatcaagtatagggaacttatattgctaataacgactccatctatcacatgtgggaaacccagtatctgtccacggctaactttcacttttccttgtctttgtcaaagatcacaacacttcagagacatcaaaggttcctccattcagattacagggccttagccatatgtatttggtcgtgtcctgcatatcca

SEQ ID NO: 3403 - DNA, 1031 bp, Homo sapiens
gcttacagaagctatctctgggtggtggaattaggttctttaaatttttttcattgttttattttatttctcagttttctacaggaagcataactcaactgaacaataaatatcatgaagaaatcttagagtaaggggccataatattttgagagaagggtacatttacatgcaagctgtgtatagaactagaggtcccttaaagcagggtggtttgttttaaaggttcaatctcccactccactagtcagtcagtcatcctaataaaaagtggatgttggtgacctagccacatgtatttccttctgctatactgagctatcactttttgcacctgaatttccttacatagggatcatgacattttagtagatctcaagtttttccaaatcaatcactaagtgggttacatggtatattagccagctggtgctgcaagaatgctttcagcattcaacagttccctccctcaccaccaaattcaatggtttaaagtaacaagcatttatttcttgctcaagaatccaggagctgactgtagttcagctgctcatggctgggctcagctgggagggctccatttccagattgggatagggtctgatttatcatctctctcmttccttcttggaccgtggccactcaggatatgttcttaacatgaagaatgggagaagcataagaagcaagcatttatagcctctacttgtgtcacattccctaacatttcattggccataccaggtcacatgccaaaactcatgaaagtggagcagagtctacccattctagtgggaaatcttgcaaagtcacatgtcaaagagtgtggatgtgtatatcaagtatagggaacttatattgctaataacgactccatctatcacatgtgggaaacccagtatctgtccacggctaactttcacttttccttgtctttgtcaaagatcacaacacttcagagacatcaaaggttcctccattcagattacagggccttagccatatgtatttggtcgtgtcctgcatatcca

SEQ ID NO: 3404 - DNA, 1031 bp, Homo sapiens
gcttacagaagctatctctgggtggtggaattaggttctttaaatttttttcattgttttattttatttctcagttttctacaggaagcataactcaactgaacaataaatatcatgaagaaatcttagagtaaggggccataatattttgagagaagggtacatttacatgcaagctgtgtatagaactagaggtcccttaaagcagggtggtttgttttaaaggttcaatctcccactccactagtcagtcagtcatcctaataaaaagtggatgttggtgacctagccacatgtatttccttctgctatactgagctatcactttttgcacctgaatttccttacatagggatcatgacattttagtagatctcaagtttttccaaatcaatcactaagtgggttacatggtatattagccagctggtgctgcaagaatgctttcagcattcaacagttccctccctcaccaccaaattcaatggtttaaagtaacaagcatttatttcttgctcaagaatccaggagctgactgtagttcagctgctcatggctgggctcagctgggagggctccatttccagattgggatagggtctgatttatcatctctctcattccttcttggaccgtggccactcaggatatgttcttaacatgaagaatgggagaagcataagaagcaagcatttatagcctctacttgtgtcacattccctaacatttcattggccrtaccaggtcacatgccaaaactcatgaaagtggagcagagtctacccattctagtgggaaatcttgcaaagtcacatgtcaaagagtgtggatgtgtatatcaagtatagggaacttatattgctaataacgactccatctatcacatgtgggaaacccagtatctgtccacggctaactttcacttttccttgtctttgtcaaagatcacaacacttcagagacatcaaaggttcctccattcagattacagggccttagccatatgtatttggtcgtgtcctgcatatcca

SEQ ID NO: 3405 - DNA, 588 bp, Homo sapiens
tgctactatttacaaaaaaaaagttggatcataatatgtatgctttttttttgcatcttacttttcttccttaaaacacgtgttaatgttttaagttatttgataatgccctgtttcatctttttagcatccttgtacatattctgatgtttttatttcttcaggttacattcccagagtgatatttttttttggataaaagcaaagtgtattttctgtctttttaattttagcagatgttgccagggccgcatgtggatgacttaacttgtaatgtcactgcacttgtcactgtagcaaggagaaagccttgacctgagagtcaggcggaagtcagctctgcaagggatgggctgtgtcactttggacaagttggcttccctctctgggctttgattttgtagtgggtaaaataggtggttggtctaagacagtgttgtttamattaacaatgcagctgatgtcctcataaataaaatatttgtgatgccctatttacgaaacagagatagaggatactctgaggaagcagagtccctgccttcttgatctttcctatatgccctcggagggtccttcagcatctct

SEQ ID NO: 3406 - DNA, 1216 bp, Homo sapiens
atatcctgaagactcccattgacatctagattagtagactcttcagcaagcaacctatcctcacgaatggtccctggccacaggaacgtcacatgagactgtccatcctctttgggtcagcctgctctgagtctgagcctcagcggatgccctgactgagcccttgtctatcctagtccatcttttatactttatatttctttcttttctcccytttttatttttttccacttttgactttgccccatgtatcagctagactgcaatcagctggagccttgccactctgtagaatgaaacaaggtcctggcaaagcattggctttggcaatcaggatgagaaaaatccagcccacctcatctcctatttttatgccactctggcctcctcctctctctcccttgtcctctggttcaaatgttcccagcaccagttcttggcatacagagagcatctagatggtacggtaaatatcattgtagttcatggtgaaagagtcaccgagaggccaagaaggcagtgaggaaaacagaaagctgagaagtagggcagcgtgtgaacccaccctcttaggtgcctggcaggattcccagtaatgaatgactataaattccatgaagaaatcattggaagagatacagtcaaaacaaagctcagatagaagctagagtcacatcagaattgaaaattattggaataatttgatcaatgactttagctgcaacttgtatcacttgttacacagttttataatttatagaatttaaacctgtgctttccaatatggtagctgctagccagatgtggctatataaatttaaattatctaaaataaaaaattcaatcactcagttgcatgtcacgtttcaagtactcaatagacacatgtggctagtagctaccatattgaactgcatggacagaatacttccagcattcctgaaactcctgttgaatagtgccagtttagagaataaaaatgatatcctttttcctgtttatgttgatttttattaccttaacatgaataggtattagaagtttttattttcttcaagtaattttaaattaagaagttaacagcatgttcttacgttcaacaaaataaaataatggcaaggtgaagtgaggtatacacaagatgggagttaacatttaatactattatatgctgtgataacactttagtaacttatttaattcaaaaataaatgag

SEQ ID NO: 3407 - DNA, 1186 bp, Homo sapiens
tgcatatttttgttctttagagagttgatttatttgtggagttgaaaagtctatcaggccttttygtggccttgaaaatgtccctaaagacttttatttcccacttaatgtcttctcccactccccaagctatctaccaatgacagtttaacatcccagacactttgatattcaatccattcttagaacctggcaagaagcccttcccctgggccctgtgctttagtgccccactctggccctcctctgaacacatccatgggtaaaggattgacctgcttctagcatcatgagctgggtacctgagattctacaggtccctgctccaatggcttcaagtttgactcaaacatctgtaccacctcttccttgggtcccacctcccaaaggcagggagaggagtggccagtgggtggctgttcactcttagtatcgattgaacttatgcttatacagcctgttcacaacatgaatgtgagagtcctgggaaataaaaggaaacaaccagttataaaaagagatgggcagctagctgaagagcacaggcatggaggccaggggccatgcggctggctcctcctcacaaggaaagctgagaattataattctaactgtccttctagatcataatgaaggtatgtttgtcaaaataggaagacagaacatattttaatcaataataaattaatttataatttgtaaacacttaaatggtttgttaatggtttcttgattcgcactcttgcctcaggccccacaaatgttaccggtaggcctgctaactagtcataaatattgtggtcatgataaaaaatattttgtatcacaaagttaatatgttggccttcttatttatgaataaacctctggtgaattttctaattgtaaaccacttccttggcattcagtcaacagaattccctacacctgtattcttgagaactcgatccaaaccatagagaccacatcaagttgatggtgctcatgtgattgatctaagtaccagctgacattctgggtgatattagtatattttatacaagaggaataaaaaagaaggatagaaaaaaggaatatattgaagagctgaagccccatataaagaactttaatttttaacacataaaaaagaagaatgccagccattactcagcttcattttaaaggtttagaattaatggcaaaa

SEQ ID NO: 3408 - DNA, 2036 bp, Homo sapiens
  misc_feature (1)...(2036): n = A,T,C or G
ctctaagtttttacatgaaaatcagagaatacatctgtactgtttaacaaaatacttggggattttttttttttttttaagagacagggtctcgctacgttgcccaggctggtctcaaactcctggcctgaaatgatcctcccacctcgccctcctgagtcgctgggactacaggcaaaatccatgcctggcttcatgagaaatttttaaagaagcacagtaaaatcaataaacagtccagaaatgtggaaaggtgcatgactggatgctaaagaaaacaaagaaaaagaaatctttgatgatacatataagtattctaattagacgtccagatttttcttttcaaccttattcatagaatttagattaaagctaccgaatataacttaaataggactgagatggtttatcccagaagggaaaaaaaaaaaggagagaaaaaaagacaaagagaaacagatggtgccaagagataatttaatgaggatttttcaagtagtttggggaaaataacacaggcctaagaaccctgacctcctggctgcctgacactaacaaattcactgttcacaactaagaaacttcaccttctttttcctcagtaataaaatgaagctgttgtagagttaagtcaccaatgtcctcctgatgttaaaattctgtgattttaaatattcatgtttatagtaaaggagaagagtagtggcatcagctatacataattcattttaaattggttttgaatactctcagtgacttaagtttaagtaagagaggaaagattcagtttagcacaatgctaagaaaggttctgatttttcaggaaaagccttttggcaaaagaagactattttttatctgtcacctatgattttcaataccttgaaaaatattatacataaactaagaccctgccccatgcttaaggtgtcctacagtgaggctctctttttctgtatgtatgcctgtgtaaaatgcgaacaccccctccttttctgacactgaataaataataagacagtaaatgcatacaactgccactctaattgcaaatgggtctaatgagatgcttgcttggttttcccttgtcnttgtatatgactttccattcacttttcccagtaataactcttccaccaccctgggaaataaacaagcatatttggtggacaacctggccacagaggtggaagaattcaacctttaggttcctccatggactcagcagagctctgcatgtctgcttgcatgtttctgtaaacaacatgtcatagaaaaactggccagaggcaaggggtccagagatctggtttaatttttaatctgaaaagtatttcataactaatatttcatcattagtaaaataaaagagcttatcaactgatttctaaagcctctttctgctctaacatcctctgattctctgatctggtttagaagacaaggatacagaatcagaattgtgagtgacctgaataaatgtttaagatcttagaacataatagtgatgttcagaaagaatactgacctgactagacagaaggactcagcagggatacaaaagaagacaagaagagaaggggtaacatctttttagctgaaggacttatggcccttgattagggccgaagggcttaagatctttttttttttctgcaaagtatctgaaaatgattaaaattattttgacagctgcaagtaattgggaagtaggtgaaaacaggaagttcaggcacagaataacctcactagttccagattccaccaataattcagtgttcatagtaatttsaacatgagtagctgatgtttattattatattacatattcattttcaagcaatagagaataaaactataactatccttttcaagtaagacccattagaatagtagacattttacctttatttgctgttattttttcattgacaaaatgtaaataagaacttctcagggagaacagttattccactaaagatgttggttctatcttttatcacctgcagataacctgtcactatgaggtaaagtat

SEQ ID NO: 3409 - DNA, 580 bp, Homo sapiens
tttgagacttaaatattggaaaaggtaacccagtgccataaagcagaaacagtgacctttaaaatgactaaaatttcaacccagyatagtttcatacctatttcatgctttctcgtaagaaagaatttcatgttttagaaacatttctttcactatgggattaataatatgacactgaaatggaattatatatgtcagctacaattcaggcattgttttgggatatggttagattgacaggcaacgttttggaatatggttagacggggagggaacacggtactgtttaacatcttaagagtatgtgggggtatgtgtatacagaatgtttttgtttttgctcatcacaaccaggtttcatcagtatttaaaatatttaagattgtggcttggaatgtggttcagccatttactcacttatacaaatattcagaagtgtaataaaaatgtgaatgaagaaaactttgatataactcttcttgcttagataaatggttgcagatgacatcacttttagtataacagaacatttctggttttgtttgtattatcttgtaaacatggccaacatggtgaaacc

SEQ ID NO: 3410 - DNA, 556 bp, Homo sapiens
tcgtgatccacccacctcagtttcccaagtgttgggattacaggcgtgagccactacgcctggccaaacatgacttcttaatgaatctcattgtactcaaatttggggctgctcttaaaaatttaatgtaaacttatttttgaagcatcactcagaaaagtgaacatatcgtaagtgcttttctcgataaatttccatatgaaacacacccataaaagagcattcagataaaaagacagaatatcagaatccagttctctcaggagaggaactttttcaaactttatttatgctaagaggtacctttaatagaaacagaaaacaaggttggatgaacaaaggtaatataattgaacatttttaattttctcgtcatgaaaggtatgacggtaacaaatgtagtattaaaaacttcccatctgtcggtttttagtaacagygctactaacttttttttttttttttgagacagtcttgctctgtctcccaggctggactgcagtggcgcgatctcagctcactgaaacctccgcctcccaggttcaagtgattcccg

SEQ ID NO: 3411 - DNA, 1232 bp, Homo sapiens
acttgttttgtgtggtgagaacacttaagatctactcttagcaattttcaaggatatcgttattaactgtagtcgccatgacgtgcaatacagatcttttgaacttattcctcctaattggaagttcaggtccttcaaccaacatctccccactccccacactcccagtctctgctacacaccattctactctctgctcctatgagaactcacttgatttcttatttaccccagatgagctctccaagctcttagcaggcagaaggaaacttcatttgagactctttgtaaaagcctttgtggctaggatgccattttcagcagagctgataaaggtttacagagacagtgcctctgttctaccctgcagaacagtcataagacactcagcagccaggcccctccccaaaacaagtgaagctgatctgtgaggggggggcaccatcacctgyatttatggttttttaagcttcaaggtcattctggtgtatacctggggctggaaaccaccatgtctagattttcttgcagagaggtcggcttgcattttaatggtttttactaagcgtctgtcaagtcaaacaagcattgcttgtcatgtggcgatggagttgggctacacgtgcccacagcacattcggatcttacataattggggttacggtgattctcaatgagggtgccaatggcatttgggtacaactctgatgcaatgaattgattagaatcaattcagatagctgaagtgttcaatcatggaataaatgtctatcacttttgaaggaagtgatcttttgacctttcagaattagctatattctggcaccttgaaccggcaccccacctccctgcagctgctccatcccaaatacatgccagtagcatcttcctaatgatgaaaactcaaaaggcccttcgcttttcaaagtgggaaaggcctcgcactgccgtatccacacacacacttacaaacacttacagacacacacacacactcagaaactagtcaaggttaaagtgacacagagtcgcagctgcctttgaatgccttcacatcccacttcaatcactagggctggagtctggaagccaagaggccaggaatcccctccttcctgcaggtgctcgtctctgctttagaagatgggcttcctctctctcaggcagagcgtgtgtgtgtgcgtacacgtgtgtgtacgtgcgtgtgcatgtgcgtgtgtacatgtgtgtgc

SEQ ID NO: 3412 - DNA, 589 bp, Homo sapiens
ccatatctaaatggaaagatagagataggttaatataatcagcatcaaaaatgtattagaacatatgtgaaaaatcatatcaatatgtctaaaccaaataactagatagacatgattcaaatttgtkgtatttatgtttttttcatagcatacactgatctgaaattcattaattcataaatttgtgtgtgtgtactatatactctgctaggtgctgggaatacagcaatggacaaggcagagtaggtgtgtggcattacagggttaataacaagcaaacaatgacaacccatgacatgaaggtgattctatttcactgacttatttttttgcatggattctacatgtgtaatcaattttaattgttagatttattgaaacttcatcatattaaaatgaatttcataatattttgttttaccaccaagataaaacaatttttaaaaataattttagactgcttttgaaatgccatcagcctatttcagaatgttttctttttacagcacatgtataatattggaagttttttcattgattttatatttatataaaatatataatcaatttaaatctagcctgtacctct

SEQ ID NO: 3413 - DNA, 562 bp, Homo sapiens
tttgccctacacattggaagctaattaatttaacaattaccttgtataattggttaaaatctctagtttatttgattttcccctcattcatagggcagtgtgaaggaattcacagttacagaacatttagtatttgtgagacactggcttataacatgatttacaccttaagataattttagcattaaggtgaagattattaacagttaagaataaagcctttggtctcaggcttgtatttgagttccagctggagactagagagtgaatccagaatttctgtacagaaggagtgttaaagttttaggagatcacaaattcaactcatcttgaatatagaccactgctcaaggaaataagagacrtcataaataaatgggaaaacattccatgctcatggataggaagaataaatatcatgaaaatggccatactgcccaaagtcatttatagattaaatgctatcttcatcaagctaccactgactttcttcacagagttgaaaaaaacgacttcaaaactctttaaaaagagcccacatagccaagataattctaagcaa

SEQ ID NO: 3414 - DNA, 538 bp, Homo sapiens
tgtcatgtgacaggcatgctaaattttagagaacttacagaacttaattcttataacaaactacaacgaaaaatcgacacttaaaatgattaagtgtcttgccccaggtcacaactaagataacaatttgagcactracaatctgactacagggcctgaacccttttatgaaaataacaataataataacaataatagctacaaatattatatttaaatacccaggaagttgatagaatcagcaagaccaacagcaaggcctcagcagggccaaccgtgcatgataaatggagccattgttatgacactgtcctcaagagcttagaatgttgtagggagaaagaacacataggatgagataactagtcacagaaggctgtttatggcatgtaacaggcaaacaaaagtgagctctacacaaatccatgggggcagtgatccgtgtagggtcttagggccctgcaagggagagatgaaatacaacagcaaatgcaagtaggtcccacttcgaggtcatgtgtgacttgtgcaatcactt

SEQ ID NO: 3415 - DNA, 1316 bp, Homo sapiens
agtctgagttaagcttttcagtagtaagccacacacagtgtcagcatgaaataattatatatatatatgaattatatataaagaactagttttagaaatatatatatatatatatatatatatatatatatatatatatatatatatatawagaactagttttagctggtgactctgagcttggaagacacctagttctgataactggggataaacagaataatagtttgtattagcactcaactggatttttcattgttcaatagacattgactgttctgggtgctggaaatccagtagtgaacagaaaaaatttttttatctacatcaagtcatattaatgtagtaacatacattgtctaagaagaatttatagataaatatatagattatatatatatatatatacatgtgtgcatatgttgtgtatgtgtgatcagaaagaaacttttgcccttacatgcacacaaacacacacaaatcattttcagctaaaaaatctttgtgccttcagaggattttcggagtaagaatcttagcagaagtacagtttccaaaacaaagtccagaaaatagtttttatttctcccatttgtcagttaggcaaaagaacagtaaggttttgggcaaagggatggaaaaggaggatttgatgatattgtgccagtgaacatgcttcaaagaaaactaactcagaggctttatttgtttcttattgctgctgtaacaaatcaccacaaacgtagttgcttaataccagaaaacttaatcacttatagttctggaattcaggagttacaaaatcaacatgtcagcagggctgcgttctttctggaggctccaggggaaaatctatttccttgcctttccagtttctagaagctgcttgcattttttggcttgtggtgcctcccttacataatacagacctctgcttctgtggtcatatctttttgactctgaccctcctataaagactctcttataaagccccttggaaatatgtagatcccagcctataatccaggataatcttatctcaaggtccttactttaagtacatattttgggagactcattattctgtctagcatagagactgatgtattggatgaaatattcaggttctgacttgcacatttactgcaagtttgtaggacaaattttggatactacctcagaagtctcaggtaccctaaaagcaaaagaaaatccattcttcaaatcaccctttgtttgtgtagctgtggatgactttgcaatcagggaataaattctgtttcatcatgagcagagaggtcatcaacattcatgag

SEQ ID NO: 3416 - DNA, 1316 bp, Homo sapiens
agtctgagttaagcttttcagtagtaagccacacacagtgtcagcatgaaataattatatatatatatgaattatatataaagaactagttttagaaatatatatatatatatatatatatatatatatatatatatatatatatatataaagaactagttttagctggtgactctgagcttggaagacacctagttctgataactggggataaacagaataatagtttgtattagcactcaactggatttttcattgttcaatagacattgactgttctgggtgctggaaatccagtagtgaacagaaaaaawttttttatctacatcaagtcatattaatgtagtaacatacattgtctaagaagaatttatagataaatatatagattatatatatatatatatacatgtgtgcatatgttgtgtatgtgtgatcagaaagaaacttttgcccttacatgcacacaaacacacacaaatcattttcagctaaaaaatctttgtgccttcagaggattttcggagtaagaatcttagcagaagtacagtttccaaaacaaagtccagaaaatagtttttatttctcccatttgtcagttaggcaaaagaacagtaaggttttgggcaaagggatggaaaaggaggatttgatgatattgtgccagtgaacatgcttcaaagaaaactaactcagaggctttatttgtttcttattgctgctgtaacaaatcaccacaaacgtagttgcttaataccagaaaacttaatcacttatagttctggaattcaggagttacaaaatcaacatgtcagcagggctgcgttctttctggaggctccaggggaaaatctatttccttgcctttccagtttctagaagctgcttgcattttttggcttgtggtgcctcccttacataatacagacctctgcttctgtggtcatatctttttgactctgaccctcctataaagactctcttataaagccccttggaaatatgtagatcccagcctataatccaggataatcttatctcaaggtccttactttaagtacatattttgggagactcattattctgtctagcatagagactgatgtattggatgaaatattcaggttctgacttgcacatttactgcaagtttgtaggacaaattttggatactacctcagaagtctcaggtaccctaaaagcaaaagaaaatccattcttcaaatcaccctttgtttgtgtagctgtggatgactttgcaatcagggaataaattctgtttcatcatgagcagagaggtcatcaacattcatgag

SEQ ID NO: 3417 - DNA, 1316 bp, Homo sapiens
agtctgagttaagcttttcagtagtaagccacacacagtgtcagcatgaaataattatatatatatatgaattatatataaagaactagttttagaaatatatatatatatatatatatatatatatatatatatatatatatatatataaagaactagttttagctggtgactctgagcttggaagacacctagttctgataactggggataaacagaataatagtttgtattagcactcaactggatttttcattgttcaatagacattgactgttctgggtgctggaaatccagtagtgaacagaaaaaatttttttatstacatcaagtcatattaatgtagtaacatacattgtctaagaagaatttatagataaatatatagattatatatatatatatatacatgtgtgcatatgttgtgtatgtgtgatcagaaagaaacttttgcccttacatgcacacaaacacacacaaatcattttcagctaaaaaatctttgtgccttcagaggattttcggagtaagaatcttagcagaagtacagtttccaaaacaaagtccagaaaatagtttttatttctcccatttgtcagttaggcaaaagaacagtaaggttttgggcaaagggatggaaaaggaggatttgatgatattgtgccagtgaacatgcttcaaagaaaactaactcagaggctttatttgtttcttattgctgctgtaacaaatcaccacaaacgtagttgcttaataccagaaaacttaatcacttatagttctggaattcaggagttacaaaatcaacatgtcagcagggctgcgttctttctggaggctccaggggaaaatctatttccttgcctttccagtttctagaagctgcttgcattttttggcttgtggtgcctcccttacataatacagacctctgcttctgtggtcatatctttttgactctgaccctcctataaagactctcttataaagccccttggaaatatgtagatcccagcctataatccaggataatcttatctcaaggtccttactttaagtacatattttgggagactcattattctgtctagcatagagactgatgtattggatgaaatattcaggttctgacttgcacatttactgcaagtttgtaggacaaattttggatactacctcagaagtctcaggtaccctaaaagcaaaagaaaatccattcttcaaatcaccctttgtttgtgtagctgtggatgactttgcaatcagggaataaattctgtttcatcatgagcagagaggtcatcaacattcatgag

SEQ ID NO: 3418 - DNA, 1316 bp, Homo sapiens
agtctgagttaagcttttcagtagtaagccacacacagtgtcagcatgaaataattatatatatatatgaattatatataaagaactagttttagaaatatatatatatatatatatatatatatatatatatatatatatatatatataaagaactagttttagctggtgactctgagcttggaagacacctagttctgataactggggataaacagaataatagtttgtattagcactcaactggatttttcattgttcaatagacattgactgttctgggtgctggaaatccagtagtgaacagaaaaaatttttttatctacatcaagtcatattaatgtagtaacatacattgtctaagaagaatttatagataaatatatagattatatatatatatatayacatgtgtgcatatgttgtgtatgtgtgatcagaaagaaacttttgcccttacatgcacacaaacacacacaaatcattttcagctaaaaaatctttgtgccttcagaggattttcggagtaagaatcttagcagaagtacagtttccaaaacaaagtccagaaaatagtttttatttctcccatttgtcagttaggcaaaagaacagtaaggttttgggcaaagggatggaaaaggaggatttgatgatattgtgccagtgaacatgcttcaaagaaaactaactcagaggctttatttgtttcttattgctgctgtaacaaatcaccacaaacgtagttgcttaataccagaaaacttaatcacttatagttctggaattcaggagttacaaaatcaacatgtcagcagggctgcgttctttctggaggctccaggggaaaatctatttccttgcctttccagtttctagaagctgcttgcattttttggcttgtggtgcctcccttacataatacagacctctgcttctgtggtcatatctttttgactctgaccctcctataaagactctcttataaagccccttggaaatatgtagatcccagcctataatccaggataatcttatctcaaggtccttactttaagtacatattttgggagactcattattctgtctagcatagagactgatgtattggatgaaatattcaggttctgacttgcacatttactgcaagtttgtaggacaaattttggatactacctcagaagtctcaggtaccctaaaagcaaaagaaaatccattcttcaaatcaccctttgtttgtgtagctgtggatgactttgcaatcagggaataaattctgtttcatcatgagcagagaggtcatcaacattcatgag

SEQ ID NO: 3419 - DNA, 1316 bp, Homo sapiens
agtctgagttaagcttttcagtagtaagccacacacagtgtcagcatgaaataattatatatatatatgaattatatataaagaactagttttagaaatatatatatatatatatatatatatatatatatatatatatatatatatataaagaactagttttagctggtgactctgagcttggaagacacctagttctgataactggggataaacagaataatagtttgtattagcactcaactggatttttcattgttcaatagacattgactgttctgggtgctggaaatccagtagtgaacagaaaaaatttttttatctacatcaagtcatattaatgtagtaacatacattgtctaagaagaatttatagataaatatatagattatatatatatatatatacatgtgtgcatatgttgtgtatgtgtgatcagaaagaaacttttgcccttacatgcacacaaacacacacaaatcattttcagctaaaaaatctttgtgccttcagaggattttcggagtaagaatcttagcagaagtacagtttccaaaacaaagtccagaaaatagtttttatttctcccatttgtcagttaggcaaaagaacagtaaggttttgggcaaagggatggaaaaggaggatttgatgatattgtgccagtgaacatgcttcaaagaaaactaactcagaggctttatttgtttcttattgctgctgtaacaaatcaccacaaacgtagttgcttaataccagaaaacttaatcacttatagttctggaattcaggagttacaaaatcaacatgtcagcagggctgcgttctttctggaggctccaggggaaaatctatttccttgcctttccagtttctagaagctgcttgcattttttggcttgtggtgcctcccttacataatacagacctctgcttctgtggtcatayctttttgactctgaccctcctataaagactctcttataaagccccttggaaatatgtagatcccagcctataatccaggataatcttatctcaaggtccttactttaagtacatattttgggagactcattattctgtctagcatagagactgatgtattggatgaaatattcaggttctgacttgcacatttactgcaagtttgtaggacaaattttggatactacctcagaagtctcaggtaccctaaaagcaaaagaaaatccattcttcaaatcaccctttgtttgtgtagctgtggatgactttgcaatcagggaataaattctgtttcatcatgagcagagaggtcatcaacattcatgag

SEQ ID NO: 3420 - DNA, 1316 bp, Homo sapiens
agtctgagttaagcttttcagtagtaagccacacacagtgtcagcatgaaataattatatatatatatgaattatatataaagaactagttttagaaatatatatatatatatatatatatatatatatatatatatatatatatatataaagaactagttttagctggtgactctgagcttggaagacacctagttctgataactggggataaacagaataatagtttgtattagcactcaactggatttttcattgttcaatagacattgactgttctgggtgctggaaatccagtagtgaacagaaaaaatttttttatctacatcaagtcatattaatgtagtaacatacattgtctaagaagaatttatagataaatatatagattatatatatatatatatacatgtgtgcatatgttgtgtatgtgtgatcagaaagaaacttttgcccttacatgcacacaaacacacacaaatcattttcagctaaaaaatctttgtgccttcagaggattttcggagtaagaatcttagcagaagtacagtttccaaaacaaagtccagaaaatagtttttatttctcccatttgtcagttaggcaaaagaacagtaaggttttgggcaaagggatggaaaaggaggatttgatgatattgtgccagtgaacatgcttcaaagaaaactaactcagaggctttatttgtttcttattgctgctgtaacaaatcaccacaaacgtagttgcttaataccagaaaacttaatcacttatagttctggaattcaggagttacaaaatcaacatgtcagcagggctgcgttctttctggaggctccaggggaaaatctatttccttgcctttccagtttctagaagctgcttgcattttttggcttgtggtgcctcccttacataatacagacctctgcttctgtggtcatatctttttgactctgaccctcctataaagactctcttataaagccccttggaaatatgtagatcccagcctataatccaggataatcttatctcaaggtccttactttaagtacatattttgggagactcattattctgtctagcatagagactgatgtattggatgaaatattcaggttctgacttgcayatttactgcaagtttgtaggacaaattttggatactacctcagaagtctcaggtaccctaaaagcaaaagaaaatccattcttcaaatcaccctttgtttgtgtagctgtggatgactttgcaatcagggaataaattctgtttcatcatgagcagagaggtcatcaacattcatgag

SEQ ID NO: 3421 - DNA, 571 bp, Homo sapiens
tgtacaacataattaaaactatgataacattataaaataggatgatggctagttagagaggaagatctatcaagtaggaacccgtgtatatcacttgaaatattgcctcaattacttcaagtcgtcagctccggctcctcatctcaaaaacaatccttacaaatgcaaacttaaaatgacaagtgctgttcgtttctagccctggtttcctttccttgtacctgtccacaggaattgctcttcagcatctgttgaacaaacatcagcaagacaaggataatactcaaatttctttttttttttctgagaccgagtctcactgtgttgcccaggctggagtgcaatggcgtgatctyggctcactgcaacctccacttcccgagttcaagcgattcttctgcctcagcctcctaagtagctgggattacaggcacccaccactatgctcagttaatttttgtatttttagtagagacagggtttcaccatgttggccaggctggtcttgaactcctgacctcaagtgatctgcccgcctcagcctcccaaagtgctgggattacaggtgtga

SEQ ID NO: 3422 - DNA, 571 bp, Homo sapiens
tgtacaacataattaaaactatgataacattataaaataggatgatggctagttagagaggaagatctatcaagtaggaacccgtgtatatcacttgaaatattgcctcaattacttcaagtcgtcagctccggctcctcatctcaaaaacaatccttacaaatgcaaacttaaaatgacaagtgctgttcgtttctagccctggtttcctttccttgtacctgtccacaggaattgctcttcagcatctgttgaacaaacatcagcaagacaaggataatactcaaatttctttttttttttctgagaccgagtctcactgtgttgcccaggctggagtgcaatggcgtgatcttggctcactgcaacctccacttcccgagttcaagcgattcttctgcctcagcctcctaagtagctggrattacaggcacccaccactatgctcagttaatttttgtatttttagtagagacagggtttcaccatgttggccaggctggtcttgaactcctgacctcaagtgatctgcccgcctcagcctcccaaagtgctgggattacaggtgtga

SEQ ID NO: 3423 - DNA, 621 bp, Homo sapiens
attttttttttgagacaaggtcttgctctttcacccaggctggagtgcagtggtgtgatcatagctcattgcaacctcgacctcctgggctcaattgatccacmtgtctcagccttctcagtagctgggactacaggtgtgtgccaccatgactgactaatttttgtatttcttgtagagatggggtttctccatgttgcccaggctggtctccaactgggctcaagcaatctgcctgcttctgcctactaaagtgttgggattacagatgggagccaccgtgcctggtctacacttatttttttttaatgctgaaagaaatcaagatctaaaataattgaaagatatctgattttcaaggataaaaatacttaatgttttcaagataacaatatcctacaagtgaaccgagagattcaatataatcccttcaaattcccagctgtgtttttgtagaaattgacaactgtccccacaccaaaactgatacagataagcataggaaaccaaatacatgaaacgatcttgaagaacaactgacttccacttcccagtatgaattctcactgcaggccaggcatggtggcttacccctgtaatcccagcactttgggaggccga

SEQ ID NO: 3424 - DNA, 621 bp, Homo sapiens
attttttttttgagacaaggtcttgctctttcacccaggctggagtgcagtggtgtgatcatagctcattgcaacctcgacctcctgggctcaattgatccacatgtctcagccttctcagtagctgggactacaggtgtgtgccaccatgactgactaatttttgtatttcttgtagagatggggtttctccatgttgcccaggctggtctccaactgggctcaagcaatctgcctgcttctgcctactaaagtgttgggattacagatgggagccaccgtgcctggtctacacttatttttttttaatgctgaaagaaatcaagatctaaaataattgaaagatatctgattttcaaggataaaaatacttaatgttttcaagataacaatatcctacaagtgaaccgagagattcaatrtaatcccttcaaattcccagctgtgtttttgtagaaattgacaactgtccccacaccaaaactgatacagataagcataggaaaccaaatacatgaaacgatcttgaagaacaactgacttccacttcccagtatgaattctcactgcaggccaggcatggtggcttacccctgtaatcccagcactttgggaggccga

SEQ ID NO: 3425 - DNA, 1175 bp, Homo sapiens
cgtgaattactgggcactcttataaacctaataatacagcttcctatcacaccacatgctgctacttttttcagaaagcttaggaaattccttccagaaatggttcagactaaaaatgtaactaggttcagtaatgattttcatacatttatgaataatgtataaaatacagactacagagaaaaatcaggaatgtttgcttataaccctaatcttctgagataacacaataaaaggcacacacactcatcacctcaccaaaaagataaagtatctggttatcaacatctgcgatcagcaggcagatctgacccaacatggcacttaatacccttgcactgcgcactttttcatgtccccaaataatgggtgctaccgtctattaccgttaatgcattcttacgtgcgtgcgttcctttgcatgattttgtctccatttcttttaaagtaaaaatgtctaatactcagtatctttcaaactgttgtcaaacaatagagatcatcacatcagacttccatgaacttttccaaattatcatttatacaaacacataattcatccaaaagactattacaacctaattaatgtatgcttaaagcattttgtgaaaatactgttagtagcacaccagaaaatgaattccttaagaggtcatggaagctctaaaaatatttcatttagtaatcaggagaatagtttcataaaagatttcataataattttttaaaatayactcagtaaaaaatagctctttaagtagaacacctaaaaattacctatactttcaataattagcctgtgacaaagtaattcaaattataaaagttagttgttggttaaaagaatatgaaaagcatcacccagcaggatggtatgacataggtagctgccattcctggggtttgtctgtgtatcctatgatctacagctgcatgtataagtaaacatagtatatatgtgtattataaattgatggtatacatactatgtatatatcacataatatataacctctatatgttatacattatataggtgtgtaaatgtatgtgcatgtatatatgtttatatacatgcaaatgtatatttttgagtataccaaaaaaaaaaaaagaaaatatcttctgaattaaagaacaggaacaaaggtgagttctacaattttcttacattt

SEQ ID NO: 3426 - DNA, 1175 bp, Homo sapiens
cgtgaattactgggcactcttataaacctaataatacagcttcctatcacaccacatgctgctacttttttcagaaagcttaggaaattccttccagaaatggttcagactaaaaatgtaactaggttcagtaatgattttcatacatttatgaataatgtataaaatacagactacagagaaaaatcaggaatgtttgcttataaccctaatcttctgagataacacaataaaaggcacacacactcatcacctcaccaaaaagataaagtatctggttatcaacatctgcgatcagcaggcagatctgacccaacatggcacttaatacccttgcactgcgcactttttcatgtccccaaataatgggtgctaccgtctattaccgttaatgcattcttacgtgcgtgcgttcctttgcatgattttgtctccatttcttttaaagtaaaaatgtctaatactcagtatctttcaaactgttgtcaaacaatagagatcatcacatcagacttccatgaacttttccaaattatcatttatacaaacacataattcatccaaaagactattacaacctaattaatgtatgcttaaagcattttgtgaaaatactgttagtagcacaccagaaaatgaattccttaagaggtcatggaagctctaaaaatatttcatttagtaatcaggagaatagtttcataaaagatttcataataattttttaaaatacactcagtaaaaaatagctctttaagtagaacacctaaaaattacctatactttcaataattagcctgtgacaaaktaattcaaattataaaagttagttgttggttaaaagaatatgaaaagcatcacccagcaggatggtatgacataggtagctgccattcctggggtttgtctgtgtatcctatgatctacagctgcatgtataagtaaacatagtatatatgtgtattataaattgatggtatacatactatgtatatatcacataatatataacctctatatgttatacattatataggtgtgtaaatgtatgtgcatgtatatatgtttatatacatgcaaatgtatatttttgagtataccaaaaaaaaaaaaagaaaatatcttctgaattaaagaacaggaacaaaggtgagttctacaattttcttacattt

SEQ ID NO: 3427 - DNA, 650 bp, Homo sapiens
aaaagagtgatggaaaattacagcaacactttttattcacagacaacttggaccatgtgtgaacgccttaggtgtagtttatatgaatttatcctctgcacgtccctatggctgcttggagtgttagactgatggccaacccaaaaggtgactccctaaagtactccatcataggctgcaaagccattcagagaacaccaacacagtggtctcaactggctgacaggacactccttcacaccttcccagacacgcgcctgaatgatcatatacggaggtgacaagagaacacaggcccaacctctgtcatttcccaccctcagtaaagtggtgaatcaggatgcgtgtgttcacagcacacaggggacttgatcccacccatcacccaacagtatatgaacctagcaatgagagcagtgcaaagccattcaaggaagaaaaggaagcttctgtgggtattaaataacaggacacactaatgtgaggcacaagagagtatccctastggaaacacttctcaacttcagtcttccattgccaaaatctcaaattatgctgacgttactcattatgtttcatatgcctatttcttctcatttttatttttggtttaagtatttttttactcatagtttaatttgtatgtgtta

SEQ ID NO: 3428 - DNA, 702 bp, Homo sapiens
acgaatgtctaagccttgtggttagtggggacaatgctggtggagtctgaagttgtcatgcagtgactcatgcaagcttaggcagatttggtgatatatgacacagagatgcaaagaaatgttgtagctgacacacacaggctggctctgggagatgcagaaggagcacgtcacccaaaatagagccagacagacatccttaaggaaggagcaaaggggctgcatcttaaagaatgtagaaaggatttgtcatgagagatggggcaggaagttcttsagaggcagagggagagcatgagaatgttgggaagggaggagagattcttgcacatctgggaagctgacaatccatcagcatggccagaaggaaaataaggaggaggagcagaaatagatgaggctggatatagaagcagggctgaagctgtgtcaattgtggtaaagagttgtgattctatccagaacgcaataggtagcattctaaacagagatcttttaaaacaagagtcagcaagtattttctgcaaggggctaaatgttaaatattttaagttttccaagccatatggtctctctctcaatgactcagctcttccattataccatgaaagtagccagagacattatgtaacacatgtattggctgtgtcccattacaactttacttacaaacgcagactgtgtcagacatggtccatgcat

SEQ ID NO: 3429 - DNA, 702 bp, Homo sapiens
acgaatgtctaagccttgtggttagtggggacaatgctggtggagtctgaagttgtcatgcagtgactcatgcaagcttaggcagatttggtgatatatgacacagagatgcaaagaaatgttgtagctgacacacacaggctggctctgggagatgcagaaggagcacgtcacccaaaatagagccagacagacatccttaaggaaggagcaaaggggctgcatcttaaagaatgtagaaaggatttgtcatgagagatggggcaggaagttcttgagaggcagagggagagcatgagaatgttgggaagggaggagagattcttgcacatctgggaagctgacaatccatcagcatggccagaaggaaaataaggaggaggagcagaaatagatgaggctggatatagaagcagggctgaagctgtgtcrattgtggtaaagagttgtgattctatccagaacgcaataggtagcattctaaacagagatcttttaaaacaagagtcagcaagtattttctgcaaggggctaaatgttaaatattttaagttttccaagccatatggtctctctctcaatgactcagctcttccattataccatgaaagtagccagagacattatgtaacacatgtattggctgtgtcccattacaactttacttacaaacgcagactgtgtcagacatggtccatgcat

SEQ ID NO: 3430 - DNA, 702 bp, Homo sapiens
acgaatgtctaagccttgtggttagtggggacaatgctggtggagtctgaagttgtcatgcagtgactcatgcaagcttaggcagatttggtgatatatgacacagagatgcaaagaaatgttgtagctgacacacacaggctggctctgggagatgcagaaggagcacgtcacccaaaatagagccagacagacatccttaaggaaggagcaaaggggctgcatcttaaagaatgtagaaaggatttgtcatgagagatggggcaggaagttcttgagaggcagagggagagcatgagaatgttgggaagggaggagagattcttgcacatctgggaagctgacaatccatcagcatggccagaaggaaaataaggaggaggagcagaaatagatgaggctggatatagaagcagggctgaagctgtgtcaattgtggtaaagagttgtgattctatccagaaygcaataggtagcattctaaacagagatcttttaaaacaagagtcagcaagtattttctgcaaggggctaaatgttaaatattttaagttttccaagccatatggtctctctctcaatgactcagctcttccattataccatgaaagtagccagagacattatgtaacacatgtattggctgtgtcccattacaactttacttacaaacgcagactgtgtcagacatggtccatgcat

SEQ ID NO: 3431 - DNA, 702 bp, Homo sapiens
acgaatgtctaagccttgtggttagtggggacaatgctggtggagtctgaagttgtcatgcagtgactcatgcaagcttaggcagatttggtgatatatgacacagagatgcaaagaaatgttgtagctgacacacacaggctggctctgggagatgcagaaggagcacgtcacccaaaatagagccagacagacatccttaaggaaggagcaaaggggctgcatcttaaagaatgtagaaaggatttgtcatgagagatggggcaggaagttcttgagaggcagagggagagcatgagaatgttgggaagggaggagagattcttgcacatctgggaagctgacaatccatcagcatggccagaaggaaaataaggaggaggagcagaaatagatgaggctggatatagaagcagggctgaagctgtgtcaattgtggtaaagagttgtgattctatccagaacgcaataggtagcattctaaacagagatcttttaaaacaagagtcagcaagtattttctgcarggggctaaatgttaaatattttaagttttccaagccatatggtctctctctcaatgactcagctcttccattataccatgaaagtagccagagacattatgtaacacatgtattggctgtgtcccattacaactttacttacaaacgcagactgtgtcagacatggtccatgcat

SEQ ID NO: 3432 - DNA, 702 bp, Homo sapiens
acgaatgtctaagccttgtggttagtggggacaatgctggtggagtctgaagttgtcatgcagtgactcatgcaagcttaggcagatttggtgatatatgacacagagatgcaaagaaatgttgtagctgacacacacaggctggctctgggagatgcagaaggagcacgtcacccaaaatagagccagacagacatccttaaggaaggagcaaaggggctgcatcttaaagaatgtagaaaggatttgtcatgagagatggggcaggaagttcttgagaggcagagggagagcatgagaatgttgggaagggaggagagattcttgcacatctgggaagctgacaatccatcagcatggccagaaggaaaataaggaggaggagcagaaatagatgaggctggatatagaagcagggctgaagctgtgtcaattgtggtaaagagttgtgattctatccagaacgcaataggtagcattctaaacagagatcttttaaaacaagagtcagcaagtattttctgcaaggggctaaatgttaaatattttaagttttccaagccatatggtctctctctcaatgactcagctcttscattataccatgaaagtagccagagacattatgtaacacatgtattggctgtgtcccattacaactttacttacaaacgcagactgtgtcagacatggtccatgcat

SEQ ID NO: 3433 - DNA, 702 bp, Homo sapiens
acgaatgtctaagccttgtggttagtggggacaatgctggtggagtctgaagttgtcatgcagtgactcatgcaagcttaggcagatttggtgatatatgacacagagatgcaaagaaatgttgtagctgacacacacaggctggctctgggagatgcagaaggagcacgtcacccaaaatagagccagacagacatccttaaggaaggagcaaaggggctgcatcttaaagaatgtagaaaggatttgtcatgagagatggggcaggaagttcttgagaggcagagggagagcatgagaatgttgggaagggaggagagattcttgcacatctgggaagctgacaatccatcagcatggccagaaggaaaataaggaggaggagcagaaatagatgaggctggatatagaagcagggctgaagctgtgtcaattgtggtaaagagttgtgattctatccagaacgcaataggtagcattctaaacagagatcttttaaaacaagagtcagcaagtattttctgcaaggggctaaatgttaaatattttaagttttccaagccatatggtctctctctcaatgactcagctcttccattataccatgaaagtagccagagacattatgtaacacatgtattggctgtgtcccattacaactttacttacaaaygcagactgtgtcagacatggtccatgcat

SEQ ID NO: 3434 - DNA, 628 bp, Homo sapiens
cagttagacaaagtttcagtgaactattgcacagaatggtgactgtaataaataacaaggtattgtatgtttcaaaatgactaacagagtagattttaaatgttttcaccacaaaaaagatatgtatgtcaataagayagacctaatctttccacaatttaaacatgtatcaaaacattacattgtaccccatagatacaattattatttgtcaatttaaaatttttcactaatttatattgttattgttgcaccaactcctttccaccaggcagattctcataaagactattttctctcttacatgaagcatttcctacacacctcttaatcacggtagcattgacatcattccaccagattctatctccagtgttaaaataatcaagaacccagaaatctccaccagggggcaaccaatgcgtatcaaagtttcccactttcctttagatttacttatgggtaacttatgggaaaaaatacttaagtacttccctttttaaagaaaaaaattatatgaattctacaaaattatggcagaaaatttaagaagagcagatgcttcccaactcattctaaagggccagcattaccctgattctgaaatgaaaaagctttacaaaatcca

SEQ ID NO: 3435 - DNA, 705 bp, Homo sapiens
tgctaatgaaatgattgatggctgggggcacctggacagcctcagtgggggctggctgccaagggaagcaaccttgtcatgagagratttgaaatttcttcccccgtcccgtctctgtgaaggggagaggtgctgatggttgagttgatcacctatggccacagacgtaaccaatctgcctgtgtaataaaggacagggttgggagagcatctgtgttgctctcccaacacaggagatactgggaggatcatatctggcgagggcatgggaggcctgcattccttccatatacctcaccttgtgcatctcttcatctggcttttcatttgtagtgtttaaaagatccttggtaatgagtcaggaatagtaagtacactgctttcatgggttgtgtaatgtgatgtagcaaattgctgaacccaataagggtgttgtgggagcctccaatctgtagcaaagtcagacagaaggtaacctgggaacctactgtttgtggttggcatcttaagtggttacagtcttgtaactgagtacccatattttcttaaagaagaaatgaattagttttaccattttgctgttcctgcatttagctctttaggaatgcaattataagctttactgtctctccaccagacacttcctatactgcaaacttttccaactgtgtgattacttgtaagttccagggaccaaaccttgaa

SEQ ID NO: 3436 - DNA, 705 bp, Homo sapiens
tgctaatgaaatgattgatggctgggggcacctggacagcctcagtgggggctggctgccaagggaagcaaccttgtcatgagagaatttgaaatttcttcccccgtcccgtctctgtgaaggggagaggtgctgatggttgagttgatcacctatggccacagacgtaaccaatctgcctgtgtaataaaggacagggttgggagagcatctgtgttgctctcccaacacaggagatactgggaggatcatatctggcgagggcatgggaggcctgcattccttccatatacctcaccttgtgcatctcttcatctggcttttcatttgtagygtttaaaagatccttggtaatgagtcaggaatagtaagtacactgctttcatgggttgtgtaatgtgatgtagcaaattgctgaacccaataagggtgttgtgggagcctccaatctgtagcaaagtcagacagaaggtaacctgggaacctactgtttgtggttggcatcttaagtggttacagtcttgtaactgagtacccatattttcttaaagaagaaatgaattagttttaccattttgctgttcctgcatttagctctttaggaatgcaattataagctttactgtctctccaccagacacttcctatactgcaaacttttccaactgtgtgattacttgtaagttccagggaccaaaccttgaa

SEQ ID NO: 3437 - DNA, 705 bp, Homo sapiens
tgctaatgaaatgattgatggctgggggcacctggacagcctcagtgggggctggctgccaagggaagcaaccttgtcatgagagaatttgaaatttcttcccccgtcccgtctctgtgaaggggagaggtgctgatggttgagttgatcacctatggccacagacgtaaccaatctgcctgtgtaataaaggacagggttgggagagcatctgtgttgctctcccaacacaggagatactgggaggatcatatctggcgagggcatgggaggcctgcattccttccatatacctcaccttgtgcatctcttcatctggcttttcatttgtagtrtttaaaagatccttggtaatgagtcaggaatagtaagtacactgctttcatgggttgtgtaatgtgatgtagcaaattgctgaacccaataagggtgttgtgggagcctccaatctgtagcaaagtcagacagaaggtaacctgggaacctactgtttgtggttggcatcttaagtggttacagtcttgtaactgagtacccatattttcttaaagaagaaatgaattagttttaccattttgctgttcctgcatttagctctttaggaatgcaattataagctttactgtctctccaccagacacttcctatactgcaaacttttccaactgtgtgattacttgtaagttccagggaccaaaccttgaa

SEQ ID NO: 3438 - DNA, 705 bp, Homo sapiens
tgctaatgaaatgattgatggctgggggcacctggacagcctcagtgggggctggctgccaagggaagcaaccttgtcatgagagaatttgaaatttcttcccccgtcccgtctctgtgaaggggagaggtgctgatggttgagttgatcacctatggccacagacgtaaccaatctgcctgtgtaataaaggacagggttgggagagcatctgtgttgctctcccaacacaggagatactgggaggatcatatctggcgagggcatgggaggcctgcattccttccatatacctcaccttgtgcatctcttcatctggcttttcatttgtagtgtttaaaagatccttggtaatgagtcaggaatagtaagtacactgctttcatgggttgtgtaatgtkatgtagcaaattgctgaacccaataagggtgttgtgggagcctccaatctgtagcaaagtcagacagaaggtaacctgggaacctactgtttgtggttggcatcttaagtggttacagtcttgtaactgagtacccatattttcttaaagaagaaatgaattagttttaccattttgctgttcctgcatttagctctttaggaatgcaattataagctttactgtctctccaccagacacttcctatactgcaaacttttccaactgtgtgattacttgtaagttccagggaccaaaccttgaa

SEQ ID NO: 3439 - DNA, 679 bp, Homo sapiens
tttaccatccttgtgtttgtcatttaaatttgcaagcgacaaggggcatggcgtgtattcctaggactgagcccttagcctgtggggtctgatgctttctccatttactgtcacaattggattgcactgtaggacacgcagctggtacccaagatttggtctgtgtggggaaaaaacccatgtatctggtaacagaagtgttctgtgttgagtgttgagagtatactataagacagttgtttttcctattataacattttgtctttcaacttttttcttcatgtcttctgagacataaaagttgtgaattttgaggaaataaattgatttatttttccttttgtggtctgtgcttttggtgtcagatgtaggaaactattgctrcgtgtaaggtcatgaatgcttaactgtacgttttcttccagagtttttagttttcacctgttttggtctttgatccattgtaagttaattttttatgtggtatgaggtaaggatacaatttcatttccctttatgtggatagcaagttgccttacatcacttgttgaggacaggattctttccccaatttactggtaatggaccttgtctaaaatcagttgagcatagaggtattgttttctgtctggactcccaattcaattcagttgatctttctgtttattcctgtgcaagg

SEQ ID NO: 3440 - DNA, 679 bp, Homo sapiens
tttaccatccttgtgtttgtcatttaaatttgcaagcgacaaggggcatggcgtgtattcctaggactgagcccttagcctgtggggtctgatgctttctccatttactgtcacaattggattgcactgtaggacacgcagctggtacccaagatttggtctgtgtggggaaaaaacccatgtatctggtaacagaagtgttctgtgttgagtgttgagagtatactataagacagttgtttttcctattataacattttgtctttcaacttttttcttcatgtcttctgagacataaaagttgtgaattttgaggaaataaattgatttatttttccttttgtggtctgtgcttttggtgtcagatgtaggaaactattgctgygtgtaaggtcatgaatgcttaactgtacgttttcttccagagtttttagttttcacctgttttggtctttgatccattgtaagttaattttttatgtggtatgaggtaaggatacaatttcatttccctttatgtggatagcaagttgccttacatcacttgttgaggacaggattctttccccaatttactggtaatggaccttgtctaaaatcagttgagcatagaggtattgttttctgtctggactcccaattcaattcagttgatctttctgtttattcctgtgcaagg

SEQ ID NO: 3441 - DNA, 679 bp, Homo sapiens
tttaccatccttgtgtttgtcatttaaatttgcaagcgacaaggggcatggcgtgtattcctaggactgagcccttagcctgtggggtctgatgctttctccatttactgtcacaattggattgcactgtaggacacgcagctggtacccaagatttggtctgtgtggggaaaaaacccatgtatctggtaacagaagtgttctgtgttgagtgttgagagtatactataagacagttgtttttcctattataacattttgtctttcaacttttttcttcatgtcttctgagacataaaagttgtgaattttgaggaaataaattgatttatttttccttttgtggtctgtgcttttggtgtcagatgtaggaaactattgctgcgtgtaaggtcatgaatgcttaactgtacgttttctyccagagtttttagttttcacctgttttggtctttgatccattgtaagttaattttttatgtggtatgaggtaaggatacaatttcatttccctttatgtggatagcaagttgccttacatcacttgttgaggacaggattctttccccaatttactggtaatggaccttgtctaaaatcagttgagcatagaggtattgttttctgtctggactcccaattcaattcagttgatctttctgtttattcctgtgcaagg

SEQ ID NO: 3442 - DNA, 525 bp, Homo sapiens
attgaattttggaatatttccaccattatgtaaatrttttggtaggtaatttatttggagtgagtttctgcgccaagcccgaattttttattttattttccttattatttggtgttaaacaggtttaatgacggtcatggcaactttttggcacaatgaaaaatatcgcccacgatcaacgtgttctgttctggggaagggggcaaaggcagggtgaatcactttcttaaaaagtatagctcaagttgggagtgcagagggaatggggagaaaaccctcccgctgcctgtgtcgaagtgcaggagcccccacccccatactcacctgagtccagcccctctggagaagaaggggtgcatgaactccccctagtccacaggcgcctccctgtggcccaaggcctcttcacactccatcttgtagccccagcaggagctattttccgaaaagtgaaaagctctgaaggtcccacaattcatggtatgtacaggggctcggaggagggaaactgcccagctttccccc

SEQ ID NO: 3443 - DNA, 581 bp, Homo sapiens
ttttttgacttaaaggttttcttacctgtttattattctaagttaattttagaattactttgtcacggccaggcgcggtggctcatgcctgtaatcccagcactgaggctgaggcgggtggatcacctgaggtcgggagttcaagaccagcctggccaacaaggtgaaaccctgtctctactaaaaacacaaaacgccaggcgtggcgggagggtgtctgtagtcccagctacaggtactatagatgctgaggtgggagaatcgcctgaacctgggggatggaggttgcagtaagccaaaatcacaccattgcactccagcctgggcaacagagatagaccctgtctccaaaaagaaaaaaaaaaaaagaattagtcaaattcaaaaaaaaggtatcaaggttttattttttactgaaattacactgaagttayaggttaatctagtggaagaatctttggctttccagcgtctgtgtctgagcagggaagggcgcctcagggccgcctccctcaccgataccacgtctcagacccgcagcgtgccggggttccctttgcaggctccggtccaggcaggag

SEQ ID NO: 3444 - DNA, 583 bp, Homo sapiens
catttcagccttgcagttttcacatttaggagccaattgtcttaggtctaaagcattcatgccgaagcattgttatgggccccagacactatgcttcccagccttaatgrcctctgcaatgctggttcctactggcccacccctgggttctggccggctagcccgcgccacctcactgctcccccattcaagtgtgccttaaatgtgtggtttccaaactcatctacactttagggtcacctgagattttttttttaaatcttccaaaacccaggccacacccaagaacaattaaacctcaacctctggaatgggacatagactccgttttttgttttgttttgtttttgagacagggcctcgctctgttacccaggctggagtgcagtggcacaatcatagctcactacaggctccaactcctgggctcaagaaaccctcccacttcaacctccacggtagctgggatcacaggcgggcaccaccacgcccggctaatttttaaattttttatagagacagtatctccttatgttctccaggctagtctcaaactcctgggctcaagtgatactcccgcctc

SEQ ID NO: 3445 - DNA, 583 bp, Homo sapiens
catttcagccttgcagttttcacatttaggagccaattgtcttaggtctaaagcattcatgccgaagcattgttatgggccccagacactatgcttcccagccttaatggcctctgcaatgctggttcctactggcccacccctgggttctggccggctagcccgcgccacctcactgctcccccattcaagtgtgccttaaatgtgtggtttccaaactcatctacactttagggtcacctgagattttttttttaaatcttccaaaacccaggccacacccaagaacaattaaacctcaacctctggaatgggacatagactccgttttttgttttgttttgtttttgagacagggcctcgctstgttacccaggctggagtgcagtggcacaatcatagctcactacaggctccaactcctgggctcaagaaaccctcccacttcaacctccacggtagctgggatcacaggcgggcaccaccacgcccggctaatttttaaattttttatagagacagtatctccttatgttctccaggctagtctcaaactcctgggctcaagtgatactcccgcctc

SEQ ID NO: 3446 - DNA, 666 bp, Homo sapiens
gcataggctactgctatgaattgaaattcttaaattccaaagattaattaaaatgtttctcaagacacataaactgttagaatctgcttataatgaggctgaagttgagtaagaagagaactggcatttaggacgctacttttcttctgtcgagtactgtcaagttttggttctgcctggaagtagatgcacctcaagggagggttgcatgtaaaggggtgtgtgtgtgtgtgtgtgtgtgtgtgtgtgtgtgtgtgtggtagtttccaaagatgggtacaactttctgcaaatgttcgtgcagtataattgaaccaatctttccttaaagagggaaaatttatactcctctacatgaatctgggctgcctatgacttgctttggtcagtggaatgctgycaaattgatggtgaccaacttctagccgtaaaaggaaaataaaccttggggccccaagatcactaagctaggctgggctccgtggctcacgcctgtaatcccagcactttgggaagctgaggcgggcagatcacctgaggtcaggagttcaagaccagcctggccaacatgacaaaaccccatctctactaaaatatatgaaaattagccaggcgtggtggcaggcgcctgtaatcccagctacttgggatgctgaggcagggaaa

SEQ ID NO: 3447 - DNA, 776 bp, Homo sapiens
tagattggcagctcttggcaaatttcagccctttgaggctccatggtttgtgctctcatttctgttgtgcaatcaagtactggcctattgttgctcttttgaaagtaatctctctttatctctgcctgcttttaaaaatttcataaaatgtttttatttatccygtttgggtttatgttttcctgtattgccccaaatttctacagtaaatgagtaaaacttttgtaatgggggaaaaaagcacatgcagaaatgttaatctgataagcagcataatggtaaattcagaatatcccaagagcataggggaagggggtcctaatgtgacaaatgtcccaaacagtctaactacagacatcttggttatcaaacaaaagaccagcactgtgcaatagagcttctcacagttctccactaaaatactcccaggaaaaccatttgccacttgtatgtaagcaaacaaaatgggttgtttgcctgcaacccatctgtaggtaaggctgattcaacatttgaaaatcagttaatgtaatccatcacatcaacaagataaagaaggaaaatcacgtgatcatatcaatagatgccaaaaagcatatgacaccattcaccacccattcataataaaaactctcagcaaactaggaaaattttctcaacttaataaggatatctacaaaaaacctacagctaacatcatacttaatggcaagaacctggaagctttcccattaatatcaggaacaaagcaaggatgtcttctctcaccactgctt

SEQ ID NO: 3448 - DNA, 776 bp, Homo sapiens
tagattggcagctcttggcaaatttcagccctttgaggctccatggtttgtgctctcatttctgttgtgcaatcaagtactggcctattgttgctcttttgaaagtaatctctctttatctctgcctgcttttaaaaatttcataaaatgtttttatttatcccgtttgggtttatgttttcctgtattgccccaaatttctacagtaaatgagtaaaacttttgtaatgggggaaaaaagcacatgcagaaatgttaatctgataagcagcataatggtaaattcagaatatcccaagagcataggggaagggggtcctaatgtgacaaatgtcccaaacagtctaactacagacatcttggttatcaaacaaaagaccagcactgtgcaatagagcttctcacagttctccactaaaatactcccaggaaaaccatttgccacttgtatgtaagcaaacaaaatgggttgtttgyctgcaacccatctgtaggtaaggctgattcaacatttgaaaatcagttaatgtaatccatcacatcaacaagataaagaaggaaaatcacgtgatcatatcaatagatgccaaaaagcatatgacaccattcaccacccattcataataaaaactctcagcaaactaggaaaattttctcaacttaataaggatatctacaaaaaacctacagctaacatcatacttaatggcaagaacctggaagctttcccattaatatcaggaacaaagcaaggatgtcttctctcaccactgctt

SEQ ID NO: 3449 - DNA, 776 bp, Homo sapiens
tagattggcagctcttggcaaatttcagccctttgaggctccatggtttgtgctctcatttctgttgtgcaatcaagtactggcctattgttgctcttttgaaagtaatctctctttatctctgcctgcttttaaaaatttcataaaatgtttttatttatcccgtttgggtttatgttttcctgtattgccccaaatttctacagtaaatgagtaaaacttttgtaatgggggaaaaaagcacatgcagaaatgttaatctgataagcagcataatggtaaattcagaatatcccaagagcataggggaagggggtcctaatgtgacaaatgtcccaaacagtctaactacagacatcttggttatcaaacaaaagaccagcactgtgcaatagagcttctcacagttctccactaaaatactcccaggaaaaccatttgccacttgtatgtaagcaaacaaaatgggttgtttgcctgcaacccayctgtaggtaaggctgattcaacatttgaaaatcagttaatgtaatccatcacatcaacaagataaagaaggaaaatcacgtgatcatatcaatagatgccaaaaagcatatgacaccattcaccacccattcataataaaaactctcagcaaactaggaaaattttctcaacttaataaggatatctacaaaaaacctacagctaacatcatacttaatggcaagaacctggaagctttcccattaatatcaggaacaaagcaaggatgtcttctctcaccactgctt

SEQ ID NO: 3450 - DNA, 776 bp, Homo sapiens
tagattggcagctcttggcaaatttcagccctttgaggctccatggtttgtgctctcatttctgttgtgcaatcaagtactggcctattgttgctcttttgaaagtaatctctctttatctctgcctgcttttaaaaatttcataaaatgtttttatttatcccgtttgggtttatgttttcctgtattgccccaaatttctacagtaaatgagtaaaacttttgtaatgggggaaaaaagcacatgcagaaatgttaatctgataagcagcataatggtaaattcagaatatcccaagagcataggggaagggggtcctaatgtgacaaatgtcccaaacagtctaactacagacatcttggttatcaaacaaaagaccagcactgtgcaatagagcttctcacagttctccactaaaatactcccaggaaaaccatttgccacttgtatgtaagcaaacaaaatgggttgtttgcctgcaacccatctgtaggtaaggctgattcaacatttgaaaatcagttaatgtaatccatcacatcaacaagataaagaaggaaaatcacgtgatyatatcaatagatgccaaaaagcatatgacaccattcaccacccattcataataaaaactctcagcaaactaggaaaattttctcaacttaataaggatatctacaaaaaacctacagctaacatcatacttaatggcaagaacctggaagctttcccattaatatcaggaacaaagcaaggatgtcttctctcaccactgctt

SEQ ID NO: 3451 - DNA, 570 bp, Homo sapiens
ccccaaccaggatgcaatgtgaatatccctcaatagtggaaggaataaatcgtggcatactcatatattgacatatagcaatgaaaatggatgaattacagctgcacacatcatggatgaatctaacaaacatacataaagaaaaaatacatatattcacaaaagaatttaaattgttaggattccacaacrttcaaaaccaggcaaatctaccttacggtgttagcaatcaaaatagcaattatttttagagaggggaggggctgatgaccaggagagaactctgaaggtgctattaacgttctatttcttgagctatttgctggctgtgttcattttgtaataattcatccagcagttcatgtaagatctgtgcccttttctgtgtgtatggtatactccaatttaaaaacttattaaaaatcatgtatatatgtattatatataattatatattatatatattatatatgttatatattatatataaaaagtactgggaggaggcattcaaattttaaaagtcttttcgtttgttttttgttgagaggttcacgctctgtcacacag

SEQ ID NO: 3452 - DNA, 570 bp, Homo sapiens
ccccaaccaggatgcaatgtgaatatccctcaatagtggaaggaataaatcgtggcatactcatatattgacatatagcaatgaaaatggatgaattacagctgcacacatcatggatgaatctaacaaacatacataaagaaaaaatacatatattcacaaaagaatttaaattgttaggattccacaacattcaaaaccaggcaaatctaccttacggtgttagcaatcaaaatagcaattatttttagagaggggaggggctgatgaccaggagagaactctgaaggtgctattaacgttctatttcttgagctatttgctggctgtgttcattttgtaataattcatccagcagttcatgtaagatctgtgcccttttctgtgtgtatggtataytccaatttaaaaacttattaaaaatcatgtatatatgtattatatataattatatattatatatattatatatgttatatattatatataaaaagtactgggaggaggcattcaaattttaaaagtcttttcgtttgttttttgttgagaggttcacgctctgtcacacag

SEQ ID NO: 3453 - DNA, 570 bp, Homo sapiens
ccccaaccaggatgcaatgtgaatatccctcaatagtggaaggaataaatcgtggcatactcatatattgacatatagcaatgaaaatggatgaattacagctgcacacatcatggatgaatctaacaaacatacataaagaaaaaatacatatattcacaaaagaatttaaattgttaggattccacaacattcaaaaccaggcaaatctaccttacggtgttagcaatcaaaatagcaattatttttagagaggggaggggctgatgaccaggagagaactctgaaggtgctattaacgttctatttcttgagctatttgctggctgtgttcattttgtaataattcatccagcagttcatgtaagatctgtgcccttttctgtgtgtatggtatactccaattwaaaaacttattaaaaatcatgtatatatgtattatatataattatatattatatatattatatatgttatatattatatataaaaagtactgggaggaggcattcaaattttaaaagtcttttcgtttgttttttgttgagaggttcacgctctgtcacacag

SEQ ID NO: 3454 - DNA, 575 bp, Homo sapiens
gagaccagcctggccaacatggtgaaaccccatctctactaaaaatacaaaaattagctggacgtggtagcgcatgcctgtaaactcagctactcagaaggctgaggcatgagaatcacttgaacccaggaggcggaggttgcagagagctgagatcacaccactgcactccagcctgagcgacagagcaagactctgtctcagaaaaaaaaaaaaaaaattctcctgcttaaagatcagaaatttggcagagagtagaaaagacatgccttgagttcagtagaacctaagaagatcatgcacatcaactgaatcgtaggacagtgtggccagagcctgaagagtcatgtactctacaggttacttacaacaggaaacagaaaaacagagcttgacatccacccggcaacttggttagtgtgcaggaagatatcayctgtgtgaaggagtaagcggagggtgaaaccacaagaagagatgagcgcaagaaagctgagaggtgcaagatgcacacagaagaggctcggagcactggcagcagaatgtgaaaaagagggactgtaagcaaagtaacc

SEQ ID NO: 3455 - DNA, 575 bp, Homo sapiens
gagaccagcctggccaacatggtgaaaccccatctctactaaaaatacaaaaattagctggacgtggtagcgcatgcctgtaaactcagctactcagaaggctgaggcatgagaatcacttgaacccaggaggcggaggttgcagagagctgagatcacaccactgcactccagcctgagcgacagagcaagactctgtctcagaaaaaaaaaaaaaaaattctcctgcttaaagatcagaaatttggcagagagtagaaaagacatgccttgagttcagtagaacctaagaagatcatgcacatcaactgaatcgtaggacagtgtggccagagcctgaagagtcatgtactctacaggttacttacaacaggaaacagaaaaacagagcttgacatccacccggcaacttggttagtgtgcaggaagatatcatctgtgtgaaggagtaagcrgagggtgaaaccacaagaagagatgagcgcaagaaagctgagaggtgcaagatgcacacagaagaggctcggagcactggcagcagaatgtgaaaaagagggactgtaagcaaagtaacc

SEQ ID NO: 3456 - DNA, 575 bp, Homo sapiens
gagaccagcctggccaacatggtgaaaccccatctctactaaaaatacaaaaattagctggacgtggtagcgcatgcctgtaaactcagctactcagaaggctgaggcatgagaatcacttgaacccaggaggcggaggttgcagagagctgagatcacaccactgcactccagcctgagcgacagagcaagactctgtctcagaaaaaaaaaaaaaaaattctcctgcttaaagatcagaaatttggcagagagtagaaaagacatgccttgagttcagtagaacctaagaagatcatgcacatcaactgaatcgtaggacagtgtggccagagcctgaagagtcatgtactctacaggttacttacaacaggaaacagaaaaacagagcttgacatccacccggcaacttggttagtgtgcaggaagatatcatctgtgtgaaggagtaagcggagggtgaaaccacaagaagagatgagcgcaagaaagctgagaggtgcaagatgcacacagaagaggctcrgagcactggcagcagaatgtgaaaaagagggactgtaagcaaagtaacc

SEQ ID NO: 3457 - DNA, 651 bp, Homo sapiens
tttttagacagagtcttgctctgtcgcccaggctggagtgcagtggcaagatctcggctcactgcaagctccgcctcccaggttcacgccatcctcctgcctcagcctcccaagtagctgggactacaggcacacgccgccatgcccggctaattttttgtatttttagtagagacggggtttcactgtgttagccaggatggtctcgatctcctgaccttgtgatccgctggycttggcctcccaaagtgctggcattacaggcataagcaaccacgtccagcctactcaagattattttgcaagttttaacatatacaaatttaattgtatatggcttttcaaaaatagtttaccatactgcttgagaatctagatttaatatttaaaagtcatcctttttactaagaaattctatcaagatcaggctcagtggttgatgtctgtattcccagtaatttgggaggctgagagagaaggattgcttgagcccgcactttgagaccagcccagggaataaaagaagaacccatattttacaaaaacaaataaagtctggaaaggtgaatgcatgctgtaagttcagctacctgggaaggtaggggcagaggatacccttagcccagaaggtttagggctgtatttctgctg

SEQ ID NO: 3458 - DNA, 1095 bp, Homo sapiens
acaactatgcagatgatcagctaactagatctggcttaagtcttgtggaagcttaaagtgaaacacagatgtcagctgctaacttaccctcaacatcctcaaccacagtccgtactcattccaggaataaactctatgattcatttgactcactcacacaaactctctcccccacccaattaggttaaaactatgtctttatagaatcaaaaatatttacatattatggtgtgcattaagaaataagtatctgaaaaaaatgaaggaagggaaaatcattagttaaatgacggctgcttctcgctcaatccaacatcacctaaccccgtcccccaaccccacygccactcagcatgtagccttgcccttcagatcagctgctgggaataggatggcaggctcctgtgagtgtggccccgctgacatcaccaattattcacctccttccaaattctgcagcagtttctggctcacccactgctcttaggtccacagtgtagttttcaccattcctagccttctctatgcaggttcctcttggtttttcagcttctttaatattggtgtttctcaggggatattgctctataattttccttcagtcatctaagctaatcccaaacctctgaccccatcccatgctcaggttcaaatgcccaatggccagatgaacttttccaacagtacatccagctagcacctccaattaactcagtcaatcactgcacagatccctgtcatgtctccactttagagtccaaaacttggcatgaaggctctccacgacaaggccccgatatgcaacccaagttcatctgtctccagtgcctgccttcacattccttccagggcttaggacctcactgtggccctccacccagcatgagctatgctagtcctggcttccaccccttgttcatactttctctactgcaccaaacatgctgctgccagctccccactcccaccccaactcaacgtcaatctcaacccgcagcacacaccatctcaaccctcctcaaccacagcacacatatcacccagacacacagacatcttccctgtccaccaagccacaccctaggacacattata

SEQ ID NO: 3459 - DNA, 1365 bp, Homo sapiens
tggtggtgcacatttgtgatcccaacactttggaaggctgaggtaggagaatcacttgaggctaggagctcaagaccagcctggtcaacatagcaagaccccttcgctacaaaaaaattaaaaaattagttgggtgtggtcgtgtgtgcctgtagtcccagctactcgggaggttgaggcaagaggatcatttcagcctaggagttagaggctgcagtgatctctgattgcaccactgccctccagcctggaagacagagcaagaccttgtctcaaaaaaaacaagttaaaaaagaaaaagatttaaaaatggtgtctagcacacacacagtaagttttcaattaagatgatctagctaagagctatgtattttttttgtatcttattattttatatcttaggtgctctaacatatttgaaaacccatatgcttaaaaggaccagggagcaggcctggtggctcatgcctwtaattccaacactttgggaagctgagatggaaggcttgcttgagcccacgagtttgagcccagtctgcgcatcacagtgagacctaatctgtgccggaaaaaaagcacataaagaaagaaagaaagaaactaattagctggacatggtggcatgttcctgtagtcctggttacttgagagtttgagatgggaggatcgcttgagtttgggaggttgaggctgcagtgggccgagattgcaccgttgtgctccagtctggacggcagagagagaccctgtctcaaaaagacaaacaaacaaacagacaaaaaggaccagggaggctccctgtaagtagctaaaggggcttacagaattaaatacaggagcaagggtaatctgatatctggcatcccagctgaggggagaatagtgattagtaggggcagtggtgaaggggagaacatttgcactaagtgaagatggcccacaactgtgcatccgggccagttgttgccgtatgtttcaggatggcttgataccaacatttttaaagggaagagtaaagtctgattgtcctgtgttctttcccctttgtaaaggttggcaactgattgacatttaaaaaccgctatatttttgggtttcatagagtaggctatcagtttgccgtgtttgctctgggttgatttaggttactcaacaataaaggtaaatagttaatttagaccttgtaagaccttgtgaccatagcaatcattttcccagtcctctgctttcacagacaagggagtagctttgggcaaagttacatggcccgttagtgacagtacttttactttttatgaaaatgagctttacttttacacattctttgatttggggagttatatggtttaacatactcatttttta

SEQ ID NO: 3460 - DNA, 1365 bp, Homo sapiens
tggtggtgcacatttgtgatcccaacactttggaaggctgaggtaggagaatcacttgaggctaggagctcaagaccagcctggtcaacatagcaagaccccttcgctacaaaaaaattaaaaaattagttgggtgtggtcgtgtgtgcctgtagtcccagctactcgggaggttgaggcaagaggatcatttcagcctaggagttagaggctgcagtgatctctgattgcaccactgccctccagcctggaagacagagcaagaccttgtctcaaaaaaaacaagttaaaaaagaaaaagatttaaaaatggtgtctagcacacacacagtaagttttcaattaagatgatctagctaagagctatgtattttttttgtatcttattattttatatcttaggtgctctaacatatttgaaaacccatatgcttaaaaggaccagggagcaggcctggtggctcatgcctttaattccaacactttgggaagctgagatggaaggcttgcttgagcccacgagtttgagcccagtctgcgcatcacagtgagacctaatctgtgccggaaaaaaagcacataaagaaagaaagaaagaaactaattagctggacatggtggcatgttcctgtagtcctggttacttgagagtttgagatgggaggatcgcttgagtttgggaggttgaggctgcagtgggccgagattgcaccgttgtgctccagtctggacggcagagagagaccctgtctcaaaaagacaaacaaacaaacagacaaaaaggaccagggaggctccctgtaagtagctaaaggggcttacagaattaaatacaggagcaagggtaatctgatatctggcatcccagctgaggggagaatagtgattagtaggggcagtggtgaagrggagaacatttgcactaagtgaagatggcccacaactgtgcatccgggccagttgttgccgtatgtttcaggatggcttgataccaacatttttaaagggaagagtaaagtctgattgtcctgtgttctttcccctttgtaaaggttggcaactgattgacatttaaaaaccgctatatttttgggtttcatagagtaggctatcagtttgccgtgtttgctctgggttgatttaggttactcaacaataaaggtaaatagttaatttagaccttgtaagaccttgtgaccatagcaatcattttcccagtcctctgctttcacagacaagggagtagctttgggcaaagttacatggcccgttagtgacagtacttttactttttatgaaaatgagctttacttttacacattctttgatttggggagttatatggtttaacatactcatttttta

SEQ ID NO: 3461 - DNA, 1322 bp, Homo sapiens
tgcatggagggagtgtgtagagaaaatagaagaatcaagggtgatgctttggtttctgacttgaactggtgcagcatttactaagctgaggagagtgggagaggaaaaaaatccctcccctttgtaggggaagcatccatagttctgtttcaagtatgttaaggagtcctagaaatctcatagatggcaaacagtctgttggatataggagtttggaacccaggaaaaaggtcaaggcttgagctaaaaatttagggttatataaataacctttaaagccagtagataattggtggatggggtagagatggagaagaacacagtagaatttggggtgtttccttatattatcttcagtccactgagatttcctctcttactcaacttcacatgccccagtaactgttcttcctcttccaaattccccctactttttctttgagacaccctgtcacccaggctggagtgcagtggcgtgatcatatatcactgcagcctccacctcctaggctgaagcgatcctcccatctcagcctcccaagtagctgggggactacaggcacatgccatcacacccagctaacttttaaaatttttatagaaatgggatattactatgttgcccaggctggtctcgaactcctgggctcaagcgatcctcccaccttggcctcccaaagtgctgggattaaagatgtgagccaccatgccccacctccagatccttctaatgggcattccctaagttactgccatcagctcccctttccacccctcgacaaattccatgattctggcacaatctcctctattcatatagattcatctgatctgtactggtgacttcccaagtcgatgagcctgcccttatctctcayccaaccttaattaaatcaaatccattcaattcaaatccatgtaagtcaagaagcatttgttgaacaatgtccacatatcaggcaggttggttggccatcagtggctatataggatagtactactttagtaactctaaccctcagccttaggggcttagaagcttgattctctcagcatattaagtggagtaatttctcagggtgcaaattaacccagctcacaagaatctcttgtatataaatcaaaatgtcaattcactaatttacgatgagaaatacaacttacaagaggagcagacattcacatttgcctgatctgcaaattttctccatctagggaaactacatagaaagccaaattatcagaaagttgcatggattatgagagatcagagcaaggggacttggtggcagatttgaaagtttaatattatcaggcagtga

SEQ ID NO: 3462 - DNA, 1322 bp, Homo sapiens
tgcatggagggagtgtgtagagaaaatagaagaatcaagggtgatgctttggtttctgacttgaactggtgcagcatttactaagctgaggagagtgggagaggaaaaaaatccctcccctttgtaggggaagcatccatagttctgtttcaagtatgttaaggagtcctagaaatctcatagatggcaaacagtctgttggatataggagtttggaacccaggaaaaaggtcaaggcttgagctaaaaatttagggttatataaataacctttaaagccagtagataattggtggatggggtagagatggagaagaacacagtagaatttggggtgtttccttatattatcttcagtccactgagatttcctctcttactcaacttcacatgccccagtaactgttcttcctcttccaaattccccctactttttctttgagacaccctgtcacccaggctggagtgcagtggcgtgatcatatatcactgcagcctccacctcctaggctgaagcgatcctcccatctcagcctcccaagtagctgggggactacaggcacatgccatcacacccagctaacttttaaaatttttatagaaatgggatattactatgttgcccaggctggtctcgaactcctgggctcaagcgatcctcccaccttggcctcccaaagtgctgggattaaagatgtgagccaccatgccccacctccagatccttctaatgggcattccctaagttactgccatcagctcccctttccacccctcgacaaattccatgattctggcacaatctcctctattcatatagattcatctgatctgtactggtgacttcccaagtcgatgagcctgcccttatctctcatccaaccttaattaaatcaaatccattcaattcaaatccatgtaagtcaagaagcatttgttgaacaatgtccacatatcaggcaggttggttggccatcagtggctatataggatagtactactttagtaactctaaccctcagccttaggggcttagaagcttgattctctcagcatattaagtggagtaatttctcagggtgcaaattaacccagctcacaagaatctcttgtatataaatcaaaatgtcaattcactartttacgatgagaaatacaacttacaagaggagcagacattcacatttgcctgatctgcaaattttctccatctagggaaactacatagaaagccaaattatcagaaagttgcatggattatgagagatcagagcaaggggacttggtggcagatttgaaagtttaatattatcaggcagtga

SEQ ID NO: 3463 - DNA, 580 bp, Homo sapiens
tgcatatacattgcttctatagtaaaagcacggtaagtattgcttacaaatgttgtaaaagcaagaagtatagggacttacaaatgccaaagcagataatacataacaaaattcaaaatggcagtaacggctgggcgtggctgaacgcctgtaatcccagcactttgggaggccaaggtaggaggatcgcttgaactcaggagtttgagaccagcctgagcaacatggtggaatcccatctctacaaaaagtactaaaattagtcaggtgtggtggtgcatgcctatagtcctagctactggggaggctgaggtgggaggaccacttgagcccaggaggccaaagctggagtgagctgagatcatgccacttcaccccagccagggcaacggaggcagaccctgtctcaaaaaaaaaaaaaaaaatggcagtaataacttgtaggacagaattgtgagacataatatattaaygactttatatacataagagtcaaaatataattttcctttaaaaacccttatgttgggaggctgagtcaggtggattgcctgagctcaggagtatgagaccaccctgg

SEQ ID NO: 3464 - DNA, 1165 bp, Homo sapiens
gcatgatttaagctgttgtgtgtttgttctctttgttagagcagcctaatctttgccctcccttatacagtgaggaagctaagaagggtggaaatttcttttgcatccccctagggcccactattatagccatgagagaaggcttgccatgagaaaagtcacttgaaaattaagaaagagctagaaacaccagacaaagcaccaggtaagtaaaatgggctttgccacattttctgtcttcttttcctcctcaatccctgctcctcaaccctgcttggagaagccagacaaagggcagaggagagaggatataaaaacaggagcttatggaagtgcaccagatcttactttgcttaggtgagagagatgggtagaggagcttaagaaaacaaagttctaatttagactagactggacattttaaaatttataaaggtatttaaagctatgggtttcatacaagatgtcacccagaaataacagtgagacatccacaaaagcagtagaggcagaaaaataaacctgtttccaaattgtactctaccaaattcagtacacccgattaacctagttattcgatatccaataagtaaagcatatacactgcaaatgttcaagaacaaatgatatttctcccactcatccttagctgttatcaaacctggctaaactaattgtgacagcttttatcctatttgaggttcaatcttttacttctcttcatagatacctgctagaactctgaagtctgttcacggatcccaattatttaatatgccaattatgattttgcaactactaaaagaatttagaatcctttacaacaggggttgttctgtttttctagccagagattgtcactccatatttactaatgagcttttctagaaataacagaaaatgattagcatctctactttttttatctactgaagacaaacatctcagggtgayagcaggattatgggcggcatcatttaacaataacagtttttcaaagttatttatttatttatttatttatttatttttgagacggagtttcgctcttgttgcccaggctggagtgcaatggcactatctcggctcaccgaaacctctgcctcccaggttcaagcaattctcctgcctcagcctcccaagtagctgggattacaggcatgca

SEQ ID NO: 3465 - DNA, 1165 bp, Homo sapiens
gcatgatttaagctgttgtgtgtttgttctctttgttagagcagcctaatctttgccctcccttatacagtgaggaagctaagaagggtggaaatttcttttgcatccccctagggcccactattatagccatgagagaaggcttgccatgagaaaagtcacttgaaaattaagaaagagctagaaacaccagacaaagcaccaggtaagtaaaatgggctttgccacattttctgtcttcttttcctcctcaatccctgctcctcaaccctgcttggagaagccagacaaagggcagaggagagaggatataaaaacaggagcttatggaagtgcaccagatcttactttgcttaggtgagagagatgggtagaggagcttaagaaaacaaagttctaatttagactagactggacattttaaaatttataaaggtatttaaagctatgggtttcatacaagatgtcacccagaaataacagtgagacatccacaaaagcagtagaggcagaaaaataaacctgtttccaaattgtactctaccaaattcagtacacccgattaacctagttattcgatatccaataagtaaagcatatacactgcaaatgttcaagaacaaatgatatttctcccactcatccttagctgttatcaaacctggctaaactaattgtgacagcttttatcctatttgaggttcaatcttttacttctcttcatagatacctgctagaactctgaagtctgttcacggatcccaattatttaatatgccaattatgattttgcaactactaaaagaatttagaatcctttacaacaggggttgttctgtttttctagccagagattgtcactccatatttactaatgagcttttctagaaataacagaaaatgattagcatctctactttttttatctactgaagacaaacatctcagggtgatagcaggattatgggcggcatcatttaacaataacagtttttcaaagttatttatttatttatttatttatttatttttgagacggagtttcgctcttgttgcccaggctggagtgcaatggcactatctcggctcaccgaaacctctgcctcccaggttcaarcaattctcctgcctcagcctcccaagtagctgggattacaggcatgca

SEQ ID NO: 3466 - DNA, 662 bp, Homo sapiens
gcattgatttgcctcacaagacatggactctgattcatcacagcattgtcccaatgtgtgcatcatggcacatccacaaagagtatctgcccttttagctcctggcgccttgacttataaggctactatagtgatgctgtagttatagccttttaagcacctactttctcatattctggcaacagcatcacacttttcctttagggaaccaccgctcccactctcaatccatgtagtaagaaactgtcttcttcatgtaagttccagcagtggagtagatccaggcttaaccaatcagcatatctaacttcaatagccactgagactgaatkatagatagttgcatgcccatttcagtacatggagaattgattcttggattgttgccaaaattacttgggggaaaaaagacttttgattaaggttattcaatggatatgatacaaacctgcagctgctgagaggcacccaggaagagatgcccaaaaacttacaagggatgtgaaggacctcttcaaggagaactaccaaccactgctcaaggaaataagagaggacacaaacaaatagaaaaacattctatgttcatggataggaagaatcaatattgtgaaaatggccatactacccaaagtaatttatagattcaatgctattcctat

SEQ ID NO: 3467 - DNA, 719 bp, Homo sapiens
gctgccggctgccagggcttttgggatgtacgttcacccttcctttcagggacctcaaagtgaccagcttcccttttaagaatgacttcccaaggcccaggagccatctggggctgcagagctgcatgctgccctggcttcttccatgttgtgctggtcactacccaccaagggggatcagatgcaggcacgatgcaggacggttgtctctggacctgtgtcttggttatcatggagctggactgggcctggtgacagggccctgatggggttgtcctgggtggtcaggggggtgatgagaaaaatgcagaatggaattgctgtgaggatgaatgagacgactgtcagcacaaaacaggcacccggtgagtgttcagagattaccctcagtagctgcccagaggccaaaaccacccacctgatagtgactgtccccaagccaggaggaagagaggagagcaggtcccactcacctgagtctgatcagtgagctgtgttgagatgtgtctgtcatctagaaaatggtccttcatgcagagctactcacagacactgctgtgtgtctctaacttctccacaacacagaggcgatggggactcaggaagagtgatattgtgggttgacaacccaccacaacgggagcytgcttgggtcaacagggctcagagtcagtgtcctctatcccttgaactgacgtgtatatacaatgtgtttgtgt

SEQ ID NO: 3468 - DNA, 1337 bp, Homo sapiens
  misc_feature (1)...(1337): n = A,T,C or G
atttgccaatatagtgtctatcacataaaagacactcagtcaatgttttttgaaatattataagaaatgtatatggcttggcacgtggctcatgcttgtaatcccagcactttgggaggccaaagcaggcagatgacttgaggtcaggtgctcaagaccagcctggccaacacagtgaaaccccatctctactaaaaatacaaaaattagccaggcatggtggcacacacctataaccccagctacttcggagtctgaggcagaagaattgcttgaacctgggagacagaggttgcagtgagctgagatagctcaactgcactccagtctgggcgacagagtgagactctgccaaaaaaaaaaaaaaaagtatatatcagacactttgataactacagatacatcattccacccaaataagtctgaatttgagcttatttatactgcaaaatgagtaaaaaagtaagaggacatgtaggatttatgtggagtgaggccatctgggaatcactgatggtcaggtgtatcagggagccaggcacagtggctcgtgcctgcagtatcagctactcaggaggctaaagcaggaagatagtgtgagcccaggagtttgaggctgcactgagctatgatcacgccattccactccagcctgggtgacagagagagactctgtctccasatagatagatagatagatagatagatagatagatagatagatagatagatagacagacagacagacagacagacagacagacagacaggcagacagacaaatgaatgtagcagggaaagtaacagaaaaaccatctggctggggaaatgtgatttataactacaggaacttcaaccttcggtatgaaatccttgaaaattctgctgtaaacatgagggaatgatggcaaggcaggataagtgacaagctgcaagcttttctgaatctgaagtctcgttaagattaatcagatactgagcctttagaacaaaagtttggaagctttttgttatgccctgagttcctctactcttctgtacttagataaatctcactccatacagatctgctttgcatattgccacagccaaagcgatttttacagtgaaggtgatggcaattccagtaagcctttgttcaaaagattacccagagccatggtttcgtggggaccttaatcaacactgtactattccacccaatcatccccattgatttaaaatggactttattttnnnnnnnnnnnnnnnnnnnnnnnnnnnnnnnnnnnnnnnnnnnnnnnnnnnnnnnnnnnnnnnnnnnnnnnnnnnnnnnnnnnnnnnnnnnnnnnnnnnng

SEQ ID NO: 3469 - DNA, 1337 bp, Homo sapiens
  misc_feature (1)...(1337): n = A,T,C or G
atttgccaatatagtgtctatcacataaaagacactcagtcaatgttttttgaaatattataagaaatgtatatggcttggcacgtggctcatgcttgtaatcccagcactttgggaggccaaagcaggcagatgacttgaggtcaggtgctcaagaccagcctggccaacacagtgaaaccccatctctactaaaaatacaaaaattagccaggcatggtggcacacacctataaccccagctacttcggagtctgaggcagaagaattgcttgaacctgggagacagaggttgcagtgagctgagatagctcaactgcactccagtctgggcgacagagtgagactctgccaaaaaaaaaaaaaaaagtatatatcagacactttgataactacagatacatcattccacccaaataagtctgaatttgagcttatttatactgcaaaatgagtaaaaaagtaagaggacatgtaggatttatgtggagtgaggccatctgggaatcactgatggtcaggtgtatcagggagccaggcacagtggctcgtgcctgcagtatcagctactcaggaggctaaagcaggaagatagtgtgagcccaggagtttgaggctgcactgagctatgatcacgccattccactccagcctgggtgacagagagagactctgtctccacatagatagatagatagatagatagatagatagatagatagatagatagatagacagacagacagacagacagacagacagacagacaggcagacagacaaatgaatgtagcagggaaagtaacagaaaaaccatctggctggggaaatgtgatttataactacaggaacttcaaccttcrgtatgaaatccttgaaaattctgctgtaaacatgagggaatgatggcaaggcaggataagtgacaagctgcaagcttttctgaatctgaagtctcgttaagattaatcagatactgagcctttagaacaaaagtttggaagctttttgttatgccctgagttcctctactcttctgtacttagataaatctcactccatacagatctgctttgcatattgccacagccaaagcgatttttacagtgaaggtgatggcaattccagtaagcctttgttcaaaagattacccagagccatggtttcgtggggaccttaatcaacactgtactattccacccaatcatccccattgatttaaaatggactttattttnnnnnnnnnnnnnnnnnnnnnnnnnnnnnnnnnnnnnnnnnnnnnnnnnnnnnnnnnnnnnnnnnnnnnnnnnnnnnnnnnnnnnnnnnnnnnnnnnnnng

SEQ ID NO: 3470 - DNA, 1337 bp, Homo sapiens
  misc_feature (1)...(1337): n = A,T,C or G
atttgccaatatagtgtctatcacataaaagacactcagtcaatgttttttgaaatattataagaaatgtatatggcttggcacgtggctcatgcttgtaatcccagcactttgggaggccaaagcaggcagatgacttgaggtcaggtgctcaagaccagcctggccaacacagtgaaaccccatctctactaaaaatacaaaaattagccaggcatggtggcacacacctataaccccagctacttcggagtctgaggcagaagaattgcttgaacctgggagacagaggttgcagtgagctgagatagctcaactgcactccagtctgggcgacagagtgagactctgccaaaaaaaaaaaaaaaagtatatatcagacactttgataactacagatacatcattccacccaaataagtctgaatttgagcttatttatactgcaaaatgagtaaaaaagtaagaggacatgtaggatttatgtggagtgaggccatctgggaatcactgatggtcaggtgtatcagggagccaggcacagtggctcgtgcctgcagtatcagctactcaggaggctaaagcaggaagatagtgtgagcccaggagtttgaggctgcactgagctatgatcacgccattccactccagcctgggtgacagagagagactctgtctccacatagatagatagatagatagatagatagatagatagatagatagatagatagacagacagacagacagacagacagacagacagacaggcagacagacaaatgaatgtagcagggaaagtaacagaaaaaccatctggctggggaaatgtgatttataactacaggaacttcaaccttcggtatgaaatccttgaaaattctgctgtaaacatgagggaatgatggcaaggcaggataagtgacaagctgcaagcttttctgaatctgaagkctcgttaagattaatcagatactgagcctttagaacaaaagtttggaagctttttgttatgccctgagttcctctactcttctgtacttagataaatctcactccatacagatctgctttgcatattgccacagccaaagcgatttttacagtgaaggtgatggcaattccagtaagcctttgttcaaaagattacccagagccatggtttcgtggggaccttaatcaacactgtactattccacccaatcatccccattgatttaaaatggactttattttnnnnnnnnnnnnnnnnnnnnnnnnnnnnnnnnnnnnnnnnnnnnnnnnnnnnnnnnnnnnnnnnnnnnnnnnnnnnnnnnnnnnnnnnnnnnnnnnnnnng

SEQ ID NO: 3471 - DNA, 1337 bp, Homo sapiens
  misc_feature (1)...(1337): n = A,T,C or G
atttgccaatatagtgtctatcacataaaagacactcagtcaatgttttttgaaatattataagaaatgtatatggcttggcacgtggctcatgcttgtaatcccagcactttgggaggccaaagcaggcagatgacttgaggtcaggtgctcaagaccagcctggccaacacagtgaaaccccatctctactaaaaatacaaaaattagccaggcatggtggcacacacctataaccccagctacttcggagtctgaggcagaagaattgcttgaacctgggagacagaggttgcagtgagctgagatagctcaactgcactccagtctgggcgacagagtgagactctgccaaaaaaaaaaaaaaaagtatatatcagacactttgataactacagatacatcattccacccaaataagtctgaatttgagcttatttatactgcaaaatgagtaaaaaagtaagaggacatgtaggatttatgtggagtgaggccatctgggaatcactgatggtcaggtgtatcagggagccaggcacagtggctcgtgcctgcagtatcagctactcaggaggctaaagcaggaagatagtgtgagcccaggagtttgaggctgcactgagctatgatcacgccattccactccagcctgggtgacagagagagactctgtctccacatagatagatagatagatagatagatagatagatagatagatagatagatagacagacagacagacagacagacagacagacagacaggcagacagacaaatgaatgtagcagggaaagtaacagaaaaaccatctggctggggaaatgtgatttataactacaggaacttcaaccttcggtatgaaatccttgaaaattctgctgtaaacatgagggaatgatggcaaggcaggataagtgacaagctgcaagcttttctgaatctgaagtctcgttaagattaatcagatactgagcctttagaacaaaagtttggaagctttttgttatgccctgagttcctctactcttctgtacttagataaatctcactccatacagatctgctttgcatattgccacagccaaagcgatttttacartgaaggtgatggcaattccagtaagcctttgttcaaaagattacccagagccatggtttcgtggggaccttaatcaacactgtactattccacccaatcatccccattgatttaaaatggactttattttnnnnnnnnnnnnnnnnnnnnnnnnnnnnnnnnnnnnnnnnnnnnnnnnnnnnnnnnnnnnnnnnnnnnnnnnnnnnnnnnnnnnnnnnnnnnnnnnnnnng

SEQ ID NO: 3472 - DNA, 1151 bp, Homo sapiens
cttattaaaggttttttaaagccacacagccattcactcttatccaacagagtgggcccaggtctccactccatcctggtagagatcagggtggaggataggtagaggttcccaccttcatgctcggcattatttgaggagcttgagaagaagattctgtgagattagagggcattaataagcatctggatcatctagggtgggaaggcctggcactttattttcctcccatatttctattgtgtattttgggttttgccagttgtttccagggtcttggggtagcttgtgtgtgtgtgtgtgtgtgtgtgtgtgtgtgtgtgtgtgttctgtgagtagaaatraagaaacttataaagactctaatttctttgtagttggcaataaagtgaattaaaagccttctttcactcaaattctataccttttcctatttcaatcgctatcaccatttttgaaagtttccattccatgttaagagttagtagtacatgaatgtcttcttttgagaagtatctgttcatgtgcttagcccactgtttaatagagttgtttgttttttttcttgtaaatttgttaaagtcccttgtggtttctggatatgagacctttgtaagatggatagattgcaaaaattttctctcactctgagtttcacattctttgtctaggaaattcaatcagccacaaaatgaaaatttagctcaggttttctgattcttataaagccaaaaaatggtgtgtaaatcctctctcatccattataacatgtatagccctgggaaagcaattgaataacttgaaatctcaatcctcagctgcaaaatgggaatcaaaaactaagtagtattaataatatcaaagcttgtgaaaatcaagagagatgctaatttgctattatctgttgctggatttagctggtgcaataaagttgtaaggtcagttacagatctgtcaagatttaactgtgttgtttgccaaggactttagggtaggggttggcaaactctggtcattggtccaaaactggctggacacctgattttataaataaaattttattgaaacacagccatgtctatttgcttacatatttcctatgtctgctttagtgtcactgctgaaaaattgagttgtgctggatgaatgca

SEQ ID NO: 3473 - DNA, 1151 bp, Homo sapiens
cttattaaaggttttttaaagccacacagccattcactcttatccaacagagtgggcccaggtctccactccatcctggtagagatcagggtggaggataggtagaggttcccaccttcatgctcggcattatttgaggagcttgagaagaagattctgtgagattagagggcattaataagcatctggatcatctagggtgggaaggcctggcactttattttcctcccatatttctattgtgtattttgggttttgccagttgtttccagggtcttggggtagcttgtgtgtgtgtgtgtgtgtgtgtgtgtgtgtgtgtgtgtgttctgtgagtagaaataaagaaacttataaagactctaatttctttgtagttggcaataaagtgaattaaaagccttctttcactcaaattctataccttttcctatttcaatcgctatcaccatttttgaaagtttccattccatgttaagagttagtagtacatgaatgtcttcttttgagaagtatctgttcatgtgcttagcccactgtttaatagagttgtttgttttttttcttgtaaatttgttaaagtcccttgtggtttctggatatgagacctttgtaagatggatagattgcaaaaattttctctcactctgagtttcacattctttgtctaggaaattcaatcagccacaaaatgaaaatttagctcaggttttctgattcttataaagccaaaaaatggtgtgtaaatcctctctcatccattataacatgtatagccctgggaaagcaattgaataacttgaaatctcaatcctcagctgcaaaatgggaatcaaaaactaagtagtattaataatatcaaagcttgtgaaaatcaagagagatgctaatttgctattatctgttgctggatttagctrgtgcaataaagttgtaaggtcagttacagatctgtcaagatttaactgtgttgtttgccaaggactttagggtaggggttggcaaactctggtcattggtccaaaactggctggacacctgattttataaataaaattttattgaaacacagccatgtctatttgcttacatatttcctatgtctgctttagtgtcactgctgaaaaattgagttgtgctggatgaatgca

SEQ ID NO: 3474 - DNA, 1151 bp, Homo sapiens
cttattaaaggttttttaaagccacacagccattcactcttatccaacagagtgggcccaggtctccactccatcctggtagagatcagggtggaggataggtagaggttcccaccttcatgctcggcattatttgaggagcttgagaagaagattctgtgagattagagggcattaataagcatctggatcatctagggtgggaaggcctggcactttattttcctcccatatttctattgtgtattttgggttttgccagttgtttccagggtcttggggtagcttgtgtgtgtgtgtgtgtgtgtgtgtgtgtgtgtgtgtgtgttctgtgagtagaaataaagaaacttataaagactctaatttctttgtagttggcaataaagtgaattaaaagccttctttcactcaaattctataccttttcctatttcaatcgctatcaccatttttgaaagtttccattccatgttaagagttagtagtacatgaatgtcttcttttgagaagtatctgttcatgtgcttagcccactgtttaatagagttgtttgttttttttcttgtaaatttgttaaagtcccttgtggtttctggatatgagacctttgtaagatggatagattgcaaaaattttctctcactctgagtttcacattctttgtctaggaaattcaatcagccacaaaatgaaaatttagctcaggttttctgattcttataaagccaaaaaatggtgtgtaaatcctctctcatccattataacatgtatagccctgggaaagcaattgaataacttgaaatctcaatcctcagctgcaaaatgggaatcaaaaactaagtagtattaataatatcaaagcttgtgaaaatcaagagagatgctaatttgctattatctgttgctggatttagctggtgcaataaagttktaaggtcagttacagatctgtcaagatttaactgtgttgtttgccaaggactttagggtaggggttggcaaactctggtcattggtccaaaactggctggacacctgattttataaataaaattttattgaaacacagccatgtctatttgcttacatatttcctatgtctgctttagtgtcactgctgaaaaattgagttgtgctggatgaatgca

SEQ ID NO: 3475 - DNA, 1447 bp, Homo sapiens
gtaaagaatgatggaactgttttattttaaaacaacagaactcacaatttgcctgaattaaatcatctgcaattatttatattatgggcaacattttagctatcagcttggaaatgtgcaaggaatatatgcttttcataaaaatagaaaaaagttatagcgtgttcttgggcaaaggtttcagagatcacctgtaacttggtgtggtgcagcacattgctggccacaccgcctgtgacaccgtgtggcagtggctgcaatagcacttcaacagcacaagacttcctggggacaagaaagggctctggctttttcactttaaggcaacagcaaggctgaagattcctctcctcatccctaaagttattaagggggagaagatcatgggagagagaataacatcgttcctcaatagcatggggaaggaagcaatttcatctgattatgaaaaagaatgtggacttatttaatgatatagtttttgcttaagtttaccctggtctttcccatcagagattctctgtgtgtgatctgtggatccctgagagtttctgagaccacaagaacacaaccaattttataataatactaaaacacttttgccttttccactgtgttgtgatttgtgctgatggtgcaaaagtgatggctaggactactgtaatttagcatgaggtagggcatgttggctccaaactgggctggtagycatggattcctcactgccacacatatatgaaaacgtcatttttcacttctgaatgttcttgatgaagcaataagtattgtagattttatcaaagttcaactcttgaatacacatcttctaatatttggtgtgataaaatgggaagtatctataaacatctttaaaaaacttggaaatacttataggttagcaggaaattgccaaaaaatgtataaggaaattttctaccagtttcccccaataacaatattttgcacaactataatacaaatagaaaaaccaggaactgacattcatgcaatccaaaagactcttcagaggaagggaagaacttctcagggtttaaaggatgaataggagctcaacaagtggttaagtctgagatggcatgcattacagcaaagggaggagacacgcaaattgtgatggggaaaagcaaataattctgttttgctaaagcaagaaatgcaggaagagacactcacaagggtgatgagactgggaaggaaaaattgcctaataatgaaggcttcttgtgtcatgatgaaagacctgagttttttttctgaaggccctggggagctactgaagagttttaagcatgtgggtggtatgaatagatctgtatttcaggataataactacagactttttttttttttttttttttttgagaaacgagggaccagtagtaacagggagtaataggaagcccattaggaaggtttgcaataatgt

SEQ ID NO: 3476 - DNA, 1447 bp, Homo sapiens
gtaaagaatgatggaactgttttattttaaaacaacagaactcacaatttgcctgaattaaatcatctgcaattatttatattatgggcaacattttagctatcagcttggaaatgtgcaaggaatatatgcttttcataaaaatagaaaaaagttatagcgtgttcttgggcaaaggtttcagagatcacctgtaacttggtgtggtgcagcacattgctggccacaccgcctgtgacaccgtgtggcagtggctgcaatagcacttcaacagcacaagacttcctggggacaagaaagggctctggctttttcactttaaggcaacagcaaggctgaagattcctctcctcatccctaaagttattaagggggagaagatcatgggagagagaataacatcgttcctcaatagcatggggaaggaagcaatttcatctgattatgaaaaagaatgtggacttatttaatgatatagtttttgcttaagtttaccctggtctttcccatcagagattctctgtgtgtgatctgtggatccctgagagtttctgagaccacaagaacacaaccaattttataataatactaaaacacttttgccttttccactgtgttgtgatttgtgctgatggtgcaaaagtgatggctaggactactgtaatttagcatgaggtagggcatgttggctccaaactgggctggtagccatggattcctcactgccacacatatatgaaaacgtcatttttcacttctgaatgttcttgatgaagcaataagtattgtagattttatcaaagttcaactcttgaatacacatcttctaatatttggtgtgataaaatgggaagtatctataaacatctttaaaaaacttggaaatacttataggttagcaggaaattgccaaaaaatgtataaggaaattttctaccagtttcccccaataacaatattttgcacaactataatacaaatagaaaaaccaggaactgacattcatgcaatccaaaagactcttcagaggaagggaagaacttctcagggtttaaaggatgaataggagctcaacaagtggttaagtctgagatggcatgcattacagcaaagggaggagacacgcaaattgtgatggggaaaagcaaataattctgttttgctaaagcaagaaatgcaggaagagacactcacaagggtgatgagactgggaaggaaaaattgcctaataatgaaggcttcttgtgtcatgatgaaagacctgagttttttttctgaaggccctggggagctactgaagagttttaagcatgtgggtggtatgaatagatctgtatttcaggataataactacagactttttttttttttttttttttttgagaaacgagggaccagtagtaacaggragtaataggaagcccattaggaaggtttgcaataatgt

SEQ ID NO: 3477 - DNA, 706 bp, Homo sapiens
ggtgacttgggacttctgccttccataagttctgcttccctgaaatgggctargcaacattaattagactagctgtaaaatatccagaatattggtttccctaacaagtattgattcctgggtgaatgtggaagacactgacaatttcacagaagaattttctctgcccttacagaatgttcaatgtagtgaggaataccaacatattaaatgaaccaaaatctataaatccatccatacacacctctgcacatgaaaagacaatcacccagatgtagagggaattgtcaataaaactagttaaatatatggttaacatagaaactccattgtgaaagatctctgcaaacagaaaggtagaattttggaaaatgaatgaggaaagcccgtgcactttggcactacattaatactatagttaaaactctgtcttgccaagaaacaaagttcatttgatatttagcatgtctattggcaagacagagttttaatattattgattagaatttgaattattctaattcaaactatcattaatacaaagttcatttgaattaactataattatgtattgccaatgatttttgagaaaaacctgaacctgaagtattctttcttggtactatgagttcaatgcttgaagagctgtaagatccaactgtgaagtgaggcgaacatcatcactcaccctgcaagactcaagatt

SEQ ID NO: 3478 - DNA, 706 bp, Homo sapiens
ggtgacttgggacttctgccttccataagttctgcttccctgaaatgggctaagcaacattaattagactagctgtaaaatatccagaatattggtttccctaacaagtattgattcctgggtgaatgtggaagacactgacaatttyacagaagaattttctctgcccttacagaatgttcaatgtagtgaggaataccaacatattaaatgaaccaaaatctataaatccatccatacacacctctgcacatgaaaagacaatcacccagatgtagagggaattgtcaataaaactagttaaatatatggttaacatagaaactccattgtgaaagatctctgcaaacagaaaggtagaattttggaaaatgaatgaggaaagcccgtgcactttggcactacattaatactatagttaaaactctgtcttgccaagaaacaaagttcatttgatatttagcatgtctattggcaagacagagttttaatattattgattagaatttgaattattctaattcaaactatcattaatacaaagttcatttgaattaactataattatgtattgccaatgatttttgagaaaaacctgaacctgaagtattctttcttggtactatgagttcaatgcttgaagagctgtaagatccaactgtgaagtgaggcgaacatcatcactcaccctgcaagactcaagatt

SEQ ID NO: 3479 - DNA, 918 bp, Homo sapiens
aaccacagaatttctggatatgcatttttcaatgaatatttgatctttgcactatgttgtaatgtttctaatataataaaaatactttcctttatttaaaagtaagccatggaattctagctattatgttgattgctgtcttgaacattaggaatattggtttggtgggatgaggggggaagttgaggaaaactggaaatgtaagaaacaacagaaaaaagagaagacatgctacctggtaatgttgtcaggccttacaatggagatagcagcctagaaagccaaaactgaagtaatgatgttataaattaaactataatttatattccctaaaataaaatcagcactttatatgaaccaaaaaggaagaccttccttcatatgcatctttacttttttaaaaaataagtcaagctttcttaagaaaaacgaagctgggcgcagtgtctcaggcctataatcccagccctctgggagactgagatagtaggatcacttgagcccaggacatcaagaccagcccgggaacatagtgggatcccatttcaataaaagaatttaaaaattagcttggcatggtggcggacacctgtactcccagctacttgagagactgagatgggaggatcgyttgagcccaggtggtcaagactgcagtaagctgtgatcatgttactgcactctagcttcagtgacagagtaggaaaaaaaaaacaagaaaaaaaataaaaaatgacttaaatttatagagaagttaatatgagttaagaactttcgtgtattggctcattttattcctgaaaatatcactatgacgcatataccattgttacccaattggcagatggggaaacaggagtctggagagtttacagaatttcccataactctataattagcagtggtgggatttaaacc

SEQ ID NO: 3480 - DNA, 580 bp, Homo sapiens
aaattgactaagaacttagacatttggaaaacaatctgaatgcagaatctgtctagatttttacatttttgaaaaccaatattttggccgggcatggtggctcacacctataatcccagccctttggggggccgacgcgggtggatcacgaggtcaggagatygagaccagcctggccaacatggtgaaaccctgtctctactaaaaatacaaaaaattagccgggcgtggtggcatgcgcctgtaatcccagttactcagggagttgaggcaggagaatcatttgaacctggtgggaggcggaggttgcagtgagctgagatggtgccattgcactcctgtctgggcaacagagtgagactccatctcaaaaacaaaaacaaacaaacaacaatatttaacagctgttgcacctaccctattcaacaataatttttagcaaactgattgagccattttaaagcattcaaatgttttctctttagttgtcttctaaaatacacatagccctggaaactttctaaattttttttcagttattaaaaatttgtgaatttgcttatcatatcacttccttgta

SEQ ID NO: 3481 - DNA, 657 bp, Homo sapiens
aagagaaaaatcatcctaaggatcaggacctacagataagacattatattaagagataggaaggaagacagtgaatgcctaacatagactaaagattgggggccttgagtagtagggaatacaagacataaaacccagaagtgccagccattgatatcccagtaatttccagctttacatcccaaattcttcccatccctgcctagtagcctattccacaacagtcatggcaaaatctactgctacagccaaggctttaaggtcagcattctttaactcctagtttagcagggaagctcaaaatataaatttttcttgaaactaaagtactctattggaccagccagaggggatgagcttaagatggggaagtagatttatgtgcyattcataaggagtatagatatttgaatttccaaaaaatataaagaggcttagacttaagaaataggaacagtggtgtgtttcatttaaaaaaaaaaatccctgccactcttggttaaacaggtgggttttaaagccagagctcctgggatcaaatgccagctccaccatttattagcaagctcatcactcttcgcttgtttcctcagtaagaagtagataataacagtatgtaaagcttaggtttttgaagactgtatgtaagatatgcat

SEQ ID NO: 3482 - DNA, 657 bp, Homo sapiens
aagagaaaaatcatcctaaggatcaggacctacagataagacattatattaagagataggaaggaagacagtgaatgcctaacatagactaaagattgggggccttgagtagtagggaatacaagacataaaacccagaagtgccagccattgatatcccagtaatttccagctttacatcccaaattcttcccatccctgcctagtagcctattccacaacagtcatggcaaaatctactgctacagccaaggctttaaggtcagcattctttaactcctagtttagcagggaagctcaaaatataaatttttcttgaaactaaagtactctattggaccagccagaggggatgagcttaagatggggaagtagatttatgtgccattcataaggagtatagatatttgaatttccaaaaaatataaagaggcttagacttaagaaataggaacagtggtgtgtttcatttwaaaaaaaaaatccctgccactcttggttaaacaggtgggttttaaagccagagctcctgggatcaaatgccagctccaccatttattagcaagctcatcactcttcgcttgtttcctcagtaagaagtagataataacagtatgtaaagcttaggtttttgaagactgtatgtaagatatgcat

SEQ ID NO: 3483 - DNA, 422 bp, Homo sapiens
ccgcctcctgggttcaggccattctcctgcctgagcctcccgagtagctgggactacaggtgcctgcaattactcccagctaatttttttgtaattttagtagagacagggtttcaccacattagccaggatggtctcgatctcctgaccttgtgatccacccgcctcggcctcccaaagtgctaggattacagcgtgagccacsgcgctcagcaattctactactttttcccaactttaatgtatagggtattgcagggttttctagctgagttgtttgtaagcccattgactcttaacagttttcagaaaatgtgcaataaaaataatttctaacactaacaatagcaaggcacagaacctcctcgaagctgcaaccaatgcagcatcaatcctgtcctccagcagctgagatactgggg

SEQ ID NO: 3484 - DNA, 422 bp, Homo sapiens
ccgcctcctgggttcaggccattctcctgcctgagcctcccgagtagctgggactacaggtgcctgcaattactcccagctaatttttttgtaattttagtagagacagggtttcaccacattagccaggatggtctcgatctcctgaccttgtgatccacccgcctcggcctcccaaagtgctaggattacagcgtgagccacggcgctcagcaattctactactttttcccaactttaatgtatagggtattgcagggttttctagctgagttgtttgtaagcccattgactcttaacagttttcagaaaatgtgcaataaaaataatttctaacactaacaatagcaaggcacagaayctcctcgaagctgcaaccaatgcagcatcaatcctgtcctccagcagctgagatactgggg

SEQ ID NO: 3485 - DNA, 657 bp, Homo sapiens
actcgtctgaccattctctttttcaatggtgtgtccgagcaggggagaatggggagggggagcagtaaagatgccggggacatggccacacccaggaacccctgtttagttctgtcagtgccttgacccccaggagagctggggtcccccatggggagttacatctctagccacacctagcaccctgcaccctcctcataggattaccgcatcccagtttgccggcaacagtcccagctgaggcctgctgtcagggctctgccttccgtagaggaatagtgtccctgttgaggggcacgtcctgtccctaccctcctctgtagccccatcctcagccagctgccatccctgaaagggcctctgatyccaggccctcagctttagcccctgcacatagccctattttgtgcagggcgggactttctcatttgccagtcccctagaagtcaagtgtcacccaaggttaacgcagctttttggctgtggctcaccctcccacgttccatcctgacccacttttccttttgaatgttctttaaacatttaaaaaatttaatgtattcattttgactcaagttctagtgtgggatcttgtggataatactgtttctttttttaaaaagaattaaaattttacaatcacgcattttgtaaaat

SEQ ID NO: 3486 - DNA, 709 bp, Homo sapiens
  misc_feature (1)...(709): n = A,T,C or G
gnnnnnnnnnnnnnnnnnnnnnnnnnnnnnnnnnnnnnnnnnnnnnnnnnnnnnnnnnnnnnnnnnnnnnnnnnnnnnnnnnnnnnnnnnnnnnnnnnnnnatcagtttgcaaggctcagctccastccagaggcaggcattctgctttccagagaacagctggactttctcagagaatatgcagacaagtcaggcaccctttttctttgcccgtagcaatataagaatgcactggcagacttatttcttctcactactaaggatctattttataactccctgccttctagaatgtctttccttgttttttttttttgttttgtttttttttccctgtgttgccaatgcctttcttttccaatcacctttgaaagacattttttttctcccttgagcatatctccagtcttttctctggcagctactattcattatttaacttatttctgtatttttttcttcttttttatttcaactttgtgaaaaatataggggaaaatcttgctctggtgtcctcagcatgtcctgttttggcttgctctcagtttcctagagactagcatagtggcttgcacatggtagacactcaaaaaatgcattcagtgtgaatgaatgaatgaataaatgatggatggatggatggatgattaaatgtttatatggaaagtatggactcaaactaaaatgcagcacagcaattaaatcaat

SEQ ID NO: 3487 - DNA, 1935 bp, Homo sapiens
ctcaatgttgctgtaaaaatacaaatataagagacagcaacatccaggaaacatcctatagagagaaaaatcacaaggcaataagtcagtttcccacaacatgctcctaggaaaacacactacttgatttaatagtttttatatgaaaaaacaattcaaccattaaatagttttgagaactgcaagcttgaacaaagttaaataattttcttttttgtcagctctctcagaaccttgactgggctaatgtgaattgtaaatctctaagacagggatgcacgatgcagtccttcctgtattacttgattgtgaaacacctttttatgtgcatcatcttccaccaatcacacttggagaaacactaagttaagtgatatcgtctgttctattcacttaagaagtttcgaggacagagacagagtggaatgtttgagaaagacttccagagaagactgaatttaaactgaattctgggctagattctcagataaaaataaaatttggatagacccggggaaaaaaaaaagagagagagagagatttcttatgagagaagacatgaatgcaccaaaatttagagttaggaataagcatggcacatttagaagtcagtcagcaaagagaacggtcttattagagagaagagttcatgtggggggagtggcagcattaaattataaaggctgaaagtactgtgttagatatttttctaattgtcctaacaactctgaaagataggcattgcggtgatcactttacagataaagaaactgagaattgcagagacgaagaaatttgccaacttcttgtaaccagtaagtagccaagcaggcatgtgaacccaatttctcatcttcaaaatggaaactgagtgaattttgagactcagcacataataatcttgtccaattacaaagcctatgctattcatatcaagagatttcacaagagcgaatgaaaaaaattcatataaatataaatgcatgccaaataagagtaaaatagtgtgattcgtacaaaagggtagatattgattgtgcaggacttcaaaagctaatatggattttctgggggtttttatatattagagacagtagagttttctgagtgttggagatttctcgggaggagactgattaggaagataagttcaaccatggtgctcagggcagattaaaggaggaaggaaacaatctgagatgccactggaggttgtttcagtaattccgacatgaagggatggcaagcaggatgaggatgctggcagtaaaagtgaaatgggaggaaccaatggtggagaatgaagtccagccattcaaagggaggattagaggcatttggtgatgcttggtgatggaaggcaggtgacaaagaagaggcaagagtccaaagtggcttttctgcccttttcttgacactctttacccacgagtggaggtgcaaacaatgagctgttgacatggccactgaacacagaaggaaagggmgagctgatactggcattggacagggttccatgatggatggggggctgagttaccaccaagaattcacataaacaggtgcatatatgtgtttcctcaagcagtgactattcaaaaccacaagtgctattctgcagaagttccaaaacttttcttctatgttaaagaaggggtccttattctgagacagggttgagcatcgcttgtataagggtcaaggtgacagtgtctagcgtggtagttctgagctgaatgactttgagaaaattccttcaactctttaagtttcagtttctcatttctcatcttcaaaaatggaagagatgacttaagaagtttatttgaggcagtaaattctgtaattctcataatcagcaccaaacgacagatctttggctaaagttaaatgactttggaataagctattttctggcccatcccacctttcttt

SEQ ID NO: 3488 - DNA, 985 bp, Homo sapiens
ctttatagacaacatatatttgactgtagtttatcccaacatccccattttacaggtgaaaaaraagaagatagcagtgttcaaggtcacatccttaagaattcaatacccatccctcactccagaataatacctgaaattttatgtttgaggtttttctttttacagaaggttgagtaaggagtaagagaatccaacgaagagctttaggtacagaatgtggaagtgaggaagtgggaagagttgaagaatgagagagactgaggaccataaactctgttccatgtgtatccttactggaagaattacatggatattgagacggtacagaatccactgttctaagtcttgtcctgtgacctttacccaggtcctccaagaagacagggttcttgccaaaggttgaaattgcttatttcttttccaatggaatttttcaggtgggcgtatcacactccaagatgggcatgtttgaccacaaaattggctgtccactcacagcaagagagatggcctcaagtggggatcattttaaatgtgtctctgagagcagagatgaaaggagaaaagccaattagagagagaaagcatgccaggtacttgctctctggtgccatggttgtcatggagtttttgtccctgctgatctcacgccccactttgctatgtgggtcaattccctatttccctatcgtcttatcatgatgtcaggattgcaactttttacaaaacttgaagtcattggagttggaaagaagatagggaccatctagtccaaaactctcaatttctgggtgaaaaatctgagaccagagtgctgaagagtttgcccaagatgacgccctagccagtaatatagcttgatagcaataaatttgatatgtgcatgcttctctgcttacaaaacactttcattctaggcaattacatacatatttcctcaaatacctgacttgagtcaattatcacagcagtcctgcaaggc

SEQ ID NO: 3489 - DNA, 514 bp, Homo sapiens
taatctgtcactctcttttagtttaccccatcacatataattgacaatgcagaatccgtgtataagttgggacttctctgtgcttgtagcgtgttatttttaggagaggaggtgattactctcatatcattagagttattggggaagcaattttgttagtcattatgcatatcaataattatacaaactgatttatgagtgcatttttatcactagtattattagtgcagttgttagagctmaaccacaaatataattactttcaactttaatgaaatatagaataatctacattcagatagtaagaatagtattaatcactgacaataattaaaatacacttctacatataaacagtgtttaaaatgtagaagtaaacatgataccagacaatattttcaaagtggaaaggctaagggagtggtgaaagtgtttaaaaacaggcctgtgtttaggacttcctagcgataggctaagcaccttggcagagagtcaggtattgtagcaatgaact

SEQ ID NO: 3490 - DNA, 514 bp, Homo sapiens
taatctgtcactctcttttagtttaccccatcacatataattgacaatgcagaatccgtgtataagttgggacttctctgtgcttgtagcgtgttatttttaggagaggaggtgattactctcatatcattagagttattggggaagcaattttgttagtcattatgcatatcaataattatacaaactgatttatgagtgcatttttatcactagtattattagtgcagttgttagagctcaaccacaaatataattactttcaactttaatgaaatatagaataatctacattcagatagtaagaatagtattaatcrctgacaataattaaaatacacttctacatataaacagtgtttaaaatgtagaagtaaacatgataccagacaatattttcaaagtggaaaggctaagggagtggtgaaagtgtttaaaaacaggcctgtgtttaggacttcctagcgataggctaagcaccttggcagagagtcaggtattgtagcaatgaact

SEQ ID NO: 3491 - DNA, 425 bp, Homo sapiens
attcatcttgagcttcatatggagcttaaaaacgatgacacatagatcagttggaaagttttgcttcctcctggctcacccttctccaagccagaagccrccaagtgtatgtatggggagggaagtgggtgagacagggagcctggcaagggcccccttctagtgtgttttgtgggaacagcctcattttgtttatagaggctgggcttgcctgtaatcacttaggtcaaaacctggcatattagatagaaaagatagttttcttaaatgggattgacaatttccgccttccaggttcaagcgattctcctgcctcagcttcccgagtagctgggattacaggcgcccgccgccacgcctggctaatttttctatttttagtagagacagggtttcaccgtgttggccaggatgatctcgatctg

SEQ ID NO: 3492 - DNA, 2888 bp, Homo sapiens
caggtgagcctggggagcacactggccatctgatcaggccttcctccctgtttacagtggtccactccttggctttgtttgctgtgaactggattccaaggacagccttctcagaagagctagaggtcatgggggtgtcatggataggtcaatggccccaaggraatgagctcagagggtctcatcatctcatccttctagcttgcccccattaaatggtgtgccttaatgtcccgggttttccagggctgacacccactctcatgtattgggctggatgttggtttgaaaaggggttatttcaggaaggtgctaggtcctgtccagttccctggcagtccccccacacagagtgactgggggaggtcaggaaatcagaaggtggtcctttgccacgtgtagaaccaaaagactggttagtcactttgggtgggctggactgcactgtggatggcagggaggatgcatccttgcttagtagccttttggattgtagctgttgcaatggcctgaggctttcaatctcttccccagaccaagatacttggtagtgaccgggtgaagctgatggagagtctagtggttggagacattgcagagctaagaccaaaccaggtgggcccttttatttctgctctatgagttttcttagtcatgagccagcaaatgggctgagtccctacctcaggcttaggggcacagagatgagtcaaacacagcttctcagggcttgcagtcttggacagaatccctgagtcatttccagagacacagacatttgtagggaggggaatatcccagtcttactacatcaggctaggaggccagaaaccaaggttaatatgctgctctctggccatcccttctgcttaacccctctctattcaacatgtggtccctggccaggcgacgtgactcaaacacctgtaatcctggcacttggggaggccaaggcgggtggatcacctgaggtcaggagttcgagaccagcctggccaacatggcaaaacctcgtttctactaaaaacacaaaaattagccgggcgtggtggcgcgtgcttgtagtcccagctactcgggaggctgaggttgcagcaagctgaggttgcaccactgcactctggcctgggcaacagagtgagactcagtctaaaaagaaaaataacaacaacaaagtgtggtctctaaaccagcatctttggagcttgttaggaatatagtctcaggcactgctgcagacctgctgaatcagaaccttcattttaacaagatccccaggtgattcatgtgaccccctcaacctcaggctttttgtccatccagtggggaggctaaggaagttttttgggggcattgctatggagtacttaggagagcctgcgatcatcaagatgacctttgaagcttttgtcctgtgggttgccacatggggctaagtcgtcccaggtttgggtaggtgaagcagcaggtcctaggtgtcatagattaagtgtcagatgggactctcagtacagagtggggaggggtgcagaggttgcaccagatcagggaagcaccccaaggtagggaggggatgaaaacttacttgatgcatgaggatcaaagaccttggacttgggcccagacttgtaccttgcacaccctgagtccttcacattagggttcataaccttttggtaactaagtgggtccagggttgtgtctggctcacccttggccttgccctcctggacctggaagccaaaacgctccactttggtcctaggggacactgtcgctgtttaccaacgaggctggaggcatcttagatgacttgattgtaaccaatacttctgagggccacctgtatgtggtgtccaacgctggctgctgggagaaagatttggccctcatgcaggtataccccctctgtgttctagacaccttgtcttccttgttcatagagcagtatccttgttgtccaagacagggttggcacagacaagggacctggaaaatggctctttcagtgaatgaacagctatgagactcaagagcaggccctctctggagcacgccagggtttggtggtgggggattaccaggcatggggagggggtcttggcccctctggtgtgaggtggcagaactgggcttgggtcatctctatcacttagtagctatgtgaccttgtaagatgggaaccagcctactacctttttttttcctccctcctcctcctcctctccactgtcctactactgtccagctctgcagcgtccagcccatggtagctgctcagtaagtggccccagatgctcttgtgtttctgtcttttaggacaaggtcagggagcttcagaaccagggcagagatgtgggcctggaggtgttggataatgccctgctagctctgcaaggtgagagggctgggctggggttggagccaacctttgccttcctggcttcattgactgcttagcacagaggccataccaagaagaatgtgtggaaggtgtgatatttgtgtgccataattttaagttttgtatcttgccctcctcctacctaccacaaggctccatgggctagggacaagggcatcttctcccacttgcagagtaagacatgctcagggcttgttctggtccctgaataaggctttagtccagctttgagggatgctgggacctggatacttggtcactggctccctgggcccaggccccactgcagcccaggtactacaggccggcgtggcagatgacctgaggaaactgcccttcatgaccagtgctgtgatggaggtgtttggcgtgtctggctgccgcgtgacccgctgtggctacacaggagaggatggtgtggaggtgtgtcaagaagtggtgtgggggcagtacagggcacagg

SEQ ID NO: 3493 - DNA, 2888 bp, Homo sapiens
caggtgagcctggggagcacactggccatctgatcaggccttcctccctgtttacagtggtccactccttggctttgtttgctgtgaactggattccaaggacagccttctcagaagagctagaggtcatgggggtgtcatggataggtcaatggccccaaggaaatgagctcagagggtctcatcatctcatccttctagcttgcccccattaaatggtgtgccttaatgtcccgggttttccagggctgacacccactctcatgtattgggctggatgttggtttsaaaaggggttatttcaggaaggtgctaggtcctgtccagttccctggcagtccccccacacagagtgactgggggaggtcaggaaatcagaaggtggtcctttgccacgtgtagaaccaaaagactggttagtcactttgggtgggctggactgcactgtggatggcagggaggatgcatccttgcttagtagccttttggattgtagctgttgcaatggcctgaggctttcaatctcttccccagaccaagatacttggtagtgaccgggtgaagctgatggagagtctagtggttggagacattgcagagctaagaccaaaccaggtgggcccttttatttctgctctatgagttttcttagtcatgagccagcaaatgggctgagtccctacctcaggcttaggggcacagagatgagtcaaacacagcttctcagggcttgcagtcttggacagaatccctgagtcatttccagagacacagacatttgtagggaggggaatatcccagtcttactacatcaggctaggaggccagaaaccaaggttaatatgctgctctctggccatcccttctgcttaacccctctctattcaacatgtggtccctggccaggcgacgtgactcaaacacctgtaatcctggcacttggggaggccaaggcgggtggatcacctgaggtcaggagttcgagaccagcctggccaacatggcaaaacctcgtttctactaaaaacacaaaaattagccgggcgtggtggcgcgtgcttgtagtcccagctactcgggaggctgaggttgcagcaagctgaggttgcaccactgcactctggcctgggcaacagagtgagactcagtctaaaaagaaaaataacaacaacaaagtgtggtctctaaaccagcatctttggagcttgttaggaatatagtctcaggcactgctgcagacctgctgaatcagaaccttcattttaacaagatccccaggtgattcatgtgaccccctcaacctcaggctttttgtccatccagtggggaggctaaggaagttttttgggggcattgctatggagtacttaggagagcctgcgatcatcaagatgacctttgaagcttttgtcctgtgggttgccacatggggctaagtcgtcccaggtttgggtaggtgaagcagcaggtcctaggtgtcatagattaagtgtcagatgggactctcagtacagagtggggaggggtgcagaggttgcaccagatcagggaagcaccccaaggtagggaggggatgaaaacttacttgatgcatgaggatcaaagaccttggacttgggcccagacttgtaccttgcacaccctgagtccttcacattagggttcataaccttttggtaactaagtgggtccagggttgtgtctggctcacccttggccttgccctcctggacctggaagccaaaacgctccactttggtcctaggggacactgtcgctgtttaccaacgaggctggaggcatcttagatgacttgattgtaaccaatacttctgagggccacctgtatgtggtgtccaacgctggctgctgggagaaagatttggccctcatgcaggtataccccctctgtgttctagacaccttgtcttccttgttcatagagcagtatccttgttgtccaagacagggttggcacagacaagggacctggaaaatggctctttcagtgaatgaacagctatgagactcaagagcaggccctctctggagcacgccagggtttggtggtgggggattaccaggcatggggagggggtcttggcccctctggtgtgaggtggcagaactgggcttgggtcatctctatcacttagtagctatgtgaccttgtaagatgggaaccagcctactacctttttttttcctccctcctcctcctcctctccactgtcctactactgtccagctctgcagcgtccagcccatggtagctgctcagtaagtggccccagatgctcttgtgtttctgtcttttaggacaaggtcagggagcttcagaaccagggcagagatgtgggcctggaggtgttggataatgccctgctagctctgcaaggtgagagggctgggctggggttggagccaacctttgccttcctggcttcattgactgcttagcacagaggccataccaagaagaatgtgtggaaggtgtgatatttgtgtgccataattttaagttttgtatcttgccctcctcctacctaccacaaggctccatgggctagggacaagggcatcttctcccacttgcagagtaagacatgctcagggcttgttctggtccctgaataaggctttagtccagctttgagggatgctgggacctggatacttggtcactggctccctgggcccaggccccactgcagcccaggtactacaggccggcgtggcagatgacctgaggaaactgcccttcatgaccagtgctgtgatggaggtgtttggcgtgtctggctgccgcgtgacccgctgtggctacacaggagaggatggtgtggaggtgtgtcaagaagtggtgtgggggcagtacagggcacagg

SEQ ID NO: 3494 - DNA, 2888 bp, Homo sapiens
caggtgagcctggggagcacactggccatctgatcaggccttcctccctgtttacagtggtccactccttggctttgtttgctgtgaactggattccaaggacagccttctcagaagagctagaggtcatgggggtgtcatggataggtcaatggccccaaggaaatgagctcagagggtctcatcatctcatccttctagcttgcccccattaaatggtgtgccttaatgtcccgggttttccagggctgacacccactctcatgtattgggctggatgttggtttgaaaaggggttatttcaggaaggtgctaggtcctgtccagttccctggcagtccccccacacagagtgactgggggaggtcaggaaatcagaaggtggtcctttgccacgtgtagaaccaaaagactggttagtcactttgggtgggctggactgcactgtggatggcagggaggatgcatccttgcttagtagccttttggattgtagctgttgcaatggcctgaggctttcaatctcttccccagaccaagatacttggtagtgaccgggtgaagctgatggagagtctagtggttggagacattgcagagctaagaccaaaccaggtgggcccttttatttctgctctatgagttttcttagtcatgagccagcaaatgggctgagtccctacctcaggcttaggggcacagagatgagtcaaacacagcttctcagggcttgcagtcttggacagaatccctgagtcatttccagagacacagacatttgtagggaggggaatatcccagtcttactacatcaggctaggaggccagaaaccaaggttaatatgctgctctctggccatcccttctgcttaacccctctctattcaacatgtggtccctggccaggcgacgtgactcaaacacctgtaatcctggcacttggggaggccaaggcgggtggatcacctgaggtcaggagttcgagaccagcctggccaacatggcaaaacctcgtttctactaaaaacacaaaaattagccgggcgtggtggcgcgtgcttgtagtcccagctactcgggaggctgaggttgcagcaagctgaggttgcaccactgcactctggcctgggcaacagagtgagactcagtctaaaaagaaaaataacaacaacaaagtgtggtctctaaaccagcatctttggagcttgttaggaatatagtctcaggcactgctgcagacctgctgaatcagaaccttcattttaacaagatcyccaggtgattcatgtgaccccctcaacctcaggctttttgtccatccagtggggaggctaaggaagttttttgggggcattgctatggagtacttaggagagcctgcgatcatcaagatgacctttgaagcttttgtcctgtgggttgccacatggggctaagtcgtcccaggtttgggtaggtgaagcagcaggtcctaggtgtcatagattaagtgtcagatgggactctcagtacagagtggggaggggtgcagaggttgcaccagatcagggaagcaccccaaggtagggaggggatgaaaacttacttgatgcatgaggatcaaagaccttggacttgggcccagacttgtaccttgcacaccctgagtccttcacattagggttcataaccttttggtaactaagtgggtccagggttgtgtctggctcacccttggccttgccctcctggacctggaagccaaaacgctccactttggtcctaggggacactgtcgctgtttaccaacgaggctggaggcatcttagatgacttgattgtaaccaatacttctgagggccacctgtatgtggtgtccaacgctggctgctgggagaaagatttggccctcatgcaggtataccccctctgtgttctagacaccttgtcttccttgttcatagagcagtatccttgttgtccaagacagggttggcacagacaagggacctggaaaatggctctttcagtgaatgaacagctatgagactcaagagcaggccctctctggagcacgccagggtttggtggtgggggattaccaggcatggggagggggtcttggcccctctggtgtgaggtggcagaactgggcttgggtcatctctatcacttagtagctatgtgaccttgtaagatgggaaccagcctactacctttttttttcctccctcctcctcctcctctccactgtcctactactgtccagctctgcagcgtccagcccatggtagctgctcagtaagtggccccagatgctcttgtgtttctgtcttttaggacaaggtcagggagcttcagaaccagggcagagatgtgggcctggaggtgttggataatgccctgctagctctgcaaggtgagagggctgggctggggttggagccaacctttgccttcctggcttcattgactgcttagcacagaggccataccaagaagaatgtgtggaaggtgtgatatttgtgtgccataattttaagttttgtatcttgccctcctcctacctaccacaaggctccatgggctagggacaagggcatcttctcccacttgcagagtaagacatgctcagggcttgttctggtccctgaataaggctttagtccagctttgagggatgctgggacctggatacttggtcactggctccctgggcccaggccccactgcagcccaggtactacaggccggcgtggcagatgacctgaggaaactgcccttcatgaccagtgctgtgatggaggtgtttggcgtgtctggctgccgcgtgacccgctgtggctacacaggagaggatggtgtggaggtgtgtcaagaagtggtgtgggggcagtacagggcacagg

SEQ ID NO: 3495 - DNA, 621 bp, Homo sapiens
tgcatgactgctggctgcctgtgtctgcctggygggagagctgtggaactaggggtccacatgaggacagactactgtggtgctgcctacctgccaggctggcccaccttccccacccccacttgaccttactctcttgaggtcctaaaggtatgattcagacctttcagccctttccagaactttgaccctctggagacagggcggttctgcagggggcggtctagcccctagctttgttctgggcagcccaatcagctctggattgcccgagctgccctgaagagtcagccgaaagagctggaggcttcttccctgtggttgcgggttcctgcattctctgctctaaatcccagcctgcccttggggctgcccacgcccccttcagatcctttgctccggagagagacctgtccgagcagaggcctggactacatctcccggcgtgcctggcagtgtggtggcctctgtgcgccgtctgcactcgttgcaggcgacgatgcagagggctgtaagtgtggtggcccgtctgggctttcgcctgcaggcattccccccggccttgtgtcgtccacttagttgcgcacaggtgggatagagggtgctgatcttggagggggg

SEQ ID NO: 3496 - DNA, 604 bp, Homo sapiens
gaaccctctccactatttaaagtttctgtgtcagcacttaataaaataggaaactatggccaaatgagaaagacatcctcagcctccaccatgtagatccattgtgctttcctagctccttcggtgctaggtgctttacatacatcagctctaatccctatcacaactacagggtctgaaagattccatctattttcctcacctgaggaaatgataagaaagtgacagtgagtggtaagaagtgacttgccacagctgcttagtggacactccacagccccatgctgattcctggtgatgatgctcctttacctccccacagcccctatgctctaytccagccaaatggtatggcccaggtttgctctaaatgcttgtaacaacatcctgctttacaatctgcccatgttcttccctctgctgaatgccttccccactaaccttccttccttatgataagcttcgtgttcccattgtttagcggaacaacacacactggggcctgttgagggggcggcggtgagagggagagtatcaggataaatagctaatgcatgtggtgcttaatacctaagtgatgagttgatagatgcagcaaaccacc

SEQ ID NO: 3497 - DNA, 604 bp, Homo sapiens
gaaccctctccactatttaaagtttctgtgtcagcacttaataaaataggaaactatggccaaatgagaaagacatcctcagcctccaccatgtagatccattgtgctttcctagctccttcggtgctaggtgctttacatacatcagctctaatccctatcacaactacagggtctgaaagattccatctattttcctcacctgaggaaatgataagaaagtgacagtgagtggtaagaagtgacttgccacagctgcttagtggacactccacagccccatgctgattcctggtgatgatgctcctttacctccccacagcccctatgctctattccagycaaatggtatggcccaggtttgctctaaatgcttgtaacaacatcctgctttacaatctgcccatgttcttccctctgctgaatgccttccccactaaccttccttccttatgataagcttcgtgttcccattgtttagcggaacaacacacactggggcctgttgagggggcggcggtgagagggagagtatcaggataaatagctaatgcatgtggtgcttaatacctaagtgatgagttgatagatgcagcaaaccacc

SEQ ID NO: 3498 - DNA, 1314 bp, Homo sapiens
gctgtcaacatcgaggcacgattccccagcagcaaaaagattacaacgtgtgctaaaggctcagatggtcattagcatttttcttagcaataaagcacttttcaattaaagtatgtacatttttagacataattacatcgtacacacaatagactacatatagtgtaaacataaatttacgtacactgggaaacaaaatatttttatgacttgctttattatagttatctggaactgaaccttcaatatctctgatgtatacctgtacttttgattctcaggatacattcttctaaaaaatattgctgatttaaggggtcagatatgtcctgggagcctgtggctaytgatcctattgcctcggtcatcagccctcctgttttcctaggtgacatagagggcttgtagggtggctgtagggtggtggaaaaagaagcagaactgaattccagggctgactttgctgcttgttagctgggtgaccttgggaaaaccacttaacctttctggcccttactttcctcatgggaaataagattaaaaatgtatgcgaaggcttaatattgacaagctctattgagtttgagatttgaccttagagtttttattaatagacctgccatttgctaagcaaattttctagataaagatgtatacctggatgcatgtcatagtacagtccctgtttgcccaaggtgaagttaattttatgtgatggggcagagttaatccttgttaggcaaatgatgcagtcttctccggagtagaaaactgtgtagacaagaacagcttacctacctcttaaggccatagttatttatttagcataaaccaaatacatggtgataagggagatacagtaagatcttttggaagtctttttatggaaactgatgtgtattgaaggtagaagacaagcaatggcggaatgttgtgtatgtccaaccagtgcacaaaagtgggagtgggtacctctaatgggagagatcactgggggcttcccggaggacggggttcaaactctgcctaaaggataaggataagaggatttggactaggagggagggcattccaggtagcttagaggatttgaccaagcttttgtacaacatctgtcattccacccagatgttctgctggccatcatttgctccctgatgcctttagtttcttgccattgcattggttggactctgcttcttgacttcacattggggcatgtgttttattttattttattttatttttaagacggagtctcgctctgtcacccaggctagagtgcagtggtgcgatctcggctcactgtaaccg

SEQ ID NO: 3499 - DNA, 1035 bp, Homo sapiens
gtatataccgctgtcgtgtgtttaacaggctcagggtaatggctgggttacctaccaccccagggcagtgagcctcagaactacctgaagcctagttaaaaatgcactaattccacctcaccccaccctcctccccatgtttctgattaaggagggcttgggcagtacctgggcctgacaatgtgcgtttctaacaagttcccaggtgatgctgcacctgctgggccaggagccacacttcgacaaccactgtgccagagaagttttatggagaactttacatctttttaagtactagactgaaactaaactaaaacatttctgtccatgtttttaggtaaaaatgatttacttgtattccaatataccaaaaaagtaatatcatatcttcttgatctgtagtcataattatgaccattcattattgtggccagctgtcattccagggtgtgctgagcccgccttgagactgacccaggttgtttgagttgttggtttgcattctgtgtttgcagatcggctgctgcgcccatagcattcttcccttcctggagctttaaaaaaaaacctttcttattaaaatgttcacacctataaaaatagagagaatagtatgacccactcccatgtccccatcatctagatttttaacatttttgcttcatctttttcttgcggaaatattctaaagccaatcccagacatcctaacattcccctccaggcatcctaacattcccctcccaaatatttctgactgcatctccaaaaaaataaagacattttcttgcataaccacaaaaccatgatcacaacaaatccagcaattattcctaagtatcctctaatactcaaaccgtattcagattttccccagttgctcaaaaaggtctttgcagttgratgaggagatgaacaaggcctatattcacattgcctttgattgctagctacctttccctacaaaatttgcttttgtaggcgtagggggatctgcagtgagctggggctagctagttgcaacaagtgacccaga

SEQ ID NO: 3500 - DNA, 1035 bp, Homo sapiens
gtatataccgctgtcgtgtgtttaacaggctcagggtaatggctgggttacctaccaccccagggcagtgagcctcagaactacctgaagcctagttaaaaatgcactaattccacctcaccccaccctcctccccatgtttctgattaaggagggcttgggcagtacctgggcctgacaatgtgcgtttctaacaagttcccaggtgatgctgcacctgctgggccaggagccacacttcgacaaccactgtgccagagaagttttatggagaactttacatctttttaagtactagactgaaactaaactaaaacatttctgtccatgtttttaggtaaaaatgatttacttgtattccaatataccaaaaaagtaatatcatatcttcttgatctgtagtcataattatgaccattcattattgtggccagctgtcattccagggtgtgctgagcccgccttgagactgacccaggttgtttgagttgttggtttgcattctgtgtttgcagatcggctgctgcgcccatagcattcttcccttcctggagctttaaaaaaaaacctttcttattaaaatgttcacacctataaaaatagagagaatagtatgacccactcccatgtccccatcatctagatttttaacatttttgcttcatctttttcttgcggaaatattctaaagccaatcccagacatcctaacattcccctccaggcatcctaacattcccctcccaaatatttctgactgcatctccaaaaaaataaagacattttcttgcataaccacaaaaccatgatcacaacaaatccagcaattattcctaagtatcctctaatactcaaaccgtattcagattttccccagttgctcaaaaaggtctttgcagttgaatgaggagaygaacaaggcctatattcacattgcctttgattgctagctacctttccctacaaaatttgcttttgtaggcgtagggggatctgcagtgagctggggctagctagttgcaacaagtgacccaga

SEQ ID NO: 3501 - DNA, 609 bp, Homo sapiens
caggatacagaatggctctttaaatgaaacacattcagctttatgaaaacttatgacagtgagtgtctttctgtcttgctttctgctttctttccttgctttcctccttccttatctggctgtggcctcgtgaaaggtcctcttggcccagcactacaatcctgttaaagaggtcctgtgtggggagtatagaccgtgtgctgaggggaatggggagctggaggtgtaactcactgggtgtcttccctgactcaggggatgatgagccttgagcctgyccagcctgtcctgaaatctccttagcattcttggagtctaatgtctgtatccctcggaaccaaggtggacctgaggcattggccactggcctgagagtattagtcactttcatgaatgtgggtaagctggttgcagcctcatggtttgggtttttggacaagcagacaaccacaaggtgtttcacctcttggccttcaggtttccggcatctgcaggttcctccttaggatttgttgttttccctgaaacaggctggagttgttccctggcagaaaataagactgggctgcacaaagcttttccacaggcaggcaggcaactcggagctgt

SEQ ID NO: 3502 - DNA, 943 bp, Homo sapiens
tgcatcagaggtttcttcctcagaggtggaggcctttgaggggtggcacggaactggattcaaacccttgccctgacccttcccagcagggaggccttgttcacatcacccaacctttcgggtgctcagttccctcactgaaaaatggggagaataatatcctctgctaggmgtactggggaaacaaatgaggtagcacctggacagcaattactgcagtgattttgctcagtgatgttaactcgtatctcctgtttgtccctccagtccctctcccattcacctcacaacctgaccttgagccccttcttcactcagtacagggctcatcagcacatggtaattaacaatgatggacatggcttcctggcactctctgcatgccaggcactgttcgcagtgctttaatccacaaaacagctttgtaagtactgctattgtctccgttttacttgcgaggaaatagaagcacaaagaggttaaataacttgcccctgatcacatagctagctggtgacagagtcgagctttgaaccagagtctgtgcccatagcagctaacctatgtgctttactcatacatctacttacctataacttatttagtctcataagaaccctgaaaagtaggtgctattcttatccctattttacagatggcggtactgaggcagaggcaggttaaggaattgttcatggtctcccagttagtgagtagcattcctgagactggcattcaagacatctggccttggctgggcacagtgactcacacctgtaatcccagcactttgggatcctgaggtggaaggtcgcttgaggccaggagtttgagaccagcctggacaacatagtggactgtgtctcaaacaaaacaaaacaaaaacgaagtctggccttggggttcaggctctacgctactgtgctacatgatcctgcatgca

SEQ ID NO: 3503 - DNA, 943 bp, Homo sapiens
tgcatcagaggtttcttcctcagaggtggaggcctttgaggggtggcacggaactggattcaaacccttgccctgacccttcccagcagggaggccttgttcacatcacccaacctttcgggtgctcagttccctcactgaaaaatggggagaataatatcctctgctaggagtactggggaaacaaatgaggtagcacctggacagcaattactgcagtgattttgctcrgtgatgttaactcgtatctcctgtttgtccctccagtccctctcccattcacctcacaacctgaccttgagccccttcttcactcagtacagggctcatcagcacatggtaattaacaatgatggacatggcttcctggcactctctgcatgccaggcactgttcgcagtgctttaatccacaaaacagctttgtaagtactgctattgtctccgttttacttgcgaggaaatagaagcacaaagaggttaaataacttgcccctgatcacatagctagctggtgacagagtcgagctttgaaccagagtctgtgcccatagcagctaacctatgtgctttactcatacatctacttacctataacttatttagtctcataagaaccctgaaaagtaggtgctattcttatccctattttacagatggcggtactgaggcagaggcaggttaaggaattgttcatggtctcccagttagtgagtagcattcctgagactggcattcaagacatctggccttggctgggcacagtgactcacacctgtaatcccagcactttgggatcctgaggtggaaggtcgcttgaggccaggagtttgagaccagcctggacaacatagtggactgtgtctcaaacaaaacaaaacaaaaacgaagtctggccttggggttcaggctctacgctactgtgctacatgatcctgcatgca

SEQ ID NO: 3504 - DNA, 592 bp, Homo sapiens
  misc_feature (1)...(592): n = A,T,C or G
gacaaaatctataaattagggaaatctcatcattcagtgtaaaagatgacaaggtccattacctactcctgaatcattgttatttttccatyactaggttattatgaaataagactctatgatccaccctgcatacaatagatcaacggagttcgaaagagcacaattcattttataattgggagcaggtttcacagtgagaggaaattttgttagtaataatggtcactctttatgaagggcctgtattacacgctggggatccaaagatgagtaagactgagttcaaagtccagtggggaattcaggcatagtaatgtcatagatgagaaactgcaaaaggatacaatgtaacattcactgctgtattaattagttcaactttatntagaaaatgtgaagaaagacttttggtagtgtggtgaaaataattagattgaatttgactgggactggttcgaatttgaatcctgggactgatacttacttttatgtacacacacacacacatacatagtggctttcaaagcctgaccacaactcacaagaagtacatcataacacacacacacacacacacacgtatttcttc

SEQ ID NO: 3505 - DNA, 592 bp, Homo sapiens
  misc_feature (1)...(592): n = A,T,C or G
gacaaaatctataaattagggaaatctcatcattcagtgtaaaagatgacaaggtccattacctactcctgaatcattgttatttttccatcactaggttattatgaaataagactctatgatccaccctgcatacaatagatcaacggagttcgaaagagcacaattcattttataattgggagcaggtttcacagtgagaggaaattttgttagtaataatggtcactctttatgaagggcctgtattacacgctggggatccaaagatgagtaagactgagttcaaagtccagtggggaattyaggcatagtaatgtcatagatgagaaactgcaaaaggatacaatgtaacattcactgctgtattaattagttcaactttatntagaaaatgtgaagaaagacttttggtagtgtggtgaaaataattagattgaatttgactgggactggttcgaatttgaatcctgggactgatacttacttttatgtacacacacacacacatacatagtggctttcaaagcctgaccacaactcacaagaagtacatcataacacacacacacacacacacacgtatttcttc

SEQ ID NO: 3506 - DNA, 592 bp, Homo sapiens
  misc_feature (1)...(592): n = A,T,C or G
gacaaaatctataaattagggaaatctcatcattcagtgtaaaagatgacaaggtccattacctactcctgaatcattgttatttttccatcactaggttattatgaaataagactctatgatccaccctgcatacaatagatcaacggagttcgaaagagcacaattcattttataattgggagcaggtttcacagtgagaggaaattttgttagtaataatggtcactctttatgaagggcctgtattacacgctggggatccaaagatgagtaagactgagttcaaagtccagtggggaattcrggcatagtaatgtcatagatgagaaactgcaaaaggatacaatgtaacattcactgctgtattaattagttcaactttatntagaaaatgtgaagaaagacttttggtagtgtggtgaaaataattagattgaatttgactgggactggttcgaatttgaatcctgggactgatacttacttttatgtacacacacacacacatacatagtggctttcaaagcctgaccacaactcacaagaagtacatcataacacacacacacacacacacacgtatttcttc

SEQ ID NO: 3507 - DNA, 592 bp, Homo sapiens
  misc_feature (1)...(592): n = A,T,C or G
gacaaaatctataaattagggaaatctcatcattcagtgtaaaagatgacaaggtccattacctactcctgaatcattgttatttttccatcactaggttattatgaaataagactctatgatccaccctgcatacaatagatcaacggagttcgaaagagcacaattcattttataattgggagcaggtttcacagtgagaggaaattttgttagtaataatggtcactctttatgaagggcctgtattacacgctggggatccaaagatgagtaagactgagttcaaagtccagtggggaattcaggcatagtaatgtcatagatgagaaactgcaaaaggatacaatgtaacattcactgctgtrttaattagttcaactttatntagaaaatgtgaagaaagacttttggtagtgtggtgaaaataattagattgaatttgactgggactggttcgaatttgaatcctgggactgatacttacttttatgtacacacacacacacatacatagtggctttcaaagcctgaccacaactcacaagaagtacatcataacacacacacacacacacacacgtatttcttc

SEQ ID NO: 3508 - DNA, 556 bp, Homo sapiens
gagacggcataaaccagaagggagcactcaaaacatattttaaaataataaacagctttagagagataaggaaagattttgcatccttataagaacaagatgcttagagaaagaaaaaaaacactgggaataggcagggggagaacttttctaacttaaaaactgacagtcaaaaaagaattagtaaaaaatgtttttaaaaagagcaagaaggccgcacgcagtggctcacgcctgtaatcccagcactttgagaggctgaggtgggtggattacctgaggtcaggagttygagactggcctggccaacatggtgaaaccttgtgtctactaaaaatgcaaaaaatagctgggcatggtggcacgcccctgtaagcccagctactcaagaggctgaggtgggaaaattgcttgaacccaggaggcggaggctgcagtgagccaagactgtgccaccaaactgcctgggtgacagagcaagaccccatctcaaaaaaaaaaaaaaaaaaagcaagaacaacaaaaggagagaatgtatgggaaaattagatcaatc

SEQ ID NO: 3509 - DNA, 556 bp, Homo sapiens
gagacggcataaaccagaagggagcactcaaaacatattttaaaataataaacagctttagagagataaggaaagattttgcatccttataagaacaagatgcttagagaaagaaaaaaaacactgggaataggcagggggagaacttttctaacttaaaaactgacagtcaaaaaagaattagtaaaaaatgtttttaaaaagagcaagaaggccgcacgcagtggctcacgcctgtaatcccagcactttgagaggctgaggtgggtggattacctgaggtcaggagtttgagactggcctggccaacatggtgaaaccttgtgtctactaaaaatgcaaaaaatagctgggcatggtggcacgcccctgtaagcccagctactcaagaggctgaggtgggaaaaytgcttgaacccaggaggcggaggctgcagtgagccaagactgtgccaccaaactgcctgggtgacagagcaagaccccatctcaaaaaaaaaaaaaaaaaaagcaagaacaacaaaaggagagaatgtatgggaaaattagatcaatc

SEQ ID NO: 3510 - DNA, 1287 bp, Homo sapiens
ccctgtwtggccagctggccagcatctcccactcacagtgccctcccaccacgtactagggagagccaggaagaaggaaacagcaattaaaagtttcttgggttgggtgcagtggctcacacctgtaatcccagcactctgggaggccaaggtgggcagatcgcctgaggtcaggagtttgagactagcctggccaaaatggtgaaactttgtctctactgaaaatacaaaaaaaattagctggacatggtgatgtacacctgcagtcctagccactcaggaggctgaggcagaagaattgcttgaacctgggaggtggaggttgcagtgagctgagatcatgccattgtacccgagcctgggcaacaaagccagactctgtctcaaaaaaaatttttttaaattaaaagtttatctccctgttggagaaaccatttgcatacgaataagaggtttcttccccaggcatttccccgccctacacttaagctgtttctttttcttttctccaccatatcaggagttggtgtgttggtgcaaaggtagttgcggtttttgacattacttagaatggtggggactgcacttgcttttgcactaacttaataacccatccctgcgagtacaggggcttctctgtgccagaggctttttcttgaaaggcgttttactaggctgggactccaattcacaagactcccttttctctccttgttggaagaggacccagttccacagcttcacctgggacttaatgagtccgtgcaccctgctgagacaaatttttgtcccaacctaaattccaagctttgggttgaagctctaggaaagaaaactggatctgagggatccagaggcataagacaacagaagtcaaaagggacagctcacatgagcatgattaattcttgccgattaaaccaagactcccatttcaaggatagaggtcatgctagtatccatggcataaatgagatatagggaacctgaaggctactgacagcagggagaaaggcagtatgtgggtaagagtggataatcccacccccagcccctctgttaacatgggtgaaaagccacattgacacccatgggttgcaccctgttgtggtcgccaggactcagggatataaggacagaagaaagaaaatgaaagcctcttccttctctccctcacataagctggatattgtctaggaagagaaaagaataagggacgcttgctcctctcattctagatgagtagccattcatcttcagtctgtgccccttttgaatgcatcctga

SEQ ID NO: 3511 - DNA, 635 bp, Homo sapiens
aatgggttcttgacctttgacatctcattagttcactttcttctgaacatttcatsaagtctctgcaatgaaatttagggcctactatatgccaggctggcttgtgctgggtgatggggatgtggcaatggacaagagagttaaaacctttcccttacagcattcattgtgttagaaaatctcatgtgaggcagatgtagggggaacatacacacactatgatgttccactagtgctcttttttttttatttttttgagacagagtcttgctctgtcacccaggctggagtgcagtggtgtgatctcggctcactgcaacctctacctcccgggttcaagtgattcttgtgcctcagtctcctgagtagctgggattataggcatgcaccatcatgctcagctaatttttatattttttgtagagacagggtctcactatattgcccaggctggtctcaaactcctggcctcaagtgatccacccgcctcggcctcccaaagtgctgggattgtaggcatcagccaccacgctgggcccatttttaacaagtcatgccctctgttacgttttgcatatacttctatcaccatagttattaataatacattgactttcaagtgtctgtttctatgt

SEQ ID NO: 3512 - DNA, 635 bp, Homo sapiens
aatgggttcttgacctttgacatctcattagttcactttcttctgaacatttcatcwagtctctgcaatgaaatttagggcctactatatgccaggctggcttgtgctgggtgatggggatgtggcaatggacaagagagttaaaacctttcccttacagcattcattgtgttagaaaatctcatgtgaggcagatgtagggggaacatacacacactatgatgttccactagtgctcttttttttttatttttttgagacagagtcttgctctgtcacccaggctggagtgcagtggtgtgatctcggctcactgcaacctctacctcccgggttcaagtgattcttgtgcctcagtctcctgagtagctgggattataggcatgcaccatcatgctcagctaatttttatattttttgtagagacagggtctcactatattgcccaggctggtctcaaactcctggcctcaagtgatccacccgcctcggcctcccaaagtgctgggattgtaggcatcagccaccacgctgggcccatttttaacaagtcatgccctctgttacgttttgcatatacttctatcaccatagttattaataatacattgactttcaagtgtctgtttctatgt

SEQ ID NO: 3513 - DNA, 549 bp, Homo sapiens
aggccgaggcgggcagatcacctgagcttgggagttcgagaccagcctgaccaacatgcagaaaccccgtttctactaaaaatacaaaaaattagctgggtgtggtggcgcatgcctgtaatcccagctacttgggaggctgaggcaggagaattgcttgaacctgggaggtggaggttgtggtgagctgagatcatgccattgcactccagcctgggcacaagagccaaattccatctcaaaaacaaacaaacaaacaaacaaacaaaaataacaaaacacaaacaaaacaacaaaaacaatattaataacaaaactgccatgactctctataaaatcactataaggtcactataaaatcttattcctttacacttagarttctggaaagagtagcttgctctttgtttttacttttaaccctttaccattttccttctgccctactactttagtgaaattgcttatggtaaagccaacgtgccaaatgcaatgagcacaacaaattccttaacttactgggcctctctactaccattgatgctgcta

SEQ ID NO: 3514 - DNA, 789 bp, Homo sapiens
aaaacttagtagatatagtgtttgatactattggcagtatcagacatctactgcagttcttagaacatatcctctgcagatatgggagggggctactgtaaacaaaaatctatgctaagtatatatttcatggttccatacaactcttccttatatagacaaccctaaaaagaaaaatgttactttatttatggtttccagtatagcactatcttattcttgggcaattagaataatactagattraacatttaatatttcatcacaaccttgatttttctgaatctgtgtattttctaatcacaattttaatattttttattacttgatgccacaaagagctttcacactctacttttattgaaagatgtacttgctctttgaaaatatgactatattaaatgaataataaagcttgaaattatttatatttaatttttgcatgcctgtatctgtagacataacacatatgtgtcaatatgtatacatatgtgttgagagagagaggttggttttatatcatttgatgagttgcactgcatctaatcaggagaacctgttttgtttttgtttttgttttgttgttgttgttttgagatggagttggaatttcactcttatcgcccaggaaatggtgctaccttggctcactgcaacctctgcctcccaggttcaagtgatgattttcctgcctcagcctcccaagtagctgggattacaggctcctgccaccgagcccagctaatttttgtatttttagtagagatggggtttcaccatgttggccag

SEQ ID NO: 3515 - DNA, 640 bp, Homo sapiens
ggcctctgctcctttctcaatctgtttaacatgtgcttccctttccctcctttttatttcagccaatacatctgatatggtttggatctatgtctccacccaaatctcatgttgaaatgtaatccccaatgctggaggtgggacctggtgggaggtgattgggtctattagtttagcaccatcccactagtgctgttctcgtgatagagttctcacaatatctggttatttaaaagtatgtaatacaccaccctcccttcttcctgctctggccatgtaagatgtgcctgcttccccttcaccttccaccatgattgaaggtttcctaaggtctccctagaagccatcatacttcctgtatagcctgtggaaccatgagccaattaaacctcttttctttaataaattacccagtctcaggtatttctgtatagcagtgcaagaactagctaatacaatatccaacgttgaagacaaagaaatgaactcataatgaagccartgaaccccaatgagcaccagctgtctttagaaagtatttgacagaaaactatgcaagctttaaattgttcctcagaatttaattgttaaaaagcacttgaaaatcttggtttgaggatgctgtatactcatcaatgca

SEQ ID NO: 3516 - DNA, 949 bp, Homo sapiens
tcttttagaccccagacataaataggtcataggccttgccttgaggagctcacagtcaaagaaaagataacaggtctgtaatgtgcacctataggggatctgcttcaagaggagaattatttttctattacaagagtcactttcactagcagtaaagtcctgccttaatttaaatcctcagcagaatacccatcacataaatgacaacttggggaagtatttcactttggagtgtatgcctggattttgaatttcagcttcccctaagcccagttctgtggatgatagtggattgattctcacatcaaaaggaacacaaagctgtacatacttaacctttgtaaccagctactgctggagaaataatargaaagtcttaggaggaaaaagagttgcttgaaattctacagttcttttaatcttgtgaagaatgagatataaatcaataaataacaataacatcaagaggtgcaattacattttctgtccacttaaaaacattggaaagaagtggatggttccaacagctttcttcctttaaaagtaataacagactaaatctttgcttctggaactaggacataagtctgatctgggttaatatcctttcactgggctagaaacattccaacaaaaataaattgaaaaataagactatgtcaaggatttgttttccaaactttctcaaattaagaaacatttaccttttaaaaataatgtcccacatagctccgccaagtagatatttattcaagaattttacgaataggtagaatattagcgggctaatacatataatagttagaatattagaagtgactcatttggagtgaggaaaaaaatgggttacccaaatcaatatagctacccttttggggattatcccattatgactttgacctaagggcaaaatatgctgctaagaattgaccaaattcagcgccaggtc

SEQ ID NO: 3517 - DNA, 949 bp, Homo sapiens
tcttttagaccccagacataaataggtcataggccttgccttgaggagctcacagtcaaagaaaagataacaggtctgtaatgtgcacctataggggatctgcttcaagaggagaattatttttctattacaagagtcactttcactagcagtaaagtcctgccttaatttaaatcctcagcagaatacccatcacataaatgacaacttggggaagtatttcactttggagtgtatgcctggattttgaatttcagcttcccctaagcccagttctgtggatgatagtggattgattctcacatcaaaaggaacacaaagctgtacatacttaacctttgtaaccagctactgctggagaaataataggaaagtcttaggaggaaaaagagttgcttgaaattctacagttcttttaatcttgtgaagaatgagatataaatcaataaataacaataacatcaagaggtgcaattacattttctgtccacttaaaaacattggaaagaagtggatggttccaacagctttcttcctttaaaagtaataacagactaaakctttgcttctggaactaggacataagtctgatctgggttaatatcctttcactgggctagaaacattccaacaaaaataaattgaaaaataagactatgtcaaggatttgttttccaaactttctcaaattaagaaacatttaccttttaaaaataatgtcccacatagctccgccaagtagatatttattcaagaattttacgaataggtagaatattagcgggctaatacatataatagttagaatattagaagtgactcatttggagtgaggaaaaaaatgggttacccaaatcaatatagctacccttttggggattatcccattatgactttgacctaagggcaaaatatgctgctaagaattgaccaaattcagcgccaggtc

SEQ ID NO: 3518 - DNA, 949 bp, Homo sapiens
tcttttagaccccagacataaataggtcataggccttgccttgaggagctcacagtcaaagaaaagataacaggtctgtaatgtgcacctataggggatctgcttcaagaggagaattatttttctattacaagagtcactttcactagcagtaaagtcctgccttaatttaaatcctcagcagaatacccatcacataaatgacaacttggggaagtatttcactttggagtgtatgcctggattttgaatttcagcttcccctaagcccagttctgtggatgatagtggattgattctcacatcaaaaggaacacaaagctgtacatacttaacctttgtaaccagctactgctggagaaataataggaaagtcttaggaggaaaaagagttgcttgaaattctacagttcttttaatcttgtgaagaatgagatataaatcaataaataacaataacatcaagaggtgcaattacattttctgtccacttaaaaacattggaaagaagtggatggttccaacagctttcttcctttaaaagtaataacagactaaatctttgcttctggaactaggacataagtctgatctgggttaatatcctttcactgggctagaaacattccaacaaaaataaattgaaaaataagactatgtcaaggatttgttttcyaaactttctcaaattaagaaacatttaccttttaaaaataatgtcccacatagctccgccaagtagatatttattcaagaattttacgaataggtagaatattagcgggctaatacatataatagttagaatattagaagtgactcatttggagtgaggaaaaaaatgggttacccaaatcaatatagctacccttttggggattatcccattatgactttgacctaagggcaaaatatgctgctaagaattgaccaaattcagcgccaggtc

SEQ ID NO: 3519 - DNA, 661 bp, Homo sapiens
ccacccgccacagcctcccaaagtgctgggattacaggagtaagccaccatgccaggcctgcacaagggagtttttcaggaagaaaaggggaacattagaatactcttctgaatctgctattttttaagtgcctttagctcaaaataattctctatgtcaaagcagcatattttggggaagctaatctgccaccttcactttccgtgagccatccacccatcyatccatttatttatttatttatttatttttgagacagggtcttgctctgttgcccaggctggagtgcagtggcacggtcacagctcactgcagcctcaaacaactgagcacaagtgatactcccaccttggcctctcaaaacactgggattacaagtaggagccaccacacctggccccaagatctggctctttagttttagtcttctgaatatttctattccgcagctgcagatttgattggattatctgtatgcccttcatgaaatttcaacctcccaaattccctattttgttagaaaattgtgccaatattttccacttgactaatttcacctatgagacattttataaacaatacaaataaaaatattataatatgtatctagattatattattaatctagattgtatctagattgtaatattataatatgca

SEQ ID NO: 3520 - DNA, 661 bp, Homo sapiens
ccacccgccacagcctcccaaagtgctgggattacaggagtaagccaccatgccaggcctgcacaagggagtttttcaggaagaaaaggggaacattagaatactcttctgaatctgctattttttaagtgcctttagctcaaaataattctctatgtcaaagcagcatattttggggaagctaatctgccaccttcactttccgtgagccatccacccatccatccatttatttatttatttatttatttttgagacagggtcttgctctgttgcccaggctggagtgcagtggcacggtcacagctcactgcagcctcaaacaactgagcacaagtgatactcccaccttggcctctcaaaacactgggattacargtaggagccaccacacctggccccaagatctggctctttagttttagtcttctgaatatttctattccgcagctgcagatttgattggattatctgtatgcccttcatgaaatttcaacctcccaaattccctattttgttagaaaattgtgccaatattttccacttgactaatttcacctatgagacattttataaacaatacaaataaaaatattataatatgtatctagattatattattaatctagattgtatctagattgtaatattataatatgca

SEQ ID NO: 3521 - DNA, 613 bp, Homo sapiens
agttaaaaaacctctctagagcaattgagcatagatctgtgtcttgatagtttttgagacagggtctcactctgtcatccaggctggagtgcagcagcatgatcttggctcactgtagcctcgacctcccaggctcaagcgatcttcctacctcagcctcccgagtagctgggaccacaggygtgcgccatcacactcagctaatttttgtattttttgtagagatcgggttctgccatgttggccaggctggcctcaaactcctggactcaagcaatccacccaccttggcctcccaaaaagctggtattataggtgtcagccatcaccctggccctaaattctgatttattcaattatcctgcaattctccttcagtctcaagcaagaaggaaagtcctttgtaactttttacctaaggaatttttacagagcccaaaacatatacatatgaagtcaggggctcttctggtctctgcaaaaccaaagtccatagaagacataaccctgtgtgtcttgcagtagaagtagagaggaaaatatttttaagaatgggagagagagagcacagattctggagactggacaggggacagacgttggtgggttctga

SEQ ID NO: 3522 - DNA, 2479 bp, Homo sapiens
cattctctaatttggtaaaataatttacaaattttctaaaatagtttttctgtccatttgaaactaatttttctgtatgtttcttcagttacttttttcaagggaaataattaatctgatttctattcttttaaaattatagtatcttttaaaaaatctaccagtaggggttgtttatcttcttattttctcattcttacaggatagcagctgtttcctgaattttggcttataatcagaagttctattaagaaattggatttctgtccaattatttcatttagttcaggaagaactgaatattttatacttactgtaaatttgcactatcagttcagatatctatcagccaggaaggaagaggatggtggagaacaaaagatttcaactcaatagaaagttttattctcccactgcacaacacaattgcaagttggaaaaataagtgcacttttatacataatggtactgaccatgagtctgcagtattgaagcttttctctatttacgtattattttgcccatttttttctagcaatttgaaagttgggggaaaaagactttattttcacttagactggtttcagttatacacaaaattgcactagctgaatatttccaaaaatgttcattaaaattgataccaattaccaatttgaaggtatacatcaactttaacaatagataaataagaataaatattttagtcatattttgccaacatttatataatttgaggcggcctgatgcttttcaatgaatcagtaatttatgtgattttaatttcaaataaattgtacagaagacttttccaaaaaaaaatagcctttagtacatcacaaaactcaaagttctattgtaaaatacaataactttagcaatattcagcagtaagaaatatgatatttgtttaatttacactgtatggcaaatatgctcagtggatttcacacatgatttctaattatcccaacaactgtgggaatgttaactttttaacactggtacagtgaggtgagataatgatatacttgcttttaaagtgcactctcataactggtatgagaaaagcatccaatttcattttactgcctcacttcatctttgatccatattcccttttctctctacatagcatttcttttaatgtgtttcatccatcaccttagataggtattgcttttgttaatatatagtactattttgtatgcatgtgtttttaatttgcataagtaatattggatcatagatttcattctgtttcttacttttgagagataggaaaattaaggttcaaagaggccaagtagcttccacaggagtacataacctgcatatttatacttgagttccacactacaatgtgtttaactctgaaagcccttgctattttcagtgcatcacacaattgattcctaatataagtgaacccgtggcatagggaaacattattttataggagtttcattgtatttaactctgcatatattgaagaaaaaagttaaaccttttgagattatagcaataaatactatgccatttgatcactttctatttgtacttaaatatgtactcattgtaactcaatataactttaaaataatggcaatatatgcagkttccatattgtattcatttctataaatgcagttaacctaagtttataaagtttgaaaattacgtcttgtggaacaagaactagacaaaatacatgtctgaatggtaaagtatattcattataaaactgagtctgctacatcactttcaggaaacttcagcctggtggattgtttatagtttgcaacaacaacccttttcatgcagtttttgccctccttttgaccaaaaaaaaaaaaacatttccataggatgataatttgtgccttattttcttttaggaataaataaataacttataaaataaagtttgaattatttcatgggccatgtgccttctaaacattggtgacttaataaaccattttccaaaagaactaagaagaaataagttgtagtcaagacaagaaaaacatcaacagcaactttttctaagcatgtacacagccaacttgccaagggctctgtgaccacccacctgattcctcatcaaggcagttgcctggtttccttgcagcagtgtgtttcccaaggtgccaggcatcttcaatctggagatgcaggtgatgtaatgacttgctgtaagctaggtgctctttcctgctactgcaataaaaggccttggagctaaggggctctgtgacagttagtgaggttaaggtgcagcttgtctaaaatgaacatcctaactctagataacaaggtgtaggagagtataagaagaccaggcttataaaggatagggacctatgctaatcagtggaaagtttcagcattaacaggtattcttggacctagggatttttgttctctgagaatattctgattatacttgatagccaggcgagagggagctctcata

SEQ ID NO: 3523 - DNA, 2479 bp, Homo sapiens
cattctctaatttggtaaaataatttacaaattttctaaaatagtttttctgtccatttgaaactaatttttctgtatgtttcttcagttacttttttcaagggaaataattaatctgatttctattcttttaaaattatagtatcttttaaaaaatctaccagtaggggttgtttatcttcttattttctcattcttacaggatagcagctgtttcctgaattttggcttataatcagaagttctattaagaaattggatttctgtccaattatttcatttagttcaggaagaactgaatattttatacttactgtaaatttgcactatcagttcagatatctatcagccaggaaggaagaggatggtggagaacaaaagatttcaactcaatagaaagttttattctcccactgcacaacacaattgcaagttggaaaaataagtgcacttttatacataatggtactgaccatgagtctgcagtattgaagcttttctctatttacgtattattttgcccatttttttctagcaatttgaaagttgggggaaaaagactttattttcacttagactggtttcagttatacacaaaattgcactagctgaatatttccaaaaatgttcattaaaattgataccaattaccaatttgaaggtatacatcaactttaacaatagataaataagaataaatattttagtcatattttgccaacatttatataatttgaggcggcctgatgcttttcaatgaatcagtaatttatgtgattttaatttcaaataaattgtacagaagacttttccaaaaaaaaatagcctttagtacatcacaaaactcaaagttctattgtaaaatacaataactttagcaatattcagcagtaagaaatatgatatttgtttaatttacactgtatggcaaatatgctcagtggatttcacacatgatttctaattatcccaacaactgtgggaatgttaactttttaacactggtacagtgaggtgagataatgatatacttgcttttaaagtgcactctcataactggtatgagaaaagcatccaatttcattttactgcctcacttcatctttgatccatattcccttttctctctacatagcatttcttttaatgtgtttcatccatcaccttagataggtattgcttttgttaatatatagtactattttgtatgcatgtgtttttaatttgcataagtaatattggatcatagatttcattctgtttcttacttttgagagataggaaaattaaggttcaaagaggccaagtagcttccacaggagtacataacctgcatatttatacttgagttccacactacaatgtgtttaactctgaaagcccttgctattttcagtgcatcacacaattgattcctaatataagtgaacccgtggcatagggaaacattattttataggagtttcattgtatttaactctgcatatattgaagaaaaaagttaaaccttttgagattatagcaataaatactatgccatttgatcactttctatttgtacttaaatatgtactcattgtaactcaatataactttaaaataatggcaatatatgcagtttccatattgtattcatttctataaatgcagttaacctaagtttataaagtttgaaaattacgtcttgtggaacaagaactagacaaaatacatgtctgaatggtaaagtatattcattataaaactgagtctgctacatcactttcaggaaacttcagcctggtggattgtttatagtttgcaacaacaacccttttcatgcagtttttgccctccttttgaccaaaaaaaaaaaaacatttccataggatgataatttgtgccttattttcttttaggaataaataaataacttataaaataaagtttgaattatttcatgggccatgtgccttctaaacattggtgacttaataaaccattttccaaaagaactaagaagaaataagttgtagtcaagacaagaaaaacatcaacagcaactttttctaagcatgtacacagccaacttgccaagggctctgtgaccacccacctgattcctcatcaaggcagttgcctggtttccttgcagcagtgtgtttcccaaggtgccaggcatcttcaatctggagatgcaggtgatgtaatgacttgctgtaagctaggtgctctttcctgctactgcaataaaaggccttggagctaaggggctctgtgacagttagtgaggttaaggtgcagcttgtctaaaatgaacatcctaactctagataacaaggtgtaggagagtataagaagaccaggcttataaaggatagggacctatgctaatcagtggaaagyttcagcattaacaggtattcttggacctagggatttttgttctctgagaatattctgattatacttgatagccaggcgagagggagctctcata

SEQ ID NO: 3524 - DNA, 2241 bp, Homo sapiens
ttgttgttaagtctgacatttctggagaaggttgtggggtagatagatcatgggcactgttcagttcatcctgccaagtgtccagttggagcggtgatatgaattagtatcatctcagtcacttgtaagcattatccatcacaggctcccaagatgggtctcatcatggcaagtagtctccatcgagagaaccaggaatggaaaraaggtgtggctgattcacctcaactgaatcatgtggagggtggaaggaaagagaaaaccaaatgctgctagctaggagaaagtgtctgttcttccttccacaagaaaggataagggctggacaaaagaaaaaaagcactgaatagggttttaagaacactaaactttacagagcattttagaagaatgttctctttcagagaacatgaggattaaatagaccatattaagaatttttttcgacggggtgcagtggctcatgcttgtaatcccaacactttgggaggctaagggaggaggattgcttgagcccaggagtttgagaccagcctggcaacatagcaataccccatttcagaaaaataaaaattaattagctgggcacagtggtgcgtgcctatagtcctggctactcaggaagctgaggcaggaggatcacttgagcccaggagtttgaggctccaatgagctatgatctcaccactgcactccagcctgggtgacagagcaagactctgtttcttaaaaatgaaattttaaaaaaagaatttgtttttgtcattggcaatatatttgtttcacacaacttatggtagtagaaaagaaaccttgaaaaataagtggtatgtaaactattcacacggaatgagctgtgtgattcaaagttagaataggataccttcagctgctaaggtcaaattagcagccttagggttaaatttaaggagtgggaacttccctaaaccccatcctcatttcttccacattatctacctataataaggacattcaaagggaaagctttcctataatggcagcctgacagaatttgatagaaactagcaagcttctggaatcggaatagaactaagtctagctctaaacagactgtctatggcgatggatccttttagatgctacttcaaattctatggcccatgttaaccagcgagcctggggctcccagctgaaacctattcccatcaagggaggaatcttgggacctagtttcactgaagcacatttcagttggggaacaaaatatccttttcagggaaatttgctaccaagggatttagtagaacttgctagagactctactcccagagctgaaaagacagtggagccaaaagacaagacagatctcctagacctttccattagtgaccccctcctgactcccatttattgacatttagatgggagtctcagctgattattttctgttttggttacaagggggctaaaatagccacctctcttcatataaaactcaattgaaaaaaaaaagaatgagtttcccctctgattgttgtatgcctttgacataatactttgaggtagaaaaacagtgatgttcttatgcatgtagaatgagtatctgtagaccagccatcaggtcttgctatggaacgtgggcattttagaaggatataagagaaatgtgacaaaaatccagcctttggtggtagactgggaaagatttcagccagctgacaatgtgtgactgaaaataagtattgcttgtgtgatgtgaagagggtgtacccaacgccggggcactgacatcaacacacacaggcaagaaaatagccctccagctagggccccagtgagtcctgccctacccagaagaatcgggaaatacaactctgggtatacgggaagttattaacaaaaccaaggtgtgggccagatgcagtgactcacccctgtaatcccagcactttgggaggtcgaggcaggtggatcacctgaggtcaggaattcgagaccagcctggccaacatggtgaaaccccatctctactaaaaatacaaaaattagctgggcatggtgggggcacctgtaatcccagctactcaggaggctgaggcaggagaatcatttgaacctgggaggcagaggttgcagtgagccgagattacatcattgcactccagcctgggtgacaagagtgagatctgtctcaaaacaaaacaaaaccaaggtgtgggaggaggcaaagcagggtgaaggaaaacaaagaaaggggtc

SEQ ID NO: 3525 - DNA, 2241 bp, Homo sapiens
ttgttgttaagtctgacatttctggagaaggttgtggggtagatagatcatgggcactgttcagttcatcctgccaagtgtccagttggagcggtgatatgaattagtatcatctcagtcacttgtaagcattatccatcacaggctcccaagatgggtctcatcatggcaagtagtctccatcgagagaaccaggaatggaaagaaggtgtggctgattcacctcaactgaatcatgtggagggtggaaggaaagagaaaaccaaatgctgctagctaggagaaagtgtctgttcttccttccacaagaaaggataagggctggacaaaagaaaaaaagcactgaatagggttttaagaacactaaactttacagagcattttagaagaatgttctctttcagagaacatgaggattaaatagaccatattaagaatttttttcgacggggtgcagtggctcatgcttgtaatcccaacactttgggaggctaagggaggaggattgcttgagcccaggagtttgagaccagcctggcaacatagcaataccccatttcagaaaaataaaaattaattagctgggcacagtggtgcgtgcctatagtcctggctactcaggaagctgaggcaggaggatcacttgagcccaggagtttgaggctccaatgagctatgatctcaccactgcactccagcctgggtgacagagcaagactctgtttcttaaaaatgaaattttaaaaaaagaatttgtttttgtcattggcaatatatttgtttcacacaacttatggtagtagaaaagaaaccttgaaaaataagtggtatgtaaactattcacacggaatgagctgtgtgattcaaagttagaataggataccttcagctgctaaggtcaaattagcagccttagggttaaatttaaggagtgggaacttccctaaaccccatcctcatttcttccacattatctacctatartaaggacattcaaagggaaagctttcctataatggcagcctgacagaatttgatagaaactagcaagcttctggaatcggaatagaactaagtctagctctaaacagactgtctatggcgatggatccttttagatgctacttcaaattctatggcccatgttaaccagcgagcctggggctcccagctgaaacctattcccatcaagggaggaatcttgggacctagtttcactgaagcacatttcagttggggaacaaaatatccttttcagggaaatttgctaccaagggatttagtagaacttgctagagactctactcccagagctgaaaagacagtggagccaaaagacaagacagatctcctagacctttccattagtgaccccctcctgactcccatttattgacatttagatgggagtctcagctgattattttctgttttggttacaagggggctaaaatagccacctctcttcatataaaactcaattgaaaaaaaaaagaatgagtttcccctctgattgttgtatgcctttgacataatactttgaggtagaaaaacagtgatgttcttatgcatgtagaatgagtatctgtagaccagccatcaggtcttgctatggaacgtgggcattttagaaggatataagagaaatgtgacaaaaatccagcctttggtggtagactgggaaagatttcagccagctgacaatgtgtgactgaaaataagtattgcttgtgtgatgtgaagagggtgtacccaacgccggggcactgacatcaacacacacaggcaagaaaatagccctccagctagggccccagtgagtcctgccctacccagaagaatcgggaaatacaactctgggtatacgggaagttattaacaaaaccaaggtgtgggccagatgcagtgactcacccctgtaatcccagcactttgggaggtcgaggcaggtggatcacctgaggtcaggaattcgagaccagcctggccaacatggtgaaaccccatctctactaaaaatacaaaaattagctgggcatggtgggggcacctgtaatcccagctactcaggaggctgaggcaggagaatcatttgaacctgggaggcagaggttgcagtgagccgagattacatcattgcactccagcctgggtgacaagagtgagatctgtctcaaaacaaaacaaaaccaaggtgtgggaggaggcaaagcagggtgaaggaaaacaaagaaaggggtc

SEQ ID NO: 3526 - DNA, 1124 bp, Homo sapiens
aaaagtaacagaagggcccagcatgttggcttctgcctataatcccagtactttgggagatcgagatgggcagatcacttgagctcaggagttcgagaccagcctcggcaacatggtgaaaccccatctctacaaaaatacaaaaattaggcgggcgtagtggtgtgcacctgttgccccagctacttgggaggctgaggtagaaggattgcctgagcccggaaggtggagtttgcagtgagctgagattgtgtcaatgcacaccagcctgggcagcagagccagaccctgtctcaacaaacaaacaaamaaacaaacaaaaaaaaaaaaaaaaaagggagagagagagaggaaataagtaacagaactagcagcatttcatattccagctaccttttccccatttacaaactcctgagtctgaaacatttgttatatttggttttgagtgaaaccagaatcaataacaaatttgttttgcattcattcctcaatatatttactgcgtgaatatggatcagcagggatggtgtgagactgccacactcaagctgggcgtttgtgcaatccacatcaacacttccaatactctcaagcaaggccaataaatcataaagctcatgtgctactgaattcagcacttcaccatcggcaaaatcaatggagatgcttccagaattttcagttttacagcttcttgaacaaatcttttcccctagtccctctctttgtctgtctggctaaggttgaggcatggacactgggtttgcctcctctccatccaccttctccatccccttttgagaaatgaccacgtggttgaggtcgatcttgtagtcaagccaattgtggtttttccatccctattcccagtgaggcaacttgttgcatgtcattcccctggcaaccaagactggttcagtttgggttgattcgatgctagcagaagttttttggggcttctaggtaaagcgtcctcatccttaagtgaaagtctcaaagagtcatctttccccatcccaaactgattctagaacttctgcaggcatcttattatagatctgatgaagtaactgtcctagaagaatcacagggaggtggagctccttccctatccctgcact

SEQ ID NO: 3527 - DNA, 1124 bp, Homo sapiens
aaaagtaacagaagggcccagcatgttggcttctgcctataatcccagtactttgggagatcgagatgggcagatcacttgagctcaggagttcgagaccagcctcggcaacatggtgaaaccccatctctacaaaaatacaaaaattaggcgggcgtagtggtgtgcacctgttgccccagctacttgggaggctgaggtagaaggattgcctgagcccggaaggtggagtttgcagtgagctgagattgtgtcaatgcacaccagcctgggcagcagagccagaccctgtctcaacaaacaaacaaacaaamaaacaaaaaaaaaaaaaaaaaagggagagagagagaggaaataagtaacagaactagcagcatttcatattccagctaccttttccccatttacaaactcctgagtctgaaacatttgttatatttggttttgagtgaaaccagaatcaataacaaatttgttttgcattcattcctcaatatatttactgcgtgaatatggatcagcagggatggtgtgagactgccacactcaagctgggcgtttgtgcaatccacatcaacacttccaatactctcaagcaaggccaataaatcataaagctcatgtgctactgaattcagcacttcaccatcggcaaaatcaatggagatgcttccagaattttcagttttacagcttcttgaacaaatcttttcccctagtccctctctttgtctgtctggctaaggttgaggcatggacactgggtttgcctcctctccatccaccttctccatccccttttgagaaatgaccacgtggttgaggtcgatcttgtagtcaagccaattgtggtttttccatccctattcccagtgaggcaacttgttgcatgtcattcccctggcaaccaagactggttcagtttgggttgattcgatgctagcagaagttttttggggcttctaggtaaagcgtcctcatccttaagtgaaagtctcaaagagtcatctttccccatcccaaactgattctagaacttctgcaggcatcttattatagatctgatgaagtaactgtcctagaagaatcacagggaggtggagctccttccctatccctgcact

SEQ ID NO: 3528 - DNA, 1124 bp, Homo sapiens
aaaagtaacagaagggcccagcatgttggcttctgcctataatcccagtactttgggagatcgagatgggcagatcacttgagctcaggagttcgagaccagcctcggcaacatggtgaaaccccatctctacaaaaatacaaaaattaggcgggcgtagtggtgtgcacctgttgccccagctacttgggaggctgaggtagaaggattgcctgagcccggaaggtggagtttgcagtgagctgagattgtgtcaatgcacaccagcctgggcagcagagccagaccctgtctcaacaaacaaacaaacaaacaaamaaaaaaaaaaaaaaaaaagggagagagagagaggaaataagtaacagaactagcagcatttcatattccagctaccttttccccatttacaaactcctgagtctgaaacatttgttatatttggttttgagtgaaaccagaatcaataacaaatttgttttgcattcattcctcaatatatttactgcgtgaatatggatcagcagggatggtgtgagactgccacactcaagctgggcgtttgtgcaatccacatcaacacttccaatactctcaagcaaggccaataaatcataaagctcatgtgctactgaattcagcacttcaccatcggcaaaatcaatggagatgcttccagaattttcagttttacagcttcttgaacaaatcttttcccctagtccctctctttgtctgtctggctaaggttgaggcatggacactgggtttgcctcctctccatccaccttctccatccccttttgagaaatgaccacgtggttgaggtcgatcttgtagtcaagccaattgtggtttttccatccctattcccagtgaggcaacttgttgcatgtcattcccctggcaaccaagactggttcagtttgggttgattcgatgctagcagaagttttttggggcttctaggtaaagcgtcctcatccttaagtgaaagtctcaaagagtcatctttccccatcccaaactgattctagaacttctgcaggcatcttattatagatctgatgaagtaactgtcctagaagaatcacagggaggtggagctccttccctatccctgcact

SEQ ID NO: 3529 - DNA, 761 bp, Homo sapiens
tttctatgaaatttattactagcttttaaaaaataattgataacatcctaaatgatattttaaaataattaccaatatttcccacttttggctacaatatacattcaatttttctgatacctgtatttaccttatgtcttgtgagaattctggaaaaatttccagaagttaaaatcttcagtgaataaaaataagtaacaataaatttggtagaaggtaagaagttctatatttacagggattatttartcaagtgtttaattacatcatatggcattcactatactgttgtcagcactttcttaatggtagtaaaattcctgtgctttcatttttttttttgacggggtggggggttctagtttaaattcaactccattgcaaaacacttccagttcctagtactatctctcaatctatcttctgataagaatctaactgagtaaacaaccctctgctacttttaaattgttccttaagcaagtaatctttgctaatgtaaattgcaccatttggggaaaatgtttttatttaatttataagactgggtaaaaattattatcacacaaatacttttgcattttcttttcagcctccctgagagctctgcttggtctgtgtactgctcaatttccccacccaacctggagtgggactacatcaaacttaaaagcttctgcacagcaaataagacaatcaacagagtgaaaagacaacctatacaatgggaaaagatattttgccaactatgtatctgacaa

SEQ ID NO: 3530 - DNA, 668 bp, Homo sapiens
gtataggtctaaggaattatattcaaaaattataaataactcctgcaaatcaaaaataaaacaatccaatgagaaaatgagcaaattacttgaaagagtaatcattcctcaaaagaatcagaagaaaaagtagcatacggtatggtggctytctcttttaagaaagtctccttcattaatatacaatgcccaatccattagctttttttgtttgtttttcaccttcttttaccactgactgcacaaaatataaagatgtggtttatattatactaagaaaacttgcctgtgagaaccacatgacaggtttggtgcttgtggtgttggtggtagttctttcatttttgtcttttcatattatcattactttgtttttaatatctttattatgatacaactgatatacaaagaactgcacaggccgggcatggtggttcacgcccgtaatcccagaactgggagatcaaggcgggtggatcacctgagagtcaggagtttgagaccagactgaccaaaatggtgaaaccttgtctctactaaaatacaaaaattagctgggcatggtggtgggcacctgtaatcccagctacttgggaggctgaggcaggagaatcgcttgaaccagggagacagaggttgcagtgagcagagatcgcaccattgcagtc

SEQ ID NO: 3531 - DNA, 668 bp, Homo sapiens
gtataggtctaaggaattatattcaaaaattataaataactcctgcaaatcaaaaataaaacaatccaatgagaaaatgagcaaattacttgaaagagtaatcattcctcaaaagaatcagaagaaaaagtagcatacggtatggtggctttctcttttaagaaagtctccttcattaatatacaatgcccaatccattagctttttttgtttgtttttcaccttcttttaccactgactgcacaaaatataaagatgtggtttatattatactaagaaaacttgcctgtgagaaccacatgacaggtttggtgcttgtggtgttggtggtagttctttcatttttgtcttttcatattatcattactttgtttttaatatctttattatgatacaactgatatacaaagaactgcacaggccgggcatggtggttcacgcccgtaatcccagmactgggagatcaaggcgggtggatcacctgagagtcaggagtttgagaccagactgaccaaaatggtgaaaccttgtctctactaaaatacaaaaattagctgggcatggtggtgggcacctgtaatcccagctacttgggaggctgaggcaggagaatcgcttgaaccagggagacagaggttgcagtgagcagagatcgcaccattgcagtc

SEQ ID NO: 3532 - DNA, 668 bp, Homo sapiens
gtataggtctaaggaattatattcaaaaattataaataactcctgcaaatcaaaaataaaacaatccaatgagaaaatgagcaaattacttgaaagagtaatcattcctcaaaagaatcagaagaaaaagtagcatacggtatggtggctttctcttttaagaaagtctccttcattaatatacaatgcccaatccattagctttttttgtttgtttttcaccttcttttaccactgactgcacaaaatataaagatgtggtttatattatactaagaaaacttgcctgtgagaaccacatgacaggtttggtgcttgtggtgttggtggtagttctttcatttttgtcttttcatattatcattactttgtttttaatatctttattatgatacaactgatatacaaagaactgcacaggccgggcatggtggttcacgcccgtaatcccagaactgggagatcaaggcgggtggatcacctgagagtcaggagtttgagaccagactgaccaamatggtgaaaccttgtctctactaaaatacaaaaattagctgggcatggtggtgggcacctgtaatcccagctacttgggaggctgaggcaggagaatcgcttgaaccagggagacagaggttgcagtgagcagagatcgcaccattgcagtc

SEQ ID NO: 3533 - DNA, 677 bp, Homo sapiens
gattctcccctagagccttcagagggagcatggccctgctgacacctcaatcttagacttctggcttctagaactgggagagaataaatttctttcattttaagccactaaatgtgtgctaatttgttgcagcagctctagaaaactaatatagggaccataagaattcatttgaaaaaggggttctgtgctcttaagaaggaattccactgctacaaaggttaacaaccactaagcaagtcctcattttacgcagagaagcaatttgcccaatgtcacacagcaaatcaggaataagaatggaagtgttctagaacacacctrctgcagcactgcctcccagtggggatgactagggagaccagcaggtcaccagcaggcccagctgtgcagcttctgtgttcaggttctcatgaagttaggactccacttcgccatccacctgcctagctccacggcccagaccagtctgatatggatgagctgcttgaaccctcctgaggggtggggaacttctatctaggacggtcagaacacctcagtctcgggaagccaactccatacattagtttgacttgtggattggctcttctggagacacctttaaaggtatcactgatcaatcagtagctatcacatcatctcccaaaccagcctggctctcagtttccaatgca

SEQ ID NO: 3534 - DNA, 1187 bp, Homo sapiens
tgtgtaaattattaatcttattaaatttgcrtgtcagaaaaatgactaccccaaccttaaggcttgcttttatcacaataataaggtagccaaatgctttggtccttgaatttacattttatagacaatatataacattacatgtaatagatgttttatattttcaattatttcagaggttattttactattaaagtcaaaagtttttctgctgtaatttacagccacagtttgatatttaagagtcacttattagctttctctctgcaatatttcttaccttccctctcatctcaaccctccttccatgattccttttgattgagacttaagattccattctattggaccaaggactgaagtagagaaattatttgtgtaagattatacaattggtggcagagctggacaatatacaaaacttctgaatgccaaactaaaatttctccctagccccagtactctccccaacctgatggttggtataccttcagggcaaaacagcagcagatgtgcctctaccacaaaagggttgagggagaaagtataagcaaaaagttcactccattccccttctcatgagaattttactttcagttgactccctagctctattctcctagtaacttgataaggtgatatgtgtcaactgtgttactaagcaatttgaactacttaaaaatgacccctgattggtaaattccatctgaactgggaggaatgtatacctaatagaaaaccacagctttgagtttctgtgagtatgttgacttttgtagctgggcaaatccatggtggggaccctggaagctatgcctatggaattattacaagagattccagcccctggggtgtgaagttttacgccagggcagctcctgtacccacccggtgtgaacctcttttccttgtattgtatctgcactccgtaaactaaggactaaagaaaacagctatgtgttctgcatgggtatggcaagggctcctacaggaagagaaatgtctgatgttgccttgctggaagctgtttcctgtcttatatttttctaagtacattcatgccaaatatggtctgtattagtctcatgagtatgacagcctttagttgagcccaagaccaaccccttgtgggcactgcagaaggtgtctgagctagaattgggcaggctctgtgtctcatgccatgc

SEQ ID NO: 3535 - DNA, 790 bp, Homo sapiens
cccacatgtggctcccgagatgggagctgctccttgcataccctgtgccctccggagggtgcacctggagtgcttcctcacacatggctttctcccctccccrcccttcccctcccttcggtctgtttctcttcccatggtctaagcatttattttatgccattctttatgtaacaaccaccccagaaggcggatgtgaacacttggatttgggattttcaaattccttatctttcactgagtcattttccattttattcaagagcacatggagaaaccaagggatatcttaatggaaggagacctttcctgggtagaacaggaagactgaagatgaaggattcctctgggatataaatggctcccttgagactaattacaaggcctttgggtgggccaccagcccacactctgaacctgggggacaggtcaagctgaggccctgagacgttacccagtgggtcagtggtggcacgtgggtgaaggctgatgggtaactctacctgaaaaagcccttgcatccttcacatgtcatgacattgaagtgatagccagtggccttgtccccacatacacggcagatttggggacctccgacttcctcatctgcgttgacactgggctttccaggaacagactctgtgtcctcacagtgtacaaagtcagcatggttccagctttctttgggtctcacctccaggtttgcttctgggcctcttggactagaaatgagaaaaccacagagaatgaaaagactggacagggatgtgtagaggcctcagaggaaaca

SEQ ID NO: 3536 - DNA, 790 bp, Homo sapiens
cccacatgtggctcccgagatgggagctgctccttgcataccctgtgccctccggagggtgcacctggagtgcttcctcacacatggctttctcccctccccgcccttcccctcccttcggtctgtttctcttcccatggtctragcatttattttatgccattctttatgtaacaaccaccccagaaggcggatgtgaacacttggatttgggattttcaaattccttatctttcactgagtcattttccattttattcaagagcacatggagaaaccaagggatatcttaatggaaggagacctttcctgggtagaacaggaagactgaagatgaaggattcctctgggatataaatggctcccttgagactaattacaaggcctttgggtgggccaccagcccacactctgaacctgggggacaggtcaagctgaggccctgagacgttacccagtgggtcagtggtggcacgtgggtgaaggctgatgggtaactctacctgaaaaagcccttgcatccttcacatgtcatgacattgaagtgatagccagtggccttgtccccacatacacggcagatttggggacctccgacttcctcatctgcgttgacactgggctttccaggaacagactctgtgtcctcacagtgtacaaagtcagcatggttccagctttctttgggtctcacctccaggtttgcttctgggcctcttggactagaaatgagaaaaccacagagaatgaaaagactggacagggatgtgtagaggcctcagaggaaaca

SEQ ID NO: 3537 - DNA, 790 bp, Homo sapiens
cccacatgtggctcccgagatgggagctgctccttgcataccctgtgccctccggagggtgcacctggagtgcttcctcacacatggctttctcccctccccgcccttcccctcccttcggtctgtttctcttcccatggtctaagcatttattttatgccattctttatgtaacaaccaccccagaaggcggatgtgaacacttggatttgggattttcaaattccttatctttcactgagtcattttccattttattcaagagcacatggagaaaccaagggatatcttaatggaaggagacctttcctgggtagaacaggaagactgaagatgaaggattcctctgggatataaatggctcccttgagactaattacaaggcctttgggtgggccaccagcccacactctgaacctgggggayaggtcaagctgaggccctgagacgttacccagtgggtcagtggtggcacgtgggtgaaggctgatgggtaactctacctgaaaaagcccttgcatccttcacatgtcatgacattgaagtgatagccagtggccttgtccccacatacacggcagatttggggacctccgacttcctcatctgcgttgacactgggctttccaggaacagactctgtgtcctcacagtgtacaaagtcagcatggttccagctttctttgggtctcacctccaggtttgcttctgggcctcttggactagaaatgagaaaaccacagagaatgaaaagactggacagggatgtgtagaggcctcagaggaaaca

SEQ ID NO: 3538 - DNA, 790 bp, Homo sapiens
cccacatgtggctcccgagatgggagctgctccttgcataccctgtgccctccggagggtgcacctggagtgcttcctcacacatggctttctcccctccccgcccttcccctcccttcggtctgtttctcttcccatggtctaagcatttattttatgccattctttatgtaacaaccaccccagaaggcggatgtgaacacttggatttgggattttcaaattccttatctttcactgagtcattttccattttattcaagagcacatggagaaaccaagggatatcttaatggaaggagacctttcctgggtagaacaggaagactgaagatgaaggattcctctgggatataaatggctcccttgagactaattacaaggcctttgggtgggccaccagcccacactctgaacctgggggacaggtcaagctgaggccctgagaygttacccagtgggtcagtggtggcacgtgggtgaaggctgatgggtaactctacctgaaaaagcccttgcatccttcacatgtcatgacattgaagtgatagccagtggccttgtccccacatacacggcagatttggggacctccgacttcctcatctgcgttgacactgggctttccaggaacagactctgtgtcctcacagtgtacaaagtcagcatggttccagctttctttgggtctcacctccaggtttgcttctgggcctcttggactagaaatgagaaaaccacagagaatgaaaagactggacagggatgtgtagaggcctcagaggaaaca

SEQ ID NO: 3539 - DNA, 2374 bp, Homo sapiens
  misc_feature (1)...(2374): n = A,T,C or G
tctactttcatggctactactcagcattatgctgaatggcaaagaaaaaccaataagacacaaaaaattaaggtttgtaaagattggaaaggaaggagcaaaactcttactatatatagatgatatgtttgtctaactagaaattccaaaggaatcaactgataagcttttataactattaagagaattccataaggtaactaggcaaaatatcaaaacacaaaatagattttctatttattgggggaaaaaatcaagtagaaaaggtaaacattatagtggaaattggctcaggaataggaaataaatacaaaaggacacagaaatggacatgtgtaagtgggaatttagtacatgatagaggtgatatttcaaacaaataggaaaaagatggacttttcaataaatagtattgaaataatgtattgcaataagtaacaaagtgaataaagactaactttttaaataaaagtattacaggaaggtgcaccaaagtagcttcataattttggaagttgagaaatcttttaaaaatcagcctcaaagagtaaaatccagaaagagggaaactaacagattcaactgcatcaaaataacaacaacaataatagtaaaaatttctgttggctaaaaagtatgatttaaacaaagcttagagagaatattacacacatatcaaataatttgcattgagaataaataaaaaactcctacaaagaagaaaaaaaatccgacataaaataagctaaggatatgaataggtaatttaagaagagaaatacaatggccaagaggggtcctataaaaagaatgctcaacttcattaataatcagggaaattaaaatattgaaataatgggttgtcatttgcactaattcaatggaaaaaataataaaatactgaataaacagcaagcattgtttggagtgtggargaacagtaactatccttctctgctggtgggagtacagtcggttcgggtactgtggagggctgtttggcagccaaaaattgaaccacatatatcctgtgatgtggcaattcaacgtcttagtagttcctctagtgcaatacgtgcacatgtctagaagcagacaaacacagtgaggttcattggtaagactgaaaaattggaaaagcttaaatatctatcgaaaagaaaacggctaaataaaagaagtgtacactgtgaaatatgacgtagcagttaaaataaatgaagtagagctctatacagatatggaaagtctccaagtgctgctatgagggaaaaacagagggtttnnnnnnnnnnnnnnnnnnnnnnnnnnnnnnnnnnnnnnnnnnnnnnnnnnnnnnnnnnnnnnnnnnnnnnnnnnnnnnnnnnnnnnnnnnnnnnnnnnnnaattcatatattacttatttgctttttaaaagcataaacattgcaaaagatctgaaataagacacaaatcttaggcatgccctactgtacgtggtagaaatatgacctattacttatttccttagatttttctgtataattatatttttaaatgaaaataaaacaaaggttggcttattgtggttcagtgatcaaacaggaaacttgttccagcctccctttcctttacctgcttttgcaaggccacatttagaggtgctaggcacctaagtgtgctggcatcctcaaaacttgatccagggaggcatacgttggcttaggtctcagccagtgtctcggagctggtcaggagacatatccagtggccacatcctcctgcctgacctacaggtattgtgtctttgaatgcttaaagttgcaggtaagagatagccctaaattttacattcactatggggacaaaacccaaagatggtgaattctcagctagtgattagtgtcttcattttctgttattttttaaaaaagtatgtggccaagtggctcacacctgtaatcccaacactttgggaggctgaggcggaagaattgcttgaaaccaggagtttgagaccagcctgggcaacatggtgaaaccttgtctctacaaaaaaataaaaataaattagccaggtgtggtggcacatgccagtagtcccagctacttgggaggctgaggtggggggatcatttgtgcctgggaggtcaaggccacagtgagctgtaatcacatctctatactccagcctgggcaacagagtgagaccttgattcacaaaaaagaaaaaaaaaaagtatatatttttcacttttatcgaacaaattccttaccccatatttttcccacctcagggctctgaaaatgccttgtatttcagtatataaatttgtttattacagagcattccaaggtgtgattattcagtagtcacttaatattcttcaaatgc

SEQ ID NO: 3540 - DNA, 2374 bp, Homo sapiens
  misc_feature (1)...(2374): n = A,T,C or G
tctactttcatggctactactcagcattatgctgaatggcaaagaaaaaccaataagacacaaaaaattaaggtttgtaaagattggaaaggaaggagcaaaactcttactatatatagatgatatgtttgtctaactagaaattccaaaggaatcaactgataagcttttataactattaagagaattccataaggtaactaggcaaaatatcaaaacacaaaatagattttctatttattgggggaaaaaatcaagtagaaaaggtaaacattatagtggaaattggctcaggaataggaaataaatacaaaaggacacagaaatggacatgtgtaagtgggaatttagtacatgatagaggtgatatttcaaacaaataggaaaaagatggacttttcaataaatagtattgaaataatgtattgcaataagtaacaaagtgaataaagactaactttttaaataaaagtattacaggaaggtgcaccaaagtagcttcataattttggaagttgagaaatcttttaaaaatcagcctcaaagagtaaaatccagaaagagggaaactaacagattcaactgcatcaaaataacaacaacaataatagtaaaaatttctgttggctaaaaagtatgatttaaacaaagcttagagagaatattacacacatatcaaataatttgcattgagaataaataaaaaactcctacaaagaagaaaaaaaatccgacataaaataagctaaggatatgaataggtaatttaagaagagaaatacaatggccaagaggggtcctataaaaagaatgctcaacttcattaataatcagggaaattaaaatattgaaataatgggttgtcatttgcactaattcaatggaaaaaataataaaatactgaataaacagcaagcattgtttggagtgtggaggaacagtaactatccttctctgctggtgggagtacagtcrgttcgggtactgtggagggctgtttggcagccaaaaattgaaccacatatatcctgtgatgtggcaattcaacgtcttagtagttcctctagtgcaatacgtgcacatgtctagaagcagacaaacacagtgaggttcattggtaagactgaaaaattggaaaagcttaaatatctatcgaaaagaaaacggctaaataaaagaagtgtacactgtgaaatatgacgtagcagttaaaataaatgaagtagagctctatacagatatggaaagtctccaagtgctgctatgagggaaaaacagagggtttnnnnnnnnnnnnnnnnnnnnnnnnnnnnnnnnnnnnnnnnnnnnnnnnnnnnnnnnnnnnnnnnnnnnnnnnnnnnnnnnnnnnnnnnnnnnnnnnnnnnaattcatatattacttatttgctttttaaaagcataaacattgcaaaagatctgaaataagacacaaatcttaggcatgccctactgtacgtggtagaaatatgacctattacttatttccttagatttttctgtataattatatttttaaatgaaaataaaacaaaggttggcttattgtggttcagtgatcaaacaggaaacttgttccagcctccctttcctttacctgcttttgcaaggccacatttagaggtgctaggcacctaagtgtgctggcatcctcaaaacttgatccagggaggcatacgttggcttaggtctcagccagtgtctcggagctggtcaggagacatatccagtggccacatcctcctgcctgacctacaggtattgtgtctttgaatgcttaaagttgcaggtaagagatagccctaaattttacattcactatggggacaaaacccaaagatggtgaattctcagctagtgattagtgtcttcattttctgttattttttaaaaaagtatgtggccaagtggctcacacctgtaatcccaacactttgggaggctgaggcggaagaattgcttgaaaccaggagtttgagaccagcctgggcaacatggtgaaaccttgtctctacaaaaaaataaaaataaattagccaggtgtggtggcacatgccagtagtcccagctacttgggaggctgaggtggggggatcatttgtgcctgggaggtcaaggccacagtgagctgtaatcacatctctatactccagcctgggcaacagagtgagaccttgattcacaaaaaagaaaaaaaaaaagtatatatttttcacttttatcgaacaaattccttaccccatatttttcccacctcagggctctgaaaatgccttgtatttcagtatataaatttgtttattacagagcattccaaggtgtgattattcagtagtcacttaatattcttcaaatgc

SEQ ID NO: 3541 - DNA, 697 bp, Homo sapiens
ttacccagtctcaggtatttatttatagcagtgagagaacagactagtgcaatgccctctgataattattgacagaaaacataaatatctccaatgctggttcttaaaaataggcaattaaaaaattaaaaaattatatatatatatatatatatatatatataatttttaaaaaataggatatatatcatttttaaaaaaataggccaggcgtggcggctcacgcctgtaatctcagcactttgggaggccgaggtgggcagatcacttgagatcaggagtttaagaccagcctggccaacatggtaaaaccccgtctctactaaaaatacaaaaattagccaggcatgrtggtgcatgcctgtaatcccagcaacttgggaggctgaggcgtgagaatcacttgaacccagaaggtggaggttccagtgagctgagattgtgccactgcactccagcctgggtgaaaagagagtctccgtctcaaaagaaagaaaagaaaaaagaaaacataaatatatgcacactaatgccttttcccatgggtccatccacatatgtcttctccagacctcctttctccagtctttcaatcttcttccttccaggccccagaccagccagccaagctattcttcatggtccaggagtccatatatatcttcacctctgaccactttgccatccatacaaattt

SEQ ID NO: 3542 - DNA, 904 bp, Homo sapiens
tgcatataaaagagaacctctaaatctggttttaagaacaaaggtgaaatagtctcctgacttttatctgggcgtcctctcctcattttttcctgcaatgcagaatttttagtaaatggcaaaatcatatgtctaaacattctaagagtatgatgttatttctgccaaaatttggtgcagtcttagcaagttttgatgccaaaccaacaccaaatgtggcaaagtaggttacaggacaagaacagagtttgcatataatcaaggcccttgatgtctgacttttatttgcttctgtgggaatatatgaaaatattcaaatgagcacaaacaatatttattcagagctgcctatatattcagagctggctatagcaagggagtcagccaccatcatttgtatttggcagagactcaaacactgtcaggggagtggaaacattttgtattgaaaaaaagaaggctcaggtatgctttgattagaagttgttggcaggaggaagctggatttaggttaactagaaacggggcatattagttgactgatatggggaacatatatatatatwttttttttccaaggatagattctgagttggaggcaggagcaaacaattaggaagctggcagtcattgacacatcctgactctttggaccattgctgttgcccttgtgttttacattcctggtctgcttgctacagagattgtgggtcagagtgtttccatatatggtctagtcattgttttataaacagatttttattcctccctttctcttccacactgagaaaaaattccatagcaaaatttaattctgaactgtttgcttttcttcaaaacttttattatttaagagtaatcacagtctgcaattctgggcttgttattgagccgctcttaaccc

SEQ ID NO: 3543 - DNA, 641 bp, Homo sapiens
cacacctctcttctcatttcacttctctcacccctcctccttatttctctttcagcaatccatccttgcatttttgtccttgttgctgtttttgtaacttgggttgaacatactgaaatgacaaatgtatttttccacatgttacatatccaaagtgataggcatgccatggtcatcactggtctcaaggatcaaacagttcaaatgattagacaaacaacatatgggacatgtggacagatcaaggtaataatatggctaattgtcacagaggctgacctagaagaaacagtgcaattgtgctacagatttatagaatcttagagtatattatcaatccaaatggacttagggatccaactacttatgactctacattctcagatgataaataagatgaataaagtggcttttaaaatgttccaccagctacactttaaaaaattttgagtgcatcaatctattttcacccacatttaatcatatagcagtgattaaaaacagtgattaaaaacacaagcctggagagaggccaaggtttgatccttgtttactaggccgtgtgaccttggataaggtacttctcatctctgagcttcagtttctttgtctgggttattgtaaggaytaaatgagataat

SEQ ID NO: 3544 - DNA, 616 bp, Homo sapiens
cagtgagccgagatcgcgccactgcactccagcctgggcgacagagcaagactccgtctcaaaaaaaaaaaaaaagtgcaaacatttgtgtgtgtgtgtctcatgcacacgcacacacactctgcaggaaattaaagagtgccaatatytgaaaaatctccctacaagaaatcagagagtgcccacgatttgaaagaaaatctggatttcaacattatcctttgctgtacaaatcagtggaagtgtccacattactgtctccaacatagcacaaggaaagtgattcccctcccagacaagaggtttctgacacttgtctttattgccccatcataaattcataaagggatgtccgctgtaaccagttggcaagttcactgcataaacatcaacaccaatttaatgactgtgtacacatcgtaaactagagaatctttatacaaagaaatcagataaatcaaacatgagctgaggctaaggagaaagcaattaaagctttaggttaaggtggctgcgggagggcactgtgtcacgttagagcagagaacagaaaatgtgttaatacaactgcagtatgtataattaaattaattagtaatataaaatgtgtttaaag

SEQ ID NO: 3545 - DNA, 565 bp, Homo sapiens
aaaataactagtgtgatttctgttttctgactggactgtaactattacacaggatgctttcacaaaatatctgtgagcataaacatttcaggaagccaggccaaggggtgtgtggaaggtatgcttggagatatgcttgatgatggtaaagtgtgtaccccaagatttagataagaaaataaaactttctggactacagtactgccagatcactcagtgtggggtggggtgtgtgtggtagagagtacacacaaggaaatgggagatggtcaggtgccacggctcacagctataatcccagaactttgggaggccaaggcgggtggatcactcaaatccaggagtttgagatgagcctgggcaacatggcaaaaccctgtctctacaaaaagtacaaaaattagccaggcwtggtggtacatgcctgtagtcgcagctacttgggaggctaaggcaagaggatcatttgaacctggtatgcagaggttgcagtgagccaagattgtgcctctgcactccagtgtgggcaacggagcaagaccctgtctcaaaaaaaaaaaaaaaa

SEQ ID NO: 3546 - DNA, 642 bp, Homo sapiens
aacacaaccccttaataagagttagttctttcatttttaaagttcaccaagacagaaaactctaaggtataaaacaacagcattaggaacttggctgaaaggttcagaactactttctttttctaacatacacagagagcttctttctgcatataaatgagtgtttcatacaagtagacacttagacgaacaccctaagaaaggcaggctcaaaacagctgatattttttctgtttaattatagtctcatattcttaaaatgtttcagaatttatctgacttttaaaaacacatgagaagcatcattaccagtctaccacaaaatatgacaaagtaaaacaagatatcacccaagtgtttaccttagtttwgttctgcattgtactagtaaataaagcaatcaactataataaccaaccataataagaaagctcttacccaggccatcaaaaaaggtcagttagcagtatttgttttggaactccccacagttttatcttatcaatttgtttttccttcccttttttttagaacagcctctgcagtgaaagttaaactaaatcaagatggagacagagcaaggtactgccacaacattgtctatctttgggccccattactattttacctaaactacaatgc

SEQ ID NO: 3547 - DNA, 1343 bp, Homo sapiens
aaggtwacactaaatatacagtattcctttgcagacataacttgagttttaaataatatcatttgaaaagtaatagatacagcatgctagagttggagaaaacttagaaatcccctaacatcctaatcacacagaaatgtgagtccatgagagcttaaagagataatgatagtattaagagcaactaactttattttttgtagagatgtggtctcactctgttgcccaggctggagtgcagtggtgtgatcatagctcatagcaacctcaaactcctggttgatcaagggatcctcctgcctcagtctcctgaagagctgggactataggtgcatgccattgtgcccagctaacttttttgttttttttgtagagatggggtcttgctttgttgcccagcctagtctcgaatacctggctttaagtgattcacctgctttggcctcccaaagttctgggattacatgagtcaccatgcccagccagcaactaactctttttttttttttttttttgagatagggtgtcactctgtcacccaggctggagtgcagtggcatgatctcggctcactgcaacctccatctcctgggctcaagcgatccttctgtctcagcctcccaagcagctgtgattacaggtgtgcaccatcatgtctggctaatttttgtattttttgtagagacagggtttcaccacgttgtccagactgcagtaactaatttttaacagatggttataacgtgccaggtatacattatcaccttatgccttccaccaaattcctttacaaggtaaaagcctagtttataggtagtaaagaatggaaccttgcccaggctctcccacccttatgtctgagcccataacctccaggcctcctaaagctgtcccacgtcatacctccaactgaattggggctaactagaaggcccacattcagactctggtctgctgagctcactttcttctggtctttaggcagaaaacagaaatcagaaattaaaaaaaaaaaaaaattagaatgggacagcatttgactgagtaccaaaccatggtacacaggaaactgagaattttgacctcatacttctcccagatttgaagccttttcctgagactccttctgctccaaaccctgcccatgtttgtatgtctgtgttataaaacaaacaaacaaaaaacagaagaaaatagagaaagaaagtgtcttgagctattgttctcttgttttaagaaatcatattatactgtatcctgaaatagaaatttacagaaagtgataagtgatgtgggcttaaagttcaagctatggaaccaaaactaataaagccggtggtcac

SEQ ID NO: 3548 - DNA, 1343 bp, Homo sapiens
aaggtaacactaaatatacagtattcctttgcagacataacttgagttttaaataatatcatttgaaaagtaatagatacagcatgctagagttggagaaaacttagaaatcccctaacatcctaatcacacagaaatgtgagtccatgagagcttaaagagataatgatagtattaagagcaactaactttattttttgtagagatgtggtctcactctgttgcccaggctggagtgcagtggtgtgatcatagctcayagcaacctcaaactcctggttgatcaagggatcctcctgcctcagtctcctgaagagctgggactataggtgcatgccattgtgcccagctaacttttttgttttttttgtagagatggggtcttgctttgttgcccagcctagtctcgaatacctggctttaagtgattcacctgctttggcctcccaaagttctgggattacatgagtcaccatgcccagccagcaactaactctttttttttttttttttttgagatagggtgtcactctgtcacccaggctggagtgcagtggcatgatctcggctcactgcaacctccatctcctgggctcaagcgatccttctgtctcagcctcccaagcagctgtgattacaggtgtgcaccatcatgtctggctaatttttgtattttttgtagagacagggtttcaccacgttgtccagactgcagtaactaatttttaacagatggttataacgtgccaggtatacattatcaccttatgccttccaccaaattcctttacaaggtaaaagcctagtttataggtagtaaagaatggaaccttgcccaggctctcccacccttatgtctgagcccataacctccaggcctcctaaagctgtcccacgtcatacctccaactgaattggggctaactagaaggcccacattcagactctggtctgctgagctcactttcttctggtctttaggcagaaaacagaaatcagaaattaaaaaaaaaaaaaaattagaatgggacagcatttgactgagtaccaaaccatggtacacaggaaactgagaattttgacctcatacttctcccagatttgaagccttttcctgagactccttctgctccaaaccctgcccatgtttgtatgtctgtgttataaaacaaacaaacaaaaaacagaagaaaatagagaaagaaagtgtcttgagctattgttctcttgttttaagaaatcatattatactgtatcctgaaatagaaatttacagaaagtgataagtgatgtgggcttaaagttcaagctatggaaccaaaactaataaagccggtggtcac

SEQ ID NO: 3549 - DNA, 1204 bp, Homo sapiens
cctattgatttgacttctccaggaaactgtaagccttttgaagactgtaattctaatttactcacttatgtaatcctgtgccttccacagcacctggcacatagaacattttctctattgaagtgaaactgactatccctattacagcatccgtcacttgggagggagagcccctgctgtcccaatcctatcatcctccaggactttgtggtttatcagtgcatacagtgtgtcacctactgacccctggcaaactgagcatttgctggtggacctttagtgagcaccaggagggagaagaaatttcagttaagcattttgcaaacatctgtctgaggactgactaatgttggcctagggtccatgacaagtttccactggtctggggtaaaggacaaggaagacattctcataaagctaaattgattcagtttgaaggactgttttttttaaatctcaaattatgttcttcctgtgactttggttaagagactttcttcctgaattgatgataatggtgataggaattgtgtgtgtgtgtgtgtgtgtgtgtgtgtttgtgtgcttgcgtgtgtaggtatccttaattggcaaaattaaaaaccaagagccttatggaaattcccaaagtagtttagatattttcctttcttattaaattcactggcctggcatcaaaaacatgacctggaaaggaaagtgtatgtaaggggcaggccaagtctgtgggtaactaagagaaagacctctgtaagggttagagcagaaggcagaggctctagccacagctccgccctgaaagcagtgacctggggtcatagacttttcttcttggcgctgaggcttgttcattcgtaatcaaggcaaatgcttagctgacctccaaggtgctcacctgttctcctggtcttaggttcctgatgtttccatggcttccttggctgaaagttgtatggaggagtccttacgtatttgacattccattttctctgcagaccctgtcctacaacaaatacaacctcaaaccccaaacaagtgagaagcaggctaaagagattctgatccgccgccagaacaccttaagggagagcatgaggaaaggtcacagcctgccctggggaaagccggtacattggggctggggactgggacattccttcagtstgcaagtgtttgtcatctgctgagcctgttcctgtacagg

SEQ ID NO: 3550 - DNA, 663 bp, Homo sapiens
gggccacatcctgcagctttcaagaaagacctaagagtctgaatgctctaagcatgaataagcatttcacagaatcagaaaacgcaaaacaacctttgaggcaacgcttttccctgctaccaaagagcctatgtccccagccagggttcaacagcctagaccaggaacaccagtctctcaggccacgttcaccatagccccagggtctgtctcggggagtgtgcttctctggtgagccagaaaattctccattattccctgcttccagaaaaatctctcaaagaaatgcaattagggaaaattagttcttacattatcacatcttctgaagaggttggtctctatttctcgtaaccagmaataattattttcaaatctatttgttttttctaaacggagtggtatcttctgtctctggtgtgtgtggagcaaaaaatttaagggaatttcaataacttaggcttagacaaaacaagtgtttgactttagctctcaagagctggctttggctcccagaaggtgactaggtttagggaccaggttagggaagggagttgacagggacatggcacacttgccaccatcctgaattccttcattttacctgtgaagattatcccatttattttattattatttattttaatgtattatactactgca

SEQ ID NO: 3551 - DNA, 663 bp, Homo sapiens
gggccacatcctgcagctttcaagaaagacctaagagtctgaatgctctaagcatgaataagcatttcacagaatcagaaaacgcaaaacaacctttgaggcaacgcttttccctgctaccaaagagcctatgtccccagccagggttcaacagcctagaccaggaacaccagtctctcaggccacgttcaccatagccccagggtctgtctcggggagtgtgcttctctggtgagccagaaaattctccattattccctgcttccagaaaaatctctcaaagaaatgcaattagggaaaattagttcttacattatcacatcttctgaagaggttggtctctatttctcgtaaccagaaataattattttcaaatctatttgttttttctaaacggagtggtatcttctgtctctggtgtgtktggagcaaaaaatttaagggaatttcaataacttaggcttagacaaaacaagtgtttgactttagctctcaagagctggctttggctcccagaaggtgactaggtttagggaccaggttagggaagggagttgacagggacatggcacacttgccaccatcctgaattccttcattttacctgtgaagattatcccatttattttattattatttattttaatgtattatactactgca

SEQ ID NO: 3552 - DNA, 690 bp, Homo sapiens
  misc_feature (1)...(690): n = A,T,C or G
gtttgatttgacatatttgattccttcctaaggataaattccaagaagtggaattgctagactaatgggtagaaacctttttaaggctttttatctctatcatcaaagaggcgcaggatctcgaaacacgttttcactaagtaggactgagttgtccagaaaaagcctgaagaggctggatacatcctgcagtctgtgtagccccactcaggtaggcagggaagtacgacggtgactatcgaggttattccacagctatgtaagggtagcgagaatcgcacctgaccaagcccacactgtttttgctactataagacacacatacagaattcaagtgatattcacgagaataacacttgtgtcracgcatcttttcctgactcgctcaaggggttaatttctgggggaggcagcatggagagtatggtcaagagcacgaatcctggagtcagacagcttggccttagctccaccgtggactaaacatgttactggagcaagttacttctctctgtcctgagcttcctcattcataaaccttccaaattcaattaattcctgaaaatgcctaaccaagtgcctggaattcnnnnnnnnnnnnnnnnnnnnnnnnnnnnnnnnnnnnnnnnnnnnnnnnnnnnnnnnnnnnnnnnnnnnnnnnnnnnnnnnnnnnnnnnnnnnnnnnnnnna

SEQ ID NO: 3553 - DNA, 690 bp, Homo sapiens
  misc_feature (1)...(690): n = A,T,C or G
gtttgatttgacatatttgattccttcctaaggataaattccaagaagtggaattgctagactaatgggtagaaacctttttaaggctttttatctctatcatcaaagaggcgcaggatctcgaaacacgttttcactaagtaggactgagttgtccagaaaaagcctgaagaggctggatacatcctgcagtctgtgtagccccactcaggtaggcagggaagtacgacggtgactatcgaggttattccacagctatgtaagggtagcgagaatcgcacctgaccaagcccacactgtttttgctactataagacacacatacagaattcaagtgatattcacgagaataacacttgtgtcgacgcatcttttcctgactcgctcaaggggttaatttctgggggaggcagcatggagagtatggtcaagagcacgaatcctggagtcagacagcttggccttagctccaccrtggactaaacatgttactggagcaagttacttctctctgtcctgagcttcctcattcataaaccttccaaattcaattaattcctgaaaatgcctaaccaagtgcctggaattcnnnnnnnnnnnnnnnnnnnnnnnnnnnnnnnnnnnnnnnnnnnnnnnnnnnnnnnnnnnnnnnnnnnnnnnnnnnnnnnnnnnnnnnnnnnnnnnnnnnna

SEQ ID NO: 3554 - DNA, 603 bp, Homo sapiens
gggtacagatgccaaaatgtgctaaacccatttgtatataatgaatgaagaccaggaacagtcgtcattatggcctctgaacacagaaagcaaagaaaaggaaggaagaaagaaaaggctcttcccaatatgcgtttgtgtggtttgattgtaatggttgtttcycattccggttgtttatgaataatagtgacctttgtttccttaaagatgagctgaacaaaatgatgcatcttgaaatgatcattcattctgcaggaagggaacataagtgaaacctaaaagcctgttcggctgcctttcttccaatctccctttgtatttacagtatttgccaaaacatatttaatcctacaaagccccaagatgtatattttttggctcatgtatagacagccttattctattggaaaaagatgctgtatgtcttccatttccaaagcaagcttcgcagaatggtctggatggggaagagctggagaaaaaccacagaggaaggtctatagatctgtaccagatggtcagtcacatagtgcgtgcgtgtcctgggagagggtcacgagaagctgaaagaaatcctgaaaagtggcagtgggctatatt

SEQ ID NO: 3555 - DNA, 596 bp, Homo sapiens
gcagagagacttctcttcctcttcttatgaggccactaactcattatgaggtctcatcttcaagaccttatccaactctaattaccccccgaaggccccatctccacatgctaccaagttgggggttaggagttcaatatacgaattttggggagccacaaacattcagcccataaccaactcagatactgttttctttgaggagccttccccatgtagcagaattggttcttcctagattttacttcatggtccagtgcatggtacatacttcyataagggacatgtaaacattgtattgtattactgttgatgtaatatatttctcctgcactagattgagactgttattggtgtaaaacaaaacaaaacaaaactttgtcttccttcttttattttctttttacacgggtgacaatgcctagagtataagagatattaatagtttgctggctgaacaaacataaatgaatgaatgatattttctattgttaaggatcaaattccttaaagtacaattctttcatagataaataaactaattcatggcatctctcttcttttcctgataaaatatgtgctttttagccatggca

SEQ ID NO: 3556 - DNA, 1279 bp, Homo sapiens
ttgaaatcatcacataggaacacctgtgaaagggagtttataattgtttttgaataattctaataaattgagaccattagccttctctgatgtattaattatgattagtttcatcttcatgtgatgggaaaaaagaatatgacagaaaaaaataatatgacagtggctgaaataacatccaattaaattttctcttgtaataatctgaataagaggttcacagccttcgttatcatcaaaaaccaagtttcttctatctcatttctccatcatcttcaatgtttgacttgcattttgtggtccaagatggtgttctagctctagtcatatcatctgtataccagtcagcaggacactttctgtaagttttgccagcacttctggatgttacattggccagaayttagatacacacagtgaaggctgatctacctggtctttattctgggaacaaatatgctcaactaacatttagaggttccatatctgagtaagaagtcatcacatgactacccattttaaatacttctgcatctctgtgtagaagatccttgatttggggttggggtttcattttattttcagcaattcttagcatggagagaaatcagggagtccatgctccacatcagaaatgtaatgactccctcagaacatatacatttttggaactagaatagcctcttatttggagagaggcagcattttgagagacgacgaacgtcagtattggttttggtgcaaggataaaatacgtttttcctcttgcattttgtagcagcttgctagcctcatctaattcacaggtcatggtgggatgcaatagcaagcttgaaaagctatgaccggtatttttgattgactatgattttaactaacagggtcctatacagaactgggctccacatggagctctttctatagagctcaaacaaaatagtgagttttagagagtgatgaagtttcttcatttttactttactcccattatgggagctataagatggaacagagtttgctgccaaaagagagaagagataaagtgctgtggaacttcaaaagcaggagaggttcgcagctgcatttgacccagcgttaggcctggtgcagatttcaggaaacagtaaagatcttttactttatacttttgtttttcatgtgttccttgtttgagcctttcagcttcatacaccagatgttgaatttaatattattattggtagtagtaattcaaatctgaattgtaggagaatgtattattcaaattgtagatgagaca

SEQ ID NO: 3557 - DNA, 1301 bp, Homo sapiens
acatacagtattctaggacagatttccagatgcctaatcactgggtcattggttaagtgcatttaaaatatgaccagtactggcaattttctctcagaaattcctagttaacattctttctgattgccacaaaagtgaatgcagtcttcaacttgatttaataaaaataaggtatctagaacaagaaaagttattttatttgcatgacgaggccagtacatggtggcaagctctgctgcatctgccgcagaacagagatggcccttatggagmcaactggtagcctgttatttgggcattgctctcaactcataggacatgtttggccccacattggaacttttggtttaaactgggttctctttcaggtttatgtatgtgtttaatcacttatcctttctaattcttctaattactttttttaaattaccttctaagttttaaaatgacagatgaaactcagaaaataaagaggataatacaggctagctcatgttgtaggcaaggaaaattgggcaaatttttcttcccagcttggccctctcatcctcttattagtagattctttttttctttccaaggttaataccttgatactaaggtaagccctcaaagaaaggctagtttggttaaaagcagaacccaaaattcagctaggtaatgcagagaccagaatttccttttagagtcactgctccctccagtagcagttcagcttccttataaagcatatcttgacctaaattccatagttcttacataacagtaggactacagccaagctgttcagaccagtagtcactcaacaaaaacagataagaggatgttttctggccacctcttaagcaaattcagagtcctaaattcctagaaagaatgattagaagaaagcaaaaccaaggatctgtagccagaatatttagatttcccaccccaccttttacagtcattttgcctcttacttactaatctgattagtcttcctgcagaactggacttccagaagattctcttgctgtttacatattacatctcccttctcatcatgcacacaggaaactgaaccaggctaggctttaccctcttcagattacctttcccagaaaatgaagagcccacactagactattaggaccatggtagaaccctgtcttgcttgttcctggtaaccctcaacctctctcaaaatgttttgtttcagaaaatctccctctccctaaggaaagtctacaagccagttaccaaaatccaggacataagctataccgtttactctctttatttgttctcctcttagcctg

SEQ ID NO: 3558 - DNA, 1301 bp, Homo sapiens
acatacagtattctaggacagatttccagatgcctaatcactgggtcattggttaagtgcatttaaaatatgaccagtactggcaattttctctcagaaattcctagttaacattctttctgattgccacaaaagtgaatgcagtcttcaacttgatttaataaaaataaggtatctagaacaagaaaagttattttatttgcatgacgaggccagtacatggtggcaagctctgctgcatctgccgcagaacagagatggcccttatggagccaactggtagcctgttatttgggcattgctctcaactcataggacatgtttggccccacattggaacttttggtttaaactgggttctctttcaggtttatgtatgtgtttaatcacttatcctttctaattcttctaattactttttttaaattaccttctaagttttaaaatgacagatgaaactcagaaaataaagaggataatacaggctagctcatgttgtaggcaaggaaaattgggcaaatttttcttcccagcttggccctctcatcctcttattagtagattctttttttctttccaaggttaataccttgatactaaggtaagccctcaaagaaaggctagtttggttaaaagcagaacccaaaattcagctaggtaatgcagagaccagaatttccttttagagtcactgctccctccagtagcagttcagcttccttataaagcatatcttgacctaaattccatagttcttacataacagtaggactacagccaagctgttcagaccagtagtcactcaacaaaaacagataagaggatgttttctggccacctcttaagcaaattcagagtcctaaattcctagaaagaatgattagaagaaagcaaaaccaaggatctgtagccagaatatttagatttcccaccccaccttttacartcattttgcctcttacttactaatctgattagtcttcctgcagaactggacttccagaagattctcttgctgtttacatattacatctcccttctcatcatgcacacaggaaactgaaccaggctaggctttaccctcttcagattacctttcccagaaaatgaagagcccacactagactattaggaccatggtagaaccctgtcttgcttgttcctggtaaccctcaacctctctcaaaatgttttgtttcagaaaatctccctctccctaaggaaagtctacaagccagttaccaaaatccaggacataagctataccgtttactctctttatttgttctcctcttagcctg

SEQ ID NO: 3559 - DNA, 912 bp, Homo sapiens
  misc_feature (1)...(912): n = A,T,C or G
aaaaagcctattattttacagtaattctacagtgacagtctctgaaatatttcatgaatcaaattggtrtatttaaaaggtttccccattcccgaattgcatagacagggacggggagcattgtgggtgctgcgacctcttcccaagcacagggtcattccacagagccaggagggtggtgcgagtgactgtgagtggagtgagggcagatacacatatgatcttccaataatctatttttaaaaaagggcatataagcaagggcactctcagaagaagctacttggaaaattgttaggaacaataataggattagccttattttcatttaatttggagtgaaattacccactgagctatgttttaagtcagggttgccatggcagcagtggaggcagtctaaatataggggatgatgtcatgtgccaaaattatctttatattaaacatacgttgggttcgtaatttaagcctcataggctataggtacattagttgaaactgacttttttttttaactagtcggattctaatttcatgcaggttggcttcctatcaatcccttgctttaacagagagttgccattttgagttcactttatagcatggtctagtcattatttttcttngcattaggaaggatttgtgtagtggtgagactagccaagtgttctttttttttttttttttttctgaagagatttgatggtgtagcctataacttgtacttctaataatatcaagaagaaagaaaattgatttcatttctgagttctccctctatggtttctaaattaagacatgatggttaacgggattaaggttgtatagtcttggctgggaacactgagggagcatttactccctttaaaatatgaacttatataacaaaagaaacaggcttccataccc

SEQ ID NO: 3560 - DNA, 912 bp, Homo sapiens
  misc_feature (1)...(912): n = A,T,C or G
aaaaagcctattattttacagtaattctacagtgacagtctctgaaatatttcatgaatcaaattggtgtatttaaaaggtttccccattcccgaattkcatagacagggacggggagcattgtgggtgctgcgacctcttcccaagcacagggtcattccacagagccaggagggtggtgcgagtgactgtgagtggagtgagggcagatacacatatgatcttccaataatctatttttaaaaaagggcatataagcaagggcactctcagaagaagctacttggaaaattgttaggaacaataataggattagccttattttcatttaatttggagtgaaattacccactgagctatgttttaagtcagggttgccatggcagcagtggaggcagtctaaatataggggatgatgtcatgtgccaaaattatctttatattaaacatacgttgggttcgtaatttaagcctcataggctataggtacattagttgaaactgacttttttttttaactagtcggattctaatttcatgcaggttggcttcctatcaatcccttgctttaacagagagttgccattttgagttcactttatagcatggtctagtcattatttttcttngcattaggaaggatttgtgtagtggtgagactagccaagtgttctttttttttttttttttttctgaagagatttgatggtgtagcctataacttgtacttctaataatatcaagaagaaagaaaattgatttcatttctgagttctccctctatggtttctaaattaagacatgatggttaacgggattaaggttgtatagtcttggctgggaacactgagggagcatttactccctttaaaatatgaacttatataacaaaagaaacaggcttccataccc

SEQ ID NO: 3561 - DNA, 1266 bp, Homo sapiens
tgcatcctcaaggtatctgaataaaaggagctttgatttaaatgtgcttagttttaaagtgctctctctccgagcagtgggtttccttggatattttactacctacacatttctattaataataagcatatggtaattcatgaagataagacttaatgaaaaaaattaaactctttttcaactgcaagcccacgcagagtttgactagaatgtaatgagattttttcccagatgttatttatttattttttaactacagagctaaatcttgcctaaaacagcatggacacacacaattctttgattccaatttttcctctgttccctcatacgcaaggaaaaataaaaatatagcgcaattccttaaaccaaaagggtccccaaccctggctatgggccagtgtcagtctgtgcccttttaggaattgggccatacagcaggaggtgagcagtgggccagctagcaaatcctcctctgtatttacagcccctccccattgctggcattaccacctgcactctcctcctgtcagaccagcagtggcattagattcttataggcgcgcaaaccctattgtgaattgggyatgcaagggatctaggtttcgagctccttgtgagaatctaatgcctgatgatctgtcacgctgagatgggatcgtcacccccagatgggaccatctagttgcaggaaaacaaggtgtgggctcccactgattctacattatggtgacttgtattattttcatcatatattactgtgtaatcttaatagaaataaactgcaccataaatgtaatgcgcttgaatcatcctgaaaccaatccctcctcttccagtggaaaaattgtcttccaagaaactggtgtcaggcgccaaaatggtagaggacggctaccttaacccaagcaccttttctcaaagtgacactgctaaggcaaagcattacatttatggtacctgaaccacaccacacctggcccatttgactatttctacacagatgcctggatgagcaatttaccttcagggactataaccctcaacccaggaggacaccggtgcatgaggactgaaaatgtgctcagttcagcttcacagagagatagatgtagtttttcctctaaaggcgacattggtccggccattctacttactggttagcctcagtttatctttaaaaactgtttatgatttataggtccttttccctaatgcccttttaaatttctgtgttcttaatataacatacgctcaaaatactaa

SEQ ID NO: 3562 - DNA, 1554 bp, Homo sapiens
tgttatcttatgataaataatataaaaatgactcaattgaggatgtttcctggtgttcgatttttatcaactgttttgatttaacctttgtacaatcaacattttaaataattttagttctatattttataaagtgtatgcaaagcactttatcacccttgacaactgcagaactagaagagtgaagtattcttgtagtgagtgaactcaattttgttaaaaaaaaaaaagtcagatagctaagttatattagaatgtcttataagttgtttttttttcattaaaaaaaaaaaaacagaattccagcaattgtttctgacaaaaatgatcagtcagtgggtgctgaaattagtgaacagaagtattattgaaaatggaatctgtacagagattcaaagaatctctcaaaaaatatgtattatttacaaaaagaaaaatagtgacttttcatttgaaatagctggtaaaccccatgtaaccaagagatcaaagttactatcacaattaataggacaagtcaacaggggtcccctgctataatgaactgaagacacaatgccaattctggacatttctgccaaaaaaatatgaatcacctgaatctaatcacaaagaaacagttaaataaacccaaatttagggacagcctgtaaaataattggcccttactctccaaaagtgtaaaggatatggaaggaaaaaattgccgtttcctatttagggaaacgaaagagacatggcagctaaatgcaacctgtgatgctgaattaggttctgagccagaaaacacaatggtggaatgttaggtaaaatttgaattaggtctgaaaattaggcaatgatattaaatcagagttaatatattgactttaatagttatactgtggttgtgaaagaacatgttcttgtttttgctctcaactatttcaagaaaaatatacagtgagaaagaataaagcaaatgtgataaaatattaatatttggggaatcttagtgaaggctacacagaatttttttactgtttatgcaacacttttgtaagtctgaaatggtttgaaaataaaaagttaagaaaactgtctctcaggctggtgtttttaaaaggtgtctccttcaaagagagagcaaagtagagaaatcaaacctgtcagtttgagccccggataattaacttttgcataatgccttattttttaaagaataatttttgtaccaaaataagatgtgttcctctctaygactgaatattgacaattaactgagtgggtgattcttcttcatattcaactgataaaataagcctttctagttttggttttttttccctgaaagttttgatgttgagagatcactttaacctttagattaggcagagtttgagttttaattaccacacatatattgcaggaaatttaaattgtctacaactttaaaaatacttatcatgcaaattcccagatatgccaacatattcaccaacagagacttttcctttataactggtggattcatttttggggaatggtgggaaataaaaagatctatgttgaaaa

SEQ ID NO: 3563 - DNA, 746 bp, Homo sapiens
ttagcaatattagttgtgtgtatgcggtaaaagcacataagatctacatgcttagaaattttaggcctttaaaattttacttaaattttaaatgaaaatttaaagttcttagtgtgttttttaagcatttaaaatctaattttaaatgtttaaaatttaagctggtttatttcatttaccacgatgtcttcccgattcacgcatgctgttgcaaatggcacaatttccttcttttttaaggggtgagtaatatttcattgtatattccactttttcttcctccactcattgatcaaagtgcatttatgttgtttcctaatcctggcaattgctaatactgctccagtaaacatgggagtgaaagtgtgtgttcaaaatcctgatttcatattcctttggataattacctggaagtggggattgctgggtcatatggtaggttttgttgttgttgttgttgtttttagcagcctacaaactcttttcataakgactgagccaatttacattcctaccaccagtgtacagagttccttactccccacgtccgcatcaacacatatatttttatataatggccatcttaacaaatatcacgtgatatattcttgtggttttgatttgcgtttgtctgataattaattatattgatcacctttttatatacctgttggacgtttgtatgtctttgcagatatatctacttgggttatttgcccatttttaatttttaatttgttttctat

SEQ ID NO: 3564 - DNA, 746 bp, Homo sapiens
ttagcaatattagttgtgtgtatgcggtaaaagcacataagatctacatgcttagaaattttaggcctttaaaattttacttaaattttaaatgaaaatttaaagttcttagtgtgttttttaagcatttaaaatctaattttaaatgtttaaaatttaagctggtttatttcatttaccacgatgtcttcccgattcacgcatgctgttgcaaatggcacaatttccttcttttttaaggggtgagtaatatttcattgtatattccactttttcttcctccactcattgatcaaagtgcatttatgttgtttcctaatcctggcaattgctaatactgctccagtaaacatgggagtgaaagtgtgtgttcaaaatcctgatttcatattcctttggataattacctggaagtggggattgctgggtcatatggtaggttttgttgttgttgttgttgtttttagcagcctacaaactcttttcataaggactgagccaatttacattcctaccaccagtgtacagagttccttactccccacgtccgcatcaacacatatatttttatataatggccatcttaacaaatatcacgtgatatattcttgtggttttgatttgcgkttgtctgataattaattatattgatcacctttttatatacctgttggacgtttgtatgtctttgcagatatatctacttgggttatttgcccatttttaatttttaatttgttttctat

SEQ ID NO: 3565 - DNA, 610 bp, Homo sapiens
gccctattagcacaggatcagattcctaacaaatcgattggacgtgcagaaagagtctgtgtcctagattcaaagtcattacacagtcttaaacacagctgtgcggcaagcctttcattctagatggacatgagcaaattgaatggttccgaaggtgattggctggtggatttcctacaatgcaattttcaataatgacaagtttaatgaaatcactattgtattatttagcaagggaatgtgtatcctattttgtatagccatcaatggctgattaagtgtgcacaggagtatgaatgcacaaatatttaaacagattcagaggcacccattattctttggtttaggggaggtacatacacccaaccctgccaytatccttgcccaaccagggatgaagataatcctatactttttattgtaattttacttcctttctgtcattcctgaattctggcttcctgctgtctctaatcttttattagaattgtcaatttccattgagtatatgataaactttcttcttaattgtaaatgttttccattctatatccaaaaatatgtgcttacacaagcattacacatgcaaaaacattatatatgtaaacta

SEQ ID NO: 3566 - DNA, 596 bp, Homo sapiens
tgcttagtgctctgcaccaatgaaaaagcctttctgtttttcctcactcttcacttccaactttctactattaattctttttctccttttctcttcatataacaaccatttttgtctyaatgaaaaacttaaagtaggctttattaaaacactcacatattgtttcttcatctgtaaaatgaaggattggattacatgatcttaaaagtccctatgggaagactccatgatctacatgtttgatggagataccattttattaagaaaaaaattatgcaataatctattaccaagacacatatcatgacaatcattgatacagaacatttttattcaggatttaaagtctggttttattcaggatttaaagtctggttttattcattacagatttttaaaaattcactaaactacttcaaagaaaaaaataacttcataatttttgtgtatgtaatttgcctgtgtagaggggaattgtataaatctacccactttgaagacctaagtgtgtaatcaaggggtgtttattggaaaatttatattaagtaactgataacctgggattttgattaatttgtgtcttagaaacattatga

SEQ ID NO: 3567 - DNA, 1087 bp, Homo sapiens
tcgcctccgctacttatcatttctatgtgttgagaatattatctcttttacttctggtagattttattcagcatctttaaataataagccatttctaagttaaagtaagaaacaacttgatagctttgtgcttgtgttcttttggaatactatgttaatagtactaggatatcctttgtagaagctagggtaattggtgacttttgaaatattttattagtgcatctcctgatgtcccactcaggtagttttaggggtgagcaaagtttactttacagatccaatctggtgaagtacttgtttttgtaaataaaatcttgttagaacacaagtatgcccattcatttatttattgtctgtgctgcatttttgctagatgtgagtgtttgcaacagaggctctgatttgcacagccccagatatttactatttggtcatttacaaaaatatttaccaactcctgaaggaacaaattgattcttgtgtcttgccccatcactgtaacaaaccccargaccacagagagtacacatagactatagcagcatttctcatgcttgagaaatgtgaatattcccttggaaggatgcaaagtattctcctcaccaccagtaatgacttaagttacttttattatacagtttcttaaatccaaataaatacatatttaggtatacactccttatagatttagcttgtcccaaaacatatttaaagtattgcacacataaaattaacattaaatggatttaatggtaatgttattttgcacaaactaactgtgtacttgaggcataaaaatggcactacctgatgtgactacagccttttcagtttggtacatggctcctactgcactccatgtgattgagttctctctccatttttctccattcaaatttccatgagacctccttgggacagaaaatgttgaattaattggatttggcttgtttagtgagcacatcatgaatgacgaaagatcatataactgaagttcttaaacaattcatttcaaactgatatgcagtgtgagcactggaatctcatggaagttcttgtttataatgaccacccaggttatttg

SEQ ID NO: 3568 - DNA, 1274 bp, Homo sapiens
cttcttaatcctgaatcatcagaaaaggtttagaaatagagaccagacgtttcagagagatttttagggccttggatggaagtaaattgtggggagagatgggcgtcggcaggggaagtaaattggcgggtagggggtgagagaagactgtacaatcgtagatatttaaaaaaatttcatcaggcacaatctttacttcctaaaatttctttattcatggagactctgctaaacttcctgagtgcctttcccctcaaagctgtagctgtgctatttttgaccagtctctatttcagtctggcaagaagttctttgcatctcagagtgagctgggcctctgctgccttctgaggagagtattcttgtttcaacaggggacagagtgaacaaaaagggagccagcagtggtggagctaacagacttactctgaatagcggttcttttttcagtagaaatgatctggaagtaagctcactgtgcagggcctctcctgggggctttgagtgtcctccctgtaagtcaggcagccctgttgccaccagagcccactgtttctgactgagcccttgactcgggcctgctcatctagacatagaaggcccagttaagctccagcactggtccaccacccctctatgctccacttccagcagttctgtcacaatttgaaatatcatgatgcccgcttcccttgttcatttatttctgtgaaattgggtggagcagtttgtcacagatacagtaggcctggcctgagaccaggctcatcaggcgtaccacctgcagagaagtccatacgctttgtttcaggtttaaaatcaagtgagatctaagctggctgaaaaacaactgtgctgttacctaagggattatgagctttccagctggcctttgagcccgctgctctcctctggtttgtagtcatacttttttcagstcttggccatgtcctctctagtagcatgaccctagatgagtgacttaaactggcctaggagaacttaccggtaatgtagagaatggtagtagttaacctggtacctgattcaaagttgttgtgatggtgaaagtgcacgaggcatgtcgagtttttgctgaaataaagaaatagaaggtaatgaggaaaaacctagactttggggctaggcaccctgggccactgcaacttattgctggtgaccttggtcaaattacttaacatctgtgtttcagtttcctcattggtgcagtggaaatgttcctgagacctacttctgagggctgtagagatgca

SEQ ID NO: 3569 - DNA, 1274 bp, Homo sapiens
cttcttaatcctgaatcatcagaaaaggtttagaaatagagaccagacgtttcagagagatttttagggccttggatggaagtaaattgtggggagagatgggcgtcggcaggggaagtaaattggcgggtagggggtgagagaagactgtacaatcgtagatatttaaaaaaatttcatcaggcacaatctttacttcctaaaatttctttattcatggagactctgctaaacttcctgagtgcctttcccctcaaagctgtagctgtgctatttttgaccagtctctatttcagtctggcaagaagttctttgcatctcagagtgagctgggcctctgctgccttctgaggagagtattcttgtttcaacaggggacagagtgaacaaaaagggagccagcagtggtggagctaacagacttactctgaatagcggttcttttttcagtagaaatgatctggaagtaagctcactgtgcagggcctctcctgggggctttgagtgtcctccctgtaagtcaggcagccctgttgccaccagagcccactgtttctgactgagcccttgactcgggcctgctcatctagacatagaaggcccagttaagctccagcactggtccaccacccctctatgctccacttccagcagttctgtcacaatttgaaatatcatgatgcccgcttcccttgttcatttatttctgtgaaattgggtggagcagtttgtcacagatacagtaggcctggcctgagaccaggctcatcaggcgtaccacctgcagagaagtccatacgctttgtttcaggtttaaaatcaagtgagatctaagctggctgaaaaacaactgtgctgttacctaagggattatgagctttccagctggcctttgagcccgctgctctcctctggtttgtagtcatacttttttcaggtcttggccatgtcctctctagtagcatgaccctagatgagtgacttaaactrgcctaggagaacttaccggtaatgtagagaatggtagtagttaacctggtacctgattcaaagttgttgtgatggtgaaagtgcacgaggcatgtcgagtttttgctgaaataaagaaatagaaggtaatgaggaaaaacctagactttggggctaggcaccctgggccactgcaacttattgctggtgaccttggtcaaattacttaacatctgtgtttcagtttcctcattggtgcagtggaaatgttcctgagacctacttctgagggctgtagagatgca

SEQ ID NO: 3570 - DNA, 1274 bp, Homo sapiens
cttcttaatcctgaatcatcagaaaaggtttagaaatagagaccagacgtttcagagagatttttagggccttggatggaagtaaattgtggggagagatgggcgtcggcaggggaagtaaattggcgggtagggggtgagagaagactgtacaatcgtagatatttaaaaaaatttcatcaggcacaatctttacttcctaaaatttctttattcatggagactctgctaaacttcctgagtgcctttcccctcaaagctgtagctgtgctatttttgaccagtctctatttcagtctggcaagaagttctttgcatctcagagtgagctgggcctctgctgccttctgaggagagtattcttgtttcaacaggggacagagtgaacaaaaagggagccagcagtggtggagctaacagacttactctgaatagcggttcttttttcagtagaaatgatctggaagtaagctcactgtgcagggcctctcctgggggctttgagtgtcctccctgtaagtcaggcagccctgttgccaccagagcccactgtttctgactgagcccttgactcgggcctgctcatctagacatagaaggcccagttaagctccagcactggtccaccacccctctatgctccacttccagcagttctgtcacaatttgaaatatcatgatgcccgcttcccttgttcatttatttctgtgaaattgggtggagcagtttgtcacagatacagtaggcctggcctgagaccaggctcatcaggcgtaccacctgcagagaagtccatacgctttgtttcaggtttaaaatcaagtgagatctaagctggctgaaaaacaactgtgctgttacctaagggattatgagctttccagctggcctttgagcccgctgctctcctctggtttgtagtcatacttttttcaggtcttggccatgtcctctctagtagcatgaccctagatgagtgacttaaactggcctaggagaacttaccggtaatgtagagaatggtagtagttaacctggtacctgaytcaaagttgttgtgatggtgaaagtgcacgaggcatgtcgagtttttgctgaaataaagaaatagaaggtaatgaggaaaaacctagactttggggctaggcaccctgggccactgcaacttattgctggtgaccttggtcaaattacttaacatctgtgtttcagtttcctcattggtgcagtggaaatgttcctgagacctacttctgagggctgtagagatgca

SEQ ID NO: 3571 - DNA, 670 bp, Homo sapiens
cattttgtctaactggtatgtaattgatttatgccttgtaggaaagatcttgctttgtcacccaggctggagtgcagtggtgcaatctcagctcactgcaacctctgcctcctgggctccagygattctcctgcctcagcctcctgagtagctggggctacaggtgcccaccaccacgtccggctaatttttgtatttttagtagagacagagtttcaccatattggccaggctggtctcaaactcctgacctcaagtgatccacccgcttcagcctcccaaagtgctgggattacaggcatgagccaccatgcctggctggaaagatcatttcaaatgttacattttattgtcctataaacattaaatagttctgcatcaattggtaaatttgtttctgtattgctgagtgcctatatgtgtctattcttcagattctctttgaatcagttttaacatcttactgattccttcattaattaatgtattaaataaaatatttgatatgtattcattttacattcagatgagagtgattattttattttttaaaaattaaattttgacacccttgaaattacccaatagccaagaattatctacctgaattatatacagaagttatattctctaaaacagtattccccagtacactctactacccaaatct

SEQ ID NO: 3572 - DNA, 670 bp, Homo sapiens
cattttgtctaactggtatgtaattgatttatgccttgtaggaaagatcttgctttgtcacccaggctggagtgcagtggtgcaatctcagctcactgcaacctctgcctcctgggctccagtrattctcctgcctcagcctcctgagtagctggggctacaggtgcccaccaccacgtccggctaatttttgtatttttagtagagacagagtttcaccatattggccaggctggtctcaaactcctgacctcaagtgatccacccgcttcagcctcccaaagtgctgggattacaggcatgagccaccatgcctggctggaaagatcatttcaaatgttacattttattgtcctataaacattaaatagttctgcatcaattggtaaatttgtttctgtattgctgagtgcctatatgtgtctattcttcagattctctttgaatcagttttaacatcttactgattccttcattaattaatgtattaaataaaatatttgatatgtattcattttacattcagatgagagtgattattttattttttaaaaattaaattttgacacccttgaaattacccaatagccaagaattatctacctgaattatatacagaagttatattctctaaaacagtattccccagtacactctactacccaaatct

SEQ ID NO: 3573 - DNA, 670 bp, Homo sapiens
cattttgtctaactggtatgtaattgatttatgccttgtaggaaagatcttgctttgtcacccaggctggagtgcagtggtgcaatctcagctcactgcaacctctgcctcctgggctccagtgattctcctgcctcagcctcctgagtagctgggrctacaggtgcccaccaccacgtccggctaatttttgtatttttagtagagacagagtttcaccatattggccaggctggtctcaaactcctgacctcaagtgatccacccgcttcagcctcccaaagtgctgggattacaggcatgagccaccatgcctggctggaaagatcatttcaaatgttacattttattgtcctataaacattaaatagttctgcatcaattggtaaatttgtttctgtattgctgagtgcctatatgtgtctattcttcagattctctttgaatcagttttaacatcttactgattccttcattaattaatgtattaaataaaatatttgatatgtattcattttacattcagatgagagtgattattttattttttaaaaattaaattttgacacccttgaaattacccaatagccaagaattatctacctgaattatatacagaagttatattctctaaaacagtattccccagtacactctactacccaaatct

SEQ ID NO: 3574 - DNA, 670 bp, Homo sapiens
cattttgtctaactggtatgtaattgatttatgccttgtaggaaagatcttgctttgtcacccaggctggagtgcagtggtgcaatctcagctcactgcaacctctgcctcctgggctccagtgattctcctgcctcagcctcctgagtagctggggctacaggtgcccaccaccacgtccggctaatttttgtwtttttagtagagacagagtttcaccatattggccaggctggtctcaaactcctgacctcaagtgatccacccgcttcagcctcccaaagtgctgggattacaggcatgagccaccatgcctggctggaaagatcatttcaaatgttacattttattgtcctataaacattaaatagttctgcatcaattggtaaatttgtttctgtattgctgagtgcctatatgtgtctattcttcagattctctttgaatcagttttaacatcttactgattccttcattaattaatgtattaaataaaatatttgatatgtattcattttacattcagatgagagtgattattttattttttaaaaattaaattttgacacccttgaaattacccaatagccaagaattatctacctgaattatatacagaagttatattctctaaaacagtattccccagtacactctactacccaaatct

SEQ ID NO: 3575 - DNA, 572 bp, Homo sapiens
agaagaggaacatactaagcattggatgttagaaaacagagaaatcttgtattattaatatttttaccttattttactttaagttctgggatacacatgcagaacatgcaggtttgttacataggtatacatgtgccatggtggtttgctrcacctatcaactcatcatctaggttttaagccccgcatgcattaggtatttgtcctaatgctctccctccccttgtcccccatccccctacaggccccagtgtgtgatgttcccctcccgaaacagaggtgtttaagctgatgtataaaattttggtaaaataatcctggtagtattgaggaagatagattggagcgctggtgagacactggggttggagagccatccattcaagcaagaggtagtaagagctgccttcaggcagtggtaggagtgcagatagagaaaagacacatctgcagcatgtgtagagtacaagagggagagggaggaaaaagaaaagataaattctagagatagactcattattacttaatttatatttggattcatagtgttctcgattttgaaaatgaatcag

SEQ ID NO: 3576 - DNA, 565 bp, Homo sapiens
taagcacttcgtacagttcgtccttaactggacaagaattacggaatctctataggatgatgtcaggagctgtgctggattctggagactcagcgtctacaaaacagcatcccttgcctcacagcgatcccagttgggagagcaattcagacagacagcaaggcaatgaacacgcagtgtcagaagcrtgatgatgagaagtgcagacaccagggaattgcaaaggaggctcctctgcccagacctggggagaaaagacctttctggacccagtgatatccaagctgagaccaggagttagtcggaggggaagagagctccaggcacagggaacagcacaacatacgcaaagactgcaggagccgtataaaacttgactgcttccttggaactgcaagcagtcaacatgtctggagtattgagtctggagagggtgtgtggaagaatgaagccacagaggtaaggtcagatcatagagtattttataagctaatgtaaggtcagttagtggtcaccttgaacaggtgtgaagccctgggggacaggggttaataatctacctgta

SEQ ID NO: 3577 - DNA, 565 bp, Homo sapiens
taagcacttcgtacagttcgtccttaactggacaagaattacggaatctctataggatgatgtcaggagctgtgctggattctggagactcagcgtctacaaaacagcatcccttgcctcacagcgatcccagttgggagagcaattcagacagacagcaaggcaatgaacacgcagtgtcagaagcatgatgatgagaagtgcagacaccagggaattgcaaaggaggctcctctgcccagacctggggagaaaagacctttctggacccagtgatatccaagctgagaccaggagttagtcggaggggaagagagctccaggcacagggaacagcacaacatacgcaaagactgcaggagccgtataaaacttgactgcttccttggaactgcaagcagtcaacatgtctggagtattgagtytggagagggtgtgtggaagaatgaagccacagaggtaaggtcagatcatagagtattttataagctaatgtaaggtcagttagtggtcaccttgaacaggtgtgaagccctgggggacaggggttaataatctacctgta

SEQ ID NO: 3578 - DNA, 601 bp, Homo sapiens
atatgctgatttatctagtatctatatctaaagtgtgactttggtatttgctaactcatactaccacattttgccaaagatggctattctgctcatttgcaaaagatcaaaactaatagagaattctacatccatgtttatttttttattcacacttacatattctgtataatcctgtgctgggctgtgcaggattatccccatctgcaccccaggactctgtgcctaaatttttttcactcagagaacacaaattagatggtccttttgcatgcaatgccctgtgttaagcaattatttacagctactttcctaattggcagttaaatttcaccaagattcaaccacagcctgatatatatttctccaaagaagcttaaaacagtttttgatcgcagcagaaaatggccttcctatttgtttattgaacaaatactttactccacaaggcaagatcctactatatgccaagcactatgatggatactaaaaattcagagacaaacacagcagagccaatatttgcccctgaggctctggtggggagatatgttaaacagtgaataatcacacaaataattaattayaattgtgataagca

SEQ ID NO: 3579 - DNA, 721 bp, Homo sapiens
agctcctttctctgaaatagttgcaacagttttgtaattgctgtaacagcgttgtatacagaaagcaggaaaccgctgcttagcacttcgaaggtttctgagaagcggactgtgcagctgacctgcaagatggatgaggttgtctgggcagtgagggaattccagcagaagaaggccacagccaaagtagctggagcatgacaacacttgatgtgaatggaaaccaatgtcagtaattcagtgtggctggagcacataccaagatcaaaaccatttaaatacatgcagggttgtgaggtgcttcagaaggcagaatctgcaccatctggattcaaatcctggctctgccttttataccatctaaccagaaactagttatttaatctccctgtgcctctgtttcttcatctttgaaatggggctgcatagacaatayttattgttaggtgacattgtggctgtgatgatgatgaatgcttgcagcaattcacctgctcctacaggcacacactaagttttgtggattctccatatgaatatttctaacatgactcccttccactccatgtcaagtcctctgcttcaattcatttgtctttctcaggatgatttgcagtgcctacaaaatcaagcagggagtcttcagcaccccatggcaggccttccctgccccaggcttgctctgctgatctggggtgccatcgcaagtgatatgtatgca

SEQ ID NO: 3580 - DNA, 646 bp, Homo sapiens
aatcactcttgggtattgcttaacagatggaattttgtttgctttgttctgtggctattaggaaaattactgtattttgaagagctgccatttgtagtacagcaagtgcaatttttctgttggtgtgctataccatcttctacaaatctgtagtatcactggactctgatttttctcatatgtactaggatgaagtaaatcatgttgttgaatagaatcaacactagctttattagaagctgagcatgtttagagaccccttgcaaaaaatcagtaaaaatttcttaaagcttctgtttagaaaaaaattattttcttccaagataatctgaaattccttaatgcagttattgtgaagcacagagagagrtaagtgtgcatctctgtgtgtatgagagaggctgtgtgagcgtgtataagtgtatgcgattgtagtttactttatgacttatttctggcaaaatataggtacaattttgtatcttttaatttttcctggatcacatattgtccacataaatcacaaaggaaagtgatgttaaggctagggccgattattacaagttcatgaatttccaaaagtgtgatgatcattagatgcaatatcagtgaatatcagcctacagcaggtacaccagagaaacaa

SEQ ID NO: 3581 - DNA, 1242 bp, Homo sapiens
cttctgaagtagaaaggctgggagatgcaagcactatcaatgtgccattgtattttttgtaaaatgaatccccaccaagaatcactttgagaggcaaagatagtactccttcatactttctagaaagacccctgaagtgggataactgatcaatgtggccacccttccttggtactaataaaccaaagcagccacagtgtgctcagacatcttttgtgttataactgaaaggcaaagctgcaccaaagggccagggcatttactgccaaagtgacctgacaaggccgtgcatgtgtatgcacattcatactcatgtcttagtcacataaagaagggtctgccaaagagtctgcagggcagggaagcaggaggaaggtatttaccctaaactaatcctgaaaggagctatgaggttcgtagaatccaagccaaatcctgacccaggtcctggaaagttcctataattgactttgtgccctggttgtagctgacacacctccttcatgtgggagtagagagtcaaacacatatgcaaggatctcttgtgcaggttgtacttaccctgctatctgtcagccttagggttattttgagcaatagctcgataagccacttgtgctgtctgtcccctaaaagacaagctgcagggacctccacaagaaccacagtatttgcaggagatgaggcagggcctcaggagtccatgagtggctgggtggacaggctgagcatgctatggtttctattgctatttcctgccttgcaagtcagccgcagtcaggcatagctctgtggctatataacaggctgagggctcagcagacccggtggaagaagggtccaggcagagtgtcttttgttcactagcytcgagagatatggggaagatctggatacatggggctctcacaacttctgcagtacctgatcccattaaggggccagagtaggaaagtagtcatccttgaagaaacttcaagataagtaccccaggagattagagcagaacgctgctacagctttccaaaggcagtgctccacaccaagagctgtgcgccaaaagagaaaggctgctgaagttgcctaagtcagtctctaggcaccaaagtcactgaaagatgaatgccaacctctgcttctctgaaagtctaggaaaggggagtctgacgccttccttggtaaactgtcttaagggttgcagcaccaggaatttaacccttatttctaaccattatttttgat

SEQ ID NO: 3582 - DNA, 651 bp, Homo sapiens
cagcctccctagtagctgggacgacaggcgcctaccactatgcctggctaatttttttgtatttttagtagagacggagtttcaccgtgttagccaggatggtctcgatctcctgaccttgtgatccgcccggctcggmctcccaaagtgctgggattacaggcatgagccaccgcgcccggcccactattctactttttaatgctgatttgatcatgaacatttattctcagccaatctggtttattctcagcaccagagaaatattttattttttgtagctatcaggaataaaatttggacccaacagagagaactgtgaagtatctaaaagttttgaagtgtatttataaagaaggaaaattattttagaacttgaaaattagattgtggctaaattgctttataaatatgctgggaggcaagattaaaacttataaaagttattttattaagctttcactgtaagcagttttaagaggagacataatctactgattctgcgtaaaagctgaattatgatgggattatatgactgttcatttaactactgtttattgggcatctatttatgtctaggtgctatgctaagtgtaccaggcaacaatgaaaaaaattagatcctgtcctgacctcatacacgctgcatat

SEQ ID NO: 3583 - DNA, 1241 bp, Homo sapiens
gcataactgataaatatggtgggtagatttgaactcagaactactggagagtgacattgaaaaatgttataaaattagtcaaagacacacaactgataaatatggtgggtagatttgaactcagaactactcaagctagaagtctgtgaccttaattactgagttatattccctttgcagggaaggaaaaagtaattttctctctacttctcatagctttgagctagtatcycttgtaataaaatacaggatagccaggtgtggtggctcacatctgtaatctcagcactttgagaggcttaggtgggaggatcgcttgaggccaggggttcaagaccagcctgggcaacatagtgatatccggtctacataaaaattaaaaataatagccaggtgtggtggcgcatgcctgtggtcccagctactcgagaggataaggcatgaggatcacgtgagtccaggaggttgaggctgcagtaaactatgattatgctactgtactgtagtctggacaacagagtgagtcctcgtctcaaaaaacaaaagattcacaagagaaaaacagacatttgttaacatgtataccacatgtacacatagaagacacccaggaaaaaatgagtaaatctcaaagaagtggcttagaactctggcttacatagcatcttcgacaaagaacaatacatggttgaagaaatgacaaaggaaaaggaccttggatttataagggcagtaaattgtaggaaggcaaatatatggtagataaaggctattttgtaaaatttgttatgtagattcctgtggtgatatctccaggatgataagggtcttaagtcatcttcagtgatcaaattctgtcctacttggtagagagaggaggagggataactttgtgaatttgtattctgttcttaggcaaattgtttaggcaaggcaaataacttttcctgtatctacttcttctcagttgcctttagctcaaaataacccttatgctaaagtggcatcttttggggtggcatattctgctgccctccaccttctattttaattttcaaaatctaggtatccatctacagcaaaacctacagcaatactcaagacattatgaagccaactttagaatgaattgtgattgcttaaaaatcataacataattgaaagcaatgttcattactctactttcaatttgagcatacttagatataacacagtaaatactaatctatatgttagtaata

SEQ ID NO: 3584 - DNA, 1241 bp, Homo sapiens
gcataactgataaatatggtgggtagatttgaactcagaactactggagagtgacattgaaaaatgttataaaattagtcaaagacacacaactgataaatatggtgggtagatttgaactcagaactactcaagctagaagtctgtgaccttaattactgagttatattccctttgcagggaaggaaaaagtaattttctctctacttctcatagctttgagctagtatcccttgtaataaaakacaggatagccaggtgtggtggctcacatctgtaatctcagcactttgagaggcttaggtgggaggatcgcttgaggccaggggttcaagaccagcctgggcaacatagtgatatccggtctacataaaaattaaaaataatagccaggtgtggtggcgcatgcctgtggtcccagctactcgagaggataaggcatgaggatcacgtgagtccaggaggttgaggctgcagtaaactatgattatgctactgtactgtagtctggacaacagagtgagtcctcgtctcaaaaaacaaaagattcacaagagaaaaacagacatttgttaacatgtataccacatgtacacatagaagacacccaggaaaaaatgagtaaatctcaaagaagtggcttagaactctggcttacatagcatcttcgacaaagaacaatacatggttgaagaaatgacaaaggaaaaggaccttggatttataagggcagtaaattgtaggaaggcaaatatatggtagataaaggctattttgtaaaatttgttatgtagattcctgtggtgatatctccaggatgataagggtcttaagtcatcttcagtgatcaaattctgtcctacttggtagagagaggaggagggataactttgtgaatttgtattctgttcttaggcaaattgtttaggcaaggcaaataacttttcctgtatctacttcttctcagttgcctttagctcaaaataacccttatgctaaagtggcatcttttggggtggcatattctgctgccctccaccttctattttaattttcaaaatctaggtatccatctacagcaaaacctacagcaatactcaagacattatgaagccaactttagaatgaattgtgattgcttaaaaatcataacataattgaaagcaatgttcattactctactttcaatttgagcatacttagatataacacagtaaatactaatctatatgttagtaata

SEQ ID NO: 3585 - DNA, 1241 bp, Homo sapiens
gcataactgataaatatggtgggtagatttgaactcagaactactggagagtgacattgaaaaatgttataaaattagtcaaagacacacaactgataaatatggtgggtagatttgaactcagaactactcaagctagaagtctgtgaccttaattactgagttatattccctttgcagggaaggaaaaagtaattttctctctacttctcatagctttgagctagtatcccttgtaataaaatacaggatagccaggtgtggtggctcacatctgtaatctcagcactttgagaggcttaggtgggaggatcgcttgaggccaggggttyaagaccagcctgggcaacatagtgatatccggtctacataaaaattaaaaataatagccaggtgtggtggcgcatgcctgtggtcccagctactcgagaggataaggcatgaggatcacgtgagtccaggaggttgaggctgcagtaaactatgattatgctactgtactgtagtctggacaacagagtgagtcctcgtctcaaaaaacaaaagattcacaagagaaaaacagacatttgttaacatgtataccacatgtacacatagaagacacccaggaaaaaatgagtaaatctcaaagaagtggcttagaactctggcttacatagcatcttcgacaaagaacaatacatggttgaagaaatgacaaaggaaaaggaccttggatttataagggcagtaaattgtaggaaggcaaatatatggtagataaaggctattttgtaaaatttgttatgtagattcctgtggtgatatctccaggatgataagggtcttaagtcatcttcagtgatcaaattctgtcctacttggtagagagaggaggagggataactttgtgaatttgtattctgttcttaggcaaattgtttaggcaaggcaaataacttttcctgtatctacttcttctcagttgcctttagctcaaaataacccttatgctaaagtggcatcttttggggtggcatattctgctgccctccaccttctattttaattttcaaaatctaggtatccatctacagcaaaacctacagcaatactcaagacattatgaagccaactttagaatgaattgtgattgcttaaaaatcataacataattgaaagcaatgttcattactctactttcaatttgagcatacttagatataacacagtaaatactaatctatatgttagtaata

SEQ ID NO: 3586 - DNA, 1241 bp, Homo sapiens
gcataactgataaatatggtgggtagatttgaactcagaactactggagagtgacattgaaaaatgttataaaattagtcaaagacacacaactgataaatatggtgggtagatttgaactcagaactactcaagctagaagtctgtgaccttaattactgagttatattccctttgcagggaaggaaaaagtaattttctctctacttctcatagctttgagctagtatcccttgtaataaaatacaggatagccaggtgtggtggctcacatctgtaatctcagcactttgagaggcttaggtgggaggatcgcttgaggccaggggttcaagaccagcctgggcaacatagtgatatccggtctacataaaaattaaaaataatagccaggtgtggtggygcatgcctgtggtcccagctactcgagaggataaggcatgaggatcacgtgagtccaggaggttgaggctgcagtaaactatgattatgctactgtactgtagtctggacaacagagtgagtcctcgtctcaaaaaacaaaagattcacaagagaaaaacagacatttgttaacatgtataccacatgtacacatagaagacacccaggaaaaaatgagtaaatctcaaagaagtggcttagaactctggcttacatagcatcttcgacaaagaacaatacatggttgaagaaatgacaaaggaaaaggaccttggatttataagggcagtaaattgtaggaaggcaaatatatggtagataaaggctattttgtaaaatttgttatgtagattcctgtggtgatatctccaggatgataagggtcttaagtcatcttcagtgatcaaattctgtcctacttggtagagagaggaggagggataactttgtgaatttgtattctgttcttaggcaaattgtttaggcaaggcaaataacttttcctgtatctacttcttctcagttgcctttagctcaaaataacccttatgctaaagtggcatcttttggggtggcatattctgctgccctccaccttctattttaattttcaaaatctaggtatccatctacagcaaaacctacagcaatactcaagacattatgaagccaactttagaatgaattgtgattgcttaaaaatcataacataattgaaagcaatgttcattactctactttcaatttgagcatacttagatataacacagtaaatactaatctatatgttagtaata

SEQ ID NO: 3587 - DNA, 1241 bp, Homo sapiens
gcataactgataaatatggtgggtagatttgaactcagaactactggagagtgacattgaaaaatgttataaaattagtcaaagacacacaactgataaatatggtgggtagatttgaactcagaactactcaagctagaagtctgtgaccttaattactgagttatattccctttgcagggaaggaaaaagtaattttctctctacttctcatagctttgagctagtatcccttgtaataaaatacaggatagccaggtgtggtggctcacatctgtaatctcagcactttgagaggcttaggtgggaggatcgcttgaggccaggggttcaagaccagcctgggcaacatagtgatatccggtctacataaaaattaaaaataatagccaggtgtggtggcgcatgcctgtggtcccagctactcgagaggataaggcatgaggatcacgtgagtccaggaggttgaggctgcagtaaactatgattatgctactgtactgtagtctggacaacagagtgagtcctcgtctcaaaaaacaaaagattcacaagagaaaaacagacatttgttaacatgtataccacatgtacacatagaagayacccaggaaaaaatgagtaaatctcaaagaagtggcttagaactctggcttacatagcatcttcgacaaagaacaatacatggttgaagaaatgacaaaggaaaaggaccttggatttataagggcagtaaattgtaggaaggcaaatatatggtagataaaggctattttgtaaaatttgttatgtagattcctgtggtgatatctccaggatgataagggtcttaagtcatcttcagtgatcaaattctgtcctacttggtagagagaggaggagggataactttgtgaatttgtattctgttcttaggcaaattgtttaggcaaggcaaataacttttcctgtatctacttcttctcagttgcctttagctcaaaataacccttatgctaaagtggcatcttttggggtggcatattctgctgccctccaccttctattttaattttcaaaatctaggtatccatctacagcaaaacctacagcaatactcaagacattatgaagccaactttagaatgaattgtgattgcttaaaaatcataacataattgaaagcaatgttcattactctactttcaatttgagcatacttagatataacacagtaaatactaatctatatgttagtaata

SEQ ID NO: 3588 - DNA, 1241 bp, Homo sapiens
gcataactgataaatatggtgggtagatttgaactcagaactactggagagtgacattgaaaaatgttataaaattagtcaaagacacacaactgataaatatggtgggtagatttgaactcagaactactcaagctagaagtctgtgaccttaattactgagttatattccctttgcagggaaggaaaaagtaattttctctctacttctcatagctttgagctagtatcccttgtaataaaatacaggatagccaggtgtggtggctcacatctgtaatctcagcactttgagaggcttaggtgggaggatcgcttgaggccaggggttcaagaccagcctgggcaacatagtgatatccggtctacataaaaattaaaaataatagccaggtgtggtggcgcatgcctgtggtcccagctactcgagaggataaggcatgaggatcacgtgagtccaggaggttgaggctgcagtaaactatgattatgctactgtactgtagtctggacaacagagtgagtcctcgtctcaaaaaacaaaagattcacaagagaaaaacagacatttgttaacatgtataccacatgtacacatagaagacacccaggaaaaaatgagtaaatctcaaagaagtggcttagaactctggcttacatagcatcttcgacaaagaacaatacatggttgaagaaatgacaaaggaaaaggaccttggatttataagggcagtaaattgtaggaaggcaaatatatggtagataaaggctattttgtaaaatttgttatgtagattcctgtggtgatatctccaggatgataagggtcttaagtcatcttcagtgatcaaattctgtcctacttggtagagagaggaggagggataactttgtgaatttgtattctgttcttaggcaaattgtttaggcaaggcaaataacttttcctgtatctacttcttctcagttgcctttagctcaaaataacccttatgctaaagtggcatcttttggggtggcatattctgctgccctycaccttctattttaattttcaaaatctaggtatccatctacagcaaaacctacagcaatactcaagacattatgaagccaactttagaatgaattgtgattgcttaaaaatcataacataattgaaagcaatgttcattactctactttcaatttgagcatacttagatataacacagtaaatactaatctatatgttagtaata

SEQ ID NO: 3589 - DNA, 1247 bp, Homo sapiens
aggttattgtgattttccaaacttcacagtttgcaaagtatttttattatgtgcactcttgtgaacctcatcacaacctgacaaggttagaaatcactattgctgatattttataaatgaatgctaagaatctgtccattgttgctgcatgaggagccaggattccacttcagatctcagaattatttactctataatttttccatggtactaggctgcttttctaactctggcactmctgcctgttattgtacacccagtaaaagagcattcacatcctcatttctgtataaaaagaccagtattgcaagtaaaaccagttagtaccagaacctataactgttatttataaaacttaaaattaaagcatgtgatattcaagaacattatttccttctaaaaaataactttactcattcttaaaaagccaaaggaaacacccatctagtttgatctataaatccccatattatttttttccatttcaatcttggccttcattcttctagttgcataaataactggagcatttctgagaggattagggaacaagctttagaaagtaaaagagaaaatgttaggtctcctctcagaggataagtgtattagagttaattgggatgcttgaaccagaggttggttttaatatgcctctatttccttccatggctctcaagacagagctaactcatggctcacaagacagagctaacttactcatctaatttgtccttccatcagggtggtgcttccatatatgatgattggaccattgcaggtgttcctgaaatgaacagattcttgaggtccacctcggatcgactaaatcagaatttccatgattggacccttgatatttatgagcacttaagtcagaaatactgctagagagagattaacctgattctgcatgcaggaataaaccttttattgaggaactaatttctcaatatgtcaagtttttggcagctttctgtagcatctattagaatgaatcaacattaatgaaggcttgcttctttgggccgtgtaaccttttgtctcagaggatttggaatattagattcttacctctcttcccaatggcagaaaaaaaaaatgagtttgagagatgaaaggacagaatagcattttttatcaagtcaattgttattttctacttaacctctctaatctgcttattttgggggaaaataagcaactgtattctttgtcaagattattaaatcctaaattgtgtccatatg

SEQ ID NO: 3590 - DNA, 1247 bp, Homo sapiens
aggttattgtgattttccaaacttcacagtttgcaaagtatttttattatgtgcactcttgtgaacctcatcacaacctgacaaggttagaaatcactattgctgatattttataaatgaatgctaagaatctgtccattgttgctgcatgaggagccaggattccacttcagatctcagaattatttactctataatttttccatggtactaggctgcttttctaactctggcactcctgcctgttattgtacacccagtaaaagagcattcacatcctcatttctgtataaaaagaccagtattgcaagtaaaaccagttagtaccagaacctataactgttatttataaaacttaaaattaaagcatgtgatattcaagaacattatttccttctaaaaaataactttactcattcttaaaaagccaaaggaaacacccatctagtttgatctataaatccccatattatttttttccatttcaatcttggccttcattcttctagttgcataaataactggagcatttctgagaggattagggaacaagctttagaaagtaaaagagaaaatgttaggtctcctctcagaggataagtgtattagagttaattgggatgcttgaaccagaggttggttttaatatgcctctatttccttccatggctctcaagacagagctaactcatggctcacaagacagagctaacttactcatctaatttgtccttccatcagggtggtgcttccatatatgatgattggaccattgcaggtgttcctgaaatgaacagattcttgaggtccacctcggatcgactaaatcagaatttccatgattggacccttgatatttatgagcacttaagtcagaaatactgctagagagagattaacytgattctgcatgcaggaataaaccttttattgaggaactaatttctcaatatgtcaagtttttggcagctttctgtagcatctattagaatgaatcaacattaatgaaggcttgcttctttgggccgtgtaaccttttgtctcagaggatttggaatattagattcttacctctcttcccaatggcagaaaaaaaaaatgagtttgagagatgaaaggacagaatagcattttttatcaagtcaattgttattttctacttaacctctctaatctgcttattttgggggaaaataagcaactgtattctttgtcaagattattaaatcctaaattgtgtccatatg

SEQ ID NO: 3591 - DNA, 1200 bp, Homo sapiens
tatggaatctttaaaaagtcaaatacatagagacagaaaataaaacagtagttttcagggttaaggtcggggaaggaaatggggagatggaggttaaaagagatacaaagtagcaaatatgtaggacaaacaagttgaaagatctaatgtaccaaatgaggactatagttgataatggaatattgtattctgaagttttgctagatgagtagattacagctgatactgtgctacagtactacagtcctacagtagattactcttgccacaggaggaaaaactggtaactacgtgagaggatggatatgttaatttgttatactttggtaaccactttactatatgcagcaggtcctcaaataacatcctatccattcgagtcattttattataatgttcgtgagaaaaaagatgattctggaccctggatcctgtctgtttggagtttgcatgttctcccaatattttgcatgagttttctccaggttctcctgtttcctcccacatctcaaagacatgcacctcagcttcattggcatgtctaaattgtcacagtcttaatgagtgtgagtgtgtatatgagtgcatcctgcgatgaggcttcctgttcaaagtgggtttccgctttgtgtactgcactgctgggagtggctccaaccactcgaaatcttgagctagaataactggataaataagtatcttacttgtttctactagtctttcttaaatgtatatataactcacagttatttcaatgttaaatattagaagtgtttttagaagtttgttggtttttgtgaccagaaatatataggaacttaactcttgttacatcaattaacctttggtaaaattggtttaattatatgtaatttcaattaaagttgcagtttctgagaacctatcagcagcrttaggtcatatatatgtatatgacttaacatagatatatatatcttaacatatatatatcttataatatcatgttgtataccttcaatatacacagtgaaatttatttttgaaaatttgaaaaagaaagatattaaatgctccaatttaagatggaaattgtggttcgttagtatttgcttgaaaccaatgggattatttacgaaaccatgttccaattcaattggccattataattagaggtaacattcggattacccttcatttaaaaattgtaattaaactgta

SEQ ID NO: 3592 - DNA, 1110 bp, Homo sapiens
cactgatctgtattattcctatattattcacaaagataacttgagggagtttgttgactgtcttgaagatgtggaaacatagtatgatgttttcaaaccgtctcctcacctggaatagcaaacatcagaatttgtctgagatccaacaggcagcatcatggtgagtaagtggatatcaaagaggcagtcacacacaaagaacgcccccatagctattcaggaagggagatagaagtccaagtctaggagtgaagctgaggtaaataaagtattctggattttgggcatctctgacgaatttctccagaagagctctttggtgctgtagtattcttagcttgtttctcactcacctagcacactttaaaaagactgacgttaggtgtttttttcttggtctaccagtataaaaattgaattttaaaaaaagcttttcttttgttgttaagcacagtttattatttgatatacattatttacctgaatatatttttccttcttgccgagaccagctctgtcagggagaccctaacccagtggcgctagaggaattaaagatgcacacayagaaatatagaggtatgaagtgggaaatcagcggtctcacagccttcagagctgagagccccaaacagagatttacccacatatttattaacagcaagccagtcattagcattgtttctgtagatattcgattaaccaaaagtatcccttatgggaaacgaagggatgggccgaaataaagggatgggttgggcttgttatctgcagcaggagcatgtccttaaggcacagattgctgatgctattgtttgtggtttaagaatgcctttaagcagttttccgccctgggcgggcctggtgttccttgccctcattcgggtaaacccacaaccttccagcatgggcattatggccatcaggaacatgtcacagtgctgcagagatttgtttatggccagttttggggctagtttatggccagattttggggggcctgttcccaacaccttctctttgacattttcatggtaaaattatgtaaactgtctgtaatagccttttacttaatttcctggtttttgcttccctctgtaactgtcatca

SEQ ID NO: 3593 - DNA, 1110 bp, Homo sapiens
cactgatctgtattattcctatattattcacaaagataacttgagggagtttgttgactgtcttgaagatgtggaaacatagtatgatgttttcaaaccgtctcctcacctggaatagcaaacatcagaatttgtctgagatccaacaggcagcatcatggtgagtaagtggatatcaaagaggcagtcacacacaaagaacgcccccatagctattcaggaagggagatagaagtccaagtctaggagtgaagctgaggtaaataaagtattctggattttgggcatctctgacgaatttctccagaagagctctttggtgctgtagtattcttagcttgtttctcactcacctagcacactttaaaaagactgacgttaggtgtttttttcttggtctaccagtataaaaattgaattttaaaaaaagcttttcttttgttgttaagcacagtttattatttgatatacattatttacctgaatatatttttccttcttgccgagaccagctctgtcagggagaccctaacccagtggcgctagaggaattaaagatgcacacatagaaatatagaggtatgaagtgggaaatcagcggtctcacagccttcagagctgagagccccaaacagagatttacccacatatttattaacagcaagccagtcattagcattgtttctgtagatattcgattaacyaaaagtatcccttatgggaaacgaagggatgggccgaaataaagggatgggttgggcttgttatctgcagcaggagcatgtccttaaggcacagattgctgatgctattgtttgtggtttaagaatgcctttaagcagttttccgccctgggcgggcctggtgttccttgccctcattcgggtaaacccacaaccttccagcatgggcattatggccatcaggaacatgtcacagtgctgcagagatttgtttatggccagttttggggctagtttatggccagattttggggggcctgttcccaacaccttctctttgacattttcatggtaaaattatgtaaactgtctgtaatagccttttacttaatttcctggtttttgcttccctctgtaactgtcatca

SEQ ID NO: 3594 - DNA, 1110 bp, Homo sapiens
cactgatctgtattattcctatattattcacaaagataacttgagggagtttgttgactgtcttgaagatgtggaaacatagtatgatgttttcaaaccgtctcctcacctggaatagcaaacatcagaatttgtctgagatccaacaggcagcatcatggtgagtaagtggatatcaaagaggcagtcacacacaaagaacgcccccatagctattcaggaagggagatagaagtccaagtctaggagtgaagctgaggtaaataaagtattctggattttgggcatctctgacgaatttctccagaagagctctttggtgctgtagtattcttagcttgtttctcactcacctagcacactttaaaaagactgacgttaggtgtttttttcttggtctaccagtataaaaattgaattttaaaaaaagcttttcttttgttgttaagcacagtttattatttgatatacattatttacctgaatatatttttccttcttgccgagaccagctctgtcagggagaccctaacccagtggcgctagaggaattaaagatgcacacatagaaatatagaggtatgaagtgggaaatcagcggtctcacagccttcagagctgagagccccaaacagagatttacccacatatttattaacagcaagccagtcattagcattgtttctgtagatattcgattaaccaaaagtatcccttatgggaaacgaagggatgggccgaaataaagggatgggttgggcttgttatctgcagcaggagcaygtccttaaggcacagattgctgatgctattgtttgtggtttaagaatgcctttaagcagttttccgccctgggcgggcctggtgttccttgccctcattcgggtaaacccacaaccttccagcatgggcattatggccatcaggaacatgtcacagtgctgcagagatttgtttatggccagttttggggctagtttatggccagattttggggggcctgttcccaacaccttctctttgacattttcatggtaaaattatgtaaactgtctgtaatagccttttacttaatttcctggtttttgcttccctctgtaactgtcatca

SEQ ID NO: 3595 - DNA, 1110 bp, Homo sapiens
cactgatctgtattattcctatattattcacaaagataacttgagggagtttgttgactgtcttgaagatgtggaaacatagtatgatgttttcaaaccgtctcctcacctggaatagcaaacatcagaatttgtctgagatccaacaggcagcatcatggtgagtaagtggatatcaaagaggcagtcacacacaaagaacgcccccatagctattcaggaagggagatagaagtccaagtctaggagtgaagctgaggtaaataaagtattctggattttgggcatctctgacgaatttctccagaagagctctttggtgctgtagtattcttagcttgtttctcactcacctagcacactttaaaaagactgacgttaggtgtttttttcttggtctaccagtataaaaattgaattttaaaaaaagcttttcttttgttgttaagcacagtttattatttgatatacattatttacctgaatatatttttccttcttgccgagaccagctctgtcagggagaccctaacccagtggcgctagaggaattaaagatgcacacatagaaatatagaggtatgaagtgggaaatcagcggtctcacagccttcagagctgagagccccaaacagagatttacccacatatttattaacagcaagccagtcattagcattgtttctgtagatattcgattaaccaaaagtatcccttatgggaaacgaagggatgggccgaaataaagggatgggttgggcttgttatctgcagcaggagcatgtccttaaggcacagatygctgatgctattgtttgtggtttaagaatgcctttaagcagttttccgccctgggcgggcctggtgttccttgccctcattcgggtaaacccacaaccttccagcatgggcattatggccatcaggaacatgtcacagtgctgcagagatttgtttatggccagttttggggctagtttatggccagattttggggggcctgttcccaacaccttctctttgacattttcatggtaaaattatgtaaactgtctgtaatagccttttacttaatttcctggtttttgcttccctctgtaactgtcatca

SEQ ID NO: 3596 - DNA, 671 bp, Homo sapiens
tgttactggaaatcagaatggatgagtcaatgctgtagtcattgagtgttatacactgtcttctctgctaatttagctgagcttgtgccataactatcagttttagtggaatgagggggagattactgtcctagattttcactgaagtatttttcctcctctttcttttttatagcatattagttgatgtaaaatttaattctacaactaagtataactatagacttaatgtgcataatggaatgtgagcatggattctgactcatgaaaatctgaatttgaattatgtcttggcttgttcatttgctgtatggctttaggcatgtcatttaatcactttgacccttagtttccttkcctgtaaaatagaattaatactaccagttttttggtgttctgattgatgattaaatgaaataatgtatatattataaagtgcatggcacagtgcctggcacctagtaaagcattcagtagataataactcacctagtatttatttaatatgaaggaatctcagtgcacagattcttaagttgatatctctcatgtctttcaagtattacttcccatttctgagtttttagtattgtaacattggattttacctctgaaaaatcagactactgtttaagactatcacctgtcctgatttctttcttttttttttt

SEQ ID NO: 3597 - DNA, 1237 bp, Homo sapiens
gagtagcactcacttattcccacatggaacttagattagttccccagctaagccctggctaaacaccaacacatagtattgtgggcaaagaaatagtggtyatttgaagcaaataaattttcaatcacttagttttgtaacaaacaggtaattaaaatactgcctttcaaatattttctgcagctctgctgtctacccatctaaatgctacctgtaatcacagacttctaatattgaaaaaatcctgtgcttgttttatgacagagtaaaacacaaaaggagagagtagaaaacaaaggagtgcttggaccataatagctctcaaaacattaactcaaagagcccctggtataaaactacctttgaaatcctgtggatccaactttgtgctacggttcttttaaacagggatcagaacagtctggattctttctgggtaaattctgacttacttttttcctcctaagtccctcctccatcatttggggaagataagaagggattctaattattaagttatgtgtacatatctacctgtgtttcttgttttctcacatgttattagtgggataatagcaagtcattatggcacatactggccctctcacttgctccatcaatctctgcaaatactaatgatgttctctcttcacaagtagacttaaagaacaacaaaaaattaacctgaagcttctttcacaagatagtttgtcatttttataaagtaactggttttcaaggaattcaatttatcttttgttgtcattagttcgttttctgtgcctctcgtttcagtttcaccctaatattgagaaattcaatttttatgatggaggagtattggactcatgtttcaatacgtttttgggggttataattatattaaaataatgggctaggcactgtgagagattaaagaaatgtataacagattatccctaactgatataaaattagagtccagttaatagaatgctttatgtattccatttcgtctgagatgtgggtgagaagatacattattgttggtattttaagcttcttaaaaatgaaacaatcatattttccctaaacgtaaaacaaaatagcttatatatttttattattataaaagtaatatgtgttatttcaaaaaacgtggaaaacaacgaaaaacaaataaaaatgtttaaaagttacctttattttagactacttacttgtatcttttatatatataaataaatcaataggtaga

SEQ ID NO: 3598 - DNA, 1237 bp, Homo sapiens
gagtagcactcacttattcccacatggaacttagattagttccccagctaagccctggctaaacaccaacacatagtattgtgggcaaagaaatagtggtcatttgaagcaaataaattttcaatcacttagttttgtaacaaacaggtaattaaaatactgcctttcaaatattttctgcagctctgctgtctacccatctaaatgctacctgtaatcacagacttctaatattgaaaaaatcctgtgcttgttttatgacagagtaaaacacaaaaggagagagtagaaaacaaaggagtgcttggaccataatagctctcaaaacattaactcaaagagcccctggtataaaactacctttgaaatcctgtggatccaactttgtgctacggttcttttaaacagggatcagaacagtctggattctttctgggtaaattctgacttacttttttcctcctaagtccctcctccatcatttggggaagataagaagggattctaattattaagttatgtgtacatatctacctgtgtttcttgttttctcacatgttattagtgggataatagcaagtcattatggcacatactggccctctcacttgctccatcaatctctgcaaatactaatgatgttctctcttcacaagtagacttaaagaacaacaaaaaattaacctgaagcttctttcacaagatagtttgtcatttttataaagtaactggttttcaaggaattcaatttatcttttgttgtcattagttcgttttctgtgcctctcgtttcagtttcaccctaatattgagaaattcaatttttatgatggaggagtattggactcatgtttcaatacgtttttgggggttataattatattaaaataatgggctaggcactgtgagagattaaagaaatgtataacagattatccctaactgatataaaattagagtccagttaatagaatgctttatgtattccatttcgtctgagatgtgggtgagaagatacattattgttggtattttaagcttcttaaaaatgaaacaatcatattttccctaaacrtaaaacaaaatagcttatatatttttattattataaaagtaatatgtgttatttcaaaaaacgtggaaaacaacgaaaaacaaataaaaatgtttaaaagttacctttattttagactacttacttgtatcttttatatatataaataaatcaataggtaga

SEQ ID NO: 3599 - DNA, 650 bp, Homo sapiens
taatttgaagttcaactgggtgaaatattgctactatttaagctacttatttataaaatatggatcctgttaattatattgatagtgtgaagttggaactctctctgatgacaagagatggaaggcaaattttcttaaaatactaccctccactgtcttcattattcaccagctgcttatgtaaaaaatgtaaagttgaccagctactttacctttctaaactgggtttcctcatctacaaaatgattgggttaggttatcactcccttcaagctctaaaaatgatatgattttgcagtaacaaaaccaaaaatggtgatcatgttccagtaaatagaaagtcctctctgctgtacagtctatcaagattgtctcagagccaggagagaagctgactagcactgacttcaaagatatggatgagtcaaaattctatttccacactgttatatttgagtaatctagkgcttgtcagaattacgcatttttaaaaatttcagtgtacaaaaatatctacttctaattatttttaaggatagaatttgagcaatggatctgatgctggtacctcagtataatcccatcatcagagtcaatgattctgggtagcattagaagtaaaattagtagcacaagtttctttgggtgct

SEQ ID NO: 3600 - DNA, 965 bp, Homo sapiens
aagttacttcactttcctgaatctcagtttctttatctgcaaaatggcaatagcaatatttaccttgaagggttataattgggcctaagtgaaatgatacatgcaaaacactcagttatcaagcatttattgagcttatactgtgagcacagtctggcttcaacaacaattttcctgatgatgttgaacataaaaacattcgaatgtatttaaagtatgtctgtgaaggtatgtaaacatatatactaattcaaacatttttaaatatctagatgaagtctcactgtgttgcccagggtggtctcaaactcctgggctcaagtgatcctcccacctcagcctcccaaagttctggattattggcgtgagccaccgtgcccagccaaaagatatattctggctttggagggcagctctgatttttacatactctgccccattgtctaaccctgatgtgtccttatttttaattcaaaaaccttttaccacatgtgaattactgcttaaccaaaggatagttttatataccactcttaattgtttgagtaattagctcaaactgttmtgggaatatcttgaacttggtagattggatcagggaacaagaggctattgagctagcaacccagactgtggaaatgacctccgaagaattatcaagtaaaatatgtacacacacacacacacacacacacacacacacacacactagttactagttatatagaagaaagagactttagagtagtccagtctatctgaaatttactttacggctctgggtaagtctaaccatagtcctaggtttttagctttccacctataattcaatgataagagtattattgttgtgaggataacttggtaaaatgaatggagtactctatgaacccggaggggaaaaagttgtaaagatcacagcaagtttaaaaaaaattactttaaaaatttactataagaatgca

SEQ ID NO: 3601 - DNA, 627 bp, Homo sapiens
aacacaaagatatatgttattttttctttttttggagacagggtctcattcagtcacccaggatggagggcagtggcgtgatcactgcttactgtagcctcaaccttctgggctcaagcaatcctaccacctcaacatccctagtacctggaaccrcaggcatgtgttaccgtgcccactaatttttgtattttttgtagagacagggtttccccatgttgcccaggctggtctcgaactcttgggctcaagcaacctccttggcctctcaaagtgctcagattacaggcatgagccactgcgcccagcctgttctgttatttttactgtggaactgaaagataatagcctaggtaaaatctgtattaggaaagtgcacagtttgcaggccaagtagtctttgcaagtgatttttaaaaacaatttgcaaagctgtcgaagcttccattcatacctactgccttaggtaacaacacagcacttacccttgtgagtggcaatgtcttacctactgagtcagccttctctaattgggatacttgctagaagtttctaaacaaaatatttctggcagctgtgtgcatctgcaaatattttctgagtgagggcagtagcggataagtggag

SEQ ID NO: 3602 - DNA, 1023 bp, Homo sapiens
aaacaccagacaaatcgaaattgggagacattctaaaaatagaatccattggaatattaccttcaaaaaatgtttaggatgctatgaaggttgaagaaggactatggaatgcttctgatttaaagaagttaaagagacataggaaccaggaacaacacattatcctgaagtggattgttttttataaaaagcatcagggcagtttgtgaactagaatgggtcctctcttggtgattgttacatgacagctgtttgcatcacttyacaacttaaagataaattgcttaaagataaattggcgtcgtttcatacaaacattaaagaaaatggtaatgtccaacaggcacagagtgcccgcctaattactgttccaggggtcctcagaggctgttttcctactatcttcttgatttttaaaatatattttagttgattggttttattcatgccataattggtggaaattaatccttgattctataaatttttacctagtccgtttccaatgttttttgtttgtttgtttctctttccttacttatttatttattcttttcttttactttttttgtaaagtggaataagttaggaatgagtatattatgaccaactaaactgagtagttttatgtcaagttgcaaattatgttaagtatcaaatatttgatttttcttagatttcaaaatagtcacgttttcagaaaaaatcattagtagttttctaaaaataaaatcctcttgattcaacaaaacatacttgatgtggtttttcctcccaaaacaggctcctccttgagttattgggaataagtaatgcttctcaataaagcttcgtgtcaacaaatctgaacatataacatctcagctagagcaagttactaaaaataggctcaatttgtagcttgcagtcatgccttcataaccacttttcaattaatcctgcttaattcagagaatgtataaatatgtaattttgcatcacttttaaggcagccattttattttgaaatgcaactaacgttat

SEQ ID NO: 3603 - DNA, 1827 bp, Homo sapiens
tttttagattcattatgattaatgtttaagaatgaatatataatttctagtcaatatataataatgcaaatttaacacataagaaatattgatagaaaaagcattctaccttaaacatattgctagaccatgtgagagagttctgtagaatagattcaagaatggtgtggaaaggggtggtacctcctgatcaattttctcccctgatgggggcaggtgtggaggaaaactcctgggaaataaagaagtcaggtgttctggtttaatttttctgcaaacatattaatgcaagtctcttagaaaataaactaaatagtttttggtggccaaagaatcattcttcataaaatgtttctagcagaccatgcggagttgtctaaaattgcttatgaaaaataagccaggaatcaataaatgtagggtgatgattcccaagaaaatgtcacgttagctgtgttgctgcctaagtataaaaggagatggtttgtaactgagaatacacttgagtaagtaaagcaactgtacattttacttagaaaccaaatctagaaacttggatgagaccacattcaatgaagatgaaaggacccaggtctctccccacttaacccatacatgattattttatctttgaaattattcaaaaagcatgatactgagcaaaatcttcaatctgagtctgatttgacaattcaatgctttttgtgggttcagattggcactgagagcaggattgtcttttagacccacacaccaaaatagtgaatgttttctktttctacctgggctccttttcaaaaggaaataatggaaaaatatgagaatttgttctcaggatagttggctgtacatttttggtatgaggtagtggaatctttgaggcaggttaagggaaataagtcttaccattgaaatctgggggccatagactacagtctgggagtacgggtctagggagtacatggacaaagggaaattgggtgcaaatcccattgactgactcctgctagcatacctgtaaaagctaaccttttaataggttagtttttaataggaggagatgatagtgggagaaaaagctgcgagattacattttattcactggaaaaccttcttatccctccctggtttcttggagaaatttcttgtatcttttgaaatgactcaaaatattgattataggacaaactatttatgtaaccagagtccaaggacaggtgatgagtgaaaactatattttattaaagaacagaatattcactaacagaagactggtgaattaacattggcatggattcttcaaattaatgatggaggacatgttgcaattctattattatctgatgcaaaggactattcatggtcatgactaatcattaaatggctgtaaacttttgagaaaacacttccaaatactgtgacagcatatcggctgcagttgttaaggtgagatttgtcagtcctatactgagaagggtaactgctactactcctctccaaattgccaattggattctccttttcacatgataggaatgatacaagtgtaaaggttgacaggctttatattttccagagagaaaacaccttagttaatgctattgatacaaataataagagatagagtgaatgggataagctaatgattctctgtcttacaagacttatataaccttgagggccaaatatatatattcagagaacagtaacaaacatacaggtttagttactatacatgggattatatggagaaaaagcatttatatcatgtgcacaacagggagaaattaaaaatcagaagagaaaatagaaaggcagctcacatga

SEQ ID NO: 3604 - DNA, 453 bp, Homo sapiens
cataaaaatgaagatatttgataattgagacaggtatctccatgtaaataaattgtcggcatacctctctagaagtctcatctatctgcctgggcaagggagtatctaatgacagaaccaaggatctaaagaatcagattaagagatctaaataattctctgatttgcccatgcctaatgattaactgagttcrtgagattactagtaaagctttatattttgtaagatcttagattctgataagtctaatgtcacaatccaatcagtttttcctatctcaaggaatcatgtccatataatggaattaatcctgaaactctgaaaagttttaatattctggggtaagggtagatgagaagtagtctccatatgacttataaacatgtaaggagaaatagtaaaattgttgtaaaattaaaagaagaacagaaattcataaaataacctataac

SEQ ID NO: 3605 - DNA, 705 bp, Homo sapiens
tatcagaaaagaggcaatttttttttatatttaaaaagttccctttttccagtctgttcatttttatgcatcaactctcattttatgttgacaatttcataataactatatttacctttattttttatccatatgcatttcatttaaaagtgaaaacttccactcaaaatgtaaaaagaacttatagaacttgcctccaaagagctctactagtctgtctttcctatttcatccaatgttacgactacaattcccatctatcaaacacagcagagtcaattggtaagtcatttatgtctctttttatactatttttcatgaagtttctctattttccagttctattgtatgtcacctcaaatatccatacaacacattattttaatctccttccctctaagcatttctgttccacttaatctaacacaatgttctcaaagatatgacaaactgcaactctgttaaaaaaccttcaaagactttccactgaactgaacagaattaraatagatgattatttcagtcatgtgttggtatacaacaaaataccccaatcacctgttcttcctcctgttaaagtcaatgtattattaaaacgtccaacttccttttatgaaatatttcacacatacccaaacatgaaaaataattgatacagcaacataaccagaaacaagattataagaaattctacaagggataact

SEQ ID NO: 3606 - DNA, 700 bp, Homo sapiens
tgtaaaaagctgctaaaaaagcaagaggtattttttatttttttgtaatttgattttattatcatgttttcatacccacacaaaataatcaatacattaacatacaaccatcacacatattcaacaattatcataattttgttgtttctgcttaaggtatccctgttctcttcttgccaaattattttaaaaatatatctcagaatgtaattttatacctacatacttaaggatacatctctagaaaatgcagatatttagtaatacatttttgcacagtttattttacttcagtatctcaattcaaatattgtttgttattaaaaaactgcctctagcatatgttttactatatatttaagaatataatttggaaaaaagagtctgacacatagtccatgttcaatttacctcttcaactgatctactaaaaggaaaaaaatgacaccaatacttcttactcttccctgaagttatgttatgatatttttagattttgaaatcctgtaaagtgtgcccattattggtttcaagtacatgtttcctaactcatttcaatctcttctataatcaagtscaagagaaaatataaaataggccctatgattgtagaaataaaagtggaaaaaactagcctagagttcataaaagtagacatataaaaatcttgaaatgataaaggccataatcaattaattga

SEQ ID NO: 3607 - DNA, 772 bp, Homo sapiens
ttttttgtatttttagtggagatggcgtttcaccgtgttagccaggatggtctcgatctcctgacctcatgatccgcccgcctcagcctcccaaagtgctgggattacaggtgtgagccactgcgcctggccagtgtatgccttctaaaagcagagtctgtagtaaatatatatataaatggtaacacaagcatataaaataaaatgtggcaattactattcaatgaaaaatacagggacatttgggagagcataacaagtaaagtaagggagtaaatacgtgctgagataaatgaatttttgttacatgagtcaggagttaaagaaataaatgaaagatgagagattaggatataaagtatatagggtgccagttcatataacactttatattaaaggaatttgagcttttggttgaaayaatggaagctattgggagttttaaggggattgatatgaaggaggtaaaataggagtctatagcactaatctaaagtggtaagtgaatggaagtcaaagctatttagtggagtaggttgaaccaaaattgatgactaagtaggtggtatctaaaggaaaggaaaagtttgagtcttgggtatctggcatgcatagtatactaacagtgatatacacagttactttcaggctcactgaatgagtagtggtcaatgaaatacagaacaaagtcatgcaattcactttcaagttgtgttcttgaaacttcccatggcacccatgaagatttcaagagtcatttgttattatatcc

SEQ ID NO: 3608 - DNA, 617 bp, Homo sapiens
atgctctccctccctttgtcccccacccaccgaaaggccctggtgtgtgatgttcccctccctgtgtccatgtattcttattgttcaactcctcttatgagtgagaacatgcagtttttggttttctgttcctgtgttagttttctgagaatgatggtttccaacttcatccatgtctctgcaaaggacataaactcatcttttttatggctgcataatattccatggtgtatatgtgccaygttttctttatccagtctatcactgatgggcatttgggttgtttccaagtctttgctattgtgaacagtgctgcaataaatgtacctgtgcatgtgtctttatagtagagtgatttaaaatcctttgaaccccaagtttttcttttgggatatggctgccagaaataaagatgacattttactggtgctgttaaaagcaaggttagccatatgactgtttctatctaaagtaacggggtggaagtgatatttgcaatccttgaaaccttaagggaaaagagttgcagagaatattcttctttgctccttccttcttcccaggggtagctctgtacttgcagccttagcagtaggcacctcacatgatcgtgatta

SEQ ID NO: 3609 - DNA, 663 bp, Homo sapiens
gctacaatgtatatgtgcttagtgttttttgaatcattaagttttctggaaacctaatgtttccagaaaaaaagttgatgactgcaagtataaaatatatgaaacaagtatacatgaaagcaaagagaaaaacaaaagaaattcataaaatgaatagctatcgaagaatcccatctatttactatatgttttccatcatatcgaaaatcatatattttcattttatggaaaagtttgacgattttatttgtagtaaaaaatttaaaggcagcagcaagtgcaacgtragtctttattgaaaaagtttgttaaaatattctgtatgagtcttgggtgattctcggctcactaaagcttgtattttatcttatctccaatgatgtggcatctgactcagtgtaaagacttgtgatcatttatttgattgcaaccatctgttttctaaaagtcatttatctctctcaggatttggaataatatctacagattcctagggtgccctctttcttttcccttgaggaaaattactttgtcttgattgcctatttcttttttattctctcctgggttttgtcctaaatcaaccctgtccttggggagttcaaaggcagcaattaggaagtttgagtgtaagaactaccagtgactgcatatgagagaaaa

SEQ ID NO: 3610 - DNA, 916 bp, Homo sapiens
tgaagtcttactatgtatcrgttactattataattgatgatcatagtgaaattgtagtcaaacatacgtatcagctccatttccttacagtagaatcctgtatggaaaaaggtcacatgactgtgtccctttaaagtggtaggtaagtaaacaaattctcatggagtttccttttttacattttaagaagctcagcctaactctactagcacagttttcctaaggacagagcatgacatagttggtcaggatcacatatattactgtcattacattgcggtcttactgccctcagattttactgaaatcacctcgattagagtttagttgtttaataataacttacagtatatcccattttgtgatgtgcatacaaatgttttatgtatgtatttgttatatacatgaaacaaattttggcatacatattatgcaaaatatatattactaattatagatatataccatgtataagcctacatacatatatgcgtacatatacacacagcctcagaaggccattttggtttttttactttcattttttttgtggtatcagagtgaacaagtaacactattattttttctttaagaagatattctactaataaaataaccaagtgaataaaaaagaaatgaaagatatttaaagagataagcatcaagaatatatcaggaaaattatggtaatggtcacttgtttacctgcacatacatttttggtaattggacattaggcgtcaggcattgtgtcccttgacaaattctcatggaatttttaaaaacaccacactacttgatttactaaataaaagttaaaaaattataagccatagtattttattttattgatgttggtttttatatttcagtatttacagaaggtagaattattattctttgaaaatctgagcaa

SEQ ID NO: 3611 - DNA, 916 bp, Homo sapiens
tgaagtcttactatgtatcagttactattataattgatgatcatagtgaaattgtagtcaaacatacgtatcagctccatttccttacagtagaatcctgtatggaaaaaggtcacatgactgtgtccctttaaagtgrtaggtaagtaaacaaattctcatggagtttccttttttacattttaagaagctcagcctaactctactagcacagttttcctaaggacagagcatgacatagttggtcaggatcacatatattactgtcattacattgcggtcttactgccctcagattttactgaaatcacctcgattagagtttagttgtttaataataacttacagtatatcccattttgtgatgtgcatacaaatgttttatgtatgtatttgttatatacatgaaacaaattttggcatacatattatgcaaaatatatattactaattatagatatataccatgtataagcctacatacatatatgcgtacatatacacacagcctcagaaggccattttggtttttttactttcattttttttgtggtatcagagtgaacaagtaacactattattttttctttaagaagatattctactaataaaataaccaagtgaataaaaaagaaatgaaagatatttaaagagataagcatcaagaatatatcaggaaaattatggtaatggtcacttgtttacctgcacatacatttttggtaattggacattaggcgtcaggcattgtgtcccttgacaaattctcatggaatttttaaaaacaccacactacttgatttactaaataaaagttaaaaaattataagccatagtattttattttattgatgttggtttttatatttcagtatttacagaaggtagaattattattctttgaaaatctgagcaa

SEQ ID NO: 3612 - DNA, 916 bp, Homo sapiens
tgaagtcttactatgtatcagttactattataattgatgatcatagtgaaattgtagtcaaacatacgtatcagctccatttccttacagtagaatcctgtatggaaaaaggtcacatgactgtgtccctttaaagtggtaggtaagtaaacaaattctcatggagtttccwtttttacattttaagaagctcagcctaactctactagcacagttttcctaaggacagagcatgacatagttggtcaggatcacatatattactgtcattacattgcggtcttactgccctcagattttactgaaatcacctcgattagagtttagttgtttaataataacttacagtatatcccattttgtgatgtgcatacaaatgttttatgtatgtatttgttatatacatgaaacaaattttggcatacatattatgcaaaatatatattactaattatagatatataccatgtataagcctacatacatatatgcgtacatatacacacagcctcagaaggccattttggtttttttactttcattttttttgtggtatcagagtgaacaagtaacactattattttttctttaagaagatattctactaataaaataaccaagtgaataaaaaagaaatgaaagatatttaaagagataagcatcaagaatatatcaggaaaattatggtaatggtcacttgtttacctgcacatacatttttggtaattggacattaggcgtcaggcattgtgtcccttgacaaattctcatggaatttttaaaaacaccacactacttgatttactaaataaaagttaaaaaattataagccatagtattttattttattgatgttggtttttatatttcagtatttacagaaggtagaattattattctttgaaaatctgagcaa

SEQ ID NO: 3613 - DNA, 916 bp, Homo sapiens
tgaagtcttactatgtatcagttactattataattgatgatcatagtgaaattgtagtcaaacatacgtatcagctccatttccttacagtagaatcctgtatggaaaaaggtcacatgactgtgtccctttaaagtggtaggtaagtaaacaaattctcatggagtttccttttttacattttaagaagctcagcctaactctactagcacagttttcctaaggacagagcatgacatagttggtcaggatcacatatattactgtcattacattgcggtcttactgccctcagattttactgaaatcacctcgattagagtttagttgtttaataataacttacagtatatcccattttgtgatgtgcatacaaatgttttatgtatgtatttgttatatacatgaaacaaattttggcatacatattatgcaaaatatatattactaattatagatatataccatgtataagcctacatacatatatgcgtacatatacacacagcctcagaaggccattttggtttttttactttcattttttttgtggtatcagagtgaacaagtaacactattattttttckttaagaagatattctactaataaaataaccaagtgaataaaaaagaaatgaaagatatttaaagagataagcatcaagaatatatcaggaaaattatggtaatggtcacttgtttacctgcacatacatttttggtaattggacattaggcgtcaggcattgtgtcccttgacaaattctcatggaatttttaaaaacaccacactacttgatttactaaataaaagttaaaaaattataagccatagtattttattttattgatgttggtttttatatttcagtatttacagaaggtagaattattattctttgaaaatctgagcaa

SEQ ID NO: 3614 - DNA, 491 bp, Homo sapiens
gtcaaattcaattctactttgaggtcactgaaggaggaatcaatgaygaacactctgtggtcacccttgcacctatttggatttcatgtctccaaatcctcctgtgagactgggagaccgaagctgatggtggaagtgggaacagaggcccagagaaaaagaactggagtgcagagcaaaggcaaactagccagggtgcaggaggggacagtccccgctctcccatctatgggtccatgaccctgtgccaaatctcttggtgtaagcagctgatttattttttcatttgttgtaacaatttgaaaatgagaagtcacggtgattttaccctgattaggtactactgggctctattactgtagccagagctgggcgaagatttagacttttttgtctggtaaaaactgggaatgccaaccaccaactatccagaaactgcaatttaataattctcttcaactcttttaactcgactaatattactgagttcc

SEQ ID NO: 3615 - DNA, 902 bp, Homo sapiens
  misc_feature (1)...(902): n = A,T,C or G
tgtcatcttgcccttgcctggccacagaaaataagtggttacaacttctggcagacagacccaaccctgaggcaggatgggccatggaaaataggatgctgtggaaattggtctgggtgcagamctggcacctggagatattacctgttgtcagtctatcacccaaaggtctggaatgcccagagagctgaggtgaacttggtcttagttgagtaggcatcaggatctactatatgtcaagtccctgctaggggtagtgtttggttctggagtccagactgtggacattaattgaggttgtgtgctttggaatagcataatgctgggtgatctgtctgctcatgggagaacctgatgggtaccaaacacaagaagctatcaaaatcagggtccaggctctcccctgagagggctgccccccgttaagcaggagtagaggcctgccaaccactccagggatctggtctcactgggggaatgagcattcttgcagtaaggctccggtccaaaggctgagcccacatggtgatgatggtgtagagaaagctcaggttctgttgtgtcttcctgtncgcagatcttcctgcattaggtgttggttgccaatcaatggtatgttgacgtggctgggttatccgtcattccaataaatactagatgaaccactcaaagtggctgaaactgcacagggaaggactcaatgcctcaccctgatgggggattggggtcagggaacagcctctgagaaggggctatagagttttactgggagcagagtccggacatttggaggccaatcatggctcaaggactatcttttgcaaaacctaaagcaagtttcagaacctttctgggctgttgtttcctcagtagactatgtgccctgtggagtcaggggcccg

SEQ ID NO: 3616 - DNA, 902 bp, Homo sapiens
  misc_feature (1)...(902): n = A,T,C or G
tgtcatcttgcccttgcctggccacagaaaataagtggttacaacttctggcagacagacccaaccctgaggcaggatgggccatggaaaataggatgctgtggaaattggtctgggtgcagacctggcacctggagatattacctgttgtcagtctatcacccaaaggtctggaatgcccagagagctgaggtgaacttggtcttagttgagtaggcatcaggatctactatatgtcaagtccctgctaggggtagtgtttggttctggagtccagactgtggacattaattgaggttgtgtgctttggaatagcataatgctgggtgatctgtctgctcatggkagaacctgatgggtaccaaacacaagaagctatcaaaatcagggtccaggctctcccctgagagggctgccccccgttaagcaggagtagaggcctgccaaccactccagggatctggtctcactgggggaatgagcattcttgcagtaaggctccggtccaaaggctgagcccacatggtgatgatggtgtagagaaagctcaggttctgttgtgtcttcctgtncgcagatcttcctgcattaggtgttggttgccaatcaatggtatgttgacgtggctgggttatccgtcattccaataaatactagatgaaccactcaaagtggctgaaactgcacagggaaggactcaatgcctcaccctgatgggggattggggtcagggaacagcctctgagaaggggctatagagttttactgggagcagagtccggacatttggaggccaatcatggctcaaggactatcttttgcaaaacctaaagcaagtttcagaacctttctgggctgttgtttcctcagtagactatgtgccctgtggagtcaggggcccg

SEQ ID NO: 3617 - DNA, 1532 bp, Homo sapiens
tagtcagtaagccagattgtatgagtccaaatcccagaactgtcacttattaactataggacctccagtaaatcactcaacctttctgagtcccagtttcctcttatgtcaaatggggaaaataattatagtatccacctcatagggttcttgtgtgtgcttaaatgaattaatatatgtaaagtacttagaaaaactcatagtgcatagtgaggactttatcactattaccttttattataattaaagtatattaaattaaggtcagctcctgcaactagtatttaagatgaggaactagtctgctatttctttgcccagcttctgatgcctcgagaatcagcttgaagcttttgctatttcttgcatcatacaaattctctggatagaatgagtttggtgttgtcccctgaccagcttccatcaatgggtccccttggacatggaaaccattttggactgaatcttaagagtttcttcacccactcagacttcatttaattgcctttcaggtcatgacacagattaagtaactgttatggcaccggcaccagcagtttctactttatcatcacagagtttactcttcactgtaaattgttttcaaactccttctttccccctgcttaccagcataaatccacattaagatttttctatcttcctatagcatgaaaaatctaggtaggagatttaaggcaatttggtagatatagcccgtgggtgtctgtgttcatttgtcacatgctgatgtactactggagacttataagcatcaatgtatctatttctcgttcacatgtaccttcattagggaaaatagtccatagaagttttacggacaataaaaactcattaaaaatttaatattccaactctattaataacttttcaatataaaacattgtaaactatttctccatcttctcatcacacttaatccagtaggtttcaattgggagtgtacaaaagaatactcaatggagtgttctccctagagaacacttttggttaatggagtgaaggtccttttcacacctcctacagagggatctagatttgcaaggagctaagcagwttagaattcacggcaagtgtgtcatggaaacagcatttttagacatcagccaatttatggggaaaaggaagagagagcaatgcgtttaaatagcacattgttgatatgcaaataggatcatgtagttcaggcctaaaacgatttagtaatttcacgtcccctctaaggcaaaatctcaactttgccagggtgttaaaaactccataatccaggtcccatgtatctttcaggcctcaacttccatcactcttctgtgtgatccagatgtcctaaatgatatggagtctcaagaatgattctatgtcatttcattttctaagtctttgcccatgctttcccctccttagggaaaagcacccctttaacattttttttatttaactgccaattggtcatcctgtaagggtttattcacataccactccttctgtggaagccttattgacttccctac

SEQ ID NO: 3618 - DNA, 1265 bp, Homo sapiens
gtagtaagagcctaaaaatttatatcagagcttcaatatgttgtctaaatcaacaatttcttaacattgaaacccaacaattggtacaaagatactgtgccttctccatgaggtaggataatcaattcatacagaactggtagtctattcctacttttaccattaataaactactctcagggagtacggccaacctctatattcaacaacgaaggaaaatcatttacatctcaataaaacagaaaaaaatattggaagacaaatttgtaatgctccttctctccttctcccttttgtgtatgtagtttacaaaagttcagctgaagtagcaatgtttgtcctaggggaatatatctttaaggctgaaactcaggaatttgggggtccaacaaagaggacaggggtttgtcaaatagcactacacagatatgtctatttcacttacatttaagtatgcctgcctcacaaatagtaaggttattcccaccaaactgatacacagtacaatcgatcatttttgttacatatttgattaaagataaacttttgaaatatttttacattctaaaaataaatggtagtatagatttttgtgcttctttctttctcccactattatacggttacctttattattgtaattgctctaaatgcttaggctgtattggctgaattaaaattaatattcttcaaaattatttcttctaaatctattggtctgcaaaactgagtttctttgagcaaggatcacattctaattatttatcttcctttactgtttagcacagtgcctggcaatagtaaataagarttgtttgaagaacaactatattatatgttatgacaattgactgcaacataatctattgctctgacattatagatggtttcttagtaaactacttttcaatatacagcaattgagaagacagataattatatagttatagttatgttaatgccatataactctttgaaagaatctggtctacaggcattagcaccataaaataattttggtcagtgtgtggatggtcgatattaaagttagattttaaataattttttattgatagtctgtatctttcatttagaggtcataagaataaatattgatgtcgagacaaaaaatacaaatgctaaagcattgataaataccaaagcaatttgctggcagatattaacattttttaaaaaattaccttagtagtctattgcattattctagacccttttcaaggaaaacatttaatttactgtggaat

SEQ ID NO: 3619 - DNA, 1265 bp, Homo sapiens
gtagtaagagcctaaaaatttatatcagagcttcaatatgttgtctaaatcaacaatttcttaacattgaaacccaacaattggtacaaagatactgtgccttctccatgaggtaggataatcaattcatacagaactggtagtctattcctacttttaccattaataaactactctcagggagtacggccaacctctatattcaacaacgaaggaaaatcatttacatctcaataaaacagaaaaaaatattggaagacaaatttgtaatgctccttctctccttctcccttttgtgtatgtagtttacaaaagttcagctgaagtagcaatgtttgtcctaggggaatatatctttaaggctgaaactcaggaatttgggggtccaacaaagaggacaggggtttgtcaaatagcactacacagatatgtctatttcacttacatttaagtatgcctgcctcacaaatagtaaggttattcccaccaaactgatacacagtacaatcgatcatttttgttacatatttgattaaagataaacttttgaaatatttttacattctaaaaataaatggtagtatagatttttgtgcttctttctttctcccactattatacggttacctttattattgtaattgctctaaatgcttaggctgtattggctgaattaaaattaatattcttcaaaattatttcttctaaatctattggtctgcaaaactgagtttctttgagcaaggatcacattctaattatttatcttcctttactgtttagcacagtgcctggcaatagtaaataagagttgtttgaagaacaactatattatatgttatgacaattgactgcaacataatctattgctmtgacattatagatggtttcttagtaaactacttttcaatatacagcaattgagaagacagataattatatagttatagttatgttaatgccatataactctttgaaagaatctggtctacaggcattagcaccataaaataattttggtcagtgtgtggatggtcgatattaaagttagattttaaataattttttattgatagtctgtatctttcatttagaggtcataagaataaatattgatgtcgagacaaaaaatacaaatgctaaagcattgataaataccaaagcaatttgctggcagatattaacattttttaaaaaattaccttagtagtctattgcattattctagacccttttcaaggaaaacatttaatttactgtggaat

SEQ ID NO: 3620 - DNA, 1265 bp, Homo sapiens
gtagtaagagcctaaaaatttatatcagagcttcaatatgttgtctaaatcaacaatttcttaacattgaaacccaacaattggtacaaagatactgtgccttctccatgaggtaggataatcaattcatacagaactggtagtctattcctacttttaccattaataaactactctcagggagtacggccaacctctatattcaacaacgaaggaaaatcatttacatctcaataaaacagaaaaaaatattggaagacaaatttgtaatgctccttctctccttctcccttttgtgtatgtagtttacaaaagttcagctgaagtagcaatgtttgtcctaggggaatatatctttaaggctgaaactcaggaatttgggggtccaacaaagaggacaggggtttgtcaaatagcactacacagatatgtctatttcacttacatttaagtatgcctgcctcacaaatagtaaggttattcccaccaaactgatacacagtacaatcgatcatttttgttacatatttgattaaagataaacttttgaaatatttttacattctaaaaataaatggtagtatagatttttgtgcttctttctttctcccactattatacggttacctttattattgtaattgctctaaatgcttaggctgtattggctgaattaaaattaatattcttcaaaattatttcttctaaatctattggtctgcaaaactgagtttctttgagcaaggatcacattctaattatttatcttcctttactgtttagcacagtgcctggcaatagtaaataagagttgtttgaagaacaactatattatatgttatgacaattgactgcaacataatctattgctctgacattatagatggtttcttagtaaactacttttcaatatacagcaattgagaagacagataattatatagttatagttatgttaatgccatataactctttgaaagaatctggtctacaggcattagcaccataaaataattttggtcagtgtgtggatggtcgatattaaagttagattttaaataattttttattgatagtctgtatctttcatttagaggtcataagaataaatattgatgtcgagacaaaaaatacaaatgctaaagcattgataaataccaaagcaatttgctggcagatattaacattttttaaaaaattaccttagtagtctattgcattattctagacccttttcarggaaaacatttaatttactgtggaat

SEQ ID NO: 3621 - DNA, 576 bp, Homo sapiens
aaaaaattatttaaatgagtttaatatactattctaacttcacatacatagatatgtttgaaggataaaaatcttcaaaaaatcttgttacttaactctagttttattgttattaacaatattgaattgtaattttgaaacttttttatattatacaataaatcaaggtaaatgtgtaataaataggtaaatgtgatagttcattttatgcagcaactggattgtgttaacagaaaccaagattttcagagtaagaaaaaagaaacaaaaatataaaatcaaagtgatagggtttggatctgtstccacccaatctcatgtcgaattacaacccccagtgttggaagtggggcctggtgggaggcgattcgatcatgggggtggatccttcatgaatggtttagcactatccccttggtgctgcctggtgatagagttctcatgagacctggttgtttaaaggtgtgtagcgcctcccctctcctcccggcccacttctcggtcctgctcctgccatgtaagacacctgctcccactttgccttctgccatgagtaaaagttacctgaggcctccc

SEQ ID NO: 3622 - DNA, 612 bp, Homo sapiens
atgattttccaatggttctgtttttctactcttgatggcaaaatattactggatttgtgataagatttgttctgttgtttaaagtagcaaataccaagtggaaccattatatcagttgaattctatctgaatcccttccctggtggaatttcattcttgcagacattgcacagttcaaagttcatagacttgaaacatgaagattcttctagaaggaaatatctcagctcatagtcctcgaaagtgagtagagcttcacagaatctgggtatgtacatggctgcactgagaattaacacatatcaggccttgctattgtgaaatagctgtggtgggtaatgaccatmattcattctattttattagtttttaaatgtgattccattttggctttggcagaggtgagggaactgacttgtattttctctttatgcttgatatccaaaagcccctttggggaaaatgacgctagctaaaatcacgtaaattaaagaggaaatttgctaagacaccttgacaaactcaaaaatgaaaatactgagctttaactctttggtcatcctgattcttgactcttacactcataattagtgaaggaggtgtggagagggc

SEQ ID NO: 3623 - DNA, 2237 bp, Homo sapiens
gcatgttctcatctccccttccacccaactcacctgtcatcttcctgtgcttcctcattgcaaaaccagcattcctctcacggtcagctatgcacaaaatatccttctgttctcctggtcacatcaaagcaccttcacgctatgcagacaggtcattgagggaacggagaaaattaacaaacgcacctaggttatttctattaaaattagcccctcagccggtaggctctgtcagtttccattgaacacaaactctgacaagtctgttgaaaacttttaacctttccaggttgtgtcaacagcttgcaaacacaacaggaggatggtgcctctgagttctgcctttccttttggaatagaggaggtatcaggatttgttaccaccagctttcatgtttatcttcactgctctgctcactccccgctgccacttaaggagcatacaaacaccttactggataaagacaaacatctgtcaattgtctataaggtcctgatgagatttagcttttgcctacttctcccctcatgtcttagcccactctcccccactctctactcagctccactgaaggctaccttatggaattcttcaaaaaagcaggtagagttcctcctgccacagggtctttgcatatcctgttccttagcatggagccctcttcttacctagtgatatggtttggctgtgtcccacccaaatctcatcttgaattatagctcccataattcccacatactgtgggagggacccattgggaggtaattgaatcatggaggcagtttcccccatactgaaccatctgatggttttataaggggaaatccctttcacttggtcctcactctctcttgtctgctgccatgtaagatgtgcctttcgttttctgccatgatcatgaggccccccccccaccgcccagccacgtggaactctgagtccattaaacctctttttctttataaattacccagtcttgggtatgtctttgtcagcagcatgaaagtggactaatacagctagttaacccttactcatctcttgggatctcaactcaaaagtaactttctcaggagagggatggtctaaaatttatactctcacagaccttttacatttataatgaagcatgttccatacttgggtattatatatagtatttatgaaattatttatctaaggtctgtttgcccactagaataaaagtttcatgagagcaggaagaatgtgtgatttgttccaacacggaacatgatatatactcactaagtgtgtttaattattagattaattaataattttatcatgtcatacctctagttaaacattttccagtggttcccatgatatttcataaagtctgaagtcttccaaaaccatctgtaatggaatctcacccaatcataggaattcaagattatttattattaatcccctcaaaggtactctcctcttctgccaaggtcattggttgactgtgcctcaacgattgcccctcatctaaaatagcttcttttatctcccctctgattattcaaatctagtaatgcatgaaaatgcaggggcatgtggacaccataacacaatgtaaggaatgcagctctagctcagagtcctaggttcaaattcatctatcatgacatattatgtgaccttgaccaagccacttacatgctctgagcttctctcttttaaaagaacaaaagtgatatctacaaggctactgcrgaagttaaagcacatggtagatactaggtaattattagctccacttccattcttcaggtgagaccatcaaaaacctatatggtgaaaagttgacataatggagaagcagcatggaccaagttcatctacaaaattagctgccaggaaaacacaggtttatcttcataagctggcaaggagattctcaaaagtggtatatgggttcattcccactggtgtcaggcagaccctggaggtaggtctgctcttcctggtagcaaagcaatctatggtcacaatgatttgtttcttaaagggccctaaagaaacactagttctcatcaaagtttagcatcctgtgtctttgaccatcttgttcaatgagaaagagtttaggcagcatctgctacatgttcaacattctagttattactagagaggatgaaaaatattacacatgggcctttcccacaaggtattaatagtatagccagacaggaaagaattgccttgatgaggtgagaccata

SEQ ID NO: 3624 - DNA, 2237 bp, Homo sapiens
gcatgttctcatctccccttccacccaactcacctgtcatcttcctgtgcttcctcattgcaaaaccagcattcctctcacggtcagctatgcacaaaatatccttctgttctcctggtcacatcaaagcaccttcacgctatgcagacaggtcattgagggaacggagaaaattaacaaacgcacctaggttatttctattaaaattagcccctcagccggtaggctctgtcagtttccattgaacacaaactctgacaagtctgttgaaaacttttaacctttccaggttgtgtcaacagcttgcaaacacaacaggaggatggtgcctctgagttctgcctttccttttggaatagaggaggtatcaggatttgttaccaccagctttcatgtttatcttcactgctctgctcactccccgctgccacttaaggagcatacaaacaccttactggataaagacaaacatctgtcaattgtctataaggtcctgatgagatttagcttttgcctacttctcccctcatgtcttagcccactctcccccactctctactcagctccactgaaggctaccttatggaattcttcaaaaaagcaggtagagttcctcctgccacagggtctttgcatatcctgttccttagcatggagccctcttcttacctagtgatatggtttggctgtgtcccacccaaatctcatcttgaattatagctcccataattcccacatactgtgggagggacccattgggaggtaattgaatcatggaggcagtttcccccatactgaaccatctgatggttttataaggggaaatccctttcacttggtcctcactctctcttgtctgctgccatgtaagatgtgcctttcgttttctgccatgatcatgaggccccccccccaccgcccagccacgtggaactctgagtccattaaacctctttttctttataaattacccagtcttgggtatgtctttgtcagcagcatgaaagtggactaatacagctagttaacccttactcatctcttgggatctcaactcaaaagtaactttctcaggagagggatggtctaaaatttatactctcacagaccttttacatttataatgaagcatgttccatacttgggtattatatatagtatttatgaaattatttatctaaggtctgtttgcccactagaataaaagtttcatgagagcaggaagaatgtgtgatttgttccaacacggaacatgatatatactcactaagtgtgtttaattattagattaattaataattttatcatgtcatacctctagttaaacattttccagtggttcccatgatatttcataaagtctgaagtcttccaaaaccatctgtaatggaatctcacccaatcataggaattcaagattatttattattaatcccctcaaaggtactctcctcttctgccaaggtcattggttgactgtgcctcaacgattgcccctcatctaaaatagcttcttttatctcccctctgattattcaaatctagtaatgcatgaaaatgcaggggcatgtggacaccataacacaatgtaaggaatgcagctctagctcagagtcctaggttcaaattcatctatcatgacatattatgtgaccttgaccaagccacttacatgctctgagcttctctcttttaaaagaacaaaagtgatatctacaaggctactgcagaagttaaagcacatggtagatactaggtaattattagctccacttccattcttcaggtgagaccatcaaaaacctatatggtgaaaagttgacataatggagaagcagcatggaccaagttcatctacaaaattagytgccaggaaaacacaggtttatcttcataagctggcaaggagattctcaaaagtggtatatgggttcattcccactggtgtcaggcagaccctggaggtaggtctgctcttcctggtagcaaagcaatctatggtcacaatgatttgtttcttaaagggccctaaagaaacactagttctcatcaaagtttagcatcctgtgtctttgaccatcttgttcaatgagaaagagtttaggcagcatctgctacatgttcaacattctagttattactagagaggatgaaaaatattacacatgggcctttcccacaaggtattaatagtatagccagacaggaaagaattgccttgatgaggtgagaccata

SEQ ID NO: 3625 - DNA, 773 bp, Homo sapiens
ttaaacacattttttttttgagatggagttttgttcttgttgcccaggctggaatgcaatggcgtgatctcagctcactgcaacctctgccgcctgagttcaagtgattctcctgcctcagcctcccaagtagctgggattacaagcatgtgccaccacacctagctaatttttttttttttttttgacatggagtttcgctctttttgtccaggctggagtgcaatgacacaatctcagcccactgcaacctctgcctcctgggttcaagagattctcttgtttcagcctcccaagtagctgggattacaggtgcctgccaccatacctggctaattttttgtatttttagtagagacgggggtttcatcatgttggtcaggctggtctcgaacttctgacctcagstgatccacctgctttggcctcccaaagtgctgggattacaggcatgagccaccacgccgggccccattaaatacatgttttaagcagttaatttgtttatatactaaaatatatttaattatgttgcttttttcacaaccgccacttccatgagttctttcctctgtgtctatcctgttgatacttgatctacccccaactgcagtctggcggcatgtggacgagtgatgttaggacagtcacagaatcgtgacttccagttgaacaggtctgtctacacatggtcattttgcagcaacctaaaaagagtatttgttttcatcttgactttctctacacacacagagtggtttatttgggctaaa

SEQ ID NO: 3626 - DNA, 584 bp, Homo sapiens
gcctgtagtcccagctacttgggaggctgaggcaggagaatcgctttaacccaggaggcggaggttgcagtgagccaagattatgccactgcactccagcttggcgacagagtgagactctgtctcaaaaaaagaaaaaaaaaaaaaaaaaagagggctaaagtaatgccctattactttctttggcctgcggatctagaatttatccttattttttttctctcctgggaggagctgtcctgctttctgtagtcttatatttgtgctactctctctgccttaccctgcatgtttctattctagactgcaatagggagggcctgggccaaacatccctacctctgaaccctcaccctrtttcaaatcctttatgtcaaagaaagtcaatataccctaggtagctacaagtccaattattattgaggtatttagctgtaaaatttgtccttccatcactgtcttgactaaaggttctcctctgaaaattccaacttgttgacctgcaaacagactggagaaaagagcagtaagggtgaaggtgggactgatagtggccaagccccatgagaagacatgtttaacct

SEQ ID NO: 3627 - DNA, 648 bp, Homo sapiens
ccgaaacattgaacatttgaacctcaatggatgcacaaaaatcactgacaggtaagtaatgaagattaattggtgaccaaatagccacggggagagagaagggagagaaacgtggttgaaaatatctttagtgcgtctgctctttttcagcacgtgttatagccttagcagattctgttccaagctgaaacatctggatctgacctcctgtgtgtctattacaaacagctccttgaaggggatcaggtaagagtgcccattgtttgtgtcaagagaaatacccaaagctatgaacattctggaaaccttcttaatggtcacrttggatccagcaagaaataggtgactccaagaggtcccaggcatggtctccccttcggaatttcttgtgatgtactaaactcagagttggtcattaactctctacaggagagactgcacataagtttttgtttcttgttctctcagtgagggctgccgaaacctggagtacctgaacctctcttggtgtgatcagatcacgaaggatggcatcgaggcactggtgcgaggttgtcgaggcctgaaagccctgctcctgaggggctgcacacaggtaccagagggttgatacagctgtttgtgttatgtgtcaggtgtgggcacatc

SEQ ID NO: 3628 - DNA, 531 bp, Homo sapiens
gccaggtgtgatgcacacctgtagtcccggctacttaggaggctgaggtgggaagatggcttgagtgcaggagatcaaggctgcagtgagctatgatcaagctactgcctccagaaaaaaaaaaaggaaagaaaaaaagaaaaaagaaagaaactcacgtggttgccagacatgccaacaccaccaccaggatcatgagcacacgaccacatcccacctggctggtgggctcccagtgtactctttcttgcacacacacaggcctgcagtgccatgtgtggctgccacctgtctgttcagcgtgccctccgaatgcccacaaacccctgcactcagcatgcaggtcatgtggatggaaggtgtgccgaagcctgtgttctaccctgttctaggcatcctgcacctgctatgaaagccgctgcaggtgcagtggttcactcttgtaatcccagcactttggtaggctgaggtgggtggatcacttgaggtcaggagttccaagwccagcttgggcaacacaacaagaccccc

SEQ ID NO: 3629 - DNA, 579 bp, Homo sapiens
  misc_feature (1)...(579): n = A,T,C or G
tgcctggtcgtcagggaggaagatgagagcgcccagaagccagaggagaaatgaaagaggctttcacccccaaaatgagcttataagaagacagaaattggctgagccaggcggtggctcacgtctgtaatcccagcactttgggaggctgacacgggcggatcacaaggtcaagagattgagaccctcctgaccaacatgatgaaaccgcgtctctacaaaaaatacaaaaattagctgggcgtggtggtgtgtgcctgtggtcccagttactcaggaggctgaggcaggggaatctcttgaaccagggaggcagaggttgcagtgagccaagatcacaccactgcactccaacctggagaaaaagtgagactccatctcaaaaaaaaaaaaaaaaaaaaraaaaagaaaaagaaaaagaaggcggnggttcagtttcagtcaaaaacagaaaaacaggagaaagcatgtttgagagnnnnnnnnnnnnnnnnnnnnnnnnnnnnnnnnnnnnnnnnnnnnnnnnnnnnnnnnnnnnnnnnnnnnnnnnnnnnnnnnnnnnnnnnnnnnnnnnnnnng

SEQ ID NO: 3630 - DNA, 625 bp, Homo sapiens
tggcagaaaaagtcaggaggaagtttgcgtatgttatttttccctgccacttgctttttagtctttgcaaacctttctcaaatccttttagaacacggtatgacatttctttctgtttttaagcaacaactataagaactaccactgactgagkgcttaggtaacgcccaatatatttcacgtagaatctcatcaacaggccgggcaccatggctcacgcctgtaatcctagcacttcaggaggctgaggcggacggatggattgagcccaggagtttgagaccagcctgggtaacatagggagacccctcttctccaaaaaacaacaaactctcataaatctgtaagaggtgacatagtaaaaactctgaaacaacactcttttaatattttatcaatttcctccccattcgtttatttatttatgcagccactgacccaggcatggtcatccctgctgggggcggacacagcccgcgcccccaggttcgaggacacccaatgtttagaaaacggaccctgcgaatcccaccggccccacgtggactctcggaggctccctcctccctttggagcattgaagaacgcgcacaaatccagcttccacccgtcactcgcgcacccg

SEQ ID NO: 3631 - DNA, 595 bp, Homo sapiens
ttacaggcataagcaatcatgcctggccttaagtgagaattcttctgtgtcatttccttctctttctctctctctctctctctctctctctctctctctctctctckctctcgctctctcgtcgccaggctggagtacactggcgcaatgtctgttcacggcaacctctgcttcccgcattgaagcaattctcctgcctcagcctcccaagcagctgggactatacaggcttgtgccaccatgcccggctaatttttgtatttttagtagagagggggtttcaccacattggccaggatggtctcgatctcccaacctcgtgacccccccccgcctcagcctctcaaagtgggattacatgtgtgagccactgccccggccttcacgtgtcatttctttttgtaggaaccaattttaaaagaaagccgattttaagagctcagcttttaggttatatatctatataaactatatcatttccaactttcaaaattatatatatatatgtatatatatatacgtatatatacgtatatatacgtatatatacgtatatatacgtatatatacgtgtatatacgtgtatatacgtgta

SEQ ID NO: 3632 - DNA, 595 bp, Homo sapiens
ttacaggcataagcaatcatgcctggccttaagtgagaattcttctgtgtcatttccttctctttctctctctctctctctctctctctctctctctctctctctcgctctcgctctctcgtcgccaggctggagtacactggcgcaatgtctgttcacggcaacctctgcttcccgcattgaagcaattctcctgcctcagcctcccaagcagctgggactatacaggcttgtgccaccatgcccggctaatttttgtatttttagtagagagggggtttcaccacattggccaggatggtctcgatctcccaacctcgtgacccccccccgcctcagcctctcaaagtgggattacatgtgtgagccactgccccggccttcacgtgtcatttctttttgtaggaaccaattttaaaagaaagccgattttaagagctcagcttttaggttatatatctatataaactatatcatttccaactttcaaaattatatatatatatgtatatatatatacgtatatatacgtatatatacgtatatatacgtatatatacgtatatatacgtgtatatacgtrtatatacgtgta

SEQ ID NO: 3633 - DNA, 418 bp, Homo sapiens
ttgtatttttagtagagatggggttttgccatgttggccagactgttctcatacccctgacctcaagtgattcgcctgccttggcctcccaaagtgctgggatacaggtgtgagccaccgcgcccggccagacccctgagttttaactgtagctccaacacttactaactgcaaaccctggtcaagtcacttcatctccacgcgtgcctcagtttccccactttatgtgaatctgcagtctaactgggagttatatgtgtaaaaacttggtgcagtgctrtgaatataagcacagtctcaatgtatgcagcttataattaggttgaaccagatacaactgccattcaaatatggtcaaatgtgagggccgggcatggtggctcacacctgtaatctcagcactttgggaggttgaggc

SEQ ID NO: 3634 - DNA, 609 bp, Homo sapiens
gttggaaaaacttagaatcagttactttttttgggtccatcaaaaaatcaactttaaggacaaactaatactcgaaaagctggagaaacaaattcatccagggagatagagcaactaaggtcwactttatttagaacagccattgaagccataactgctgggaacatttaaatactaattttgatttacttgaggttgagtgtgagctagcacaaaaatgagaaaactcttggaggctgtagtcttaggaagacctcccacattttcatcctttcctctagaaacctcaccaggttttctttgttaggatctctgaagaattctctcttccttgtgtggaggtaggaatgaagatgctcagtgcattggggaataggcatatccagagccttctctgtaaaaatgtctattctttaggagaaaatactttgccaatggataattctgaacctttataacagctggggataggtaatccctcggaactgtagttccctccaccttttttatctcatctaagggagggggagtatgataaataatgtttaagggactaaagttacaaacaaaatgctgtaaacaggaagaggatggggaataagggggaat

SEQ ID NO: 3635 - DNA, 609 bp, Homo sapiens
gttggaaaaacttagaatcagttactttttttgggtccatcaaaaaatcaactttaaggacaaactaatactcgaaaagctggagaaacaaattcatccagggagatagagcaactaaggtctactttatttagaacagccattgaagccataactgctgggaacatttaaatactaattttgatttacttgaggttgagtgtgagctagcacaaaaatgagaaaactcttggaggctgtagtcttargaagacctcccacattttcatcctttcctctagaaacctcaccaggttttctttgttaggatctctgaagaattctctcttccttgtgtggaggtaggaatgaagatgctcagtgcattggggaataggcatatccagagccttctctgtaaaaatgtctattctttaggagaaaatactttgccaatggataattctgaacctttataacagctggggataggtaatccctcggaactgtagttccctccaccttttttatctcatctaagggagggggagtatgataaataatgtttaagggactaaagttacaaacaaaatgctgtaaacaggaagaggatggggaataagggggaat

SEQ ID NO: 3636 - DNA, 1387 bp, Homo sapiens
cttctccacagggaacagaaatgctctcatcaccacagcacccctgctagggggatgggaaaggagtggcattgactattcaagactatttttctttcctctgcagtacctatttcagcaatatgaagttaaaaccaggtactgtgagtgcctacctgatttttgtttcttatgaatgtgctttatttgtatagttagttgttaaattggtgtcgttgatggagggacaatcagtggagccttctatctgccatcttgctccacccatcagccaagtaagtaacttaatttatctattagattgcagaaccaaggacaaaaatagaactcctgaccatgtctgacttttcccagcacagccaagggacattgctaactctacaggtacccaggtgtttcctagaatttaatggccactagtctcttgattacctgttccctgtcctaaacagctagacaattctaaatttgcatttctaaaggagtaattcttaagtgaaacaaaacagataattaatgttttactcaaactctgagaaaatggtatgagtagaagttcaaatggccaaaagaaggacatccttacgtgtggtgattttcttagatgtaagtttcttaattgtattactggcttaagggtggaatcttataaggagcagcaccaagaaagcatgcagtttctaggtctaatggggagggataggtggaaggcagactagatccccaaaagtcaaggatccaatttttacatcaaatcctgaatcccccaaaggagggaaccactgtaagatgagatggtgcaagactgaacatcagaagctgtccatggagggaaaaaataatcaataagtagcaaaattcccccaggtattaagccaaaaaattctaatttcctaaaccagaaatatgaacccaggccaccatcatgaaagggcaaagccttagctaccaagctacagcattgggcagttgccagaacttttctgaaaagaagtctagaacagccatcaagcttgcaaagaattttcactgcccaggagaatccatgacattattatatatcattttctaagtttaaasctttttattcaattgttgagaataaaatagctataaaaatatttttctttcaatggcatacttagttcaaatagcaactcaatccaaaagcccttttcaaactcagatggtaattttccaggttcttatcaactacagaagaggtattcctggagagatgatagaggaggcatcctcacgatccccaaatattcacccccagaaaggggcttaatatagcaaaagaggacaaaaaccccatagtatgggacattttaaaacaaaactcatcagagggcttgacacatttgggatgaacaatgtgcta

SEQ ID NO: 3637 - DNA, 1296 bp, Homo sapiens
tttcacaacagataaagaaaaaatattttaatgatctgcattcaatatatttcaaagtatatgcgttgttttgtagttatcaatttatttgcttatttatatttatatggttttatwcatgtttttaaaataggttagatgttgagaacttctttatttaaataataatttgatattaaatatgtttgattaatttctaataacaaggttggtactcaagatgaaagacgcttcagggggttcttagttacagtaaggtatcctaaaattcattatgtacatttttgtagatttagtaaatagtatttctcatatccacatattttttaaatgactaaatattttctaagttaaaacatataaatttattttaaaatgtcactgacctcatgatacttttagttgttacataatttcctaatcagagcttacaaaaattatcataactaccatgtggatatctgcaaaacattttgacattaaaaaccaggtccttggacttaaaaatttaggtactaattcactccatttcaatgcagtaactgttcttaactaatgcaatttaatctacttccctttttgtctttagttagtagagattcaaaacatctggttatgatcaagtattcataatctcctaatttaaagttacatgattcacaattttttaatatatattttggagataactgaatatgtacaaaaatatgggcaataggtcatattaaccttaaactattctgaatgttcttaagcgtcaatcagaaatacaaatggcctatctttataattatttccctttaccctatctgaaaaatgcttatattttacacttcagcctaaagtaagcaagcactgcataaaatgttgtgttgggtaatcactactgcttagctattgctcaacacatgtcaaatacaagtaattaaaactatagtgggcccaagcaaaacattaaaatttttgcattccaaaggaggttcattaaaaccagatgactggcttggctcgtagaaggacttggctgaaacatgtccacttcaaatccatactgtcttatttgcttacatcacagaatcactgactcaagaacctgaagggtcctccaaagtttatctaacctctttccaagcagagttttacttaaaatattttgcagagaaactaatatttctttacaaagtcatatgcaagaatattccaaatactttttgtatcattaaaaagtataatttttcagtgagtagaaaaacaatttaaaactctttattattttattctgctaaaatcacctta

SEQ ID NO: 3638 - DNA, 1296 bp, Homo sapiens
tttcacaacagataaagaaaaaatattttaatgatctgcattcaatatatttcaaagtatatgcgttgttttgtagttatcaatttatttgcttatttatatttatatggttttatacatgtttttaaaataggttagatgttgagaacttctttatttaaataataatttgatattaaatatgtttgattaatttctaataacaaggttggtactcaagatgaaagacgcttcagggggttcttagttacagtaaggtatcctaaaattcattatgtacatttttgtagatttagtaaatagtatttctcatatccacatattttttaaatgactaaatattttctaagttaaaacatataaatttattttaaaatgtcactgacctcatgatacttttagttgttacataatttcctaatcagagcttacaaaaattatcataactaccatgtggatatctgcaaaacattttgacattaaaaaccaggtccttggacttaaaaatttaggtactaattcactccatttcaatgcagtaactgttcttaactaatgcaatttaatctacttccctttttgtctttagttagtagagattcaaaacatctggttatgatcaagtattcataatctcctaatttaaagttacatgattcacaattttttaatatatattttggagataactgaatatgtacaaaaatatgggcaataggtcatattaaccttaaactattctgaatgttcttaagcgtcaatcagaaatacaaatggcctatctttataattatttccctttaccctatctgaaaaatgcttatattttacacttcagcctaaagtaagcaagcactgcataaaatgttgtgttgggtaatcactactgcttagctattgctcaacacatgtcaaatacaagtaattaaaactatagtgggcccaagcaaaacattaaaatttttgcattccraaggaggttcattaaaaccagatgactggcttggctcgtagaaggacttggctgaaacatgtccacttcaaatccatactgtcttatttgcttacatcacagaatcactgactcaagaacctgaagggtcctccaaagtttatctaacctctttccaagcagagttttacttaaaatattttgcagagaaactaatatttctttacaaagtcatatgcaagaatattccaaatactttttgtatcattaaaaagtataatttttcagtgagtagaaaaacaatttaaaactctttattattttattctgctaaaatcacctta

SEQ ID NO: 3639 - DNA, 1251 bp, Homo sapiens
cgtggtgagtttgagtttggacatatgtatatactggtgactcctgtcattgtcaccacaatttaaatcgaattactaagtctaagttttctggtgaagtgatttttttctttcttcttcattgagtagacttgccattttactcatattttagtgatttttcactgcgttcatgtcccgtgtctttttttttttttttttttttttttgacggagtcttgctctgttgccaggctggagtgcagtggtgcgatctcagctcactgcaacctctgcctccgaggttcaagcgattctcctacctcagcctcccgagtagctgggactacaggtgtgtgccaccatgcccagctaatttttgcatttttagtagagacggggtttcactatgttggccaggatggtcttgatctgttaacctcatggtccaccccatggattacaggcgtgacgactgccgccttgcctcatgcctttttttaaaaggcaccacaaagttttttttttttttttttttataagtcctgttacttatgtgaacattctgatctagccaaatcattgtatcttgcctaaatatggcttttaatctttttgtctgtgtccttacctggggtgctttcttcattcttttctgctattaaagctctcccattttcttcaaattcttccatcctatgtgaaggtttccccttttatagtgggcctgagtgactggtgctgcctctgaaactgaaagcacttactctcccacctccacttttgattcacacacatatatagctttgtgatagccttgttttcttgaattagttacaggcctcgataatgttttcaastttttccaagtgtgggcatgtctgagctaacctatcttttgtaaggagggtgattataggtagaagtatatgtaaatacagctgagactcattactcaggcgaatgggggcaaggccagaaggaatctgtgccaagtctgagtgatagtattcattcaaaccgttgtcaccttcgtgtttacacaaaacactagtgagattagcaatgtgttgtgtattcatcgtgcaaactccaaggttctgttttaatgaatgaatggattcacaagggtttatatttgattttggtttattgtatgttaacaagtcctctgtattaaaaaattgttctattaaattcagtaaactgcaatctgttcacactgttagcaaacctatttctgttttctcctttacatatttgtggagtttg

SEQ ID NO: 3640 - DNA, 1652 bp, Homo sapiens
ttgtatatttaggcaaccatgtgtggtgttgtcacttctttaacggcgagcattttctcctctgagcgctccatgtgaccagacccagtgggtatgtgatcgtaaggcctagtgcaaccagtacatacccttggttctggctctaacccccgactgtcaggtgttggatggggaaattgcttcaggagcagataaacaaatagaagggcagtcttcagaacagatggaaagctcagaataaagagggagccattagagacatcaagaatagcataaggttagtcagtgtacatacctgcagaagtttagtgggatggcaaccagtttcatcccctgccaacttcagttgattgatattggttgtccagaacactgtgctaagtaaaattatcaggccaggcccagaaatcacaggaaaaagtaggtcagtatctctgctaagactgggctatcagattgggactgagttgagttagttgtaagtccaccgtggttctttggaaacgctctactaggagaagataatgcaaacaacagtaggaacagaacagctgaaaaaaaagttcaaatgtttttgtaatatgcatggcaacatttaatatttaccctataaagttatagaagaccaaaaataatttagagatagctcagtctgggaattttctaatctttctaagtttttgttggggggtggtgggcgtggggtggggaggggagtgcttagtgaaaactgtttgccaaaagaagycttgtttcttaagccccaaaacacaaagtagataacagcagagtgtctgtagtggaaaaggagggaaatccggaccttgtccatttaaagattccttttcagctctcacagtggagcctgaagtaactttgtagactactggggcttaaataccactgaaatatacactcgttccatttttactgactgacgaggaaactgagaggctgccaggttaaaggattttctttgagttatactaccagaaattgagcctagatattctgccctacatctagatagttcctgcattacaatcatcagaaactgacggaatttaaaaccgtttttcttaaggcatattaatttccaaggaatcaaatagcaattgcattagctcaagtaaaagacacattttaaggataaaattatagagaatccagagaaaagtggtactatgaggtgtcaggaagtgtggtaaccgggtcagctctagggacctacatcataagagctcaaggacattcattctagcacactgctgtgagcatgacttggctactaattctaccaatctctatgaatcttaatgcaaatcctaaagagaaagcattaggttggtctggcctatagacgttttcttcctttgttagtttttcactcctaggccagccagctgtgtctgggaggaaaggtgtggagtcatatggagatgcagtttctgggaaagggagaacaacttcccttagaaggccctgtgggcaggtatcagtgatgtgctggtaaggtgttaacaatgggttctggggtagaagaggtggggagttctgacttgtagtgttttcagatttccatggcgtaaatactcccaccgtggtgatttcaggctaccaatacgacattactgattgcagattgggaagag

SEQ ID NO: 3641 - DNA, 2329 bp, Homo sapiens
cattttaggctacctaaacagcttcttctgccatctgctccaagccttcccctcctaggaagaaattatctcaccaattcaatccaccttaagccaagcctgtcttgctacccttggttttcttcttatcccagctctttaaattggttctctcatgtattgtgagataacacgagacatggggaaggagcttgcttgtcttgcccattcctctacacctatggcctaacacggtggctacacataatagatgggtttttctaggctcttaggcaatttccctgtgcartatttacagattaatgttcagaactttaatatgcacaaagtgtttatttgcagcaagtaatctgttaaaaaaaaaacagaaaatatatctttctgtcagtactaataagctgccaacttataaagagattaactggtttatgcactgccagtataaaggcatcacctaattcacacttgaacagatatggcatggggttagcctagttaaaaagtgcttgggattcagaaacaaaaatcctagttttgaggttattttttcttctaatatgtaactcgtttttcatttgttaaatagttatggaaatacctgccctacttttctcacaggtttgttttgagaaaaaattcagctagcatatggaaactgctttatggattaaccagcactatgcagatcataataatgataatattattatcatagccatatttgataataataccacattgatagctgtattgcctaatgatattcacaccataaatccacatgtaataatagctttaattataaatataaaaggtacagtttcatggtattcaggacttacctttacaatgataaattatgtctccctcctagaagaaccaggtactatttcctagtatttacgtcagcattatgaattaaagtcaggttcaacaaaagatgtcaggttccatagatgtggaacagtacatatttgttatgcaacagttattgtaattgttccccatttcgcaaagcaatttaaagttggagtgagagatctgtggaatggagaaacttctggtgcgttagggacagtgtcccacagacccaattaagaggggtgctggaaatagactgtgggtgaactaaagctcacaaatgaaataacactctcctgcccacataacttctaggagcaggggcagatgttcaccaaacaaactttatgaaatgtgagagcgtcctagtttaaaatatatctaccaaagttaattcaaagtaagaaattaataattcaagtgatgtttactaaaaatgacctcgatattatgaacgaaataaaatggatagtatctatgaattaaatgcattgtgattaactgtttgcttactttattctttttgaaaaattaattttatgcagcatgcgattttcaagttttttgaaatgaaaagaaatacagataagcaagaaaataaatagatccatgggacaaaagcaactctatatgtttaaggccaaaaaagtgaaaaaaaatccagaattgatagtttggggtattattgggaagaaaggacattattgaattaaagtgtcttagcaaagtctattaagctatattttagatattaacacttagattgtcactgtaattttctagtagatgtcacatttcgtgtacaatacttgaattctcagaaataacaatttacttaaaaagcaaaaacagtatttatatacgcacacagacacaaacacatacatacaaacatagccctctcaaccaacacacacaccacaaaccgtggtgtgtgtacattaaatacgaatagatatatgtcaagagtttttttaatattatagaagtctagagctagaaactctgcaaaaatcacttagtaagacttttcttcctatagatgagtaaactgtggtaaaagtgatgaaatactattcccaagtcattgttagtatttgacctagagagaattcagaacagtcactcttcagaagaaccagataatgacaataacaatagcatatgaatttttaccagttcttagacaatagctaatggaatagtctgaaaatataggcctcatatgactggaagataaaggactcctacatggagtgagcagtgagacattttattaacctgaagagagattattggagtgaaacttacctatatctattatagaacttccctactgaattcagaaaaggactagaatcaacaaaggggagcctttattctctttttggaagtggcctctaggggacataagatgagagggcatagaggcattcgagcaatgcaacaaagtatgaaaatatatgca

SEQ ID NO: 3642 - DNA, 2329 bp, Homo sapiens
cattttaggctacctaaacagcttcttctgccatctgctccaagccttcccctcctaggaagaaattatctcaccaattcaatccaccttaagccaagcctgtcttgctacccttggttttcttcttatcccagctctttaaattggttctctcatgtattgtgagataacacgagacatggggaaggagcttgcttgtcttgcccattcctctacacctatggcctaacacggtggctacacataatagatgggtttttctaggctcttaggcaatttccctgtgcagtatttacagattaatgttcagaactttaatatgcacaaagtgtttatttgcagcaagtaatctgttaaaaaaaaaacagaaaatatatctttctgtcagtactaataagctgccaacttataaagagattaactggtttatgcactgcmagtataaaggcatcacctaattcacacttgaacagatatggcatggggttagcctagttaaaaagtgcttgggattcagaaacaaaaatcctagttttgaggttattttttcttctaatatgtaactcgtttttcatttgttaaatagttatggaaatacctgccctacttttctcacaggtttgttttgagaaaaaattcagctagcatatggaaactgctttatggattaaccagcactatgcagatcataataatgataatattattatcatagccatatttgataataataccacattgatagctgtattgcctaatgatattcacaccataaatccacatgtaataatagctttaattataaatataaaaggtacagtttcatggtattcaggacttacctttacaatgataaattatgtctccctcctagaagaaccaggtactatttcctagtatttacgtcagcattatgaattaaagtcaggttcaacaaaagatgtcaggttccatagatgtggaacagtacatatttgttatgcaacagttattgtaattgttccccatttcgcaaagcaatttaaagttggagtgagagatctgtggaatggagaaacttctggtgcgttagggacagtgtcccacagacccaattaagaggggtgctggaaatagactgtgggtgaactaaagctcacaaatgaaataacactctcctgcccacataacttctaggagcaggggcagatgttcaccaaacaaactttatgaaatgtgagagcgtcctagtttaaaatatatctaccaaagttaattcaaagtaagaaattaataattcaagtgatgtttactaaaaatgacctcgatattatgaacgaaataaaatggatagtatctatgaattaaatgcattgtgattaactgtttgcttactttattctttttgaaaaattaattttatgcagcatgcgattttcaagttttttgaaatgaaaagaaatacagataagcaagaaaataaatagatccatgggacaaaagcaactctatatgtttaaggccaaaaaagtgaaaaaaaatccagaattgatagtttggggtattattgggaagaaaggacattattgaattaaagtgtcttagcaaagtctattaagctatattttagatattaacacttagattgtcactgtaattttctagtagatgtcacatttcgtgtacaatacttgaattctcagaaataacaatttacttaaaaagcaaaaacagtatttatatacgcacacagacacaaacacatacatacaaacatagccctctcaaccaacacacacaccacaaaccgtggtgtgtgtacattaaatacgaatagatatatgtcaagagtttttttaatattatagaagtctagagctagaaactctgcaaaaatcacttagtaagacttttcttcctatagatgagtaaactgtggtaaaagtgatgaaatactattcccaagtcattgttagtatttgacctagagagaattcagaacagtcactcttcagaagaaccagataatgacaataacaatagcatatgaatttttaccagttcttagacaatagctaatggaatagtctgaaaatataggcctcatatgactggaagataaaggactcctacatggagtgagcagtgagacattttattaacctgaagagagattattggagtgaaacttacctatatctattatagaacttccctactgaattcagaaaaggactagaatcaacaaaggggagcctttattctctttttggaagtggcctctaggggacataagatgagagggcatagaggcattcgagcaatgcaacaaagtatgaaaatatatgca

SEQ ID NO: 3643 - DNA, 1304 bp, Homo sapiens
acaccatctgtaaatatatgtttattcagagtcaacttttactgtaaactaaatccataaagtgaatgggaaatttgtgtacagaaaacatcarttatacttccaaaatgatgagagagattgagagagagagagagagagagagagaagctcccttctgattttgtgtatgaaatagagtaataggcctcccataattaggtcttcagggctttatttctgaagtttcataagttttatacacctttcatcttggaggcaatttaaagttgtgcacagaggtttagaagagtccttaaatatttaaattgtctcttaaatcctgaggcagatctttaggaatttgtgggtctccacaatgggatggtatttcagcatgcacttcagaggcaaattcaatttgccctattcctaaaatttattgccaaatattaattttctttctatttttaaactagaggaatctgatgatactttttctgaactagaagaatttcatgacactttatcctagtaatcatgtccataacaccatgtttctgtaaacatcaactagtcaatcaatttctatgacaaaatgattactcactcgtcttgcctctttggagattcagctactaatgagtggctatgaagactggctgcaagtagaaaagtaagacaaaattgtctgttgctgttgcaccctataaagagaggcaacctctggtttggaggtaagttattgcaaaaacaagaacaatgtttcaactgtaagagagacttggactgattggttaaatcagtttgaaaatgacattttttttttctgatttgagagtgactttgaatattggaaatggaatttaagtgtctattcactgggatgtagtaggaacaaaataaaaaccatgagaccaaaagagcagttctgcatgcaaaggcaattgaacaaaaactgaatttgcccagcccttgtgaattactttatgtcagtgtgcagttttttatgacattacaaagtatttggacactgtatcatctacttaagctaattaaagcttattacacagtaaatagcagattgtgtgttctttagtatagaattcatattaaacaaatccttgactgtggttccctagcagtaactcaggtcaatttggttcagttaccagtgaaccagttgaacggtgtgctaggtaatatgacagggactctttatacaacagtatcatgtgaggagaacattatgacaaatttggaaaataaaaaaaaaaactaaataatctcttgggatctgaaatatataatttgccaaaggaatg

SEQ ID NO: 3644 - DNA, 1304 bp, Homo sapiens
acaccatctgtaaatatatgtttattcagagtcaacttttactgtaaactaaatccataaagtgaatgggaaatttgtgtacagaaaacatcagttatacttccaaaatgatgagagagattgagagagagagagagagagagagagaagctcccttctgattttgtgtatgaaatagagtaataggcctcccataattaggtcttcagggctttatttctgaagtttcataagttttatacacctttcatcttggaggcaatttaaagttgtgcacagaggtttagaagagtccttaaatatttaaattgtctcttaaatcctgaggcagatctttaggaatttgtgggtctccacaatgggatggtatttcagcatgcacttcagaggcaaattcaatttgccctattcctaaaatttattgccaaatattaattttctttctatttttaaactagaggaatctgatgatactttttctgaactagaagaatttcatgacactttatcctagtaatcatgtccataacaccatgtttctgtaaacatcaactagtcaatcaatttctatgacaaaatgattactcactcgtcttgcctctttggagattcagctactaatgagtggctatgaagactggctgcaagtagaaaagtaagacaaaattgtctgttgctgttgcaccctataaagagaggcaacctctggtttggaggtaagttattgcaaaaacaagaacaatgtttcaactgtaagagagacttggactgattggttaaatcagtttgaaaatgacattttttttttctgatttgagagtgactttgaatattggaaatggaatttaagtgtctattcactgggatgtagtaggaacaaaataaaaaccatgagaccaaaagagcagttctgcatgcaaaggcaattgaacaaaaactgaatttgcccagcccttgtgaattactttatgtcagtgtgcagttttttatgacattacaaagtatttggacactgtatcatctacttaagctaattaaagcttaytacacagtaaatagcagattgtgtgttctttagtatagaattcatattaaacaaatccttgactgtggttccctagcagtaactcaggtcaatttggttcagttaccagtgaaccagttgaacggtgtgctaggtaatatgacagggactctttatacaacagtatcatgtgaggagaacattatgacaaatttggaaaataaaaaaaaaaactaaataatctcttgggatctgaaatatataatttgccaaaggaatg

SEQ ID NO: 3645 - DNA, 1304 bp, Homo sapiens
acaccatctgtaaatatatgtttattcagagtcaacttttactgtaaactaaatccataaagtgaatgggaaatttgtgtacagaaaacatcagttatacttccaaaatgatgagagagattgagagagagagagagagagagagagaagctcccttctgattttgtgtatgaaatagagtaataggcctcccataattaggtcttcagggctttatttctgaagtttcataagttttatacacctttcatcttggaggcaatttaaagttgtgcacagaggtttagaagagtccttaaatatttaaattgtctcttaaatcctgaggcagatctttaggaatttgtgggtctccacaatgggatggtatttcagcatgcacttcagaggcaaattcaatttgccctattcctaaaatttattgccaaatattaattttctttctatttttaaactagaggaatctgatgatactttttctgaactagaagaatttcatgacactttatcctagtaatcatgtccataacaccatgtttctgtaaacatcaactagtcaatcaatttctatgacaaaatgattactcactcgtcttgcctctttggagattcagctactaatgagtggctatgaagactggctgcaagtagaaaagtaagacaaaattgtctgttgctgttgcaccctataaagagaggcaacctctggtttggaggtaagttattgcaaaaacaagaacaatgtttcaactgtaagagagacttggactgattggttaaatcagtttgaaaatgacattttttttttctgatttgagagtgactttgaatattggaaatggaatttaagtgtctattcactgggatgtagtaggaacaaaataaaaaccatgagaccaaaagagcagttctgcatgcaaaggcaattgaacaaaaactgaatttgcccagcccttgtgaattactttatgtcagtgtgcagttttttatgacattacaaagtatttggacactgtatcatctacttaagctaattaaagcttattacacagtaaatagcagattgtgtgttctttagtatagaattcatattaaacaaatccttgactgtggttccctagcagtaactcaggtcaatttggttcagttaccmgtgaaccagttgaacggtgtgctaggtaatatgacagggactctttatacaacagtatcatgtgaggagaacattatgacaaatttggaaaataaaaaaaaaaactaaataatctcttgggatctgaaatatataatttgccaaaggaatg

SEQ ID NO: 3646 - DNA, 1304 bp, Homo sapiens
acaccatctgtaaatatatgtttattcagagtcaacttttactgtaaactaaatccataaagtgaatgggaaatttgtgtacagaaaacatcagttatacttccaaaatgatgagagagattgagagagagagagagagagagagagaagctcccttctgattttgtgtatgaaatagagtaataggcctcccataattaggtcttcagggctttatttctgaagtttcataagttttatacacctttcatcttggaggcaatttaaagttgtgcacagaggtttagaagagtccttaaatatttaaattgtctcttaaatcctgaggcagatctttaggaatttgtgggtctccacaatgggatggtatttcagcatgcacttcagaggcaaattcaatttgccctattcctaaaatttattgccaaatattaattttctttctatttttaaactagaggaatctgatgatactttttctgaactagaagaatttcatgacactttatcctagtaatcatgtccataacaccatgtttctgtaaacatcaactagtcaatcaatttctatgacaaaatgattactcactcgtcttgcctctttggagattcagctactaatgagtggctatgaagactggctgcaagtagaaaagtaagacaaaattgtctgttgctgttgcaccctataaagagaggcaacctctggtttggaggtaagttattgcaaaaacaagaacaatgtttcaactgtaagagagacttggactgattggttaaatcagtttgaaaatgacattttttttttctgatttgagagtgactttgaatattggaaatggaatttaagtgtctattcactgggatgtagtaggaacaaaataaaaaccatgagaccaaaagagcagttctgcatgcaaaggcaattgaacaaaaactgaatttgcccagcccttgtgaattactttatgtcagtgtgcagttttttatgacattacaaagtatttggacactgtatcatctacttaagctaattaaagcttattacacagtaaatagcagattgtgtgttctttagtatagaattcatattaaacaaatccttgactgtggttccctagcagtaactcaggtcaatttggttcagttaccagtgaaccagttgaackgtgtgctaggtaatatgacagggactctttatacaacagtatcatgtgaggagaacattatgacaaatttggaaaataaaaaaaaaaactaaataatctcttgggatctgaaatatataatttgccaaaggaatg

SEQ ID NO: 3647 - DNA, 617 bp, Homo sapiens
tgttccttctcattgtctttctttccttttgtttccttccttttttcttccttatgaagtcaagttttctacaagaatttaagtataaacattttccagaaaaagttactttttctgaacctggtaaaggttaatatgcattattcaagtacactttatttcttagcaggattaatagtgaatgtatttaacaaagactatggcatagctgccacccgatcagaatggacaccaactataaacaastaatacagctgtactactggctgcagtcttaagcatggttttatgagattttaatttgggggttgtaattttaatttttttgtttgtaatttttttctcttacctatgagcaagggctgacactgctggcacacactaattactatggccacactggttgtttatggcaaatatttattctaatttactagaacacttgccacagaagttaaatattttgaacatcgctgctactcaatcacttagaagtgcgttttaattgtctcaggttatggaacttttaaattaattaattacctttaatttaatcatatataggaaagagaatatgactgtttaatattgcttccttaaaatttactgattcttgc

SEQ ID NO: 3648 - DNA, 617 bp, Homo sapiens
tgttccttctcattgtctttctttccttttgtttccttccttttttcttccttatgaagtcaagttttctacaagaatttaagtataaacattttccagaaaaagttactttttctgaacctggtaaaggttaatatgcattattcaagtacactttatttcttagcaggattaatagtgaatgtatttaacaaagactatggcatagctgccacccgatcagaatggacaccaactataaacaagtawtacagctgtactactggctgcagtcttaagcatggttttatgagattttaatttgggggttgtaattttaatttttttgtttgtaatttttttctcttacctatgagcaagggctgacactgctggcacacactaattactatggccacactggttgtttatggcaaatatttattctaatttactagaacacttgccacagaagttaaatattttgaacatcgctgctactcaatcacttagaagtgcgttttaattgtctcaggttatggaacttttaaattaattaattacctttaatttaatcatatataggaaagagaatatgactgtttaatattgcttccttaaaatttactgattcttgc

SEQ ID NO: 3649 - DNA, 617 bp, Homo sapiens
tgttccttctcattgtctttctttccttttgtttccttccttttttcttccttatgaagtcaagttttctacaagaatttaagtataaacattttccagaaaaagttactttttctgaacctggtaaaggttaatatgcattattcaagtacactttatttcttagcaggattaatagtgaatgtatttaacaaagactatggcatagctgccacccgatcagaatggacaccaactataaacaagtaatacagctgtactactggctgcagtcttaagcatggttttatgagattttaatttgggggttgtaattttaatttttttgtttgtaatttttttctcttacctatgagcaagggctgacactgctggcacacactaattactatggccacactggttgtttatggcaaatatttattctaatttactagaacacttgccacagaagttaaatattttgaacatcgctgctactcaatcacttagaagtgcgttttaattgtctcaggttatggaacttttaaattaattaattacctttaayttaatcatatataggaaagagaatatgactgtttaatattgcttccttaaaatttactgattcttgc

SEQ ID NO: 3650 - DNA, 1316 bp, Homo sapiens
tacactgttaaccattcatctctcacttggaaaacagacaagttgtgaacagggattataaagcatcactcaaatagatagaaccatcagtggatttctgaagggtaacgatgcctttatagggtgaagctcacttcccaaaagaaaaagtgtttctgaaagcaaatggaccttcatgttctatgagaaatatctgccctcaatggccttctctttaagccatattgaacaatagaaaagttacttaagcackcattcccctgtctttggtaggctccatatcaagtacaacttgatctcattgatattataaaactctcctacaatctgaaggagaaactaccaacattatccattatttttaacttcatttaaatcaacaagcctgacttcataacactattgggagaagagtaaagttccccttcccaaagacaatgtagacaggaaacatgtttatgtattgtttgaataaccctacagttagacaagacaagctactgactataattgggtttatgggacactgtccctggagttttagaatttgtaatactatacaaatagatgtttaatttgctgcatgaattgaagacttttcaaaaggaacaaatagcttaaattgccctacactgccaatggctggttctttgcaggatgtttctgcagcacaaacatcaggacaacagcaagatgaaagaagtatctgccatgtgtctcctagcatgagacacatgtcaccattttcctgagtttgagaaggaaactctgggcttgtttctaagtgtccaaagtctctgttactttatggctgcagaaatctatacctttttttgcctttattccctgagacttccaaattattttggatatatctctaggaatggcagaagaaactgtgaacttggaaatccaaacagttcctaagtaagaagattattaccaaatcagaggaagaaaatcatgccaatggtacagaggtaaatagatcagttaaaatgtggttttggaaaaagaaagaatgcaaaatattgtttcttttctcattcttttgtgataccgattaaatacaccatcctcctaccctcacattgccaaaagaaaatcttacagcaaaagtaacattttaaggatgtatctgttgacttcctgcttaaatttttcttattagtgacaaatttcttcaatatatattactatcactaacctagagaaccattgaagaacagaacacaagttcatataaataaaacatgccagatatgtgaaggagggggttatgttttatatatgtgtgacgttaatccttctatgca

SEQ ID NO: 3651 - DNA, 1316 bp, Homo sapiens
tacactgttaaccattcatctctcacttggaaaacagacaagttgtgaacagggattataaagcatcactcaaatagatagaaccatcagtggatttctgaagggtaacgatgcctttatagggtgaagctcacttcccaaaagaaaaagtgtttctgaaagcaaatggaccttcatgttctatgagaaatatctgccctcaatggccttctctttaagccatattgaacaatagaaaagttacttaagcacgcattcccctgtctttggtaggctccatatcaagtacaacttgatctcattgatattataaaactctcctacaatctgaaggagaaactaccaacattatccattatttttaacttcatttaaatcaacaagcctgacttcataacactattgggagaagagtaaagttccccttcccaaagacaatgtagacaggaaacatgtttatgtattgtttgaataaccctacarttagacaagacaagctactgactataattgggtttatgggacactgtccctggagttttagaatttgtaatactatacaaatagatgtttaatttgctgcatgaattgaagacttttcaaaaggaacaaatagcttaaattgccctacactgccaatggctggttctttgcaggatgtttctgcagcacaaacatcaggacaacagcaagatgaaagaagtatctgccatgtgtctcctagcatgagacacatgtcaccattttcctgagtttgagaaggaaactctgggcttgtttctaagtgtccaaagtctctgttactttatggctgcagaaatctatacctttttttgcctttattccctgagacttccaaattattttggatatatctctaggaatggcagaagaaactgtgaacttggaaatccaaacagttcctaagtaagaagattattaccaaatcagaggaagaaaatcatgccaatggtacagaggtaaatagatcagttaaaatgtggttttggaaaaagaaagaatgcaaaatattgtttcttttctcattcttttgtgataccgattaaatacaccatcctcctaccctcacattgccaaaagaaaatcttacagcaaaagtaacattttaaggatgtatctgttgacttcctgcttaaatttttcttattagtgacaaatttcttcaatatatattactatcactaacctagagaaccattgaagaacagaacacaagttcatataaataaaacatgccagatatgtgaaggagggggttatgttttatatatgtgtgacgttaatccttctatgca

SEQ ID NO: 3652 - DNA, 1316 bp, Homo sapiens
tacactgttaaccattcatctctcacttggaaaacagacaagttgtgaacagggattataaagcatcactcaaatagatagaaccatcagtggatttctgaagggtaacgatgcctttatagggtgaagctcacttcccaaaagaaaaagtgtttctgaaagcaaatggaccttcatgttctatgagaaatatctgccctcaatggccttctctttaagccatattgaacaatagaaaagttacttaagcacgcattcccctgtctttggtaggctccatatcaagtacaacttgatctcattgatattataaaactctcctacaatctgaaggagaaactaccaacattatccattatttttaacttcatttaaatcaacaagcctgacttcataacactattgggagaagagtaaagttccccttcccaaagacaatgtagacaggaaacatgtttatgtattgtttgaataaccctacagttagacaagacaagctactgactataattgggtttatgggacactgtccctggagttttagaatttgtaatactatacaaatagatgtttaatttgctgcatgaattgaagacttttcaaaaggaacaaatagcttaaattgccctacactgccaatggctggttctttgcaggatgtttctgcagcacaaacatcaggacaacagcaagatgaaagaagtatctgccatgtgtctcctagcatgagacacatgtcaccattttcctgagtttgagaaggaaactctgggcttgtttctaagtgtccaaagtctctgttactttatggctgcagaaatctatacctttttttgcctttattccctgagacttccaaattattttggatatatctctaggaatggcagaagaaactgtgaacttggaaatccaaacagttcctaagtaagaagattattaccaaatcagaggaagaaaatcatgcyaatggtacagaggtaaatagatcagttaaaatgtggttttggaaaaagaaagaatgcaaaatattgtttcttttctcattcttttgtgataccgattaaatacaccatcctcctaccctcacattgccaaaagaaaatcttacagcaaaagtaacattttaaggatgtatctgttgacttcctgcttaaatttttcttattagtgacaaatttcttcaatatatattactatcactaacctagagaaccattgaagaacagaacacaagttcatataaataaaacatgccagatatgtgaaggagggggttatgttttatatatgtgtgacgttaatccttctatgca

SEQ ID NO: 3653 - DNA, 573 bp, Homo sapiens
acagcctgggcgacaacagtgagactccatcttaaataaataaattaattttaaaagcatctgatggccagatgcggtggctcatgcctgtaatcccagcactttgagaggccaaggcgggcggatcacgaggtcaggagattaagaccatcctgggtaaaatgatgaaaccccgtctctactgaaaacacaaaaaaaattagccaagcgtggtgacgggcgcctgtagtcccagctactcgcgaggctgaggcaggagaatagtgtgaacctgggaagcggagcttgcagtgagccgagatcatgacactgcgtrccactgcactccagcctgggtgacagagcgagactccatctcaaaaaaaaaagtatttgattctgtaagtatcttatagaaaaaaaaaaatgatcaaatgaaagtggtattttaaatctgaatgcagagaacaggaggggctcaaagagaaatctaaaagcaagcagaactaacaaagcattccaagataaatgtatggaccaaaagaccactggaaaaaaaaaaaaagaaaaaactttacagaacaagaagttcat

SEQ ID NO: 3654 - DNA, 492 bp, Homo sapiens
ggatataataataaaacaagagctacattttactaattagcgcacaggccaaaaagcctctgaatatttatgctctcagaaaccattttctcatcaatttacttctgtgtgattgctatttggttactactgcagggagcagaattctttcaaatgttggttctatgaagcatctttagtgccctctcttttaaagttcaaaaagaaacaaagyccattaacagtggaggtcgctaaagattttaggactaacttagcattcagaggatttttatccattgtttctcttagcacaatttcacatatatgattcagtacctaagtatagcaaccaaaaaacaatttgtgtcctttctcaaatcttaggataatttacattagcagaactaatataagaaccattgatttccttttttcctccaaacactagaccagttttttaaagcatgaactgcaacaaacaagtggtgttctttgactaagaagcaacta

SEQ ID NO: 3655 - DNA, 534 bp, Homo sapiens
tttttctccctgaatatttgagggcaagttgggtcttgtcaattcatgtcaactgcttgtcaattcatggtataaaaacgaaaagttgatttttaaaatccaagtagtaattttaagaataggttaatttaactgcctaccaaattaaggacagactaaataaataatggtgcagtcacactagaataatcttgtgactgtcatcctaaatgtagtgctatagagctatatatttttgacatgcaaataacatcatagtatgtaattcacttttttcaaaggcagattttaagacagttggtttataataaaacccattttgttaaaaatatttacatgtatatctgtgacaaacttctggaaggatatacaccaaaatatcaatagtgcttatatctgtgtggagaaataatattctttttcttctttttgcttatctgtagtttctaattattttttacaatgaatattaatcatggatrtatattgagaaacaaaggagggaagagatggaggaaagaagaaaatggcagc

SEQ ID NO: 3656 - DNA, 565 bp, Homo sapiens
tatttactaaaagacagaagatctaaaaatactctaggcattattttggcggagsaaattacactggcaaaaacattgtgctgtggctattttaacaacaacctctgatccaagttctgcagctattttaattccctttaaattttaaaataaaattattgcatattttggcactatgcagtagagtatgttgtcaagtaatgattatatatgtaaaagagtctgcataataatgaaaatagcttattaataaatggcttcaactcaagcaccttagtagcaaaaaaacaaataatgcaatttaaaatggacaaaagatctgaatagatatttctcaaaataacacatataaatggccaacacgtgtatttttaaaatgctcaacatcactcatcatcagggaaatgaaaatcaaaactataatgagatatcatctaactgcagttagaatggctattaccaaaaagacaaaaacaataacagatgctggcagggatacagagaaagggaaactcttgcacactcttggtgggaatgtaaagtagaatggccattgtggaaaata

SEQ ID NO: 3657 - DNA, 565 bp, Homo sapiens
tatttactaaaagacagaagatctaaaaatactctaggcattattttggcggagcaaattacactggcaaaaacattgtgctgtggctattttaacaacaacctctgatccaagttctgcagctattttaattccctttaaattttaaaataaaattattgcatattttggcactatgcartagagtatgttgtcaagtaatgattatatatgtaaaagagtctgcataataatgaaaatagcttattaataaatggcttcaactcaagcaccttagtagcaaaaaaacaaataatgcaatttaaaatggacaaaagatctgaatagatatttctcaaaataacacatataaatggccaacacgtgtatttttaaaatgctcaacatcactcatcatcagggaaatgaaaatcaaaactataatgagatatcatctaactgcagttagaatggctattaccaaaaagacaaaaacaataacagatgctggcagggatacagagaaagggaaactcttgcacactcttggtgggaatgtaaagtagaatggccattgtggaaaata

SEQ ID NO: 3658 - DNA, 565 bp, Homo sapiens
tatttactaaaagacagaagatctaaaaatactctaggcattattttggcggagcaaattacactggcaaaaacattgtgctgtggctattttaacaacaacctctgatccaagttctgcagctattttaattccctttaaattttaaaataaaattattgcatattttggcactatgcagtagagtatgttgtcaagtaatgattatatatgtaaaagagtctgcataataatgaaaatagcttattaataaatggcttcaactcaagcaccttagtagcaaaaaaacaaataatgyaatttaaaatggacaaaagatctgaatagatatttctcaaaataacacatataaatggccaacacgtgtatttttaaaatgctcaacatcactcatcatcagggaaatgaaaatcaaaactataatgagatatcatctaactgcagttagaatggctattaccaaaaagacaaaaacaataacagatgctggcagggatacagagaaagggaaactcttgcacactcttggtgggaatgtaaagtagaatggccattgtggaaaata

SEQ ID NO: 3659 - DNA, 1027 bp, Homo sapiens
cattactgttattagagcaataatattcagctgcatygtgaacagagcacagaaaaactctactctgctgaacagaaaaacctgagacagccactctgccagatagcaggggctgtacaaacgttacttaaacatgactgatacaggtgacagacaaggagatttttaattctgggatagtctttttacacacatactaatttaaataaagttaataatcaggaccagcaaaaaaatgggtgattgcatagttttgtgctagtacctttttagaaggctttaggttgcactaactagagacaatacaagaactattgaagctggtaataaaatatcccattgaaaatgattaggccaatgttaaaaatgacagcattgagacatactggattatttataaggaatgagtagagtctgaagagaagggaaataagtgatatcatttccctaaaggagctgaattaaagtattggatttatgatgtttttatttatgcaggggccatttaaagcattttcattttcaatttttatgtgaatgctgttgcacacttactcttttatgatacaaccttatgcagcaggctgaattagggacctatttaacttctgggggtaactcatggtgttgaattagatcttcgtatgtggtctccattagaccaaacttagtgactgccttccacactatgcaccctcatattatttgagaactctcagagcagttctgttaacatcagtcaatttgcattcacagctgcattcaattgagattagtggctgctttttgaaagatagaaaatatagattagtgatggcagatgtttcctgaggctacattctagacaactgaaggcaaaaaaaaaaaaaaaatccagtgacccataagactaaaattggcttcatttgattaacaaatcacgtggtagtcaatcttcattatagtacttagcagtcatctgcatatgcaggtcctgggataaaataatgtagtggcttgatgcacagacaaagaacttgttagaaat

SEQ ID NO: 3660 - DNA, 1027 bp, Homo sapiens
cattactgttattagagcaataatattcagctgcatcgtgaacagagcacagaaaaactctactctgctgaacagaaaaacctgagacagccactctgccagatagcaggggctgtacaaacgttacttaaacatgactgatacaggtgacagacaaggagatttttaattctgggatagtctttttacacacatactaatttaaataaagttaataatcaggaccagcaaaaaaatgggtgattgcatagttttgtgctagtacctttttagaaggctttaggttgcactaactagagacaatacaagaactattgaagctggtaataaaatatcccattgaaaatgattaggccaatgttaaaaatgacagcattgagacatactggattatttataaggaatgagtagagtctgaagagaagggaaataagtgatatcatttccctaaaggagctgaattaaagtattggatttatgatgtttttatttatgcaggggccatttaaagcattttcattttcaatttttatgtgaatgctgttgcacacttactcttttatgatacaaccttatgcagcaggctgaattagggacctrtttaacttctgggggtaactcatggtgttgaattagatcttcgtatgtggtctccattagaccaaacttagtgactgccttccacactatgcaccctcatattatttgagaactctcagagcagttctgttaacatcagtcaatttgcattcacagctgcattcaattgagattagtggctgctttttgaaagatagaaaatatagattagtgatggcagatgtttcctgaggctacattctagacaactgaaggcaaaaaaaaaaaaaaaatccagtgacccataagactaaaattggcttcatttgattaacaaatcacgtggtagtcaatcttcattatagtacttagcagtcatctgcatatgcaggtcctgggataaaataatgtagtggcttgatgcacagacaaagaacttgttagaaat

SEQ ID NO: 3661 - DNA, 1027 bp, Homo sapiens
cattactgttattagagcaataatattcagctgcatcgtgaacagagcacagaaaaactctactctgctgaacagaaaaacctgagacagccactctgccagatagcaggggctgtacaaacgttacttaaacatgactgatacaggtgacagacaaggagatttttaattctgggatagtctttttacacacatactaatttaaataaagttaataatcaggaccagcaaaaaaatgggtgattgcatagttttgtgctagtacctttttagaaggctttaggttgcactaactagagacaatacaagaactattgaagctggtaataaaatatcccattgaaaatgattaggccaatgttaaaaatgacagcattgagacatactggattatttataaggaatgagtagagtctgaagagaagggaaataagtgatatcatttccctaaaggagctgaattaaagtattggatttatgatgtttttatttatgcaggggccatttaaagcattttcattttcaatttttatgtgaatgctgttgcacacttactcttttatgatacaaccttatgcagcaggctgaattagggacctatttaacttctgggggtaactcatggtgttgaattagatcttcgtatgtggtytccattagaccaaacttagtgactgccttccacactatgcaccctcatattatttgagaactctcagagcagttctgttaacatcagtcaatttgcattcacagctgcattcaattgagattagtggctgctttttgaaagatagaaaatatagattagtgatggcagatgtttcctgaggctacattctagacaactgaaggcaaaaaaaaaaaaaaaatccagtgacccataagactaaaattggcttcatttgattaacaaatcacgtggtagtcaatcttcattatagtacttagcagtcatctgcatatgcaggtcctgggataaaataatgtagtggcttgatgcacagacaaagaacttgttagaaat

SEQ ID NO: 3662 - DNA, 1027 bp, Homo sapiens
cattactgttattagagcaataatattcagctgcatcgtgaacagagcacagaaaaactctactctgctgaacagaaaaacctgagacagccactctgccagatagcaggggctgtacaaacgttacttaaacatgactgatacaggtgacagacaaggagatttttaattctgggatagtctttttacacacatactaatttaaataaagttaataatcaggaccagcaaaaaaatgggtgattgcatagttttgtgctagtacctttttagaaggctttaggttgcactaactagagacaatacaagaactattgaagctggtaataaaatatcccattgaaaatgattaggccaatgttaaaaatgacagcattgagacatactggattatttataaggaatgagtagagtctgaagagaagggaaataagtgatatcatttccctaaaggagctgaattaaagtattggatttatgatgtttttatttatgcaggggccatttaaagcattttcattttcaatttttatgtgaatgctgttgcacacttactcttttatgatacaaccttatgcagcaggctgaattagggacctatttaacttctgggggtaactcatggtgttgaattagatcttcgtatgtggtctccattagaccaaacttagtgactgccttccacactatgcaccctcatattatttgagaactctcagarcagttctgttaacatcagtcaatttgcattcacagctgcattcaattgagattagtggctgctttttgaaagatagaaaatatagattagtgatggcagatgtttcctgaggctacattctagacaactgaaggcaaaaaaaaaaaaaaaatccagtgacccataagactaaaattggcttcatttgattaacaaatcacgtggtagtcaatcttcattatagtacttagcagtcatctgcatatgcaggtcctgggataaaataatgtagtggcttgatgcacagacaaagaacttgttagaaat

SEQ ID NO: 3663 - DNA, 1330 bp, Homo sapiens
aatgcatgaggcatatgccttgccctatataaacttacagttcaagtgggaaagagagacggagagacaagataacacgtaaactgctatataacatggtaaatgtaatgaatgtctgtttaagtgtcactgtgcccagaatattagacaacaaatggtgaatagttacacaggtaccataagacattgtttctgcctgaggaatatggatcttactggagagtgtattagtgaagtggagataagtgtgggtgggcagatgccaggagagttatttcagaggcttttaagagtgtcgtcattgagaacagatagggtggtggttaccagaatagcagaatgtatatttgagataggtcatggagaaagaatgccagaattcagtgaaagggaaaaatagaggcagttgcatagttggcgtacaggaataggcagacagctttgctactgactgtgatggagagattacacatttccttgcagtgttgccaaattaatctgcttgtttcatggttaggtagaacataatctgcacagtgtcatctgagagacacagtggtgttatctccttctccccatattctatgtgttcctgacacatgtaggataccccctaatctgcccataataatagcctgacaaattttagaaatgtattagttagcctctactcactatatactataactaactccaaagtctttcctaagaatataaaaaaccctaagacacagtaacatattaagtcatttctaaatcttaatgttttaactgatatggattgttggattgtaactgggccacttataagagatatatgtttggaatgtggacagatatccatagctgaagtatggatgacccttagggaatgagggtcaggatgaaatatgaataattaaaacaattaaaattctcctgtgggtgacttstgtttgggatatccaggaaggacaactgcgtcaaatcactgagggggcctcaagaccattacagtgtccttagtccttatttgcagttaaaagttaatgacaaatgtcatctggaagtgggatcagaactagacttgcagaaaatctcatatgtttccaggtgccactacatacccatgtaattctaattctggggaaatgagaaaaaatacatatacaaatttaactaacccttagagacaaaaaataatgtcagaattttctttccaggatttgccatatgtccctttcctgataggaattcctcttataaatagattatgccatggcacacagtaccacttatacaggtagtgacgtttcctactcataggaaaaagacacccagtggaagtaca

SEQ ID NO: 3664 - DNA, 1223 bp, Homo sapiens
tctcttgggcacaacaaaaactatcttagaaaagattaattttattaaataagctagaaaatgatcatttctagcattttcaaattccaacatataagaaaaataagtcaaccagttatctgtcccctcaatcttgagcaacacacaggttttctttcctttttttttttttttttttgaggtggagtcttgctctgtcacccaggctggagtgcaggggtgcaatctcggctcactgcaacctctacctctcaggttcaagtgattctcccacctcagcctcctgagtagctgagattgcaggcgtgtgccaccatgcccagctaatttgtgtatttttagtagagatggggtttcaccatgtcagtcaggctggtctcgaactcctgacctcatgatccgcccccctcagcctcccattttgtatgtgcaactactactgtattactttgaaagcataaggctagggggtaaaggaactagtcaataatttcaattcaaatcaataatcaaacattttagttgagaagtctctttcaagcactaactgatcagcaatatttttttgtttttgtttttgtttttgtttttgagacggagtcttgctctgtcgcccaggctggagtgcaggggcacaatctcagctcactgcaacctctgcctctcgggttcaagcgattctcctgcttcagcctccttagtagctgggattacaggcatgtgccaccaygcctggctaattttttgtacttttggtagagacagggtttcaccatattggccaggctggttttgaactcatgacctcaagtgatccaccctactcagcttcccaaagtgctggaattacagatgtgagcccccacgcccagcctgatcagtaatattttggaagcagaggagaaggaaaggtacagggggaagtgaaagggaacaactgattggcatgtatagtggtagctgatagcttgactcttgaacaagagaatgtacaaatagagtaggataaattcacaagtccacactcaaaaatatccatttttgtatgtgtttatatagatgtaaatatgtactatatatgcttctttacaaatatgtggctagagataaaaagtatattcaaaagtatgtaaaaaaattcacaaaattttaaccattagataagcacatatggattgtaaatgggaagaaaatggtatataataaaaatgaaacatctggct

SEQ ID NO: 3665 - DNA, 1223 bp, Homo sapiens
tctcttgggcacaacaaaaactatcttagaaaagattaattttattaaataagctagaaaatgatcatttctagcattttcaaattccaacatataagaaaaataagtcaaccagttatctgtcccctcaatcttgagcaacacacaggttttctttcctttttttttttttttttttgaggtggagtcttgctctgtcacccaggctggagtgcaggggtgcaatctcggctcactgcaacctctacctctcaggttcaagtgattctcccacctcagcctcctgagtagctgagattgcaggcgtgtgccaccatgcccagctaatttgtgtatttttagtagagatggggtttcaccatgtcagtcaggctggtctcgaactcctgacctcatgatccgcccccctcagcctcccattttgtatgtgcaactactactgtattactttgaaagcataaggctagggggtaaaggaactagtcaataatttcaattcaaatcaataatcaaacattttagttgagaagtctctttcaagcactaactgatcagcaatatttttttgtttttgtttttgtttttgtttttgagacggagtcttgctctgtcgcccaggctggagtgcaggggcacaatctcagctcactgcaacctctgcctctcgggttcaagcgattctcctgcttcagcctccttagtagctgggattacaggcatgtgccaccatgcctggctaattttttgtacttttggtagagacagggtttcaccatattggccaggctggttttgaactcatgacctcaagtgatccaccckactcagcttcccaaagtgctggaattacagatgtgagcccccacgcccagcctgatcagtaatattttggaagcagaggagaaggaaaggtacagggggaagtgaaagggaacaactgattggcatgtatagtggtagctgatagcttgactcttgaacaagagaatgtacaaatagagtaggataaattcacaagtccacactcaaaaatatccatttttgtatgtgtttatatagatgtaaatatgtactatatatgcttctttacaaatatgtggctagagataaaaagtatattcaaaagtatgtaaaaaaattcacaaaattttaaccattagataagcacatatggattgtaaatgggaagaaaatggtatataataaaaatgaaacatctggct

SEQ ID NO: 3666 - DNA, 1223 bp, Homo sapiens
tctcttgggcacaacaaaaactatcttagaaaagattaattttattaaataagctagaaaatgatcatttctagcattttcaaattccaacatataagaaaaataagtcaaccagttatctgtcccctcaatcttgagcaacacacaggttttctttcctttttttttttttttttttgaggtggagtcttgctctgtcacccaggctggagtgcaggggtgcaatctcggctcactgcaacctctacctctcaggttcaagtgattctcccacctcagcctcctgagtagctgagattgcaggcgtgtgccaccatgcccagctaatttgtgtatttttagtagagatggggtttcaccatgtcagtcaggctggtctcgaactcctgacctcatgatccgcccccctcagcctcccattttgtatgtgcaactactactgtattactttgaaagcataaggctagggggtaaaggaactagtcaataatttcaattcaaatcaataatcaaacattttagttgagaagtctctttcaagcactaactgatcagcaatatttttttgtttttgtttttgtttttgtttttgagacggagtcttgctctgtcgcccaggctggagtgcaggggcacaatctcagctcactgcaacctctgcctctcgggttcaagcgattctcctgcttcagcctccttagtagctgggattacaggcatgtgccaccatgcctggctaattttttgtacttttggtagagacagggtttcaccatattggccaggctggttttgaactcatgacctcaagtgatccaccctactcagcttcccaaagtgctggaattacagatgtgagccmccacgcccagcctgatcagtaatattttggaagcagaggagaaggaaaggtacagggggaagtgaaagggaacaactgattggcatgtatagtggtagctgatagcttgactcttgaacaagagaatgtacaaatagagtaggataaattcacaagtccacactcaaaaatatccatttttgtatgtgtttatatagatgtaaatatgtactatatatgcttctttacaaatatgtggctagagataaaaagtatattcaaaagtatgtaaaaaaattcacaaaattttaaccattagataagcacatatggattgtaaatgggaagaaaatggtatataataaaaatgaaacatctggct

SEQ ID NO: 3667 - DNA, 1223 bp, Homo sapiens
tctcttgggcacaacaaaaactatcttagaaaagattaattttattaaataagctagaaaatgatcatttctagcattttcaaattccaacatataagaaaaataagtcaaccagttatctgtcccctcaatcttgagcaacacacaggttttctttcctttttttttttttttttttgaggtggagtcttgctctgtcacccaggctggagtgcaggggtgcaatctcggctcactgcaacctctacctctcaggttcaagtgattctcccacctcagcctcctgagtagctgagattgcaggcgtgtgccaccatgcccagctaatttgtgtatttttagtagagatggggtttcaccatgtcagtcaggctggtctcgaactcctgacctcatgatccgcccccctcagcctcccattttgtatgtgcaactactactgtattactttgaaagcataaggctagggggtaaaggaactagtcaataatttcaattcaaatcaataatcaaacattttagttgagaagtctctttcaagcactaactgatcagcaatatttttttgtttttgtttttgtttttgtttttgagacggagtcttgctctgtcgcccaggctggagtgcaggggcacaatctcagctcactgcaacctctgcctctcgggttcaagcgattctcctgcttcagcctccttagtagctgggattacaggcatgtgccaccatgcctggctaattttttgtacttttggtagagacagggtttcaccatattggccaggctggttttgaactcatgacctcaagtgatccaccctactcagcttcccaaagtgctggaattacagatgtgagcccccacgcccagcctgatcagtaatattttggaagcagaggagaaggaaaggtacagggggaagtgaaagggaacaactgattggcatgtatagtggtagcygatagcttgactcttgaacaagagaatgtacaaatagagtaggataaattcacaagtccacactcaaaaatatccatttttgtatgtgtttatatagatgtaaatatgtactatatatgcttctttacaaatatgtggctagagataaaaagtatattcaaaagtatgtaaaaaaattcacaaaattttaaccattagataagcacatatggattgtaaatgggaagaaaatggtatataataaaaatgaaacatctggct

SEQ ID NO: 3668 - DNA, 709 bp, Homo sapiens
ttcaaacaaatagatctcttttctgcaccttgaacatgccaacctaattccagaccatggtctttgctcttgctattctcttagctccaatgacctttctccagatctccttatgtacattccctccactcagatatacctttgcacaygtaactccctcaggaaggcctctctggccatacaattttaagttctcctccatctcctactcattctgtagcacatcactctgttttgtttactttatagcacttagtatatttattcacttgtttattgtctctgtctccagcaccatatcttctccccaaaatgctggctcatttaggtcatggatgtctctccattattgagaaaagaggttcacaaactctttctataaagggctttgcagatcatatagcctctgttgcaactactcacctctgccattgtagcatgaaagcagccaaatgatatgtaagcacatgagcatggctgtgttccaataaaacttggatgagctagatttggcctatgggccatcattttccaacctcttatctacaaaagtatttgtcatgtaaaagattctcggtaagtatgtatcaaatgcataaatgaatgaaagatctaaaaatctctgggagaaaacaccaaatactcagtaggatggttcttgtgtacatctggcaatagcttattattaacagagcctcattgtctctta

SEQ ID NO: 3669 - DNA, 577 bp, Homo sapiens
agctgagatcacaccattgcactccagcctgggtgacatagtgagactctgtccccctctcaaaaaaaaaattaagtaaatattaacaggaaaaataagtatgatgtattcttttcttttttggaaactttattaaccatatatattatttacaattgaaatgtaaatatatttcaagagcatgacttgctcatctttgtacttcctgcatttaatttagtagctaatccttaattgtacctatgatctgttacttccaccagagtgatgggtgaaatattttcaaaaatgggcytctgctctgcttatgtttctttgccttatatcaaaagtatcattgcaaacattagattacaaataatatattaatttgttttttgttataaatctctactacattacataattttattttgaactatctgggaaaatgcaattttttaataacctaaatgtaaatagcctaaccacatcatctagggaaactgtttttagttttagtttaataggttttgttttggggagcattaaaaatagctattcacatttaaaagtcaacctgtttctggagatgaca

SEQ ID NO: 3670 - DNA, 638 bp, Homo sapiens
atgggagctatgattctacattccctcagtcagcctcaattcccatgtgcttcgcagagcatggagaacacaattctagtgttaaagatatgtatattttttcataaacatggctctaatcataagtaaaccactttattcactgtgcaaacgaagaaaatagtaatagcactggaggaaaaactagctgtggtagacttgatgaaagacaatactaaactgyaatttatgtgctatttgggaaactttcaggagtgattgtggctcaatgtttgcttcacatactaaccttagaacctaacccctacttaatgccttttcttcatcttaatcatactaaacatactgaaggtagctaaacagggatttagtccaaaacaattatttgagggcagaaaattccctaaaaataatgaaacattttaggaagctaaaaccaggcaaataaaaacataatctccataaggttagagatttgtgtgggtacaaagtacaaaaacctcacctgcatggaacttagataagaaactggtcatactcgagctacagagcacttatgagggtcttatgagtgtatctttgcattttctcccagaaccataataacccttttccctgagtcaatattttcaaatatt

SEQ ID NO: 3671 - DNA, 1618 bp, Homo sapiens
tatgcatgtatgtgtgtatttgtatgtgtatacacacgtacatatctcatttgcctcattgaattgtgaggctagcaggtctgaaatccataggctaggctggcagactggaaactcagccaagaattgatgctgcagtcttgagtcagaattttgtcttctccaggaaaattcaagttttgctcttaacgccttcaactgattaaatgaggcccagttctttcctttacttaaggacaagtgatttcctttacctcttcaaaataccttcacagcaacgtctagattagtgtttgcttaaataactgagctgacacaaaaaactaaccatcatgccaagtttctgccatttttcaaaatctgtgattcgactggatttaagaaaatttagtcacacgaggacagtacttttttcagctgccataagctcaatacatctacccaaatcagtcacgctcttgtttttttccttgtaatattgagtttagtgtgcccggatgtcttgtcacatcaattaggaagcaaaaatgtatgagtcatggagcatgcrgcagagtgaattttcaagtcccctgaacaggtttttatgacccagccatctgattgccctaaaataaacccaactgccatgttccgcctcaccttttcccaaatgccccatggcctggagatgactcagggcccaagaatgaagaaaataatcagaatctcaatcacttcctctatcacatcttcagtgagcctgacttacaaaacagaaactctccagaagaataaggcagtgaaagctgaacccagctaccttcttcttggatatgaacaaataattataatattctttccctttcatggaaggagcccatctgtgtcaagggaactcaatttttctgcatttagcttgcatgtctcagatgccatgttggcaggtggacagccctgttatttgttgtgtgctagctaattgtacaagatcctcaaacgcaaaatgaaaaagacagtttgggcacagtggctcacgcctgcaatcccagcactttgggaggccgaggcagacagatcacctgaggtcaggagtttgagaccagcctgaccaacatggagaaaccccgtctctactaaaaatacaaaattagccgggtgtggtggcgcatgcctgtaatcccagctactggggaggctgaggcaggggaactgctagaacttggagggaaaggttgcagtgagctgagatcatgccattgcactccagcctgggcaacaagagtgaaactccgtctcaaaaaaaagaaaaagaaaagaaaacaaaagaaaaagacagaaaacagctagttctaaggagaatatggagcaaccatcaaacacggttgagaagcatataaaccaagtacaacaattttgaaaacctgtgtatatatacacacacacaccgtaggagaggaattgctagggaataaagtacttataactttgtaagtaatgtgtgtgtgtgtgtgtgtgtgtacacataccctagaagacctatatatatgtgtgtgtgtatatgtatatgagacctataagactggggaggtgtgtgtgtgtatatatatatataggtgtacataggtatgtatatagt

SEQ ID NO: 3672 - DNA, 1306 bp, Homo sapiens
ctaactttagtgtggttctttccatggaagattattagccctctggcctcactgaatctttagttcagttttattttattttagaaacaagttctcacgctgtcacctgggctggagtatagtggcacgatcacagctcactgtagcctcgagctcctggacttaggtgatcctcctgtctcacctccccaayagctaaaaccacaggcacacataaccacactcagctaatttttaaacttttttgtagaaatggagtcgcactatatcgcctatgctggtcttgaactcctggcctcaagtgatcctcccacgccagcctcccaaagtgctgggattgtaggcatgagccactgcaccagcccagtttcattttaaactttaacccttatttatttctgtagaatctcttattccctcgtacgatctagcttttgcctcaaaatgtccagaaactctcaacacaaagatccccaatatctggccccagtcacattcaagggccttttttcctggttgccaccttcttaaggcaagacccttccttccagtcctctcctcgttggctggtgtgaggctctgtgatgggagctctcccactcatcctctggttctgctcagtctgttctcggctcctttctgcccacaagtctcagttccatctctaaaaagcatagcctctagcttggagacagctttccttccttctaacagtatgtggtatatctggcatttgactatatattggatgtatatctcaaaagctgagagcagtacatctctaaaaaaaaaaaactcaccttgactcagaatcccactccagaagagcccttagagatcgtctagattgaaccagtggattttacaggcaaggatctctccagtggaaaggtctccaggggctgcccaaggtcactaccagtcagcagaagccacagctcacttctatctccagagactctggtgctcctgccgtgacatcatcctacttcatgtaggatggcaccagccagagagtcacagaatggaactgctatagtccatcctgccttcccaatggcatcacagttcaaaaaagggctataaattagggcagtatcatgatgaggtgagaaaattctcctcttcctcctcacatcttactaaggaaaccactgagactacacactctgatgacccagtcagagtaaaggaggagctgaggcaagtggctacaggtcagagcgtcccacctgcaaaccctaagcgtcatcataaagatgacactcgatttgctctgttgttcctacatcaacagcaatccttt

SEQ ID NO: 3673 - DNA, 1306 bp, Homo sapiens
ctaactttagtgtggttctttccatggaagattattagccctctggcctcactgaatctttagttcagttttattttattttagaaacaagttctcacgctgtcacctgggctggagtatagtggcacgatcacagctcactgtagcctcgagctcctggacttaggtgatcctcctgtctcacctccccaatagctaaaaccacaggcacacataaccacactcagctaatttttaaacttttttgtagaaatggagtcgcactatatcgcctatgctggtcttgaactcctggcctcaagtgatcctcccacgccagcctcccaaagtgctgggattgtaggcatgagccactgcaccrgcccagtttcattttaaactttaacccttatttatttctgtagaatctcttattccctcgtacgatctagcttttgcctcaaaatgtccagaaactctcaacacaaagatccccaatatctggccccagtcacattcaagggccttttttcctggttgccaccttcttaaggcaagacccttccttccagtcctctcctcgttggctggtgtgaggctctgtgatgggagctctcccactcatcctctggttctgctcagtctgttctcggctcctttctgcccacaagtctcagttccatctctaaaaagcatagcctctagcttggagacagctttccttccttctaacagtatgtggtatatctggcatttgactatatattggatgtatatctcaaaagctgagagcagtacatctctaaaaaaaaaaaactcaccttgactcagaatcccactccagaagagcccttagagatcgtctagattgaaccagtggattttacaggcaaggatctctccagtggaaaggtctccaggggctgcccaaggtcactaccagtcagcagaagccacagctcacttctatctccagagactctggtgctcctgccgtgacatcatcctacttcatgtaggatggcaccagccagagagtcacagaatggaactgctatagtccatcctgccttcccaatggcatcacagttcaaaaaagggctataaattagggcagtatcatgatgaggtgagaaaattctcctcttcctcctcacatcttactaaggaaaccactgagactacacactctgatgacccagtcagagtaaaggaggagctgaggcaagtggctacaggtcagagcgtcccacctgcaaaccctaagcgtcatcataaagatgacactcgatttgctctgttgttcctacatcaacagcaatccttt

SEQ ID NO: 3674 - DNA, 1306 bp, Homo sapiens
ctaactttagtgtggttctttccatggaagattattagccctctggcctcactgaatctttagttcagttttattttattttagaaacaagttctcacgctgtcacctgggctggagtatagtggcacgatcacagctcactgtagcctcgagctcctggacttaggtgatcctcctgtctcacctccccaatagctaaaaccacaggcacacataaccacactcagctaatttttaaacttttttgtagaaatggagtcgcactatatcgcctatgctggtcttgaactcctggcctcaagtgatcctcccacgccagcctcccaaagtgctgggattgtaggcatgagccactgcaccagcccagtttcattttaaactttaacccttatttatttctgtagaatctcttattccctcgtacgatctagcttttgcctcaaaatgtccagaaactctcaacacaaagatccccaatatctggccccagtcacattcaagggccttttttcctggttgccaccttcttaaggcaagacccttccttccagtcctctcctcgttggctggtgtgaggctctgtgatgggagctctcccactcatcctctggttctgctcagtctgttctcggctcctttctgcccacaagtctcagttccatctctaaaaagcatagcctctagcttggagacagctttccttccttctaacagtatgtggtatatctggcatttgactatatattggatgtatatctcaaaagctgagagcagtacatctctaaaaaaaaaaaactcaccttgactcagaatcccactccagaagagcccttagagatcrtctagattgaaccagtggattttacaggcaaggatctctccagtggaaaggtctccaggggctgcccaaggtcactaccagtcagcagaagccacagctcacttctatctccagagactctggtgctcctgccgtgacatcatcctacttcatgtaggatggcaccagccagagagtcacagaatggaactgctatagtccatcctgccttcccaatggcatcacagttcaaaaaagggctataaattagggcagtatcatgatgaggtgagaaaattctcctcttcctcctcacatcttactaaggaaaccactgagactacacactctgatgacccagtcagagtaaaggaggagctgaggcaagtggctacaggtcagagcgtcccacctgcaaaccctaagcgtcatcataaagatgacactcgatttgctctgttgttcctacatcaacagcaatccttt

SEQ ID NO: 3675 - DNA, 1306 bp, Homo sapiens
ctaactttagtgtggttctttccatggaagattattagccctctggcctcactgaatctttagttcagttttattttattttagaaacaagttctcacgctgtcacctgggctggagtatagtggcacgatcacagctcactgtagcctcgagctcctggacttaggtgatcctcctgtctcacctccccaatagctaaaaccacaggcacacataaccacactcagctaatttttaaacttttttgtagaaatggagtcgcactatatcgcctatgctggtcttgaactcctggcctcaagtgatcctcccacgccagcctcccaaagtgctgggattgtaggcatgagccactgcaccagcccagtttcattttaaactttaacccttatttatttctgtagaatctcttattccctcgtacgatctagcttttgcctcaaaatgtccagaaactctcaacacaaagatccccaatatctggccccagtcacattcaagggccttttttcctggttgccaccttcttaaggcaagacccttccttccagtcctctcctcgttggctggtgtgaggctctgtgatgggagctctcccactcatcctctggttctgctcagtctgttctcggctcctttctgcccacaagtctcagttccatctctaaaaagcatagcctctagcttggagacagctttccttccttctaacagtatgtggtatatctggcatttgactatatattggatgtatatctcaaaagctgagagcagtacatctctaaaaaaaaaaaactcaccttgactcagaatcccactccagaagagcccttagagatcgtctagattgaaccagtggattttacaggcaaggatctctccagtggaaaggtctccaggggctgcccaaggtcactaccagtcagcagaagccacagctcacttctatctccagagactctggtgctcctgccgtgacatcatcctacttcatgtaggatggcaccagccagagagtcacagaatggaactgctatagtccatcctgccttcccaatggcatcacagttcaaaaaagggctataaattagggcagtatyatgatgaggtgagaaaattctcctcttcctcctcacatcttactaaggaaaccactgagactacacactctgatgacccagtcagagtaaaggaggagctgaggcaagtggctacaggtcagagcgtcccacctgcaaaccctaagcgtcatcataaagatgacactcgatttgctctgttgttcctacatcaacagcaatccttt

SEQ ID NO: 3676 - DNA, 1261 bp, Homo sapiens
aacaaactccagacacaccatctttaagaactgtaacactcaccgcgggggtccacggtgagggtccacggcttcattcttgaagtcagagagaacaagaacccactggaaggaaccaattccagacacaatttaatttttttttttttcatattttgttgaacatccctgataggctgttattgacagcttagtgttttgtttccatcctcttatttcaggacttcaggacttggcaaactttttcttaagtatccagatattaaatatttttgggccatggaccatacagtctctgttgtaatcattcaactctgctattatagtataaaagcagcatagtaatgcagaaacaaatggagtggctgtrtttcaataaaattttatttataaaaacatgtggctggaatatgggctatagtttgccaacccctatttgtttatacattacatatatacctattttatttctatggagggatggatggatgtatggatggatagatggatggatggatagagctgatagatgatagagagagagagataaatatgtacatgtatgtcagagatgcttttctccagagaggatatatgggaacaacaacctggcaatatttcagccactctcaaagtttccagttcaaacagtgaatacaaggctcagcttccctcatggaattcccaaagattaaaatcagcaataggctctcaatcaaacatcatcaaaaataaagaattatgccatcctatatgataattcaaagaaacaacagaaataaatttatatctaaagaattacaaatactggacttgtaagaaaagtctctctctctgtctctcctcatcaataggatattttcatatacatttatcagctgatggacatttgtattgtttccactttttgactacgataattctgttataaacgtttgtgtacaaggtttggtgtgaacgtatgtttttatttctctttaatgtatacctggaatttttcaatcacatgttaactgtatgcttttaagttattgacgaactggcaaactgtttttcaaaaaggctgcaatattttacattctcaccacgaatatatgaggtttcagtttctctacatagtcacctatacttattgttttctgggttttttttaaattattattacagtagtcctctcttatctgcaggggatatattctaaaacctccagtggaagcctgaaagcacagagagtatggacactataaatactatttttccc

SEQ ID NO: 3677 - DNA, 1261 bp, Homo sapiens
aacaaactccagacacaccatctttaagaactgtaacactcaccgcgggggtccacggtgagggtccacggcttcattcttgaagtcagagagaacaagaacccactggaaggaaccaattccagacacaatttaatttttttttttttcatattttgttgaacatccctgataggctgttattgacagcttagtgttttgtttccatcctcttatttcaggacttcaggacttggcaaactttttcttaagtatccagatattaaatatttttgggccatggaccatacagtctctgttgtaatcattcaactctgctattatagtataaaagcagcatagtaatgcagaaacaaatggagtggctgtgtttcaataaaattttatttayaaaaacatgtggctggaatatgggctatagtttgccaacccctatttgtttatacattacatatatacctattttatttctatggagggatggatggatgtatggatggatagatggatggatggatagagctgatagatgatagagagagagagataaatatgtacatgtatgtcagagatgcttttctccagagaggatatatgggaacaacaacctggcaatatttcagccactctcaaagtttccagttcaaacagtgaatacaaggctcagcttccctcatggaattcccaaagattaaaatcagcaataggctctcaatcaaacatcatcaaaaataaagaattatgccatcctatatgataattcaaagaaacaacagaaataaatttatatctaaagaattacaaatactggacttgtaagaaaagtctctctctctgtctctcctcatcaataggatattttcatatacatttatcagctgatggacatttgtattgtttccactttttgactacgataattctgttataaacgtttgtgtacaaggtttggtgtgaacgtatgtttttatttctctttaatgtatacctggaatttttcaatcacatgttaactgtatgcttttaagttattgacgaactggcaaactgtttttcaaaaaggctgcaatattttacattctcaccacgaatatatgaggtttcagtttctctacatagtcacctatacttattgttttctgggttttttttaaattattattacagtagtcctctcttatctgcaggggatatattctaaaacctccagtggaagcctgaaagcacagagagtatggacactataaatactatttttccc

SEQ ID NO: 3678 - DNA, 1261 bp, Homo sapiens
aacaaactccagacacaccatctttaagaactgtaacactcaccgcgggggtccacggtgagggtccacggcttcattcttgaagtcagagagaacaagaacccactggaaggaaccaattccagacacaatttaatttttttttttttcatattttgttgaacatccctgataggctgttattgacagcttagtgttttgtttccatcctcttatttcaggacttcaggacttggcaaactttttcttaagtatccagatattaaatatttttgggccatggaccatacagtctctgttgtaatcattcaactctgctattatagtataaaagcagcatagtaatgcagaaacaaatggagtggctgtgtttcaataaaattttatttataaaaacatgtggctggaatatgggctatagtttgccaacccctatttgtttatacattacatatatacctattttatttctatggagggatggatggatgtatggatggatagatggatggatggatagagctgatagatgatagagagagagagataaatatgtacatgtatgtcagagatgcttttctccagagaggatatatgggaacaacaacctggcaatatttcagccactctcaaagtttccagttcaaacagtgaatacaaggctcagcttccctcatggaattcccaaagattaaaatcagcaataggctctcaatcaaacatcatcaaaaataaagaattatgccatcctatatgataattcamagaaacaacagaaataaatttatatctaaagaattacaaatactggacttgtaagaaaagtctctctctctgtctctcctcatcaataggatattttcatatacatttatcagctgatggacatttgtattgtttccactttttgactacgataattctgttataaacgtttgtgtacaaggtttggtgtgaacgtatgtttttatttctctttaatgtatacctggaatttttcaatcacatgttaactgtatgcttttaagttattgacgaactggcaaactgtttttcaaaaaggctgcaatattttacattctcaccacgaatatatgaggtttcagtttctctacatagtcacctatacttattgttttctgggttttttttaaattattattacagtagtcctctcttatctgcaggggatatattctaaaacctccagtggaagcctgaaagcacagagagtatggacactataaatactatttttccc

SEQ ID NO: 3679 - DNA, 624 bp, Homo sapiens
caccaattgttcaccactctggtggcagacaatgaaaacgggaggttgggcatgtgcaggagcaggaggtttatgggaaatctctgtgaagattattttcttcttcattttgctgtgagcctgaaattgctcttaaaaaggtttaaatttaaaaaaaaagttatcaaaatgtttttaaaaaagaaataaaggatttccagaacctcayatgagtaaagaatgtggtctctttatcttgaacttacaactttatataggaaaccaggtttagaatatcaatcaatcaatatttaaaaccactatgtaaaatgcagtttactttttcctgattctgtaaagcagtataagaggtgctatcatcaaggagataaaacaatcaatcatctaacatattttgatatacatttccttgtctaggaatacaacatagtataagaggcaccacccaaaacattaaaatgaaatataacagctaaatgaatgacagggggaggaaaaagaaaagccaacttaccagtttggtggatagttagaatgtttagggacgaaataaaatacttggccagagctttaaagaaatgtaagagtaagcgttagataaaagaataaaaattgagtatttca

SEQ ID NO: 3680 - DNA, 624 bp, Homo sapiens
caccaattgttcaccactctggtggcagacaatgaaaacgggaggttgggcatgtgcaggagcaggaggtttatgggaaatctctgtgaagattattttcttcttcattttgctgtgagcctgaaattgctcttaaaaaggtttaaatttaaaaaaaaagttatcaaaatgtttttaaaaaagaaataaaggatttccagaacctcacatragtaaagaatgtggtctctttatcttgaacttacaactttatataggaaaccaggtttagaatatcaatcaatcaatatttaaaaccactatgtaaaatgcagtttactttttcctgattctgtaaagcagtataagaggtgctatcatcaaggagataaaacaatcaatcatctaacatattttgatatacatttccttgtctaggaatacaacatagtataagaggcaccacccaaaacattaaaatgaaatataacagctaaatgaatgacagggggaggaaaaagaaaagccaacttaccagtttggtggatagttagaatgtttagggacgaaataaaatacttggccagagctttaaagaaatgtaagagtaagcgttagataaaagaataaaaattgagtatttca

SEQ ID NO: 3681 - DNA, 1056 bp, Homo sapiens
aaacagatatgacaaaaattaacttgcaaaaaaatgaaataccaatgagactttaaaaccaataaaattcaaattgataccattaatttgatgtgatgtataatgctatactgctaaaactaaattttctcttctaatgagaattttcagaccacaggtgcacagatctcagctgacaaatgttctataatagcaatgtgacccctttatgtcatcctagaggcaatggcagtctaggcgataccatgtgggatttagggacaaacagaattcgtttaaatctcttctctgattttgtttgtaagtggtgtgagtcacgacaagttaacttcttatcgtcattattatcatctgtgaaacagggaggatggtgaggtggataatacctttttgatgttgttttgaagagttaatgaaataatttagaaggtattccataaaaattaattcctttttccctaatacattttctttttaaaacagtttttgtaagtttggctttccaaagaaaattaaagcctataaaactgcattaaaaactaactagttaagaattaattttgggaagcaaagaataaccaaaactcccttcctcccatacactatcatttttccttttttctgtggttgctctgctttttttcctctccatccccartgtcctcccaacattctgatgtccaaatccaggtcctctcacttgaatgtccagatgaggtgcactgcagccagatagcttctccaaattcccttggctagaagtgacctcttccttcttatgatgcccaaagcagattttatatgtatgtctcatgcgatactcaaatttgacaggacttggagataacttacacaatggcaggaccttgaaattgggattggagaacagatttcccatagctcagcccagccggaggctgctgggagacaactgcaggtggactcgcccagtgggagcagccgaagctaagcccctcagcacgcagggtgaggaggcagcatcagaggtgtgaaagggtgttttgttgggaggattactggcctctcatcaaccct

SEQ ID NO: 3682 - DNA, 1056 bp, Homo sapiens
aaacagatatgacaaaaattaacttgcaaaaaaatgaaataccaatgagactttaaaaccaataaaattcaaattgataccattaatttgatgtgatgtataatgctatactgctaaaactaaattttctcttctaatgagaattttcagaccacaggtgcacagatctcagctgacaaatgttctataatagcaatgtgacccctttatgtcatcctagaggcaatggcagtctaggcgataccatgtgggatttagggacaaacagaattcgtttaaatctcttctctgattttgtttgtaagtggtgtgagtcacgacaagttaacttcttatcgtcattattatcatctgtgaaacagggaggatggtgaggtggataatacctttttgatgttgttttgaagagttaatgaaataatttagaaggtattccataaaaattaattcctttttccctaatacattttctttttaaaacagtttttgtaagtttggctttccaaagaaaattaaagcctataaaactgcattaaaaactaactagttaagaattaattttgggaagcaaagaataaccaaaactcccttcctcccatacactatcatttttccttttttctgtggttgctctgctttttttcctctccatccccagtgtcctcccaacattctgatgtccaaatccaggtcctctcacttgaatgtccagatgaggtgcactgcagccagatagcttctccaaattcccttggctagaagtgacckcttccttcttatgatgcccaaagcagattttatatgtatgtctcatgcgatactcaaatttgacaggacttggagataacttacacaatggcaggaccttgaaattgggattggagaacagatttcccatagctcagcccagccggaggctgctgggagacaactgcaggtggactcgcccagtgggagcagccgaagctaagcccctcagcacgcagggtgaggaggcagcatcagaggtgtgaaagggtgttttgttgggaggattactggcctctcatcaaccct

SEQ ID NO: 3683 - DNA, 1056 bp, Homo sapiens
aaacagatatgacaaaaattaacttgcaaaaaaatgaaataccaatgagactttaaaaccaataaaattcaaattgataccattaatttgatgtgatgtataatgctatactgctaaaactaaattttctcttctaatgagaattttcagaccacaggtgcacagatctcagctgacaaatgttctataatagcaatgtgacccctttatgtcatcctagaggcaatggcagtctaggcgataccatgtgggatttagggacaaacagaattcgtttaaatctcttctctgattttgtttgtaagtggtgtgagtcacgacaagttaacttcttatcgtcattattatcatctgtgaaacagggaggatggtgaggtggataatacctttttgatgttgttttgaagagttaatgaaataatttagaaggtattccataaaaattaattcctttttccctaatacattttctttttaaaacagtttttgtaagtttggctttccaaagaaaattaaagcctataaaactgcattaaaaactaactagttaagaattaattttgggaagcaaagaataaccaaaactcccttcctcccatacactatcatttttccttttttctgtggttgctctgctttttttcctctccatccccagtgtcctcccaacattctgatgtccaaatccaggtcctctcacttgaatgtccagatgaggtgcactgcagccagatagcttctccaaattcccttggctagaagtgacctcttccttcttatgatgcccaaagcagattttatatgtatgtctcatgcgatactcaaatttgacaggacttggagataacttacacaatggcaggaccttgaaattgggattggagaacagatttcccatagctcagcccagccggaggctgctgggagacaactgcaggtggrctcgcccagtgggagcagccgaagctaagcccctcagcacgcagggtgaggaggcagcatcagaggtgtgaaagggtgttttgttgggaggattactggcctctcatcaaccct

SEQ ID NO: 3684 - DNA, 1059 bp, Homo sapiens
agcatgcatatatttgaaatggagatgtgtcctaccgaaatatcaagaaatgatccatttttccagcatctaatacttaggttgctctaacatatcctcagaggactcattttcaaatcccactcttggacaaaatattgcctttctctccttcactggtgacattgaaataaaattgctatgatccaaggactagagaaataaatactgtatgctttaaagaaaggccaatttggcagcaactgggggatgggggagaacggaatactgctgtgccaatgtcagaaacakcccttcctcaaatcctatcctttttgcagtgcagagcaaccttcataagttgtacttctctcacaccctgaagccaaacttaaaagtttaatcctcatgagcaaaaaatgaaattctttataaaaatagctcctggctgaaagactctacaaaaaaaaaaaaaaaaaaaaaaaaaaaggaggaagaaacaaagaaagagcagacagcaaatgggatagtaagccaacagaattttcccacagtaaccttaccaccttgcatgcaaggatcctgggcagccaagtgtcaagctatgtgaaaaggaagcatgagtctctggtgcttacaaattcaattccattaaacgagtatttattgagtgtcttccatgtgctcagcaatgctttagacactgtgaaagaaacaaaggatgtataagacagttactaccctgaaggactttgcaatcttgttgaagagctttctctggaaaacaatttgatgctgaatgagtaagaaacacacatgattcaaaacaccctgtggacagaaaaactattcacatgtcatccagatgtcattttaatggaagctcaaccacctcgtttttaatttaccaaaggaatcaacccagggcatacgtatgtatttagccttgtccacatttcaagtggatcattctaagcaaacaaactttcttctataccaagaatgctgctgatgaaatgtgctggggctgcctgaatttgctccttgaccttgtctgtcaaatatgacagtcatcttttt

SEQ ID NO: 3685 - DNA, 639 bp, Homo sapiens
aattttctgtctactttctgtctgccccagcagagtgtaagctccatgaggacaggagccttggtcttcttatacttgcttcatttttagagccttgaatagtgcctaggcacaaggtactccctaactatgtggagaatgagccaataaatgaaataatgagtaactaggtttagatacatarctaaggattctcttgtttcatatatcctcacaccacttctgttaattctttaaaccattcattcttcatcaaatattttaaaaggtttcatgtatcagatattatatcaggcttagcacaagatggatataagcatggaccttggggagacagcttaaaataaaaaaacacatataaataacacgatcttaaattataactcgcatactacacgtgtctttttcacaatctatttgttgttatgtttgctttttgcattgtgctttttaaatgcagttctttctaaatgcaagaagacggtgctacgtcttatgaagaaaataatgtgtgctagaaaaccttcattcaggaatgagttatgatactgttggctgtgagttcaaccattaatgaattaatactataatagtgttaaatacactatgtataaaataaagtgtattcaaacagaaaca

SEQ ID NO: 3686 - DNA, 1064 bp, Homo sapiens
ttcaattttgctcaaattacagtggactactagtgaattgtcactatagatattcataggcttcatataaaatattggccatgttcctatatgattctggttgctccagaggtcttggattcataattacctgagcgtttctaacatgtattaacatgaagcatcaattgtttctggtaaatgaggaataagtggtttttgttcagaattgctctctgtagattctctgctagtattataatcctctttgattgaggtaaaaataacctggatgactaaaggtaaatttttccacaaaggagaattaatgcactgtctgttttctgtagaattatgacagattttatgcctttgttaaatcctaagattagttggtataactactttcaatgctctggcctattttctttgttgctaaaatgaaaatagatcagaaacaccttttgaggcctctggatttataatttaagaattaactctgagaaagtagtaggtgaataaatagagttataatctaagacaacgttacattccttgtgtgagtctcacatctaagacccggcagtactttcttcctctgtgcattctcacgaatacccacacactgtaagcatagtttctaagattccataattatgaatcctaacaataagaatgactcagaatgcagaatattacaatgcagactctgtcctgtcaggtaaagtaaggaaaggtaaatactgyttaccgatacacattattaaatggtctgttctaatttctaattgtaacttcttggtttcaatattagacatacatagaaagttctgcctaagtaacttgaggctgattccctgtggcacaggtccttactaatagatggtggttttagaatttgcattaagtctttctatctagttcatttcaacaaatatttaccgaatatccactctagtcgaggcactgtgctaccatatgggaacataaagatgactaggacaatccctatcctgcaggagtgtacaattacaaagcagagatgtgttgattgttatgattaatataaagtatagcagggttcc

SEQ ID NO: 3687 - DNA, 1270 bp, Homo sapiens
tctacattttttacataaaataaaataaacttaaggctgaagaagcaatcagataagcatttacctcagatgagcgaagtgaagactttgagttctgtcytttgtcctgtatttgtgaagacaagctatcaatgtacatggtcagggtaaaattcaacataactgtctcaggataaagatcttggggcccacaaggaatttgctcttgggaaaattatgagggagctatgtagctttttcatgtttttagccatcttagaaacaaaatgggaggcaggttgcatgacgcagttcccagtttaaattttccttttgactgagggagtttggaatcctgagatttattttcctttcacatattttgctcaatttattcatgaactgtgattttattcaaaattattttattttcaaattcattgcattcaaataatcataaaatgtgtacctgcattaaatgaggcagtgttgttctttttcttccttcatttacaaaagcttttttccacttttttcattgaataaaaaagaaacttagttatggctaggataaataatgtaatatgtgactattttgccagttatgtttcttctactgtgaatagcctatgccataaataacccatttttcaaatgagcaggcatttcttctattattagtttgcatgagctctttaaatatatcttatgtagcaattttcagttggttagatacatgagtttatccctagcttttctaatagcactatttccaatgttacacacacacacacacacacacacacacacacatacagcactcacttataagttgagtgaactccaggtaagataaaccaaagaattccatgccaagagacatttacaaatcttgaagagccagagaaaacccacaccgtacctttagagataaataatacaaatggcagtagatttcttatcagaaaccatggagtcctgaaacaagtggcacaatgcaatgctgaaagaaaaggccttttaattgagcatcctagacccagtgaaaatgtcctcccagattgaaggggaaatcaagccattctcagatgagaaaacattaatttgttattatcaaacctaccataaataatggctaaagaaatttgttctctaaacaaaggaaatgacgttccaaaaatcttggaacatctgaaagaaagaaacaatacagtaagcaaaacttttgtaaatacagtaggatttgttgagttttctaaaatatgtttgatggtagaagaaaaaattataa

SEQ ID NO: 3688 - DNA, 1270 bp, Homo sapiens
tctacattttttacataaaataaaataaacttaaggctgaagaagcaatcagataagcatttacctcagatgagcgaagtgaagactttgagttctgtcctttgtcctgtatttgtgaagacaagctatcaatgtacatggtcagggtaaaattcaacataactgtctcaggataaagatcttggggcccacaaggaatttgctcttgggaaaattatgagggagctatgtagctttttcatgtttttagccatcttagaaacaaaatgggaggcaggttgcatgacgcagttcccagtttaaattttccttttgactgagggagtttggaatcctgagatttattttcctttcacatatyttgctcaatttattcatgaactgtgattttattcaaaattattttattttcaaattcattgcattcaaataatcataaaatgtgtacctgcattaaatgaggcagtgttgttctttttcttccttcatttacaaaagcttttttccacttttttcattgaataaaaaagaaacttagttatggctaggataaataatgtaatatgtgactattttgccagttatgtttcttctactgtgaatagcctatgccataaataacccatttttcaaatgagcaggcatttcttctattattagtttgcatgagctctttaaatatatcttatgtagcaattttcagttggttagatacatgagtttatccctagcttttctaatagcactatttccaatgttacacacacacacacacacacacacacacacacatacagcactcacttataagttgagtgaactccaggtaagataaaccaaagaattccatgccaagagacatttacaaatcttgaagagccagagaaaacccacaccgtacctttagagataaataatacaaatggcagtagatttcttatcagaaaccatggagtcctgaaacaagtggcacaatgcaatgctgaaagaaaaggccttttaattgagcatcctagacccagtgaaaatgtcctcccagattgaaggggaaatcaagccattctcagatgagaaaacattaatttgttattatcaaacctaccataaataatggctaaagaaatttgttctctaaacaaaggaaatgacgttccaaaaatcttggaacatctgaaagaaagaaacaatacagtaagcaaaacttttgtaaatacagtaggatttgttgagttttctaaaatatgtttgatggtagaagaaaaaattataa

SEQ ID NO: 3689 - DNA, 1270 bp, Homo sapiens
tctacattttttacataaaataaaataaacttaaggctgaagaagcaatcagataagcatttacctcagatgagcgaagtgaagactttgagttctgtcctttgtcctgtatttgtgaagacaagctatcaatgtacatggtcagggtaaaattcaacataactgtctcaggataaagatcttggggcccacaaggaatttgctcttgggaaaattatgagggagctatgtagctttttcatgtttttagccatcttagaaacaaaatgggaggcaggttgcatgacgcagttcccagtttaaattttccttttgactgagggagtttggaatcctgagatttattttcctttcacatattttgctcaatttattcatgaactgtgattttattcaaaattattttattttcaaattcattgcattcaaataatcataaaatgtgtacctgcattaaatgaggcagtgttgttctttttcttccttcatttacaaaagcttttttccacttttttcattgaataaaaaagaaacttagttatggctaggataaataatgtaatatgtgactattttgccagttatgtttcttctactgtgaatagcctatgccataaataacccatttttcaaatgagcaggcatttcttctattattagtttgcatgagctctttaaatatatcttatgtagcaattttcagttggttagatacatgagtttatccctagcttttctaatagcactatttccaatgttacacacacacacacacacacacacacacacacatacagcactcacttataagttgagtgaactccaggtaagataaaccaaagaattccatgccaagagacatttacaaatcttgaagagccagagaaaacccacaccktacctttagagataaataatacaaatggcagtagatttcttatcagaaaccatggagtcctgaaacaagtggcacaatgcaatgctgaaagaaaaggccttttaattgagcatcctagacccagtgaaaatgtcctcccagattgaaggggaaatcaagccattctcagatgagaaaacattaatttgttattatcaaacctaccataaataatggctaaagaaatttgttctctaaacaaaggaaatgacgttccaaaaatcttggaacatctgaaagaaagaaacaatacagtaagcaaaacttttgtaaatacagtaggatttgttgagttttctaaaatatgtttgatggtagaagaaaaaattataa

SEQ ID NO: 3690 - DNA, 1334 bp, Homo sapiens
ccctttgtccaaacttttctcctaagtcccatcacaagcctataagctttgtattctttttttatacttttctgagatttcatatcctgtgtactaggaaaatagtatctttcggagaagtattctatctatattttgtagaacaaaataaaacagaaaatgtatttttccaaagctgttttaaaaatatatattcataacttaatggagaactgatacaaataaaaaatagtttaagataatgtgttttaaaagattttggttgtcttcaaaagaggaaaattcagagttaaaaaaactacatatattttattgagtctctgtagcactttcatgttctttaatctctttttctttcttytatatcacttggtttttgaaaacttaattctctgtgctgtactttgggcagtaaaaagtatatccagaatgagaaaacttcttaaattgtgctttttattagagcaaagatctttgaacggaacaggagagaaacaaaccttataagattgataggcgaagaaaaagagaaagagaagttgaagaaactgaaccgctaatgatgagcatttgtttgttcccaagctacaaagctttctacaaagctgagcgcaaacgcctcatcctcttgttctaggtcaaagagtctcatcctaatcctaccatcggatattagcatttatagtttactaccaataaatggggaaccaatattaaattagaagttaaatttctgatcaattttcctgtattccaaaagatgtttttggcacatggctttccttggtaaattaataacatgtaattctaatttgctttctggtatgatatacgtgatgatttgatttaaagtcagattaaaaagtagtatgttggcagttattaaatagctagataaatctcacagggtagatctgccaacctgatgttgactaagaatcactgtgcatatgtttggtgaactatattgatttagttttgatgcttgtcccctacagatcttatgttgaaatatgatccccagtgttggaggtagggcctaatgagaggtgtttgggtcatgaggtcagattctcatgaattgcttgtgcccttcctacagtaatgagtgagctcgggttcacgtgagagctggttgtttaaagagcctggcctgccttctctcttcctctctttctccccatgtgacatgtctgctccctgtttaccttctgtcatgaataaaagcttcctgaggcttcaccagaagctgagcagaggctggtgctatgcttgcactgcctgtagaactgtcagccaaataaacctcttttctttataaattacctagtctc

SEQ ID NO: 3691 - DNA, 1381 bp, Homo sapiens
gcatacttacactcacctttccattcctttatttacttattcatcaagcatttcttgcatggcaattatgtgcagagctttgtacttggtaaaggggaaaataaagaatagttgaacatgattttattcaaattgattctatcctctattacattttattttttaatttgcctgaagtcccttcaaaggtagacaggttgtaatttctcaataaaatagatatgaaaaaccaacaaaatcttctagcatcaatgtggcaattagctgctgactgcaacatgtattttcttaaagttgctatgtttctgcttctatcaatattaatagctaatattattgagtgtttaatatgtgccaagcactctgttaaacactccatgtatgttaactcatttaatctcctcagcagttccacaaggacatatagttattatatgtatttatagcataaggttacactcctattaagtggtaggaaatccaaactttctttctccagggagtatatgcttaattgctttatcaaatttgtaaattgataaatttgtaaattaaagttacatagctaggtaataacaaaactaggaggagaaactagaatcgttttcctctgaatcacatgccctctcaaattttgcctgtgtttaatgccagaagggcaaaaacaaaaaaaacaacaaaaaagtttgctttcccttagcagaaaagtaaaaacagatcacctaaatatttctgtcctactgtgctttacaaacaattgtttgtaaattgttagcttctatagaaaatatccaagaatttcagtagaggagtgttcaggagcctgtgagttatcccacattgaaactaggagacacactgctcttcattttctccaacaaatacacctcactttctcttgtatgatttttcacagaattcctgccctattagtaacatagctgtgattttatttaatccaaatactgataagcaattgtgaaaaatgtgaatatctgagaacctgtactttgcaaaatacatttttacttaaatatgattctcttttagaaaatgctgttgcaaagtggtgcttatttgggctctgtatttttttggggggagcgtcccgatttataagggcaataacaactcaaaaaatggtatgagtaaaaatggctgttctcctgagcttggtagaagattggagaaagcataaatagcaatctactcccctgatttattctgagtactcacacaactgaggcccaaataaattataaagtgtttggctccagtggtgttattaaattccttgtaggctggaagcattgatcatttgatacccttaggtttgcgtttcattcaartggtggaaagatatatactaatactatatatc

SEQ ID NO: 3692 - DNA, 734 bp, Homo sapiens
atatttgcacagccttcattagaaagctcactacagttaaaattactagaagatcgtttctgcataaacacagggtctgaaccaccgaataaaataactctcaattcccactgaccgctaggacctttaaaagttattgtatttaaaatataagttgtaggatgtttgtaaagttttactgttgatacacaattctacttttcatatcttcaagcttttaaaatgttgatattggcagtgcactatgcagtgaataaaatctagcatgcctttctcaaatatcttgggtttatgacagaaagatatccctaagaaatcaatcattcttcagcttgtgtcttttccagttttgccttagaagtgtcagcaacttgaagctcttaaaatgattcttyctttgatagcttttgggctgttaaaccttgcaaatacagtaattaattgatacaattaaacacacaaagcaacacttgcaaaatttgattttctgaaaattagctcaagttttaaaataaataggccattaatgtaaaagaggatttaaaaagtacatattaagtgtgttcacgtgcacgcttgtgcatgccttgtgtgtgtgtgtgcatgtgtgtgtgatattaccaaagctaagggaaggttttgtgtgtgtgtgtgtgcgtgtgtgtgtggtattaccacagctaagggaaggtttttttaattgacctttttggtggacatgagaacaaataaca

SEQ ID NO: 3693 - DNA, 734 bp, Homo sapiens
atatttgcacagccttcattagaaagctcactacagttaaaattactagaagatcgtttctgcataaacacagggtctgaaccaccgaataaaataactctcaattcccactgaccgctaggacctttaaaagttattgtatttaaaatataagttgtaggatgtttgtaaagttttactgttgatacacaattctacttttcatatcttcaagcttttaaaatgttgatattggcagtgcactatgcagtgaataaaatctagcatgcctttctcaaatatcttgggtttatgacagaaagatatccctaagaaatcaatcattcttcagcttgtgtcttttccagttttgccttagaagtgtcagcaacttgaagctcttaaaatgattctttctttgatagcttttgggctgttaaaccttgcaaatacagtaattaattgatayaattaaacacacaaagcaacacttgcaaaatttgattttctgaaaattagctcaagttttaaaataaataggccattaatgtaaaagaggatttaaaaagtacatattaagtgtgttcacgtgcacgcttgtgcatgccttgtgtgtgtgtgtgcatgtgtgtgtgatattaccaaagctaagggaaggttttgtgtgtgtgtgtgtgcgtgtgtgtgtggtattaccacagctaagggaaggtttttttaattgacctttttggtggacatgagaacaaataaca

SEQ ID NO: 3694 - DNA, 734 bp, Homo sapiens
atatttgcacagccttcattagaaagctcactacagttaaaattactagaagatcgtttctgcataaacacagggtctgaaccaccgaataaaataactctcaattcccactgaccgctaggacctttaaaagttattgtatttaaaatataagttgtaggatgtttgtaaagttttactgttgatacacaattctacttttcatatcttcaagcttttaaaatgttgatattggcagtgcactatgcagtgaataaaatctagcatgcctttctcaaatatcttgggtttatgacagaaagatatccctaagaaatcaatcattcttcagcttgtgtcttttccagttttgccttagaagtgtcagcaacttgaagctcttaaaatgattctttctttgatagcttttgggctgttaaaccttgcaaatacagtaattaattgatacaattaaacacacaaagcaacacttgcaaaatttgattttctgaaaattagctcaagttttaaaataaataggccattaatgtaaaagaggatttaaaaagtacatattaagtgtgttcacgtgcacgcttgtgcatgccttgtgtgtgtgtgtgcatgtgtgtgtgatattaccamagctaagggaaggttttgtgtgtgtgtgtgtgcgtgtgtgtgtggtattaccacagctaagggaaggtttttttaattgacctttttggtggacatgagaacaaataaca

SEQ ID NO: 3695 - DNA, 645 bp, Homo sapiens
tcgggagtttgagaccagcctgaccaacatggagaaactccgtctgtactaaaaatacaaaattagtcgggcgtagtggcacatgcctgtaatctcagctactcaggaggctgaggcaggagaatcacttgaacccgggaggcgggggttgtgagccgagatcgctccattgcactccagcctgggcaacaagagtgaaactcaaaaaaaaaaaaaaaaaatgtaagccattttcatagaaatgaaagtttgtaatcattaaggctatacaagagtgctatagatttttaaaagcaattccaaaagaagcgtggcaagtgctttggtgtttttcaatctagcttcacaccagattttcctagaaaagctttacaaagaaacaaaaaagtaatgtccctygtggagattattatttaataagcctgaggtgattcttgtgggcagctaagtttgagaaccattgcttttgattgtacatggtacactaaaacataaacttccaatttcactgatcagatgagaatgttgatgtgatttgcaagttgtggggttttctttaacataatttatctgcagttacaatgcctcatctggttaagacaacatgttgatcaaatgaggtttgattacaaagtggaccagtta

SEQ ID NO: 3696 - DNA, 674 bp, Homo sapiens
ctgtgtttatgttcttcagataaaatcagcaattttatctcttgtaagaggttctgtctataaagaaatatatagaacactttacacagaaaagatactatttcatcatgttcactctttgtcctaagaacatatttttataagcttttcatgtgtgaagcaacacaaaacgtcagttaaggagacagactaaaaatctgatgatactctataatcactgagtgttagatataaaaggaacttgataacctaataarttttaaccaacagcttggggctttcaaactacatggctgttaaaatcttgcttgaaaaatttaattaagaaaaacttcattaaaatttatttttcattttgtatgcccaacagttgaaatataatttcctaaaaatacatgcactgtacaattttcttactagcttaatacatcaagttgttctcactatttgctttgctaccttgtttaaaaatatgaagtactccctagactttgcctctcttcttcttcccaatgtcttattaatattatatataaaatatgatacctatatatattccataatatatatcctccatacatatacagatatatatgtccttcaatgagcacattttaatatgtcaatatgcaaaaatatgcccccttcattcaacaaagtaaaggaaaacctca

SEQ ID NO: 3697 - DNA, 674 bp, Homo sapiens
ctgtgtttatgttcttcagataaaatcagcaattttatctcttgtaagaggttctgtctataaagaaatatatagaacactttacacagaaaagatactatttcatcatgttcactctttgtcctaagaacatatttttataagcttttcatgtgtgaagcaacacaaaacgtcagttaaggagacagactaaaaatctgatgatactctataatcactgagtgttagatataaaaggaacttgataacctaataaawtttaaccaacagcttggggctttcaaactacatggctgttaaaatcttgcttgaaaaatttaattaagaaaaacttcattaaaatttatttttcattttgtatgcccaacagttgaaatataatttcctaaaaatacatgcactgtacaattttcttactagcttaatacatcaagttgttctcactatttgctttgctaccttgtttaaaaatatgaagtactccctagactttgcctctcttcttcttcccaatgtcttattaatattatatataaaatatgatacctatatatattccataatatatatcctccatacatatacagatatatatgtccttcaatgagcacattttaatatgtcaatatgcaaaaatatgcccccttcattcaacaaagtaaaggaaaacctca

SEQ ID NO: 3698 - DNA, 872 bp, Homo sapiens
atttaaaatgagaatggtatattttatttacccaatgtggtatgcagaattttagccctcatgatttctattctgtggtgttacttttatgtttgtgatgttaaaagcaaaacggattttgcagatgtaattaaggttagtaatcagttgttgttaagagggagattatctaggtgagtccagtgtaatcataaaaggccagaagagcagaaatctttgtctggtgacagaaagagaagggagagatatttgaagcacaagtagaactcaaaatactgttggcttgaacatgtaggggtccacatggaaacatcagaagaaaatattgtcttccaacaaccaatcagcttggaagaaaaggtcttcaacctccagtgaaccatagccctaactgacagctcaattacagccctgtgaatctctgatcagaggatccagtcacactgtgccagatcactgacctagtatgagatactaaattcgtgctgtgtgaagtcagaaggtttatggtgatccgttacaacagaaatggagaaaaatacacctagatacttataatttatatagcttctctactttttacattccaaattttttctggtattattttcattggcttattaacttgcactagcaattcttttagagtaggtatcccagctacaaattctcctatttttctgtcaactgtatttattttattatcatttttgaaggatgtttctatttaatataggatactgagggttttttcttcagcactttaaaaatggtgttttacttcactctcatcttcatagtttctgatgagaaatcagcaatcattctaattgccttctataagtgtcatttttctctggtgtttygttatc

SEQ ID NO: 3699 - DNA, 1162 bp, Homo sapiens
aaacatttcctcatgaccaacttacatcttatggcttgcactataaggatgggcattctagcacaaaaccaattcagtcatacatctggataaaaggctgttcagttttccatggaaatggggattttattcatttagaaataggggattttcactaatttgaaaaagctaaggatataaagatgtctgtggcatttttggagaatgactgaagctgtgacaagcatatagcatctacatttacaggtcaccctgacccccagggaagcacctccttcaggtgcttccccagagccttctcagagttcctgtgccacctctgagaagggctcaggaggcggtttccctcagcaagcagctcttctgtctctagaagtctccccagtttttctagcctggtgggtaagatagccacgggagcattaggaaaaacagatcagagttagtgctggaaagtagtagagaattttgctctctcctgaggccctgacatgcctcatcctttatgttcaaggaggtgggctcaagcgatcctccagcctcagcttcctgagtagatgggactacagacatgtaccaccacacccaggcaatgtttttatttttttctgtagacaggatctcactatgttgcccaggttggtctcsaactgctaggctccagcgatcctcctgcctaaacaggtattttcctaaacaaagacctaccttttctcctatgaattgttccactcccctagtggctgcagaaggtttctctcccaccatagaaatgaagaggcagctagaatgaagtagggtcagtccagggaaagaggtgggcgtgggctgccatgggagtgcgggagaggcacttcacatggtcgcagatattcagggatggctcccagaggaagaggggcatcttggttaagcagccagcacatcccaacacaagaaattggctcctgtggatttaaagagtgaacataatttaaagaatgacatccaaatacacaaagctctactcaattcagatagactctatgctcgtaaaagcctaggttcatgtgttaataacacccagcaactagatgatggtgatgatgatgaacatgttcgctctgaaggactgggcaagatgcttagcttttctatgcctcagtctgctcttccgtaaaac

SEQ ID NO: 3700 - DNA, 2490 bp, Homo sapiens
tgcattcaatactattgatcttctgtaatatgctaggaatgtgctgtgtgaggtacaaggaacatgggtcgggcagattattttatgccctagggaaggagacagatcagaactagtaaaccaacaaagcatatacaattaaaagttatgtaaatcttatttaggaaacatcaagaggcaaaacatagcaggcctcctcatttggagcggtcagagttaatgacgtttaagttaagatctgaaaagaaggacaggaggagggattcagcttgtaaggagtgggtgaagagagttcagagttctgaatcttgcaactatgtcttagagataatttgttttcaagaaccaatacaaaagaaacagtgacaaaaacgatgaaaggtgaggcttctacaaggccacaggatagcttactcatttgacaaaaggttagatggtgagcttcctgaagccttaggccaggaagtggttgaccctcaaaaactaaccagagtgggatgggtaaatggacaaacatatctctcagcatcccatcctaaagagcaggagactgtctcaggatcctcatagcctctcacctcttctgtctgcagactggcttctttgcatatccagccagctatggctacccgtgcaactccctgtgcctcattcaaggggatgatagagactaactgtattcctccttcctgggggaaagaatctgaatggtttgatgtaggtcaggcgcccacccttgccagagtcacctgtggcccagggcacaaggtctacctggttagctgccgtcttaattctacttaatcttgcttggcaggactgggagagactctctgggtaagtggagtacagggcaggcagctggattaatgcccctgttattaataaatgctgcttttcaagttcttcaactttaataacactggaagagtcccagtgatgtaaataacttagttaccacctggtttatttttgagtacttataccygctacagggcattgtgtacagcagatgcttaagaagtagtgatggtgataataacaaaattgaatgtgaaatatgatgtagttctttcctaatggtgcaggttaattatattgttttaatgaaaatgcttctttgttttgtggataaaaatcttttttgtaaggttcagtctatgtctttatttttttctttaactcctgcattttgagaatcacagtctatatatttaaatcactttagaattactttattactattataaaagtaatgcatttgcattttagaatatttggaaaccagttcagctaagagaagaaaatagaaattgtgtataatcctacagcccagagatgactccaagtgacatttctgggtgtttttttcccagttagttctttatgtgggcatgtattttaagaaaatggcacatactgctttttccattcaacattatattgtgaacattaagaattatcctactgcatcctcatctcctgctgcagtgtgttctctcatgtggatagaaagtaccgaagtggatgtacagatttgaaaagcacctctgctgctgaatgggatccttaggctgggatggattggaatgctgaccctgaggtttgtgtagcagtatagatactgcctgactgacttcaggaagagcagtgtgattgtggaatttggtcagaaattaagttcgtatgatgatgatcacttgtgtctgcttggccactgctttcctgaggataatctgaatgaagctcattgactattttgcaaggaggttggctcagcttgagcatccctgtaaggaaaataatcagtgtctccctcagggttctgggaagcttctttgctgctcaggtcgaggtggcctctgcagtctgtgcttgcttctcctgataaagcaaattgcaagcatgccaaattgctttgctccggcttaaccctactccagaatgaatccataaatgctacaaaaggaaagcttatgaacatatgctacacagaacttagaaaatgtcctgcctacttaatccttttcctacttcgtgggggggaaaaagtctatttatacttgaactgagaattgagggatcacaaaagtgaagattggatgccgtgctagaaatcaccagttgtgttttctcatttcccttagagccacagattgatttttcaatacaactgtgtcagtagggaaatgtgccgttctttctagagttcttagattcactcctaagtatgtgaatgtgtctaactgccttttgagaaaatgtgagatcccttgtttaaacacagcgtgttcattagagtggattctgaggtctagaggccacctcttgaagtcactgcctctcaccttctctcatgactctacatttagatgcttgtagatggagaagggcacttctctgcttgtgtgttcttggacagattattccatggagagatgtgtggaatcacaatagatgtgagctagctcagagggttgggaacttgcc

SEQ ID NO: 3701 - DNA, 877 bp, Homo sapiens
ttattttgatgatcgtaaatggcatcacttaatagtatccaccacaactcacaataataattctcacagattttcttttgtatattctgcttttccttgccttggactgagagcatttgattttgaagagctgactgcttataaagtttacctgtttatgacactctggctgtgctcttggtgcttctaacagtccctgaaagagcaggcagataaattaacttaacagtgagcctgcattgattcccyggtgtggcttcattgagctgtgccctgcaaagggctgagctgggtgtacaacagggataaggacatgtacaatgtgtgagggggagctcaccagttggtatcccttgtattttagcctatgatgtgtggcatacaccatcatgctgtgattttcatttctttcctttgcctttccatgtctggcctcccatacacccttgtcattttcttcttcactgtgtcttttgtatgtgtctctcttcaataaaatattctactctgaaagaatatgagagctcatcctgtcccactgcatgcctattacaagaatcacttctattgcattattggtcaatactctgatttgtacttgcatatttctagtaccaaataattcactacttttccaggaattttattactgggaaactctaattattagaaaatatttcattcatagtgtcgtgaaaatcctttcctctacagtggttatcctttggttttgttttcagaaagtattcaaaataagaatgattcctgctttacatggtaactcatcatcaaacatttagggtcagccgttatggcccaaccgaagccccacccccagtcaatacacacacacacacacacacacacacacacacac

SEQ ID NO: 3702 - DNA, 671 bp, Homo sapiens
ttacaggttccaaggagagtgctgcaaggagttgcagccatggcccgactagctggccctgccggcatctattcagcacacattaaatgataaaggctttgagtcaacaccattagaaggtaatcaacctggtcatctycccccctccaacacgccaccgccatccccaccccaccccctgcagagccatcctgcctgcgaatgatcaaaggttagttttaggaccacatgagtaaacaagttatttagataaactcctctacattcctatgtatctactctaagttatttactcaaggtaaagattaggctgctttcagacataaccctatcctgagacttttcaaaaaccttccggccttccaagaagatttgtgtttatatcctacaacttcatcgtaaattttttctcaccagcctgacagaactcccacactgataaccctaatcttttaaataattttattttaaaaacacaggttaaatgtttactaaaataataaagatatatatttgcagaagttacataaggctttaacaaagtacacaggaatttttacagcttgttgactcacaaacaaagatgacaaaaagagtgaaatttatttttagtagtccagcttccaatatgtaagatgtaacctattatacagtgacatactggttgtgct

SEQ ID NO: 3703 - DNA, 1196 bp, Homo sapiens
ctgtgataaagtatattaaactaaatttgagatcgagtaatcagacaacctggttatccttggagagtcctattttgcacttattatccagagaaaattatagtgtccccttttactctcaaacaatctaagtttgggtgaaaactgtgtaatcacctcataataaaagggaacatctaggttcacagtacattctccagaaattctctcctcttacaactctgaagacattcaagttatgcctgtaggttctgctgctcatcaagtatcttgtagataacaaaattcagatcgccctgcttggaggctatcccagactattatgaagaactttccaggagattccatctcttggctttggagaagaaagatggctgctccataagaagaaagaaaaagtaaaatgaccctttgtgaaccccctaaaaggacatgccctctacctcccctccccatcctcctcttacattgagttggggtaccagggcagggcaaaaggttaatggtactaccagcttcttctgtgccatccaagaagactggaaaacaaaacttgggtgcagaaggatctgagaaaatcggaaaaacccaacttgacttgcatagacctatagcctccaaaatttaagcagactttccaactcagtagattgcatgttcatttcatccccagattttggtgcctatccagggggaatggccatagaggaatggagactttgtatctctcaaaaatactttccagaaagcagatttgaatccactcttggcctcaccattgtgattgagtcccccagctctctcatttaggctggaggtatcctaaccaaggatgtggtataaatgaggctttgttgtctactctttgtcttatctcagggagtgatggcagtctracacccaattcctttagcactatccctaagattggtacatttgataacagacttcttagtgacagaaagaattacacagatcatgtgtttaactctttcatttgaggaccattgtgatatttacacaaaagaatcaggacctaacatcagaaaacttgagttcaaagccttcatctaccactgattaactctgtgactttaggtaaggcactcaagccaagttgctcctctaaacaacgaacagtatttaccatacaaagttgtcggaagagatgtaaaagcatatttcaaaattatttt

SEQ ID NO: 3704 - DNA, 1224 bp, Homo sapiens
agtaataattttcatatttattatctattctaatattcagttagattgctgtaatgtaacattcaatacatctaaggtactgcttttaaaaaataaataatgcttgccttggactgaagggactgagtcaataggagaaagaatcagaagatttgtactaaccttttctaaaaccagacaagaaccctagacaattgtcgtcaggcttttcccagttgttttctactggcacaaaccaacaatgtttattcaaataagcatatctgattctactttggcaatccatacacattgtcctttttcaactccaaaggatcatctgtgatttttgctgcttgtagtttattctctaattcactagttaaatcctttttcagagatacataagcagattaggaaacttaactgtcatgtgagaaattatcttaatacaatggtagtcttcaagctaccccagagatgctcacagactaaactaagatgcttgaatcattcagtttattaaatcaattagaaacacagaaagaagaaagagaagtgggaggttaacacatcaagtctaaaaggcaagcagggcagaaagaccacagaaactaaattttcttttaatccatgtttatatgatctgcctcctctgctgcattaggattccttattgatcttggagtaatgaggaccagagtgggtttataaagaccagagttaaaggtaagcaagagggcttagcaaatggaaagtgttcagagttaacaatatacacaattgctctagcaaacagacatagggayaagtagtgtccacagctgttgttcaccatctggcttcatgagatgctatcaattttatttgtacttttggccagaatgtgtgtcaacctggatggttattataaggtgtcagaaatgctgagtgcttaatatgtctaatgtatcattatatcataaatactaggtgccttttggtccttcaatccttgcttctttatctatggtccatgtcccatatattaatgtctggcttatctgtgttaactcacgtaaggacttctgaccatgtcttaaaagccacttgcttattcattatttatacctatacatttggtaagtttcacctatatcttacaaacaactaatttattcattatctatgtttaacatggattttaagttttattcatcctattttttcttgtattccataacaaaatgaaatatttcaagttaa

SEQ ID NO: 3705 - DNA, 919 bp, Homo sapiens
caaatccctgtcaagatatagaatgttacaatcacctagaaagtttcattgcctatttctcactttctgccttgtcctgccacagcagacattcttccagtttttctatcatcgacaagatttacctgcgctagaactgcatatgagtggactcatamaatgtgtactcggcatgtaaagcttttttcactcagcattattttttgagcttcgtccatattgtttgtgtataggtggctcattcctttgtactgctgaatcctactccagtgtttaaatgcaccacagtttatccagtctcctgctgagggacacctgggctgggaaaggtgtaatgtgcacgtgtaatgttttcttaaatcatcaacatcacaacagggaatctcctgggtggtagattttggagaccaacttttctacttacatgctttctaggtcttctacaattaaccttcaataattaacaaataatttaccgttttgaattactagactgcatgtggtatactgtaaggagctgataacagtcaacattgagctataagccgagtctccttccctgaaatcactgggaagaacaaaaatgtaatgcttggctggaagagccaccacagatgaccgtctccccacagaagcctgtaaagccaccaaagtgctatctgtggaaaaacatcttgtgaaaaactcttttctaaacaaagactcagactggagccctgtgcctggattagaaagccacctcgtaaaatctcccaaagctattttttctctttcttacaaagatggtgaattgaccttttcttgtttcctagggagaacaggatgaaaaaagaaataaagtattttactaaaggtgattgagaataaataatgaagaggggaagcgggaaatctaagcttgtatgaaagggcaaaaaaa

SEQ ID NO: 3706 - DNA, 919 bp, Homo sapiens
caaatccctgtcaagatatagaatgttacaatcacctagaaagtttcattgcctatttctcactttctgccttgtcctgccacagcagacattcttccagtttttctatcatcgacaagatttacctgcgctagaactgcatatgagtggactcataaaatgtgtactcggcatgtaaagcttttttcactcagcattattttttgagcttcgtccatattgtttgtgtataggtggctcattcctttgtactgctgaatcctactccagtgtttaaatgcaccacagtttatccagtctcctgctgagggacacctgggctgggaaaggtgtaatgtgcacgtgtaatgttttctkaaatcatcaacatcacaacagggaatctcctgggtggtagattttggagaccaacttttctacttacatgctttctaggtcttctacaattaaccttcaataattaacaaataatttaccgttttgaattactagactgcatgtggtatactgtaaggagctgataacagtcaacattgagctataagccgagtctccttccctgaaatcactgggaagaacaaaaatgtaatgcttggctggaagagccaccacagatgaccgtctccccacagaagcctgtaaagccaccaaagtgctatctgtggaaaaacatcttgtgaaaaactcttttctaaacaaagactcagactggagccctgtgcctggattagaaagccacctcgtaaaatctcccaaagctattttttctctttcttacaaagatggtgaattgaccttttcttgtttcctagggagaacaggatgaaaaaagaaataaagtattttactaaaggtgattgagaataaataatgaagaggggaagcgggaaatctaagcttgtatgaaagggcaaaaaaa

SEQ ID NO: 3707 - DNA, 919 bp, Homo sapiens
caaatccctgtcaagatatagaatgttacaatcacctagaaagtttcattgcctatttctcactttctgccttgtcctgccacagcagacattcttccagtttttctatcatcgacaagatttacctgcgctagaactgcatatgagtggactcataaaatgtgtactcggcatgtaaagcttttttcactcagcattattttttgagcttcgtccatattgtttgtgtataggtggctcattcctttgtactgctgaatcctactccagtgtttaaatgcaccacagtttatccagtctcctgctgagggacacctgggctgggaaaggtgtaatgtgcacgtgtaatgttttcttaaatcatcaacatcacaacagggaatctcctgggtggtagattttggagaccaacttttctacttacatgctttctaggtcttctacaattaaccttcaataattaacaaataatttaccgttttgaattactagactgcatgtggtatactgtaaggagctgataacagtcaacattgagctataagccgagtctycttccctgaaatcactgggaagaacaaaaatgtaatgcttggctggaagagccaccacagatgaccgtctccccacagaagcctgtaaagccaccaaagtgctatctgtggaaaaacatcttgtgaaaaactcttttctaaacaaagactcagactggagccctgtgcctggattagaaagccacctcgtaaaatctcccaaagctattttttctctttcttacaaagatggtgaattgaccttttcttgtttcctagggagaacaggatgaaaaaagaaataaagtattttactaaaggtgattgagaataaataatgaagaggggaagcgggaaatctaagcttgtatgaaagggcaaaaaaa

SEQ ID NO: 3708 - DNA, 1408 bp, Homo sapiens
ccagtcctaaaagattgcatactctgggggttcctccccagcctgtgcacctcccatctctgaaaaagaagccccagagccccaccttttccccacccctccagggcttgtctgtggacggtgacagggtttgaggagtggtggggaccgctgaggcaggtgtcagagggcagtctggtggttcttattctaggaatgagtcggggctggatggcagtggctgcacctgtggccagtcagctgctgctgtccataccacagccctctccctcatgatgggaagggaatggtcaggytggctgctgccattttgtccctaaaaaaaagaaaagaaggaaaaatgaaaaggctgtgtatattgtatgatccaattacagggcattctggaaaaggcaaaactatagaggcagtaaaatgaccagtagttgccagaggttccaggataggatgaagcacagatgatttgggggaattttatgtatgatattacaatggtggacataaaaccttatatatttttcaaaatccatagaactttataacccaaagagtgaacactaatatctgcaatattttaaaaacaatttaggaccttggggatctcagaaaggaatacagactgtgacgagagcatctaactgtaatgcaaatgatgaaacaacttccctgcaggggacggagggaagacgtgctgacctaaacgagtagaaataagtggaatctaaggctaaaggcaaaagaaactgcacataaaagttatataagtggtagctaaacaataagaacacatggacacatagaggggaacaacagacaccggggcctgcttaagggtgaagagtgggaagagggagagaatcagaaaaattacgtatcagttactacgcttattacctgagtgatgaaacaatctgtatgcccagccccaatgacacacagtttgcctgtataacaaacctgcttatatactcctgaacctaaaagatttttttttttaaatgaagaagtaaaaaggctctacaagacagttaatcacttcacttgtaggaaaagtcacagtattcaatattttatggcaactgagaagaatgcaggataggtatttttgtgctcactagagaaatagaaatcttttgaaatgttcacacatcgtttttttgcattctatttgatagattaaattcatatataattttttaaaaatgttttcaaggttgaggggacagagttgaccacaacccaatgttagacagctaatatcctgggctttcccattgttcacattttggaaattcctgttgcctagttactgtttttcattccctgtatctttcttggtctttgttcattcaccagtcttagtgcattttattgtccagtcactttctaataaaaactgcataaaagg

SEQ ID NO: 3709 - DNA, 1408 bp, Homo sapiens
ccagtcctaaaagattgcatactctgggggttcctccccagcctgtgcacctcccatctctgaaaaagaagccccagagccccaccttttccccacccctccagggcttgtctgtggacggtgacagggtttgaggagtggtggggaccgctgaggcaggtgtcagagggcagtctggtggttcttattctaggaatgagtcggggctggatggcagtggctgcacctgtggccagtcagctgctgctgtccataccacagccctctccctcatgatgggaagggaatggtcaggctggctgctgccattttgtccctaaaaaaaagaaaagaaggaaaaatgaaaaggctgtgtatattgtatgatccaattacagggcattctggaaaaggcaaaactatagaggcagtaaaatgaccagtagttgccagaggttccaggataggatgaagcacagatgatttgggggaattttatgtatgatattacaatggtggacataaaaccttatatatttttcaaaatccatagaactttataacccaaagagtgaacactaatatctgcaatattttaaaaacaatttaggaccttggggatctcagaaaggaatacagactgtgacgagagcatctaactgtaatgcaaatgatgaaacaacttccctgcaggggacggagggaagacgtgctgacctaaacgagtagaaataagtggaatctaaggctaaaggcaaaagaaactgcacataaaagttatataagtggtagctaaacaataagaacacatggacacatagaggggaacaacagacaccggggcctgcttaagggtgaagagtgggaagagggagagaatcagaaaaattacgtatcagttactacgcttattacctgagtgatgaaacaatctgtatgcccagccccaatgacacacagtttgcctgtataacaaacctgcttatatactcctgaacctaaaagatttttttttttaaatgaagaagtaaaaaggctctacaagacagttaatcacttcacttgtaggaaaagtcacagtattmaatattttatggcaactgagaagaatgcaggataggtatttttgtgctcactagagaaatagaaatcttttgaaatgttcacacatcgtttttttgcattctatttgatagattaaattcatatataattttttaaaaatgttttcaaggttgaggggacagagttgaccacaacccaatgttagacagctaatatcctgggctttcccattgttcacattttggaaattcctgttgcctagttactgtttttcattccctgtatctttcttggtctttgttcattcaccagtcttagtgcattttattgtccagtcactttctaataaaaactgcataaaagg

SEQ ID NO: 3710 - DNA, 643 bp, Homo sapiens
ctctcagaagcagctattgctttttcacttttcttttccctttgttatgagttcagtaatgtaggccttctctgtcagcctgaatcctgagtgaaaacagcatggaacaaaggtgcaagtgggtggtggtaagtttagaaaacagggcaaaacatttgtttacaagtcccataatttttcacactggacaagaaacagtgagaaataacctgtgttgttgtaagccatttatattttgggactgctagttatcacagcataatgtaacccatactcacaggtaaagggagtctgtgggagctggtgaggcaggccattattggtgttaatggcaagtcagaaaatgtcaaagccaagaattcaactatacaaagggttttgtgccaggcagggatgaataatgatgatgggatgaaaggatttgggtgtctgaaggactggggctagaaattataatgagagatagtaggtcttaccygttgacaggttgagctccagagccaaatcccttttcctccactgccttggaaagttactctgtacttcagtttcctcttctacaaaatgagggtaataaaagcagcacctaattatagcattgttgttgggactaaatgagttattcacatgtaatgagtttccc

SEQ ID NO: 3711 - DNA, 523 bp, Homo sapiens
ctgacaatggtgaattccacagctggagaggtctcgacttcctagctccatgtgactgggatttcaatccatatttttggatgaatgttagaattctatctccaaaccagtaattctgctatgaatccccacttagttattgagaaagtcaacttgttcatttttttgtcctgctccagtccaggcttgttccagcctgtatgggacttaagattggttacagacccctgtaccttgtcctctaggagtattgtacaggttatccccttcagattctcacttccccattagattctcacttccccatttgtccccagatgagctggttattctctgaccctccytaacatctgttctccactttgttctgtgccccagtagggtaactcttgtggaatacatcacccagtctcccttggaaactgatatccaggtaggtttggagacaccctgattaggagagaaggttggtgggaaagagttttgggttctgattcctgactccctcttggcttcaaagccg

SEQ ID NO: 3712 - DNA, 1025 bp, Homo sapiens
tatatgaataaattaattaaaattttgtaataaaaagtcttgtcctaaggaattcaaaaattagttcatgtaacaaatagttatttaacatatctgacaggaagcacaacatgatatttaagaacttgaatgctggatattcagataacctgagtgcaaaacagccatgtggtctccccatgataaatgggatcatctctgcaccctaactgggtatgatgtcaagactgtttatgtcacagccgcacacacatcaaaagaatatggcattttgtaactgaaatcatgaggttttcttaggtaagaaaagtaggcatccaagcctgtctaatgccttgagctgaagaggccagtggctttggtttatactggactcagggtgtgggcctgggtgagggtttcaacaggcaggaagagaattgtgctttgaatatccttccattgacaagagagagagtacctgggttttcttattggttgtccagatgcgacacaagaaggaatgaaagacagctggggattgaacactgtcactggtcaagcatccaaatgttgtcagactcttaattataataacctaaatctataacttcctagctgtggcatctcaagtaaatcacttatttttactatataattggcatagtagtaatctctactgcatagatttgtctcacgtaacttcatatataaaattgtcatgatataaatttttattacatagaatagttacagagattagaggaattatgaatatatstatcttttagaaacttctctggaacgtagaatccagctcagagatggttgttctgcttgcagaaccattacaaactagtctctatgctaagcagagtatgcgccaattgcctgtcatcaagaactgtcattgtcattggaaaggaagctaaaaatagctataaggttagtgctataaatttcatatataataaatttatatgtaacataaattatttatgctatatatatatatttatacattgttttttaaatatttaaatata

SEQ ID NO: 3713 - DNA, 618 bp, Homo sapiens
taggcatgacccactgatccaggccagaagatgggaaaagaacatttagtgagtaagaattcaacgaattgcttaaatatattaawgtataatcggtgtaaggcagtatacagcatttccagtataggattcctagttccggacctgtttgtctatgacacctgtgatgttgtgcaaaaggaatattaataactgctaaacataaaattagaattaatacacttactggataaacacacaaaatatctaaatgtgtatatattagtatttttattagaagagaaattttatagatatttgcgtatatgcatagacttaaaaatatataaatacagcttatttggtacaataacatctgaataataattttaaaagtacaaaaataaaatttcaaaaatgtatacacctgaaaaacactagtcttctaaactctagggaacattattgcttcattttgaatttcttcaagattttttaaattcttacctcactggctgtgggccctggctcacctgcactagatttaatttcagaataataaaatataatgcattttttgcttttaaggtttagtaaatttttaaattaaatgtggcctctgtgttttttctttattga

SEQ ID NO: 3714 - DNA, 618 bp, Homo sapiens
taggcatgacccactgatccaggccagaagatgggaaaagaacatttagtgagtaagaattcaacgaattgcttaaatatattaatgtataatcggtgtaaggcagtatacagcatttccagtataggattcctagttccggacctgtttgtctatgacacctgtgatgttgtgcaaaaggaatattaataactgctaaacataaaattagaattaatacacttactggataaacacacaaaatatctaaatgtgtatatatwagtatttttattagaagagaaattttatagatatttgcgtatatgcatagacttaaaaatatataaatacagcttatttggtacaataacatctgaataataattttaaaagtacaaaaataaaatttcaaaaatgtatacacctgaaaaacactagtcttctaaactctagggaacattattgcttcattttgaatttcttcaagattttttaaattcttacctcactggctgtgggccctggctcacctgcactagatttaatttcagaataataaaatataatgcattttttgcttttaaggtttagtaaatttttaaattaaatgtggcctctgtgttttttctttattga

SEQ ID NO: 3715 - DNA, 1301 bp, Homo sapiens
tgcatcagaaacatcttgttaaaatagggcttgttaaaatgcaaatttctgagctcaattccagaatttcataatttcatgtatgtgtatatatgtccgtgtgtgtgtgtgtatatatatgtgtgtgttaatattatctatctaatgtattgtaagaaaccgtctacatttattattgctgcaaatgataactgtagtataaagacaatattatcattaccaaatccatttcagttgtgaaatttatatatctaaaaaaagagtgattctaattattattagaattattagtcaaagtcaatagcctcacaggctaaatatttttagttcattttaagtaggtttacggagagtggtgtctaatgtgtgttccctgatctctttggagacaacataattctgtttatagttcataagttcttttcatacaaggcrtaggacataaacacagtaaaaaactatccaggaaacattattttttgatattatgctcatcagtatggcatgaaatatctactttcaggacttaaatcgctgccatttagagccaatatttagctttacaagttatatttgatcatacatatatttcctctcagtttctactttctttaatttttgtaaaaacaacatgctttatggtttttctgcgaaagagggctttaaacaatatttagaaaatcaaatgtttgcaatacatttatattaaattttattaattacttttttaataggtgccaataaacacataagacttgaacagttctttcataatatatttctttattgcagtaaaaataattctaatataggcacacatataatcactgaggctcataatcaaaagaaactaatgttgcgattggtagcacttatttaattttcaagttttggaggaattttaaatatattaccaaatttaatcattctattaatattatgatgttagtattattattctaattctgttgatgaaaattgaaccttaaaatattaagtaaattctgttcgagctagaatttgggtgtgtgcttacactcattctcaagtaaaagaaattatttacagtaaatttcagggccctctgaaatgcagtgttatctttgtgtaataattcttagaagtataaacaggtctaattacttaaaaacacaaaatgaaacaaaattaaggaatagaggtgtgctaatttttgtataacggtattacattttgttttatcgttttcagagccaaggaacttacagaaaattaaatatattttacttgaatatatcatatttctttcaagaaaatgcgta

SEQ ID NO: 3716 - DNA, 1301 bp, Homo sapiens
tgcatcagaaacatcttgttaaaatagggcttgttaaaatgcaaatttctgagctcaattccagaatttcataatttcatgtatgtgtatatatgtccgtgtgtgtgtgtgtatatatatgtgtgtgttaatattatctatctaatgtattgtaagaaaccgtctacatttattattgctgcaaatgataactgtagtataaagacaatattatcattaccaaatccatttcagttgtgaaatttatatatctaaaaaaagagtgattctaattattattagaattattagtcaaagtcaatagcctcacaggctaaatatttttagttcattttaagtaggtttacggagagtggtgtctaatgtgtgttccctgatctctttggagacaacataattctgtttatagttcataagttcttttcatacaaggcgtaggacataaacacagtaaaaaactatccaggaaacattattttttgatattatgctcatcagtatggcatgaaatatctactttcaggacttaaatcgctgccatttagagccaatatttagctttacaagttatatttgatcatacatatatttcctctcagtttctactttctttaatttttgtaaaaacaacatgctttatggtttttctgcgaaagagggctttaaacaatatttagaaaatcaaatgtttgcaatacatttatattaaattttattaattacttttttaataggtgccaataaacacataagacttgaacagttctttcataatatatttctttattgcagtaaaaataattctaatataggcacacatataatcactgaggctcataatcaaaagaaactaatgttgcgattggtagcacttatttaattttcaagttttggaggaattttaaatatattaccaaatttaatcattctattaatattatgatgttagtattattattctaattctgttgatgaaaattgaaccttaaaatattaagtaaattctgttcgagctagaatttgggtgtgtgcttacactcattctcaagtaaaagaaattatttacagtaaatttcagggccctctgaaatgcagtgttatctttgtgtaataattcttagaagtataaacaggtctaattacttaaaaacacaaaatgaaacaaaattaaggaatagagrtgtgctaatttttgtataacggtattacattttgttttatcgttttcagagccaaggaacttacagaaaattaaatatattttacttgaatatatcatatttctttcaagaaaatgcgta

SEQ ID NO: 3717 - DNA, 765 bp, Homo sapiens
tagaatgtcttcatgccagcaatatacaaatatctgccttctccttggttaataagtgaaatgtctggaatacaacacagcttcaaagaagctattatttactagaagaagatctcaatccagaaacatcttggctttttccaaatgtatgagacacactcatatgtaaagccagttttgatacttactacactttggtttaatatagtaattcccagcccaggatctcagagaaaatctcaaggatttttataaaacactaccaacgttttcaaagaaaattaatttaaatttacttttaaatcagcttgattttgtgcctgaatagtattgtgttaaattctagactgtgagcaatggtaaaaccaatttattgccatcaggttgttactgctgctctgtgttaggcactgacctagatgaagatggaaaagatattcatgcagctacagtgcttgaagggaatggagataggcatgtggcctcttacaaagatggtttatgtgttagtaacaaaatctactaaaactgaagataatttcatggaagactataggctatttcaccaaaagacctggcaggaagtgtagctagattgcaaaatggactgacaccaggaacaaggaagctatgarttgaaattattttatctgtcaataaaggactgcatggtctcccatctctccttctctgtgatcaactatatcattcttctgtctctttctctctctctctctagcataacttcctctattttataatgca

SEQ ID NO: 3718 - DNA, 2324 bp, Homo sapiens
tgcatacaagcacattttctttttgtacaaatggtagtatatcgaacatatgtcctatgcagtacagatcattgtatatttatacataagacattcttggttcttgtttccttttttaataactccagattattccaccaaatggaatacatacattatttccctgtacacaatatctaaatgacaatttctagaagaggaattgctaggccaaagcgtaaaagcatttgtcactttaatatatattacataattgcccttcatgcaggctattacattttacactacctattttcacgcagtgtactataaaactttttgacatttgccagtttaataactgaaaatagtatcttaatatggctttaatttttattgttctccttatgaatgaagatgaaaatattctcacatgtgcttatcttttgcccatttttctgctgagtagttttatttttttcttataggagctttttacacatgatgcaaactaaccttttgtgatatgagttgaaattgttttctggtgttttcgtgtgtctgtttaccttggggtagtattaaccatagcaaatttttaaaaaattcttcataaagtcaatcttctatgacatctgtgttttaagtcatcctaagaaaggtcttacccatttttataaacattcttttatttcttatgttaaatctatgttttttttttacatttaaatatttgacccattttaaacagcctggtatgacataggcagtaatggaattaacttttgttttttaggtagctgctagtttgtttgaccatttattgaataattcattttttcccaatgatagtactgtttacattatagctatatagtctgttttacagatgtagttattcctcattatgcttctatttcagaatgtttttgaaaattttttgcttgtttatttttccataataaaaagtttaatctaagctgggcacgatggctcacatgtgtaatcccagctattcaggcggctgaggtgggaggatcacttgagtccagcagttcaagtctgtagtgagctatgatcatgccactacactccagcctggctgacagagcaagactctgtctctaaaaatataaatgaatgaaataatgcatgaataaaatgtaatctgcttctctagatttaaaaaatactattgatttttaaattgtgattgtatcatttttatggatacacttagaggagaattgatatctttgtattgtttactccacctttccatttgctcaaatctacttttgtgtctttcaggagcatttttttaaatgtcaatctagtttaaatgtaaatctttacttgttaagcttattcctaataatgttatatttctttgcttttgcttttgtaaatgaggttctttccttccattatattttctaacttaatgtgttttatatgtgaagtcttttgactctcaatataaattttgtgcccagccacattggttttttactttattttgttgagatttccagataaacaaattatttaaaattcatgttaatctttttttctcctcctttttaacatcttggccctgcattttttttctcttgtctaattgcataggctaacatgccagaaattttaattagtttacatagagatgcagtacataaatttaaattgaagatctgtcattacataagacaaagggtatgtgtgttattatttattttagattggtccatcctctcaccaggagctcaggcagctgttaaactctggaaagagggcctaaaaaagataggggtatggataatggaagccctgcataaattctaagcaaagtggcagaaagcactttctaacccaccatcctgcctcgagggagggcaaagactgatgttaatgtctttgctgacctcttctggcaaatctgaagttagccagaagayggaagatttgattggttatttttttcacttcgatttcatatgatcacaaagtccctgggtttgcctgattcgcctgtttgaaaagattttcaatatcccagaagttgtttttaaagtccacactttccttaacctctcagtattcttcttttcttcctcctcttttataaaatattcaaagctttatctcccttccttctctcacatttttggctgttcaaatatctcttatccaccattatcttccccaattgactttatttctgagctccaaattcatgcagtccttggaaacagggcaaataaatgggaagtcagtttgcatgtgaaaactgatcagcttggctggaacagtttcagtggacagtggcaaggagaatccaactt

SEQ ID NO: 3719 - DNA, 1878 bp, Homo sapiens
tcggctacaaacctgcttcaagtcttttaaaacttgttcctctataccttcttcagcaaatagattccgaactccttcaattacatcttcaattacagatctgtagagtttaggctacataaaagcaattgttaaagtttcattttatttatttatttatttatttatttatttatttatttattcttgagatggagtcatgctctgttgcccaggctggagtgcggtggcacgaactcagttcactgcaatttccacgtcccaggttcaagcaattctcctgcctcagcctcctgagtaggtgcgattacaggtgcatgccaccatgccccgctaatttttgtatttttagagagacagggtttcaccatgatggtcaggctggtctcgaactcctggcctcgtgatccacccgcctcagcctcccaaagtgctgggattacaggcatgagccaccacacccggcctgttaaagttctgacttctcaagttagaacatatttggccttaaaagatatgcagtgcataccttctagtcttgtgaagtcaccattaaaacttttactatgtacattcctattcccaatatagtcttagctttccataaactgtgttagcttcagacccatagtctcagcctatctacaagactgaattacagaactacaataacatatgagctaataatctcaaagatgcatggttattgtcatgttacttgccttttgtgtcagtatttaacctcctcaactccttttaaaagggaaattaatgtaagtcaaccagaaatagaccttctgttttcaatttacctctttatcaaagtggccaaaggagaattttttagggttcactatattatttccacaaatataaataaactccaagccagaaaactggggtaaacacttaaaatagagcaattaaagctcatctcacttccaaaatacacaaagtccaaaaaatatatattctggaccattatcaaatacacctgttccaaaacggatttcctaccagaacctaagaagggcacgaacaaccttacccatccacagtgtgcatactgaagagaccaaataacattctaaaatacctcctagtcaaacatgccatgacaatgaaattaagcagatttctacccagattaaacactagttatagcaacaaaaaagagggtatgtgaaaaaactcagcccttcatatctatataaactatgcccccaggccaaaatggcaatgctatgtgctgacaatactgacttagtggaagttccaccggcaagaaacagcaaagcaggaatttagttgagttgctcttatttcaaattgcttaatcacgccaaaatgaaaattgtggcactctaggattgccttttcatcctaccctattcagtactcattaagagtactaaataaatactcctaaatactcctgttcatgccaagagtagctgtgctttttttttattattattattatttttttttttttgagatggagtcttgctctgtcacccaggctggagtacrgtagcacaatctgggcccactgcaacatctgcctcctaagttcaagtgattctcctgtctcagcatccagagtagctggcactacaggcgtgcacgacctcacctggctaattttttgtatttttagtagagatggggtttcaccatgttggccaggctggtctcaaactcctaagctcaagtgatctgcccacctcgaccttccaaggtgctgggattacaggtgtaagccaccgtgcccagcccctaagagtatttagtatttaaagctatgctttaatccttctaaagacccagggtaaacctatacgaataggccaatcagtaacatttaaataatgttat

SEQ ID NO: 3720 - DNA, 1878 bp, Homo sapiens
tcggctacaaacctgcttcaagtcttttaaaacttgttcctctataccttcttcagcaaatagattccgaactccttcaattacatcttcaattacagatctgtagagtttaggctacataaaagcaattgttaaagtttcattttatttatttatttatttatttatttatttatttatttattcttgagatggagtcatgctctgttgcccaggctggagtgcggtggcacgaactcagttcactgcaatttccacgtcccaggttcaagcaattctcctgcctcagcctcctgagtaggtgcgattacaggtgcatgccaccatgccccgctaatttttgtatttttagagagacagggtttcaccatgatggtcaggctggtctcgaactcctggcctcgtgatccacccgcctcagcctcccaaagtgctgggattacaggcatgagccaccacacccggcctgttaaagttctgacttctcaagttagaacatatttggccttaaaagatatgcagtgcataccttctagtcttgtgaagtcaccattaaaacttttactatgtacattcctattcccaatatagtcttagctttccataaactgtgttagcttcagacccatagtctcagcctatctacaagactgaattacagaactacaataacatatgagctaataatctcaaagatgcatggttattgtcatgttacttgccttttgtgtcagtatttaacctcctcaactccttttaaaagggaaattaatgtaagtcaaccagaaatagaccttctgttttcaatttacctctttatcaaagtggccaaaggagaattttttagggttcactatattatttccacaaatataaataaactccaagccagaaaactggggtaaacacttaaaatagagcaattaaagctcatctcacttccaaaatacacaaagtccaaaaaatatatattctggaccattatcaaatacacctgttccaaaacggatttcctaccagaacctaagaagggcacgaacaaccttacccatccacagtgtgcatactgaagagaccaaataacattctaaaatacctcctagtcaaacatgccatgacaatgaaattaagcagatttctacccagattaaacactagttatagcaacaaaaaagagggtatgtgaaaaaactcagcccttcatatctatataaactatgcccccaggccaaaatggcaatgctatgtgctgacaatactgacttagtggaagttccaccggcaagaaacagcaaagcaggaatttagttgagttgctcttatttcaaattgcttaatcacgccaaaatgaaaattgtggcactctaggattgccttttcatcctaccctattcagtactcattaagagtactaaataaatactcctaaatactcctgttcatgccaagagtagctgtgctttttttttattattattattatttttttttttttgagatggagtcttgctctgtcacccaggctggagtacggtagcacaatctgggcccactgcaacatctgcctcctaagttcaagtgattctcctgtctcagcatccagagtagctggcactacaggcgtgcacgacctcacctggctaattttttgtatttttagtagagatggggtttcaccatgttggccaggctggtctcaaactcctaagctcaagtgatctgcccacctcgaccttccaargtgctgggattacaggtgtaagccaccgtgcccagcccctaagagtatttagtatttaaagctatgctttaatccttctaaagacccagggtaaacctatacgaataggccaatcagtaacatttaaataatgttat

SEQ ID NO: 3721 - DNA, 636 bp, Homo sapiens
cctttctatcctgcaaataggtcttgacctaaccagatggatacgttatttgatgattaaaaactctattatatttaaaattggctgtttatttatttatttgtgcaagtaagtgcagtagagctgtttatcccctaccactgtgtatgtgatttgcctgggtcaggtamcttatggtttgtgagtttcaagtagctgatttatatgataccctttagaaaactttcctacattgaaaactattagaaatttcttttacaaaaagccaagaactatatatggtcattttaatggtcatatctctccacctggcaatttactaccaggagtgttcaaagtgacttatctttcacccaaagtaggaaagctaaaagcagtcattgattcctactgatattataaaatccaattaaattattcaagctgggaaataagaaagctaaaagtgtctcttgttttccatctttttcataggaaggttttaaagctttatttctaaatgcttaggattggtaatcacctaactttctgtgacagcatactgttttactttattacacattctgcccttctcagaactatacgtagatcatgtatattttttaaattattcttggatcttggtacccataaaaa

SEQ ID NO: 3722 - DNA, 1241 bp, Homo sapiens
gcatctatgctttgtaatggtatagaatgagagttttaaaaaaccctgttaagacataaaacaaaatacatataaaattgtgtaattgtatctgcatctgaattataattttattaaattccatacagtgaactaaaaatttgaacagctctgtgctggactatattcaaaataaaaatgaattcacaatatgcaatatartccaactgatgttcacaaaatagatgtactgagctcacaaggtttaccactctgcatcaccaatggcttttgcaaatacatagtctctccctccaaaacacataacaccatctttcaaatagaatttccatttgttcttgcttcgatgaatctggagggagaaaagtagtttacattaattaattttacaagttaaaggatcacctgcatttctctgctacagtaaatgggattattctcacccgaaatgtgagtgccttaaaattaaaatctcctcaagatagtttgtttattccataaacatttgagttcctatgtgttagacactgttttaggcactggaaatatattagtttaagatacatatatttctatactgtatatattatatataaaaacacacatcctgtatatgtaaaaccaaaaaaaatccctgccttttaagagtttacattttaatagggaaggacagaaacctaatacataagtaaattatgtagaatattaagctgtcatttgaggtgacacttgagcaaaaacttgaagaaggtaaggagtaaagcaaggcagatatttactcaggagcattccagataaaaggaatagaagtgaacagtcctaaagaggggcatgcctggattgttcaagaacagcacagagtccagtatgtctgcaaaggaataaacagggaagatgtagccaatattatcagaaatgaaaaagtgatacttcatcatgaggaagaaagtcccaataaagcactgaacaaggtcagaatatacagcttataatctgtaagactctgctggctgttttctagattccataaatcagcctagacacagacacaataaaaaataagaaattttaatacttcaagaggtaacaagccataaaatcattgctacctctaagtaaactgcaagtgactatttaaaagccctaggaatatatgatctgagatcaagagtaaaatttaaacctagttgttgactacaaatagtcaaatccaagaacaaaggctgtgactggtattcaga

SEQ ID NO: 3723 - DNA, 1241 bp, Homo sapiens
gcatctatgctttgtaatggtatagaatgagagttttaaaaaaccctgttaagacataaaacaaaatacatataaaattgtgtaattgtatctgcatctgaattataattttattaaattccatacagtgaactaaaaatttgaacagctctgtgctggactatattcaaaataaaaatgaattcacaatatgcaatataatccaactgatgttcacaaaatagatgtactgagctcacaaggtttaccactctgcatcaccaatggcttttgcaaatacatagtctctccctccaaaacacataacaccatctttcaaatagaatttccatttgttcttgcttcgatgaatctggagggagaaaagtagtttacattaattaattttacaagttaaaggatcacctgcatttctctgctacagtaaatgggattattctcacccgaaatgtgagtgccttaaaaytaaaatctcctcaagatagtttgtttattccataaacatttgagttcctatgtgttagacactgttttaggcactggaaatatattagtttaagatacatatatttctatactgtatatattatatataaaaacacacatcctgtatatgtaaaaccaaaaaaaatccctgccttttaagagtttacattttaatagggaaggacagaaacctaatacataagtaaattatgtagaatattaagctgtcatttgaggtgacacttgagcaaaaacttgaagaaggtaaggagtaaagcaaggcagatatttactcaggagcattccagataaaaggaatagaagtgaacagtcctaaagaggggcatgcctggattgttcaagaacagcacagagtccagtatgtctgcaaaggaataaacagggaagatgtagccaatattatcagaaatgaaaaagtgatacttcatcatgaggaagaaagtcccaataaagcactgaacaaggtcagaatatacagcttataatctgtaagactctgctggctgttttctagattccataaatcagcctagacacagacacaataaaaaataagaaattttaatacttcaagaggtaacaagccataaaatcattgctacctctaagtaaactgcaagtgactatttaaaagccctaggaatatatgatctgagatcaagagtaaaatttaaacctagttgttgactacaaatagtcaaatccaagaacaaaggctgtgactggtattcaga

SEQ ID NO: 3724 - DNA, 1241 bp, Homo sapiens
gcatctatgctttgtaatggtatagaatgagagttttaaaaaaccctgttaagacataaaacaaaatacatataaaattgtgtaattgtatctgcatctgaattataattttattaaattccatacagtgaactaaaaatttgaacagctctgtgctggactatattcaaaataaaaatgaattcacaatatgcaatataatccaactgatgttcacaaaatagatgtactgagctcacaaggtttaccactctgcatcaccaatggcttttgcaaatacatagtctctccctccaaaacacataacaccatctttcaaatagaatttccatttgttcttgcttcgatgaatctggagggagaaaagtagtttacattaattaattttacaagttaaaggatcacctgcatttctctgctacagtaaatgggattattctcacccgaaatgtgagtgccttaaaattaaaatctcctcaagatagtttgtttattccataaacatttgagttcctatgtgttagacactgttttaggcactggaaatatattagtttaagatacatatatttctatactgtatatattatatataaaaacacacatcctgtatatgtaaaaccaaaaaaaatccctgccttttaagagtttacattttaatagggaaggacagaaacctaatacataagtaaattatgtagaatattaagctgtcatttgaggtgacacttgagcaaaaacttgaagaaggtaaggagtaaagcaaggcagatatttactcaggagcattccagataaaaggaatagaagtgaacagtcctaaagaggggcatgcctggattgttcaagaacagcacagagtccagtatrtctgcaaaggaataaacagggaagatgtagccaatattatcagaaatgaaaaagtgatacttcatcatgaggaagaaagtcccaataaagcactgaacaaggtcagaatatacagcttataatctgtaagactctgctggctgttttctagattccataaatcagcctagacacagacacaataaaaaataagaaattttaatacttcaagaggtaacaagccataaaatcattgctacctctaagtaaactgcaagtgactatttaaaagccctaggaatatatgatctgagatcaagagtaaaatttaaacctagttgttgactacaaatagtcaaatccaagaacaaaggctgtgactggtattcaga

SEQ ID NO: 3725 - DNA, 590 bp, Homo sapiens
atggttagagacactgtggtagaatgcacagcctggcacctagagatgattctgtagagggagcagctacaattacacatagaaaccattttgtccagttctatttaagttaaaaattctttgcatgtctcctgtttctctcaagagcactttcttatactgtaaccagagaggaggattgggagtttctgttagatgaggagagggaagggtggggtcaaaatggaagtgtgggaggggaagtttcyggacagcgtctaggggacctcagagtcagatgcagtgaggggctctgtaggccacatagagagagcacaggcagaaccagccaggataggtctgggcacaagccgacgaggagcgtcacgctgaagcttaggaagggaagccattgggctgtgtgttgccctctcaagtggaaaagttaatgcttagcagagtgaggtccatgactcacggccttgctatgctgaggtcttggaagaatgaggtggttagtcccacaggcagctgtgtgctgggagccaaagcaatgtgacattagctaaacaaaacccactacctcctacattccacagcagcagaggaga

SEQ ID NO: 3726 - DNA, 765 bp, Homo sapiens
aatgccatatagcaacaagagtgaaggaagtagagctacatgaatgaatttcacaatataatactgagaaaaaagaagtcaaacacgaaagaatccattctgtatgagtccatttctataaagtcataatacagcaaagaattcacaaagtatgaacacatgtatgtgtgtacctatatatatgaatatatgtgttgtatgtaaagttcataacatacaaaagaatttatatcaccaaacaaaggtcatgagcaagcaaacctaaactgttttgttgttgttgttttcggtaaaaactacaaagaaaagcaaggaaatcattaccataaaaatcaggagagtgggccaggcatggtggctcatgcctgtaatcccagcactttgggaggccgaggtggatggatcacctgaggtcaggagtttgagaccagcctggccaacacggtgagacctgtctctactaaaaatacaaaattagccgggtgtggtagtgcacgctgtaatcccagctacctgggaggctgaggcaggagaattkcttgaacccgggaggtggaggtggcagtgagccgatcaccccacttcaatccagcctgggcaacaagagtgaaactccatctaaaaaaagaaaaaaaaatcaggagagtggttacctctgggagaaggaggtggatatgatatatggggtattccaggggcttctggaggactggcaatgttctgtcttgacctggatgcttgttaaactgtcacgtttatgtagta

SEQ ID NO: 3727 - DNA, 1625 bp, Homo sapiens
ttaaataaagagcaattagactttgaagttgaccttcacatttttgcaagtttataatgggcattgtattaaacatgccattgccaattggggcaaaagattatattgttttgggaagtcacttaaatgacatattttatgaactttatttgttcttctaaagtgtcatttaatcttcagtagttagtataactctagcagatgctgttaaaaatataagacatttttaaattttatatgtaataataaactgcctgcctgtggttgtaagaccatgtgatattcataaatgacatgaagattcccattcattgctttctatctctggtggtcatctgataagctccttatttttgctacctggtcttagcaagacaactcctcaatgaagggcactaagggcaatataattaaatagctgaaaatggggaaactgcgggtgagggtggggaaatataagagttgccttcaatagcctgaatggccccccatgggagagggatggacttgtctccagaagcagagtaaggaccactgctgggagctacagggagatcagctttggttcactctgtataaggcagaactttctgtgaattcgaaatgacaaacaatgggacaggctgcattagggacaattagaagaaatgttgaggcaaaggcttcagcctatctttcagcatgttctcaggataattcctgctatcgatgaggttgaccagatcatatctatggccctttccaactctatgcttaaaactaagggagaaagataaatgtggagcagcgtcatcagaatgatgcccattaataaataatttacctaaccctatagacatatactgcacagtcattttcattacgtgaagctctctgcatgtttaaatgggcgtgtacacatttgtggggagacagaaatcatggacacaggcagaaaagagctgaatagcaatctcagtgaagacagcaagaaaaaaagaaacatttaaatgaaaatttagaaaattaagatgtacaaaactagtgcacgcagcctaaggttgagacttggtaacagcctaggatgccacatgtcacacttgtttggaaatctcttatgaaacacaaagagggaccaacagtttctccaacagagatttctctgaatcatgttatcatcttcaagacagataaacaggaggaatgactattatacatgaacatataaattggcttggctttatccattgtggcatatggaacattgcaaagaygattaattgatcactaataagtagggtttggacttctttctgtgtgctagaatattttgttttagtggagggatgttgggtgcgaatagagaattaaagcagagactcacagagagaaaaggaagttatttttagaagctgaatcacacacaaaaaagatttaaaaaaaaaaaagaggaagaagttgaatcacagaatattccagtaagaatggatgttaaagctatggcaccatagtcatgtcacattatggatgggcaagccaaagcccacagaagtgatgcaacttgtcaaaagtcccacaaattggcagatttaaccccagatcttgagtttcaaagctcagaaaaggacaccctccactaccccatc

SEQ ID NO: 3728 - DNA, 1331 bp, Homo sapiens
gcattatgccttgcctaatcttcacaattacattttttcacaattaactggatttttcttacatatatttattagttatagaatgtagaacactaaccttttactttctattaaatttttcagaaatacttgactatccaacaataaagattgggaaagtaactctatcagatcaacacaaagacataaattagttaaataaagaattacatggacttttgagttatttaatgtctagcaaccacttacataccatagtggtcaacatggcgaaaccccatctctactaagattacaaaaaattagccaggcctagtggtgcacctgtagtcccggctactcaggaagctgaggtgggatcacctgatcctgggaagtcaaggctgcagtgaaccatggtcacaccatggcactccagcctgggtaatgggagtgagaccctgtctcaaaaaacaaagaaaagaaaagaagagagaaaaagaagagaaaagagaaaagaaaaggtatatactctacattcatttcaagcatgttatctgaaaaacaagttattttataattacttattttctaagtttgcaatattatactaggtcatatgtatcattcatcacagttttaaatacacaataagctccctagaaatagttatttttattattttattttttattcatgtaactccatttgtaacttgggaatgccttattacttgtgcattaggtttaataagatatagatttccagttaaaacaaatacagtttgtaaaactaacatactaattaaagataattcttatgtcagtaagaaaataaatggaagcattactgttttaagtccctttatgttttaaattatttaattataacaactatattaagatactgaatgggtgtagaagtgaggagtcatgttgaagtaggattataattaartgtttataaatcaatggctcatagttcttaagtacatgacagtaaagtttccattgatctcaaatctttagttcttaatccacagaaggattttagaacaacttctatcttgtgaacataaacggaagatcttaaatgatttcagcaaaacactattggtggacatatgagcacttttgtaaaacatattctcactttcagaaataccagacatcctttaattatatcatgcttcttctaatttttcctttctatgagattattttcattagcatacaagcatatcctaatttaacccatcttaaaaacgaaatcctataatcgagccccttattgaccccctaattccttccagctatgtctacatttctgttatccctttatagctaaaatgc

SEQ ID NO: 3729 - DNA, 1331 bp, Homo sapiens
gcattatgccttgcctaatcttcacaattacattttttcacaattaactggatttttcttacatatatttattagttatagaatgtagaacactaaccttttactttctattaaatttttcagaaatacttgactatccaacaataaagattgggaaagtaactctatcagatcaacacaaagacataaattagttaaataaagaattacatggacttttgagttatttaatgtctagcaaccacttacataccatagtggtcaacatggcgaaaccccatctctactaagattacaaaaaattagccaggcctagtggtgcacctgtagtcccggctactcaggaagctgaggtgggatcacctgatcctgggaagtcaaggctgcagtgaaccatggtcacaccatggcactccagcctgggtaatgggagtgagaccctgtctcaaaaaacaaagaaaagaaaagaagagagaaaaagaagagaaaagagaaaagaaaaggtatatactctacattcatttcaagcatgttatctgaaaaacaagttattttataattacttattttctaagtttgcaatattatactaggtcatatgtatcattcatcacagttttaaatacacaataagctccctagaaatagttatttttattattttattttttattcatgtaactccatttgtaacttgggaatgccttattacttgtgcattaggtttaataagatatagatttccagttaaaacaaatacagtttgtaaaactaacatactaattaaagataattcttatgtcagtaagaaaataaatggaagcattactgttttaagtccctttatgttttaaattatttaattataacaactatattaagatactgaatgggtgtagaagtgaggagtcatgttgaagtaggattataattaagtgtttataaatcaatggctcatagttcttaagtacatgacagtaaagtttccattgatctcaaatctttagttcttaatccacagaaggattttagaacaacttctatcttgtgaacataaacggaagatcttaaatgatttcagcaaaacactattggtggacatatgagcacttttgtaaaacatattctcactttcagaaataccagacatcctttaattatatcatgcttcttctaatttttcctttctatgagattattttcattagcatacaagcmtatcctaatttaacccatcttaaaaacgaaatcctataatcgagccccttattgaccccctaattccttccagctatgtctacatttctgttatccctttatagctaaaatgc

SEQ ID NO: 3730 - DNA, 622 bp, Homo sapiens
gcttatgggaagaatattttcataggaagcctgtttgggattcagaataagtggtgaatattagaaagcaagtgtttggaaccttccaagggaattttcattcagagtctttttgctataggatggtttaaattatttagctcaatgttggtgaattagttgcaggagacatttccacctagattagaggccgctttctttggtataaaatatattatactaacctgggaatcaagaggcttgagatttcttcatggctctgcctcactgactctgtgagtaacactaggcaaaggtattaccctagatgtctttctttgtaatacgagctcatctaaattgccaggctatagttcttaataccatgaataaaataattgttttttggtatggattattctattttatttagttaacaaatcaagtcagattattgtcatttttgaaaggagagctgtgacataatasagatttatgggctttaccctatcttcaaaggctattcagtcaatctgttccttgaccttagaaaaaatatttcagaacataatagtcgcttaagacatctactttcttgtgtaatccaaaactatacagaactgggtcaaatgccactgtagta

SEQ ID NO: 3731 - DNA, 762 bp, Homo sapiens
gcataaagacagagactgtggtaagtctgaaatctgcacagcagaatggcagcctggaaattttggcaggagttgatgtcatgctcttgattcttacgacagtcttgaaggagaattccttcctctttgtgagacctcagtctattctcttgagacctttaactgattgaatgaggcccacccacagtgcaaaaggtaatatacttttctctaagtctatttgttgatttaactgttagtaacatataaaatatatcttcacagcaacatctaagctaatgtttgaccaaacaagtgggcaacatggtctagccaagtcgacasataaaattagctgactgtgagcaaaacaccctatcccaaaatatggcaccttggaggtcactttctgtgtgacttctcctaccttgctgtgtaagagctgttcataaaaattctctgaccttcctcccctaaaagtaggtcataagaatttcatgtgacagatgtcctgccctacacccgtgggggaagaaatgtcataccgttaaacagaaaataatcttaacaaatagaacttgctgaacctccccttcccctagtttattactgttagatcatcctctttttttgtccattcatatttctccacaattatccacttctttcatcagatttagcctaaaattacagtttttcccgggtcttcgggtcttcatttctgaagcctcctatatcacatttactttggtcaaataaacatggtacctttttctcttgtca

SEQ ID NO: 3732 - DNA, 726 bp, Homo sapiens
tgcatgcttctgttcagggtgttccttctgcctggcttaaacttgttgcctctgcttccctgtgtaattgacagcatctatctcttcttgaaaacttatctcaaatgctccctcttttacaaatatyatgttgaatcactatcaaacacaggtctccttgatgaaaactttgtcataattcttgagtaactttcttatgatacctgccttactgtgacttttgttcagttattagtatttttgcgttttaactatcttatcaaagttgtaaactcctaaagataatgtgtttatttctctcagtatcatttctagagactaacgttgtttcttgtacatggtaagagttcaatatatttattgtattgaacgttataataataacagtatctctttctataaatgtcaatcttctttgatccttattactctgggactgggcagagattatcacactgtcatattagagaactgaaaccaatgcaatttatcgtcccatgttaaaaagatactgaacacaaacatactttcctttcccaatattgagaataacttagctacctactccagggtacaccaaattgaagaggataatactgtgaaccaactaaaacagtatttttttttaaaaaatcaagactaacagtttactcagcaagactttcttcaagaccttcacctcaggctgagcatggtggcttatgccagcaatcccagcactttggg

SEQ ID NO: 3733 - DNA, 726 bp, Homo sapiens
tgcatgcttctgttcagggtgttccttctgcctggcttaaacttgttgcctctgcttccctgtgtaattgacagcatctatctcttcttgaaaacttatctcaaatgctccctcttttacaaatatcatgttgaatcactatcaaacacaggtctccttgatgaaaactttgtcataattcttgagtaactttcttatgatacctgccttactgtgacttttgttcagttattagtatttttgcgttttaactatcttatcaaagttgtaaactcctaaagataatgtgtttatttctctcagtatcatttctagagactaacgttgtttcttgtacatggtaagagttcaatatatttattgtattgaacgttataataataacagtatctctttctataaatgtcaatcttctttgatccttattrctctgggactgggcagagattatcacactgtcatattagagaactgaaaccaatgcaatttatcgtcccatgttaaaaagatactgaacacaaacatactttcctttcccaatattgagaataacttagctacctactccagggtacaccaaattgaagaggataatactgtgaaccaactaaaacagtatttttttttaaaaaatcaagactaacagtttactcagcaagactttcttcaagaccttcacctcaggctgagcatggtggcttatgccagcaatcccagcactttggg

SEQ ID NO: 3734 - DNA, 647 bp, Homo sapiens
gagaagtcttgagagtaaactctttaagctgtgtaattcaaccaaaacatgtccttttctttaagagtaatttctcccaatatttctgaaggattttaatgaggctagacacatagaagttctttgccaagaaaatttttgttgggtattcaaatacaaaaaatactgaaaaccaaaatagcagccttcactatttaatgtcattagaaatactgtttctctaaaacttggcacttaatccatttagcccatttgactctatttttcatcctggagtcttcagggtccccgatctatactttagtatccctaataagtcacacaaaacctgtggatcctggccctcttcagcattgactctatccctcaatacaacaatayttgtttcccagtaaacttcaaacaggttagagttgcctgctcacctgtgctgcctcttatctgttgtcctttatttcccttcccttcactggggaattctcctttcctggcttcatgtctgtgttggagtccttcaagtttccacgtgatgctcctctctgttctcaatgtgtactgtctcccttggggatctcatccatcttttgtagtttcaattatatctctacacaagtgaacctcaaacttatatccacatctcagttttt

SEQ ID NO: 3735 - DNA, 647 bp, Homo sapiens
gagaagtcttgagagtaaactctttaagctgtgtaattcaaccaaaacatgtccttttctttaagagtaatttctcccaatatttctgaaggattttaatgaggctagacacatagaagttctttgccaagaaaatttttgttgggtattcaaatacaaaaaatactgaaaaccaaaatagcagccttcactatttaatgtcattagaaatactgtttctctaaaacttggcacttaatccatttagcccatttgactctatttttcatcctggagtcttcagggtccccgatctatactttagtatccctaataagtcacacaaaacctgtggatcctggccctcttcagcattgactctatccctcaatacaacaatacttgtttcccagtaaacttcaaacaggttagagttgcctgctcacctgtgctgcctcttatctgttgtcctttatttcccttcccttcactggggaattctcctttcctggcttcatgtctgtgttggagtccttcaagtttccacgtgatgctcctctctgttctcaatgtgtactgtctcccttggggatctyatccatcttttgtagtttcaattatatctctacacaagtgaacctcaaacttatatccacatctcagttttt

SEQ ID NO: 3736 - DNA, 647 bp, Homo sapiens
gagaagtcttgagagtaaactctttaagctgtgtaattcaaccaaaacatgtccttttctttaagagtaatttctcccaatatttctgaaggattttaatgaggctagacacatagaagttctttgccaagaaaatttttgttgggtattcaaatacaaaaaatactgaaaaccaaaatagcagccttcactatttaatgtcattagaaatactgtttctctaaaacttggcacttaatccatttagcccatttgactctatttttcatcctggagtcttcagggtccccgatctatactttagtatccctaataagtcacacaaaacctgtggatcctggccctcttcagcattgactctatccctcaatacaacaatacttgtttcccagtaaacttcaaacaggttagagttgcctgctcacctgtgctgcctcttatctgttgtcctttatttcccttcccttcactggggaattctcctttcctggcttcatgtctgtgttggagtccttcaagtttccacgtgatgctcctctctgttctcaatgtgtactgtctcccttggggatctcatccatcttttgtartttcaattatatctctacacaagtgaacctcaaacttatatccacatctcagttttt

SEQ ID NO: 3737 - DNA, 598 bp, Homo sapiens
caaagtgacttccgttgctgatcatgtgatcatgacatgaacagagctttcacaatcaaaaaygtaattataagagcaacttcatcttaagcagctgtataaatgcaagtaaagggcacataaaaagtcattctacccctttactttatctctggctagtgataacatgtcacagccatctggttgcaaggctttcaagagcaaagaagaggaaactgaaccaattcattggattcaggcttttttccttttttttttttttttttttaaactcattctttcattaggtcgctcttattcatcttcacctaacaccaagcagcaataataactacaaactcaatttttcttctctgggcaccagatctgacaacttttcaattgttaagtattaatttaataaaattctatctatctatctatctatctatctatctatctatctatcaatcgactgactgagggtcttgctctgtcacacaggctggagtgcagtggtgtgatgatagctcactgcagcctcaaactctggggctcaagctaatctcccgcctcagcctctccagtagctaggactacaggtgcacagcactacact

SEQ ID NO: 3738 - DNA, 619 bp, Homo sapiens
tttccagggctgcccagagatgtcccacatattttttgtcacctgatacctcctaggggcaaagaagtccccattttccagctaagagatagctgagttgttttatcttctggtattggcctctgtgccgaagccccctctgatctgtcctttccctgggtctccatccatctgcctgagctggacggagcctcagcccttccagaagagaggttgtaaccgaatcacaggttcagtcactcrccacttgcaaaattccattaacaagcgcgaggtctggtggctttttattttaaagctagtttgtgggaagaagtgcaggcttcctggcttaagggtaccacttcgcttttggagcagaaagtgtgcacttttaaagcgggggtctggcatgaatggcatcaggggagaaagtgagcaggtgggggtctgccaaatttgtttggtgccttatttactgggcagtcaagctagcaccttcatgagcagaactaggttgtaaactctccaggtgggagagagtttcagtcttcagagtggctgaaactatccagtggggagagagtttcatagtgggcatactttgggttgtaaatagaccgttgtctctcaaggcaat

SEQ ID NO: 3739 - DNA, 690 bp, Homo sapiens
tggttgtcaaaccagtcttgaattcccgagatacattccatttggacatggtttattatcctttttacatatgtctgaacttggttacctaatattttcttaaggatttttgcaaaaataatcttgggtaataacagtctgtagttttctatgctcatgacatctttggccgactttggcgtcagataataatggcctcatcaagtaagttagaaagtgttctttcctaacattttaaaaagtatttgtgtaagayaggtattaatttatctttgggtatttgattaaattttctagtgaactatttaggtttgagcttttctttgtggggaaatatttgattcttattttgttactttttattggtctattcagattattcttcttgagtcaattatggaaatttatatcttttacaaatttgtccattttagtttgtctaattaacacaacatagaattgacaaattctttgaaatttatattatttccttctaatccttttaatttctgtggattcattagtctagtgatgtctccactttgattcttaatttttgtagtctgggccttcatcttttgcagggagagaggactgtcagacaaaactagagcgtaacagaagttgaaacagtaaaaccaaatttttttttttttttttttttttttgagatggagtctcactctgtca

SEQ ID NO: 3740 - DNA, 690 bp, Homo sapiens
tggttgtcaaaccagtcttgaattcccgagatacattccatttggacatggtttattatcctttttacatatgtctgaacttggttacctaatattttcttaaggatttttgcaaaaataatcttgggtaataacagtctgtagttttctatgctcatgacatctttggccgactttggcgtcagataataatggcctcatcaagtaagttagaaagtgttctttcctaacattttaaaaagtatttgtgtaagacaggtattaatttatctttgggtatttgattaaattttctagtgaactatttaggtttgagcttttctttgtggggaaatatttgattcttattttgttactttttattggtctattcagattattcttcttgagtcaattatggaaatttatatcttttacaaatttgtccattttagtttgtctaattaacacaacatagaattgacaaattctttgaaatttatattatttccttctaatccttttaatttctgtggattcattagtctagtgatgtctccactttgattcttaatttttgtagtctgggccttcatcttttgcmgggagagaggactgtcagacaaaactagagcgtaacagaagttgaaacagtaaaaccaaatttttttttttttttttttttttttgagatggagtctcactctgtca

SEQ ID NO: 3741 - DNA, 690 bp, Homo sapiens
tggttgtcaaaccagtcttgaattcccgagatacattccatttggacatggtttattatcctttttacatatgtctgaacttggttacctaatattttcttaaggatttttgcaaaaataatcttgggtaataacagtctgtagttttctatgctcatgacatctttggccgactttggcgtcagataataatggcctcatcaagtaagttagaaagtgttctttcctaacattttaaaaagtatttgtgtaagacaggtattaatttatctttgggtatttgattaaattttctagtgaactatttaggtttgagcttttctttgtggggaaatatttgattcttattttgttactttttattggtctattcagattattcttcttgagtcaattatggaaatttatatcttttacaaatttgtccattttagtttgtctaattaacacaacatagaattgacaaattctttgaaatttatattatttccttctaatccttttaatttctgtggattcattagtctagtgatgtctccactttgattcttaatttttgtagtctgggccttcatcttttgcagggagagaggactgtcagacaaaactagagcgtaacagaagttgaaacagtaaaaccaaatttttttttttttttttttttttttgagayggagtctcactctgtca

SEQ ID NO: 3742 - DNA, 625 bp, Homo sapiens
tttttcttcttactgtgttttctttccgttttcaaaatttcagttcatcagatacagcagattacggtgtcattctctctccttttatttttttgttccactttttgttatacttcctgggagagtcctcacatttatttccaaaataacactaaacatattttttaaaaagagacgagtttttaattttcataaaccttcttgttttctaattttcttctttattatatcctcttttgattatggttgtataatttatttttataactccctacaatataaattataggttatagaatctgtcttttgctctctgttctacatctgttctcccctgcactgaattctgattttattttcatttgtctcattttatgtctaattttctttgatatctgttcaaaattataagtaaagctttaaaaatatgattgattcttccatttgtgtgagtggtgcttcagtttgatcagtttgaaggaatctctatctgcctgtatgtggagcatatggggttaatttacctggggtggagataatattcaagatgaaagagatgttagaacaggaatgttagggctagcctttctggaargaaacagagaaggctgctgaaaagttcttc

SEQ ID NO: 3743 - DNA, 913 bp, Homo sapiens
ttagccaaggtttgttcgggttgaaaaaaaaaatagaaattccattcaaaaagggataggttggtgtgtgctttcttagtacaaatagactcctatggaacacaggggagaaagtgtgtccagacttcaaaggaattggaatgaaagcaaggcaaatctgaaagaaaagagttacaaaatacctttaatttctgacgttcttttcaggtcttctgcgttctccttgttcatctgattgactttcctttccacctttgcacgtggaccattataactactggggctgacatttaactatttttgcctttgctgaaagttgatcacacattgatcattcttctctgatggaaattatctgatagkttcatcccggcctctctgcttcaatctgttggtgacaaagtaacatagaattttgtgacaaccgtcatttccccttctgggaatatgtctatgattgggtggtttacaggccaagagatgtagtagtcttatatcagttcttaacccgttagaattgatgaaaatatcagagttttccctaatgtttactttagccctattcaagaactgcaatagcccaaagataacacttccacaaattcacaaaaagaaatggaatccaatagactagaatgctacttgctttaccaataaccctctttactcttttatttaacaactttgattttaaaagtgctgcatcacttcttactaaactggagttgtgaaggagaactgtcacagtgctatctggacaacagaagtagattctccattatccagcaggtattgtttatgtaagatagtttctcgcaacagttgaagacacaaaataacagtcttgataatgttgtacttctgtggctaaatcaaatacactgagattctcctctcagagtcaaactgatct

SEQ ID NO: 3744 - DNA, 567 bp, Homo sapiens
ctcaagtgatctgcccagctcagccacccaaagtgctgggattataggcatgagccaccacacctggccaagaagagcttcttaataaataaaactatctccagcaggaatgaactgccttggaaacaagaaactcaagcacagactgcacaactattacttattagggatgccactaatarcctctaagccccagatggctgtatagtccaagtggttagtgaggcaaggctgtcatacagaaaaatcaaagttaataaataatgaaatgctagaagaatgaaattacaaaaataaagtcaaactaagtgagagctaccaaatataaaggattatccacaactaacagtattacaggtaatcactgtcgagttctaaatttccttttctattagaacataactttccccacacaccgaatctgtactcaggtgtgcatttatccctagattcagtctgaggagttgaaaagtgacaaagggatggatggcttcctgactactatgaaaatgtcccctgacccacatatttcaatatagtattaagccttgttttcattacctgaaa

SEQ ID NO: 3745 - DNA, 607 bp, Homo sapiens
gtagggattgttgactttatgaatcaactacccagtcattcttatattatctctttcaatattctctaagctcccacatccctcttaaagtgtcaagctctagactgcaacagatgttcctgaagaaattgagactagaaacataacaaagtttatgctcttccatggatgactcataagggttatctgtccatgatcggcctgttattaaaatttagatgatgtaaatgtcatggaaaggaggacaaaggtggtatctgtcagtgtgtagagtgttttttcttggttgccttggacagcatttcaaaggttaagtctgcagagcatcctcacaagttcccaatatttagtcacatgaacaggtggcatgagctcctctgtgcacaaccctcttcttgagagctcaggttataagcatggggtgggcacccttttctgttaagggccaggtaataaatctcttaggctttgtgggctacatggtctctgtggcmacttctctactatgctgcgtccaggatgtggccactgaggatattgtaaatgaatgtacctggctgtgctccaatgtaactttattaacactgacatttgaagttttcatgct

SEQ ID NO: 3746 - DNA, 1055 bp, Homo sapiens
taaattttaggaactattgctcaaatttcataaataatcttattgggatttttaaaaatttgatttgaatttacagattaatttgggtgagaattaatatgattatcatattgaatcttcccactcatgaacatcatatattttaccttttattttatgttctttgatattatttaataatataatctgtaaagatactgtatttctttttaaaacttctttttcctagacactttataatttgtgttataccaacacaatgcagactaagacaggttcctattattttttcctatttgattgtgctgctgtaacatttttcatgtttttaacaygtgaatttaatccttaatgttctgcagtttcattgtgagagatataagtaaagatttttatcaatttatcaggatacattgtcaagatacattcaaatggagaaagttttatttttaaaataaactgttgaaaactcttagccattagttcttcacatactacgtcttcaattactctagtcagtacatttagacacatgcaggagcctctcaatttgcctcaatgcctcttgacatcataaacatatttttatctatttatctctctgggatgcttataatctttctatttcatctttatatttcaattgactgtctcactctgtgagtgtctagatgaaattttgttacatttaagtttttcttctaagttggtgagtacattttcactaatcaataatgtaacttattattggactgctttatttaataatttttcacattagaattatgaatattatacatctttttatattttagcatctgtatgtcttatatatgcgatataattctaaagtatctctatgaacaaaagaaggcagtaaaggagaaacagaagaataaatctacctgtatattgatctattttttgcagtcttttggtttcccaattgtcagcttgttggctgtatttccactctttcgtgtgtatctatacccctatcatttaaaaacaaaattagagtgtactgcacattaacactcccctctggcattgca

SEQ ID NO: 3747 - DNA, 1055 bp, Homo sapiens
taaattttaggaactattgctcaaatttcataaataatcttattgggatttttaaaaatttgatttgaatttacagattaatttgggtgagaattaatatgattatcatattgaatcttcccactcatgaacatcatatattttaccttttattttatgttctttgatattatttaataatataatctgtaaagatactgtatttctttttaaaacttctttttcctagacactttataatttgtgttataccaacacaatgcagactaagacaggttcctattattttttcctatttgattgtgctgctgtaacatttttcatgtttttaacatgtgaatttaatccttaatgttctgcagtttcattgtgagagatataagtaaagatttttatcaatttrtcaggatacattgtcaagatacattcaaatggagaaagttttatttttaaaataaactgttgaaaactcttagccattagttcttcacatactacgtcttcaattactctagtcagtacatttagacacatgcaggagcctctcaatttgcctcaatgcctcttgacatcataaacatatttttatctatttatctctctgggatgcttataatctttctatttcatctttatatttcaattgactgtctcactctgtgagtgtctagatgaaattttgttacatttaagtttttcttctaagttggtgagtacattttcactaatcaataatgtaacttattattggactgctttatttaataatttttcacattagaattatgaatattatacatctttttatattttagcatctgtatgtcttatatatgcgatataattctaaagtatctctatgaacaaaagaaggcagtaaaggagaaacagaagaataaatctacctgtatattgatctattttttgcagtcttttggtttcccaattgtcagcttgttggctgtatttccactctttcgtgtgtatctatacccctatcatttaaaaacaaaattagagtgtactgcacattaacactcccctctggcattgca

SEQ ID NO: 3748 - DNA, 562 bp, Homo sapiens
gccgccttccactcttgctcctgctccagccttgyaagatgtgcatgcttccccttttccttccaacatattgaaagtttcctgaggtctcccaagaagccatcatgcttcctgcacagcctgtggaactgtgagccaattacacctcatttctttataaattacccagttgcaggaatttctttataggagtgcaagaacgggctaatacaatgactatcttaggaacagtcattaaatgggcacaagggaaatcttatccccctacaaattacccaagattctcaaatgtcctttgaactaattataatgtcttactggttttctcgttaatcaataagttaagtaaaatcttttacatgcatgtattttaaatttgcatgaaagtcatgaccttgctttttttttttttttcctaattttactttaacaggaaacacagagaaataccacaagcaaagcctcagtagtgggactatgagacacagagaagattaaatgacttgaggagggatctgctggggtctgaatgtttgtgtatcctcttccaaattcatgtatt

SEQ ID NO: 3749 - DNA, 562 bp, Homo sapiens
gccgccttccactcttgctcctgctccagccttgtaagatgtgcatgcttccccttttccttccaacatattgaaagtttcctgaggtctcccaagaagccatcatgcttcctgcacagcctgtggaactgtgagccaattacacctcatttctttataaattacccagttgcaggaatttctttataggagtgcaagaacgggctaatacaatgacyatcttaggaacagtcattaaatgggcacaagggaaatcttatccccctacaaattacccaagattctcaaatgtcctttgaactaattataatgtcttactggttttctcgttaatcaataagttaagtaaaatcttttacatgcatgtattttaaatttgcatgaaagtcatgaccttgctttttttttttttttcctaattttactttaacaggaaacacagagaaataccacaagcaaagcctcagtagtgggactatgagacacagagaagattaaatgacttgaggagggatctgctggggtctgaatgtttgtgtatcctcttccaaattcatgtatt

SEQ ID NO: 3750 - DNA, 562 bp, Homo sapiens
gccgccttccactcttgctcctgctccagccttgtaagatgtgcatgcttccccttttccttccaacatattgaaagtttcctgaggtctcccaagaagccatcatgcttcctgcacagcctgtggaactgtgagccaattacacctcatttctttataaattacccagttgcaggaatttctttataggagtgcaagaacgggctaatacaatgactatcttaggaacagtcattaaatgggcacaagggaaatcttatccccctacaaattacccaagattctcaaatgtcctttgaactawttataatgtcttactggttttctcgttaatcaataagttaagtaaaatcttttacatgcatgtattttaaatttgcatgaaagtcatgaccttgctttttttttttttttcctaattttactttaacaggaaacacagagaaataccacaagcaaagcctcagtagtgggactatgagacacagagaagattaaatgacttgaggagggatctgctggggtctgaatgtttgtgtatcctcttccaaattcatgtatt

SEQ ID NO: 3751 - DNA, 562 bp, Homo sapiens
gccgccttccactcttgctcctgctccagccttgtaagatgtgcatgcttccccttttccttccaacatattgaaagtttcctgaggtctcccaagaagccatcatgcttcctgcacagcctgtggaactgtgagccaattacacctcatttctttataaattacccagttgcaggaatttctttataggagtgcaagaacgggctaatacaatgactatcttaggaacagtcattaaatgggcacaagggaaatcttatccccctacaaattacccaagattctcaaatgtcctttgaactaattataatrtcttactggttttctcgttaatcaataagttaagtaaaatcttttacatgcatgtattttaaatttgcatgaaagtcatgaccttgctttttttttttttttcctaattttactttaacaggaaacacagagaaataccacaagcaaagcctcagtagtgggactatgagacacagagaagattaaatgacttgaggagggatctgctggggtctgaatgtttgtgtatcctcttccaaattcatgtatt

SEQ ID NO: 3752 - DNA, 562 bp, Homo sapiens
gccgccttccactcttgctcctgctccagccttgtaagatgtgcatgcttccccttttccttccaacatattgaaagtttcctgaggtctcccaagaagccatcatgcttcctgcacagcctgtggaactgtgagccaattacacctcatttctttataaattacccagttgcaggaatttctttataggagtgcaagaacgggctaatacaatgactatcttaggaacagtcattaaatgggcacaagggaaatcttatccccctacaaattacccaagattctcaaatgtcctttgaactaattataatgtcttactggttttctcrttaatcaataagttaagtaaaatcttttacatgcatgtattttaaatttgcatgaaagtcatgaccttgctttttttttttttttcctaattttactttaacaggaaacacagagaaataccacaagcaaagcctcagtagtgggactatgagacacagagaagattaaatgacttgaggagggatctgctggggtctgaatgtttgtgtatcctcttccaaattcatgtatt

SEQ ID NO: 3753 - DNA, 1216 bp, Homo sapiens
catgattattatttaaaacatcttgcttagactttataagtagtcaaatttgcgtgtgggacaaaaccccaaaacatgcaatggcttgctctcctcttttcctttcacacgttcatctcctcctatccctttctctcaccacctttcaatcttctcacagatgttgtggaggaagatgagacttgagggyccagcaggtgcttaaaatcccctgcctggtgggggtggagtagacactctgtccccctgcagtgctggagttgagagcagaggggctggagagggactgggcggagtgagaaaggcctggcataatcatggaatgcccagggtggggttctacttctcttgcaggcacaagagaagtagaagagtggccgctttccttctgggcacgcacttgggaaaaggcttggtgagagcagcgagaagaataggtctaatttcttgagccagtgtgcggaggtgcttcccagcccaggctaagcaggatcactcagccagccgctgcgtcctttacagatgtacggctccccgtgagcaatcaacatgcctggctctcaggataagctgcctcacttcccttctgcacagcactccaggacttgcctgctaccagacccatcctactttctctgtcaggaaaaatgagagttcttcctggtctcttgaggccaatcccttccaccgcctgtgccctggatccctttctccaggaagcttctcttccctgtgtagttagcctccccgctcttcccaggtcaccttctctctgtttagggacagagccaagccttttccctcccatccccacctccagcattcccggttcctgcttctcccccacttcctgctgtactgcccactgaagggacctttgaccccgctgaccactgcttttggaaagtcttttcttggtttccctaacttcactttactttggtttttccttgtctctcccctctgcctctcagtcacctttgagatctgctcatcctctcacctccctgtattgtcagcattacctgggcagccccctctggtgttttccttcagtttctctagaaacttgcctgaagatttgccccaaaatagcccacatggacctgtatgaggaaagaggctcactgtggaggcgctctccatcattcctcctcttccacttgaggcttaggcatgggccacctcctgaacagctctccccacagtctcctcc

SEQ ID NO: 3754 - DNA, 1216 bp, Homo sapiens
catgattattatttaaaacatcttgcttagactttataagtagtcaaatttgcgtgtgggacaaaaccccaaaacatgcaatggcttgctctcctcttttcctttcacacgttcatctcctcctatccctttctctcaccacctttcaatcttctcacagatgttgtggaggaagatgagacttgagggccyagcaggtgcttaaaatcccctgcctggtgggggtggagtagacactctgtccccctgcagtgctggagttgagagcagaggggctggagagggactgggcggagtgagaaaggcctggcataatcatggaatgcccagggtggggttctacttctcttgcaggcacaagagaagtagaagagtggccgctttccttctgggcacgcacttgggaaaaggcttggtgagagcagcgagaagaataggtctaatttcttgagccagtgtgcggaggtgcttcccagcccaggctaagcaggatcactcagccagccgctgcgtcctttacagatgtacggctccccgtgagcaatcaacatgcctggctctcaggataagctgcctcacttcccttctgcacagcactccaggacttgcctgctaccagacccatcctactttctctgtcaggaaaaatgagagttcttcctggtctcttgaggccaatcccttccaccgcctgtgccctggatccctttctccaggaagcttctcttccctgtgtagttagcctccccgctcttcccaggtcaccttctctctgtttagggacagagccaagccttttccctcccatccccacctccagcattcccggttcctgcttctcccccacttcctgctgtactgcccactgaagggacctttgaccccgctgaccactgcttttggaaagtcttttcttggtttccctaacttcactttactttggtttttccttgtctctcccctctgcctctcagtcacctttgagatctgctcatcctctcacctccctgtattgtcagcattacctgggcagccccctctggtgttttccttcagtttctctagaaacttgcctgaagatttgccccaaaatagcccacatggacctgtatgaggaaagaggctcactgtggaggcgctctccatcattcctcctcttccacttgaggcttaggcatgggccacctcctgaacagctctccccacagtctcctcc

SEQ ID NO: 3755 - DNA, 1216 bp, Homo sapiens
catgattattatttaaaacatcttgcttagactttataagtagtcaaatttgcgtgtgggacaaaaccccaaaacatgcaatggcttgctctcctcttttcctttcacacgttcatctcctcctatccctttctctcaccacctttcaatcttctcacagatgttgtggaggaagatgagacttgagggcccagcaggtgcttaaaatcccctgcctggtgggggtggagtagacactctgtccccctgcagtgctgsagttgagagcagaggggctggagagggactgggcggagtgagaaaggcctggcataatcatggaatgcccagggtggggttctacttctcttgcaggcacaagagaagtagaagagtggccgctttccttctgggcacgcacttgggaaaaggcttggtgagagcagcgagaagaataggtctaatttcttgagccagtgtgcggaggtgcttcccagcccaggctaagcaggatcactcagccagccgctgcgtcctttacagatgtacggctccccgtgagcaatcaacatgcctggctctcaggataagctgcctcacttcccttctgcacagcactccaggacttgcctgctaccagacccatcctactttctctgtcaggaaaaatgagagttcttcctggtctcttgaggccaatcccttccaccgcctgtgccctggatccctttctccaggaagcttctcttccctgtgtagttagcctccccgctcttcccaggtcaccttctctctgtttagggacagagccaagccttttccctcccatccccacctccagcattcccggttcctgcttctcccccacttcctgctgtactgcccactgaagggacctttgaccccgctgaccactgcttttggaaagtcttttcttggtttccctaacttcactttactttggtttttccttgtctctcccctctgcctctcagtcacctttgagatctgctcatcctctcacctccctgtattgtcagcattacctgggcagccccctctggtgttttccttcagtttctctagaaacttgcctgaagatttgccccaaaatagcccacatggacctgtatgaggaaagaggctcactgtggaggcgctctccatcattcctcctcttccacttgaggcttaggcatgggccacctcctgaacagctctccccacagtctcctcc

SEQ ID NO: 3756 - DNA, 1216 bp, Homo sapiens
catgattattatttaaaacatcttgcttagactttataagtagtcaaatttgcgtgtgggacaaaaccccaaaacatgcaatggcttgctctcctcttttcctttcacacgttcatctcctcctatccctttctctcaccacctttcaatcttctcacagatgttgtggaggaagatgagacttgagggcccagcaggtgcttaaaatcccctgcctggtgggggtggagtagacactctgtccccctgcagtgctggagttgagagcagaggggctggagagggactgggcggagtgagaaaggcctggcataatcatggaatgcccagggtggggttctacttctcttgcaggcacaagagaagtagaagagtggccgctttccttctgggcacgcacttgggaaaaggcttggtgagagcagcgagaagaataggtctaatttcttgagccagtgtgcggaggtgcttcccagcccaggctaagcaggatcactcagccagccgctgcgkcctttacagatgtacggctccccgtgagcaatcaacatgcctggctctcaggataagctgcctcacttcccttctgcacagcactccaggacttgcctgctaccagacccatcctactttctctgtcaggaaaaatgagagttcttcctggtctcttgaggccaatcccttccaccgcctgtgccctggatccctttctccaggaagcttctcttccctgtgtagttagcctccccgctcttcccaggtcaccttctctctgtttagggacagagccaagccttttccctcccatccccacctccagcattcccggttcctgcttctcccccacttcctgctgtactgcccactgaagggacctttgaccccgctgaccactgcttttggaaagtcttttcttggtttccctaacttcactttactttggtttttccttgtctctcccctctgcctctcagtcacctttgagatctgctcatcctctcacctccctgtattgtcagcattacctgggcagccccctctggtgttttccttcagtttctctagaaacttgcctgaagatttgccccaaaatagcccacatggacctgtatgaggaaagaggctcactgtggaggcgctctccatcattcctcctcttccacttgaggcttaggcatgggccacctcctgaacagctctccccacagtctcctcc

SEQ ID NO: 3757 - DNA, 1216 bp, Homo sapiens
catgattattatttaaaacatcttgcttagactttataagtagtcaaatttgcgtgtgggacaaaaccccaaaacatgcaatggcttgctctcctcttttcctttcacacgttcatctcctcctatccctttctctcaccacctttcaatcttctcacagatgttgtggaggaagatgagacttgagggcccagcaggtgcttaaaatcccctgcctggtgggggtggagtagacactctgtccccctgcagtgctggagttgagagcagaggggctggagagggactgggcggagtgagaaaggcctggcataatcatggaatgcccagggtggggttctacttctcttgcaggcacaagagaagtagaagagtggccgctttccttctgggcacgcacttgggaaaaggcttggtgagagcagcgagaagaataggtctaatttcttgagccagtgtgcggaggtgcttcccagcccaggctaagcaggatcactcagccagccgctgcgtcctttacagatgtacggctccccgtgagcaatcaacatgcctggctctcaggataagctgcctcacttcccttctgcacagcactccaggacttgcctgctaccagacccatcctactttctctgtcaggaaaaatgagagttcttcctggtctcttgaggccaatcccttccaccgcctgtgccctggatccctttctccaggaagcttctcttccctgtgtagttagcctccccgctcttcccaggtcaccttctctctgtttagggacagagccaagccttttccctcccatccccacctccagcattcccggttcctgcttctcccccacttcctgctgtacygcccactgaagggacctttgaccccgctgaccactgcttttggaaagtcttttcttggtttccctaacttcactttactttggtttttccttgtctctcccctctgcctctcagtcacctttgagatctgctcatcctctcacctccctgtattgtcagcattacctgggcagccccctctggtgttttccttcagtttctctagaaacttgcctgaagatttgccccaaaatagcccacatggacctgtatgaggaaagaggctcactgtggaggcgctctccatcattcctcctcttccacttgaggcttaggcatgggccacctcctgaacagctctccccacagtctcctcc

SEQ ID NO: 3758 - DNA, 628 bp, Homo sapiens
caaagataaggttaaaatgaagtctaggaagtttctaagactagcaggttcatcaagattgcatactgttttttcacctcctttcttgattccacaamaataaatattttggaactaagtatcaggattccccaggcaggagaaggggatgtcagttaggtgtttggttctctatcctgttgtctccatttgccagacttgggggggtggggaacgggattccaaattatattggacaattaacctcaggttagaataagcttcctttccatactgggagcagtgagggaaggagacgttggaaacatcaccttctccgagaaccagtcctagcagcatcaggggatctaaggatcactgccattgtggacaggtccacaaagaccaacaaagaccatgaccagggccttgatttgaccacatctgactcagcagatcattctgaattaatacttcaatttccttttttttttttttttttttttcagtttgtggaagatgaggttatagatctgtgtgcactatttcgttcctttattttctaggattgtgtgacataagcagcatactcagagggagacaagccacagcagcaagttgatctttaagaatcattaagctcacactg

SEQ ID NO: 3759 - DNA, 655 bp, Homo sapiens
tatgtaaaagctcagcaaataaggcttttggtttacagcatataaaataaggctgttgattagacacatttataagtcaactagcttaatggagacttcctcaggggaaagttcaatatcattgagaagaaaatgtagaagtttttggctagtattcatacaatacttgtcatgaatagattaaaatagagttattatctatcttatcaccgtaggaggcataattctatttggaaaagtaggtgactaatggtgaaaaggtgattccttggttaagactagtatttctcctctgataattactcctggcctagaccctaaacctgaatgagtttgtgaacattctgtggtggctgggagtttactttatttgaaaggcataatacaatgtaggtgtcatataaacatttttcaattgaatgaataaaatattaaacttacaatacacatttccacaatattgacgattattgtagaaataaatggcttctaatctcygaaataagtgtctacaaaaatagaggaaattaaggatatggaaaagcacattgtatatttgatgagtatcaaaactgtctggagcaggataaatgtggacaattgtaagggatggatttggggaggtagcctggatcctggtcatccagggtcttgt

SEQ ID NO: 3760 - DNA, 608 bp, Homo sapiens
ttattgaaaatgttaatgaagcttcctgtgagtgcagggacacagaaaccagcagttgatttaagtcattccaacgcataagcaagttccaaatgcagtgagaggtgaggaggggaagacgcaaagggtgccttgggaagaactgcctttgcgggaagcccttggtggctcccagcatgcccactgtgatggcattcaccccactrcagtcgtcgtcatcaaggtgacttcgttgtttcagaaggatctgttgtggtcagggttccacctgtcattccctagaccatggccctccaggcagttctaggcaggtcccagcaaaaagtactggggtagaaaccaaggaccaggcccacagaaacagggaccccaggggcttccaagggggagtgctgactgccaggtgcagaatccatagaactacccaccatgggagccagagggacctgtgcaaatccctggggagtgtgttagaatttccccaaatactgtaaaagagaaaagtgctcacactttatcacgtgaaacactaatgatgtctaggagctgacacagaacaggaggactctgaccaccacaggaccagagagatgtgtcaggacagaaat

SEQ ID NO: 3761 - DNA, 1168 bp, Homo sapiens
tggcttaatcaattttattttcctactccaatatgttttatttgtttctttcagttcatcttgataaaagaaagctactatactgacaataaaataaagtctcattgtctctccataagatgtcaaaaatctgttatatattttatgttaaaaagaaattgtctttatttaataatatcagtgaatataaggcagagttgaacaacaggtcagatggtttaatgtgccattttaagaaactaaaagttctattagaatattatcggaaataatatgttttctttttttttttttttcagacaaggtctcactctgtcacccaagctggctggacttcagtgaagcaatcacagctcattgcagcctcaacctcctgagctcaagcaatcctcccacttagcctcctgagtagctgggactacaagcgtgcaccaccatgcccaggtagttttttttttttktttgtgtgtgtgtgtgtgtgtgtgtgtgtgtgtgtattttttgtaaagatggggtttcatcatgatacccagactgatcttgaactctgagcttaagcaatccacctgcctcagactaccaagttttctttcaaataacaaaaaaagccataaaataaatataagaaagaaaataggccaggagtggtggctcacacctgtaatcccagcaatttgggaggccgaaggatcacctgaggttgggagttcaagaccagattgaccaacatggagaaaccccgtctctactaaaaatataaaattagccaggcatggtggcacatgcctgtaatcccagctattcgggaggctgaggcaggagaattgtttgaacccgggaggcagaggttgcagtgagccgagatggcgccattgcactccagcctgggcaacaagagcaaaactccatctcaaaggaaaaaaaaaaagaaatataaaattatcataatttttgtgttcattacaaatagaaatgcccaaaatggtcttagaagtttattagttttatgtaatcacaggtgatttctatagtgtctgacactagatttcatgtgttagcctaattgttatcatccttatctggattgtcaatactgcatatttcctttcagattatcagagagctcaacccatcagggccaactgtatatggagtctttccaagctct

SEQ ID NO: 3762 - DNA, 1168 bp, Homo sapiens
tggcttaatcaattttattttcctactccaatatgttttatttgtttctttcagttcatcttgataaaagaaagctactatactgacaataaaataaagtctcattgtctctccataagatgtcaaaaatctgttatatattttatgttaaaaagaaattgtctttatttaataatatcagtgaatataaggcagagttgaacaacaggtcagatggtttaatgtgccattttaagaaactaaaagttctattagaatattatcggaaataatatgttttctttttttttttttttcagacaaggtctcactctgtcacccaagctggctggacttcagtgaagcaatcacagctcattgcagcctcaacctcctgagctcaagcaatcctcccacttagcctcctgagtagctgggactacaagcgtgcaccaccatgcccaggtagttttttttttttttktgtgtgtgtgtgtgtgtgtgtgtgtgtgtgtgtattttttgtaaagatggggtttcatcatgatacccagactgatcttgaactctgagcttaagcaatccacctgcctcagactaccaagttttctttcaaataacaaaaaaagccataaaataaatataagaaagaaaataggccaggagtggtggctcacacctgtaatcccagcaatttgggaggccgaaggatcacctgaggttgggagttcaagaccagattgaccaacatggagaaaccccgtctctactaaaaatataaaattagccaggcatggtggcacatgcctgtaatcccagctattcgggaggctgaggcaggagaattgtttgaacccgggaggcagaggttgcagtgagccgagatggcgccattgcactccagcctgggcaacaagagcaaaactccatctcaaaggaaaaaaaaaaagaaatataaaattatcataatttttgtgttcattacaaatagaaatgcccaaaatggtcttagaagtttattagttttatgtaatcacaggtgatttctatagtgtctgacactagatttcatgtgttagcctaattgttatcatccttatctggattgtcaatactgcatatttcctttcagattatcagagagctcaacccatcagggccaactgtatatggagtctttccaagctct

SEQ ID NO: 3763 - DNA, 1168 bp, Homo sapiens
tggcttaatcaattttattttcctactccaatatgttttatttgtttctttcagttcatcttgataaaagaaagctactatactgacaataaaataaagtctcattgtctctccataagatgtcaaaaatctgttatatattttatgttaaaaagaaattgtctttatttaataatatcagtgaatataaggcagagttgaacaacaggtcagatggtttaatgtgccattttaagaaactaaaagttctattagaatattatcggaaataatatgttttctttttttttttttttcagacaaggtctcactctgtcacccaagctggctggacttcagtgaagcaatcacagctcattgcagcctcaacctcctgagctcaagcaatcctcccacttagcctcctgagtagctgggactacaagcgtgcaccaccatgcccaggtagttttttttttttttttgtgtgtgtgtgtgtgtgtgtgtgtgtgtgtgtattttttgtaaagatggggtttcatcatgatacccagactgatcttgaactctgagcttaagcaatccacctgcctcagactaccaagttttctttcaaataacaaaaaaagccataaaataaatataagaaagaaaataggccaggagtggtggctcacacctgtaatcccagcaatttgggaggccgaaggatcacctgaggttgggagttcaagaccagattgaccaacatggagaaaccccgtctctactaaaaatataaaattagccaggcatggtggcacatgcctgtaatcccagctattcgggaggctgaggcaggagaattgtttgaacccgggaggcagaggttgcagtgagccgagatggcgccattgcactccagcctgggcaacaagagcaaaactccatctcaaaggaaaaaaaaaaagaaatataaaattatcataatttttgtgttcattacaaatagaaatgcccaaaatggtcttagaagtttattagttttatgtaatcacaggtgatttctatagtgtctgacrctagatttcatgtgttagcctaattgttatcatccttatctggattgtcaatactgcatatttcctttcagattatcagagagctcaacccatcagggccaactgtatatggagtctttccaagctct

SEQ ID NO: 3764 - DNA, 636 bp, Homo sapiens
tcaaaaaaaaaatatatatatatatatcccatcatggcaactcccaatcaatccccagcctctcacagcaacccctgttgcctttttcttgaacttcacataaagcaaattttacagtatacactcttatgtgtctggcttctttcatttaacataagcttctgtgattgatccatgctatagcgtgagcagtttgttgctatttgattagaagtattccattgtatgaatataccacaactgtttattcacgagttgatggacattggggttcagttttgcacagttatgaatcaagtagctacgaatattcttgcacgaatctttttaatgaatatgtttttcatttttcttgtactaatgcctacaaatgcaatggctaggtcatgcaataaatgtgtgttcatttataagaaacaaacagttttcaaaaattgttaggccattttacactcctactagcaacgcatgagagtttaaattgctccatacrcttaccatgatttagtggtattggtatttttaatttgagccattctagtgggtgtatactggtatctcattgtggctttaatttgtatttccctaaaataaacgttattagtgaaaagcaccttttcatctgcttattggcca

SEQ ID NO: 3765 - DNA, 1330 bp, Homo sapiens
tgcataggtgacatgcaatatcaccctattttatataagggacttgagcatctatgaattttggtatctgagggagctcctgaaaccaattccccaaggataccaatggatgaatgtatttgactttagcaactgggcttcagaccaaaatctggttgtcatggagaaatgtatacccattatatacaaatagttaatactttscaatacgataagcaaagagattctatgatatacctctgtggcagggtaggaaaaaatgattttagaaactggcatagttcttagggaatgttctatatcttgccctctccccagtaaatctctctccatgaagctagatgaaattgtatgtacaagagatttattgggagagggtaagctgtaaaaagtaaatggagagggcagagtagggaagaaaagccttcagattgtgacgaagttatgatatctctgaaaggagagcagagctaaatttgtaggatgggcctcggactgcaacacagttctgagaaagtctggccaggtcaatggggagtccctgggcaaatttcccatgggacttctatagagaagtccccatccagcaagaatggctccctctagtagccttactatgtgtagttactggctgggagcatcccaggggaagcacaatctcaatgtgatagccacagaagaaataagtttggcagctggaagctgtcagtcagctctgctcctgaagcaagtgccttcaagggacatccgagaggtgcacctccatgtctgccatttttcaggaaaatatgtttttagaaaaataccaagaggcactgctttggggtacaaagtgggactgtgaggcatgatcccacaggggaaaaggaagcaaaaaaacatgttcacattttcaccttcatagaatcagaaatttgagagcacaattcaagaataaaggagacaagcaaaaaacatggcaggaaatgaccaactgactttttacaaacaggggtatctaatattcagagttatatttttttttgtgtgctccaatagaatcctttgtgtcattgcaagccatcagtaaaatcttatatgtgtacaaacacctcatgggaacatgtgtgtgcgtgtgtgtgtttaagtcaagaaaaaaggctctgttctatttgtaggtcaataagatacaaaaccaggtgcagtggctcatggctataattccagcactttgggagaggccaaggcaggaggatcatttgaggcaaagactttgagaccaccctgggcaacatagcaagactgtctctacaagaaattaaaaaattagccaggtgcagtggcacatgca

SEQ ID NO: 3766 - DNA, 884 bp, Homo sapiens
tgcatatatattttttaaaggaatcagaaaccctttgacctggaaaggatcaacaagtccaaatctcatattttacagattagaaggctgagacccagagagggtaattggattgtccaagtttccctgattaattacaaagctgggatcagaatgcagattcattgaccctgacctgctttgtccattatagcacactgccttgagctaagttttaagctacattttcattataatgaggtgtttcttactataagaaatcttaaaatagaaataaaatcatctttcatagggttttcttttcccattgctattttggaacaacttttctgcctatttcatctaaatgatacactataaataattcrgaaatacagtgtatgtatttttataaagggtgattttgcaaatatgttgagaaaatcatatgtaggtaacattacactagtttacttaaaataaaacaactacaaatctttcttaaaattggaaatttatctcatccactccatttatttgataagaaacaaaatgaacttttttttctcctttatcacctctggttttgtgctaagatcaagtacaaatctttgggagaaatactaaattctgagtagaacatattgtaaatggcattgtcataagaactagcaatacaaagatgggtaagtcattctcttgagcacctcagtctagtagaacgacctagctgtactcactccttttgttttttatttgtctttttgttttgttttggttttttgtttttatttttgagacagggtcttgctctgttgcccaggctggagtgcagtggcatgatcacagtgcattgcagcctcaccctccaaggctcacgtgatcctcccacctcagcctcctga

SEQ ID NO: 3767 - DNA, 596 bp, Homo sapiens
aaagttatttcttttttttttaagccagactcttctcagttgattgtccaaatgggataagggcgtatatttaagagaaaatacgcatcagtgctgcaatgtgttcagagcacgcttactattgcagttgtgcgcaaaccatttgtcaagcctcaagcacacccttggctctggagctcagcacagtttcctttctgtgagtaacattctatccaaaaaggagygcctcagcaggctgttcctgagccactaaaccttccaacaccctgtgagcatagcagaaaggccaattccccactgaaccggcagatggtgaaacatccccttggctcttgtacatccagacatattggtgcagacacagctgcaaaaaggcaagcaagttctccaaggccaggcaaaattagtcctttctcaagggagtgctctgctatgccagctggcatttcctgccatgctcccagcctgttttgagggtggataatggacaaaaatggagagggcttaaactgaaggactgagtatctcaaccagtgcagagctgggctttgaacaccgtgaatacactgtcaggaagtaacagtctttcaggaagc

SEQ ID NO: 3768 - DNA, 1090 bp, Homo sapiens
  misc_feature (1)...(1090): n = A,T,C or G
cacaaagagtgaatttcatgtagtttagaaatatataaatatacagtcatcaattttcgcaatgtgctatactagtgcaaaatgttaataacaggggatactgtggggcagaaagagggtatgtgtgaactctccatacatcctgctcaaattatctataaacccaaaactgctttaaaaataaaatgtataattaaaaaaaaattaaaatgaagaactcgggccatgacatgattacttaacnacctgaagtttatgtagcaagctgaaagaaaacaacctgttttcctgtctgttccattaaccaatattacacagcaaagtgcccaggactaactcatatgccaagtccagagagttccatagaccttcgttttgccgcttgtcctcagttgtttctggttcctatctctctcatcttagaatcaacaccacattgtacttttataatctactcatatttctgaagagtgaatccctgttagataacaagccaagcatatcacttctttaaactatcgagtcctgagagatcttcaccagttccttgtggactagaagcccktcccaagggatatacacgagggctcactcacttgacaatgtaatttatttgcctgcttcaatttccacaagttgttccatgtattgttggatctaatatgcttgtttctatgtttaactcaactgtctagatttccaagtttcctgaaaatgtataatgtataaatggttaaaattcattcaattcaatacttatttcagaagtaaaaaaaattcccccatttctctctctctctctctctcacacacacacacacacacacacacacaccacatctaattgagtttttcaaggtagccagccaacacttaattgggattgtatttttagattaattttctgagaatttatatttcaaaatgatcaatggaataattcttcatctattcattttgacttatttttattattgtagttgtaaagccttctctgtggattttatgtatcttcttggtgaataacttcctagaaacgttacaattctattgcctctttaaagggtatcttacatttctgaattaaaat

SEQ ID NO: 3769 - DNA, 1090 bp, Homo sapiens
  misc_feature (1)...(1090): n = A,T,C or G
cacaaagagtgaatttcatgtagtttagaaatatataaatatacagtcatcaattttcgcaatgtgctatactagtgcaaaatgttaataacaggggatactgtggggcagaaagagggtatgtgtgaactctccatacatcctgctcaaattatctataaacccaaaactgctttaaaaataaaatgtataattaaaaaaaaattaaaatgaagaactcgggccatgacatgattacttaacnacctgaagtttatgtagcaagctgaaagaaaacaacctgttttcctgtctgttccattaaccaatattacacagcaaagtgcccaggactaactcatatgccaagtccagagagttccatagaccttcgttttgccgcttgtcctcagttgtttctggttcctatctctctcatcttagaatcaacaccacattgtacttttataatctactcatatttctgaagagtgaatccctgttagataacaagccaagcatatcacttctttaaactatcgagtcctgagagatcttcaccagttccttgtggactagaagcccttcccaagggatatacacgagggctcactcacttgacaatgtaatttatttgcctgcttcaatttccacaagttgttccatgtattgttggatctaatatgcttgtttctatgtttaactcaactgtctagatttccaagtttcctgaaaatgtataatgtataaatggttaaaattcattcaattcaatacttatttcagaagtaaaaaaaattcccccatttctctctctctctctctctcwcacacacacacacacacacacacacaccacatctaattgagtttttcaaggtagccagccaacacttaattgggattgtatttttagattaattttctgagaatttatatttcaaaatgatcaatggaataattcttcatctattcattttgacttatttttattattgtagttgtaaagccttctctgtggattttatgtatcttcttggtgaataacttcctagaaacgttacaattctattgcctctttaaagggtatcttacatttctgaattaaaat

SEQ ID NO: 3770 - DNA, 1172 bp, Homo sapiens
aaacagaaaaatgagggaatcatgggatcaggctttaygtgtttcggcatgcttgccaatagaaaactgacagtgaaatcatgaagttgatactttattacctttgttatctgcatgagacatgtataagcaaatgagacaacctactgacaacatgggcttccctggtggtttggccaaaatagcttttttttccttaaactttcatctctattttagaaagttacagattacttgagccagtcctgctgttttgcttcctgcgatgcttaggttcaggactcaggtgacgtgacatttctggacagggctgggcctacccacaggatgctgctttgctaacccagggctctctcttctgccttggccaggaaaactatgaccttacctgctgctcagcctatgagacctaagttttacttagtaatattttgggggaaaactaaaatcttaatttagacattatgaacattaatatgacaaattatggaatgatatgaaaagatgatacactccacacttactactactgaatgatttccaaaaaataccgaataaaccgtataaacaattcatttaaaaatgtgattaatttttaaacttcaacattattacaatttctacatctctgaaaagcaataactaaagttaagtatattgagtaatttttccatgtcataaaaaataactaaaaaaagttaaaaggaggcagaggtcatagaaggacagaggaagcggagtcaatgtgtagtgtttccattcggcacctggtataatcaagcacatctttctaagtgtgagtcaattccattaaaaagaatgattctaacactaaaactgcagcaagtcagactcccttccaatagcgtggtctatttgtggaattctggtgtcagtagtttggcgttctcttctctgctgttccagatgacctttttgggtctctcttgaggatggatgcttctgtgtcacagacaccagggggaagagaaagcaatcgttccgctgtgtgtctgtcctaattcccgacatctgcagacccagctgagagcacctggattcttattagctataagacttggagacaactataaactaaaaggcacagtgttgtgaaattcgaagcgcaggtaccctccatagagtcatagtgcttgttagtgtgtaacatg

SEQ ID NO: 3771 - DNA, 1172 bp, Homo sapiens
aaacagaaaaatgagggaatcatgggatcaggctttacgtgtttcggcatgcttgccaatagaaaactgacagtgaaatcatgaagttgatactttattacctttgttatctgcatgagacatgtataagcaaatgagacaacctactgacaacatgggcttccctggtggtttggccaaaatagcttttttttccttaaactttcatctctattttagaaagttacagatyacttgagccagtcctgctgttttgcttcctgcgatgcttaggttcaggactcaggtgacgtgacatttctggacagggctgggcctacccacaggatgctgctttgctaacccagggctctctcttctgccttggccaggaaaactatgaccttacctgctgctcagcctatgagacctaagttttacttagtaatattttgggggaaaactaaaatcttaatttagacattatgaacattaatatgacaaattatggaatgatatgaaaagatgatacactccacacttactactactgaatgatttccaaaaaataccgaataaaccgtataaacaattcatttaaaaatgtgattaatttttaaacttcaacattattacaatttctacatctctgaaaagcaataactaaagttaagtatattgagtaatttttccatgtcataaaaaataactaaaaaaagttaaaaggaggcagaggtcatagaaggacagaggaagcggagtcaatgtgtagtgtttccattcggcacctggtataatcaagcacatctttctaagtgtgagtcaattccattaaaaagaatgattctaacactaaaactgcagcaagtcagactcccttccaatagcgtggtctatttgtggaattctggtgtcagtagtttggcgttctcttctctgctgttccagatgacctttttgggtctctcttgaggatggatgcttctgtgtcacagacaccagggggaagagaaagcaatcgttccgctgtgtgtctgtcctaattcccgacatctgcagacccagctgagagcacctggattcttattagctataagacttggagacaactataaactaaaaggcacagtgttgtgaaattcgaagcgcaggtaccctccatagagtcatagtgcttgttagtgtgtaacatg

SEQ ID NO: 3772 - DNA, 1172 bp, Homo sapiens
aaacagaaaaatgagggaatcatgggatcaggctttacgtgtttcggcatgcttgccaatagaaaactgacagtgaaatcatgaagttgatactttattacctttgttatctgcatgagacatgtataagcaaatgagacaacctactgacaacatgggcttccctggtggtttggccaaaatagcttttttttccttaaactttcatctctattttagaaagttacagattacttgagccagtcctgctgttttgcttcctgcgatgcttargttcaggactcaggtgacgtgacatttctggacagggctgggcctacccacaggatgctgctttgctaacccagggctctctcttctgccttggccaggaaaactatgaccttacctgctgctcagcctatgagacctaagttttacttagtaatattttgggggaaaactaaaatcttaatttagacattatgaacattaatatgacaaattatggaatgatatgaaaagatgatacactccacacttactactactgaatgatttccaaaaaataccgaataaaccgtataaacaattcatttaaaaatgtgattaatttttaaacttcaacattattacaatttctacatctctgaaaagcaataactaaagttaagtatattgagtaatttttccatgtcataaaaaataactaaaaaaagttaaaaggaggcagaggtcatagaaggacagaggaagcggagtcaatgtgtagtgtttccattcggcacctggtataatcaagcacatctttctaagtgtgagtcaattccattaaaaagaatgattctaacactaaaactgcagcaagtcagactcccttccaatagcgtggtctatttgtggaattctggtgtcagtagtttggcgttctcttctctgctgttccagatgacctttttgggtctctcttgaggatggatgcttctgtgtcacagacaccagggggaagagaaagcaatcgttccgctgtgtgtctgtcctaattcccgacatctgcagacccagctgagagcacctggattcttattagctataagacttggagacaactataaactaaaaggcacagtgttgtgaaattcgaagcgcaggtaccctccatagagtcatagtgcttgttagtgtgtaacatg

SEQ ID NO: 3773 - DNA, 715 bp, Homo sapiens
tttagaattatgttgttacgtatataaaagttcataattatatatcttcacctgttggttttatagcctatcagaattacatccacataatttggctaagggaagtacaaaacttcccttagctaaactctgtttgtagaataaatgttacgctttctaaaccagatcatctgaggacagaaagagcttgacgggagtcattcaaatgtaaaatacacagttcaatgatcttacacaacatctaagaacagatttgagtattagtgaaattgaagctgaagttgtagccctaaacattcagattcagagggcatgggttaggacctagccattttatagcctcgtcaagtgattctgtagtcttaaaaaggtaaaataaatgaaaaataagtgaaacacactgtgctagatgatttcaggtagaacctaacacagtcgacctctcttttccargtagttgtataaatacttagaagccgcctttaactaattttcacagctcacataagtacaaatgctgttagtaaccatggagcaaagatgatagtagatttcatacacttgtggaattcttaccgcatctcctagaagacctcttacagggcctgtggtttagagacaggaaagacctacttctttcgcaaaaattttcatggtaaggactccaccgggactcaacttctctcatatgttaaaatgctcattcaggctagat

SEQ ID NO: 3774 - DNA, 715 bp, Homo sapiens
tttagaattatgttgttacgtatataaaagttcataattatatatcttcacctgttggttttatagcctatcagaattacatccacataatttggctaagggaagtacaaaacttcccttagctaaactctgtttgtagaataaatgttacgctttctaaaccagatcatctgaggacagaaagagcttgacgggagtcattcaaatgtaaaatacacagttcaatgatcttacacaacatctaagaacagatttgagtattagtgaaattgaagctgaagttgtagccctaaacattcagattcagagggcatgggttaggacctagccattttatagcctcgtcaagtgattctgtagtcttaaaaaggtaaaataaatgaaaaataagtgaaacacactgtgctagatgatttcaggtagaacctaacacagtcgacctctcttttccaagtagttgtataaatacttagaagccgcctttaactaattttcacagctcacataagtacaaatgctgttagtaaccatggagcaaagatgakagtagatttcatacacttgtggaattcttaccgcatctcctagaagacctcttacagggcctgtggtttagagacaggaaagacctacttctttcgcaaaaattttcatggtaaggactccaccgggactcaacttctctcatatgttaaaatgctcattcaggctagat

SEQ ID NO: 3775 - DNA, 667 bp, Homo sapiens
agtgtctcggggggttgtatgtgctgcctcccctgcctgaacacccttcttgttctcttcccttccatcatttttccttgtttaaatcttgtttatcattaccatccacagagtgtggtgtttctgatgtctcctgcttcctgaagctttccccgaccccccagaaatattttgggccttcttgtatcacatattacaaatacaacattgtttgtgtctattgaataataccatttgatcggatactttttgaagggaagcattgaatcctattcaccactttcttaccacctctgtcactgcaaaacaagtgatctgtaatgttactgagtgaaagaactctcgcctggactgtgtgggcmgctcactgggaggcgagggccttgacaagagcattcccacacctccccttcccacgcctgcatgctccctccttctcttatgaaaggcctctcctgctgttcattttaaccagatttaacttacatttaaaaaaaaagaaaaagctttactgagatattaggaagttagattgaaaattcttattgggattataagaaacaacaggtacaggatatttttaatgtgctggcagctactaggtgctgtttagaatattcttgtctggttagaggtatagtggtgtagtatgtaataaaaggaggca

SEQ ID NO: 3776 - DNA, 2408 bp, Homo sapiens
tcaaaaacaaagtcaatactatacctggttatttcttctttaagtttacatggatcttcagcatagaatttaataccaaaatacaaagtatatggaggtccagctaaaataagaaatagaaattaaatttcactaaaatcataaattagtcaaagttacagtataatattatacagctatttacaattacactccaagattgtctaaagaaacaagaaaacataagataaaaacagcaaggttcagaactgtgacgataggacctcgacacatacacacacacagataaaagacagggccaaatacaccagaatgttgctggttcttatgtctggttggtgaggttatggacaatttttattatatatgtttttcccattttctatagtatatatgtaatttttcatagtgaagaaagaaaaaaaataaatggtttaaaaaaccacccactatcatttcattwaaaaaaaatagtttttaaacctatctgcaaaaagctgaaaacaacttaaatgctcagcagcatgtggactatttaagtcagccccagccacaggacatataccatgcaaatgtttaaacagacagaagggcatctgcatgtgctcatgtggaaaagaccaactatctaaatttccgagcacagaaatatcataccttttgtgaaaaagtatcagttaatatatatttgagttttttttcctggaagagtacaaaaaaaattactaaatggcaaactctgggaagaagggctagaaacattctatccttaaactaattcattagaattttcttatgataactcttacctttttttacaggaaaaaagtcatcagtgaggctacataataaaattagggacaatatttgtttcattcttaaacatttctgaatctaaaaatgtgttctcacgtatttaagaaaacctttctcatctcattaatttaccaaagaagaactatgcctacaaacttttttttaaaatcagaaacaaagcctggaattgtatgtacatgggcaaataaaaaataaacactcatattgtgcaagaagacacaaaccccttgggtgctgaacacattatattatgcttttactagaaatatttttatttctgagggtatcaatctaatctgtactgtttccaaaagtgcatatttccaagctgtgcagtaactagatctaatacactttgtttttaaaaggatttgttttgttacctggtataccaattagtggttacgggtgttaattttgttttccaacaaaagctctcccacaaattaaaaagaaaagatgtgaagcatgcatctcagtaaaagtcttcgatactatctaaactgataaagtaaccccagtctcgctattcttaactgaataaataaagtcacaaatttagaaactggggaaaagaaattaaaacgaacaagaataaaggtatcatgtatttataacatatgaactatgttactatttattaatattacatacacatacttatgtgtgcagcaccctggaaccctgttcctggcatgtgggagaccatcaagatgaggatcctgcccctcccctcatctgtgccttcctgtgtaaagacactccttatgctacagcttttttaaaaactaaactttaaaagaaactgctagaatttcttattattggagttgattccttatgtttaacttttatgtttgtttaaccactgtgtttgtatttctgacaaatacacctctatccctgaacatagatgtcagggaggcacagactattaaatatttagaagagccaggaagtccaccctcagcttatccgtctgtgtcaatcaagctccatgttcctgagcagatgggtctgcctgtgcccgcaggcagctggggttggtacctagggggcggggaggagcacagatgctgctgagatggtgcacaaagggaagaggccttctccaggcctcagagctgcttctattctttggaacatgacagattacatcctattcaccaagcccacgcatttcaaatgttcagtatgaacagttaagcaaaaatgttaaaagtacacagttaaaaacattaggttttggctaattttctctaaggtcttctggcccaaactagaccttcatttcccattcacatataaaatggctgtgttctaaatataaggcattattaccatttggttacacttcataatgtacgaaaatgtttcataaacatttgattctcaacaacaaaaacttgggaacatatgcaaggcacattaaactccaaggagttaaacaacttgcctaaaatcacagggaagaaaaaaaagtttgctatcatctagggctcagcactttggggtgcaccattctatacagcttctcagggaaatacaaaataataatacctttagagtga

SEQ ID NO: 3777 - DNA, 2408 bp, Homo sapiens
tcaaaaacaaagtcaatactatacctggttatttcttctttaagtttacatggatcttcagcatagaatttaataccaaaatacaaagtatatggaggtccagctaaaataagaaatagaaattaaatttcactaaaatcataaattagtcaaagttacagtataatattatacagctatttacaattacactccaagattgtctaaagaaacaagaaaacataagataaaaacagcaaggttcagaactgtgacgataggacctcgacacatacacacacacagataaaagacagggccaaatacaccagaatgttgctggttcttatgtctggttggtgaggttatggacaatttttattatatatgtttttcccattttctatagtatatatgtaatttttcatagtgaagaaagaaaaaaaataaatggtttaaaaaaccacccactatcatttcatttaaaaaaaatagtttttaaacctatctgcaaaaagctgaaaacaacttaaatgctcagcagcatgtggactatttaagtcagccccagccacaggacatataccatgcaaatgtttaaacagacagaagggcatctgcatgtgctcatgtggaaaagaccaactatctaaatttccgagcacagaaatatcataccttttgtgaaaaagtatcagttaatatatatttgagttttttttcctggaagagtacaaaaaaaattactaaatggcaaactctgggaagaagggctagaaacattctatccttaaactaattcattagaattttcttatgataactcttacctttttttacaggaaaaaagtcatcagtgaggctacataataaaattagggacaatatttgtttcattcttaaacatttctgaatctaaaaatgtgttctcacgtatttaagaaaacctttctcatctcattaatttaccaaagaagaactatgcctacaaacttttttttaaaatcagaaacaaagcctggaattgtatgtacatgggcaaataaaaaataaacactcatattgtgcaagaagacacaaaccccttgggtgctgaacacattatattatgcttttactagaaatatttttatttctgagggtatcaatctaatctgtactgtttccaaaagtgcatatttccaagctgtgcagtaactagatctaatacactttgtttttaaaaggatttgttttgttacctggtataccaattagtggttacgggtgttaattttgttttccaacaaaagctctcccacaaattaaaaagaaaagatgtgaagcatgcatctcagtaaaagtcttcgatactatctaaactgataaagtaaccccagtctcgctattcttaactgaataaataaagtcacaaatttagaaactggggaaaagaaattaaaacgaacaagaataaaggtatcatgtatttataacatatgaactatgttactatttattaatattacatacacatacttatgtgtgcagcaccctggaaccctgttcctggcatgtgggagaccatcaagatgaggatcctgcccctcccctcatctgtgccttcctgtgtaaagacactccttatgctacagcttttttaaaaactaaactttaaaagaaactgctagaatttcttattattggagttgattccttatgtttaacttttatgtttgtttaaccactgtgtttgtatttctgacaaatacacctctatccctgaacatagatgtcagggaggcacagactattaaatatttagaagagccaggaagtccaccctcagcttatccgtctgtgtcaatcaagctccatgttcctgagcagatgggtctgcctgtgcccgcaggcagctggggttggtacctagggggcggggaggagcacagatgctgctgagatggtgcacaaagggaagaggccttctccaggcctcagagctgcttctattctttggaacatgacagattacatcctattcaccaagcccacgcatttcaaatgttcagtatgaacagttaagcaaaaatgttaaaagtacacagttaaaaacattaggttttggctaattttctctaaggtcttctggcccaaactagaccttcatttcccattcacatataaaatggctgtgttctaaatataaggcattattaccatttggttacacttcataatgtacgaaaatgtttcataaacatttgattctcaacaacaaaaacttgggaacatatgcaaggcacattaaactccaaggagttaaacaacttgcctaaaatcacagggaagaaaaaaaagtttgctatcatctagggctcagcrctttggggtgcaccattctatacagcttctcagggaaatacaaaataataatacctttagagtga

SEQ ID NO: 3778 - DNA, 644 bp, Homo sapiens
cccacscccggggaaatgtgaatgtggtctgggccatgattcaccaccgttgcttccatgaggtcatctgcggcctctttcccccacggggctggcgcagggggctggaccggctggtccccctctctccctccctctgccgggcaggagggaaggcaggaagacaggctatctgtgccaccatctaattaccccgggaggtaattgctcgggattttctctgacatcttgagatttctctctgagccttccacagtggagacaaataacccttaaggaggctacgggcccaagacagggcctattgctaaaccctgacaactccccatcagccccgccgcgacgtgcccgagctttgagacagcgtgagtttatgacaggtcccattaagtctcttgcacaagcactgagtgttgaaatacccaacagatgatgacagtgttgaaataacctgtcgtctcagcactttccccgccattagccagatgttccagccctcaaaagcgttcgcagccttttgcagggagggagggggctcggattaaggcagcccaggtcccagtgggagtatggttcggggggtctggggctgagggcagctggggttccacaagagaacagggtgaggggtggtctaggattgg

SEQ ID NO: 3779 - DNA, 644 bp, Homo sapiens
cccacgcccggggaaatgtgaatgtggtctgggccatgattcaccaccgttgcttccatgaggtcatctgcggcctctttcccccacggggctggcgcagggggctggaccggctggtccccctctctccctccctctgccgggcaggagggaaggcaggaagacaggctatctgtgccaccatctaattaccccgggaggtaattgctcgggattttctctgacatcttgagatttctctctgagccttccacagtggagacaaataacccttaaggaggctacgggcccaagacagggcctattgctaaaccctgacaactccccatcagccccgccgcgacgtgcccgagctttgagacagcgtgagtttatgacaggtcccattaagtctcttgcacaagcactgagtgttgaaatacccaacagatgatgacagtgttgaaataacctgtcgtctcagcactttccccrccattagccagatgttccagccctcaaaagcgttcgcagccttttgcagggagggagggggctcggattaaggcagcccaggtcccagtgggagtatggttcggggggtctggggctgagggcagctggggttccacaagagaacagggtgaggggtggtctaggattgg

SEQ ID NO: 3780 - DNA, 549 bp, Homo sapiens
  misc_feature (1)...(549): n = A,T,C or G
atctttctgcttggccccagccgcatttaagaagcagctgagagcagtggctaacgtctgtaatcccagcactttgggaggccaaggcaggcagatcacttgaggtcaggagttgaagaccagcatgaccaacatggtaaaaccccatctctataaaaatacaaaaattagccgggcatgatggcaggtgcctgtaatcccaactactcaggaagctgaggcaggagaatcacttgaacccgggaggtggagattgcagtgagatgagattgcgccactgcactccagcctgggtgacagagggagacyccgtgtcaaaggaaaaaaaaaaaagaagcaactgtaagcaggaactcaggcaggctgggtggggnacgcaaggcctcctattgccaaggagcttgaggaagattgtcgctggggttttttgttttctcctgtttaagtaatagctttattgagatataattcacataccatgcaattcatccattaaaaatatacaattcaatggcttctaatgtatccattagtgcaatttctacaatc

SEQ ID NO: 3781 - DNA, 1137 bp, Homo sapiens
acactgtgttcatttctcctcaagcacagcctactaacagaatcacgtttcacatttgtttcactctctgttctattctgtaatgcagttgttagactcttgcttggcagacacagcagaaccaacaggattacatacttcacatctggaaatactccacaatcattatagactaaaatctgtgctgggtttcttccctcctatgccaaccaggtaaaacaagaaagagagaaggatacatttgctcacccagagaagccccatcagagaaactgccaggatcatggaaatcagatgttctcagggccggtgacttattctggatgtgaaacctacatgtggcaagtaagcaaagagaacacttggaaaggcttaggtgataggcttttaatgctgtcaagggaaccattcaaatcctccaattcgtgagtactatgccagcacatttttttcttcaaaaactggagcacaactccagaccctaaatgaggtagagtcatagagagactaacyaaccaaccaatactcaaattcgaagaagtcagctgggcttactggggtcgtcgttctcaccacaggtctcacatagggcaggtttctgattcccacctctgcacagatttgtgcaatgcaaggagttatggggccacttgataatgaaacccacaaaagtgaaattgtcacaaggaagaacttagcatcgtggtgctcaacctttgacgtgcatcagaatggctctttgaatgtccgggtgcaaacctatccagttggaatctttgaggatgggatccaggtgtgcccaattgtaaatgacggcaggcatgagttggctgtgccccctcctcttttcagaacaatggtttttcagaaaatattgatatgcagtttcatttatttttacatctcactctaccatctgtgatgagtgatttcttttttggacaggacttcatcacagaaatattccatgggaggccatctcactgtagattaaaatgtagtgaaaaatgcaagtgtcatatctccatgccgaatccattagctcttatttccagccctttctcacctcatctcaactccagttgactcacagccaatatagaaaaggcaatagctttatgaaatctagtgtccaca

SEQ ID NO: 3782 - DNA, 546 bp, Homo sapiens
cgtagaaagtgctcaggagaaggcagatgggaacaaggtcaataaaccatatgatgagcttagcaaaaaaaatactggtaatttctgccactgggtgatgggtatgggcggaaggggtcatattagaattctttctattttgaggtgttttggaaacttccataagtcatgtggagttggcatgctgaaatgaggtaagcatgatgartgttgcccgaaaggataccccttaaatttttagcactttccaaaccaatgtggtcacaaccaatgctaacaggcgtggtgtgaagtaggtaggcgaggtaataactatgcttattttatgaatgaggaaaagactagattcgactcatagaggcttggagttagaagggacttaagtctgctgtcagttttccatcctaatgtttaacttgacaatgatccacccagcactacacattacatcataagttataggaagggtcaggcgcagtggctcacacgcctgtcattttcacactctgggaggcctaggcagcctagcgtggtgggtggtagggg

SEQ ID NO: 3783 - DNA, 546 bp, Homo sapiens
cgtagaaagtgctcaggagaaggcagatgggaacaaggtcaataaaccatatgatgagcttagcaaaaaaaatactggtaatttctgccactgggtgatgggtatgggcggaaggggtcatattagaattctttctattttgaggtgttttggaaacttccataagtcatgtggagttggcatgctgaaatgaggtaagcatgatgagtgttgcccraaaggataccccttaaatttttagcactttccaaaccaatgtggtcacaaccaatgctaacaggcgtggtgtgaagtaggtaggcgaggtaataactatgcttattttatgaatgaggaaaagactagattcgactcatagaggcttggagttagaagggacttaagtctgctgtcagttttccatcctaatgtttaacttgacaatgatccacccagcactacacattacatcataagttataggaagggtcaggcgcagtggctcacacgcctgtcattttcacactctgggaggcctaggcagcctagcgtggtgggtggtagggg

SEQ ID NO: 3784 - DNA, 546 bp, Homo sapiens
cgtagaaagtgctcaggagaaggcagatgggaacaaggtcaataaaccatatgatgagcttagcaaaaaaaatactggtaatttctgccactgggtgatgggtatgggcggaaggggtcatattagaattctttctattttgaggtgttttggaaacttccataagtcatgtggagttggcatgctgaaatgaggtaagcatgatgagtgttgcccgaaaggataccccttaaatttttagcactttccaaaccaatgtggtcacaaccaatgctaacaggcgtggtgtgaagtaggyaggcgaggtaataactatgcttattttatgaatgaggaaaagactagattcgactcatagaggcttggagttagaagggacttaagtctgctgtcagttttccatcctaatgtttaacttgacaatgatccacccagcactacacattacatcataagttataggaagggtcaggcgcagtggctcacacgcctgtcattttcacactctgggaggcctaggcagcctagcgtggtgggtggtagggg

SEQ ID NO: 3785 - DNA, 601 bp, Homo sapiens
ggtaatttccttaataacttgctgcttttatgttgtttagcctattgatttaatatattgagcccctgcaaaatgtgaaaacatactggaagctactttgaggttatagttcttaagaatatttataacagtagtagtaatgtctctcttacaaagacattattattaatgtcttgtacattattttaggtaatctttgtaacactatgaatctgatattaccagtccsctttcatagaagacataaactctgataatttgggatcactagaagacaggttggaagacttctagttcagcctcttggtaaggtatattttcatagaaaagaaatccttttattaccattttctgtaacaattaaggcttttgcagccctaggttctgaatcagagactagcctgtttcccctattctaaattccactatctctttttctgccttgtaaaacatcacttttcaccttttatcatcacatctgggtttagggttattctctttgaggtagtccataggagaaagattgcatcagaagtcctctgagatggctgctagccctaaaggttctgtagcattttatttagagatgtagaatgattcc

SEQ ID NO: 3786 - DNA, 563 bp, Homo sapiens
gcttgcctgagcctgaacagatggaagaaaagtagagcagactgctccacagatgatgatcagcaacaatcagacccaaagatgagtggcttgatccaaggagaattaaagaagccatttgcatcagatgttggaacagttaaggcatgcttgcagtcagtgaatgtcattggaagctgctttaaataatgtgatgcaacatacatatattatgtatttgcaaagccagatgggataaggaataagaattttagagggaaaaatctggcaagaaacacttttatagatgtcactctgaactgatgcattatggagaagtgagctaatgggcttaggaaagaaaaaattatcataaatattaaayagaaatcttagatttcatcaggactttaaagtttatgtgaatcttattgcctgcactaaagcagaacacacttcccatccctgccatctcatgcttattaaaaaagctaatgtgtgtgtgtgtgtgtgtgtgactatttgtgtgtgtctctctctatctttaggggtagatatagatgatatagatatagatatatacc

SEQ ID NO: 3787 - DNA, 1194 bp, Homo sapiens
taaatgcaattttgatttaatcaaattcagtcataaaatatttatgacaatttcatcatttattaattgctttaagaaaatctttgcccctcgtctagaaacttttgtgtaataaaaatacactataactttaaaaaattttaggaatgacaactagaattagcaaaaccaaagctaaaaccaaacatttgttaggactgtaagttcagacccttctaattggtaggtatttctggaactaattatcgggtactttgttgattgctgtcctgcatgccagatttctgttcagatgagttggttagagcatcttattgtagaaggtcaaaacacttggtcacctctaggtcttatgtaattgctgatcttacataattaattgaatagttttaaaaaatcttattctgcaggcataatgaagctagggatttgggggtggatcaaagcaaatccatcattgtttctggaaaaggaaatcaaaatataagtcctgcaagtggtaggtgagtaacatcacctttccagatgaggccgatatagsaccaagaaccctcccacatggttcttgggtatgattcatcactaacttgctctgtcaccttggacaaatcactcaactcccctacatgaaggccaagagaaacttgaggttaccatgcgaaagtactttcaaaaattctattaaaaatgcccccattgccttaggaagagggtgccattttattatgacctacatatgcagaaaattactaggaagtttgtactaggaaaagacacgaatatcatgggaaaaatagcaaggaaactatttagcttagtaaaatcataactgtagaaattctgtaaaattttcttctaaagtttattagattccacagtcataaaaatctttaatctaaaaaaaagaaataatacacatttacataatgtgtactgtatgcctgacactcttctaagtatttaaccaaagctaggtctcatctcttgagaaggttaattagtttttggttttgtttagtacctagcactggggagatgacctcctagaactgcgatttcaggtttaacaagactaacctaaaaaaatttagctcctgttcattcctgttgatgttttgtaatccatggcagaattttagtgttctattttaagattttaatctctggaaaattcaaatcctctcgagatttagc

SEQ ID NO: 3788 - DNA, 426 bp, Homo sapiens
aagagaaaaattgctgagggcaggatttcaggcactgcagcccttatctttacctgtcatcaaaaccctctgttctaaccaattgactggaatccagcctataatgttattcgggaataaagaccacacagtgattgctgtaaaaaaaaaaaaaaaggtaaatataaacaaatgtaaattattgagagtaataattaaatgtggctgaattttccacatcttcatgtcagatattttaaacataaatatagaaggggagagggcggccctrgtatttttactttgtacagaagagagaagtgtagcatctgtatgaccttccggctgtgtctcctcaatcagacaaaaagtgctagtaaattcagggtagtttgaggagtcagttttactgattattaggtaattcaatcaaaatgaatgatctca

SEQ ID NO: 3789 - DNA, 604 bp, Homo sapiens
atggtctgaatatatattaaagatctttttcccacttaaacatatcagtatcctttttaaacattttaagttgtttttggcattaaattcaagtacytgattatataattaaaagttttctggttgggtgcagtggctcacgcctgtaatcccaacactttgggaggccgaagtgggcagattgcctgaggtcaggagttcgagaccagcctggccaacatggtgaaaccccatctctactaaaaatacaaaaattagccaggtgtggtggcacatgcctgtaatcccagctactcgggaggctgaggcaggagaatcgcttgaacccgggaggtggaggtggtagtgagccgagatcacgccactgcactccagcctgggtgacagagtaacactgtatcttaaaaaaaaaaaaaaaaagaaaagaaaagttatctgcgagtcttattcattcctctcagtgtctgctactgtacttctcattttctccttttaggccaggccagtttagtgaaacttgagtaccaggatgagaagagaatataaagagaagcagatggtattgttaacattatcttctggttgccaacatgagatattttct

SEQ ID NO: 3790 - DNA, 582 bp, Homo sapiens
gtttattaaaccagtggaacctcaattcttcctgctcatgattgtgatggtggtgaaatgaaagtgtgtctataaagcactatctactctaagacattaaccacgttttacttaataataatgaggatggtgaggatgaggctgatagaacttgatccatagagctaaatgaaggtagccactatttgttcattcaggcacactgcatatggtggaaacaatagctcgttcaggttaagtgacagctgaaaattctgactcctgtagtgagagcaaygtgttttaaatctgaggtgcaaactgtttgtttacatatgactagctagcccaatgcatagcagctataggtgggaaaagccgaatatttcaagaataatgtgctgatcctgaggaatttgttcttgacttttaggcataccacaagatattgtaattattattcattcattcactaccaatggtgggtgtctggatggttaactggtttcttttccagcccttaggaaatactggggattaggcagcattatgccccagactcctgcatgctttgaggagaatgttagtaatagtctagtggaa

SEQ ID NO: 3791 - DNA, 582 bp, Homo sapiens
gtttattaaaccagtggaacctcaattcttcctgctcatgattgtgatggtggtgaaatgaaagtgtgtctataaagcactatctactctaagacattaaccacgttttacttaataataatgaggatggtgaggatgaggctgatagaacttgatccatagagctaaatgaaggtagccactatttgttcattcaggcacactgcatatggtggaaacaatagctcgttcaggttaagtgacagctgaaaattctgactcctgtagtgagagcaacgtgttttaaatctgaggtgcaaactgtttgtttacatatgactagctagcccaatgcatagcagytataggtgggaaaagccgaatatttcaagaataatgtgctgatcctgaggaatttgttcttgacttttaggcataccacaagatattgtaattattattcattcattcactaccaatggtgggtgtctggatggttaactggtttcttttccagcccttaggaaatactggggattaggcagcattatgccccagactcctgcatgctttgaggagaatgttagtaatagtctagtggaa

SEQ ID NO: 3792 - DNA, 1167 bp, Homo sapiens
gtttttcatgtaattcagttagactcagagtgtaataaataaattattggtcaaagagcacagaaaacttcataagtcatttgggcacctatcagtttacagtatcaaaagtgtataaacaactcactttctaaaatacttagtagactacasagaagttactatatattttcttcacagattaacataggaatgtgctgcaataggcctctctattgtcatttagtctcatcattacttagccaaatcccagatcacatgccccaacccccaatttgatagtacttcagaccccccactgcaaacaaataaactaataaccgtttttatcttcactttgcagtgcagttgcagaaatcacttatcttttactagttcatttgttttctagagacaaaccacttaatgaaatttcagagaattttaaatagtcaactgttcagaattcatcatattaacaactagaccatttgaggtaggaaccacaaccatgttactgcatgggccctcctcaaatgccaaatcaatgaagactatcattgatgattgataaatatatatttgtttaattgatattacactgtacactgtagatttggccaaagggaacaatgaagtcaatgtcatctctcaaaataaaattattgtcctattttttcaaacatctcactttctcatttaatggaaattatcttaacatttatgtaatacacacctaattgaagaaaaacctagaaacaaatagtcataatttttacttgatatgtaagttaatcaacagaaccttagaaataagttatgaatcattttgatttgacagggtgatataattagattttggctataatgttgattaatgcagatggtttctggtagaactttattaattaaaaacaaacaaacttttaattaaatgaaatattttaggtccttattcatgttaggagaaagataaagatacaaaagataaaagtttctatacaaaccagaagtggacatttttgattaaaaatattttcaagaaagttataccaaatactctcactctctgcttttactgttgtcatttttaaaatgaagagccttagggaaaggatgatgacatttaaataataaaactaatgtttattaaatatttactatgttcagggcactgtgttaaacatt

SEQ ID NO: 3793 - DNA, 1167 bp, Homo sapiens
gtttttcatgtaattcagttagactcagagtgtaataaataaattattggtcaaagagcacagaaaacttcataagtcatttgggcacctatcagtttacagtatcaaaagtgtataaacaactcactttctaaaatacttagtagactacacagaagttactatatattttcttcacagattaacataggaatgtgctgcaataggcctctctattgtcatttagtctcatcattacttagccaaatcccagatcacatgccccaacccccaatttgatagtacttcagaccccccactgcaaacaaataaactaataaccgtttttatcttcactttgcagtgcagttgcagaaatcacttatcttttactagttcatttgttttctagagacaaaccacttaatgaaatttcagagaattttaaatagtcaactgttcagaattcatcatattaacaactagaccatttgaggtaggaaccacaaccatgttactgcatgggccctcctcaaatgccaaatcaatgaagactatcattgatgattgataaatatatatttgtttaattgatattacactgtacactgtagatttggccaaagggaacaatgaagtcaatgtcatctctcaaaataaaattattgtcctattttttcaaacatctcactttctcatttaatggaaattatcttaacatttatgtaatacacacctaattgaagaaaaacctagaaacaaatagtcataatttttacttgatatgtaagttaatcaacagaaccttagaaataagttatgaatcattttgatttgacagggtgatataattagattttggctataatgttgattaatgyagatggtttctggtagaactttattaattaaaaacaaacaaacttttaattaaatgaaatattttaggtccttattcatgttaggagaaagataaagatacaaaagataaaagtttctatacaaaccagaagtggacatttttgattaaaaatattttcaagaaagttataccaaatactctcactctctgcttttactgttgtcatttttaaaatgaagagccttagggaaaggatgatgacatttaaataataaaactaatgtttattaaatatttactatgttcagggcactgtgttaaacatt

SEQ ID NO: 3794 - DNA, 1167 bp, Homo sapiens
gtttttcatgtaattcagttagactcagagtgtaataaataaattattggtcaaagagcacagaaaacttcataagtcatttgggcacctatcagtttacagtatcaaaagtgtataaacaactcactttctaaaatacttagtagactacacagaagttactatatattttcttcacagattaacataggaatgtgctgcaataggcctctctattgtcatttagtctcatcattacttagccaaatcccagatcacatgccccaacccccaatttgatagtacttcagaccccccactgcaaacaaataaactaataaccgtttttatcttcactttgcagtgcagttgcagaaatcacttatcttttactagttcatttgttttctagagacaaaccacttaatgaaatttcagagaattttaaatagtcaactgttcagaattcatcatattaacaactagaccatttgaggtaggaaccacaaccatgttactgcatgggccctcctcaaatgccaaatcaatgaagactatcattgatgattgataaatatatatttgtttaattgatattacactgtacactgtagatttggccaaagggaacaatgaagtcaatgtcatctctcaaaataaaattattgtcctattttttcaaacatctcactttctcatttaatggaaattatcttaacatttatgtaatacacacctaattgaagaaaaacctagaaacaaatagtcataatttttacttgatatgtaagttaatcaacagaaccttagaaataagttatgaatcattttgatttgacagggtgatataattagattttggctataatgttgattaatgcagatggtttctggtagaactttattaattaaaaacaaacaaacttttaattaaatgaaatattttaggtccttattcatgttaggagaaagataaagatacaaaagataaaagtttctatacaaaccagaagtggacatttttgattaaaaatattttcaagaaasttataccaaatactctcactctctgcttttactgttgtcatttttaaaatgaagagccttagggaaaggatgatgacatttaaataataaaactaatgtttattaaatatttactatgttcagggcactgtgttaaacatt

SEQ ID NO: 3795 - DNA, 1167 bp, Homo sapiens
gtttttcatgtaattcagttagactcagagtgtaataaataaattattggtcaaagagcacagaaaacttcataagtcatttgggcacctatcagtttacagtatcaaaagtgtataaacaactcactttctaaaatacttagtagactacacagaagttactatatattttcttcacagattaacataggaatgtgctgcaataggcctctctattgtcatttagtctcatcattacttagccaaatcccagatcacatgccccaacccccaatttgatagtacttcagaccccccactgcaaacaaataaactaataaccgtttttatcttcactttgcagtgcagttgcagaaatcacttatcttttactagttcatttgttttctagagacaaaccacttaatgaaatttcagagaattttaaatagtcaactgttcagaattcatcatattaacaactagaccatttgaggtaggaaccacaaccatgttactgcatgggccctcctcaaatgccaaatcaatgaagactatcattgatgattgataaatatatatttgtttaattgatattacactgtacactgtagatttggccaaagggaacaatgaagtcaatgtcatctctcaaaataaaattattgtcctattttttcaaacatctcactttctcatttaatggaaattatcttaacatttatgtaatacacacctaattgaagaaaaacctagaaacaaatagtcataatttttacttgatatgtaagttaatcaacagaaccttagaaataagttatgaatcattttgatttgacagggtgatataattagattttggctataatgttgattaatgcagatggtttctggtagaactttattaattaaaaacaaacaaacttttaattaaatgaaatattttaggtccttattcatgttaggagaaagataaagatacaaaagataaaagtttctatacaaaccagaagtggacatttttgattaaaaatattttcaagaaagttataccaaatactctcactctctgcttttactgttgtcatttttaaaatgaagagccttagggaaagratgatgacatttaaataataaaactaatgtttattaaatatttactatgttcagggcactgtgttaaacatt

SEQ ID NO: 3796 - DNA, 1042 bp, Homo sapiens
atatctaactcctgccatttattctttccacttgaaccttagggcaatgtgaaagtgctttcgagttcacaggggaattcactggagacactgggataagatctgatctctgaaaggacaattaataggtaaaaaaggtccctatatttggaagtttaaattatgtctttatgggagatctagtagctttactggagacaaaggtcggacagtgtttccattaaaatggcattttgcagagcaaacatcgtcactgtaagaatttgctctgggctaaagttggcattaagattctagcccagaagctattttgtttgagagattcagtttggccattttagtttaatggttaaaggggatgaatagtatatatatcttactacttctttttccttttttttttagcgtaattatcaaattgtttttggcatggcatttgcaaatggataatctttttttctatacaactaagcacatgtttataaaaagaagaatttagaacaatgcacattttcagccttgaatgattctgtaaattgggttaagaaatttgagttcttgttatttttatttatttaaaaattttattagagatgtttctccatctagagtataattgactcaattttgacatctatttggaagccaaatatctttgtttatatagggtcttgagtctctagttttattctcttacggaaacatcttgtaaaaatgttgattttctaatggtggggacatattacagatrtttatgaattgcctgtattaagattgcttttctgttagtgatgacctagctgagggagaagcacactgaaggaaaacacaattgtaaacttctaagggaaaggcaacattaacaagttgtttcactatttacacatttacttttatttaggattttacattgtttaatagtacttgcaacaattgaaagctaaatgacactttaaaaaagctaaatgaggaaagagaacactagatgctaatgctctattattcaatgttcttcatacaattctgaattatattaccaatt

SEQ ID NO: 3797 - DNA, 986 bp, Homo sapiens
gcatatatactagtaagcttttctattattttgttaattattccaaaagtcttcaaactgttgaaaaaatatgactgtagtgcattatggcatattgtttggaatattagaamgttttagcatcagagacttagcttaattatttcttagatatagctttatatttcccagctttttacctcatcattacctatgtacccacactatacatttacaatttactttcctacccttgctgatttttgggtcaagtctctaaatgcttgcttttaggttgcactcaatgtaatacttaatcaaacaattttaggcttagtaacattgatgtagttatttgcccaggttcagtgagatcagggctgagcttagaagaaaaagaagcaactatcctgtcatacatgggatttccaagtctcccaacccccgacaaaaatacaaaaaaacatattgcttcaactttgcttgaaattgttatttcattttgcagcactccctgaaattctaccaattaagtcttcatttgaaatatagtaagtattccttttcaaaacaagcaagaaaaaaattcccaaatggtcgatatttttatggacttattttttttcaaatgtcttagatatatcagagagatagagtaggaatttgagagaacatggtgagaaaattttgggtcaagattttcagggaggtataggcttagggtgacatacagcactttgggttagaaatgagatgagagctcctgtccttccctcttccatcaaggaatttaattcatcaaagcactgaatgctgcaggttaatggccaaacacattattaggccgaagaggaatgtggagtaagtgtgggaaagactttagtcaaggacatagtccattatggctaatgatgaattaagtaaaattgagtttggaagtaatagccacccacaattttcacatagtagatctcaataaatatttactaaattaacaagtaaatgca

SEQ ID NO: 3798 - DNA, 1220 bp, Homo sapiens
tccctcactactttgataaaagccttaagatgttgccactagttctttgatgatttcctctgatgttatagtacctctctttctactcccaaaaaacctgttttgcataaacatgagaagtcaaggcagtttgagttaacgagtacaaagactcaagttttagcaacaaaagtacatgtatttgtgatcagctctctcacatattattgtcatctctctcaatgtaaggaaagtttattttagatttctgaagaatatgagtcattagctttaacagaagtccaaatatgctactcagctttataattttgacgtttattcagcaatttccccattgaattaaagagatttcttaatggaatttagagggagaagagtcatattgacctagatattgacttattctgattcattttcccgatcatccctgcctgactcctgaatcagtcctgcatactgttggattcaggcatggaagattttttaaaaaatgtttagttcaagtttccaaataattttgccacaattatggttaataaaaagtcattacagattattaattatgtccaaggttaagtttaatattcctgtagggataaactattaacaaattaatcgtgaattcaaatttgtccattttaattgcaaagttctactttcaactaaacacttaatattcagaattaaataacattagctcaacaactctgaacatactcatgatatgggatgttacctatctcatataacttctcttttygtcaatatctggtcaaaattatctacagtgtgtgttgccctgagcctacataacccatttagttgttttctcttcatatacaatgcaattcttctaacgcttatgctgtattatatgtattctaaagacaagaatgttcttccatggctctattctagaaaagagtgccattctactgactctcagtggtaactgtgggattgcatttatctcattgtgctagaaatgtcattttcacttttccatctatactctgtgaattgattatatagatgtctaaaatctaactgtgtcacctacattcacctgtttttttttctttaaaattaaggttactaggcaccacttccaccactgttttttccctgtcacacttgtgtttttctaatgcttgatttgtagctttgtatcagattgtcagcagaaggtgaacaattgtaggtttgcatattgtgtgaga

SEQ ID NO: 3799 - DNA, 766 bp, Homo sapiens
ctttcacttgtgtaatgtaaaagtgtgtggtttaatctccaaatattttgagggttttttttagctatctttttgttattgatttgtagcttaactcaattatctgagtgcagatattgtatgattttttaaaatttaatttgtatagtgtcttttatggttcagaatgtggtctatcttggtacatattccatgagagcttgagaaaaatgtgtatcctgttggtggtggtaaatagtctattatatattaaatatgtctgtctgattgatacttttgttgtctttaactatctccatactgattttctgcctgtcggattcaatcatttctggcagaagtgtactgaagtatccacctgtaatagtggactcatttctatctccttgccgttccctgtgtttttggatcatgtgttttgaccttctgtttttgggcatataaatattaaggattgttatgttttttagaatattgatctttttttaaatcatctaatggccctctttatccctaatcacttaccttgctgtgaggcctgctctgtctaaagttaacatagtaattcttgcttttycttgattactgttagcataataaatcttttcccatccacttacttttaattatttaatttttttttttaaatttaaagtttaaaaatggtaatgtgagagaggagtgtgaggctgaagggtgctggcctggcctagccctacttttaatttatatatgtgtcatttcatctaaagtagatttcttgtta

SEQ ID NO: 3800 - DNA, 766 bp, Homo sapiens
ctttcacttgtgtaatgtaaaagtgtgtggtttaatctccaaatattttgagggttttttttagctatctttttgttattgatttgtagcttaactcaattatctgagtgcagatattgtatgattttttaaaatttaatttgtatagtgtcttttatggttcagaatgtggtctatcttggtacatattccatgagagcttgagaaaaatgtgtatcctgttggtggtggtaaatagtctattatatattaaatatgtctgtctgattgatacttttgttgtctttaactatctccatactgattttctgcctgtcggattcaatcatttctggcagaagtgtactgaagtatccacctgtaatagtggactcatttctatctccttgccgttccctgtgtttttggatcatgtgttttgaccttctgtttttgggcatataaatattaaggattgttatgttttttagaatattgatctttttttaaatcatctaatggccctctttatccctaatcacttaccttgctgtgaggcctgctctgtctaaagttaacatagtaattcttgctttttcttgattactgttagcataataaatcttttcccatccayttacttttaattatttaatttttttttttaaatttaaagtttaaaaatggtaatgtgagagaggagtgtgaggctgaagggtgctggcctggcctagccctacttttaatttatatatgtgtcatttcatctaaagtagatttcttgtta

SEQ ID NO: 3801 - DNA, 562 bp, Homo sapiens
aaatattagccagattcaaatgatataaaccatgacctcattgattttaaacctgaatgcaagaataattgctcttaagaaaaccagcatatttcaactaaaaatggttattaaaggagattaataatacaataattttaatatatgcataataatatttgagaaaattaaaaatcgatttttaatgaaagcacttaaattaagaatagaaaataacttcctatactgataaaagawattcagcaaaacaacaacaaacaacttaatgacaaaatgttaaagtgtttcccttaggttctaacttagggagagaatggctctatcatgtatttcttttcagtattgtacggagttcctaaacaggattttaaaaattgtaagttatctagtgtattaagtttttaaaaaataagtataagaattggaaaagaagaaataagttgaaaagaataaacaaaactataattatgtgtacatgctctgatggaaagtctccaaaaagatctattaaaaaaaaactataagaattagtgagagtttgccaaagttggtgacaataaat

SEQ ID NO: 3802 - DNA, 562 bp, Homo sapiens
aaatattagccagattcaaatgatataaaccatgacctcattgattttaaacctgaatgcaagaataattgctcttaagaaaaccagcatatttcaactaaaaatggttattaaaggagattaataatacaataattttaatatatgcataataatatttgagaaaattaaaaatcgatttttaatgaaagcacttaaattaagaatagaaaataacttcctatactgataaaagatattcagcaaaacaacaacaaacaacttaatgacaaaatgttaaagtgtttcccttaggttctaacttagsgagagaatggctctatcatgtatttcttttcagtattgtacggagttcctaaacaggattttaaaaattgtaagttatctagtgtattaagtttttaaaaaataagtataagaattggaaaagaagaaataagttgaaaagaataaacaaaactataattatgtgtacatgctctgatggaaagtctccaaaaagatctattaaaaaaaaactataagaattagtgagagtttgccaaagttggtgacaataaat

SEQ ID NO: 3803 - DNA, 510 bp, Homo sapiens
tgccttcggataagcgtaaacactgttgcttgtactaggaaaaagtccaaatagagtaccaggagaactagtggtacaaatagtcctgacactatctcaagccttctggacttaaaaagatttgctctgaagccctgggcctcagtttctcaatctataaaatggggaaattgtgttctcaactcatgttctaaaatagtatgaatcaacaagaaaaagcaagtgtactaccggcatcttcttactttactaacacgaagcaaatatttattaactaatgttgattcagtagatgctacttcactgattcctaccatagataagaaacttctatagtcatttgagaaatttctttgagaaaatgtacaataaatgattttcaagatgacaaattgcagtgggaaatttccraaggggtaagtacaggccacaggttaaaaaattacagcaaatcaaattttataagaagtatcttatgtggaaaaatcatttgtgggaaagactctttcc

SEQ ID NO: 3804 - DNA, 1177 bp, Homo sapiens
ttaaggcatttgtaagttggtrgtgtggtacattatgtgtattttagtataagagttaaatactacagttacccttttcatggagtttagtctttgcagaagcagtttttcagcatttcatcttaaacgcttatcagtagcatttcataagtattcatcttaagtttgtacatacttagacaatcgttgatgtttagaaattttaatagtatcaaattttaatagtatcatagcatggtatcttgaaggacattttttactcaggattcccgtttactttatgaccgtctgtgtgtgtgagatggtaggtagagaagagcacagccacgtgaagaggtgtggggtggttaccagactccctcctgcattcaagccctgcgtaagcctcagtgccttcacagtgagcctggttcatgggcccgtgagtcactggtggattcggcccactgctcccgaggcagacttcacatacccaagggcttgtgtctcaacacagctgtgggtttgtgaatgtgccacggggaggcagaatgacaccagtgtgtgcatccctgccacagccatggggtgtagcccttgcccgtcttacagatacatcaaagttcaacttcacttgaccctagaggtttcaataagtatttttaattgattttacttgacctaggaaatatctgttctgggcttaagttatcttatcatcgtttgtaaaaacactttgcagtggtgctcttgctgaggcttgctcctgctggctctcaagagctgatggcgaatgtttgagaaattttgcaagttgttataccacagaaattggcaaactctacaacccacctccccatccccgacatcccccaccagagctagtcgttcaacattccccaatatgccacttcatgagtatatgttcttgctttttacccgtgcaaaaatctcttaaggacatggaattggctagtctcacttgtgggaaatcggaaaaattagaggtgtttagtgacttcttggtctcaccagtggtctttgttgctgcttaggagtggagtaggcttcctcacttcaacaccagtggttttcccgtcagatagtgccgaattttttatgaactatatggcagtagaaatgtccccatcacttcagacttaacaagtgctatactagatttgagggcttagggaaa

SEQ ID NO: 3805 - DNA, 1177 bp, Homo sapiens
ttaaggcatttgtaagttggtggtgtggtacattatgtgtattttagtataagagttaaatactacagttacccttttcatggagtttagtctttgcagaagcagtttttcagcatttcatcttaaacgcttatcagtagcatttcataagtattcatcttaagtttgtacatacttagacaatcgttgatgtttagaaattttaatagtatcaaattttaatagtatcatagcatggtatcttgaaggacattttttactcaggattcccgtttactttatgaccgtctgtgtgtgtgagatggtaggtagagaagagcacagccacgtgaagaggtgtggggtggttaccagactccctcctgcattcaagccctgcgtaagcctcagtgccttcacagtgagcctggttcatgggcccgtgagtcactggtggattcggcccactgctcccgaggcagacttcacatacccaagggcttgtgtctcaacacagctgtgggtttgtgaatgtgccacggggaggcagaatgacaccagtgtgtgcatccctgccacagccatggggtgtagcccttgcccgtcttacagatacatcaaagttcaacttcacttgaccctagaggtttcaataagtatttttaattgattttacttgacctaggaaatatctgttctgggcttaagttatcttatcatcgtttgtaaaaacactttgcagtggtgctcttgctgaggcttgctcctgctggctctcaagagctgatggcgaatgtttgagaaattttgcaagttgttataccacagaaattggcaaactctacaacccacctccccatccccgacatcccccaccagagctagtcgttcaacattccccaatatgccacttcatgagtatatgttcttgctttttacccgtgcaaaaatctcttaaggacatggaattggctagtctcacttgtgggaaatcggaaaaattagaggtgtttagtgacttcttggtctcaccagtggtctttgttgctgcttaggagtggagtaggcttcctcacttcaacaccrgtggttttcccgtcagatagtgccgaattttttatgaactatatggcagtagaaatgtccccatcacttcagacttaacaagtgctatactagatttgagggcttagggaaa

SEQ ID NO: 3806 - DNA, 1613 bp, Homo sapiens
caagatagatcaggagaaaggtggggagaacagagcagggtatccctggtgcagaaaggaaaggtattcacacacaaatagataaacatggaaagatgtctttttaagtaaatatacgtatttcagtagtactcaaggatggtagaatagtgagagaaaaagactgaaaatcactagtggtgagatcataggaatccttggatgtcatgcactgaagactgggggaggagagatgatgtttgaagggttctgctaagaggaatgacagcaacagttcctattttagaaaaatccttctctggtggatttattgagaaaggaatagaggcaaggagaccagtacagagatccaatagtgacaagggggataatgagaaagagagagacaggttccaaaaaatattaaaacaagacttggaaacaaagataatatgtatacgtgagcaayggggacatgtagaacatgccaagctccatgatagaagatggaagaggggcaggagtgaactattgagttcagctttgaacctgctatatttgaggaaactatgggacttctctgtggatacctccattagactgttaagtatataggtctagaactggagaaaaagaactgagtaggaaatggagatttgtaagtcagaagcctgtgtgtgaatggatattggaaccatgggtgtagatgagctcttccagggatagattgtaaagaaaggaaagagaaccaagccattgttcaaactagtggcatacacaggaacgcctctcccctgccatccctctttgaggtctgtctttggagggaaattttataactatctctactatttcctcactatctaggtttattcagttgtacaaataagttaataacatttatagatttagattaaaatatattaatacattgattgggtgcagtggctcatatctgtaatcccagcactttggaaggctgaggcaggaggagtgcttgaggccaggagtttgagaccagcttggacaacatagtgagatcccatctctacaaaattttaaaaattagcctggcatagtggcataagcctgtagtcccagctacttgggaggctgaggcaggaggattgcttaagcccaagagattgaggctgcagtgagctgtgactgcaccatagcacttcagcctgggcaacagagtgagaccttgtcttaaaaaaaagaatatattaatatattacaatataacacaataagcatgcaaatgatgaacatttatttctctgcttctgagaaaatgtcctatgaaaaggttgtaaaagtacttagtttaaaagcacctttaagaatagcagtgttattcacaatagtacaaaggtgaaaacaactgaaacccatcatgagatgaatggataaacacaatgtggtatatacagacaatgaacttattcagccttggaaaggaataacttacatgctacaacatggatgaaccttgaagatattgtgctaagtgaagtaaaccaggcacaaaaggacaaatacaggttgagcatccctaattcgaaaatctgaaatcttccaaaatctgtaagtggaaaattccacacttgacttcatgtgataagtcacag

SEQ ID NO: 3807 - DNA, 1613 bp, Homo sapiens
caagatagatcaggagaaaggtggggagaacagagcagggtatccctggtgcagaaaggaaaggtattcacacacaaatagataaacatggaaagatgtctttttaagtaaatatacgtatttcagtagtactcaaggatggtagaatagtgagagaaaaagactgaaaatcactagtggtgagatcataggaatccttggatgtcatgcactgaagactgggggaggagagatgatgtttgaagggttctgctaagaggaatgacagcaacagttcctattttagaaaaatccttctctggtggatttattgagaaaggaatagaggcaaggagaccagtacagagatccaatagtgacaagggggataatgagaaagagagagacaggttccaaaaaatattaaaacaagacttggaaacaaagataatatgtatacgtgagcaatggggacatgtagaacatgccaagctccatgatagaagatggaagaggggcaggagtgaactattgagttcagctttgaacctgctatatttgaggaaactatgggacttctctgtggatacctccattagactgttaagtatataggtctagaactggagaaaaagaactgagtaggaaatggagatttgtaagtcagaagcctgtgtgtgaatggatattggaaccatgggtgtagatgagctcttccagggatagattgtaaagaaaggaaagagaaccaagccattgttcaaactagtggcatacacaggaacgcctctcccctgccatccctctttgaggtctgtctttggagggaaattttataactatctctactatttcctcactatctaggtttattcagttgtacaaataagttaataacatttatagatttagattaaaatatattaatacattgattgggtgcagtggctcatatctgtaatcccagcactttggaaggctgaggcaggaggagtgcttgaggccaggagtttgagaccagcttggacaacatagtgagatcccatctctacaaaattttaaaaattagcctggcatagtggcataagcctgtagtcccagctacttgggaggctgaggcaggaggattgcttaagcccaagagattgaggctgcagtgagctgtgactgcaccatagcacttcagcctgggcaacagagtgagaccttgtcttaaaaaaaagaatayattaatatattacaatataacacaataagcatgcaaatgatgaacatttatttctctgcttctgagaaaatgtcctatgaaaaggttgtaaaagtacttagtttaaaagcacctttaagaatagcagtgttattcacaatagtacaaaggtgaaaacaactgaaacccatcatgagatgaatggataaacacaatgtggtatatacagacaatgaacttattcagccttggaaaggaataacttacatgctacaacatggatgaaccttgaagatattgtgctaagtgaagtaaaccaggcacaaaaggacaaatacaggttgagcatccctaattcgaaaatctgaaatcttccaaaatctgtaagtggaaaattccacacttgacttcatgtgataagtcacag

SEQ ID NO: 3808 - DNA, 665 bp, Homo sapiens
gagataacaaggggatcttacagctatttagtctaactatctaccaactaccaccatgctttcacctcagtacctgccatttataaagcacttaccgcacgctacgtactttgctaggcatttatatacaagaacttatttmtttctcccaaaaactttatgaagtagatattttcctcattttatagcagagcagcctgtggctcacagagctggttaattttcccaaacagttatgacatggccatagcctgttttcactcagatttgtgactgtaaagaccttgctcttaaccactgtgtaagagtgatacacacacattctgtgttatattcacaatgctaaccacatggcatggcagaagagctggcaccgctgaaaatgtgctagactagagtatctgacactgttccacagaaggcatgccgaatgtctaatagtaaaccagtggaaataaccaaagtgaaaatgtcatgataccacaaccatctccaactcaccattcaggaggcacgagttacagaggaaaaagtcccaaaacaaaggagtggtggccctggattctagacttgggactgaccaaaggaggccaagctggacacatggctctacaagggagcatcctcatttgagcctcacagcaggcatctgagcagatgctatt

SEQ ID NO: 3809 - DNA, 665 bp, Homo sapiens
gagataacaaggggatcttacagctatttagtctaactatctaccaactaccaccatgctttcacctcagtacctgccatttataaagcacttaccgcacgctacgtactttgctaggcatttatatacaagaacttatttctttctcccaaaaactttatgaagtagatattttcctcattttatagcagagcagcctgtggctcacagagctggttaattttcccaaacagttatgacatggccatagcctgttttcactcagatttgtgactgtaaagaccttgctcttaaccactgtgtaagagtgatacacacacattctgtgttatattcacaatgctaaccacatggcatggcagaagagctggcaccrctgaaaatgtgctagactagagtatctgacactgttccacagaaggcatgccgaatgtctaatagtaaaccagtggaaataaccaaagtgaaaatgtcatgataccacaaccatctccaactcaccattcaggaggcacgagttacagaggaaaaagtcccaaaacaaaggagtggtggccctggattctagacttgggactgaccaaaggaggccaagctggacacatggctctacaagggagcatcctcatttgagcctcacagcaggcatctgagcagatgctatt

SEQ ID NO: 3810 - DNA, 1293 bp, Homo sapiens
catgatttccatgtgaaataaaacattggtataaaagggatatggacaaatttgtggatgttagaaccacacctttttctctgaatttattttcttctcactcctacttggcatattccctgtcattgtttgagagtgtgcaccaatgtcctcgtctcagggacaccatttctttcccgctattagagtgtctggatgatgccgtacccttagtgcactgtcctgttgaaaatttggtacattagttattttaaggtttaaaaacattgctgcctacataatattccacctctttggagcatttgcattggagtgaccagtggcttgaagctctgtatggtggagtgactgatggtagttgaagactgcaaaagtaggtatctgagggctggaaggcattcctggcacccctaaaactaccccactgggggccatccaagcctgtgattaacaaaccctagttatttgctaggtagtttccacatggcatagtaggatatatatatgtgaggcacaatacagtgtttatgtgagaataatatagattatttgaatctaggctgcagaacctacctgaaaatgggttttacagttttgtgtaattgccttttctttgtgtttgcatagaaggcattgcatagctggaagatgatggcaattataatttattatgctgtaattgttacctaaatgtttttgaataagcaaaaatcacatctgtttaggaataagttgcacagcaagagaattccctttgaaatgaataccgtgttctcatattctgtaactgtacacataaaacaacatatttatttccccactgagtccattacattcccaagtcaaactgcatcctctcttcctttcccatattaaaccctttgatttaatggaggttttaactactggttctttagggaattttcagtaggctttgcacagattaggttattggaaagtatagttatttgcttgtaaagtggcagttctgtgtcaaaattgmttttctctggagctgcaacagtaaaaacgataagcttctgctttgcatccaaaatgccctgatgttcctagcatgatcgtttttcctttgcttcttgctcagcaccattcggtcacaggctggtttggacaggcgaatatgagcacatgtagcccagaggactttgatatccagtggtgataatagacaaggcctgtcttccattctggttgccactggtctgtgacaaccagtgttccgggcatggtgagcatagtgctgcttcccttctccgttaaataggaaatgca

SEQ ID NO: 3811 - DNA, 1293 bp, Homo sapiens
catgatttccatgtgaaataaaacattggtataaaagggatatggacaaatttgtggatgttagaaccacacctttttctctgaatttattttcttctcactcctacttggcatattccctgtcattgtttgagagtgtgcaccaatgtcctcgtctcagggacaccatttctttcccgctattagagtgtctggatgatgccgtacccttagtgcactgtcctgttgaaaatttggtacattagttattttaaggtttaaaaacattgctgcctacataatattccacctctttggagcatttgcattggagtgaccagtggcttgaagctctgtatggtggagtgactgatggtagttgaagactgcaaaagtaggtatctgagggctggaaggcattcctggcacccctaaaactaccccactgggggccatccaagcctgtgattaacaaaccctagttatttgctaggtagtttccacatggcatagtaggatatatatatgtgaggcacaatacagtgtttatgtgagaataatatagattatttgaatctaggctgcagaacctacctgaaaatgggttttacagttttgtgtaattgccttttctttgtgtttgcatagaaggcattgcatagctggaagatgatggcaattataatttattatgctgtaattgttacctaaatgtttttgaataagcaaaaatcacatctgtttaggaataagttgcacagcaagagaattccctttgaaatgaataccgtgttctcatattctgtaactgtacacataaaacaacatatttatttccccactgagtccattacattcccaagtcaaactgcatcctctcttcctttcccatattaaaccctttgatttaatggaggttttaactactggttctttagggaattttcagtaggctttgcacagattaggttattggaaagtatagttatttgcttgtaaagtggcagttctgtgtcaaaattgcttttctctggagctgcaacagtaaaaacgataagcttctgctttgcatccaaaatgccctgatgttcctagcatgatcgtttttcctttgcttcttgctcagcaccattcggtcacaggctggtttggacaggcgaatatgagcacatgtagcccagaggactttgatatccagtgktgataatagacaaggcctgtcttccattctggttgccactggtctgtgacaaccagtgttccgggcatggtgagcatagtgctgcttcccttctccgttaaataggaaatgca

SEQ ID NO: 3812 - DNA, 589 bp, Homo sapiens
aagggatgaggtgtgcctagaagctgtaatatctagaattttcgcaaaccttatttataaccatttgtttctgaaccctaacaattcttttctgaaactgttaactgaaagatctgaatctcactayttatttcacactcttcacatagaggtgctaatgagcagcagaataaccccaaaaatggtccttaatccaaacaccgagaagtcaagttataagtaattaagaatacactggatggaacatacctacatggcagctagcatctgtgctttccagaggttgctggggacggttagttcagttctcatttttgatcctctttggaaactcaggagttaaggtcagcatcctcagtacaaaggtacttgaacatgtatgaatctttgccttcttgaaaactttttatcttgggaataaggaacctgatacaaagagaatctctagtatttcattccatcgagagaagttttgacatttacaattctgctaatttcacacatcatttcgcagcatgcaggattttggcgcctgccaaggggactgcaaattctttttggaaaaagtacttttttgggtgttggaaga

SEQ ID NO: 3813 - DNA, 683 bp, Homo sapiens
attcgatatactgtcagctaacagtctttgattatcatatttacccttctgaaactgtgaaaaatcatgggcggagccgctgtgaacaatagcatgtgtaggcattttgtaaatgttgccttagttgtttaatgcccaggctgactgctggaatttaacacagtgacaactttctcagatggggcatgaaaaaaactgtgatattttactacctgagaagttaagcactgagatagttaggacccagctctcattagctgaatggtagatttttctaattagttctttctagtgcaattagcacgaaaagagtctaatcacctcatgtgaaaccaatctaatgctcagaaaagaattcccttggcytctctttcagattggatcttaggattttcagtctgcctccttaaagaatggaatctgttagtgactgattatttgaacggtaaggacagatctgtagaaaaggcaagaaatggacaacttattgacttgcagtgcaagtttggctggagaaggtgtttagaaatattcattaattggcagttatcacttcaactataggttctggttttcttgatttctttcattttgaaatgggagacttgggcccgggacagctatagttcagcatggctgcctctctggagggcatgaaacatactgcacattagaatcaaatg

SEQ ID NO: 3814 - DNA, 683 bp, Homo sapiens
attcgatatactgtcagctaacagtctttgattatcatatttacccttctgaaactgtgaaaaatcatgggcggagccgctgtgaacaatagcatgtgtaggcattttgtaaatgttgccttagttgtttaatgcccaggctgactgctggaatttaacacagtgacaactttctcagatggggcatgaaaaaaactgtgatattttactacctgagaagttaagcactgagatagttaggacccagctctcattagctgaatggtagatttttctaattagttctttctagtgcaattagcacgaaaagagtctaatcacctcatgtgaaaccaatctaatgctcagaaaagaattcccttggcctctctttcagattggatcttaggattttcagtctgcctccttaaagaatggaatctgttagtgactgattatttgaacggtaaggacagatctgtagaaaaggcaagaaatggacaacttattgacttgcagtgcaagtttggctggagaaggtgtttagaaatattcattaattggcagttatcacttcaactrtaggttctggttttcttgatttctttcattttgaaatgggagacttgggcccgggacagctatagttcagcatggctgcctctctggagggcatgaaacatactgcacattagaatcaaatg

SEQ ID NO: 3815 - DNA, 649 bp, Homo sapiens
cttttgtggttagcaattatttataaattgtgtattaataatatttgtaaatatcactcaatccaaaacatgttttaaccctcaggatcttagagtcatggaaaaaaagttttaaagaggcttaatttatactcattttttttgtgaagatcaataaaatgcttttaggaataaaatatattgcattgcaacaaaattttgtgagcaatatgaaatgaaaatatggtttcaagaaaagaggacaaacagaaaatttctaactattagcaaagtgcataccacagctttyggctggattattgtgagtatcaagctgcaatggaatcagatttcaatggataccaatagaagaattagctaaccgttttattttaaatgtgaatattttaatacaccagcgattacatttttatgacataggataaatttttaggcagtgacttaaaaaaatctgaggggtatacatatttgcaaaattcttttagagagtgtataagatttgaatatcacgtgcgtaatctttagactgcactatacttagtggcccctagatggagtctctcctcacatgttgccccagttccacaaggacaacttggaagggtggagagctctcatttgcattaactgctccacaaattattaaaaa

SEQ ID NO: 3816 - DNA, 1562 bp, Homo sapiens
tattacagttctatagtaagaattttcaatattcaaacagtaaacaataaactgaaaaaaagaatagatactctaacctgtaacactttatttatataattagacatctccaaattaatcaactaattttagttgcataaaataataaagctgctaaaattttgtatttttaatgtttttatcctctttgatctttttctatcttccttaagtacaacttttatatgccattaattgctcaaaaacataaagtagcccattatttctttataggcatgagagtctaaagctagaatagactggaaatcattgagttttatctgctaattttactcagaatcaactgaggcccatagaagtcattactgaagtctcataacctatcagaaattaaactgtgactggaatccaggtctcctgacataatgttcttcctgcttcaccatcttatacatttttaaactctttgtttttcaagatctctacgatgacacttcattattaaagttacttaaacttacttcctaactctcctcccaaaacaaatcttcactcaggatgactaccttctatcatacctactcttgtcatgaaaattatttccttaaattccttccacccaaactcaaagactgtcctcctttgtgaaatagactctgttttgccaactcacaatggtatttccagttttttaaaaaagtattctgtattacatgtacaaaactctgatagctaaggtgctagatggaaagactgttctcaagaagtttaaaatagagttggggagattaaacatgttcacataaattaggcaaaagattacgaatgttgcaagatggacacaatggacagtagaatcacaaagaagagaaagatcaattttagttaaggacatcaagtgaggcttaatatgtaggtggtatctgtatttaaagatggtaaaaattctagaaagaaggaaagacaatcgaagacaaaaacattgcacagaggcaagagtgggaaagtgcagatggaaagcagcaagtatcaaaattggcagcgcattagagtttgttaagcagtgtggtagactttgtcataaaaagtattaatttccaagagaagatgtttgggcttcattttctaagaaatgtgaacttgttgagagtatttgagcaaggcaattttctgatcagagttccgctttggaagaataagccagatggagtctatagaatgaatgaaaaaggacatagctcatgccaaatagactagttgggaaaggaatgctatagtggaaggaagagttaatgcgggcctggggtagagttggaagtggaaaataaaatatgggttcaaatgtgcaccaaaactagaatagagtcagtaggaattgatacctgattggatatggggaacagagagtggagaaacagttaagaggggtagctataaaaaaagaaagaagaaacagaaggacaaggaagtatttaagggaaaattcttacgatctttttgaagcatwctgagttctaaattaaattcacaacatatgtactataatatgtaccacaaatcaa

SEQ ID NO: 3817 - DNA, 1674 bp, Homo sapiens
attatccataactacaattttggaaatagatgttgatcatttgagaaagtgttttctaactgctcacaatacagaggcaatttcaacagtaggattgaatctgatgttactatacagtggctgccaaataattcattttaatttcttatctctggttatctcagtcatctcccagaaaattattttcttagattgcttatttaaaggtttacagaaaagatgcagcaaatgtatacaacataagtaacttgatgcttgatggtcgcaagtttcataattatagtaactttttcttcattgtattcttgttcagacatgctgaatctttttttgggacattamatttcatagattggctcatgttgtgttattgcaaatatcattttgatattttcatgcactgcagacaggatatagaggtaaagtaagtgccatattgcatacttgatttccaatttacctgaacctattaaaataactcttgagagtcattgttttaatccttatattgttttccaggtcacagatactctactcagcagtgaaattgtccttactagcttctacaagatactgattacatttcttgtgatgttttaataggtttatcctcagaagagctaaagttcaggtttttggaaatttttacagagtaacagtgtatgtatttccagtattttttcagtgattcctaataagcatggctcaagaggaacttccgattttcctccttctgctaagttactgtctatattatttaattatatttatatctattagatgatacatcaaaacaacagacctcttcaactttttattgttcaatcattccagcctctttcttggactcaattaaaagtaaagtcacgacaattcatgaaattttactagtcaaagccaattacttcctaatggtacctgccaagcacaacattacagttaatggggcctacattttcccactgaaaatagtataagtaaaataaactattataataaacaagatcccttgtttgaatcaattttagatgataacccttttccagcagttaggaaactggcatacctcattcacatagcatctaatactaaaccaagtgaagacagagggctgaatatttcagtttttgctctctatagaaatatcaattcccttgattcttatttcatatcactagcatgttatttgttattagatgatcattaggtaaatagcatatatgtggcaaccaaaaatgaacgtaaagatttctaaggacttgactacattgccagaggtctctctgcctaaaacactcttcccttagctttccaatgtctgctctctctttgttattcaggatgtggctccgtatgactttctcagagaggaaatttgggggcacactttctaagattgtttctctccattgagtcgctctctaatttatcatcctgctattattttctttatattatttatcaatacctaaatatttcttatttattgacttgtttgtttacttgtacgtgctcttctctatgccaactgaaagacaagttctaccagggaagaaaacttgtctctttgattcattgctgaatctctggttaacagaataatgcctaactcatgataaactcaataagtaaatacatgttcattcattcctctatcacccatctgttgaatga

SEQ ID NO: 3818 - DNA, 538 bp, Homo sapiens
ctttttcaaatatgacaatgctattttacccctacttctttctcatggctggatggaaatgaaggggaaagttatcttccttacccaaaaaatcacacaaagaacatcttggcaagggcaaataacttaaatgttttgttttcagtgttcttaatttagctattttccattaacttactattgtcataaaaaagtgctctgattaaataaactttatatacagcataccaaatacttttctgaagttatcgtttgggaatacagcagactaaaagaaaggaagagcatgggctgctgctcacaaagtggtgaacatgccaaagtataatttaaaaaaaaacccttttttcataggaatgaaaaccatttcagaaaccattaagccaaaatgtaggctacaaccataacttttatatcctaaktattagccttggtgaaatgatcgtgtgtataacatttaatatgctgtaaaatgggatttcaaataccgaacctataagcatctcttacattccatagattccgaagattaaaacca

SEQ ID NO: 3819 - DNA, 658 bp, Homo sapiens
aaatcacagactaatgtacaagagacattgataatttcatttttattctggagtcaggaactggactcaagtaaagaagaaccttactaggaagaaggaatgagtaaactaattgtataaacctgctttttagtgaacatatatatagattctcttgttggccagtgggtgtataaaatataaatacattatgatggtctaaaaatgtaggataaagagtgaaagagaacctatgtctaaacccagtggaaaacaaggaggctctccaagaaagaatctgggtagtttttgcaattaaaaacagtcaccattgtttctccacaatacggatgtgctctggagaaacaaacattcgatgtaaacaaaaaagagaatgatgcccattttattctggtataatttatacaagtagtttaagaatatctgtgatgtgttaagagtttgtggaaaaacatcaagtacaggaatatttctagtaagaaagctgattggcattaatgctcttttattttcatttcaaatagacaactgctgctaagccgggcatacaaaatatccctttgactttcagaaaaataataaatgtttatctgtaacaacttttcagatagtattattacaaaatatrgacacccaaaagcacattagctaattatat

SEQ ID NO: 3820 - DNA, 1895 bp, Homo sapiens
aaacatcagtaaacaggccaggtgtggtgactcatgcctgtaatcccagcactttgggaggctgaggtgggtggaacatgaggtcaagagatcgagaccatcctggccaacatggtgaaaccccgtctctactaaaaatacaaaaaattagccgggcatggtggggggcacctgtagtcccagctactcgggaggctgaggcaggagaatcacttgaacctgggagacgaatgttgcagtgagccgagattgcgccactgcgctccagcctggcgacagagcaggactccgtctcaaaaacaaacgaacaaacaaaaaaattagtcaacagcaaaagcaaaaatataacactatcagaaaatatgtttcgacatgagaaacaagtgaaaaaattggaaaggaaaatgaaaaattcttacaaattactgataattttctagagaattgaaaaaaatttgtcaattagcattattccctagcagattactttgttatccaaaaagtatctactgagatttgaatatgagttttcagccaagtggaatcacatttatatatcctcaaactccaaagccacatagatcacatgtttaaacgtgcatgtcataggactctgagtcatatgcagagaattgaaggtcataaaatttggtaaattgagcaaaataaaaaggtttttattggagttgtggaaattgactgaacagaagagacatggatgcataggaaaagtagtgtttagatgaattactaagctatmtaagaatacatttggtctcataaataaaagttaccatgggagaaatacttggaagttgaattagaactttatttttgtacttttgtttgcatgaaaactattcctaagttctacaaaatgcttatgtcaaactaagtgttcagtcaccctgaagaaataattgactccttgaattagtcccaagttagccacactgtcagcttgacatgatgaaatcattcagggatttgtgacccagagttggtgacagcagtaaaaaacagacctcttcctatattatggaaccatattgatttctggatgtcttatacattataactataagttatatgtcctgatagattatttagcatatttaaagcattaaactattgaaagtaagcattttagagtagtatcttgagaaatgtcaataccagtagcccccatttcatagcaactcagtccttataggagaaattgttactgaattattcttgttggaaaaacttattatcaggaaaggttatctctgggccagtgggatgaaggctaattctaagagaacaggaagataaacagaaggtctttctatattcctaattgaaaggcaggaagtagcagagtgacttttcctcttgatttttatcccagtaattacatgtttacagttgttcagctgttcgttaaagatgcagaaagttctcttgacctagatagcaaatatttctataacatcgaagatgaaaattaatactcaaacgaggttttacaaaaaaatctctccctgatttgtggggttttgcctacaaattacacctttctgcctggttttactcttttttttttgagaccgagtcttgctctgtcaaccaggctggagtgcagtggcgcgatctcggctcactgcaacgtccgcctcccgggttcacgccattctcctgcctcatcctcccaggcgcccgccaccacgcccggctaattttttttttttttttttttttgtatttttagtagagacgaggtttcaccgtgttagccaggatggtctcgatctcctgacctcgtgatccgcccgcctcggcctcccaaagtgctgggattacaggcttgagccacctgctcccggccctggttttacttttataaagtttat

SEQ ID NO: 3821 - DNA, 1895 bp, Homo sapiens
aaacatcagtaaacaggccaggtgtggtgactcatgcctgtaatcccagcactttgggaggctgaggtgggtggaacatgaggtcaagagatcgagaccatcctggccaacatggtgaaaccccgtctctactaaaaatacaaaaaattagccgggcatggtggggggcacctgtagtcccagctactcgggaggctgaggcaggagaatcacttgaacctgggagacgaatgttgcagtgagccgagattgcgccactgcgctccagcctggcgacagagcaggactccgtctcaaaaacaaacgaacaaacaaaaaaattagtcaacagcaaaagcaaaaatataacactatcagaaaatatgtttcgacatgagaaacaagtgaaaaaattggaaaggaaaatgaaaaattcttacaaattactgataattttctagagaattgaaaaaaatttgtcaattagcattattccctagcagattactttgttatccaaaaagtatctactgagatttgaatatgagttttcagccaagtggaatcacatttatatatcctcaaactccaaagccacatagatcacatgtttaaacgtgcatgtcataggactctgagtcatatgcagagaattgaaggtcataaaatttggtaaattgagcaaaataaaaaggtttttattggagttgtggaaattgactgaacagaagagacatggatgcataggaaaagtagtgtttagatgaattactaagctatctaagaatacatttggtctcataaataaaagttaccatgggagaaatacttggaagttgaattagaactttatttttgtacttttgtttgcatgaaaactattcctaagttctacaaaatgcttatgtcaaactaagtgttcagtcaccctgaagaaataattgactccttgaattagtcccaagttagccacactgtcagcttgacatgatgaaatcattcagggatttgtgacccagagttggtgacagcagtaaaaaacagacctcttcctatattatggaaccatattgatttctggatgtcttatacattataactataagttatatgtcctgatagattatttagcatatttaaagcattaaactattgaaagtaagcattttagagtagtatcttgagaaatgtcaataccagtagcccccatttcatagcaactcagtccttataggagaaattgttactgaattattcttgttggaaaaacttattatcaggaaaggttatctctgggccagtgggatgaaggctaattctaagagaacaggaagataaacagaaggtctttctatattcctaattgaaaggcaggaagtagcagartgacttttcctcttgatttttatcccagtaattacatgtttacagttgttcagctgttcgttaaagatgcagaaagttctcttgacctagatagcaaatatttctataacatcgaagatgaaaattaatactcaaacgaggttttacaaaaaaatctctccctgatttgtggggttttgcctacaaattacacctttctgcctggttttactcttttttttttgagaccgagtcttgctctgtcaaccaggctggagtgcagtggcgcgatctcggctcactgcaacgtccgcctcccgggttcacgccattctcctgcctcatcctcccaggcgcccgccaccacgcccggctaattttttttttttttttttttttgtatttttagtagagacgaggtttcaccgtgttagccaggatggtctcgatctcctgacctcgtgatccgcccgcctcggcctcccaaagtgctgggattacaggcttgagccacctgctcccggccctggttttacttttataaagtttat

SEQ ID NO: 3822 - DNA, 1895 bp, Homo sapiens
aaacatcagtaaacaggccaggtgtggtgactcatgcctgtaatcccagcactttgggaggctgaggtgggtggaacatgaggtcaagagatcgagaccatcctggccaacatggtgaaaccccgtctctactaaaaatacaaaaaattagccgggcatggtggggggcacctgtagtcccagctactcgggaggctgaggcaggagaatcacttgaacctgggagacgaatgttgcagtgagccgagattgcgccactgcgctccagcctggcgacagagcaggactccgtctcaaaaacaaacgaacaaacaaaaaaattagtcaacagcaaaagcaaaaatataacactatcagaaaatatgtttcgacatgagaaacaagtgaaaaaattggaaaggaaaatgaaaaattcttacaaattactgataattttctagagaattgaaaaaaatttgtcaattagcattattccctagcagattactttgttatccaaaaagtatctactgagatttgaatatgagttttcagccaagtggaatcacatttatatatcctcaaactccaaagccacatagatcacatgtttaaacgtgcatgtcataggactctgagtcatatgcagagaattgaaggtcataaaatttggtaaattgagcaaaataaaaaggtttttattggagttgtggaaattgactgaacagaagagacatggatgcataggaaaagtagtgtttagatgaattactaagctatctaagaatacatttggtctcataaataaaagttaccatgggagaaatacttggaagttgaattagaactttatttttgtacttttgtttgcatgaaaactattcctaagttctacaaaatgcttatgtcaaactaagtgttcagtcaccctgaagaaataattgactccttgaattagtcccaagttagccacactgtcagcttgacatgatgaaatcattcagggatttgtgacccagagttggtgacagcagtaaaaaacagacctcttcctatattatggaaccatattgatttctggatgtcttatacattataactataagttatatgtcctgatagattatttagcatatttaaagcattaaactattgaaagtaagcattttagagtagtatcttgagaaatgtcaataccagtagcccccatttcatagcaactcagtccttataggagaaattgttactgaattattcttgttggaaaaacttattatcaggaaaggttatctctgggccagtgggatgaaggctaattctaagagaacaggaagataaacagaaggtctttctatattcctaattgaaaggcaggaagtagcagagtgacttttcctcttgatttttatcccagtaattacatgtttacagttgttcagctgttcgttaaagatgcagaaagttctcttgacctagatagcaaatatttctataacatcgaagatgaaaattaatactcaaacgaggttttacaaaaaaatctctccctgatttgtgggrttttgcctacaaattacacctttctgcctggttttactcttttttttttgagaccgagtcttgctctgtcaaccaggctggagtgcagtggcgcgatctcggctcactgcaacgtccgcctcccgggttcacgccattctcctgcctcatcctcccaggcgcccgccaccacgcccggctaattttttttttttttttttttttgtatttttagtagagacgaggtttcaccgtgttagccaggatggtctcgatctcctgacctcgtgatccgcccgcctcggcctcccaaagtgctgggattacaggcttgagccacctgctcccggccctggttttacttttataaagtttat

SEQ ID NO: 3823 - DNA, 1895 bp, Homo sapiens
aaacatcagtaaacaggccaggtgtggtgactcatgcctgtaatcccagcactttgggaggctgaggtgggtggaacatgaggtcaagagatcgagaccatcctggccaacatggtgaaaccccgtctctactaaaaatacaaaaaattagccgggcatggtggggggcacctgtagtcccagctactcgggaggctgaggcaggagaatcacttgaacctgggagacgaatgttgcagtgagccgagattgcgccactgcgctccagcctggcgacagagcaggactccgtctcaaaaacaaacgaacaaacaaaaaaattagtcaacagcaaaagcaaaaatataacactatcagaaaatatgtttcgacatgagaaacaagtgaaaaaattggaaaggaaaatgaaaaattcttacaaattactgataattttctagagaattgaaaaaaatttgtcaattagcattattccctagcagattactttgttatccaaaaagtatctactgagatttgaatatgagttttcagccaagtggaatcacatttatatatcctcaaactccaaagccacatagatcacatgtttaaacgtgcatgtcataggactctgagtcatatgcagagaattgaaggtcataaaatttggtaaattgagcaaaataaaaaggtttttattggagttgtggaaattgactgaacagaagagacatggatgcataggaaaagtagtgtttagatgaattactaagctatctaagaatacatttggtctcataaataaaagttaccatgggagaaatacttggaagttgaattagaactttatttttgtacttttgtttgcatgaaaactattcctaagttctacaaaatgcttatgtcaaactaagtgttcagtcaccctgaagaaataattgactccttgaattagtcccaagttagccacactgtcagcttgacatgatgaaatcattcagggatttgtgacccagagttggtgacagcagtaaaaaacagacctcttcctatattatggaaccatattgatttctggatgtcttatacattataactataagttatatgtcctgatagattatttagcatatttaaagcattaaactattgaaagtaagcattttagagtagtatcttgagaaatgtcaataccagtagcccccatttcatagcaactcagtccttataggagaaattgttactgaattattcttgttggaaaaacttattatcaggaaaggttatctctgggccagtgggatgaaggctaattctaagagaacaggaagataaacagaaggtctttctatattcctaattgaaaggcaggaagtagcagagtgacttttcctcttgatttttatcccagtaattacatgtttacagttgttcagctgttcgttaaagatgcagaaagttctcttgacctagatagcaaatatttctataacatcgaagatgaaaattaatactcaaacgaggttttacaaaaaaatctctccctgatttgtggggttttgcctacaaattacacctttctgcctggttttactcttttttttttgagacsgagtcttgctctgtcaaccaggctggagtgcagtggcgcgatctcggctcactgcaacgtccgcctcccgggttcacgccattctcctgcctcatcctcccaggcgcccgccaccacgcccggctaattttttttttttttttttttttgtatttttagtagagacgaggtttcaccgtgttagccaggatggtctcgatctcctgacctcgtgatccgcccgcctcggcctcccaaagtgctgggattacaggcttgagccacctgctcccggccctggttttacttttataaagtttat

SEQ ID NO: 3824 - DNA, 1895 bp, Homo sapiens
aaacatcagtaaacaggccaggtgtggtgactcatgcctgtaatcccagcactttgggaggctgaggtgggtggaacatgaggtcaagagatcgagaccatcctggccaacatggtgaaaccccgtctctactaaaaatacaaaaaattagccgggcatggtggggggcacctgtagtcccagctactcgggaggctgaggcaggagaatcacttgaacctgggagacgaatgttgcagtgagccgagattgcgccactgcgctccagcctggcgacagagcaggactccgtctcaaaaacaaacgaacaaacaaaaaaattagtcaacagcaaaagcaaaaatataacactatcagaaaatatgtttcgacatgagaaacaagtgaaaaaattggaaaggaaaatgaaaaattcttacaaattactgataattttctagagaattgaaaaaaatttgtcaattagcattattccctagcagattactttgttatccaaaaagtatctactgagatttgaatatgagttttcagccaagtggaatcacatttatatatcctcaaactccaaagccacatagatcacatgtttaaacgtgcatgtcataggactctgagtcatatgcagagaattgaaggtcataaaatttggtaaattgagcaaaataaaaaggtttttattggagttgtggaaattgactgaacagaagagacatggatgcataggaaaagtagtgtttagatgaattactaagctatctaagaatacatttggtctcataaataaaagttaccatgggagaaatacttggaagttgaattagaactttatttttgtacttttgtttgcatgaaaactattcctaagttctacaaaatgcttatgtcaaactaagtgttcagtcaccctgaagaaataattgactccttgaattagtcccaagttagccacactgtcagcttgacatgatgaaatcattcagggatttgtgacccagagttggtgacagcagtaaaaaacagacctcttcctatattatggaaccatattgatttctggatgtcttatacattataactataagttatatgtcctgatagattatttagcatatttaaagcattaaactattgaaagtaagcattttagagtagtatcttgagaaatgtcaataccagtagcccccatttcatagcaactcagtccttataggagaaattgttactgaattattcttgttggaaaaacttattatcaggaaaggttatctctgggccagtgggatgaaggctaattctaagagaacaggaagataaacagaaggtctttctatattcctaattgaaaggcaggaagtagcagagtgacttttcctcttgatttttatcccagtaattacatgtttacagttgttcagctgttcgttaaagatgcagaaagttctcttgacctagatagcaaatatttctataacatcgaagatgaaaattaatactcaaacgaggttttacaaaaaaatctctccctgatttgtggggttttgcctacaaattacacctttctgcctggttttactcttttttttttgagaccgagtcttgctctgtcamccaggctggagtgcagtggcgcgatctcggctcactgcaacgtccgcctcccgggttcacgccattctcctgcctcatcctcccaggcgcccgccaccacgcccggctaattttttttttttttttttttttgtatttttagtagagacgaggtttcaccgtgttagccaggatggtctcgatctcctgacctcgtgatccgcccgcctcggcctcccaaagtgctgggattacaggcttgagccacctgctcccggccctggttttacttttataaagtttat

SEQ ID NO: 3825 - DNA, 1895 bp, Homo sapiens
aaacatcagtaaacaggccaggtgtggtgactcatgcctgtaatcccagcactttgggaggctgaggtgggtggaacatgaggtcaagagatcgagaccatcctggccaacatggtgaaaccccgtctctactaaaaatacaaaaaattagccgggcatggtggggggcacctgtagtcccagctactcgggaggctgaggcaggagaatcacttgaacctgggagacgaatgttgcagtgagccgagattgcgccactgcgctccagcctggcgacagagcaggactccgtctcaaaaacaaacgaacaaacaaaaaaattagtcaacagcaaaagcaaaaatataacactatcagaaaatatgtttcgacatgagaaacaagtgaaaaaattggaaaggaaaatgaaaaattcttacaaattactgataattttctagagaattgaaaaaaatttgtcaattagcattattccctagcagattactttgttatccaaaaagtatctactgagatttgaatatgagttttcagccaagtggaatcacatttatatatcctcaaactccaaagccacatagatcacatgtttaaacgtgcatgtcataggactctgagtcatatgcagagaattgaaggtcataaaatttggtaaattgagcaaaataaaaaggtttttattggagttgtggaaattgactgaacagaagagacatggatgcataggaaaagtagtgtttagatgaattactaagctatctaagaatacatttggtctcataaataaaagttaccatgggagaaatacttggaagttgaattagaactttatttttgtacttttgtttgcatgaaaactattcctaagttctacaaaatgcttatgtcaaactaagtgttcagtcaccctgaagaaataattgactccttgaattagtcccaagttagccacactgtcagcttgacatgatgaaatcattcagggatttgtgacccagagttggtgacagcagtaaaaaacagacctcttcctatattatggaaccatattgatttctggatgtcttatacattataactataagttatatgtcctgatagattatttagcatatttaaagcattaaactattgaaagtaagcattttagagtagtatcttgagaaatgtcaataccagtagcccccatttcatagcaactcagtccttataggagaaattgttactgaattattcttgttggaaaaacttattatcaggaaaggttatctctgggccagtgggatgaaggctaattctaagagaacaggaagataaacagaaggtctttctatattcctaattgaaaggcaggaagtagcagagtgacttttcctcttgatttttatcccagtaattacatgtttacagttgttcagctgttcgttaaagatgcagaaagttctcttgacctagatagcaaatatttctataacatcgaagatgaaaattaatactcaaacgaggttttacaaaaaaatctctccctgatttgtggggttttgcctacaaattacacctttctgcctggttttactcttttttttttgagaccgagtcttgctctgtcaaccaggctggagtgcagtggcgcgatctcggctcactgcaacgtccgcctcccgggttcacgccattctcctgcctcatcctcccaggcgccmgccaccacgcccggctaattttttttttttttttttttttgtatttttagtagagacgaggtttcaccgtgttagccaggatggtctcgatctcctgacctcgtgatccgcccgcctcggcctcccaaagtgctgggattacaggcttgagccacctgctcccggccctggttttacttttataaagtttat

SEQ ID NO: 3826 - DNA, 1895 bp, Homo sapiens
aaacatcagtaaacaggccaggtgtggtgactcatgcctgtaatcccagcactttgggaggctgaggtgggtggaacatgaggtcaagagatcgagaccatcctggccaacatggtgaaaccccgtctctactaaaaatacaaaaaattagccgggcatggtggggggcacctgtagtcccagctactcgggaggctgaggcaggagaatcacttgaacctgggagacgaatgttgcagtgagccgagattgcgccactgcgctccagcctggcgacagagcaggactccgtctcaaaaacaaacgaacaaacaaaaaaattagtcaacagcaaaagcaaaaatataacactatcagaaaatatgtttcgacatgagaaacaagtgaaaaaattggaaaggaaaatgaaaaattcttacaaattactgataattttctagagaattgaaaaaaatttgtcaattagcattattccctagcagattactttgttatccaaaaagtatctactgagatttgaatatgagttttcagccaagtggaatcacatttatatatcctcaaactccaaagccacatagatcacatgtttaaacgtgcatgtcataggactctgagtcatatgcagagaattgaaggtcataaaatttggtaaattgagcaaaataaaaaggtttttattggagttgtggaaattgactgaacagaagagacatggatgcataggaaaagtagtgtttagatgaattactaagctatctaagaatacatttggtctcataaataaaagttaccatgggagaaatacttggaagttgaattagaactttatttttgtacttttgtttgcatgaaaactattcctaagttctacaaaatgcttatgtcaaactaagtgttcagtcaccctgaagaaataattgactccttgaattagtcccaagttagccacactgtcagcttgacatgatgaaatcattcagggatttgtgacccagagttggtgacagcagtaaaaaacagacctcttcctatattatggaaccatattgatttctggatgtcttatacattataactataagttatatgtcctgatagattatttagcatatttaaagcattaaactattgaaagtaagcattttagagtagtatcttgagaaatgtcaataccagtagcccccatttcatagcaactcagtccttataggagaaattgttactgaattattcttgttggaaaaacttattatcaggaaaggttatctctgggccagtgggatgaaggctaattctaagagaacaggaagataaacagaaggtctttctatattcctaattgaaaggcaggaagtagcagagtgacttttcctcttgatttttatcccagtaattacatgtttacagttgttcagctgttcgttaaagatgcagaaagttctcttgacctagatagcaaatatttctataacatcgaagatgaaaattaatactcaaacgaggttttacaaaaaaatctctccctgatttgtggggttttgcctacaaattacacctttctgcctggttttactcttttttttttgagaccgagtcttgctctgtcaaccaggctggagtgcagtggcgcgatctcggctcactgcaacgtccgcctcccgggttcacgccattctcctgcctcatcctcccaggcgcccgccaccacgcccggctaattttttttttttttttttttttgtatttttagtagagacgaggtttcaccgtgttagccaggatggtctcgatctcctgacctcgtgatccgcccgcctcggcctcccaaagtgctgggattacaggyttgagccacctgctcccggccctggttttacttttataaagtttat

SEQ ID NO: 3827 - DNA, 1302 bp, Homo sapiens
cccttccttcctcaagatatacatgagagatgttcttcagggactgctgagacaccatgaccatttgatctgatccttaagcttaatattaaatctatttatggataggtttataaacactgaattgtatagtcaccagggaagacaaaagacggctatacataacttaagtagtagaatcagagtttcacagttcagaatcctataactaattttaaaacagagtaaagggacttactcttccagccaagatgggataagatagaccagctttatcctcttccacttgaagcaacaaaatattcgaaataattttgacactgcacatcaggtaatgaaggacagtaatctctgagagatggaaaacaaatgagacaagccctacaattactctaggatattgccttgagagagtttccaggatatagcacagggagaaacccaagcagagttcaggtgattctgtgagttgtgaagagtcctagggagttgagagtcctaggagaccgaggcagctagagtttctagaatggtctactgaaaataagaaagccatagagggaaaactccagaggcctgcaaaaggtcccctttgaatactcagctgagtacaaatcagcacacatgtatatgagaaaactacatgagactagataaggtmctgtccaaaaggcttagagattacagtggccagcagtcacacagagaagtattaatattgtacctgttcccatcagccatactggagcattcaagattcacagacatttaatagagtacacagagaagggtcttacctcaataatggagaataatttgccttagactaaatactagtgctctagtcccatgtaacaaatcttaaaagtaagacccaaaaacttcagattgtctccaggtttcttaactacatcccagaacacagttcaggaatatttatagcaatccatagttatgtagaacccaccaaggtaaaattcaccatgtctagcatccaaaaaaaattacagccatgcaaagcagcaagaaaataggacccacagtgaggagataaatcagccaacaatgaccaaccctgaactgacacagaaacagggacattaaaatagagataataccagtttgggaaaattacttaagctaaacttttacacagtttatattctttccttatatgtgttatgcttcaatacagttttattatttaaaaaaatcaaaactgtataaaaagctaagtagaaataggaagatattttaaaatacccaaatctatcttctaaagacagatactataatgtgtga

SEQ ID NO: 3828 - DNA, 417 bp, Homo sapiens
ctaaaaatacaaaaattagccgggcgtggtggcaggcacctttaaccccagctactcaggaggctgaggcaggagaatcgcttgaacctgggaggtggaggttgcagtgagccgagatcatgccactgcactccagcctgggcgacagagcgagactccatctcaaaaaaaaaacaacaacagtctcgaggaggccagaggagcatgttttgttccccccacctttggaaagaaaaaaacattgtacaagtggaaaatcttcactaatgcaacataaaacttggcgattttcatcacaccaggtcaggtaatcccaggctgtgcttcttgaggcagtggaagctgatttyctttgctcacttatcacctgtgcctctcaatggcatgtctgtaacaggaggcagaggcctccttccc

SEQ ID NO: 3829 - DNA, 619 bp, Homo sapiens
gggtgctgcatcggcccgccccccgcagccacccgccgcagcagtggtcaccgagtcrgggtgtggggaggtggaaatgaaatgcataattcataggccgctgtggtgtccagtctgtgggaggggtggtaattacagaactgagaaatgaggctgcagcgggcaagtcacctctaggttagaggctgctatgatagatggcctgcattgttctctttctgacctttttctgaacttccccttagaagaacagaggaaatatggtgctgccttttcccatattgtttttgaataataccttcagacgccagcttttagagtttctgttcttccgtttggggttttgcttccccctccacccgcccaatgccttgcttctttccatagaaaaatcgaatcactaatgactttatcctagtattaatggtaaatacagactacacaaatatttgtccacactgaacacaatacatacggggaaaggaaaaaaaaaacccgcagcaccctctccctccttctgctccgccctccactgccaagcaagacaatcccaagagccgtcctccgtcctccgtaatgatgcagacggggctgatgagaagggtggggggcgttgctc

SEQ ID NO: 3830 - DNA, 661 bp, Homo sapiens
ttcacatttcaccattgaaatccttattatcagagaagaactaaaagagccacttatttccttaaaagtaaataaacagtaagaaatcccagttttcacttcttcttcacacaatcagctactcagttcagcaaacatctgtgtattgggtatttactgttcttagcacagtgcttggcggtaggaaagaagataatgaaaccacagcttcttccagctcatgagtgtgaacaatgacacccaatgtctgcagacaccgaccctctyaccccagtagacaaggctgtacgctgggtgctgtgaggtgtacagagatcagtcatgcacaggccatggcctcgggatgcttccagtctaggagctgattatagatgattcttatttaaaaaaaaaaaaaaaaactatcagtgcaaggatgagtgaaagagctgaattggcagtagagacatagttagcgttgtaggaatagagcacaggagggagcctcagtcagcagggagtgctagagcaggtaaggtttgagtagaaagcttcaaaggctttccatgagagccaggccagacatgctttccacagggccactgacagaggtgcggaggggaagcctgggtgtgctcagggagagtctgggaccaccaagagtctcaggtgctgcctcacc

SEQ ID NO: 3831 - DNA, 661 bp, Homo sapiens
ttcacatttcaccattgaaatccttattatcagagaagaactaaaagagccacttatttccttaaaagtaaataaacagtaagaaatcccagttttcacttcttcttcacacaatcagctactcagttcagcaaacatctgtgtattgggtatttactgttcttagcacagtgcttggcggtaggaaagaagataatgaaaccacagcttcttccagctcatgagtgtgaacaatgacacccaatgtctgcagacaccgaccctctcaccccagtagacaaggctgtacgctgggtgctgtgaggtgtacagagatcagtcatgcacaggccatggcctcgggatgcttccagtctaggagctgattatagatgattcttatttaaaaaaaaaaaaaaaaactatcagtgcaaggaygagtgaaagagctgaattggcagtagagacatagttagcgttgtaggaatagagcacaggagggagcctcagtcagcagggagtgctagagcaggtaaggtttgagtagaaagcttcaaaggctttccatgagagccaggccagacatgctttccacagggccactgacagaggtgcggaggggaagcctgggtgtgctcagggagagtctgggaccaccaagagtctcaggtgctgcctcacc

SEQ ID NO: 3832 - DNA, 580 bp, Homo sapiens
acactggttgtaggaaggaatctacaggttgaaataaggagatcatttccctgaggttccgaagctcatatttactcaccatttgttgtttactgctaatattgagcactatcagtaaaatacataaaaccctttgccaatccaggaagtgaaaatgacactttactgttttagtttgcatttctctgcttacaaatggattacacgcattttcatgtgctgttggctacttattcattcagaaaacatactaagtgctggctctttttcatgtcctttatcaagtttggatcatgtcatttgctgttttctttctgatgtaaactctcaaagtttgaagggtattgtcttttcctgacacataygttgtaaataattttctggcttacattttgacttttaatttcattcacgatgtttttaatgaataattttaatttttatgaatgcaagttaaaataattctttcattgtggtttctgacatgtcatgccaataagggtcttctcctccaagagcacagaaatatttgccaatactgtccttaaaatcggtcacagtttcattttttatatatgca

SEQ ID NO: 3833 - DNA, 580 bp, Homo sapiens
acactggttgtaggaaggaatctacaggttgaaataaggagatcatttccctgaggttccgaagctcatatttactcaccatttgttgtttactgctaatattgagcactatcagtaaaatacataaaaccctttgccaatccaggaagtgaaaatgacactttactgttttagtttgcatttctctgcttacaaatggattacacgcattttcatgtgctgttggctacttattcattcagaaaacatactaagtgctggctctttttcatgtcctttatcaagtttggatcatgtcatttgctgttttctttctgatgtaaactctcaaagtttgaagggtattgtcttttcctgacacatacgttgtaaataattttctggcttacattttgacttttaatttcattcacgatgtttttaatgaataattttaatttttatgaatgcaagttaaaataattctttcattgtggtttctgacaygtcatgccaataagggtcttctcctccaagagcacagaaatatttgccaatactgtccttaaaatcggtcacagtttcattttttatatatgca

SEQ ID NO: 3834 - DNA, 1625 bp, Homo sapiens
tgcatcctgcccctgggactcctctgccagagcctgagagctttctcctgcccacaggctaggggtagggcagttggaattgatccatgccttctagctagactgtgggtcccctcagtcttgggcatggtgacagcccagcatcagacagasgtcagtatcaaactagaaaatttaataaatactgtcagatttgtagacccaagaaaatataaactgccaatcacggaggaaaaaaatctctcaatgatcttatctttatatgattcccttgctgcctggagattgacatttccttggggataatctggtcataggattggtgaaggtggaagggaggcaacctccaaaggtggggccctctgctcacctgggacagggagggcctgaggtaggtgtctgtgtgggctggggaggaggatgggagcagtgcttctagatgtttccactttctcctcattagataataacgaatgggtgatttccctagtcactgcagtgtgaggaaatctacaaaattaatttcacaatacgctttacaggataggtggagaaacacatgaagtacaactgcagtgggttataaaaaacggcctttcgagttgagcaataaattcgttcaagcagccattctgaaggacaaactggctctgtatttaagaggggcattccagcacttctctagccactgggttgacaatgactcaccaaagcctctggtagccaccacaggacacccagagcatatgttttaaagctgaacaccaaactgcggacttcgggagtaagtgaactgactggtttttattttgttttactgcttttaacattacagtaactgttacaggttccagcaggctaactgggtggaaatgagtttggtttcacttagtctctctaaagagaaagcaagtcggtagactaatacctaataaaagcaaagctgccaacaattgaaattgcctaggctgctctgtgtgtcccacatgcatgggtgtgggtgccagtgtgtgtgcgtgtgtgcatgcatgtgcatgtgtgttgggatagagtggtaagaaaatgggaaataataagaatgttcagtccatagcccttcattataaaaaggtgagctgtaataaatactagtgccacatttagccaaaactttactccagccaaaggtgatattttcatgataacatcctgtgattgctttgttcttcgtcttttatgttcttcctagatgggctcagaacatacaagaattaagtacacatcttattttccagtgataatgctaccggcaaattctgttgtttgtataaacatcagccatgtttatataactaaactagtgttttgttttgtcaattcagcaagaaattagaccaaatggtggcttaatgctgcattgatttggctatcaatttgttttcacttttctgcaaaataattaatacattattaaattgaattgtgctgatgccacagttgttcttatctcaagtgtcttaaaattcatttaatttgtttttcctttggtttcattattcaaattttaacttcagttctcaagattttatctgatggaagagatggagtccattactaaggactccattgtgctccatcatgccaga

SEQ ID NO: 3835 - DNA, 1625 bp, Homo sapiens
tgcatcctgcccctgggactcctctgccagagcctgagagctttctcctgcccacaggctaggggtagggcagttggaattgatccatgccttctagctagactgtgggtcccctcagtcttgggcatggtgacagcccagcatcagacagaggtcagtatcaaactagaaaatttaataaatactgtcagatttgtagacccaagaaaatataaactgccaatcacggaggaaaaaaatctctcaatgatcttatctttatatgattcccttgctgcctggagattgacatttccttggggataatctggtcataggattggtgaaggtggaagggaggcaacctccaaaggtggggccctctgctcacctgggacagggagggcctgaggtaggtgtctgtgtgggctggggaggaggatgggagcagtgcttctagatgtttccactttctcctcattagataataacgaatgggtgatttccctagtcactgcagtgtgaggaaatctacaaaattaatttcacaatacrctttacaggataggtggagaaacacatgaagtacaactgcagtgggttataaaaaacggcctttcgagttgagcaataaattcgttcaagcagccattctgaaggacaaactggctctgtatttaagaggggcattccagcacttctctagccactgggttgacaatgactcaccaaagcctctggtagccaccacaggacacccagagcatatgttttaaagctgaacaccaaactgcggacttcgggagtaagtgaactgactggtttttattttgttttactgcttttaacattacagtaactgttacaggttccagcaggctaactgggtggaaatgagtttggtttcacttagtctctctaaagagaaagcaagtcggtagactaatacctaataaaagcaaagctgccaacaattgaaattgcctaggctgctctgtgtgtcccacatgcatgggtgtgggtgccagtgtgtgtgcgtgtgtgcatgcatgtgcatgtgtgttgggatagagtggtaagaaaatgggaaataataagaatgttcagtccatagcccttcattataaaaaggtgagctgtaataaatactagtgccacatttagccaaaactttactccagccaaaggtgatattttcatgataacatcctgtgattgctttgttcttcgtcttttatgttcttcctagatgggctcagaacatacaagaattaagtacacatcttattttccagtgataatgctaccggcaaattctgttgtttgtataaacatcagccatgtttatataactaaactagtgttttgttttgtcaattcagcaagaaattagaccaaatggtggcttaatgctgcattgatttggctatcaatttgttttcacttttctgcaaaataattaatacattattaaattgaattgtgctgatgccacagttgttcttatctcaagtgtcttaaaattcatttaatttgtttttcctttggtttcattattcaaattttaacttcagttctcaagattttatctgatggaagagatggagtccattactaaggactccattgtgctccatcatgccaga

SEQ ID NO: 3836 - DNA, 1625 bp, Homo sapiens
tgcatcctgcccctgggactcctctgccagagcctgagagctttctcctgcccacaggctaggggtagggcagttggaattgatccatgccttctagctagactgtgggtcccctcagtcttgggcatggtgacagcccagcatcagacagaggtcagtatcaaactagaaaatttaataaatactgtcagatttgtagacccaagaaaatataaactgccaatcacggaggaaaaaaatctctcaatgatcttatctttatatgattcccttgctgcctggagattgacatttccttggggataatctggtcataggattggtgaaggtggaagggaggcaacctccaaaggtggggccctctgctcacctgggacagggagggcctgaggtaggtgtctgtgtgggctggggaggaggatgggagcagtgcttctagatgtttccactttctcctcattagataataacgaatgggtgatttccctagtcactgcagtgtgaggaaatctacaaaattaatttcacaatacgctttacaggataggtggagaaacacatgaagyacaactgcagtgggttataaaaaacggcctttcgagttgagcaataaattcgttcaagcagccattctgaaggacaaactggctctgtatttaagaggggcattccagcacttctctagccactgggttgacaatgactcaccaaagcctctggtagccaccacaggacacccagagcatatgttttaaagctgaacaccaaactgcggacttcgggagtaagtgaactgactggtttttattttgttttactgcttttaacattacagtaactgttacaggttccagcaggctaactgggtggaaatgagtttggtttcacttagtctctctaaagagaaagcaagtcggtagactaatacctaataaaagcaaagctgccaacaattgaaattgcctaggctgctctgtgtgtcccacatgcatgggtgtgggtgccagtgtgtgtgcgtgtgtgcatgcatgtgcatgtgtgttgggatagagtggtaagaaaatgggaaataataagaatgttcagtccatagcccttcattataaaaaggtgagctgtaataaatactagtgccacatttagccaaaactttactccagccaaaggtgatattttcatgataacatcctgtgattgctttgttcttcgtcttttatgttcttcctagatgggctcagaacatacaagaattaagtacacatcttattttccagtgataatgctaccggcaaattctgttgtttgtataaacatcagccatgtttatataactaaactagtgttttgttttgtcaattcagcaagaaattagaccaaatggtggcttaatgctgcattgatttggctatcaatttgttttcacttttctgcaaaataattaatacattattaaattgaattgtgctgatgccacagttgttcttatctcaagtgtcttaaaattcatttaatttgtttttcctttggtttcattattcaaattttaacttcagttctcaagattttatctgatggaagagatggagtccattactaaggactccattgtgctccatcatgccaga

SEQ ID NO: 3837 - DNA, 630 bp, Homo sapiens
catttctctctgctagcttttgctgtctttctcatgcctttgattttcccagctcctcttagttgaattaacctaagtgctctgctatggtttaaatgtgtcccccaaagtttatgtgctggaaactcaatcctcaatgcaacagttgggatgtggggcctaataaaatagccttcatgaatgagttaatgttgttattgtggtaatagattagtaatcacagagtgggcttattataaaacagagttcagccccttttgccctcttgctttcttgcactctcttttccttctgccttctgtagtgggatgatgcagcaagaagaccyttaccagatgcaggcccctcaaccttggacttcctaacatccagaactgttaagaaataaaatttattcctttcctttccttttcttcctcctttcccttctcttcccttttcttcccttcccctccctccctctctctctccctccctccctccttccctcccttcctccttccctctttctctctttcccttccttcctttccttctttcccttccttcctttccttccctccttccctttttccctccttccctcctcccttccttttttctttccttccttttttcctttttataaat

SEQ ID NO: 3838 - DNA, 590 bp, Homo sapiens
aaagaaaaatcactaagcaaaataagacatgtgaaggatcatgtcaaaggaaagaaaaattaggggaacattaaaagctttcttcccaagccactaaatcaacttgactaacaaaattaccacttgatttagtattagaaaattacattacatatcaaacataaacccattaatcaaatactaaagaaatttctgagttaaatggtataatgttagcttatgccagagctgaccttgaaagattgttcaaatatggctcagtgtgattgaaagttctgtgtgaatatgtttttggaaagatccaacagcaacaccttagtgtatgtttttgaaataaaatrtatctgagtagcagcaaagttattctcaaatttccattttatagctggagatgttataccgtgacgtacatgataggacccaatatggatcaatcccttttagaagtcaatcaggaagaggggagcagttaaaacagttgcttggtttacaaacattagaacaattttcttattcacaccatctgattattgtatgttattttttccccaacgtttagactacacaatgagttaagaatgataaaaata

SEQ ID NO: 3839 - DNA, 590 bp, Homo sapiens
aaagaaaaatcactaagcaaaataagacatgtgaaggatcatgtcaaaggaaagaaaaattaggggaacattaaaagctttcttcccaagccactaaatcaacttgactaacaaaattaccacttgatttagtattagaaaattacattacatatcaaacataaacccattaatcaaatactaaagaaatttctgagttaaatggtataatgttagcttatgccagagctgaccttgaaagattgttcaaatatggctcagtgtgattgaaagttctgtgtgaatatgtttttggaaagatccaacagcaacaccttagtgtatgtttttgaaataaaatatatctgagtagcagcaaagttattctcaaatttccattttatagctggagatgttataccgtgacgtayatgataggacccaatatggatcaatcccttttagaagtcaatcaggaagaggggagcagttaaaacagttgcttggtttacaaacattagaacaattttcttattcacaccatctgattattgtatgttattttttccccaacgtttagactacacaatgagttaagaatgataaaaata

SEQ ID NO: 3840 - DNA, 431 bp, Homo sapiens
tactggcgtaatggatgacgtaaagacaatgatgggatttgagtccttgtgtgtcaaaagagacataaaactcgccttctttacttccattctggtatgtttcctctgaataagcaacaaatccgtggtaattattaccttgagtgacttccagatgttaaccatgccatgtgaccraactcaactattctctaacaagcatggcaagagagggaaattgttagtatatatgatgatttcaataaccatgaaaaataccttttttgtctatcacatccatctgcatgatgtaaaaaccctacataaataggatacctttttgagaagaagaggaagacttaaatctgtgtaacataggtgaactttccctttaaaaaaaaaaagaatagctaaattaatgaaagctgaatgtaatttattatctaatcctt

SEQ ID NO: 3841 - DNA, 431 bp, Homo sapiens
tactggcgtaatggatgacgtaaagacaatgatgggatttgagtccttgtgtgtcaaaagagacataaaactcgccttctttacttccattctggtatgtttcctctgaataagcaacaaatccgtggtaattattaccttgagtgacttccagatgttaaccatgccatgtgaccaaactcaactattctctaacaagcatggcaagagagggaaattgttagtatatatgatgatttcaataaccatgaaaaataccttttttgtctatcacatccatctgcatgatgtaaaaaccctacataaataggatacytttttgagaagaagaggaagacttaaatctgtgtaacataggtgaactttccctttaaaaaaaaaaagaatagctaaattaatgaaagctgaatgtaatttattatctaatcctt

SEQ ID NO: 3842 - DNA, 519 bp, Homo sapiens
tcttcwcactcttatttatccaagttaaaataaaaactctgtcattaaaaagggaaatacatttctatttcctcaaaagaagagaaggaaaggtgaattatgtagtagcatttgtttgcttacagataagtgtgtaaaaaggagaatttgagcataggatttttccaatcagttgttttaattatcatttaagagaactttgaggaattgtttagatttaaaatataattttgcctggatttcattatacaaatttttataagctaaatattttaaaatagtagtcatggaaagtattatgagtaattaagatgatataaaaataaaagaacaagaatcttttgggagatgttatttctaaatgttgactagctatactagaattcttacaaaatatttgggtaaataaagggattctgcatctgtgcttgttatagtaggatttctatggagtgactctgtgtggaggggagacagctaatcaaatatatcaagtatgttaacaaattacttggaaaa

SEQ ID NO: 3843 - DNA, 561 bp, Homo sapiens
agacagtaaatatgttaggctttgcaggctacatgatctctgttgcaactactcaactctgccctcacaatgcaaaagcagccattgagaatgctcaaaccaatragtgtggctgtgttccaataacattttatggacattgaaatttgaattttgtacaactcctacctgttacaaaagagtattcttcttttaacattttaagacatttaaaaatgtaaaaaccatccttagctcaagagccatacaaaagcagatggtggactgaatttggcaagagccatggtttgctgatctctgacctagatcactgtttcctaagttgcggtccctaaaccatctgcatcagaatcacttagggttacgagtttatagaaaatataaattatggaaccagtgaaggagaatttctgaagaaatgaaggctattaaccaatagttgtggctcaccacatctagaatggttatgatgggttggccttttgagttagtatttgggaatcagtaagcaaggttctaacaggaaggggcaatgatagagcaggttccttagagacccat

SEQ ID NO: 3844 - DNA, 664 bp, Homo sapiens
gctatatatggaacatacttacatccaaaaaaattattcattgttttctccaaaattcaaatttggctgggtatatattttatctggcaaccatatttctgcagttcattaaaagttgtattttgggccaggcgcagtggctcacatctgtaatcccagcactttgggaggctgaggtgggcagatcactttaagccaggagtttgagaccagcctgaccaccatggggaaaccccatctctactaaaaatacaaaaattagctgggtgtggtggcagatgcctgtggtcccagctactcaggaggctgaggagggaggatcgctttagcctgggaggtagaggttgcagtgggctaagatcacrccactgcacttcagcgtggggtgaccaagtgagaccctgtctcaagaaaaaaataaatcgtgtttagttgacatgtagatttaatttacatttcaataatgaaatcagtgttgtcttttttcttctgtcattttcaagtaccaggatttcctgcctaaacaatttgcaatgtgtgtctgtttctctgcccatctcactatgctcttagatgcagagttacaaatatattctagttttatttctggttccaaagaagacagattttacaggtgtaatcagttttgtgctttatattaaaa

SEQ ID NO: 3845 - DNA, 1274 bp, Homo sapiens
catgctgcctaaagtcagctaaagtgaaaaattaccgaggatatgcctttacccacaaatgtggccttccacatcatggcaagttcacccagaatggatgaccaaggaaacccagaatagctttctgtatgaattttgcgatcaaatgaattatgaagtacatagttaaagatttttacaaatgggagcacaagcccttctgagcagaaaattcactaaaattcactaaaactcaaaccatatttaacagttattccccccagtgtgatattatataaacaattacttctgttagagttacagggtggttctgacccaggatctgccactggcaactgctggacctcagacaagccacttaccctctctatgcttctagagattatgtttcacaggaggaaattgaactagactagaggttttccatccttgacagttatagaaactttgttcaaatgaratcttgggcaatagcccacatagaaaacaaattaaaacgaagccagtcttattgaaggaagggtcagtgacccatttcttttccagtttgctggctcaacatgaacccctgccacagtcccagtcccaggtgggcagggcaggcccctggtgtctctggtgttacacagcacatgtgcacagtttaaaaaacactggagtatatggcacctcacatcccttccagcttgaaaatattgatgatggacagaccagaggtggaatcagagccccgacaaaaatatagctagtgtgaaaactaaagcaggacggtgccataggggacagaaagttacaatcctgccaagttcaatgtagtgtatatcaaaactgttttttttaagtggccatattttattcactcactaaatgtactttttctgagtactaactatgcactggtaatacaacaagtagaaagacgcagccctgtttgcgtctgatctgtttgagacatggctgggtagactcgtggtaatcacagttggatgtgaggaagtggtgcgaggggcaggagggacagggcggtcagcaagagccctctaggaaaggagacacctcctctgaatctagtagctaggtgaaatgagagaggggaaggaagagtggaaaatacatgtagaaagagaaatgaagtatgcaaagtttcagaagcagaagagaactgggtgggtcctcgggaatgagaagccagcccatcagccaatatgaggaaggtgagcagacccaggctcaaaaggagcccgccatgaccctctaggaagtttggcctttgt

SEQ ID NO: 3846 - DNA, 1274 bp, Homo sapiens
catgctgcctaaagtcagctaaagtgaaaaattaccgaggatatgcctttacccacaaatgtggccttccacatcatggcaagttcacccagaatggatgaccaaggaaacccagaatagctttctgtatgaattttgcgatcaaatgaattatgaagtacatagttaaagatttttacaaatgggagcacaagcccttctgagcagaaaattcactaaaattcactaaaactcaaaccatatttaacagttattccccccagtgtgatattatataaacaattacttctgttagagttacagggtggttctgacccaggatctgccactggcaactgctggacctcagacaagccacttaccctctctatgcttctagagattatgtttcacaggaggaaattgaactagactagaggttttccatccttgacagttatagaaactttgttcaaatgagatcttgggcaatagcccacatagaaaacaaattaaaacgaagccagtcttattgaaggaagggtcagtgacccatttcttttccagtttgctggctcaacatgaacccctgccacagtcccagtcccaggtgggcagggcaggcccctggtgtctctggtgttacacagcacatgtgcacagtttaaaaaacactggagtatatggcacctcacatcccttccagcttgaaaatattgatgatggacagaccagaggtggaatcagagccccgacaaaaatatagctagtgtgaaaactaaagcaggacggtgccataggggacagaaagttacaatcctgccaagttcaatgtagtgtatatcaaaactgttttttttaagtggccatattttattcactcactaaatgtactttttctgagyactaactatgcactggtaatacaacaagtagaaagacgcagccctgtttgcgtctgatctgtttgagacatggctgggtagactcgtggtaatcacagttggatgtgaggaagtggtgcgaggggcaggagggacagggcggtcagcaagagccctctaggaaaggagacacctcctctgaatctagtagctaggtgaaatgagagaggggaaggaagagtggaaaatacatgtagaaagagaaatgaagtatgcaaagtttcagaagcagaagagaactgggtgggtcctcgggaatgagaagccagcccatcagccaatatgaggaaggtgagcagacccaggctcaaaaggagcccgccatgaccctctaggaagtttggcctttgt

SEQ ID NO: 3847 - DNA, 1274 bp, Homo sapiens
catgctgcctaaagtcagctaaagtgaaaaattaccgaggatatgcctttacccacaaatgtggccttccacatcatggcaagttcacccagaatggatgaccaaggaaacccagaatagctttctgtatgaattttgcgatcaaatgaattatgaagtacatagttaaagatttttacaaatgggagcacaagcccttctgagcagaaaattcactaaaattcactaaaactcaaaccatatttaacagttattccccccagtgtgatattatataaacaattacttctgttagagttacagggtggttctgacccaggatctgccactggcaactgctggacctcagacaagccacttaccctctctatgcttctagagattatgtttcacaggaggaaattgaactagactagaggttttccatccttgacagttatagaaactttgttcaaatgagatcttgggcaatagcccacatagaaaacaaattaaaacgaagccagtcttattgaaggaagggtcagtgacccatttcttttccagtttgctggctcaacatgaacccctgccacagtcccagtcccaggtgggcagggcaggcccctggtgtctctggtgttacacagcacatgtgcacagtttaaaaaacactggagtatatggcacctcacatcccttccagcttgaaaatattgatgatggacagaccagaggtggaatcagagccccgacaaaaatatagctagtgtgaaaactaaagcaggacggtgccataggggacagaaagttacaatcctgccaagttcaatgtagtgtatatcaaaactgttttttttaagtggccatattttattcactcactaaatgtactttttctgagtaytaactatgcactggtaatacaacaagtagaaagacgcagccctgtttgcgtctgatctgtttgagacatggctgggtagactcgtggtaatcacagttggatgtgaggaagtggtgcgaggggcaggagggacagggcggtcagcaagagccctctaggaaaggagacacctcctctgaatctagtagctaggtgaaatgagagaggggaaggaagagtggaaaatacatgtagaaagagaaatgaagtatgcaaagtttcagaagcagaagagaactgggtgggtcctcgggaatgagaagccagcccatcagccaatatgaggaaggtgagcagacccaggctcaaaaggagcccgccatgaccctctaggaagtttggcctttgt

SEQ ID NO: 3848 - DNA, 1274 bp, Homo sapiens
catgctgcctaaagtcagctaaagtgaaaaattaccgaggatatgcctttacccacaaatgtggccttccacatcatggcaagttcacccagaatggatgaccaaggaaacccagaatagctttctgtatgaattttgcgatcaaatgaattatgaagtacatagttaaagatttttacaaatgggagcacaagcccttctgagcagaaaattcactaaaattcactaaaactcaaaccatatttaacagttattccccccagtgtgatattatataaacaattacttctgttagagttacagggtggttctgacccaggatctgccactggcaactgctggacctcagacaagccacttaccctctctatgcttctagagattatgtttcacaggaggaaattgaactagactagaggttttccatccttgacagttatagaaactttgttcaaatgagatcttgggcaatagcccacatagaaaacaaattaaaacgaagccagtcttattgaaggaagggtcagtgacccatttcttttccagtttgctggctcaacatgaacccctgccacagtcccagtcccaggtgggcagggcaggcccctggtgtctctggtgttacacagcacatgtgcacagtttaaaaaacactggagtatatggcacctcacatcccttccagcttgaaaatattgatgatggacagaccagaggtggaatcagagccccgacaaaaatatagctagtgtgaaaactaaagcaggacggtgccataggggacagaaagttacaatcctgccaagttcaatgtagtgtatatcaaaactgttttttttaagtggccatattttattcactcactaaatgtactttttctgagtactaactatgcactggtaatacaacaagtagaaagacgcagccctgtttgcgtcygatctgtttgagacatggctgggtagactcgtggtaatcacagttggatgtgaggaagtggtgcgaggggcaggagggacagggcggtcagcaagagccctctaggaaaggagacacctcctctgaatctagtagctaggtgaaatgagagaggggaaggaagagtggaaaatacatgtagaaagagaaatgaagtatgcaaagtttcagaagcagaagagaactgggtgggtcctcgggaatgagaagccagcccatcagccaatatgaggaaggtgagcagacccaggctcaaaaggagcccgccatgaccctctaggaagtttggcctttgt

SEQ ID NO: 3849 - DNA, 1274 bp, Homo sapiens
catgctgcctaaagtcagctaaagtgaaaaattaccgaggatatgcctttacccacaaatgtggccttccacatcatggcaagttcacccagaatggatgaccaaggaaacccagaatagctttctgtatgaattttgcgatcaaatgaattatgaagtacatagttaaagatttttacaaatgggagcacaagcccttctgagcagaaaattcactaaaattcactaaaactcaaaccatatttaacagttattccccccagtgtgatattatataaacaattacttctgttagagttacagggtggttctgacccaggatctgccactggcaactgctggacctcagacaagccacttaccctctctatgcttctagagattatgtttcacaggaggaaattgaactagactagaggttttccatccttgacagttatagaaactttgttcaaatgagatcttgggcaatagcccacatagaaaacaaattaaaacgaagccagtcttattgaaggaagggtcagtgacccatttcttttccagtttgctggctcaacatgaacccctgccacagtcccagtcccaggtgggcagggcaggcccctggtgtctctggtgttacacagcacatgtgcacagtttaaaaaacactggagtatatggcacctcacatcccttccagcttgaaaatattgatgatggacagaccagaggtggaatcagagccccgacaaaaatatagctagtgtgaaaactaaagcaggacggtgccataggggacagaaagttacaatcctgccaagttcaatgtagtgtatatcaaaactgttttttttaagtggccatattttattcactcactaaatgtactttttctgagtactaactatgcactggtaatacaacaagtagaaagacgcagccctgtttgcgtctgatctgtttgagacatggctgggtagactcgtggtaatcacagttggatgtgaggaagtggtgcgaggggyaggagggacagggcggtcagcaagagccctctaggaaaggagacacctcctctgaatctagtagctaggtgaaatgagagaggggaaggaagagtggaaaatacatgtagaaagagaaatgaagtatgcaaagtttcagaagcagaagagaactgggtgggtcctcgggaatgagaagccagcccatcagccaatatgaggaaggtgagcagacccaggctcaaaaggagcccgccatgaccctctaggaagtttggcctttgt

SEQ ID NO: 3850 - DNA, 1010 bp, Homo sapiens
gtgtgtgtgtgtgtgtgtgtgtgtgtagggtataaacgtatgcccaatagaagttgtctcttttaaaattgcaaaaattagaagatatagaatttaaactttcttgtattgaggttcaagaagcatttattttctgacaaactyctttagggtttttataacttacaggtagaaattcatctgggtctaaggtggacttttatcaccgaaacattttagaatgtgcaagccatagattgacttttgacttcatgagagtactcaaaataaatagaagatacttttctgaagtcagctgaaagaacacagttgtatttcaaaataagatgaaaaactctcctgaatgtcattttttcagccttagaagaaactaaaactattaaatataaaaagttttgactttttaagtagaatctgatttatgcttagcctgtccccttgccccttggcaccttcctcagggggaaatacttcagttgtgaccaagctgcgcatactttcatgtccactgctggggtgccagcagatgatcagcaatttaaagaactatttattatgctgtctcttgcttaagaaatgtttagtggtttctggacctgaatggtttaaaggaggtattagaactgatagaagcaggtattaagtaaaattccccttgcttaaacaggatagttgtagaaattaagacgagatttcagagaattctcatgggacaaaaatctatgtctgagccacatgattatacagtagcactcgttgtagagagaggctcattgaatgctggccaggcaaatattttccaggctctgcagtaggtgggactgctggagtgatacagtgtacaaagcacaattatacaggcttgccttggtgcccaacaacctgggctattcccagggatatatgaaaggcatcattcacttctgagacgtgggcaaatgccgattatttatctggtgctcttttaaataaagatgaatcaggcgcttaagtacatatgtttatatgca

SEQ ID NO: 3851 - DNA, 2646 bp, Homo sapiens
acctgctacttgaaaagtaaaccagtgtgaaagtgtattaagtaaagttaaaatattgtttaccgttttcattttaaaaacagtctgcatgtctactttcatacctttttctgagtaagcacatatgatttttcattacattttaaaaaattactcttaaaggtagtgttgtgaattatgtttttctgccttgataattttctctttatctttttttcccagtagtttttgtttattgctacacttcgtactctaaatcttctccctttctttctgctctgaagatagtagttgcccagtgaattgactggatacagaaaccagggtcaagctgaacataaatgttatgatgccaattaatgatcagaaaggaaaataaacttgtgaagatgttcactgaagaaaaaaatctcgatttagaaaacattggtttagatgattaatcagaagttctactctatttttgttttacttagttaacacatacttactgggagcctactttgtgtggcagatgttgttatacttggcatgagacaacactgaacaaaacatacacagtttatgccctcaggagacttacagtatgtggtatatacatgagggcagtgggggcttgggtttacatgtagcagtgctgaataattaacaactgctgtgctttgtagtggaaactaagaccccactagctttaaattctgcagtgtcctcttccactgccctgttgtgagtattctccctgctagccgcaactagaacaggactcctccaaaagtggaaatgagtatttgtaaccctgtgctcactgcctgtgtgacctgtttactccattagtaggcaggcagttccaacataatgtgataaatgaggatatttgctagagaatggttggaatggtgaaccatggagtccaatctagataggaaagtgagtacagaagtgggttatgtaaatgagggtgtgtggtcttgtagtgtctaaagtgaagttgtagtgaatgttggtggaggtgaaatgcttatgatattaaaagtagcatatttgatggattatccacatgtatgttaaaataactgaaggttattcagcattcctgatagagaagaatgtttatggattagtagtgcatacatcggtggttctcaaaagtaactgcatattgcaatcatctggggaacttcacaaactaacaatgctcttatatcagctttcctgaacattggaaattctgatgcatggctcacatacctagctattttgatttaatttgtatgtggcgtacatggggtagtgggattttaaaatcccctacttccccaggtaatgctaatgggcaggaattatacaggaacaacaggggcttttacaggaaatgggctgggagttatggttttgatcgtgaccctacattctgaagttgggtacatgattaatgaaagaataagcagcctttgtttgagagagctgcaggagaagcagcttttacttgaagcaaaaatagtgaagttgtcggggatatggaagtgtttgttttgactttggaacagagtgatcctagagggaaagtttaggagggatggaatcactgggaaattgtataagggaggaaaaagcaagaacagtacagtggtcagagtgtaggagagaatcgataactgaatgtatttatctctctatgatgaacaaggataacaaggcttagtgggttcattattagtctagagaacacatccagcagtcctgtagtgcccaataattgggaattgggtawacagttcttaggagtcagtccagaccttgatagactgaatttcataggaagtcctatccttgtatcctctggtaaggggtttggattgattgtgcaagatctaaggagagccctagagtttggggctgttgtccacaggctcctgatagtggttggagtcttttctaacactggcgggggaggctgttaagtcttaaggtttggtcagatttgttcttctcacgtccagtgcgctgcgtggctgagtacacgctgctgcaccaaatgatgcaaagcctttactatgtctttacttgtgtacttcatacttttcaggaacactttaaattgtccagttctagatttgtgagcaactatttataggttcactttgtcaacatacaagaaatgatatagacttagagtgaaaaagggccttatatattatctaggcaaactcttcttatttatgcattagaatttttatgcatagagaatcaaagtgaaattcacaaagaaccctcttacttagattaaagtataaacggtatatggggctggaaatttataattgctgcactgattcaaagtttttgtaagaataaatgggttaactgcaactcattttattaatttgacacgtaacttgatttctgtattttttcactgttaaactttgaaatataagagcatcagacatcaccgcccacagagtgcttcaaatttatttttcttttacaattaaagaaagcttttaaaagtacagtgtatgtgtaggctttaagagctactctagttatgcaagagaactatgaaattgcttttgaatgaagagttcattcaaaccttctcaaaaatattcaaatatatttttggtcagaataaggtaagtagta

SEQ ID NO: 3852 - DNA, 678 bp, Homo sapiens
attataattgttaaaagataatgtgtgcatatcattgtacagtaagtgtcaactgtgtgcctaactgttctatcaatactttctttctttaacaaagaagaaacaacaatcagaatgtcagttatttttattcaactaaaaggattaaaaaatttatttggtttgtgttctgtccattagaaaatactaataaagtattaacaaacatttttgttgagttcatttaatagtaatgtatttttgttacttttaagatgcttgctcagtagtcttatttttagtatctgtttgtattttcttttcttttagatatcaaccaattcaagttccaggttgatagatgagtgcttgagtgattactgacttaaatggactgaatttaactttttcttttatggggcaaataatttacaccacagtgttaaagaaactttatacttcctcatcgtatcaaattataaagtattttcccacagatgraaagatttataattagtaatccattttatttgatctcattttaaattcatattttggctaatattttagattttgccattctaaaagtagattggtcataatatttgcatctttcttggagctgtatcaacagacttctaaggcctcagatgtgataacttctagcccatcagggattggcatatttcttaaaatgca

SEQ ID NO: 3853 - DNA, 1020 bp, Homo sapiens
ataatattttaaagttaaaacattaaaatgtgaatcaaaggtgtatgaaatccctgtttcattgacagagaacagggattctgagatacaaattttgaaaactgggaatctaatacaagcctagtacaatgtagtacaggttgagtattccttatctgaaacagctttggagctgaaatactttggatttgggattttttcagatttgggaatatgtgcattatataccgggttgagcatcccaaatctgaaagtccaaaatctgaaatggttcaaaatccaaaactttgagtgccaatatgacactcaacggaaatgctcacaggggcatttcagattttggatttttggattagggatcctcaaccagtacaacaactttatagaagaaaagcccaagactcagtgctatgtcttatcagtgtttacaagagtacatggtttacaagaacgcctggttttgcacttgttatgggcaagatctagattctggttctttcccaacccagttgagtatgttacattcaaatatgaccacttgctattcttctcaaatgaccacagtttgctacccyttcaagttcttcctaatgattgaggaaatgaactcctcttaaattcccagatctgtgtggcgctttagctagcaccacacctcaggtccaattctcctgtctttatatgcagcaggtccacaggacaaggcctccctcagaaaaagctaccccaatctaggacaaaaacaaactcttttccctccccctccctccatgtgcccagaacccctttctccttcctccctaggctaacctgctaagtcttccggatagctcactacactatctgatagctaactgggtgtgacaaaccacgtcctcacaccttagaaggcaaaacactccaggaacttacttctggaataccaataccttcacagtaatttccctgcctttccaaagagtgctctaaacaggtaaaagctataatacaaactctatatatttgtgtcacagatacaga

SEQ ID NO: 3854 - DNA, 585 bp, Homo sapiens
tacatgctcttccacaacatggtttacttccaagatatctcttcaaattttttttcactgtactgaattggtgactaatagtcatatttttgtttttgttcaaaaagtcttgacttgtaaatttttcagtttcttctttatccacaggtaactctttcctcacaaggtgaattgcttgcttccttgagttctgctctcaaagatacccttcattttctacctaatattaataactgtaatcactcattattccattactatgctctatagtgtatacaactgttytttgtcatgtcattaactaaattatttatttgttccagtaatgtattccataaatattgtacacctaaaaattatgctatttttactgctgtatgctcagctgcccaataacagtttgaggattaacatatttgttaaatgcacaaatacattctttcagaagtgttagttgaataattttatattaaactccctatatacgtacaatatgaattagagaattcagaataaacattccattggaaaaaactaaacaatttgttataaaacatccttaaaagcatcagaaagttaatacag

SEQ ID NO: 3855 - DNA, 550 bp, Homo sapiens
gggtagaattattccgaaaggtgaacaacatcagtcatttggcgtttattgaattgctaggtacaaagcataatgagaagcagtagaggaattaaaaaaatttttttttctaaagacttagttagaaaacatgtatatgttcatttttcctttctttttatggagaatggagtctccttatgttgcatagcctggttttgaattcctgggattaaggtgtcctctcacctctgcctccccaagtgctggcattacaggcacttggcagaaaacatgtttttaaaagatatcatcacagtttgacagcctaycagggagactatctctgcagacttttctgtacagcataggatcttcaagtaattcaagaaacaacgctgactgcatgaaaattatcagtgccttctcagttcggtgtttaacgtacacccatctggaaatcaataaccataattttgtgtatgtttgaacagcttaatcagagggcttgttttggaccatggagcatagcatcttgataggaagaaaagggtggaggatgcatatatcc

SEQ ID NO: 3856 - DNA, 1119 bp, Homo sapiens
ttcttgtaatctcagcactttggaaggccgaggtaggtggatcacttgaggccaggagttcacgaacagccctggccaacatggtgaaactccgtctctactgaaaatacaaaaattagccaggcatggttctgtatgcctgtagtcccagctactccagaggctgaggcaggagaatcgattgcttgaagctgggaggctgaggtttcagtgagccaagattgtgccactgcactctccagcctaggcgacagagtgagactgtcaccaacaacaacaaaaaaaattatttgggttttagtgtttgagaaatacagcataagcacatagaacatttacaatttaggaaataattatgaagtggacacacacaaccaccattgtagttaagaaataaattgttgctaccacctcagaagtcccctcccactggaacctctctccaatctccagaagtctgtttttcagttttcattgaaaaaattacaaacctgtgaaaataataattatattgtgtgtgccctttacctagattcaccaattgtttacatgttgctccatttcttttctatttttcctctgaatcatttgaaggtaagctgcagacatgtcattttacctctaaaatacaatttttttccgcttttttttttttttttttttttaagagacaggattttgccatgtagctcaggctggtttygaattcctgagttcaagggatccatctgctgtggcctcccaaagtgctgggattacaggcatgagctaacgcacctgacctttccttttaaattatttggccattgcagagtaacagtggaggctgctgagctttcattttaggagatacctggcttattgtcactagagccctacacttgcctaaagaggcaaggatgtaaaattatctgttactgttaactgttagctgtcatcttgagtaaacttttactgagcctcaagcttcctcatctgtaaagtagagataacctgggaaataaattacacataaaaatgtttccatcattataatttcatgcacgtgatagctaattgtgactttttaatcttagtaatttgtagccaaacacttgggtagctttttcaagtagatag

SEQ ID NO: 3857 - DNA, 1119 bp, Homo sapiens
ttcttgtaatctcagcactttggaaggccgaggtaggtggatcacttgaggccaggagttcacgaacagccctggccaacatggtgaaactccgtctctactgaaaatacaaaaattagccaggcatggttctgtatgcctgtagtcccagctactccagaggctgaggcaggagaatcgattgcttgaagctgggaggctgaggtttcagtgagccaagattgtgccactgcactctccagcctaggcgacagagtgagactgtcaccaacaacaacaaaaaaaattatttgggttttagtgtttgagaaatacagcataagcacatagaacatttacaatttaggaaataattatgaagtggacacacacaaccaccattgtagttaagaaataaattgttgctaccacctcagaagtcccctcccactggaacctctctccaatctccagaagtctgtttttcagttttcattgaaaaaattacaaacctgtgaaaataataattatattgtgtgtgccctttacctagattcaccaattgtttacatgttgctccatttcttttctatttttcctctgaatcatttgaaggtaagctgcagacatgtcattttacctctaaaatacaatttttttccgcttttttttttttttttttttttaagagacaggattttgccatgtagctcaggctggttttgaattcctgagttcaagggatccatctgctgtggcctcccaaagtgctgggattacaggcatgagctaacgcacctgacctttccttttaaattatttggccattgcagagtaacagtggaggctgctgagctttcattttaggagatacctggcttattgtcactagagccctacacttgcctaaagaggcaaggatgtaaaattatctgttactgttaactgttagctgtcatcttgagtaaacttttactgagcctcaagcttcctcatctgtaaagtagagataacctgggaaataaattacacatraaaatgtttccatcattataatttcatgcacgtgatagctaattgtgactttttaatcttagtaatttgtagccaaacacttgggtagctttttcaagtagatag

SEQ ID NO: 3858 - DNA, 1119 bp, Homo sapiens
ttcttgtaatctcagcactttggaaggccgaggtaggtggatcacttgaggccaggagttcacgaacagccctggccaacatggtgaaactccgtctctactgaaaatacaaaaattagccaggcatggttctgtatgcctgtagtcccagctactccagaggctgaggcaggagaatcgattgcttgaagctgggaggctgaggtttcagtgagccaagattgtgccactgcactctccagcctaggcgacagagtgagactgtcaccaacaacaacaaaaaaaattatttgggttttagtgtttgagaaatacagcataagcacatagaacatttacaatttaggaaataattatgaagtggacacacacaaccaccattgtagttaagaaataaattgttgctaccacctcagaagtcccctcccactggaacctctctccaatctccagaagtctgtttttcagttttcattgaaaaaattacaaacctgtgaaaataataattatattgtgtgtgccctttacctagattcaccaattgtttacatgttgctccatttcttttctatttttcctctgaatcatttgaaggtaagctgcagacatgtcattttacctctaaaatacaatttttttccgcttttttttttttttttttttttaagagacaggattttgccatgtagctcaggctggttttgaattcctgagttcaagggatccatctgctgtggcctcccaaagtgctgggattacaggcatgagctaacgcacctgacctttccttttaaattatttggccattgcagagtaacagtggaggctgctgagctttcattttaggagatacctggcttattgtcactagagccctacacttgcctaaagaggcaaggatgtaaaattatctgttactgttaactgttagctgtcatcttgagtaaacttttactgagcctcaagcttcctcatctgtaaagtagagataacctgggaaataaattacacataaaaatgtttccatcattataatttcatgcrcgtgatagctaattgtgactttttaatcttagtaatttgtagccaaacacttgggtagctttttcaagtagatag

SEQ ID NO: 3859 - DNA, 639 bp, Homo sapiens
tgcatgaataagtggttgtgttctccctcttcttgaccccaggaaaggctgaacccagaaatggtgatggagaaagagctcagagctcattcctaccttgtcttaattcatatcttcttgtcccaggctagtacataaatgggatacccagttagktgtttgtgataggaccagaggaggaaatggccacatgtacaacagcatacaaaggggtaatatgaagtaaactgagtggggaggcattggctacttcccattcataagagccaggaattccatggcttttctacatccatgagcatgcttgttctcatgcccatgttcttttttttttttaaagaaaaatttatttcttaacataagctccatccatttgaaaaggctgtgtttctgctcatttctcttatcaaacaataaattttgtgaccattttgatgggaaatcatcaggcatccaccctagaatcctgacttggctccctcaacttccccttaacctccaatcttaaaaaatcccccaaaaggccatcaatttcaagacaccattgtaaatgttgatactggtcattcagtccaatcctaaataccaagggtcctggaaatggatctatgtgaatgcagtctcttttacattattaac

SEQ ID NO: 3860 - DNA, 451 bp, Homo sapiens
tcacgtcttcctctgcagtgtttttgccattcagattcattgcatgtggagagttaacctgtgtctctagtcagtcctaatagttaggaaatgtttaagcctgcagtactaataaatcagcttaacgtataattagaggcttaactctgtgaagagaaggtataacccatttgttaataatatcacttaggccttttgaaaacattcttgcctaaaataactgaattgawttgggaactagccttgaacaaaatgtgaaaataattgccttctatgacattatgagcccagttccttcaacaaaagtgtagagctaagaatgctccgtagctttctgtcagttattccagaggcaaatagattattagcttccacaaagttgattaaaattcagatttatagtcgggaatgtggtgtgagtctgtagacctagctactcaggaggctaagg

SEQ ID NO: 3861 - DNA, 567 bp, Homo sapiens
tgttattctgtcatagtctcatgtgtatcccagtaacatactttttcctgtggaggtttgaaatgtgggtatatgtaatatggagtggttcatgtggtagcaatatttggtgtagtatcatcctttggacctacttcataatcataatcttcatttccttcaagcctgggtttcttcatttccttcagaattcatatcaagtattaacaaatgacttacttgtagaagtgtattatattcaagsatgtcatgttagatcctgcaatatatggttctatctgtggtattatgattgctctttggtctgatttattgcttcttatgcaatgatctattttgattgatatgtctgtttctgttagcatttcgctatccattatgtgtgctgtctattggtttgaagtgttattgaatgcttggttgtagctgcataaattggctgtgtcacatttagtcatgtcatttatgcattcttctgaggggtgcttaaaaatgtgtgcaaagcttctataaagacgcgttggctgggttgtgtctcatgcctttaatcccaatactttgggaggg

SEQ ID NO: 3862 - DNA, 738 bp, Homo sapiens
ttttacctggcctccagggcctgttgatgggctttgcaggcagtccagcagcccacacctgcaggcaggatgctgttgtcaatgagctgagggtagctgctttgctgaagacctcacacgatgtccaatctcatccaaataacattgttcccatcctccccacccaccacatcaaaacataacacatcacagcactcagtagaggtcctgcctccccatttctcaagggaagccagtaggcaacacagccagcacggtgctctccagggcagcccctctcagacgaggaggcagcgggtgcagccaggtgtctgcagagcagccacaaaggtggcctaggatgcgggtgtctccccaggtgagtccatccacacacgtttgaaaaacactattagtctttctaacacactgagggaaagattaaaatctgtggaataaaggaggagattttatttacagatttttttaaaagccacctgggttgacaccttcctacttatccactagatgtcatcagaggtgctgttccgtggttctgcattaacccctgcctcatgtctgtaacatgtgacagtaattccagctcggtccctccaggcaaaggagaaacgggacttacttcacaggacagaggattgacagaagtcagtttaagataagtgtttgaatcagatttcagwacatctcattcatttcttagatttgtattcacaattgtgttctctaaaatgtgtctaa

SEQ ID NO: 3863 - DNA, 738 bp, Homo sapiens
ttttacctggcctccagggcctgttgatgggctttgcaggcagtccagcagcccacacctgcaggcaggatgctgttgtcaatgagctgagggtagctgctttgctgaagacctcacacgatgtccaatctcatccaaataacattgttcccatcctccccacccaccacatcaaaacataacacatcacagcactcagtagaggtcctgcctccccatttctcaagggaagccagtaggcaacacagccagcacggtgctctccagggcagcccctctcagacgaggaggcagcgggtgcagccaggtgtctgcagagcagccacaaaggtggcctaggatgcgggtgtctccccaggtgagtccatccacacacgtttgaaaaacactattagtctttctaacacactgagggaaagattaaaatctgtggaataaaggaggagattttatttacagatttttttaaaagccacctgggttgacaccttcctacttatccactagatgtcatcagaggtgctgttccgtggttctgcattaacccctgcctcatgtctgtaacatgtgacagtaattccagctcggtccctccaggcaaaggagaaacgggacttacttcacaggacagaggattgacagaagtcagtttaagataagtgtttgaatcagatttcagtacatctcattcatttcttagatttgtrttcacaattgtgttctctaaaatgtgtctaa

SEQ ID NO: 3864 - DNA, 577 bp, Homo sapiens
gtggcaggcaaggtgggctccaaggctttctaaggttgatgccatacrcacaccaaggctgggagtgaaatttgggctaattaacagtgacatgtaagtacaggaatctttaatttaaacgtaagcctctgcataccaataaaccttgccaactttttgggagttacagaacctcatgtaaacttgagaaacaacaggaatacacctttacagagagctctggagcacggaactaagtatgcccatcatgcaaccctttacttgactaacaaaccagttgagttgggaatgatcgtctcctactagctaccaatagacatgttttgtttggcccatgatagctttgagataaagaaactttacacaaaatctagatattcaatttttcctgaaaaatccaaagactcattaaccatcagctagacctgagtggtgcctggttccctcttccccgccatatctttcacacagcaagatcttttccattttaccacacttcccatcactccctagtagatgtggctgggcaggctgtgccctgagcctgcaggcatgtgcatttactaccctgtgcaca

SEQ ID NO: 3865 - DNA, 1223 bp, Homo sapiens
ttcttaaattcttatgtattttagtgttacacactgaagattcataaagaaatagttctcactctgtcgcccaggctggagtgcagtggcgcaatgttggctcattcaacttccacctcccgggttcaagcgattctcctgcttcagcctccctcgtagctgggactacaggtgcgcgccaccacgcctagctaattttttgtatttttcatagagatggtgtttcatcatgtaagccaggatggtctcgatctcctgacctcgtgatctgcccgccttggcctcccaaagtgctgggattacaagtgtgagccacagcgcctggccaagaaatagttttttaagaagaaatcaagtatcttacaattttttatcacttaaattttgaaccaaaaatattttgctcttgactaagtgctattgtaatatcatgtcactgttcagaagtgtggagtacacatctgtaaatagaacmttttaatattctaccactttatttacaaataatttttatagtggaattgcttctctagaagatcagtctgaccatgcagatgactacttaaaatttttttttattgatgcatgatagttatatgtatttttatttctttaaccattagtaaagctatttatgaggttgaagagaatatcataatcattttagtttatggtttatgttttttatcttcttgctccatgtacaactattgatttatgatttgtgttttatttttatagaaagatatccaacattatatcttattattagatatttgttttctcacagaccatggaatacatatttttagtttgaacttgtaactgggtcaaactagtggctacataggtatgatcacaaagtttaaataattgctgttatatattgcttttaacctcttttattagatgaagttagtgtccacatatacatgatgaattaaagtattaacaaaggaaatcaagcaatgctctcattctcctccacatgtaaatcataattcattaacatatatttttaccaggtttaatgtacgagaacaaatttatggataactgtttcaaacaaaagactattttgatttgaatgatgtgaactattgctttaattttatttctcaatttccttttaaatccttaatccgctgtgttgctctcacaatgactaagcccccaatattttggttgtttatattggacctacattgcaaatatattttttt

SEQ ID NO: 3866 - DNA, 1223 bp, Homo sapiens
ttcttaaattcttatgtattttagtgttacacactgaagattcataaagaaatagttctcactctgtcgcccaggctggagtgcagtggcgcaatgttggctcattcaacttccacctcccgggttcaagcgattctcctgcttcagcctccctcgtagctgggactacaggtgcgcgccaccacgcctagctaattttttgtatttttcatagagatggtgtttcatcatgtaagccaggatggtctcgatctcctgacctcgtgatctgcccgccttggcctcccaaagtgctgggattacaagtgtgagccacagcgcctggccaagaaatagttttttaagaagaaatcaagtatcttacaattttttatcacttaaattttgaaccaaaaatattttgctcttgactaagtgctattgtaatatcatgtcactgttcagaagtgtggagtacacatctgtaaatagaacattttaatattctaccactttatttacaaataatttttatagtggaattgcttctctagaagatcagtctgaccatgcagatgactacttaaaatttttttttattgatgcatgatagttatatgtatttttatttctttaaccattagtaaagctatttatgaggytgaagagaatatcataatcattttagtttatggtttatgttttttatcttcttgctccatgtacaactattgatttatgatttgtgttttatttttatagaaagatatccaacattatatcttattattagatatttgttttctcacagaccatggaatacatatttttagtttgaacttgtaactgggtcaaactagtggctacataggtatgatcacaaagtttaaataattgctgttatatattgcttttaacctcttttattagatgaagttagtgtccacatatacatgatgaattaaagtattaacaaaggaaatcaagcaatgctctcattctcctccacatgtaaatcataattcattaacatatatttttaccaggtttaatgtacgagaacaaatttatggataactgtttcaaacaaaagactattttgatttgaatgatgtgaactattgctttaattttatttctcaatttccttttaaatccttaatccgctgtgttgctctcacaatgactaagcccccaatattttggttgtttatattggacctacattgcaaatatattttttt

SEQ ID NO: 3867 - DNA, 689 bp, Homo sapiens
agcactggtgctgggcatggtgyttgccttctaggtgaccaaaagggctccctgtcccattgccttcctgtggacatggctctgacttgatgaaacttgttcatatcactgcccaaatgaccaattttgggtcctttccctggagcagatttctacttgcccttgaattgtctttggaaccaagaaagagaaattgaacttttggatactaggtgcatctgaaagcagtggaggtcaacatggaaatttgaattttcttttattgataaatactgtatgcaaagtactgtcttaggtattttgtggattacttaatgtaatcttatctttccaacactctttgaagtaggaactattgtctacagtttaatcatgagaaaactctagctcagagtataaagaaacttgcccaactcatgcactggtggaaccaagacttgagtgcagggctggcaggttccaaatctcatccttaacaactcttccacctggggtagaggcacctaatgctgtacaacacagctgtgatgcaaagcattttctgggggctggggaaagatttcacagaggcaggaaaaagctcctgtccctgaggcatctcagcagcttccctgaggaaacagaacaaccatgattccaggactatgctaagcgagtctgcacgtgttgctcattagggtcttggaaac

SEQ ID NO: 3868 - DNA, 1156 bp, Homo sapiens
  misc_feature (1)...(1156): n = A,T,C or G
ttctgagggaggagatatcagcttcttctcttactcctttccatactcctccccctgccaggcacagtggatacacttgtctgaaggcctgaagtcttctcacactgggcctttaagagcctggcctcttaccccatcaaatctacccttgagcaggaacctgggggaatgcaggaactgagataactgtgattgaatctcaaactttgaataactgactttactctctgggctgcagttccatcatctgcaaaatggagtggtaatatagcacctacttcaaagattntgtgagattaacaaatcaatcctatcacatgctttctatagagtcttccacataataagggctccaaattagggctgtttatacatggaagtaaataactaaaccaatggcaaagatcaaccttctggtatgggagatgtgaggggagcaaagtgtgtcttgattctcaaaatccagcaaagtcaaccacaaatgcctctgcagctcctgagcttcctacttccagtcattgggttgtggccctggaatgggccttcatgggtcggctctagtccctcctgtagcaccaggatgtgccatgtatgcatctcagggtctttatgtttcccctccacccatgtcccacatgttgttccttcagctcctgctaccccacccttctctgttcagtaagctgcttctaccacgtcttcctcctacctaggtttgagaccatctcccaacaactctaagcccagccatccatggcccagtgatgtacactagaaagcagggcatgctcatcagaggacctaggcttcagaaaaacagagtgggtgagagggacrgctgacatcagagcagggagaggggcaagtctgtgactgcaagtcaaaggcatggtggctgaggggttcagagagcaggaatggtcccagatatgtgggtgagaaagagagaacaaacctgggagcaggatattgtaagctgatgctgcccaagactgccactcctgcataagggaatggcaggtcctcacaccagtggcctgcagccttccctggaggctgagacttgtcccacggggtccaaagcccactctccccttctctccctgtccatggttcctttggcaaaatacattctggaatctacttctctttcttt

SEQ ID NO: 3869 - DNA, 577 bp, Homo sapiens
tcagctttttaacttttcagtttattgtagataagtttttatttaagttttatttaaataagaagattttaaggaaaaataaactttaaagacaggagcttcatttgggctcmcactgaatgaaaggaaaaattttattcaagtgcaaatgccaaaatctggactaacaacattgatgcttgttcaagttagcaatttgtcacttcagttatcagaaaatgcaatgagttgtttacagtcttgaatttacaattgtgacccagtgagtgtgtttgattccacagatcagaaattaaagtttatatttgacatcttgcattttttgtatctgttttgctaccatttttgtgctgacctttcaggtgttcagaattttcaaggagaagaaaccgatggtgcatttaacccttttactatctataaatacagtaggaagttatagtttataaaaatataaagcttgagttaatttttttagaccttaaaatattgcccagaatttcatggacaatcatagacactagcaagcactgtaccaaaacataaagtaagcccttgataatcatctgttaatctc

SEQ ID NO: 3870 - DNA, 571 bp, Homo sapiens
ctatgcgtttgatgctatgcagaatctaaagggaacataaacaaatcaacaagcaaaaaataaacaacaccattaaaaatggcaaatgacatgaacatttttcaaaataagacatacgaattgcctacaaacatacaaatgctcaacataactcatcattagagaaatgcaaatcaaaaaatcaaaaccacaataagataccatctcacgccagtcagaatgactattattaaaaagtcaaaaaataacagatgctggtgaggctgtagtgaaaagaaaacacttacatactataagtgggaatgtaaatcagtccagcttattgagctttactacagtttttacaagtcaggctttcttattacactggattgctctttcttattacactggattgctctttcttattctgcctttatagtgtggattttcaggtcactgatttgatacatttccttatttcaaattaacacatttaaaactataaactttcctctaagtgctacttttactttatcacatagattttgataagttgtatttttctctctmtatatataaattcttaaaa

SEQ ID NO: 3871 - DNA, 909 bp, Homo sapiens
atcacacctcaataaagctatttttaaaatacgctgggcctcaagaaaagagtaggctatcggactctggaggaagaataatcaccagaatcctagaaaaaggaataggtttttcaagcaagcctgccataacagcattattataagcacttcgagaggaagagtgaagacagtggcgttgggggaagatcaagcgtgtcccaactgaaaaagtgaacctggaaaccgaacaaccaaacatgggtacatgaaacaaggcaagcacataggaggttacctgagaaagtgtctagataaagtcaaagacagcttctaggaagaggaggaactgggaccaggagaccccatcaggactgggacatgagagatggcagaggaacagttatgcacagcatgggcagcgagaggcaagtgtgccacagcctttccatctgtgcagcactctgactttcagcggctcttgcatggtaggcagggcctgatcccatcatgttccacgtgttcggatcagcaggactgctgggaacagttgtgcagattgtacaaagcacggtgctgagraccagggttcacatcacggggcactgtctgcagccttgcacagtctgatgtacaatgctgcaaatcagagaacccagtgagggcttcaattacagttagtgaccaagaaaagatcagcaatgggagtataagccagtgaaaactttctggaagaaaacatagccataggtgaacaaaaatgttaaacctttggagccagcaattcctctgcctctgggaatttagctttacaaaataaccatggacatgcacagagagttggtacaaaggacagtcgtggctcagtgctccttgtaagaaacaaccttcagatcctaaatctgggtattggttaaaatcattctaaat

SEQ ID NO: 3872 - DNA, 1196 bp, Homo sapiens
tgcatggataaaggaaaaagagaaagtaacaatattgtatagtcttatggagagggaactttgagtttctggggcaatgagttgttcagtggcttaaaaaataaatctgtgactctggtaataaaaagttataacatggccgggtgcagtgactcacacctgtaatcccagcactttgggaggccaaggtgggtggatcacccgaggaggtcaggagtttgagaccagccttatcaacatggtgaaaccccatctctagttaaaatacaaaattaactgggtgtattggcacactcctgtaatccaagctactcaggaggctgaggcaggacaattgcttgaacccaggaggcagaggttgcagagagccgagatcgtgccattgcactccagcctgggtgggcgacaagagcaaaaagtcataacacatgtatgtagggatggatccatgtaaaattccagaattggatcaacgagccagtaacagtgatggcattcactgccacaaaaggaaacaggtggccagaagaatttgaaatatcattcaaggttgttagtatgtctattttcctttaaaacaaaaatgatgaaactgctatacttgttaacctgctctgcaatgccactgagggaagccactgcttgcttgttctatacctttgcttccctttaaataccatgaacacgaacactgaacagaaaacacactctagaataaccatgtggtaaattagttatgggagtaagtttttcctttgaacagaattcttttgagtggtccctattctggccaatgattctggcctaatcacayatgaaaaatctatgctcaaaagcatagattttttttattttaaaaagttttgtaagtctgtggagtacaagtgtaattttgttacatgcgtagattacatagtggtgaatcaggccttttagggtatctatcaccaaaatagcatatgttgtacccattaagtaatttctcatcattcacgctcccctaagcacagaaatttattacaaatttccatggaggctttaaaattttaattacaatgtgactttgaagatctccagaaaatttaaaaaataatttctgtgtcagccaatgtcataaaaatttattgacatttgatgcttatagtctgtttgcaatatgttagccatcaaggcagcaaatatttctttgatatgca

SEQ ID NO: 3873 - DNA, 718 bp, Homo sapiens
atttaattaatttaaatttcaatagtgccttccatattggctagtacagctctagatattgattggctgtcacctaattacaaacactttacaattctggcccagactctccttccactccccatctcttctcccctcctgtccccccacctcagcccttggagtcccagtccccacctgttgtagtagaaagagaagacgtcctcttttagcaccccttgggagatgatgttgtcgaagataggggtgaccctgccaatggcctgttcaatgaagcccatgcccacaaccccatcaaactcggccagcatgaagggtaaggcgggcatctccgtgacctctccaaacatctgtgtcaccgtgattccacccacctgtgggaggaaggaccagaggagaccaagcccactgcccactccttggttggagtctggtctgggcttccacactagggatcccaggggcacacatgctccagggtacagaaatcggggtaagagtattkcctcaaccctgcacgcacacactctgtgccaatacacatctctgctgcggagcccagagagagctagagttgaccagggatcggagagcagaggctgagagggtggtcctgccaagcagcaaaagaaaagctgccaagagctcctcccctccccagtggccagactttcgtgcctggcaggactgggtcttggcccccacccttatcatgggc

SEQ ID NO: 3874 - DNA, 613 bp, Homo sapiens
cacatcayactcagcttccctcccccccacacacaccccaccaccagccaagaaaagaggagccgggcaagcctgagaaacagcaggggctgaaggggccactccctctgctttcgacagcgccctattcaagccccactgccctcaccccacctgcctctgagccacggctgtacctgcacacaggcttccttccacccctccccactacattttattcccccttctttccccaccctaccccaccctcatggaacaggccagaaccaaaacctcacaaggatggttgagtgacttcagactccttcagtagggctggagggtggggagaggttgttcgcatgagggtgggggacctcataccccacacaggctgagggctaagacagaaaaccctcctcaccctccactctgaggagtgccaggtcctgccttgtgtggccaggcaagagttaatgcttttaagtcagtgtgagggcagctcacgccaaggctcccctccctgtctagcctttcctaggcgccagggccaaagcaggaggccccatgagtcccaggcaaccccccaacccccacccccagagcccgccagggggtccgtggggcccactca

SEQ ID NO: 3875 - DNA, 1311 bp, Homo sapiens
tgctgagaccaagcttgtgattgttgaattatggatgttgggagctggaattctctaaatatattaatctacgtgattcgaatttggtagagtagaaagagtcctagattttgagtccaaaaatgggttttgaatcctgttgtttactcgctgtgcaagggagtgagtgattatatcacctcgtctctcagggacttatcggtgaaatgggaataatgatttctttctcacaatgatggcttgaggattaaaagagcagcgtatgtgaaaacagctagtacagttctagcattcctgactactcagaatgttcagtygaaatctgtgcttttgatagcgaatccatcttctcgttgcagagctagaaatatgaagcacatctgttttaaatgagattgtagctactaaaaataggataacccctgtaagagctattaaaaatcacagtaatgggtcaccagagagaatgatagggaggactatgaaaaatacaaaagttacctcttctgatctgtaagaaatggagtacacaaagtgctgggtcctattagagctttgaaaaaggcattcaagagcagcagaagagctacccttgaattcaagactagggttttatttcctagtatcaaaacccaagagcgtatggcagaagacaaatgtttaggatttaaaaagaattagacgtttattcatctatttgctcatccatttatttgttgagcaagaaaaaactgtggagcactgctatgtgtcaagcactttgctaccccagcctgggagaccccaggatgcctgcctcattgctcttagagtctgatgtcttgacagtggagccgcattgggaagccagacagccgtagtatgtagcgtcagttctttttaataatgaaaatgaaaacaagaaaatatagtccaaggattgggttttaagtgacccaaaggagagcatacatacttttcaaactacaatggagaggaagaatatatacttgtcagtttgacaattctcttgaggtttcaaaaatgttcttctggcttaggaaaatatcgataaataaatggacaattttgatgatataacaattaataatataattactataagactaatcagtatgctctaatatatatatatttcaagtattaccataattcaaacagagttgttaaccagcagatgtggtaggagcaattgttaaaatccagagaaagggaaatgcaaggcaatggttgtgaaagaagaatcatatcccatttagaagccataagagaatctgtgatttctttttgctaatatttgttatctccata

SEQ ID NO: 3876 - DNA, 541 bp, Homo sapiens
tgcacaacagttttatgaaaatatatcagttaccagatgaaggtgacatttgtcacagagatcaccattacacaatatggcttactggaaatcagagtgaagagcagaaatgtgcaaacacacttctgttagttgactgtgggctttgaactgttataaaattaacacttcagtatgtttccgaatagttaccttttcttcatatatgtgttatttgtatgtacaaatgtgtataaatatataaacttgcaaatatgcagaactataattaaaaagtacaattggtttttatttacatcaaaacctaagcatttaaatgggtgcgatatcatcaacggaatcactttctgctcatataygcccctgaatagacacagtttgaaagaagtgtgatatgagccacaaattaggaagcagaagaaggttctatccctgactcaagtaacctgtgaaaatgtacttaccgcactggatgccagttctatttaactataaaatagtagaggtagtggcacttgccttcctaccaaccagttacttg

SEQ ID NO: 3877 - DNA, 481 bp, Homo sapiens
tactcaggacttaagtttaaagttcttttacttatttttcagattcgtagccacctacagctttttccttttgtgctgtagttttgtttgtygtttttgtttttagacttttagtcttctgaagtcgtggctcttagttttaatttctgatttaaaaaaagagagagagacagggtgctggtccatctaagcagtagtctctctcttgaatcaccccagactgcaagataatcattacctccctcccacatagggaccttgctttttcttttaagtaaatatttagaatgactaggcgctaaaaagtttttttttttttttgagacagaatttattttactctgttgcccaggctggagtgcaatggcatgatcttggctcactgcaaactccgcctcccaggttcaagcaattctcatgcctcagcctcacaagtacttgggattacaggcatgtgccaccacacctggctagtttttgt

SEQ ID NO: 3878 - DNA, 481 bp, Homo sapiens
tactcaggacttaagtttaaagttcttttacttatttttcagattcgtagccacctacagctttttccttttgtgctgtagttttgtttgtcgtttttgtttttagacttttagtcttctgaagtcgtggctcttagttttaatttctgatttaaaaaaagagagagagacagggtgctggtccatctaagcagtagtctctctcttgaatcaccccagactgcaagataatcattacctccctcccacatagggaccttgctttttcttttaagtaaatatttagaatractaggcgctaaaaagtttttttttttttttgagacagaatttattttactctgttgcccaggctggagtgcaatggcatgatcttggctcactgcaaactccgcctcccaggttcaagcaattctcatgcctcagcctcacaagtacttgggattacaggcatgtgccaccacacctggctagtttttgt

SEQ ID NO: 3879 - DNA, 576 bp, Homo sapiens
ccccccaggtacacacttgcctttgcaaaaacaactccctatttggcaaaaggcagtgtttgccctgggacagggccttgcaaccccatgccaggccctgtttattctggcataagccacggtggtggccaagcgctctgagtttattgaacttcctggatttcttatcacatagcctgctctgccagggagccggtgaaatgctgatatgtgcccacgggaagatattaagggggctgcaaacaccacccctgtcccccgaggagcaggcagctctgggcagggctgctggggccagtggggggacggttgaaggggtaggtcagacatggggataaaccttccctctccttaaccttgcctgaacctaggctccccatggctgaattcccgcccctgaattcttggtggtctctccctgtccagcctccacacctttgcctgkgtcttgcctcccatttggatttccttccccagtctctccaaatgaaatcctacctgcttggtaaaataaaagaatgacggaatgagcttcgaggctgggactggtaggtgacggactgtgtctctcctacc

SEQ ID NO: 3880 - DNA, 559 bp, Homo sapiens
cctgtctctactaaaaaaaaaaaagcaaaaattagcagggtgctgtggtgcatgcctgtagtcccagctactcgggaggctgaggcaggagaatcatttgaaccaggaggcagaggttgcagtgagccgagagcaagccactgcactccagcctgggtgacagagcgagactctgtctcaaaaaaaaaaattataaaaaaagggggccgggtgtggtggttcacgcctataataccagcactttgggaggctgaggcaggtggatcactggaggtcagaagttcaagaccagcctagtcaacatggtgaaaccccgtctctactaaatatacaaaaaaattagccaggtgtggtgamgggtgcctgtaatctcagctacttgggaggctgaggcaggagaatcgtttgaacccgggagatggaggttgcagtgagccgagattgcgccattgagctccagcctgggcaacaagagcaaaacttcatctcaaaaaaaatcatattaaaaaaaattagttacttagtgagctaagaggcctttttcctcctgtgtttggtc

SEQ ID NO: 3881 - DNA, 768 bp, Homo sapiens
ggcggggaacgctggccagctgtctgcacggggcctctagcccccaagattgccctggggcctgggcagcagctgcggctcagtcccgccctgcatggctgttggatgccgaaagtacatacagcagacacgcagacacacggccatgtgccccagcacggcgggaacgtgggggagggcagggagccaccacttccgcatctatcctatgtggcagcagttggggttggggtggaacactcctgatattgtaaaagaaaagataggtgccattacagtcctgggaaaaaaaagaagaaaaatgccatagcaaagactgggttggactgaggccgacattcccaaacccaagagtgacgcaaggggtgcagtttcctctgccttcagaaaaagtctgaggactggaaggcccagaaacgaaagtgaaagagattcttgggttcgcattttactcrctcttcctcatatccccatataggccatcaaatgatgcaggaatttttgcttcttaattcagctaaatctgggtgcttgtctcatgatcaggaaaaattaaacatgcggacacattgaagggtaaagagggtggaagttattaagagaaaggaaagctctcaacaaagagagggtcctgcattcgggtttccactcacaaattgaataccagggcaccacacatgagctgaagaggcaagattctccctgcatagagcatgaattctggtagctcaccccatttttcagtgcacatgtgagccttagtctgag

SEQ ID NO: 3882 - DNA, 1032 bp, Homo sapiens
gctggccaatccaaaacaaagtgacattgcaaataaattttaataatctcatatggaatatggcctaatgaggccatatgcaagccactcactcttctatgttctaatttacccctaactcaagacagatgtagtctatgttgttttagcccttctcagtttctcttaaattaaattgggcttcagcaattatgtcatcagcctgcattgaaagggagttttaaaaattaatcatataaaactccctattttaacaaaaaaagatatgttggaaatgtccttcattacctgacaaaagttcttctcagttctgtttatcatgatgttatctcttagacttcatgtgtcgttgccatcatgcttttatttttggtacttaagaagcttataattaaatttatactaacattgaactatgatgttggaatataagttgtttatttttatgtgtttatatatamctttatcactattctattcataaatttctcttctgtttctctgcaatggcttaagtccatacttttgaaattattttgggtagtacataaatttgtgaggtcacagaaatcgataaaataggcctatagaatccctttgattttagagtaatctcatataggaggctacaaatctgatcaatttctctagaattatattttagttttacattcattctaagttttatataatttttatgatgaggtaaagtggctctttaagagtgcacatatttatgtaattatttttcagttttggaggggcttttattcaattaattctgccaccatcaacaaaagaagacttgagatatctcatgagaaaatcacattttaaactttgaagagtaaaatcaagcagattatcacaaaaatcatttctgttgtattcacctccatgatttagttttgttttctgtatgtacacattttgtgttataatttagaaacaatattccttattttaatttaacttttaggttcaagggtccatgtacaggtttattatataggtaagcttgtgtcacggggg

SEQ ID NO: 3883 - DNA, 1613 bp, Homo sapiens
  misc_feature (1)...(1613): n = A,T,C or G
aaaaaaaaaaaaaaaaaaagaaacctgaatggaaaaacaaatccccctcccactctccatctaataacaagctggcttgattgacagatgactaatctgcacaggtagaaaggtgagtaggagaggagaaagctgttgtcgattamaagggcaacagaaataatcagaaattcctggctttcagtgaaaatattaaggtgagtcaaacaataaattaaatacatgttaccatctactttattattccacatacaaatgacaacctgttaatgacatctgccactcactagaagcacagcatatgcatttcccaatagctgctttaaaactggaaaaatcctaatcccagtaagacaggaaaatgctatcagagttcttgcagcatatactcatgccatatccctgtgtgctaccgcatagatgtgaccagaggttaaatatacacttctggaatttgcataaaatgtanaatcatntaaatgaaaatttatttgcattgctttattcatatacactttgctaaaggttttaaaaataatataaactcaatatctcttatcaactttccccaaaatattttttgtggccaaagttatggtttcaagtcaagtatattttaatatgtattttaataatgttgaaattttgatgtttattcaaaataagaattctatattcttaaaagcatttttagatactctttctctaaacaatttaattaaaaattcctgactagctgaagagctttgggcaagtaattttaacatatttgggtctcaatttacttctctgcaaaagggaaaaaaaatagtgtatctacctcagagagttgaaagcaatatataacatatacacaaggtaacatgatgcactgtgcatggaaaactaccatcttcttttatggcatggcatggccttggcagtgtctatcaggaccttctgcttatccacatgtatgtaagaccaccattcaaaataacttccacgaggaagaaagcaaaagttactgttaacagcttcagaaccccacatataccttgttatcttattcagaatccactttgacttctgattagaaatagtaacttagttatcaaaagataaaatgaaatgacaggaatatatcagggtcccagacaagagaaaaaaaaagaaaaagaaagaaaagaaaaggaaggaaggaaggaaggaaggaaagaaagaaaaggaaggaaggaaagaaagaaggaggaaagaaagaaagaaagaaagaaagaaacaaagagaaagaaagaaaggaaggaaggaagaaagagaaagaaaggaaaggagagagagagaaggaaggaagggagagagagaaggaaggaaggaaggtaggagggagggaggggagaaagaaagagaaagagagaaggaaggaagagagagaaagaaagagggagagaaacagaaagggagatagaaggaaggaaagaaagaaagaaagagagagagaaagaaaaaaagaaagaaagaaagaaagagaaagaaagaaagaaagaaaagaaagaaagaggccttccagaatttagccaatagtgaaatcattcatatacctactggattaagttcagtgacatcccactcaaggt

SEQ ID NO: 3884 - DNA, 1613 bp, Homo sapiens
  misc_feature (1)...(1613): n = A,T,C or G
aaaaaaaaaaaaaaaaaaagaaacctgaatggaaaaacaaatccccctcccactctccatctaataacaagctggcttgattgacagatgactaatctgcacaggtagaaaggtgagtaggagaggagaaagctgttgtcgattacaagggcaacagaaataatcagaaattcctggctttcagtgaaaatattaaggtgagtcaaacaataaattaaatacatgttaccatctactttattattccacatacaaatgacaacctgttaatgacatctgccactcactagaagcacagcatatgcatttcccaatagctgctttaaaactggaaaaatcctaatcccagtaagacaggaaaatgctatcagagttcttgcagcatatactcatgccatatccctgtgtgctaccgcatagatgtgaccagaggttaaatatacacttctggaatttgcataaaatgtanaatcatntaaatgaaaatttatttgcattgctttattcatatacactttgctaaaggttttaaaaataatataaactcaatatctcttatcaactttccccaaaatattttttgtggccaaagttatggtttcaagtcaagtatattttaatatgtattttaataatgttgaaattttgatgtttattcaaaataagaattctatattcttaaaagcatttttagatactctttctctaaacaatttaattaaaaattcctgactagctgaagagctttgggcaagtaattttaacatatttgggtctcaatttacttctctgcaaaagggaaaaaaaatagtgtatctacctcagagagttgaaagcaatatataacatatacacaaggtaacatgatgcactgtgcatggaaaactaccatcttcttttatggcatggcatggccttggcagtgtctatcaggaccttctgcttatccacatgtatgtaagaccaccattcaaaataacttccacgaggaagaaagcaaaagttactgttaacagcttcagaaccccacatataccttgttatcttattcagaatccactttgacttctgattagaaatagtaacttagttatcaaaagataaaatgaaatgacaggaatatatcagggtcccagacaagagaaaaaaaaagaaaaagaaagaaaagaaaaggaaggaaggaaggaaggaaggaaagaaagaaaaggaaggaaggaaagaaagaaggaggaaagaaagaaagaaagaaagaaagaaasaaagagaaagaaagaaaggaaggaaggaagaaagagaaagaaaggaaaggagagagagagaaggaaggaagggagagagagaaggaaggaaggaaggtaggagggagggaggggagaaagaaagagaaagagagaaggaaggaagagagagaaagaaagagggagagaaacagaaagggagatagaaggaaggaaagaaagaaagaaagagagagagaaagaaaaaaagaaagaaagaaagaaagagaaagaaagaaagaaagaaaagaaagaaagaggccttccagaatttagccaatagtgaaatcattcatatacctactggattaagttcagtgacatcccactcaaggt

SEQ ID NO: 3885 - DNA, 1613 bp, Homo sapiens
  misc_feature (1)...(1613): n = A,T,C or G
aaaaaaaaaaaaaaaaaaagaaacctgaatggaaaaacaaatccccctcccactctccatctaataacaagctggcttgattgacagatgactaatctgcacaggtagaaaggtgagtaggagaggagaaagctgttgtcgattacaagggcaacagaaataatcagaaattcctggctttcagtgaaaatattaaggtgagtcaaacaataaattaaatacatgttaccatctactttattattccacatacaaatgacaacctgttaatgacatctgccactcactagaagcacagcatatgcatttcccaatagctgctttaaaactggaaaaatcctaatcccagtaagacaggaaaatgctatcagagttcttgcagcatatactcatgccatatccctgtgtgctaccgcatagatgtgaccagaggttaaatatacacttctggaatttgcataaaatgtanaatcatntaaatgaaaatttatttgcattgctttattcatatacactttgctaaaggttttaaaaataatataaactcaatatctcttatcaactttccccaaaatattttttgtggccaaagttatggtttcaagtcaagtatattttaatatgtattttaataatgttgaaattttgatgtttattcaaaataagaattctatattcttaaaagcatttttagatactctttctctaaacaatttaattaaaaattcctgactagctgaagagctttgggcaagtaattttaacatatttgggtctcaatttacttctctgcaaaagggaaaaaaaatagtgtatctacctcagagagttgaaagcaatatataacatatacacaaggtaacatgatgcactgtgcatggaaaactaccatcttcttttatggcatggcatggccttggcagtgtctatcaggaccttctgcttatccacatgtatgtaagaccaccattcaaaataacttccacgaggaagaaagcaaaagttactgttaacagcttcagaaccccacatataccttgttatcttattcagaatccactttgacttctgattagaaatagtaacttagttatcaaaagataaaatgaaatgacaggaatatatcagggtcccagacaagagaaaaaaaaagaaaaagaaagaaaagaaaaggaaggaaggaaggaaggaaggaaagaaagaaaaggaaggaaggaaagaaagaaggaggaaagaaagaaagaaagaaagaaagaaacaaagagaaagaaagaaaggaaggaaggaagaaagagaaagaaaggaaaggagagagagagaaggaaggaagggagagagagaaggaaggaaggaaggtaggagggagggaggggagaaagaaagagaaagagagaaggaaggaagagagagaaagaaagagggagagaaasagaaagggagatagaaggaaggaaagaaagaaagaaagagagagagaaagaaaaaaagaaagaaagaaagaaagagaaagaaagaaagaaagaaaagaaagaaagaggccttccagaatttagccaatagtgaaatcattcatatacctactggattaagttcagtgacatcccactcaaggt

SEQ ID NO: 3886 - DNA, 660 bp, Homo sapiens
atttacagtaaaacaactacatattataggcatgattttatatataccaatattgtgtaggttttgaaacctggttggtggagtatcaaaacaggtgggataattatgggaaaacagggctgttattttctggttttggcttaaaaacaaatagatcatgtaataggaaataaaattatctttcatttaaaaagtctgtggccgggcatggtggcttacacctgtaatcccagcactgggaggctgaggcaggtggatcacctgaggtcgggagttcgagaccagcctaatcaacatggagaaaccccgtctctactaaaaatacaaaaaattagccaggcgtggtggcacaygcctgtaatcccagctacttgggaggttgaggcaggagaatcgcttgaacccgggaggcggaggttgcagtgagccgagatcgtgccattgcactccagcctagccaacaagagcgaaactccgtctcaaaaaaaaaaaaaaatagtctctgcactaatttttcctttaaaataattctgtatgctggtttgttaatatagtttattgaattaacaaaaaatgtgttaagaaactcattttgctcttgtatatattctgttttcagagcagcggaaagagctcagtgctagaaagcctggtggggag

SEQ ID NO: 3887 - DNA, 1016 bp, Homo sapiens
taagaggtaytgatgagcactctctaggttctatttactagacatggagataaagtggtaagacaagcttttctattcagctttggccacaggagggagtggcagtgagggcccagcctctcttgtgtcttggtgcattttaatcatcctgcttttgatttgtggtggttccaaactgagtggaaaatcacctgtattgcaatggaagcttgttgaagaggggaaccaactctattgtttatcctgagtcagactccctaagaggggaacaaacactcacctgacatggagtgggatcttgggcaccttcttagagaccttgaaccggtctctgtccccataggtgtcagtgaagtacactccggctacacttgtcaccttgttcccagggaacctggagagcaccttgtcagggccgtgctggctggcccagtaccaggcctggcccccgattaacaagccccctccatgtttcacaaactggatcagcgttgcagtcaaggtgtcattgtaggcattgatacagtaaacccctaggggctctcctggttctggcttgacctgtgcctcaagcccagcatcctgtaggatgtttactagaggtgccagggatggacgcactcccacgggagccccaggacagggacagagccagctcactgcattgaggagaaatgaagccaagccagcatgcgacaggtagccctcatgggacacaaccacgaggcggcctcggccgtaggaggaggcagcaatgagcacctggcccttgtcattcaccatcacggggaaggcggcttctccaataagaaggagttcactggggatggggcctctggggacatcccagcatgtcactccatccatgagggcctcaaacgcagcagcagcaatggtcgccatggttctatcagctgctgcagggggaagcaaagactttcatgtatttaagagatactgataagcactgctggtcagaacagatgaaggaacaggtgaaaaaagcaaacaactaa

SEQ ID NO: 3888 - DNA, 1016 bp, Homo sapiens
taagaggtattgatgagcactctctaggttctatttactagacatggagataaagtggtaagacaagcttttctattcagctttggccacaggagggagtggcagtgagggcccagcctctcttgtgtcttggtgcattttaatcatcctgcttttgatttgtggtggttccaaactgagtggaaaatcacctgtattgcaatggaagcttgttgaagaggggaaccaactctattgtttatcctgagtcagactccctaagaggggaacaaacactcacctgacatggagtgggatcttgggcaccttcttagagaccttgaaccggtctctgtccccataggtgtcagtgaagtacactccggctacacttgtcaccttgttcccagggaacctggagagcaccttgtcagggccstgctggctggcccagtaccaggcctggcccccgattaacaagccccctccatgtttcacaaactggatcagcgttgcagtcaaggtgtcattgtaggcattgatacagtaaacccctaggggctctcctggttctggcttgacctgtgcctcaagcccagcatcctgtaggatgtttactagaggtgccagggatggacgcactcccacgggagccccaggacagggacagagccagctcactgcattgaggagaaatgaagccaagccagcatgcgacaggtagccctcatgggacacaaccacgaggcggcctcggccgtaggaggaggcagcaatgagcacctggcccttgtcattcaccatcacggggaaggcggcttctccaataagaaggagttcactggggatggggcctctggggacatcccagcatgtcactccatccatgagggcctcaaacgcagcagcagcaatggtcgccatggttctatcagctgctgcagggggaagcaaagactttcatgtatttaagagatactgataagcactgctggtcagaacagatgaaggaacaggtgaaaaaagcaaacaactaa

SEQ ID NO: 3889 - DNA, 1016 bp, Homo sapiens
taagaggtattgatgagcactctctaggttctatttactagacatggagataaagtggtaagacaagcttttctattcagctttggccacaggagggagtggcagtgagggcccagcctctcttgtgtcttggtgcattttaatcatcctgcttttgatttgtggtggttccaaactgagtggaaaatcacctgtattgcaatggaagcttgttgaagaggggaaccaactctattgtttatcctgagtcagactccctaagaggggaacaaacactcacctgacatggagtgggatcttgggcaccttcttagagaccttgaaccggtctctgtccccataggtgtcagtgaagtacactccggctacacttgtcaccttgttcccagggaacctggagagcaccttgtcagggccgtgctggctggcccagtaccaggcctggcccccgattaacaagccccctccatgtttcacaaactggatcagcgttgcagtcaaggtgtcattgtaggcattgatacagtaaacccctaggggctctcctggttctggcttgacctgtgcctcaagcccagcatcctgtaggatgtttactagaggtgccagggatggaygcactcccacgggagccccaggacagggacagagccagctcactgcattgaggagaaatgaagccaagccagcatgcgacaggtagccctcatgggacacaaccacgaggcggcctcggccgtaggaggaggcagcaatgagcacctggcccttgtcattcaccatcacggggaaggcggcttctccaataagaaggagttcactggggatggggcctctggggacatcccagcatgtcactccatccatgagggcctcaaacgcagcagcagcaatggtcgccatggttctatcagctgctgcagggggaagcaaagactttcatgtatttaagagatactgataagcactgctggtcagaacagatgaaggaacaggtgaaaaaagcaaacaactaa

SEQ ID NO: 3890 - DNA, 1016 bp, Homo sapiens
taagaggtattgatgagcactctctaggttctatttactagacatggagataaagtggtaagacaagcttttctattcagctttggccacaggagggagtggcagtgagggcccagcctctcttgtgtcttggtgcattttaatcatcctgcttttgatttgtggtggttccaaactgagtggaaaatcacctgtattgcaatggaagcttgttgaagaggggaaccaactctattgtttatcctgagtcagactccctaagaggggaacaaacactcacctgacatggagtgggatcttgggcaccttcttagagaccttgaaccggtctctgtccccataggtgtcagtgaagtacactccggctacacttgtcaccttgttcccagggaacctggagagcaccttgtcagggccgtgctggctggcccagtaccaggcctggcccccgattaacaagccccctccatgtttcacaaactggatcagcgttgcagtcaaggtgtcattgtaggcattgatacagtaaacccctaggggctctcctggttctggcttgacctgtgcctcaagcccagcatcctgtaggatgtttactagaggtgccagggatggacgcactcccacgggagccccaggacagggacagagccagctcactgcattgaggagaaatgragccaagccagcatgcgacaggtagccctcatgggacacaaccacgaggcggcctcggccgtaggaggaggcagcaatgagcacctggcccttgtcattcaccatcacggggaaggcggcttctccaataagaaggagttcactggggatggggcctctggggacatcccagcatgtcactccatccatgagggcctcaaacgcagcagcagcaatggtcgccatggttctatcagctgctgcagggggaagcaaagactttcatgtatttaagagatactgataagcactgctggtcagaacagatgaaggaacaggtgaaaaaagcaaacaactaa

SEQ ID NO: 3891 - DNA, 1288 bp, Homo sapiens
ggggctagaaagggagctgaaacataaattagcggtgtttatccaagatgacgatgctcctgctttgtcaggtttgcttcctgtccctgccagttattagctaggaaacgtggggaaaattgcttagcttttccaaactccatctttaaagtgagaatagtaactttcaggtttattataatgattgaaagagataatacatatgttaaatacctaacatatattaaaccttattaaatagcagctactttcattgttttccacacttaaacattgtaaacagatattatacaagatttaaatattggtaactagctgtctgagatcattaatattgcccttaggatattgtcaaatcagctgttgaaatttacctgatatactaactgctatgcttactcacttttccctccctccctccctgcttccccctcccttccccctccctccctctgtcatccccttccttccttctttcctcctttcctttctttctttagttttcttttaagaaatgcctttttatgaaaatatttcaaaaggaattcaagtttattttgaaaaaaatgcacaccaatacagaaatatagagaggaaaatggcaactcatcctcctcaccacaccaccagctccagtctcatgcctctggaccaaggtagccaatcctaaaagtttgacatggatcatctcagatgcttatctatgtgtgtgtgtgtgctctgcacattgattttttagttaatgtatcatgttggagaatgtctgcctttttacttcatatttttgcaacaagttagcagaacacaaccttctagggtctcaatgtcttgtcttcaggatgcaggacaattgtcttctggctgtaagtaagcttgtaagtcattctgatcaaatcatctccatcctttttttttttccaatggatgctgtgaatacattaccatctccaaatgtaatgtcaattcatatttttattttctttgtagcagttcttgctttcagtattgtgtttttgcagggcataaaaattaataaaaattttatttttgttagagtgtaactttaatccatagaaaatgttcatttttaatttttcctctttgaaatcacttgcatcccttattaatgctgatatgtctgcttttktgtttttgtattttttaaaataaaactttgttgattttgtcattttcaatgcttttatgtttagtttcaggtgtgtcttttataagcagcttatatccagatgtttttaacccaatctgacagcttctgtgagatggaaat

SEQ ID NO: 3892 - DNA, 594 bp, Homo sapiens
gatagagaaatcactataaaaacaacctttacaatataataagtattcaataatcagttgctgaatgaatgaattattaaggaaaaggaattaagatgaagagaaacaatacaaagataacaattgacaatcataatcatttaatgcccttaaatttgtaataactactgaacatctctccatgcttctattcactcctacatcgactgcactgattttatatataaacacatacataaataaaccatgtacttgcttatctataacaagccactccaactgagtggcttaaaacagtaagtcatttattattattattactattgctgttgtaattattagtgaagaccaagtcatgctctgtcacccaggcgagagtgagcgyagtggtgcaatcacagctcactgcaggcccgacctcctgagctcaagaaatcctcctacctcactcagcttttggagaagctgagactataggggtgtgccactatgccctgctaatttttaaatcattttttgtagagaaaaggctctcactttgttgcccaggccggtcttgaactcctggtttcaagtgattctcctgcctcagcc

SEQ ID NO: 3893 - DNA, 594 bp, Homo sapiens
gatagagaaatcactataaaaacaacctttacaatataataagtattcaataatcagttgctgaatgaatgaattattaaggaaaaggaattaagatgaagagaaacaatacaaagataacaattgacaatcataatcatttaatgcccttaaatttgtaataactactgaacatctctccatgcttctattcactcctacatcgactgcactgattttatatataaacacatacataaataaaccatgtacttgcttatctataacaagccactccaactgagtggcttaaaacagtaagtcatttattattattattactattgctgttgtaattattagtgaagaccaagtcatgctctgtcacccaggcgagagtgagcgcagtggtgcaatcacagctcactgcaggcccgacctcctgagctcaagaaatcctcctacctcactcagcttttggagaagctgagactataggggtgtgccactatrccctgctaatttttaaatcattttttgtagagaaaaggctctcactttgttgcccaggccggtcttgaactcctggtttcaagtgattctcctgcctcagcc

SEQ ID NO: 3894 - DNA, 1247 bp, Homo sapiens
tgcatgtgtttcatgttayaattcttaccaaaactggtattataacatgaaacacatgaatttcatgtatgaaatgaaatttgtaacctggcaagatgtctcacctatgtaatcccagcactttgggaggccaaagcaggcggatcaccggaggtcaggagtttgagaccagcctagccaacatgtgaaaacctcgtctctacaaaaatacaaaaattagccaggcgtgatggcgggtgctgtaattctagctactcgggaggctgaggtggaagaatcgcttgaacccaggaggcagagattgcagtgagccgatatcacgccattgcactccagcctgcgtgactgaacgagactctgtatccaaaaaaaaaaaagtgatcttctctgaatgtcaaatgccctgctatcctgcagagagtagccatattttgccaagcagatcaatttccattaattagatatctgaatgtaagagacattaaaaaaagtgtgtgtaaagggataaacagcggttacagagtgttgtgctggagctaacttgtagtgatttataagattcaatttccaaattttcagaacttgcagaacagtcaacatcagtttggtagtttataataggtcatgatggaaatacagcacaacagctggcagatgttacaaatcggagtattgttttgttttttctttcacatccgtaacaacagaaacaagtcgtgaaatccattttaagtggatggtatctttttcacattcccaacctaaagatgaagtttcgaatatattttaaaatggttttgaaatagtaagctaaaagtatgaggaatttaaatgagaatccctgattttctttctttcttaaacagtttcaaataatcagataagcctctaaaccatctagatattaaataagattcacatgctaaaggtggtgactaagatatagtaatgtatcatcaggtttctgagtacagagaattagcaaagtgaaatggaaattttgctgaaaaggatagttgagaataggggttggaaacagatgggaatatgccaatagtctattttttcaaatactgtaattagcaggagttcaaaacgttcaaatggcaatgtaattaccaccaatccagtgttaaggtagcaaaccagggaggattacaacatattatataaaatctagaaactttaagagtatcaagttatgtatatccaactacttatattcatggacaaaagaaatacacatt

SEQ ID NO: 3895 - DNA, 1247 bp, Homo sapiens
tgcatgtgtttcatgttacaattcttaccaaaactggtattataacatgaaacacatgaatttcatgtatgaaatgaaatttgtaacctggcaagatgtctcacctatgtaatcccagcactttgggaggccaaagcaggcggatcaccggaggtcaggagtttgagaccagcctrgccaacatgtgaaaacctcgtctctacaaaaatacaaaaattagccaggcgtgatggcgggtgctgtaattctagctactcgggaggctgaggtggaagaatcgcttgaacccaggaggcagagattgcagtgagccgatatcacgccattgcactccagcctgcgtgactgaacgagactctgtatccaaaaaaaaaaaagtgatcttctctgaatgtcaaatgccctgctatcctgcagagagtagccatattttgccaagcagatcaatttccattaattagatatctgaatgtaagagacattaaaaaaagtgtgtgtaaagggataaacagcggttacagagtgttgtgctggagctaacttgtagtgatttataagattcaatttccaaattttcagaacttgcagaacagtcaacatcagtttggtagtttataataggtcatgatggaaatacagcacaacagctggcagatgttacaaatcggagtattgttttgttttttctttcacatccgtaacaacagaaacaagtcgtgaaatccattttaagtggatggtatctttttcacattcccaacctaaagatgaagtttcgaatatattttaaaatggttttgaaatagtaagctaaaagtatgaggaatttaaatgagaatccctgattttctttctttcttaaacagtttcaaataatcagataagcctctaaaccatctagatattaaataagattcacatgctaaaggtggtgactaagatatagtaatgtatcatcaggtttctgagtacagagaattagcaaagtgaaatggaaattttgctgaaaaggatagttgagaataggggttggaaacagatgggaatatgccaatagtctattttttcaaatactgtaattagcaggagttcaaaacgttcaaatggcaatgtaattaccaccaatccagtgttaaggtagcaaaccagggaggattacaacatattatataaaatctagaaactttaagagtatcaagttatgtatatccaactacttatattcatggacaaaagaaatacacatt

SEQ ID NO: 3896 - DNA, 1247 bp, Homo sapiens
tgcatgtgtttcatgttacaattcttaccaaaactggtattataacatgaaacacatgaatttcatgtatgaaatgaaatttgtaacctggcaagatgtctcacctatgtaatcccagcactttgggaggccaaagcaggcggatcaccggaggtcaggagtttgagaccagcctagccaacatgtgaaaacctcgtctctacaaaaatacaaaaattagccaggcgtgatggcgggtgctgtaattctagctactcgggaggctgaggtggaagaatcgcttgaacccaggaggcagagattgcagtgagccgatatcacgccattgcactccagcctgcgtgactgaacgagactctgtatccaaaaaaaaaaaagtgatcttctctgaatgtcaaatgccctgctatcctgcagagagtagccatattttgccaagcagatmaatttccattaattagatatctgaatgtaagagacattaaaaaaagtgtgtgtaaagggataaacagcggttacagagtgttgtgctggagctaacttgtagtgatttataagattcaatttccaaattttcagaacttgcagaacagtcaacatcagtttggtagtttataataggtcatgatggaaatacagcacaacagctggcagatgttacaaatcggagtattgttttgttttttctttcacatccgtaacaacagaaacaagtcgtgaaatccattttaagtggatggtatctttttcacattcccaacctaaagatgaagtttcgaatatattttaaaatggttttgaaatagtaagctaaaagtatgaggaatttaaatgagaatccctgattttctttctttcttaaacagtttcaaataatcagataagcctctaaaccatctagatattaaataagattcacatgctaaaggtggtgactaagatatagtaatgtatcatcaggtttctgagtacagagaattagcaaagtgaaatggaaattttgctgaaaaggatagttgagaataggggttggaaacagatgggaatatgccaatagtctattttttcaaatactgtaattagcaggagttcaaaacgttcaaatggcaatgtaattaccaccaatccagtgttaaggtagcaaaccagggaggattacaacatattatataaaatctagaaactttaagagtatcaagttatgtatatccaactacttatattcatggacaaaagaaatacacatt

SEQ ID NO: 3897 - DNA, 1247 bp, Homo sapiens
tgcatgtgtttcatgttacaattcttaccaaaactggtattataacatgaaacacatgaatttcatgtatgaaatgaaatttgtaacctggcaagatgtctcacctatgtaatcccagcactttgggaggccaaagcaggcggatcaccggaggtcaggagtttgagaccagcctagccaacatgtgaaaacctcgtctctacaaaaatacaaaaattagccaggcgtgatggcgggtgctgtaattctagctactcgggaggctgaggtggaagaatcgcttgaacccaggaggcagagattgcagtgagccgatatcacgccattgcactccagcctgcgtgactgaacgagactctgtatccaaaaaaaaaaaagtgatcttctctgaatgtcaaatgccctgctatcctgcagagagtagccatattttgccaagcagatcaatttccattaattagatatctgaatgtaagagacattaaaaaaagtgtgtgtaaagggataaacagcggttacagagtgttgtgctggagctaacttgtagtgatttataagattcaatttccaaattttcagaacttgcagaacagtcaacatcagtttggtagtttataataggtcatgatggaaatacagcacaacagctggcagatgttacaaatcggagtattgttttgttttttctttcacatccgtaacaacagaaacaagtcgtgaaatccattttaagtggatggtatctttttcacattcccaacctaaagatgaagtttcgaatatattttaaaatggttttgaaatagtaagctaaaagtatgaggaatttaaatgagaatccctgattttctttctttcttaaacagtttcaaataatcagataagcctctaaaccatctagatattaaataagattcacatgctaaaggtggtgactaagatatagtaaygtatcatcaggtttctgagtacagagaattagcaaagtgaaatggaaattttgctgaaaaggatagttgagaataggggttggaaacagatgggaatatgccaatagtctattttttcaaatactgtaattagcaggagttcaaaacgttcaaatggcaatgtaattaccaccaatccagtgttaaggtagcaaaccagggaggattacaacatattatataaaatctagaaactttaagagtatcaagttatgtatatccaactacttatattcatggacaaaagaaatacacatt

SEQ ID NO: 3898 - DNA, 1107 bp, Homo sapiens
atgttccttgctgagaaaaagaattcagtaatatttctcctatttgcttttgaaagaagagaaatatggctctgttccgcccagcccacaggcagccagagtttaagsttatctcccttgttccctaaacattgctgctatcctgttcttttttcaaggtgcccagatttcatattgtttagacaatttgtgcagttaacgcaattatcacagggtcctgaggcaacattcatcctcagcttatgaagatgatgggattaagagattaaagtaaagacaggcataggaaatcacaagagtattgattggggaagtgataagtgtccattaaatcttcacaatttatgttcagagattgcagtaaagacaggcataagaaattataaaagtattaatttggggaactaataaatgcccatgaaatcttcacaatttatgttcttctgccatggcttcagctggtccatccatttggggtccctgacttcccgcaacactgaaccttggtgtgagagtcaccatcctacctgtggactgcattcacgtatgagagtcacaattccaacttttgactgcctctgagtgtgagattcaggacgttgtaaggaggctgtgttcaggtgggaggatgagaatccttattgtcagccaggtgtgcatatgagagtcagaatctgacctgtttgctggtttctgttatgacactctctgtaccacctgagggttttatatggcacatgtgagactcacaatctgctttgagacctttgtgcttgcccaggtgtttcttacaataccaaatgtaggatctcacccattgccctaagcccaggcatgagagtaaacatctctcttatttttgggtccaggtaggagagtcatttttgttcctgttatctggttacagaaattggtcaacatccctcctgtggctcaatccacatgtgacagacatgatccaactgtggactgtgtctgtcagtgagattcaggaactcactattttgctgtctcctatgtaaaggtgacaattttaacagtcagctgagtgtgcatacaatagtcacaacctcagtgtggtactgggtcctatgatgacactctctg

SEQ ID NO: 3899 - DNA, 609 bp, Homo sapiens
tctgatatataaaaatgtagggttttttttacctcctgctgttgattctcatggaaactatacttatcrtaggtttgggaaatgcagctcagggctctgagatgactgacaggagtgctaacactagatgtaatccaggatggcggattagagaggagacctttacagctctcttgcattctaattagctgacagtcatgaaagatgtaagctccagacattgacattgtcacttcaggcaaggacaaaagtcatctaatttatattaatatgtgaaaagtttaagtctgcccatttaaaatgggagagtttaggcaaactttcattagcttttttggctgacaaatgaaatgatgcaagactgtaaaagacacatcatttttctataaattaatagagattggaaatcatcttatggtaaatcacctcttttatcagcagaaatatctctgaactggaacaaaaacgagaatatttcattaacttaaaaatcttattcttgtcatttttaaagctatttacattattgtctatcccatgaattaacattaggagaaaatacatttgtggacagttgtgaaatttggagataaaagtgaagatatttgt

SEQ ID NO: 3900 - DNA, 609 bp, Homo sapiens
tctgatatataaaaatgtagggttttttttacctcctgctgttgattctcatggaaactatacttatcgtaggtttgggaaatgcagctcagggctctgagatgactgacaggagtgctaacactagatgtaatccaggatggcggattagagaggagacctttacagctctcttgcattctaattagctgacagtcatgaaagatgtaagctccagacattgacattgtcacttcaggcaaggacaaaagtcatctaatttatattaatatgtgaaaagtttaagtctgcccatttaaaatgggagagtttaggcaaactttcattagcttttttggctgacaaatgaaatgatgcaagactgtaaaagacacatcatttttctataaattaatagagattggaaatcatcttatggtaaatcacctcttttatcagcagaaatatctctgaactggaacaaaaacgagaatatttcattaacttaaaaatcttattcttgtcatttttaaasctatttacattattgtctatcccatgaattaacattaggagaaaatacatttgtggacagttgtgaaatttggagataaaagtgaagatatttgt

SEQ ID NO: 3901 - DNA, 587 bp, Homo sapiens
cttttcatgctatctcagagtaatcccaggaaatgttctttcatgatcaaagcaaatcactgcctggaaaaaaatgcactattttcagttaactctcctactagcaagtgccaaacgcatttgaagacagaacgtttcacagtagagaaagttaagtactgcactaaaaagcagccacgagattactaagacaatctacacaagaaaacatgtgggctgactatacatgtttattcagggcaaaaccaccatcagtgtgcagagcttagctttatatatctcacaacatgccccagagaataacagagactcagaaaagacagaaggaaaatatgaatggcttccaactgtcaaaacaygcagttgggcagctatattaatcgtgatttaaaagccttgtaacatattctatttcaatggtattctatttttccttctgtgcaaaggaatatagtccctataagaaaatagacaatttgcacttgaactaactttttgtgttacagccctaaccaaggacagttatcatagtgtttctatctcagcagataagaattcctggttaagaaagccacaaaccacacagg

SEQ ID NO: 3902 - DNA, 587 bp, Homo sapiens
cttttcatgctatctcagagtaatcccaggaaatgttctttcatgatcaaagcaaatcactgcctggaaaaaaatgcactattttcagttaactctcctactagcaagtgccaaacgcatttgaagacagaacgtttcacagtagagaaagttaagtactgcactaaaaagcagccacgagattactaagacaatctacacaagaaaacatgtgggctgactatacatgtttattcagggcaaaaccaccatcagtgtgcagagcttagctttatatatctcacaacatgccccagagaataacagagactcagaaaagacagaaggaaaatatgaatggcttccaactgtcaaaacatgcagttgggcagctatattaatcgtgatttaaaagccttgtaacatattctatttcaatggtattctatttttccttctgtgcaaaggaatatagtccctataagaaaatagacaatttgcacttgaactaactttttgtgttacagccctraccaaggacagttatcatagtgtttctatctcagcagataagaattcctggttaagaaagccacaaaccacacagg

SEQ ID NO: 3903 - DNA, 693 bp, Homo sapiens
taggcagaagggtctgtcactactgaagacaacaaaggataattcactttagtcagtgctgacttgcttggagaagaaatgtaaaagcactcaaaggcagaaaataaaagcagttccagtcctggaagtcatttggacagttccagttgaagagccaaagcagaaaattaacattcyagctcctagaaattttattttcgcctttcttctaggcataatttataagtcaaatagaattgctttggcctgggtgattttgcataatggttcctagcatggtattatggtctgcattcagcattatttttcttacatttctgtagagcaatgacagcactattccccaagcatcccaacaaagctctcagcccacacccagctgctgcccaggccagtgacctgtggaaagacaaagacaagaatgctatgcaataaatcagaaatggcctggaagataaacctggccaaagaactgagtgcctgcagccagactacagctgttttctctttgggcagcaaggaggaagcaagtgtgactcctcagactccctcaagccctgctgatcaagacaatggttcttcttcattactcatctatatgaaatagttcagacattgctgtttacttatttataataaacctaattactcatcttattgccataccttgtcttcccagtcttatttatgcat

SEQ ID NO: 3904 - DNA, 1042 bp, Homo sapiens
tcccacccactgtggagttgaggaagttgcgacattcattcacttctttttactcgctcagttggttgaagtttcctcctgaggcaccacagactgttctcacagctgacagagggagctcccttattcgctggaggcttcacgcagagagaaatgtcaaaacccagagtcagatcagtctgagcacacgtgtctgctggtaactttctgtggaaaccaggggtaagggtgaatgtactcacagcatctgctgcacaagttttatttcatgtggtcagaacatgctaactgtattatttcattgtcttttccttttaaaaaatattattggctgggtgcggtggctcatgcctgtaatcccagcactttgggaggcctaggcaggaggattgcctgagctcaggagttcacgaccagcctgggcaacaaggtgaaaccccatctctactaaaaatacaaaaaattagccggatgtgatggtgtgcgcccgtagtcccagccacttgggaggctgaggcaggagaaatgcttgatcccagagacggaggttgcagtgagccgagatcgcgccactgcattccagcctgagcaacagagtgagactccatctcaaaaaaaaaaaaaattattattattaaggagtgctaaattttraaaatgttacatataaactagaaaaattatctgttatctgataatggattttaataaatattgattggttagatctatatattaattttataaggtctctttaattcattttatttttttaggactgagagaactgtgttgaaatctcctgttattagtatctttttgcttgcataacctgcaatatctactgttgctgttttattaggtgaatagatctcaataacttacattttcattgtggattatagtctttagaattgttagtttcattcattgcctctcagtttttgaacttttcattttgcaataattatagattcacaggagtttgaaaagatagtacaaagagatcccacatgccgtcggtacattatgtgtgtgtagt

SEQ ID NO: 3905 - DNA, 1342 bp, Homo sapiens
tatacttgtgttggttggttttccaacctttctagtacattaatttgctgtcatcagccactcgctgctgaaggagcctccatgacatctccccagctctttttattcatcttgataagccaaatctctgccctccattttcaggaaacacctctaaaattctttcaaaatctgttatcctaacagagcactaagtttaatatttatagatcatctatattttgccagacactgcagtagctgatgggttttaatgatgaaataaacacagcacatgtgctcttgggacctttaaaccagtgaggaaacaatggttgtgcacatcagtaagtattataggaacacaggacatgagcagaagacagagaaggaacacgtggctcatgtgtgaaagacaaaaagaaatagcccaagtgtgtggtgtaaagaaatctattctatwtgaaaaaacgcatgtccacagactggagacccagaaaacaatgcagttccatgatggaatacacagatatttgatgtgacccatgtgtagtatggatgcaggaagctggccagagctcgaattaatgagggcacacaggccatgggaggagtcctggagacagacccctaagtgaggggagttgctgaagagttctactggagaggatatagacatgtagtgaggagccaaatgtgtgaagaaatgtagaaagtatccacttgttagttttcacatacattcaacacacattaggtggtaagtacttgtattgtagttgaaagtcattatgagactggaaggctcagagacacccagggaactcctgaagacacactctgaggggcatagagccttgtgtgggagacctagggcataagaggcagacagaggtgaactgtcaaagggccatgcaggttaagagccgtgcaagatccaaggagagataagtaacgtgaagtaagaggaagaagatcttaatggaaggagggtccatgtagggttaagtatggagttaatgggtggggtagattatgggactgaaataaaatgtgcctccacacaacttgattaaacgaaataggttctaaaagttttggattaaaagtaagttgctcaaaatagcaaatcccatttgaatgctgttttggggaaaaaataatgaccttcctcagttactacacgtctgaatttattaatttctttatttgtcctttattcaatgcccactatgtgccagacccagttctgggccttgggacacatcagtagattaatagactacctgctctcaaagagtgtgaattctgggtagtatccactgcctagatcataaatatactttatgatctcctgaatgca

SEQ ID NO: 3906 - DNA, 1342 bp, Homo sapiens
tatacttgtgttggttggttttccaacctttctagtacattaatttgctgtcatcagccactcgctgctgaaggagcctccatgacatctccccagctctttttattcatcttgataagccaaatctctgccctccattttcaggaaacacctctaaaattctttcaaaatctgttatcctaacagagcactaagtttaatatttatagatcatctatattttgccagacactgcagtagctgatgggttttaatgatgaaataaacacagcacatgtgctcttgggacctttaaaccagtgaggaaacaatggttgtgcacatcagtaagtattataggaacacaggacatgagcagaagacagagaaggaacacgtggctcatgtgtgaaagacaaaaagaaatagcccaagtgtgtggtgtaaagaaatctattctatatgaaaaaacgcatgtccacagactggagacccagaaaacaatgcagttccatgatggaatacacagatatttgatgtgacccatgtgtagtatggatgcaggaagctggccagagctcgaattaatgagggcacacaggccatgggaggagtcctggagacagacccctaagtgaggggagttgctgaagagttctactggagaggatatagacatgtagtgaggagccaaatgtgtgaagaaatgtagaaagtatccacttgttagttttcacatacattcaacacacattaggtggtaagtacttgtattgtagttgaaagtcattatgagactggaaggctcagagacacccagggaactcctgaagacacactctgaggggcatagagccttgtgtgggagacctagggcataagaggcagacagaggtgaactgtcaaagggccatgcaggttaagagccgtgcaagatccaaggagagataagtaacgtgaagtaagaggaagaagrtcttaatggaaggagggtccatgtagggttaagtatggagttaatgggtggggtagattatgggactgaaataaaatgtgcctccacacaacttgattaaacgaaataggttctaaaagttttggattaaaagtaagttgctcaaaatagcaaatcccatttgaatgctgttttggggaaaaaataatgaccttcctcagttactacacgtctgaatttattaatttctttatttgtcctttattcaatgcccactatgtgccagacccagttctgggccttgggacacatcagtagattaatagactacctgctctcaaagagtgtgaattctgggtagtatccactgcctagatcataaatatactttatgatctcctgaatgca

SEQ ID NO: 3907 - DNA, 589 bp, Homo sapiens
ggaaggttgaagagctgaaacatagtatgtattaatatttttagataacactgttctgtacatattataattctgcatacacgacacaattcatttgccaaaatgtatataactttacaagtctgagtagaagttattgagggggaaaaaatgacttccctccactctyctagtttatttggctttgtcagttaaattgacataaaacagattaacaacagaaatactgttttaattatgtacattgatgtggtttgactgtgtccccacccaaatctcctcttgagttcccacatgttgtgggagggacccagtgggtgataacggaatcatgggggcaagtctttcccgtattattcttgtgatagtgaataagcctcacaagatctgatggttttataaaagggagtttgcttgcacaagctctcattttttttgcctgccatcatccaccctggagatggagaccccatgatccaaaaagtttattcccagagatagactaagaagtcaaagacctttgttgtcacagttgataaggaaaatgtttgtgagaatgatggattttgtcttccacaggcatgtgggg

SEQ ID NO: 3908 - DNA, 1273 bp, Homo sapiens
tttgtgatcattcatgttttatgtatcagtagtacattcctttgtattttgggtaataattcattgtatggatacacctagcatgtttatacatttaccggttggagaacgtttgggtaatttccaatgtgggaccataaagccactataaacattctcacacagatttttgtttgaacatacgttttcatttcacttggaaaaatgcctgggagtgggattgctggattgtatggtaagtgaatgtttaaattgatgagaaactgctaaactgttttctatggtggtgtagcgttttgtttttagaccagcaatgaatgacagatccagttgctcagcatcttagtcattctaataggtgtatagtggtatcacataatggttttaattagcatttccctaatgactaatgatattgagcatcttttaagtgctcctttatgttctatattttttggttatttcatagtactagcaaagtactaacaatgtattagatgcttaacgaatatttgcagattgttaaattgcagatcattaatactactctcttttgcatgccatttgcatcccattactagctgttaccatttattgagtacctactgtatgccaagcgctgtagtaagtgctttatatatggcatcttattaatacacataagaaccctatgaatgtgctgggtggtattgttcccatttgataaggaaaagggacaaacagtgctgacttgtgactctccaaatccttctctttccccaggaattttgggtttgcttgttcaggttctggaaggtttttatactactgctaaggatgagtgaagaggtaaatttaaataatccaaaacaggctgaaatgatccacatgataaagagataatttagaggttagtggggccatgaggaagaaagggaaaagtacttgggagaggcaagggaagtatagttgtggaggtagaagagagagaaagaggttctttgtttgtgtgtttgtttktgtttcagtttttgttcaaaaaaaaaagacaagagggagcaagaattgtgaagaagactgaggggttagagggatgaagagagtgtttagtatgctaattatgaaatattctctttttggagtttttttgagtgaataagattaaaacaaggtttttagggaaaaggaattggatttttttatattgatactagtataagccatagagcttattaatatttcaacagttatacacacccttacttgtgcacgtgtgtgtgtactcatgtgtatg

SEQ ID NO: 3909 - DNA, 683 bp, Homo sapiens
agtggatcatcttaagcacatccatgaccacgaggctagtgcactgagccaaagacatgaaaccctgggcttcattcctggctctgccacctcctagctttagtttccacraagactctgggttgcagaaagaagaggtgatagagaaggggagctagcaagaaaagaagtcatggccagggagagagagaggctgatgaccattaattaagtcccaattaaaaaaaggcaaccccagttcagttataggaaggttaacaattcaaggggagtcggcttcctcagaagttgtgactggtaaatgggcaattctctagggaagatattgactcagtaattacacaggaaatagaaaatgagtgagaactggaagcaggttcctcatgggaagaaggaaaaaattgaaagttcggagatagggagatctgggttcaagtgattgctgtacttcttataatctgtgtaactttggcaagttacttaaataaactcttagaatctccatttcctgtcagggttaataagaggtgccttggactatggagaagtttcaacaacttaaagccatcccaaatgaacccaccgtggtttgagttcaaaagaatgggcaaaccattccaaataataacaacctgagaaaccagttagaatggcgatcattaaaaagtcaggaaacaacaggt

SEQ ID NO: 3910 - DNA, 1634 bp, Homo sapiens
aaaatgatgagttcatgtgctttgtagggacgtggatgaagctggaaaccatcattctcagcaaactatcacaaggagaaaaaaccaaataccgcatgttctcactcataggtgggaaatgaacaatgagaacacatggacacaggaaggggaacatcacacaccggggactgttgtggggtcgggggacgggggagggatagcattaggagatatacctaatgctaaatgacgagttaatgggtgcagcacaccaacatggcacacgtatacatatgtaacaaacctgcacgttgtagcatgtaccctaaaacttaaagtataataataataaaatttaaaaaaaatctcaagttgttttttttttwaaataaattcacagggtcagttgccaagaaagcagaatataaaggtagcacctccctagctgggattggtgcttttgagttgcaaggtgctcaaaacccattctcatgacatcttggtttccccagccatcagctaatgatcatgaactcaagtgctgagtggtggcttcatgatcaagaagatgctttgcactcctgcttccgcatccccttagaaacgggtatagtggaatagataagtatgccagctctggagctagacagatgtaggcttgactgaatacatctcagcacctgagaataaaatgcatttttttcagagttataaatgaatttggcaggtggttggctgaccagagggctagtttctccagatgctactttcctgaggtgggagagcagttcctggttgccgagaccttaggacaggaggagaacgaggcagattgcttaaggggagggaggaagtgaagggttgggcttagatttgagaaatttcaaacccacaagaccaccaaaatgcttgaggcatcaagtggctccttgtgttctttagtcccctgtcaggagaccattttccaaatcccccagttaacagggtaaaagtgaatgccctactgcccagcagctctccattacctgtgacagaagccttcaacctactgggtgcttatcacattctcttgggtagaggctgacaatgacagcatgtcactttaattttccatgaagcaagatagattagtggttttcactagattctggtttcagaaagacatacatttcagttgtgaatgcacaactaaactggctgtgtaatgttggtcaaaataacctgtctgatcttcagtttttattctgcataatggagagcaatataataatagttaaccttcatggatgggtttctatgtgccagacacagtgttatttgctgtatgtgaattgtctccttttatgcttctggcaagtctgggttctgtactattatatcctcattttttacagattgggagactaccttagataaattttaaaacttactcaagtttacatctacaaagtgatggagttgcggttctgtgtcagacactaaagcctcattaataagatgatagcccaaaggacttagcacctgcctggtggagagttagtgctactgtaatggtagcctcaatttcctctttagttatgaggaggagaatggtgaaggcaaaggactttgtaaacaataaagcactaagcccaggggaaggattccttaat

SEQ ID NO: 3911 - DNA, 1291 bp, Homo sapiens
tgtaaagaaactaacacctaatgtgattttaaaacttacagactctctgctcttcccatttgacagacagacacatcttctcatacagggacagcggaacatygttgagacacatgctgaagtgatggcaatgtggatgtcgttgccatcactgacccctttgttaacatcaagtacattgtctatgtgttctagtatgattccaccaaataacaagttcaacggcatagccaagactgagaaccaaaaggttgttataaatgaaaaacccatttccatcttctaaaagtgagatcctgacatgaaatggggtaattcttgtaatgaatttgttgtggaatctactgtgtcttcattttcttgtaaaagtctgacttcatatgaagggtggagccaatagggtcatcatctttgtcccgtctgctgatgtccccatatttatgagcatgaatgatgagaagtgtgacaactccctcaagattgtcagcaattcctcctgcactaccaagtgcttagccctcctggccaatgtcatcaataacaattttggcatcacggagagactcaagatcacaatccatgccatcactgccaccaagaagactgggaaggcctctctgggaaactgtgttgtgacagccatgaggtagccagaacttcatgcctgcctctactgatgcttccaaggctgtaggcaaggtcatctctgagctgaatggaaagctcagtggcatggccttctgtgtccccatccccaggctgtgtctccagctttctatggactgtccagagaaagctgccaaatgtgatgactccaagaaggtgatgaagcagacattggatattctcctaaagggcatcctgggctacaccgaggacctggttgtctcctagactctaacagtgacacctactcttctaccttccatgctgggactggcattgccctaacaacactttgactagttcatttcctggtatgacaatgaatttggctacagtagcaaggtggcagactttatggaccacatgtcctccaaggagtgagagcctcctggaccactagcctcagttagaggataagaaaaagagagagaccctcaggtgctggggagtccttgacccagttcaatcccccaacacactgtgaactgctcatagaaagatgtgcctcaaaactttaattagaccttacagtcacagaggtctgcttccatctcagtggagcaaatagactttaataattggactttaaatgaaattgaaactcactcaccatatgtttaatgca

SEQ ID NO: 3912 - DNA, 840 bp, Homo sapiens
tgttgtggcagcttaatgatacggctaaggtgtccctgcctcaatgttgctggtcaccagtcaggtggatcaaagctgggttgggctgagttaaggatataaagttgggattgggtaactaccatgtggcttccttaaacttaagaaaaaggggacagaaggcagctctggatgttgacagaatctcctgacccctcagttggaaggagaacaagctcaagcctccttgtggttttggtctctgaggagggatggcttcgcttctgttaacccctccctgggtctggccctttaaattactcaggttgttgaggttctaagaggctcaggtctctcagcctgccctgctctgactcagcctcctcatctgcttgtctgcagtaaggtctagaccaagacaaattagttagaaggaagagatagagacatattatgctaacaaatgttggtagggaacttgccctgccaccaaggtgtttgcctttttggttccagttgggcttggttaaggcasaaaacccacctttatttaacactagttgtttgggttaggttaaacaattgcgttggtgtggttcactttgtaataaattgaggtggagtgatttcagcatgttggcaagctgggtctgatgatacctacatatgtagttctaaatgaaagttagtatgaaaaaaggatttttatcacacaactctgtttatgttaaatatatcttttgcccaaaacaccagtgacaacttttaatccaatataataattcactgtcatacaaagtcctataagttattaatgtgctatatctacatctttattcaggagtcataaacaccctaaga

SEQ ID NO: 3913 - DNA, 840 bp, Homo sapiens
tgttgtggcagcttaatgatacggctaaggtgtccctgcctcaatgttgctggtcaccagtcaggtggatcaaagctgggttgggctgagttaaggatataaagttgggattgggtaactaccatgtggcttccttaaacttaagaaaaaggggacagaaggcagctctggatgttgacagaatctcctgacccctcagttggaaggagaacaagctcaagcctccttgtggttttggtctctgaggagggatggcttcgcttctgttaacccctccctgggtctggccctttaaattactcaggttgttgaggttctaagaggctcaggtctctcagcctgccctgctctgactcagcctcctcatctgcttgtctgcagtaaggtctagaccaagacaaattagttagaaggaagagatagagacatattatgctaacaaatgttggtagggaacttgccctgccaccaaggtgtttgcctttttggttccagttgggcttggttaaggcacaaaacccacctttatttaacactagttgtttgggttaggttaaacaattgcgttggtgtggttcactttgtaataaattgaggtggagtgatttcagcatgttggcaagctgggtctgatgatacctacatatgtagttctaratgaaagttagtatgaaaaaaggatttttatcacacaactctgtttatgttaaatatatcttttgcccaaaacaccagtgacaacttttaatccaatataataattcactgtcatacaaagtcctataagttattaatgtgctatatctacatctttattcaggagtcataaacaccctaaga

SEQ ID NO: 3914 - DNA, 840 bp, Homo sapiens
tgttgtggcagcttaatgatacggctaaggtgtccctgcctcaatgttgctggtcaccagtcaggtggatcaaagctgggttgggctgagttaaggatataaagttgggattgggtaactaccatgtggcttccttaaacttaagaaaaaggggacagaaggcagctctggatgttgacagaatctcctgacccctcagttggaaggagaacaagctcaagcctccttgtggttttggtctctgaggagggatggcttcgcttctgttaacccctccctgggtctggccctttaaattactcaggttgttgaggttctaagaggctcaggtctctcagcctgccctgctctgactcagcctcctcatctgcttgtctgcagtaaggtctagaccaagacaaattagttagaaggaagagatagagacatattatgctaacaaatgttggtagggaacttgccctgccaccaaggtgtttgcctttttggttccagttgggcttggttaaggcacaaaacccacctttatttaacactagttgtttgggttaggttaaacaattgcgttggtgtggttcactttgtaataaattgaggtggagtgatttcagcatgttggcaagctgggtctgatgatacctacatatgtagttctaaakgaaagttagtatgaaaaaaggatttttatcacacaactctgtttatgttaaatatatcttttgcccaaaacaccagtgacaacttttaatccaatataataattcactgtcatacaaagtcctataagttattaatgtgctatatctacatctttattcaggagtcataaacaccctaaga

SEQ ID NO: 3915 - DNA, 840 bp, Homo sapiens
tgttgtggcagcttaatgatacggctaaggtgtccctgcctcaatgttgctggtcaccagtcaggtggatcaaagctgggttgggctgagttaaggatataaagttgggattgggtaactaccatgtggcttccttaaacttaagaaaaaggggacagaaggcagctctggatgttgacagaatctcctgacccctcagttggaaggagaacaagctcaagcctccttgtggttttggtctctgaggagggatggcttcgcttctgttaacccctccctgggtctggccctttaaattactcaggttgttgaggttctaagaggctcaggtctctcagcctgccctgctctgactcagcctcctcatctgcttgtctgcagtaaggtctagaccaagacaaattagttagaaggaagagatagagacatattatgctaacaaatgttggtagggaacttgccctgccaccaaggtgtttgcctttttggttccagttgggcttggttaaggcacaaaacccacctttatttaacactagttgtttgggttaggttaaacaattgcgttggtgtggttcactttgtaataaattgaggtggagtgatttcagcatgttggcaagctgggtctgatgatacctacatatgtagttctaaatgaaagttagtatgamaaaaggatttttatcacacaactctgtttatgttaaatatatcttttgcccaaaacaccagtgacaacttttaatccaatataataattcactgtcatacaaagtcctataagttattaatgtgctatatctacatctttattcaggagtcataaacaccctaaga

SEQ ID NO: 3916 - DNA, 840 bp, Homo sapiens
tgttgtggcagcttaatgatacggctaaggtgtccctgcctcaatgttgctggtcaccagtcaggtggatcaaagctgggttgggctgagttaaggatataaagttgggattgggtaactaccatgtggcttccttaaacttaagaaaaaggggacagaaggcagctctggatgttgacagaatctcctgacccctcagttggaaggagaacaagctcaagcctccttgtggttttggtctctgaggagggatggcttcgcttctgttaacccctccctgggtctggccctttaaattactcaggttgttgaggttctaagaggctcaggtctctcagcctgccctgctctgactcagcctcctcatctgcttgtctgcagtaaggtctagaccaagacaaattagttagaaggaagagatagagacatattatgctaacaaatgttggtagggaacttgccctgccaccaaggtgtttgcctttttggttccagttgggcttggttaaggcacaaaacccacctttatttaacactagttgtttgggttaggttaaacaattgcgttggtgtggttcactttgtaataaattgaggtggagtgatttcagcatgttggcaagctgggtctgatgatacctacatatgtagttctaaatgaaagttagtatgaaaaaaggatttttatcacacaactctgtttatgttaaatatatcttttgcccaaaacaccagtgacaacttttaatccaayataataattcactgtcatacaaagtcctataagttattaatgtgctatatctacatctttattcaggagtcataaacaccctaaga

SEQ ID NO: 3917 - DNA, 2934 bp, Homo sapiens
  misc_feature (1)...(2934): n = A,T,C or G
atttttagagtcgttttaactattagttttaaaattctggtttccaaatgctgatttctgatatggagaaagataattgatgttgtggttgattttgtatcctgcaaccttgctgaacttacttactagttttaggagttatttttatggatcccttgagattttctatgtaggtaatcatgttgtctatgaataaggacagttttatttcttcttttccaatctgtatgccttctatatctttttcttgcattagtttactgactttaatttccagtgtgatcctgaataagaatggtaggagtgaacatccttgcgttgtccctaattttaaggggtaaaatattgacttttttcccattaaatgtgaggtgagcttgtaggtttttttttaatagatagactgtatcagcttgaggaatttttccttctagttaactgagaatcattgtgtttttaagaatcacatatggatatgaagtcgaatattttttctgcattcattcatatggtcacatgctttttcttccttcaactgtactttgacccatgtttgggtggatacagatggagagaagggaaaatgaagagtggcaagaaggagacaaagaattcagcagaagtagtgaattgcagcaagaagtagctagaagaaatgtaagctttcccctccactaaagaattctgatgtattggaaagatcttagacttcttgctatataagggatgaagctcaatgtttttattgaagttctaaaagacaaggttgactttagcagtctggaggacttagggacacctgagacagatgacttctaggggaaatatgtccctctactcttggttcggccttttgtgtgcaaattaatcaatgcatttgatgaagcttccaagtcatcacccaggccaatgcccagcatatgacaggtactttatatacacctgtcagatgagtgactgagtgaaatgtcatcaactagacagtatgacattgtgattaaaagtatgagttaggagctgaatacctgagttgaactgtggctcttcctctgtagaggctacacttcagcaagttattgaagctctttatakcctgggcaacatggagaatccccatctttacaaaaaatacccaaaattagccagatgtggtggtgtgtgcctgtggtcccagctaccagggaagctgaggtgggaggatcacttgagcccaggaggttgaagttgcagtgagtcgtgattgcaccactgcactccagcctgggtaacagagcgagaccctttgcagggcttagtaaagtgcctggcccataatgactacaacgtaagtctgactgttcttattattattcacgttcattttcaggattgaacactctgccattactttttcattacatttccatcattttcttccttccttcctttctatcgctctcttttaaagtaaagcttaaaatagtttctcctatggccatagaattggaaacaactgtagtggcaatctaattcaagcttcgtgctttctgtgtgaggaaagggaggctcagagaagccaagtggtcccctcatctggggcatctggggtttcggtcacctgcagcaccattgcaaagctgagcttgagcttgttctcctctagccacaaatcagttgcagttcaggaccctcaaaacaacccaaatatttaatatctgcattgttggaagttacagtgcaggtgcccattcaggaccaggagacttgtagcttgaaacatggcagtcactgcatcagtgtgctggaaagtggacaggcagatacagtgcaagggcagagtcagcaacaaacactgtccacacctcctcctccaggagaggnctgttctgagacctggagaaaggcttcatttcctggctagtccctgataggtcacacattcccggagctgcctttgtcgccctcatctttcctggcccctgaagccatttagttgcttctccagcaaagggctgaggcagcagccttgcaaatctccatgacccaccttgtcttgcccagaatgcatttggtgcacgtgtccataaatattttaggccgtgctgcttagttattaatggagtgaaatgaaagataattctttagcctctccccttctctacaggttgaaaacgagagccagagtttgaagggctggagtgacaggtgtttagggacttgggatgctgggggtgaagctgcagatgaattttctctgtcccgtccttattgtgaaaagagggccctggtcccttgattccaaagaaccagagttaccctcttttcccctgatccctggaaggtggggtacagatgttgtcctgtgacgcctgtccccacttcgtgcacggagcggactgcccagcatgcacagatggaatgggaacaactgcaatgaccaccttcggaagagtgagcctgggaggccccctggagccccaacttggggcggaggctggtgacctgtcagccactctcagacagtcccaccctatggcctgaaagggtggtggccaggtaggtggttgactttcctccctgccccctcttccttattcagtgttaaagagctagcatttgagggtggcctcgggtgacaaattccccactgttaaaaccccctgtgggttggcagcagccaggaagaaccggctttttgtctgggagtagaggcaagggcgatggcttatctcactgttccttttcatttgggacataatacatcccacaaagctcaggtcccgcactgaaaaaatcaattacattcacagcatttttagtgctctgagtctccgagcaaaggaaataggtgagannnnnnnnnnnnnnnnnnnnnnnnnnnnnnnnnnnnnnnnnnnnnnnnnnnnnnnnnnnnnnnnnnnnnnnnnnnnnnnnnnnnnnnnnnnnnnnnnnnnt

SEQ ID NO: 3918 - DNA, 2934 bp, Homo sapiens
  misc_feature (1)...(2934): n = A,T,C or G
atttttagagtcgttttaactattagttttaaaattctggtttccaaatgctgatttctgatatggagaaagataattgatgttgtggttgattttgtatcctgcaaccttgctgaacttacttactagttttaggagttatttttatggatcccttgagattttctatgtaggtaatcatgttgtctatgaataaggacagttttatttcttcttttccaatctgtatgccttctatatctttttcttgcattagtttactgactttaatttccagtgtgatcctgaataagaatggtaggagtgaacatccttgcgttgtccctaattttaaggggtaaaatattgacttttttcccattaaatgtgaggtgagcttgtaggtttttttttaatagatagactgtatcagcttgaggaatttttccttctagttaactgagaatcattgtgtttttaagaatcacatatggatatgaagtcgaatattttttctgcattcattcatatggtcacatgctttttcttccttcaactgtactttgacccatgtttgggtggatacagatggagagaagggaaaatgaagagtggcaagaaggagacaaagaattcagcagaagtagtgaattgcagcaagaagtagctagaagaaatgtaagctttcccctccactaaagaattctgatgtattggaaagatcttagacttcttgctatataagggatgaagctcaatgtttttattgaagttctaaaagacaaggttgactttagcagtctggaggacttagggacacctgagacagatgacttctaggggaaatatgtccctctactcttggttcggccttttgtgtgcaaattaatcaatgcatttgatgaagcttccaagtcatcacccaggccaatgcccagcatatgacaggtactttatatacacctgtcagatgagtgactgagtgaaatgtcatcaactagacagtatgacattgtgattaaaagtatgagttaggagctgaatacctgagttgaactgtggctcttcctctgtagaggctacacttcagcaagttattgaagctctttatagyctgggcaacatggagaatccccatctttacaaaaaatacccaaaattagccagatgtggtggtgtgtgcctgtggtcccagctaccagggaagctgaggtgggaggatcacttgagcccaggaggttgaagttgcagtgagtcgtgattgcaccactgcactccagcctgggtaacagagcgagaccctttgcagggcttagtaaagtgcctggcccataatgactacaacgtaagtctgactgttcttattattattcacgttcattttcaggattgaacactctgccattactttttcattacatttccatcattttcttccttccttcctttctatcgctctcttttaaagtaaagcttaaaatagtttctcctatggccatagaattggaaacaactgtagtggcaatctaattcaagcttcgtgctttctgtgtgaggaaagggaggctcagagaagccaagtggtcccctcatctggggcatctggggtttcggtcacctgcagcaccattgcaaagctgagcttgagcttgttctcctctagccacaaatcagttgcagttcaggaccctcaaaacaacccaaatatttaatatctgcattgttggaagttacagtgcaggtgcccattcaggaccaggagacttgtagcttgaaacatggcagtcactgcatcagtgtgctggaaagtggacaggcagatacagtgcaagggcagagtcagcaacaaacactgtccacacctcctcctccaggagaggnctgttctgagacctggagaaaggcttcatttcctggctagtccctgataggtcacacattcccggagctgcctttgtcgccctcatctttcctggcccctgaagccatttagttgcttctccagcaaagggctgaggcagcagccttgcaaatctccatgacccaccttgtcttgcccagaatgcatttggtgcacgtgtccataaatattttaggccgtgctgcttagttattaatggagtgaaatgaaagataattctttagcctctccccttctctacaggttgaaaacgagagccagagtttgaagggctggagtgacaggtgtttagggacttgggatgctgggggtgaagctgcagatgaattttctctgtcccgtccttattgtgaaaagagggccctggtcccttgattccaaagaaccagagttaccctcttttcccctgatccctggaaggtggggtacagatgttgtcctgtgacgcctgtccccacttcgtgcacggagcggactgcccagcatgcacagatggaatgggaacaactgcaatgaccaccttcggaagagtgagcctgggaggccccctggagccccaacttggggcggaggctggtgacctgtcagccactctcagacagtcccaccctatggcctgaaagggtggtggccaggtaggtggttgactttcctccctgccccctcttccttattcagtgttaaagagctagcatttgagggtggcctcgggtgacaaattccccactgttaaaaccccctgtgggttggcagcagccaggaagaaccggctttttgtctgggagtagaggcaagggcgatggcttatctcactgttccttttcatttgggacataatacatcccacaaagctcaggtcccgcactgaaaaaatcaattacattcacagcatttttagtgctctgagtctccgagcaaaggaaataggtgagannnnnnnnnnnnnnnnnnnnnnnnnnnnnnnnnnnnnnnnnnnnnnnnnnnnnnnnnnnnnnnnnnnnnnnnnnnnnnnnnnnnnnnnnnnnnnnnnnnnt

SEQ ID NO: 3919 - DNA, 2934 bp, Homo sapiens
  misc_feature (1)...(2934): n = A,T,C or G
atttttagagtcgttttaactattagttttaaaattctggtttccaaatgctgatttctgatatggagaaagataattgatgttgtggttgattttgtatcctgcaaccttgctgaacttacttactagttttaggagttatttttatggatcccttgagattttctatgtaggtaatcatgttgtctatgaataaggacagttttatttcttcttttccaatctgtatgccttctatatctttttcttgcattagtttactgactttaatttccagtgtgatcctgaataagaatggtaggagtgaacatccttgcgttgtccctaattttaaggggtaaaatattgacttttttcccattaaatgtgaggtgagcttgtaggtttttttttaatagatagactgtatcagcttgaggaatttttccttctagttaactgagaatcattgtgtttttaagaatcacatatggatatgaagtcgaatattttttctgcattcattcatatggtcacatgctttttcttccttcaactgtactttgacccatgtttgggtggatacagatggagagaagggaaaatgaagagtggcaagaaggagacaaagaattcagcagaagtagtgaattgcagcaagaagtagctagaagaaatgtaagctttcccctccactaaagaattctgatgtattggaaagatcttagacttcttgctatataagggatgaagctcaatgtttttattgaagttctaaaagacaaggttgactttagcagtctggaggacttagggacacctgagacagatgacttctaggggaaatatgtccctctactcttggttcggccttttgtgtgcaaattaatcaatgcatttgatgaagcttccaagtcatcacccaggccaatgcccagcatatgacaggtactttatatacacctgtcagatgagtgactgagtgaaatgtcatcaactagacagtatgacattgtgattaaaagtatgagttaggagctgaatacctgagttgaactgtggctcttcctctgtagaggctacacttcagcaagttattgaagctctttatagcctgggcaacatggagaatccccatctttacaaaaaatacccaaaattagccagatgtggtggtgtgtgcctgtggtcccagctaccagggaagctgaggtgggaggatcacttgagcccaggaggttgaagttgcagtgagtcgtgattgcaccactgcactccagcctgggtaacagagcgagaccctttgcagggcttagtaaagtgcctggcccataatgactacaacgtaagtctgactgttcttattattattcacgttcatwttcaggattgaacactctgccattactttttcattacatttccatcattttcttccttccttcctttctatcgctctcttttaaagtaaagcttaaaatagtttctcctatggccatagaattggaaacaactgtagtggcaatctaattcaagcttcgtgctttctgtgtgaggaaagggaggctcagagaagccaagtggtcccctcatctggggcatctggggtttcggtcacctgcagcaccattgcaaagctgagcttgagcttgttctcctctagccacaaatcagttgcagttcaggaccctcaaaacaacccaaatatttaatatctgcattgttggaagttacagtgcaggtgcccattcaggaccaggagacttgtagcttgaaacatggcagtcactgcatcagtgtgctggaaagtggacaggcagatacagtgcaagggcagagtcagcaacaaacactgtccacacctcctcctccaggagaggnctgttctgagacctggagaaaggcttcatttcctggctagtccctgataggtcacacattcccggagctgcctttgtcgccctcatctttcctggcccctgaagccatttagttgcttctccagcaaagggctgaggcagcagccttgcaaatctccatgacccaccttgtcttgcccagaatgcatttggtgcacgtgtccataaatattttaggccgtgctgcttagttattaatggagtgaaatgaaagataattctttagcctctccccttctctacaggttgaaaacgagagccagagtttgaagggctggagtgacaggtgtttagggacttgggatgctgggggtgaagctgcagatgaattttctctgtcccgtccttattgtgaaaagagggccctggtcccttgattccaaagaaccagagttaccctcttttcccctgatccctggaaggtggggtacagatgttgtcctgtgacgcctgtccccacttcgtgcacggagcggactgcccagcatgcacagatggaatgggaacaactgcaatgaccaccttcggaagagtgagcctgggaggccccctggagccccaacttggggcggaggctggtgacctgtcagccactctcagacagtcccaccctatggcctgaaagggtggtggccaggtaggtggttgactttcctccctgccccctcttccttattcagtgttaaagagctagcatttgagggtggcctcgggtgacaaattccccactgttaaaaccccctgtgggttggcagcagccaggaagaaccggctttttgtctgggagtagaggcaagggcgatggcttatctcactgttccttttcatttgggacataatacatcccacaaagctcaggtcccgcactgaaaaaatcaattacattcacagcatttttagtgctctgagtctccgagcaaaggaaataggtgagannnnnnnnnnnnnnnnnnnnnnnnnnnnnnnnnnnnnnnnnnnnnnnnnnnnnnnnnnnnnnnnnnnnnnnnnnnnnnnnnnnnnnnnnnnnnnnnnnnnt

SEQ ID NO: 3920 - DNA, 2934 bp, Homo sapiens
  misc_feature (1)...(2934): n = A,T,C or G
atttttagagtcgttttaactattagttttaaaattctggtttccaaatgctgatttctgatatggagaaagataattgatgttgtggttgattttgtatcctgcaaccttgctgaacttacttactagttttaggagttatttttatggatcccttgagattttctatgtaggtaatcatgttgtctatgaataaggacagttttatttcttcttttccaatctgtatgccttctatatctttttcttgcattagtttactgactttaatttccagtgtgatcctgaataagaatggtaggagtgaacatccttgcgttgtccctaattttaaggggtaaaatattgacttttttcccattaaatgtgaggtgagcttgtaggtttttttttaatagatagactgtatcagcttgaggaatttttccttctagttaactgagaatcattgtgtttttaagaatcacatatggatatgaagtcgaatattttttctgcattcattcatatggtcacatgctttttcttccttcaactgtactttgacccatgtttgggtggatacagatggagagaagggaaaatgaagagtggcaagaaggagacaaagaattcagcagaagtagtgaattgcagcaagaagtagctagaagaaatgtaagctttcccctccactaaagaattctgatgtattggaaagatcttagacttcttgctatataagggatgaagctcaatgtttttattgaagttctaaaagacaaggttgactttagcagtctggaggacttagggacacctgagacagatgacttctaggggaaatatgtccctctactcttggttcggccttttgtgtgcaaattaatcaatgcatttgatgaagcttccaagtcatcacccaggccaatgcccagcatatgacaggtactttatatacacctgtcagatgagtgactgagtgaaatgtcatcaactagacagtatgacattgtgattaaaagtatgagttaggagctgaatacctgagttgaactgtggctcttcctctgtagaggctacacttcagcaagttattgaagctctttatagcctgggcaacatggagaatccccatctttacaaaaaatacccaaaattagccagatgtggtggtgtgtgcctgtggtcccagctaccagggaagctgaggtgggaggatcacttgagcccaggaggttgaagttgcagtgagtcgtgattgcaccactgcactccagcctgggtaacagagcgagaccctttgcagggcttagtaaagtgcctggcccataatgactacaacgtaagtctgactgttcttattattattcacgttcattttcaggattgaacactctgccattactttttcattacatttccatcattttcttccttccttcctttctatcgctctcttttaaagtaaagcttaaaatagtttctcctatggccatagaattggaaacaactgtagtggcaatctaattcaagcttygtgctttctgtgtgaggaaagggaggctcagagaagccaagtggtcccctcatctggggcatctggggtttcggtcacctgcagcaccattgcaaagctgagcttgagcttgttctcctctagccacaaatcagttgcagttcaggaccctcaaaacaacccaaatatttaatatctgcattgttggaagttacagtgcaggtgcccattcaggaccaggagacttgtagcttgaaacatggcagtcactgcatcagtgtgctggaaagtggacaggcagatacagtgcaagggcagagtcagcaacaaacactgtccacacctcctcctccaggagaggnctgttctgagacctggagaaaggcttcatttcctggctagtccctgataggtcacacattcccggagctgcctttgtcgccctcatctttcctggcccctgaagccatttagttgcttctccagcaaagggctgaggcagcagccttgcaaatctccatgacccaccttgtcttgcccagaatgcatttggtgcacgtgtccataaatattttaggccgtgctgcttagttattaatggagtgaaatgaaagataattctttagcctctccccttctctacaggttgaaaacgagagccagagtttgaagggctggagtgacaggtgtttagggacttgggatgctgggggtgaagctgcagatgaattttctctgtcccgtccttattgtgaaaagagggccctggtcccttgattccaaagaaccagagttaccctcttttcccctgatccctggaaggtggggtacagatgttgtcctgtgacgcctgtccccacttcgtgcacggagcggactgcccagcatgcacagatggaatgggaacaactgcaatgaccaccttcggaagagtgagcctgggaggccccctggagccccaacttggggcggaggctggtgacctgtcagccactctcagacagtcccaccctatggcctgaaagggtggtggccaggtaggtggttgactttcctccctgccccctcttccttattcagtgttaaagagctagcatttgagggtggcctcgggtgacaaattccccactgttaaaaccccctgtgggttggcagcagccaggaagaaccggctttttgtctgggagtagaggcaagggcgatggcttatctcactgttccttttcatttgggacataatacatcccacaaagctcaggtcccgcactgaaaaaatcaattacattcacagcatttttagtgctctgagtctccgagcaaaggaaataggtgagannnnnnnnnnnnnnnnnnnnnnnnnnnnnnnnnnnnnnnnnnnnnnnnnnnnnnnnnnnnnnnnnnnnnnnnnnnnnnnnnnnnnnnnnnnnnnnnnnnnt

SEQ ID NO: 3921 - DNA, 1322 bp, Homo sapiens
tgcatatgtctaaatgtgtgcatgtattatggcaagtgctcaaaaattttggggagtaaagatggggtctcactatgtcgcccaggctggtctcaaactcctagcttcaagcgatcctcctaccgtggcctccccaaagcgctggagttacaggcatgagccactgtgcccagcctgctcaaaatgctctgataaagaggcatgcaatcaaaaaagttgggaactgctgccttatgataagacmcttttttattatcttctttaccactaaacaaaatttttcttttgttttacttcttaatcctttctctcccctagaatgtaagctccatgcaaacctatgtcacttattcatgcaatgttatttgttattgtgtgactagcatttataataaactgagcacatagcatctgttcaataaatgtttattgatatattaaataaataaatgaatgaatgatcagagtcttccctgggacctagtggaaggacagttcgtgaatcccaacacctttacatgctcaggatagtggcaaataatgacatgatgggatgtctctaggacaagatcactcatagagaaaactggaaagtttctaggctttttgtcaccctttgagatcatttccctgctccacctacagtcagaaagccattgggcaaccaacatcccatagtcagaagaatagcccctgggaagtcatcaacacttagaataaactggtttaatatactgcaactcccaggagtgtttgcctcaaaaaacaccattaagatcaggggccaggggtctcagcttagctacaaactatttctgaggtcctatgactttctccaagttctcaacgctaacctgagagaagttgtgtattagtctgttcccacattgctaataaggacatacccaagactgggtaatttataaagaaaaggaggtttaatggactcacagttccacatggctggagaggcctcacagtcatagcagaaagcaagaggagcaaagtcacgtcttacgtagcggcaggcaagagagagcatgtgtaggggaactcccctttataaaccatcagatctcgtgagacttttcactatcatgagaaaaagcatgggaaagaacctcccccatgattcaattacctcccacggtgtcactcccatgacacgtggaaattatgggagctacaattcaagatgaaatttgggtgaggacacaaccaaatcatatcaaattggatcacagcaggttttcttcttcactttaatatttggaaataacttcaaatttatagaaaagttgtaagaacatgaagaacatgca

SEQ ID NO: 3922 - DNA, 1322 bp, Homo sapiens
tgcatatgtctaaatgtgtgcatgtattatggcaagtgctcaaaaattttggggagtaaagatggggtctcactatgtcgcccaggctggtctcaaactcctagcttcaagcgatcctcctaccgtggcctccccaaagcgctggagttacaggcatgagccactgtgcccagcctgctcaaaatgctctgataaagaggcatgcaatcaaaaaagttgggaactgctgccttatgataagacccttttttattatcttctttaccactaaacaaaatttttcttttgttttacttcttaatcctttctctcccctagaatgtaagctccatgcaaacctatgtcacttattcatgcaatgttatttgttattgtgtgactagcatttataataaactgagcacatagcatctgttcaataaatgtttattgatatattaaataaataaatgaatgaatgatcagagtcttccctgggacctagtggaaggacagttcgtgaatcccaacacctttacatgctcaggatagtggcaaataatgacatgatgggatgtctctaggacaagatcactcatagagaaaactggaaagtttctaggctttttgtcaccctttgagatcatttccctgctccayctacagtcagaaagccattgggcaaccaacatcccatagtcagaagaatagcccctgggaagtcatcaacacttagaataaactggtttaatatactgcaactcccaggagtgtttgcctcaaaaaacaccattaagatcaggggccaggggtctcagcttagctacaaactatttctgaggtcctatgactttctccaagttctcaacgctaacctgagagaagttgtgtattagtctgttcccacattgctaataaggacatacccaagactgggtaatttataaagaaaaggaggtttaatggactcacagttccacatggctggagaggcctcacagtcatagcagaaagcaagaggagcaaagtcacgtcttacgtagcggcaggcaagagagagcatgtgtaggggaactcccctttataaaccatcagatctcgtgagacttttcactatcatgagaaaaagcatgggaaagaacctcccccatgattcaattacctcccacggtgtcactcccatgacacgtggaaattatgggagctacaattcaagatgaaatttgggtgaggacacaaccaaatcatatcaaattggatcacagcaggttttcttcttcactttaatatttggaaataacttcaaatttatagaaaagttgtaagaacatgaagaacatgca

SEQ ID NO: 3923 - DNA, 1322 bp, Homo sapiens
tgcatatgtctaaatgtgtgcatgtattatggcaagtgctcaaaaattttggggagtaaagatggggtctcactatgtcgcccaggctggtctcaaactcctagcttcaagcgatcctcctaccgtggcctccccaaagcgctggagttacaggcatgagccactgtgcccagcctgctcaaaatgctctgataaagaggcatgcaatcaaaaaagttgggaactgctgccttatgataagacccttttttattatcttctttaccactaaacaaaatttttcttttgttttacttcttaatcctttctctcccctagaatgtaagctccatgcaaacctatgtcacttattcatgcaatgttatttgttattgtgtgactagcatttataataaactgagcacatagcatctgttcaataaatgtttattgatatattaaataaataaatgaatgaatgatcagagtcttccctgggacctagtggaaggacagttcgtgaatcccaacacctttacatgctcaggatagtggcaaataatgacatgatgggatgtctctaggacaagatcactcatagagaaaactggaaagtttctaggctttttgtcaccctttgagatcatttccctgctccacctacagtcagaaagccaytgggcaaccaacatcccatagtcagaagaatagcccctgggaagtcatcaacacttagaataaactggtttaatatactgcaactcccaggagtgtttgcctcaaaaaacaccattaagatcaggggccaggggtctcagcttagctacaaactatttctgaggtcctatgactttctccaagttctcaacgctaacctgagagaagttgtgtattagtctgttcccacattgctaataaggacatacccaagactgggtaatttataaagaaaaggaggtttaatggactcacagttccacatggctggagaggcctcacagtcatagcagaaagcaagaggagcaaagtcacgtcttacgtagcggcaggcaagagagagcatgtgtaggggaactcccctttataaaccatcagatctcgtgagacttttcactatcatgagaaaaagcatgggaaagaacctcccccatgattcaattacctcccacggtgtcactcccatgacacgtggaaattatgggagctacaattcaagatgaaatttgggtgaggacacaaccaaatcatatcaaattggatcacagcaggttttcttcttcactttaatatttggaaataacttcaaatttatagaaaagttgtaagaacatgaagaacatgca

SEQ ID NO: 3924 - DNA, 1322 bp, Homo sapiens
tgcatatgtctaaatgtgtgcatgtattatggcaagtgctcaaaaattttggggagtaaagatggggtctcactatgtcgcccaggctggtctcaaactcctagcttcaagcgatcctcctaccgtggcctccccaaagcgctggagttacaggcatgagccactgtgcccagcctgctcaaaatgctctgataaagaggcatgcaatcaaaaaagttgggaactgctgccttatgataagacccttttttattatcttctttaccactaaacaaaatttttcttttgttttacttcttaatcctttctctcccctagaatgtaagctccatgcaaacctatgtcacttattcatgcaatgttatttgttattgtgtgactagcatttataataaactgagcacatagcatctgttcaataaatgtttattgatatattaaataaataaatgaatgaatgatcagagtcttccctgggacctagtggaaggacagttcgtgaatcccaacacctttacatgctcaggatagtggcaaataatgacatgatgggatgtctctaggacaagatcactcatagagaaaactggaaagtttctaggctttttgtcaccctttgagatcatttccctgctccacctacagtcagaaagccattgggcaaccaacatcccatagtcagaagaatagcccctgggaagtcatcaacacttagaataaactggtttaatatactgcaactcccaggagtgtttgcctcaaaaaacaccattaagatcaggggccaggggtctcagcttagctacaaactatttctgaggtcctatgacttyctccaagttctcaacgctaacctgagagaagttgtgtattagtctgttcccacattgctaataaggacatacccaagactgggtaatttataaagaaaaggaggtttaatggactcacagttccacatggctggagaggcctcacagtcatagcagaaagcaagaggagcaaagtcacgtcttacgtagcggcaggcaagagagagcatgtgtaggggaactcccctttataaaccatcagatctcgtgagacttttcactatcatgagaaaaagcatgggaaagaacctcccccatgattcaattacctcccacggtgtcactcccatgacacgtggaaattatgggagctacaattcaagatgaaatttgggtgaggacacaaccaaatcatatcaaattggatcacagcaggttttcttcttcactttaatatttggaaataacttcaaatttatagaaaagttgtaagaacatgaagaacatgca

SEQ ID NO: 3925 - DNA, 1322 bp, Homo sapiens
tgcatatgtctaaatgtgtgcatgtattatggcaagtgctcaaaaattttggggagtaaagatggggtctcactatgtcgcccaggctggtctcaaactcctagcttcaagcgatcctcctaccgtggcctccccaaagcgctggagttacaggcatgagccactgtgcccagcctgctcaaaatgctctgataaagaggcatgcaatcaaaaaagttgggaactgctgccttatgataagacccttttttattatcttctttaccactaaacaaaatttttcttttgttttacttcttaatcctttctctcccctagaatgtaagctccatgcaaacctatgtcacttattcatgcaatgttatttgttattgtgtgactagcatttataataaactgagcacatagcatctgttcaataaatgtttattgatatattaaataaataaatgaatgaatgatcagagtcttccctgggacctagtggaaggacagttcgtgaatcccaacacctttacatgctcaggatagtggcaaataatgacatgatgggatgtctctaggacaagatcactcatagagaaaactggaaagtttctaggctttttgtcaccctttgagatcatttccctgctccacctacagtcagaaagccattgggcaaccaacatcccatagtcagaagaatagcccctgggaagtcatcaacacttagaataaactggtttaatatactgcaactcccaggagtgtttgcctcaaaaaacaccattaagatcaggggccaggggtctcagcttagctacaaactatttctgaggtcctatgactttctccaagttctcaacgctaacctgagagaagttgtgtattagtctgttcccacattgctaataaggacatacccaagactgggtaatttataaagaaaaggaggtttaatggactcacagttccacatggctggagaggcctcacagtcatagcagaaagcaagaggagcaaagtcacgtcttacgtagcggcaggcaagagagagcatgtgtaggggaactcccctttataaaccatcagatctcgtgagacttttcactatcatgagaaaaagcaygggaaagaacctcccccatgattcaattacctcccacggtgtcactcccatgacacgtggaaattatgggagctacaattcaagatgaaatttgggtgaggacacaaccaaatcatatcaaattggatcacagcaggttttcttcttcactttaatatttggaaataacttcaaatttatagaaaagttgtaagaacatgaagaacatgca

SEQ ID NO: 3926 - DNA, 1466 bp, Homo sapiens
ttctatcttttaattaagtaatcctccttttgtttccattttgtataatttccagtgaccatgatttttcttttctgaaattgtgctactttaattgtatttgtttttgtatttacctgttttattagctctgctttttaaatttttgtaatgtcttgtttttccaaattgaaaacatatcttcatttttctatttgagcatcctaataatataaattttaaagtatttgtccagctgttgtatacattcaatgctgcaagagtgaatttatattctgttctgaaaattgatagaatcgattgtcttccagaatcgattgtcttccattagatggctttttcttgcattttgatattttgatttataggctaattttctatgagttttgtttttgtttagttcttatttatttattcccttctgtctggtggtctgcggttgccccccatctgctgctccataacctcaatgcaaaaccatgccttgcgttgatatggagaccgtcatatcaacaatcacagagccagttcaaggcttcatgaggctcctagtctggaggtcaagtctgtgctctccttttaccttaggcttgcagcttgccaggaggtatagggctagatagaatttttttttttttctttttgagacagagtcttgctctgctgcccagatgggaagtgcagtggcgcaatctcagctcactgcaacttccgcctcctgagttcaagctattctcatgcctcaacctcctgagtaactggaactacaggcacacaccaccatgcctggctaatattgttttgtatttttagtagagatggggtttcactatgttggccaggctggctaagtaggattttttaaagaatttcttaaagaccaaacctctggcattggtcaagctctagatagactccttctgtcatccaaagaatcagaaccaatacagaggatactattaggttggtacaaaagtaattgcagtttctgccattactttcaatggcataaaccgcagttacctttgcaccactctaatagttcttccaaagattagcaaacaatgaaagagaaaattggaaagctacagacctaagaataagactcagcagtctcaaagacaagagaaggcttttttgatagtgatttttaaaactctgggtggctttattaagataattcacataccataaaatcaatactcataaatgtttcattcagcagtttttagtataatcacaaaattgagtaatcatcaycactatctaattccagaacatttttatcaacccagaaagaaactctgtacccatcagcagtcatacctcatcccctcctactctcaacccctggcaacgcctaatctactttctgtctctatggatttgctattttggacatttcgtataaatggaatcacatcctagttagccttttgtttctggcttctttgatttagcacaat

SEQ ID NO: 3927 - DNA, 676 bp, Homo sapiens
atgcctgtagtcccagctacttgggagaccaaggcaggagaattgcttaaacctgggaggtgaaggctgcagtgagccgagatggcgccactacactccagcgtgggtgacagagcgagactcagtctcaaacaacaaaaaatccaagaactcagaaaagataataatttactagctgtcatcctattcatgagcatattatagctcttttttctgatgtattaattattatggataatgctatgataaatctttttatataaacacttttatattttagactgttcctttagaaaagatttctgaaaaagaaactcctggcagggcsggggcggaatgtgtatagagttttaaaaattgtaatttgggccgagcgtggtggctcatgcctgtaatcccagcactttaggagacccaggtgggcggatcacaaggtcaagagatcgagaccattctggtcaacatggtgaaaccccgtctgtactaaaaatataaaaattagctgggcatggtggcgggtgcctgtagtcccagctactggggaagctgaagcaggagaatcacttgaaccggggaggtggaggttgcaagcaaaattccgcctccaaaaaaaaaaaaaaaaattgtaatttaaaataattttaggtttacagaaaagttacaaaaatagtacaga

SEQ ID NO: 3928 - DNA, 596 bp, Homo sapiens
ccattatttatttattttataaatataatataatatttattttataaatataatataatatttattttataaatatatacattattcatttatcttataaatatataagtatataaacaagttataaatacataaactataaacatataaactggatcaatttataaatatgtaaatatatgcattatttatttacaaatatataactgtataaattataattttataaacaatttgtttattatatataaatatttatttattgtatagctatagaaatatgtgtgtgtgtgtgtatatacacaaacgcataaattctattagttctgtttctttagagaactctgactaatgcacttcctatgcagtgttcttttctctatgatgagttcagctccttagatattgttccaagaccaaattacctttaaggaccragggcagaaggattttggaggctcacctctgctttgagtggccattgtgtggatcctgcctttaagagggtctttgcaggccaagcgacaaaacctggcagatgggaatggtatttcaggacctccaaggattctcagggagaagctatggaatctaca

SEQ ID NO: 3929 - DNA, 936 bp, Homo sapiens
tcagctaagttaaaaaaaaaaaaatttatagygatgagacctcactgtgttacccagggtggtctcaaactcctgggctcaagtgatcctacttccctggcctcccaaagtgctgggattacacgcatgagctacggcgcccagccaaggaggtaattttatcagaaaagtcttagcagtgggattctggggttagcagttgattaacgaaaggaaaggggaggtctcaaaagtcctcaggcatgcacagttatctcttcatgtctcctcgtgggtctcatgtgcaactttgtggggagttagtgaaaattcagggggagttagtgtgaaacatggggtggaaatcaggctgtgacatcagcaagctcattctatacggacttcagttgggcatattggttctaactgatcttaaccagtttttaaatctcacaaacagagggagtttcagcgtttcagcaagttgtctcttttcttatctgccatcctacaagctcaagaattttttatcagtcactggtttctttaactctttggggacacagtttcacaagcagtgacattgagccccatgtagcagttgcgtggcttctcttgaccctcccagaaccagcctgacatgtggcttctgagacacaggcaccagctgggcagcaacccctcttcagaggttcgagcactcactctgtatgcccctcctctgagcctctaggtcctcatgaaacctcttccttttgttccccaagccctgcagctggtagccatgttctgcagtttttatcttggagtttccaccattcctttctactcttctagcccctccagcaaatgggcaactaattcaatagatgattgattgattggttgattgattgattgatgaaagagatagatgatagatatgatagatagatgatagatacatacacacatgca

SEQ ID NO: 3930 - DNA, 936 bp, Homo sapiens
tcagctaagttaaaaaaaaaaaaatttatagtgatgagacctcactgtgttacccagggtggtctcaaactcctgggctcaagtgatcctacttccctggcctcccaaagtgctgggattacacgcatgagctacggcgcccagccaaggaggtaattttatcagaaaagtcttagcagtgggattctggggttagcagttgattaacgaaaggaaaggggaggtctcaaaagtcctcaggcatgcacagttatctcttcatgtctcctcgtgggtctcatgtgcaactttgtggggagttagtgaaaattcagggggagttagtgtgaaacatggggtggaaatcaggctgtgacatcagcaagctcattctatacggacttcagttgggcatattggttctaactgatcttaaccagtttttaaatctcacaaacagagggagtttcagcgtttcagcaagttgtctcttttcttatctgccatcctacaagctcaagaattttttatcagtcactggtttctttaactctttggggacacagtttcacaagcagtgacattgagccccatgtagcagttgcgtggcttctcttgaccctcccagaaccagcctgacatgtggcttctgagacacaggcaccagctgggcagcaacccctcttcagaggttcgagcastcactctgtatgcccctcctctgagcctctaggtcctcatgaaacctcttccttttgttccccaagccctgcagctggtagccatgttctgcagtttttatcttggagtttccaccattcctttctactcttctagcccctccagcaaatgggcaactaattcaatagatgattgattgattggttgattgattgattgatgaaagagatagatgatagatatgatagatagatgatagatacatacacacatgca

SEQ ID NO: 3931 - DNA, 657 bp, Homo sapiens
gttgtggtataattactccatttgttgcaaaatttactaacttgtagtaaaattgcaggaaaatctcacaaaagacaataaagtatcaatcctaataaagtatcaggaaaatgaatccagcaatatataaatagaaaaaaacaccatgatcagtttggatttattttaataatacaaagttgacttaataattgaaaatttcattcttaattagcaccacaataacagaattaatgaaaaaattgggacatctaaattgtggcacaaaaataattgaggttttggaccataaattttaaatcaaactagtctcaagcacatctttattaatcaaaaggggaaccattacaatcaacacattttgccaatgagaaataagtttgtttgttcctgtagcataaaaatccatgattcagaatttgacaaactcttggaaagcattttctgcatcctgctgattgtgcaagcattttccctgcaaaaagttgcccagatgcttggacaaggggtagtcggttgacgagaggtgaggtgaatatggcagatgagacaaaacttggtagcccaatttgttcaacttttgaarcactgtttgtgcaccgtgtggtcgggcattgttgtggagaagaattgggccctaactgttgaccaatgccg

SEQ ID NO: 3932 - DNA, 1546 bp, Homo sapiens
attaatttttagtcctctcacttgaggatagaagttaatttgtttgctcattctgcctacatatgcagtaaatcatcaagctagtagaatagcaaaccattggaaaatagcaattctattctatttactggattaaagaagcaaaagcactgtaaacttaattaaactgctatatgtttcgggagctattaattataaagataataaaaataatgttactggcatcgtatgccttgtgtgtatactgatttattttttgagaaaacattatgcttttattgggctaggtctacaagaattgctgacctgagaacatgatttggttgaaagagaggaattgtagtaacatcagtatgagcttcttacatataataattcactatcttcaaaactcatgcaactcctcaaaaaatcttgaagttaaggtgtactgatatacatctcaatcataagatgcaatagcatttaataagaaattaatcaggatgccttaaaaacctaagtctccccttagtactaagttcagcaagtgaaaaagtatgttaactttttcagttaaagctttctatatcacctctatcaaaagtaatgtggggtcttgaattaattgcttctacatcacttaaaagtatatcctataagttaaaataaaaacacataatatacattttatattgtttcagatataattgttcaaaacccataatccgatgaattattgtttgcataaaaattttcattaaatatgtatttaacattgcttagtgaattaaattttttaaaaagagtactaacctaaaggtgcaaagaataaaaacatctagaattaggattcaatcaacccaaaggcccatcgatgatagactagataaataaaatgtggaacgtatacaccatggaatactatgtagtcataaaaaggaatgagatcatgtcctttgcagagacatagatagaactggaagccattattctcagcaaactaatgcagaaacagaaaaccagcattttctcacttatgagtgggaactggacaatgagaatacattgacacagggagagcatcaggaaaaacagctaatacatgtggggcttaatatctaggtgatgggttgacaggtgcagcaaaccaaccaggcacacatttacctatctaacaaamctgcacatcctgcacatgtaccctggaacttaaaaataaaattaaaaaaaattcaatctgacctttgacaagtagtttagcctttctcagggtaaactctctcaactacactatagaagtcacaatacctggcaagttgttttgggaattttgtgaggatccataggataacagattttaaaagttgctttttttagtaaaatgctattacaaagacctgtaatatatagtgaaaacctgcaacactgttaagcataagaagactcacaacaaattatttcattactctgagaagcttttcttccagtagacagtgctccttaaaatgttacatttgtaaaacaaggacagactcaaaaattggatgaaatcttgatgtttctg

SEQ ID NO: 3933 - DNA, 619 bp, Homo sapiens
taattatatttattatgtctccaccttttcctagctttgattaaattgttgcaaaattccctgatctgagaagaatatraagtattttaaaaatctgtatgggcaatccataaatttaaaaatatgttatatcctaaaggtttattaataattcaatttaattctcaggaatgttcattaatcaccatatattctctggttctaagtaatttgtaatctattggcaagtatagttggtcctccctatccataggttgtgcatttggagattcaaccaaacttgagtcaaaaatacttaaaaacaaaaattgcatttgtactgaacatacacaggatatgtttcttgttattatttcctaaacaatatagaataacaaatatttacacaacatttacattgtattatgaattttcagtaatctagtgattatttgaagcatgagggaggttatacataggttatttacattcaaatactatcctattttatatcaggtgtttgagcacacatgaattttggtgttcacaacaggtcctggaaccaatccccaaaggatacctagggactacagatgcttcccccaccttcattaaaatttctccaacttaacttccctgc

SEQ ID NO: 3934 - DNA, 512 bp, Homo sapiens
  misc_feature (1)...(512): n = A,T,C or G
tnnnnnnnnnnnnnnnnnnnnnnnnnnnnnnnnnnnnnnnnnnnnnnnnnnnnnnnnnnnnnnnnnnnnnnnnnnnnnnnnnnnnnnnnnnnnnnnnnnnncttatttagcagattttttttttttttttgaggcaggacttctcaaagagcccctgcaaagtaatgcagtgattgtcacttaaaatatgtcaagagtgtggcaaacaaaagtgaagtttgaaagctggatacagagaatttatctcagggatgacactcacttgtagttctcagtgaaaattacaagatattggtgaaattaaggatatcattagtatcattggatatgttttctttctttcttcttytttttttttttttgagaaagtcccatgttgtttatttctcagaccttaaagaaatctgagcagtgagtcagtaatgtttccatatgacacaagaggctttacttctgagagagaagagacacttaaagaaatttctatcaagacctggaaatggctgggagcg

SEQ ID NO: 3935 - DNA, 1113 bp, Homo sapiens
ttttttttttcttgagacagagtctcgctctgtcgcccaggctggagtgccgtggcgggatctcggctcactgcaagctccgcctcctgggttcacgccattctcctgcttcagcctcccaagtagctgggactacaggcgcccgccaacacgcctggctaatttttttgtatttttagtagagacggcgtttcaccgggttagccaggatggtctcgatctcctgrcctcgtgattcgcacatttcggcctcccaaagtgctgggattacaggcgttagcctcccacgctggcctcatctttcaatttttaacacatctgaggaatatgaataattccaagtgaagtagacattcataaaatgcttttgttcttccatcatttaaatccaaacttttccatgctgtcttattatgttggtgcaaaagtaattgcggtttgtgccataactttcaaggtcaaaaaccgcaattacttttgcagcaacctaatagtttgcttacaggaatctaacagtcgttattctcttggtcaaattgaaagctgaaaaataatctttaaaatatagatctctatgtttatttcaagtcttcttggcattttctaaattaaataatttcataaaactagaccaaagctgtatgagctaagatatttatcacagtatcaaaataattaacatttactgagaaaagtcagacactgtgatgcactgttttatatgcataatctttatttactatcacaaccaccctatgaagtagcttgtataataatcccaatttttacagatgagaaaattgcactttagagagagtacgtaacttgactaaagtcacatagctaataagtggcagagcagccaggactttttttcttttgtttgtttgtttgagacagggtcttgctctgtggcccagactggagtgcagtggcacaatctctgctcactgcaacctctgcctcctaggttcaagcgattctcctgcctcagcctccagagtaactgggattacagacacatgccaccatgcccagctaatttttttttttttttttttttttttagtagagacaggatttcaccatgttggtcaggctggtttcaaaccc

SEQ ID NO: 3936 - DNA, 1113 bp, Homo sapiens
ttttttttttcttgagacagagtctcgctctgtcgcccaggctggagtgccgtggcgggatctcggctcactgcaagctccgcctcctgggttcacgccattctcctgcttcagcctcccaagtagctgggactacaggcgcccgccaacacgcctggctaatttttttgtatttttagtagagacggcgtttcaccgggttagccaggatggtctcgatctcctgacctcgtgattcgcacatttcggcctcccaaagtgctgggattacaggcgttagcctcccacgctggcctcatctttcaatttttaacacatctgaggaatatgaataattccaagtgaagtagacattcataaaatgcttttgttcttccatcatttaaatccaaacttttccatgctgtcttattatgttggtrcaaaagtaattgcggtttgtgccataactttcaaggtcaaaaaccgcaattacttttgcagcaacctaatagtttgcttacaggaatctaacagtcgttattctcttggtcaaattgaaagctgaaaaataatctttaaaatatagatctctatgtttatttcaagtcttcttggcattttctaaattaaataatttcataaaactagaccaaagctgtatgagctaagatatttatcacagtatcaaaataattaacatttactgagaaaagtcagacactgtgatgcactgttttatatgcataatctttatttactatcacaaccaccctatgaagtagcttgtataataatcccaatttttacagatgagaaaattgcactttagagagagtacgtaacttgactaaagtcacatagctaataagtggcagagcagccaggactttttttcttttgtttgtttgtttgagacagggtcttgctctgtggcccagactggagtgcagtggcacaatctctgctcactgcaacctctgcctcctaggttcaagcgattctcctgcctcagcctccagagtaactgggattacagacacatgccaccatgcccagctaatttttttttttttttttttttttttagtagagacaggatttcaccatgttggtcaggctggtttcaaaccc

SEQ ID NO: 3937 - DNA, 583 bp, Homo sapiens
tgttgtccacagtgactggtaattgatatgaaacagttacctttactttatcctgcaaatggaagaaacaaagcttccactgagggggctattcatacgtaaattgtatttaatggtttcctgttaatgtattctatttctataatgaaagtctagccaaattataggagagatgctcttaactcctttactgctatcaaattgagcagtaattgaatggggcaagaaatccctctttgaccttgaaagttgagatttagattttaccttctcatcccatcatcaaatttgagagacatgatattaatttttctagscttttacattttatatggtaacctggtggcactaaatataatgcttctaaatgcaaaatgcaatgaatcatcaacaaactcatcaattttcatgcagagacaagaaattttgatgcagcccaactttaattcaccaattcaagtttttcattcatcattttacctgttataaaatatttaatgataagcaattcagatgttatataaaatctgccataagaagaattgtgtctatatgtagaacatattaacaatcaaatcagaaa

SEQ ID NO: 3938 - DNA, 524 bp, Homo sapiens
tttcttctaagaaatggatacacaatattatgaaattaatttaaaaagaaagattggctgacatttattacataaatggttgtttctcctaatatctaatttttactcctctcttacttaacagatttgtgactgatgacattgctttatgaatagcataagccctgttttaactaagtggatcattgggctagaaatagagattcctgtgctgtatttctagctctgagtagttctgtgaccttaggcaaacttctcagcaggaatctcaaattatcctaattaaaactaaaatgtcattttccacccactatatgtattgcayaaaggttgtgacatgattatccctctttttacaaataattgagttacttcatataaaggtaaaatgccataaaattatttctacattaatgtcatatttaataatctgaaatgattttgccttaataggataagatagtaagtgcaaacagaatagagttctgattatcctttaaagttagtaattattgttagaatat

SEQ ID NO: 3939 - DNA, 524 bp, Homo sapiens
tttcttctaagaaatggatacacaatattatgaaattaatttaaaaagaaagattggctgacatttattacataaatggttgtttctcctaatatctaatttttactcctctcttacttaacagatttgtgactgatgacattgctttatgaatagcataagccctgttttaactaagtggatcattgggctagaaatagagattcctgtgctgtatttctagctctgagtagttctgtgaccttaggcaaacttctcagcaggaatctcaaattatcctaattaaaactaaaatgtcattttccacccactatatgtattgcataaaggttgtgacatgattatccctctttttacaaataattgagttacttcatataaaggtaaaatgccataaaattatttctacattaatgtcatatttaataatctgaaatgattttgccttaataggataagatagtaagtgcaaacagaatagagttcygattatcctttaaagttagtaattattgttagaatat

SEQ ID NO: 3940 - DNA, 552 bp, Homo sapiens
cagtctaagctaactcagtatgtaggcttgcataattttttaattaagtcctattcacgttttaacccgaatctccataaaagattaggcattcaattacatatttattatttcctagttactttcatcagtctgagatatgatctgccatttaagagttcctatcactttgaattatatgtttataaaacagaagagtcaaaaaatgtaacttaaataaatgtgtgtgtttaaaaaggaattacccagctcacaatttttcaacttataaataagcagtcctgctctacccttagttgcttccctgtcactctccatgtgatctatagtagaaatctaggcctggcagatgacaatgagtagggtatggggagcattcctactcaagcagcaargaagagtatcagaacttcctaggaaagggaatgctcttttgcaaaatatgaatggttactgtggtaggcagaattctaaagagagatcccccaagatttccttcctttggttatttaatcaaactactctaggtactgccgtgaagggattttgcta

SEQ ID NO: 3941 - DNA, 909 bp, Homo sapiens
gagatggaggagggcaccgtgactgccctgtggtctgactgcacagactttgctcgcttgctctatgaaagcgtcctcagtaggtaacagcattacaaaacagtaagtgaaatgagctcagtagcttttagaagaggcaatgagtgttgttcagaagaatttgtggttcggggctctggaggaagagaaggattctttggcctgatggaaagatgactgaaaaaaaggaaaaaaaaaaaaaaagactgggattctaactagttctatgactccatttcttcatgtttgatatagtttaataagctctacctcaaagtaggtgctagaaaattaaatgaaatggacgtaaaagtgcttaactgaaaagtagatgtttaatgagttgtaattcacttcttaccgccttgggtgtactgcggagatgaggcaggttcagttatgtctcaaccccaagaagtctgtcatcagaagcagttctagaggcagcacttgtctcatatatccgctaatatccaggacctaatacctgggagctgtgttgtccaccatggtggccatgagccacatgtactactattgagcacttgcaatgtagccagtccaaattgagatgtggtgccactgtaaactacatgctatattttgaagacttagttgaaaaaatgaaaaatatttcatttataattttgatgttggttacttgttgaaatgagaatattttggacatactggattaaatataatattaaaattaatttcacttttttwaaaaattgtggctatggaagacttaaagttacacatgaagctcacatttgtggctcacattatgtttctattggacagcattaccctagaacataagtctcaaatatattggatcacatacttcatcagtttaaaaaaagt

SEQ ID NO: 3942 - DNA, 736 bp, Homo sapiens
tgcatatgcccactgagatccagtatgctcaaggcacttgtgtgggatgggaggagcactaaattaggagtcatcagaccaactgacaaggctgctcctaacctgttgagttggctgggtggggcagttgtcctctgtgggcctctgcttccttctcaagaagggagaagggcaggagaagaactgaaaaccatcactgctggcttgattcagtcaactttaatcatgtgcccatcaaggacatggcaccaagctttaattcaagatcataaagcaattttgaacccctacgctatcactgtacaagaagaaaagctgcaaaagatgagctgatgcaaatacatctggcctgacaatcaagagtcctgggttctaatcctggctcctttttctatctggctaygtgagttttttttgcttcaattttctcatctgtaaaatgttgttggcatggaaaaatgatttctaaccgagactccatggatatcttgggttcatgagtgggatctgaggtgtccacgaagtcctcaaaatgtatgaaaatttttgtggcataggcatatttctagagaggccacctagaactttaatcacatgtgtaaaagacttgcagtccaaaaactgttaggcacactgttggtgggaatgtaaattagtatggctattatagaaaacagtatggagttcctcaaaaattaaaaatagagctaccatatgaacaagcaattcgactact

SEQ ID NO: 3943 - DNA, 736 bp, Homo sapiens
tgcatatgcccactgagatccagtatgctcaaggcacttgtgtgggatgggaggagcactaaattaggagtcatcagaccaactgacaaggctgctcctaacctgttgagttggctgggtggggcagttgtcctctgtgggcctctgcttccttctcaagaagggagaagggcaggagaagaactgaaaaccatcactgctggcttgattcagtcaactttaatcatgtgcccatcaaggacatggcaccaagctttaattcaagatcataaagcaattttgaacccctacgctatcactgtacaagaagaaaagctgcaaaagatgagctgatgcaaatacatctggcctgacaatcaagagtcctgggttctaatcctggctcctttttctatctggctatgtgagtttttttkgcttcaattttctcatctgtaaaatgttgttggcatggaaaaatgatttctaaccgagactccatggatatcttgggttcatgagtgggatctgaggtgtccacgaagtcctcaaaatgtatgaaaatttttgtggcataggcatatttctagagaggccacctagaactttaatcacatgtgtaaaagacttgcagtccaaaaactgttaggcacactgttggtgggaatgtaaattagtatggctattatagaaaacagtatggagttcctcaaaaattaaaaatagagctaccatatgaacaagcaattcgactact

SEQ ID NO: 3944 - DNA, 695 bp, Homo sapiens
caggtggatcacttgagctcagcagttcaagaccagcctgggcaacatggtgaaactctgtctctacaaaaaatacaaaaattagctgggcatggtggcacacacctgcagttccagctacttgaggggctgaggtgggagagttgtttgaacctgggaagcagaggttgcaatgagctgagatcatgccacagcactccagcctgggcaacagagtgagaccctgcctcaaaaaaaaaaaaaaaaaaaaaaraagttcctttggcaataagaacccaataagaacgatgacagtttagctatgttttatattaacagtctttgtgtgtggatgtgtatggagtcaggggtgactttaagggcagatagatagtttgcagatactttgttattagcacagaaatatcaataccataaagtaatcagatcattgtgcaatgttaagtggagacaggaattggggcaatagaaccagattaatagaacaaggaaatgaatctggaataatgtggagatttaggactattctagtcaaaataacaaaacccttcattaatgccctattaaggagagattataaactctagttactccttaatgcgggaataaaacaatccttcccacaaaagaccccttcataccaacatagaagagagagctgacacaatttaataataccttcagatatacatgca

SEQ ID NO: 3945 - DNA, 643 bp, Homo sapiens
ttgcggagggaggcagagttgggagaggagtggagtagagtttggaacacaaaaggtggtaagattgtaatcaccagctattatctaattgggctgccccattctcctagcaatattaataacacaatttaatagctgaagctcaatttcatctataacggtaaattacttaatgcctytaaagttgtaagcaaagtaaaagtgaaagttagtctttcttgatgatgaaatactttcagaattctggaaagaatgaaggaggctatgagattgggattggggtctatgtggtgagagatgggaaacttctggttatgacggaagtaagttttgatacctaaggaaaaataaagcattttctctaactcaatggcaaagcagaaccagatgcaaattgatctttttcagaacttacacatgtcagagtctgcaactgttttgaggcattttaggtagagctcactagaggctttcttcgaagatctggtttgaagcagttgcttcaacttttggaggctcccatcgtatcaaagtcctaaattatgttgcagatcattgcaatactagtcactgcaacatttcagagtcaaaagtttttcatatatatttacttcttgtgaaaaagacctgcttctggaaccca

SEQ ID NO: 3946 - DNA, 643 bp, Homo sapiens
ttgcggagggaggcagagttgggagaggagtggagtagagtttggaacacaaaaggtggtaagattgtaatcaccagctattatctaattgggctgccccattctcctagcaatattaataacacaatttaatagctgaagctcaatttcatctataacggtaaattacttaatgcctttaaagttgtaagcaaagtaaaagtgaaagttagtctttcttgatgatgaaatactttcagaattctggaaagaatgaaggaggctatgagattgggattggggtctatgtggtgagagatgggaaacttctggttatgacggaagtaagttttgatacctaaggaaaaataaagcattttctctaactcaatggcaaagcagaaccagatgcaaattgatctttttcagaacttacacatgtcagagtctgcaactgttttgaggcattttaggtagagctcactagaggctttcttcgaagatctggtttgaagcagttgcttcaacttttggaggctcccatcgtatcaargtcctaaattatgttgcagatcattgcaatactagtcactgcaacatttcagagtcaaaagtttttcatatatatttacttcttgtgaaaaagacctgcttctggaaccca

SEQ ID NO: 3947 - DNA, 672 bp, Homo sapiens
aaaaaaaactccaacagtttcacaaggaaatgtgcattaggtagaagcttgtcaatagggttagaaagaattagaacatacacatataagccttatcatgaaaacaatgagaaaattctaaaatgcaaatatgagacacaattttcaaaaagttattcttaaataaaagacaaattctaagtttaacaataggatccatataggtagtgttgctggaaacaaagagggccctgtttcttcttgctatttcaatttcacaaactagaaaaggaagcaaacaccatttagctggtcttaatatacttcacaagtctaataatttcctccagaaacagaaattctatgtgagttataattgtgttcatttattcattcagcaaatatttatcaagaatctgattaatatcctgattctggctctcttctgcgctctggggaagggaarggaggagtttgtggatgttaaattagagatacctattttagatattattttggaaataatgagtgggcagttgagtatatagatccagagttcaaggataagatttgagctgaaaatataaatttgggactcctttgcatatctagatgttctttaaaattgtgggataacacggtatcacctagtgaatgactgtagataaagaagcattctgaggactgagccca

SEQ ID NO: 3948 - DNA, 1262 bp, Homo sapiens
ttccctctaaaccaataatttagtgaacttctcatttgcttgtaatgcctatagcgctaaaagaccatattttaaaactatagatatggggttttctttttccttttttgagatctgtactccagctatgctaaccaaggatttcaaaacaacactgacaatacttgatatggtttggttgtgtccctacccaaatctcacattgaattgyaatccccataatccccacgtgtctagagagatacctggtggaaggtgattggatcatgggggtggttttccccatgctgttcttgtgatagtgagtgagttctcattagatctgatttaatttggatctcattagatctaatgagattttaaattttttttattagggcctctccccgcttttctcttcactcctctctctgctgccaccatgtgaagaaggcccttgcttccccttcaccttttgctatgattgtaagtttcctgaggcctccccagccatgtggaactgtgagtcaattaaagctctttcttttataaatttaaaaaaatgatagtttaagggagatgcttccttttggaacttgataggctgactcaaaaactataatagagaataaaaaaaacaagaataacaaataattttgaacaaaatcagaaattttgctcttttgattagttgttatattaacactataatactggtatagaaatagacaaatagaacaatgaaatatgatagagaacctagaaacccaaataaaagaaatccctaaaatctgtgaggtctggggtaagtgtgcaaaagtatgtggtggtgcaggaaaagcaggtctctgactaccactcctgagagacttcacccacccttgttatcttcctattcccaagtgtttcgtgcacacatatgtgtggacgccagagctctggcctatatagctaagctctttacacacacacacacacacacacacacacacacacacacacacagacactccaaaacagcctccacttggccagccctcatgcttagaagtacgcctattagtggcattgtctttcctcctcggggaaaaccgattgtgcaggtcttataagtaagctcagcgttatttgggtaggaaattctagcatctaggatatcattaggtaggtttaaaattgaggcatggattctgaatggaaatgtccctagtcttgcagtctcttttcaccatacaaagagatatggcaggaggaagaactgattagaccctttgaagtatgca

SEQ ID NO: 3949 - DNA, 1262 bp, Homo sapiens
ttccctctaaaccaataatttagtgaacttctcatttgcttgtaatgcctatagcgctaaaagaccatattttaaaactatagatatggggttttctttttccttttttgagatctgtactccagctatgctaaccaaggatttcaaaacaacactgacaatacttgatatggtttggttgtgtccctacccaaatctcacattgaattgcaatccccataatccccacrtgtctagagagatacctggtggaaggtgattggatcatgggggtggttttccccatgctgttcttgtgatagtgagtgagttctcattagatctgatttaatttggatctcattagatctaatgagattttaaattttttttattagggcctctccccgcttttctcttcactcctctctctgctgccaccatgtgaagaaggcccttgcttccccttcaccttttgctatgattgtaagtttcctgaggcctccccagccatgtggaactgtgagtcaattaaagctctttcttttataaatttaaaaaaatgatagtttaagggagatgcttccttttggaacttgataggctgactcaaaaactataatagagaataaaaaaaacaagaataacaaataattttgaacaaaatcagaaattttgctcttttgattagttgttatattaacactataatactggtatagaaatagacaaatagaacaatgaaatatgatagagaacctagaaacccaaataaaagaaatccctaaaatctgtgaggtctggggtaagtgtgcaaaagtatgtggtggtgcaggaaaagcaggtctctgactaccactcctgagagacttcacccacccttgttatcttcctattcccaagtgtttcgtgcacacatatgtgtggacgccagagctctggcctatatagctaagctctttacacacacacacacacacacacacacacacacacacacacacagacactccaaaacagcctccacttggccagccctcatgcttagaagtacgcctattagtggcattgtctttcctcctcggggaaaaccgattgtgcaggtcttataagtaagctcagcgttatttgggtaggaaattctagcatctaggatatcattaggtaggtttaaaattgaggcatggattctgaatggaaatgtccctagtcttgcagtctcttttcaccatacaaagagatatggcaggaggaagaactgattagaccctttgaagtatgca

SEQ ID NO: 3950 - DNA, 1262 bp, Homo sapiens
ttccctctaaaccaataatttagtgaacttctcatttgcttgtaatgcctatagcgctaaaagaccatattttaaaactatagatatggggttttctttttccttttttgagatctgtactccagctatgctaaccaaggatttcaaaacaacactgacaatacttgatatggtttggttgtgtccctacccaaatctcacattgaattgcaatccccataatccccacgtgtctagagagatacctggtggaaggtgattggatcatgggggtggttttccccatgctgttcttgtgatagtgagtgagttctcattagatctgatttaatttggatctcattagatctaatgagattttaaattttttttattagggsctctccccgcttttctcttcactcctctctctgctgccaccatgtgaagaaggcccttgcttccccttcaccttttgctatgattgtaagtttcctgaggcctccccagccatgtggaactgtgagtcaattaaagctctttcttttataaatttaaaaaaatgatagtttaagggagatgcttccttttggaacttgataggctgactcaaaaactataatagagaataaaaaaaacaagaataacaaataattttgaacaaaatcagaaattttgctcttttgattagttgttatattaacactataatactggtatagaaatagacaaatagaacaatgaaatatgatagagaacctagaaacccaaataaaagaaatccctaaaatctgtgaggtctggggtaagtgtgcaaaagtatgtggtggtgcaggaaaagcaggtctctgactaccactcctgagagacttcacccacccttgttatcttcctattcccaagtgtttcgtgcacacatatgtgtggacgccagagctctggcctatatagctaagctctttacacacacacacacacacacacacacacacacacacacacacagacactccaaaacagcctccacttggccagccctcatgcttagaagtacgcctattagtggcattgtctttcctcctcggggaaaaccgattgtgcaggtcttataagtaagctcagcgttatttgggtaggaaattctagcatctaggatatcattaggtaggtttaaaattgaggcatggattctgaatggaaatgtccctagtcttgcagtctcttttcaccatacaaagagatatggcaggaggaagaactgattagaccctttgaagtatgca

SEQ ID NO: 3951 - DNA, 575 bp, Homo sapiens
agattagtttggcaaaaactgataaaatgtagaattaaacttttatttaatgtctacctcatgctatttcttaagtttatgaagattatatcttctgaaaaattatttatcatacaacattttacctgaaggcaatgatgctgtttttccatttctgtatctcttgttctttgctcagtttctagrgcagagtaataatttcaaaattgctgaatgaaagaatgagtagtgcatcttagtcactatcacacaaaaggcctaacagctagctgctctgccctgcaatgttcttgaacatagtaacattattccaatattctgaattatttaaggtttttcaccaatcagataagttttaaaaaatattctacagttaaaccttaaacaacatgagggttagatgtgccaaccctctgggtagtcaaaccacatataccttttgtattcccctgaaactttaaccacaaatagccgactgttgaccagaaaccttaccaataacataaagagttaattaacacatattttgtatatgtattatgtactgtagtctacaataaaagtaatctagaaaa

SEQ ID NO: 3952 - DNA, 1284 bp, Homo sapiens
aaaagatttctggaaggatacasaagaaataggtagcaatggtgttctctgctaagagaagaacagaggtgaaaagaaacaatttttttctgatcatttcccttacacatttaaaatattatatcataatttttatacttacaaaatatctttcaaatgaaagtactacaaaatgggcagtatcctatcaactgaggaaagataccctttcacttctcttgtttagaactcatttttccttcttaaattgagaaccctatctttcgtgaattctgaggactccttagcattatctattatttccattaccctatctctctattctcttctctgaattcccattagccaggtattgagggctctctgtgtatcctctataatctattatatttggtattgcaatgtgctgcttcctgagtagtttttgcagatcaaccttccagtttactaacagtcttttaaattgtgtttagactgccatttaagtcatccacttgcttcatttcatttttattttatttttttttttacttttagagacacagtctcactctgttgcacaagctggagcccagtggtatgatggattatagctcactgcagccttgacctcctggctcaagtgatcctctttcagcctcccaagtagctaggactgcaagcatgtgccactgtacctagctaatgtgttatttttattttttgtagagacagggtcttgctatgttgcctaggctggtcttgagctcctggcgtcaagtgatcctctcgttttggcctccctaactgctgggattacaggtattcatcacggtgcccagcctggtttattttattttaattactatatttttgattagtaaatgttctatttgattcttcttttcaagtttacttagtgattttgcatactgtcttattctttccagatgttttttaccatttaaatattcttagtttatgatcgcctttattctttttctattatttctagtacctgagacatttgtgcctccttttttttttcatgtaaccactgccttgtattcatgatggaattttttatttttgtgattttgtttgtaaattcatatttgttaagtcctggtccctgccatcccctcacatgggaatcccacgaggtagaaatggatggatggtttcccatttatctctatcaaggatatcaacaacctggactactttttttctcttttaaaacattaattcatagtttatgattttcttcgtaatgaagtaaatgcagtttttaagttcaaatgc

SEQ ID NO: 3953 - DNA, 1471 bp, Homo sapiens
agtgacatatacgtcagctgtctttggcaacaaaattgagacttttaggagagttttgttattgttgttttaaagtttatgtcaaacatctagaaccatgtctgcttttgtaggagtatgcatggatgttctaacacccaggttttacagaactgaggcagcatgaggaatcttatattcatcccatgtcattgcccaacattctctaggaccttgctgtgcagcagcagaggcaccatctgggatcttgttacaaacacttttctaggccctgcctcagcactactgaatcaggatatgcagtttatgaagattcctagtgatttatatgggctttaaaagttgaaaagcctgctctgggagctccatgcctattccccaaattgctccaatgcacaaaktaattctccctcctccaaatatcaaaaaggcattagaagagttaaatgacaacataaatattttttttcaaaataaagtatgggttatcactagaattaacactgtgaaagattccttacatttcagaaaatgagctatcttaattcaatctaatctccagcatgtgaactaaagcaagggaatcccagcagcatcaattacagctcaggaagatataagaaactactctttatctaaggtgttaggaggtgtaggttatctgcaaccttttaaaatattcaccctttaaaatattcactcaggctcaaagggagaccaggagttctgctgtattcagaacacttaagttataaacagatcagagtttgtagggccttcttagctccttaaacagctaggtccataaaacctatcatatctctttggttccctctgttttaggaagagaagcaggtcactgaagtcttgggtacagtagggaggctagacccagggcatacttaccataaataataataacaatggttaataaaatgttcattgatgccattcactttttctaagcatttctgaagtatcatcttacataaagactaaaacaatcttatgtggtagttactattattatcattttcatttgtagctggagataatgagacattgaaagataatgtgaattgtccaaagtctcacaggtaagcaatgaatgtttgaaggcagattataggaactcaaccattgcactattctaccttttaagattggaagtggaaggcagttacattcaaacaaagacagtgcccagagtaagcaagagaaagacagctggaccacatataatcagatactgttatcctactaatataattcaacagagaaataggcccaccaaaagtcagaccatacttttctcattagctggacatcgaagatcctcaacttccctatgaacgagacttatactggatggagaaagagacgtaggttccctttcaagctattttccaagaaggtgaggtatcttccttcatagaaatgtgagggtgagaatataaggtattcctaacac

SEQ ID NO: 3954 - DNA, 1471 bp, Homo sapiens
agtgacatatacgtcagctgtctttggcaacaaaattgagacttttaggagagttttgttattgttgttttaaagtttatgtcaaacatctagaaccatgtctgcttttgtaggagtatgcatggatgttctaacacccaggttttacagaactgaggcagcatgaggaatcttatattcatcccatgtcattgcccaacattctctaggaccttgctgtgcagcagcagaggcaccatctgggatcttgttacaaacacttttctaggccctgcctcagcactactgaatcaggatatgcagtttatgaagattcctagtgatttatatgggctttaaaagttgaaaagcctgctctgggagctccatgcctattccccaaattgctccaatgcacaaattaattctccctcctccaaatatcaaaaaggcattagaagagttaaatgacaacataaatattttttttcaaaataaagtatgggttatcactagaattaacactgtgaaagattccttacatttcagaaaatgagctatcttaattcaatctaatctccagcatgtgaactaaagcaagggaatcccagcagcatcaattacagctcaggaagatataagaaactactctttatctaaggtgttaggaggtgtaggttatctgcaaccttttaaaatattcaccctttaaaatattcactcaggctcaaagggagaccaggagttctgctgtattcagaacacttaagttataaacagatcagagtttgtagggccttcttagctccttaaacagctaggtccataaaacctatcatatctctttggttccctctgttttaggaagagaagcaggtcactgaagtcttgkgtacagtagggaggctagacccagggcatacttaccataaataataataacaatggttaataaaatgttcattgatgccattcactttttctaagcatttctgaagtatcatcttacataaagactaaaacaatcttatgtggtagttactattattatcattttcatttgtagctggagataatgagacattgaaagataatgtgaattgtccaaagtctcacaggtaagcaatgaatgtttgaaggcagattataggaactcaaccattgcactattctaccttttaagattggaagtggaaggcagttacattcaaacaaagacagtgcccagagtaagcaagagaaagacagctggaccacatataatcagatactgttatcctactaatataattcaacagagaaataggcccaccaaaagtcagaccatacttttctcattagctggacatcgaagatcctcaacttccctatgaacgagacttatactggatggagaaagagacgtaggttccctttcaagctattttccaagaaggtgaggtatcttccttcatagaaatgtgagggtgagaatataaggtattcctaacac

SEQ ID NO: 3955 - DNA, 1471 bp, Homo sapiens
agtgacatatacgtcagctgtctttggcaacaaaattgagacttttaggagagttttgttattgttgttttaaagtttatgtcaaacatctagaaccatgtctgcttttgtaggagtatgcatggatgttctaacacccaggttttacagaactgaggcagcatgaggaatcttatattcatcccatgtcattgcccaacattctctaggaccttgctgtgcagcagcagaggcaccatctgggatcttgttacaaacacttttctaggccctgcctcagcactactgaatcaggatatgcagtttatgaagattcctagtgatttatatgggctttaaaagttgaaaagcctgctctgggagctccatgcctattccccaaattgctccaatgcacaaattaattctccctcctccaaatatcaaaaaggcattagaagagttaaatgacaacataaatattttttttcaaaataaagtatgggttatcactagaattaacactgtgaaagattccttacatttcagaaaatgagctatcttaattcaatctaatctccagcatgtgaactaaagcaagggaatcccagcagcatcaattacagctcaggaagatataagaaactactctttatctaaggtgttaggaggtgtaggttatctgcaaccttttaaaatattcaccctttaaaatattcactcaggctcaaagggagaccaggagttctgctgtattcagaacacttaagttataaacagatcagagtttgtagggccttcttagctccttaaacagctaggtccataaaacctatcatatctctttggttccctctgttttaggaagagaagcaggtcactgaagtcttgggtacagtagggaggctagacccagggcatacttaccataaataataataacaatggttaataaaatgttcattgatgccattcactttttctaagcatttctgaagtatcatcttacataaagactaaaacaatcttatgtggtagttactattattatcattttcatttgtagctggagataatgagacattgaaagataatgtgaattgtccaaagtctcacaggtaagcaatgaatgtttgaaggcagattataggaactcaaccattgcactattctaccttttaagattggaagtggaaggcagttacattcaaacaaagacagtgcccagagtaagcaagagaaagacagctggaccacatataatcagatactgttatcctactaatataattcaacagagaaataggcccaccaaaagtcagaccatacttttctcattagctggacatcgaagatcctcarcttccctatgaacgagacttatactggatggagaaagagacgtaggttccctttcaagctattttccaagaaggtgaggtatcttccttcatagaaatgtgagggtgagaatataaggtattcctaacac

SEQ ID NO: 3956 - DNA, 1203 bp, Homo sapiens
caaggattagctcatttcaagataaagtcactgttttcctctccctttgggactaataaaataaaaccttattaaataaaaagtaattgacaaataattcctgagagcatcagagccaccaacttgttttccaaaacagaaaaaacagtgcttacattattttattcttgtgatgctatcttaactttgggggggggaaggttaaattattctgaaagctatgaaccatctacatatttattctttttaaaggttctgtggtgtgttagcatctgtattgccagaaaacaaaattttcttcaaagttattcttgggcaggcctgggactcaacccatatgtctcacagttagttgcagcacaaggctttaatttatgaggcttgttccaaactcgtctgcagtgttacttggttcggtgaatgtgttgcgccacctattggtgggccctcagaagttcacttttcattatyagacgataacatgttttaagcatttcataaaaatcatgttttttgagggtcttcaagatttcagagtatcagggtgaagatgaacaaaatattactttcattaaattattttctctacagtaactgaaaaggcattatttttccacgtaagtccttagaccggatgaattagtagagagagacaaagaagtattttttcatccgccctagacttctcttaaaatacctttgctggcttttcttctgagccgtctcttagggagatcaaatacacgtctgtgcatcggctcgtaaagaaggagaagaacaccatgatggcctaagaaaaaaataatcacataaaagagtgagaatcaggctcgactattttctttcaccatttgtggagatacatacaatttgaagactcaaaatcccttgtggatagaagccgagggagaatttcacagtacataattttcaaacaacaaatatctttcagaaaacacctataccttattatagccttcctaaaaccaccctggccttgctctcttacagactgctttttcctccccgaaatactaaataactgaaagcatcaaactgcagaaaaggttgaagttttgtgcttttcatgaagattaggggaaaatcaacgcaagcaaaaatgctatttccagtgatgttgagtaccttgattcatatcttcctttgtgtctttagaagaaaaatatcacaggtgtatacata

SEQ ID NO: 3957 - DNA, 1278 bp, Homo sapiens
tcctggattctgctttcctgatgattttatataatttaacatttatttttcatatttgggagtaagtgtttagtccttgaactttcttcccagttgaaagaaaaaaaaaatatcagtgttgagaccttgccatctttagtggtgcataccagttaaaaataaatgtaaaatagtgtgccaccctgtttataggaatattgtgcagagaaaaagataatgctgtaaaatatttcacatcatttctggggattaaaatataaagagagtaatagaaatgaaagacacacatgacaaaccatttagaatgaaattcaatattttcaacactattggggtctatttatacataagatatttgttgggctaaacagctgaggattgataaacttatcttttgtataaagaattgctcttttaaaaatcctttctcatgacttaagaaaaaatctgtaataataactctagtgcagtggttcccaaaacacacgtatggtcagaattaagatatttttaaatgataatttctatgcttcacttcatggaatttttatgtaaaccatagaacctggaaagtggcatagtttagacataatatttgtgctttttgaaaacctcagcaggtcattctgataagcaaccatgcttggtaacataaccgttgtgaacagtgaagtgttctaaacatttagttctgctaaacttttcctcagttttataggaatactatgaaaatatcaatatggaaaagtaatttgtggctattttttaaaaattttatttcagtagtttttgaggaacaggtggtttttggtgacatgaataagttctttagtgatttctcagattttggtgcaccatagccagagcagtgtacactgtacccaatacgtattttcttatccctcaccccaactctttccctcaagtccccaaagtccattatatcattcttatgcctttgattctcatggcttttcttccacttataagtgagacacatgatattttgtttcccgttcccaagctacttcacttagaataatgatctccaactccatccaagttgaccaaaggccattattttgttcygttttatggccgagtagtatttcatggtgtgtatgtatgtatgtgtgtgtgtgtgtgtgtgtgtgtgtgtgtatatatatatatatatatatatatatatatatatatatatataccatattttctctatccactcatttgttgatgagcatttaggtttgttccatatttttgcaatagttttgctat

SEQ ID NO: 3958 - DNA, 565 bp, Homo sapiens
tttctgcctttgacggaatcataggctaagactggacatgctctcctgccacatacacaaaaataaaactggacaaactgtgagatgacagttttcaatcactggacaacaggaaccacaggactgatccctgagaagagcagcacagaagcacagtgaggtagaagccaagcagaacacagtagtcccactgaacttagaggcacaaattggagtctggactgcagaagtgactgcaatttgggggcagagtcttgagasgaggatccctaagggtggaagtgaagggcatacatctatgttaggattgcacacatattattggctgaggacttgtctgcaaatattaaacacaagactccacaaagcctgtcagagagaagctgctaccaagttaagagcataacagaaatagtgaagggtgcttggtgataggagatgtttaggtttcagcttgagaatgaaaggatcttttttctttttcacaagatattaaagcaaagaaagatgacctggtcaaatccccttgcaaacctgctaataagattatctcctgaaaagcgga

SEQ ID NO: 3959 - DNA, 566 bp, Homo sapiens
tacgaaaaattagccaggtgtggtggcaggcgcctgtggtcccagctacttgggaggctgggcaggagaatcgcttgaacccaggaggtggaggttacaatgagccaagatcatgccattgcactccagyctgggcaacaagagtgaaactctgtctcaaaaaataaaaattttaaaaaggaattaaattaaaaaataaggcaagaaacttagaagtcacaaggaggccttcattccctgacagctataaaatgaagtttctaattttgttgtaattgtcaagtttcttttagcccagagttgtacaattgtacctgattatttaaaaacattaaaaatacagtttagacatgaaatacatacacttaaataattatgttttataaaaaatttggtcaaagagtcataaatgcaaatattatggattgtatgacccaattacatctggaagttccagataggacctaataaacataactttaaatatagagctaagatagaatgaaataaaaggaaactccagtgtgccccaaatgaaggcaaaactgtacccccaagttgtcagc

SEQ ID NO: 3960 - DNA, 613 bp, Homo sapiens
ctttcatttacacaggaatcacttggagatctttgaaaatgcagagtatgagtcagcaggtccgggactgggcttgagattttgcatgtctaacaagctcccaggtgaggtagatggcccacgggccatacctggagcagcaggctttaaatcacaacaagggaaagcactgctggtttcatggatcatcctaacgacgtgaaaattatcatctgttttgaaaactcttccttctctctttttaattaagcagggaaaattctaacttcttattctggaaagtaggagatggccagggctcattgggggaaggagaagaagaaggagaaggagaggaacaggaagaggaagaggaagaagacaaataagtggaagaggaggaggaagaggaagaagaagaggaagaggaagaagatgaataagtggaagaagaggaggaggargaggaagaggaagaagaagaggaagaggaagaagacgaataagtggaagaagaggaggaggaggaagaggaagaaggaggaggaggagaagaagaagaaggggaaataataataatcagttttcatggagtaacatccctccacctcatggcctttagcgtatatggtta

SEQ ID NO: 3961 - DNA, 500 bp, Homo sapiens
agaaaaaattttaagaaaacatgctgcacaaatacactatccatgatagtaatgatggtatcttaattgtcaagtaaaaccccatagaccagaagcctgatgttaaaccaggaagagaatgaactcctctgatactttccccaaaacttaaaatccttcacatttctttttttggcgatggagtcttaccctgttacccaggctggagtacagtggtgtgatctctgctcactgcaacctccacctcctgggttcmagtgatcctcccgcctcagcctcccaagtagctgagagtacatacaggcatgcgccaacacgcctggctaatttttgtatttttagtagagaagggttttcaccatgttggccaggctggtcttgaactcctgacctcaggtgatctgcctgcctcggcctcccaaagtgctgggatcacaggcatgagccaccacgcctggccaatccttcacatttctttggagggaatgctaaaataatgt

SEQ ID NO: 3962 - DNA, 573 bp, Homo sapiens
ccgtggagacacagaaaggtgataaggtgcgtgctgtgagaatgcctgaccagccatgagtttccatgccacactcaggcctacaccgacataaacttcccttgtcctggggtcattacaaatactcaattacttgcatttcatggaaaactgctgcctattccatggctccaggttattgaatattacaattcttccacttcaggtcccacatgatcctattgcagagtctaccttactttttatctttcaagtcattttcagctttctgagattgacgtttctttcccttctttgaactccactgggacttgtatactatttcacgatttcttttattactttgtttctaaacatgctctgtccgtgtctgaaatccctctagttgtaaagattgtatttaattatgtttatttctagtgcctttcccaatacatgattgggactaagtgatgtactaattttgatttggaaatctttcattccacaaacatttattgagtgtctactataaatgtaggtgatggtmtgagttgtgagaaacaggctgacgataaacaagacctggtcctt

SEQ ID NO: 3963 - DNA, 676 bp, Homo sapiens
aattaataatccaatttaaatatttgaaagatatgccttataagaaataccgcattaaaagatagagtaagaatatagtaggaaagatgttcttcctaataacatttaattttattatcacaaaaataaagtatgtggagtccatgcaatttgtaaaatctatctaaaatacacatctctaataaggaaactgctttaaggcagaaataatactctcatggcagttaaggttaatttgtgaatttagtgatagagaaggagaattatcctaccttaaagagaaaaatcaaaagataagtcaaattaaaacataaacaccgctagcaacaatgtcgctttaggtaaaaaactttaaaaatgtacatgccttggtacaatctaagtttggtagaracctcgatgggtcagtaagttaaaggtgagtgttcaaatttactcattatctcagacaagggaagcactaaaactccaaagctatcttaccatcctaattagagttttctcacaatgaatatgcttgcatatatgaaaatagtgtgttgttttattggttatattcaaagaagtgttgaggagagtccggaagacatacattacatgcagtacttaactcacatatagacatgatggcaaatcagtcctcattatcaataaatctgctctcactgaaattgag

SEQ ID NO: 3964 - DNA, 550 bp, Homo sapiens
gagggagaggcaaggagctaggggtgcaaagaactgagccagagcggagcgatgagccttcgccagccccgggagggcgcctccaaatgcaggtgcctgggctgggaatgcggagactcagcacagaaggtcggctggaggcctgggctgcaggtgcctgggttgggaaagcggagactcagcacagaggcctgggctgcatgcccctcatccgctaacgtgcacgcctgtgggctgggtgtcagcttgccccatgaaaactgcctggcagccttgtcgctgcccatgtgcrcacatgacgcctccctgggcccttggaatgatcgagctcatgtaaagcttgaatcgcatatttgacatcatgctcaagcccgtgggtggagcggccagtgtggatgtacttacctgctctgccagttaggatctgggtaagctctggggacttggtcaacctctctaagcttcattctctgcattctaaaagtagggatgccagctgctcataagcgttaaaataacacttcatgagctcaggagtgaagagcaaatc

SEQ ID NO: 3965 - DNA, 550 bp, Homo sapiens
gagggagaggcaaggagctaggggtgcaaagaactgagccagagcggagcgatgagccttcgccagccccgggagggcgcctccaaatgcaggtgcctgggctgggaatgcggagactcagcacagaaggtcggctggaggcctgggctgcaggtgcctgggttgggaaagcggagactcagcacagaggcctgggctgcatgcccctcatccgctaacgtgcacgcctgtgggctgggtgtcagcttgccccatgaaaactgcctggcagccttgtcgctgcccatgtgcgcacatgacgcctccctgggcccttggaatgatcgagctcatgyaaagcttgaatcgcatatttgacatcatgctcaagcccgtgggtggagcggccagtgtggatgtacttacctgctctgccagttaggatctgggtaagctctggggacttggtcaacctctctaagcttcattctctgcattctaaaagtagggatgccagctgctcataagcgttaaaataacacttcatgagctcaggagtgaagagcaaatc

SEQ ID NO: 3966 - DNA, 499 bp, Homo sapiens
tataccttaataaaaagaaatagctaatagcagaaccatatatattattactatgtgtgtacatacatgtatacacatatacatacacatagatacatataaatactgaaattcacttgtgttttaaataaatatatattcaaacttaaaacatcttaggccaggcgcagtggctcacgcctgtaatctcagcactttgggaggctgaggccggtggatcacctgaggtctggagtttgagaccagcctgaccaacatggagaaaccctgtctctactaaaaatacaaaattagcygggtgtggtggcacatgcctgtaatcccagctactccggaggctgaggcaggagaatcgcttgaacccaggaggcagaggttgcggtgagccgtgatcgcgccattgcactccagcctggcagcctgggcaacaagaatgaaactctgtctcaaaaataaatagataagatagataaagaggctgggtgtggtggctcacacc

SEQ ID NO: 3967 - DNA, 499 bp, Homo sapiens
tataccttaataaaaagaaatagctaatagcagaaccatatatattattactatgtgtgtacatacatgtatacacatatacatacacatagatacatataaatactgaaattcacttgtgttttaaataaatatatattcaaacttaaaacatcttaggccaggcgcagtggctcacgcctgtaatctcagcactttgggaggctgaggccggtggatcacctgaggtctggagtttgagaccagcctgaccaacatggagaaaccctgtctctactaaaaatacaaaattagctgggtgtggtggcacatgcctgtaatcccagctactccggaggctgaggcaggagaatcgcttgaacccaggaggcagaggttgcggtgagccgtgatcgcgccattgcactccagcctggcagcctgggcaacaagaatgaaactctgtctcaaaaataaatagataagatagataaagaggctggrtgtggtggctcacacc

SEQ ID NO: 3968 - DNA, 664 bp, Homo sapiens
cgtaaccaatgtagtgggaagagaagcctatccacctaaattaatttccaactttctaccaacaacacttttgccaagaatgttgtttaaaattccaccccaaataagctaagtgaatacctgctctgagcctggggagaaagtggcatcctggctccgggtcatcatcctccgaggagattcaggcaccagaggtaagcgctctggtcgcccctcaaggcctgggattggggagctggtcaggccaaaggatgcatccaggtcagtcatggacgattcaatctgctggaagccccagagccccaccttcctcatacattgcgaacatgytatcagggagagctgcatggattccaaagaggaactagataggaatgaaaaagagagttttctcaaagtgtaacatttccaaatgactaagtgcaatgtcttgtgagtatgccttatctcatccaatttctggaacagtcaccatgtcctatcagagcctctgtgctccagtctcaggacccagcttcatacttcatcatctctcacatatttcccatagaaagacctcgggttcttagtgtgctctctatggtaagactgttttgcaggcatgttttaaaagtttctcggccgggtgcagtggctcatgcctgtaatcccagcactttgggag

SEQ ID NO: 3969 - DNA, 1300 bp, Homo sapiens
agcaagattacaacttattgtaaaatagagattgttcatatttgtgtcagttatatgaaataagtgaaaatccttttatcaataagaaataaatttatttcattttccagtcagaaaactctatctgagagctatattataaaagaaatgccagtgattaactacctgcaatgatcttctcttccctgtggcagcatataagcattaaggggagaatgaatttcttagttatagaatgtatttataaaaaagaaaaagatgtaaaagatagaggaagaacaaagtcttcttctctttaatagctgtttcctatttataggggcaggaaacagtcataggcactagagccatttcccctcatttgggaccaaaagctataaccaaagtctataaccaaagatatatgggactcaatcatctccttgaaagttactgagtaggaaaatgaggccgaattttaacagggaggaagaatattctaggagggaaagggaagactgagttttccatatgacccatctagggggttcagactctatcctaggagttcccatctcaccaaaactatccaagtaatggtccaaattttcaagccataaaataaatttggcaagagatctcagtttgaattgatgatcaaggagttgacttgccactttgttaatttcataaaaccataaaattattagagtttggtttaaaattagaattatttttatttatttttattttaaaaaatgttttatagagatggggtctgactttgtttcccaagctggtctcaaactcctggactcaaacaatcctcccacctcagcctcctaaagtgctaggatcacagatgtgagccagtatgcctagtctatagttagaatttgatttaatattgagattgaagagaatctgggaattgaatttagaaatgttaagactcttgaaaatcttactttatggagcaagtaatactcatcagacttgtattctgcattaattttagtcaaggtcaatgttgttcttagaaattacctgtcttcaatggaaatgaaagttaatgatctattattttcattatgctacccctaatgcctggacttgatcaaaaaaaaattagtaattaaatataagaataaaagtatgaccggacttcaacatatcgcttgaggtctggagccagcaagtaactaacagtatttaatagggtgagagctttactgtggcttagaagagaawcaataatgtaatatcaaaatgtaatgtaatcaaaaatgtctttcattgctgtttatatattgtgttagtt

SEQ ID NO: 3970 - DNA, 1296 bp, Homo sapiens
cttttttcataaaaattcaaaggtaagcagaactgctccttttcaccctctatgtgcagctcatcacagaagtgcagccataactgagtcacttgtcaatctttttcctcccaattacagtgtttagacgggggatgctgagagagaagccggtttgctgggaggtgcgagcccagagcacacgctccacctagactgcgggcagtgccccaccatgaggagctcagcagtttcttcacgtggtgttttccaccatgcaaaaacatccaagatctattgtttatgtagcttgtactttgggtcaggccccggttcaattcctaacagtgacattttgtatttgtgtgactaatacacgtgttattaagaaagttactactgtctttaagatgcagtttcctcatctgtgaaatggaatatttgtgtattccatatgttatataatattactgtctgcttaaccttggcatagtgtttgaaggacacaaagcctgagtccagcacagagcaggtgcttgatgaatatcccagacacggaggaaggcagcatctcgattccaagttcttttcctgtatatacatttatatctctctgaataggcatctgcatttgtttcttttattatagacaggttgtctgatctcaatccgttagagatggggtagccttagggaccctctggtcccacatctcactgtacaggggatgcaggatttgccaaggtcctacccattagtgagtagcagagcctggatgagttcctcggatcaggaggaggtggtgtgctcctgtcctcctgtgagatgaagccattcttaatcagagcctcggatcaggaggaggkgctgtgcgcctgtcctcctgtgagatgaagccattcttaatcagagcctcggatcaggaggaggggctgtgcgcctgtcctcctgtgagatgaagctgtgctcaaccccggcctcagatcaggaggaggggctgtgctcctgtcctcctgtgagatgaggccatgctcaatcccaggacaggtgcaggcgattgctttcaccttctaactttagaatctggagagtccgcatagctcctactttcgaagctgcctcagagagtctttgttattgcaaaatgcgtgtgggcaggctggaccaggcagtggatcttgttgttttgttagggagaaaggaaaactgaagttccatcacctgccagttagtcttggtctacctccaacccaaacttgggctcagtgaagcagattaataaagcaatggggcatctctggctgctgcgagcaccat

SEQ ID NO: 3971 - DNA, 1296 bp, Homo sapiens
cttttttcataaaaattcaaaggtaagcagaactgctccttttcaccctctatgtgcagctcatcacagaagtgcagccataactgagtcacttgtcaatctttttcctcccaattacagtgtttagacgggggatgctgagagagaagccggtttgctgggaggtgcgagcccagagcacacgctccacctagactgcgggcagtgccccaccatgaggagctcagcagtttcttcacgtggtgttttccaccatgcaaaaacatccaagatctattgtttatgtagcttgtactttgggtcaggccccggttcaattcctaacagtgacattttgtatttgtgtgactaatacacgtgttattaagaaagttactactgtctttaagatgcagtttcctcatctgtgaaatggaatatttgtgtattccatatgttatataatattactgtctgcttaaccttggcatagtgtttgaaggacacaaagcctgagtccagcacagagcaggtgcttgatgaatatcccagacacggaggaaggcagcatctcgattccaagttcttttcctgtatatacatttatatctctctgaataggcatctgcatttgtttcttttattatagacaggttgtctgatctcaatccgttagagatggggtagccttagggaccctctggtcccacatctcactgtacaggggatgcaggatttgccaaggtcctacccattagtgagtagcagagcctggatgagttcctcggatcaggaggaggtggtgtgctcctgtcctcctgtgagatgaagccattcttaatcagagcctcggatcaggaggaggggstgtgcgcctgtcctcctgtgagatgaagccattcttaatcagagcctcggatcaggaggaggggctgtgcgcctgtcctcctgtgagatgaagctgtgctcaaccccggcctcagatcaggaggaggggctgtgctcctgtcctcctgtgagatgaggccatgctcaatcccaggacaggtgcaggcgattgctttcaccttctaactttagaatctggagagtccgcatagctcctactttcgaagctgcctcagagagtctttgttattgcaaaatgcgtgtgggcaggctggaccaggcagtggatcttgttgttttgttagggagaaaggaaaactgaagttccatcacctgccagttagtcttggtctacctccaacccaaacttgggctcagtgaagcagattaataaagcaatggggcatctctggctgctgcgagcaccat

SEQ ID NO: 3972 - DNA, 1296 bp, Homo sapiens
cttttttcataaaaattcaaaggtaagcagaactgctccttttcaccctctatgtgcagctcatcacagaagtgcagccataactgagtcacttgtcaatctttttcctcccaattacagtgtttagacgggggatgctgagagagaagccggtttgctgggaggtgcgagcccagagcacacgctccacctagactgcgggcagtgccccaccatgaggagctcagcagtttcttcacgtggtgttttccaccatgcaaaaacatccaagatctattgtttatgtagcttgtactttgggtcaggccccggttcaattcctaacagtgacattttgtatttgtgtgactaatacacgtgttattaagaaagttactactgtctttaagatgcagtttcctcatctgtgaaatggaatatttgtgtattccatatgttatataatattactgtctgcttaaccttggcatagtgtttgaaggacacaaagcctgagtccagcacagagcaggtgcttgatgaatatcccagacacggaggaaggcagcatctcgattccaagttcttttcctgtatatacatttatatctctctgaataggcatctgcatttgtttcttttattatagacaggttgtctgatctcaatccgttagagatggggtagccttagggaccctctggtcccacatctcactgtacaggggatgcaggatttgccaaggtcctacccattagtgagtagcagagcctggatgagttcctcggatcaggaggaggtggtgtgctcctgtcctcctgtgagatgaagccattcttaatcagagcctcggatcaggaggaggggctgtgckcctgtcctcctgtgagatgaagccattcttaatcagagcctcggatcaggaggaggggctgtgcgcctgtcctcctgtgagatgaagctgtgctcaaccccggcctcagatcaggaggaggggctgtgctcctgtcctcctgtgagatgaggccatgctcaatcccaggacaggtgcaggcgattgctttcaccttctaactttagaatctggagagtccgcatagctcctactttcgaagctgcctcagagagtctttgttattgcaaaatgcgtgtgggcaggctggaccaggcagtggatcttgttgttttgttagggagaaaggaaaactgaagttccatcacctgccagttagtcttggtctacctccaacccaaacttgggctcagtgaagcagattaataaagcaatggggcatctctggctgctgcgagcaccat

SEQ ID NO: 3973 - DNA, 1296 bp, Homo sapiens
cttttttcataaaaattcaaaggtaagcagaactgctccttttcaccctctatgtgcagctcatcacagaagtgcagccataactgagtcacttgtcaatctttttcctcccaattacagtgtttagacgggggatgctgagagagaagccggtttgctgggaggtgcgagcccagagcacacgctccacctagactgcgggcagtgccccaccatgaggagctcagcagtttcttcacgtggtgttttccaccatgcaaaaacatccaagatctattgtttatgtagcttgtactttgggtcaggccccggttcaattcctaacagtgacattttgtatttgtgtgactaatacacgtgttattaagaaagttactactgtctttaagatgcagtttcctcatctgtgaaatggaatatttgtgtattccatatgttatataatattactgtctgcttaaccttggcatagtgtttgaaggacacaaagcctgagtccagcacagagcaggtgcttgatgaatatcccagacacggaggaaggcagcatctcgattccaagttcttttcctgtatatacatttatatctctctgaataggcatctgcatttgtttcttttattatagacaggttgtctgatctcaatccgttagagatggggtagccttagggaccctctggtcccacatctcactgtacaggggatgcaggatttgccaaggtcctacccattagtgagtagcagagcctggatgagttcctcggatcaggaggaggtggtgtgctcctgtcctcctgtgagatgaagccattcttaatcagagcctcggatcaggaggaggggctgtgcgcctgtcctcctgtgagatgaagccattcttaatcagagcctcggatcaggaggaggggctgtgcgcctgtcctcctgtgagatgaagctgtgctcaaccccggcctcrgatcaggaggaggggctgtgctcctgtcctcctgtgagatgaggccatgctcaatcccaggacaggtgcaggcgattgctttcaccttctaactttagaatctggagagtccgcatagctcctactttcgaagctgcctcagagagtctttgttattgcaaaatgcgtgtgggcaggctggaccaggcagtggatcttgttgttttgttagggagaaaggaaaactgaagttccatcacctgccagttagtcttggtctacctccaacccaaacttgggctcagtgaagcagattaataaagcaatggggcatctctggctgctgcgagcaccat

SEQ ID NO: 3974 - DNA, 1645 bp, Homo sapiens
ggagcagtcagctgcagttacagaaaaggctgtgatgctatcaagtcagcaccacagttctgagaaatctccatctttttccaggaattttcatgaatattcaatcccttggttaaagaaacccataaagacagcagccccagaccccatggtacgactgtctcttgagcacgcccgcactcccatttctggagtgtgtactttttgctttgcaataaatctctgtactttcactactttataactcatccttgaattccttctcgcaatgttgtcaagagcctggacaccagctggggtgaggtcctcctggcatttggggacctcttccagctcactggtatcactcagtccaagcgaaaggagccatcaagtgggaagccaggagtttctccaaaggaatcatctctccagaggtagatgagatgggaaagttgagggtggggttggaagtggggcctgcagcagactgggagtaattccaaatctggggagtcattagctgcatgtggtttagtgttggctgactgggaatgagaggcttcctgggaatgagaggcttcctgggaggttaaggcattggccagtaatgatctgaggagaacttgataaaatcctcttatggcatccaatggggaagaacatgtccaagccaagggccaggggcaagggaaggggagcagtgcctgctggctcagtcacagccccaacccccgctgcgagggtcctgggatgggccattgcctctctggcctgagcaagtgcctcctctgtgagacacggtttcccatgactgcagtgagtttcaaggtgaggaacagcatgggctttacaatctgaaaagcagctctctctaccacaacaggacaaatccccccacctgcatacccaagccgtctcttcgcaagattgccctggaagtgcctgaggacaaatgtgaacacctgccctagccccacagcccctgagagctcctcatggcattgggttttcctggagagagaggcctgagatactgcacatggggctgagcaaagggaatcgtcttcctcttggagtggagggagggcaaccacaggaggagcaaagcgggaggaacctggagcccgtgggccgggcagaaggtgaggccagcagcaggacctgaccaccagggtgacacaatgttgaagaarcctcccatccccagtgcctggccagcccctctgtgaaagcttgtttatatctccaggggtaaaagattgtttgaggaaatccattagcttcggcaattcaaagagggtgagttttatatctaggtcaatatgacaagtgcaatgacagcctggaccgacagcccaggaggtggagaagcctggagaaagcccttctcagagcccctccctggtgcctgctgtgggctccactgtccctgacacccaccctctcctggccagtgagtctgtgggccaaggcactcagcttgagcactgaacccagaattcctactcaccaccagagccagccccacggcctgcagcacccccgtggcccatcctctagggggctggccatgtgtggctgtgtccagccgaggtccaaagggcacatgagctgtgtgaccacacccctgcaggtcagacctttcaggggcctcctgagccca

SEQ ID NO: 3975 - DNA, 1645 bp, Homo sapiens
ggagcagtcagctgcagttacagaaaaggctgtgatgctatcaagtcagcaccacagttctgagaaatctccatctttttccaggaattttcatgaatattcaatcccttggttaaagaaacccataaagacagcagccccagaccccatggtacgactgtctcttgagcacgcccgcactcccatttctggagtgtgtactttttgctttgcaataaatctctgtactttcactactttataactcatccttgaattccttctcgcaatgttgtcaagagcctggacaccagctggggtgaggtcctcctggcatttggggacctcttccagctcactggtatcactcagtccaagcgaaaggagccatcaagtgggaagccaggagtttctccaaaggaatcatctctccagaggtagatgagatgggaaagttgagggtggggttggaagtggggcctgcagcagactgggagtaattccaaatctggggagtcattagctgcatgtggtttagtgttggctgactgggaatgagaggcttcctgggaatgagaggcttcctgggaggttaaggcattggccagtaatgatctgaggagaacttgataaaatcctcttatggcatccaatggggaagaacatgtccaagccaagggccaggggcaagggaaggggagcagtgcctgctggctcagtcacagccccaacccccgctgcgagggtcctgggatgggccattgcctctctggcctgagcaagtgcctcctctgtgagacacggtttcccatgactgcagtgagtttcaaggtgaggaacagcatgggctttacaatctgaaaagcagctctctctaccacaacaggacaaatccccccacctgcatacccaagccgtctcttcgcaagattgccctggaagtgcctgaggacaaatgtgaacacctgccctagccccacagcccctgagagctcctcatggcattgggttttcctggagagagaggcctgagatactgcacatggggctgagcaaagggaatcgtcttcctcttggagtggagggagggcaaccacaggaggagcaaagcgggaggaacctggagcccgtgggccgggcagaaggtgaggccagcagcaggacctgaccaccagggtgacacaatgttgaagaagcctcccatccccagtgcctggccagcccctctgtgaaagcttgtttatatctccaggggtaaaagattgtttgaggaaatccattagcttcggcaattcaaagagggtgagttttatatctaggtcaatatgacaagtgcaatgacagcctggaccgacagcccaggaggtggagaagcctggagaaagcccttctcagagcccctccctggtgcctgctgtgggctccactgtccctgacacccaccctctcctggccagtgagtctgtgggccaaggcactcagcttgagcactgaacccagaattcctactcaccaccagagccagccccacggcctgcagcacccccgtggcccatcctctagggggctggccatgtgtggcygtgtccagccgaggtccaaagggcacatgagctgtgtgaccacacccctgcaggtcagacctttcaggggcctcctgagccca

SEQ ID NO: 3976 - DNA, 580 bp, Homo sapiens
catccctgtatcagtcagtcactggatgtggcatagcatgggaccaccactgcctctggcaagcagatggctggggctaaggtcatgcagtgggtgagaagagaaccaggtttaacctcacactgtggctctatatgctcccctggtgtccmctgctacttgtcccactcctgccactacccccctgagctatcagaccatgtttccatgctgcggatgcaccttcatctccctttctccacaaatcctaaccaaatcctattgggttacacttcctggacacgctaccacccaccatcctgcctcttgctctggtgtcatggtctcaccttgcacactcatcaactctcatctggactaagcaaatgacccccaaacacccagccctgctttgagtttctcccctccctccctgctgcttcgtaccaggtatcctgaactgcagctcaaagctctgattaggcttcttcccagaaaagtccagggactccaactgcctagacctgtgagcaaaacccagctccctggtccgctctctaacttcatccatcactgatgccattcctaagcatgggcctta

SEQ ID NO: 3977 - DNA, 631 bp, Homo sapiens
ttgcttttacccttcttgaaaccccagtgaatgaccctataaatgcacagaaaagaataaactcacagcagcaaagcaaggaaaggggtctccaagcttacggatgacttaagacagacagacctacgtggaagggcacaagtggacagatggacagagccaaggaagacacagtgaacacccttccagaaactgccctgagctcccgagctcaaggtcagtggcaacagtggaggccaggagtggggttcatttgagagctgtctgtggagcaagtggagcccccagcaactcctcaacacctgtrtaaagagaggcacctatgagagctacttaccccatggcaaaaaacctgagggctcttccttggaaaaaatggaccttccttcctgggagttccaaggcttgcatggtggatgtagcaccagataagccctacccctcctgggctcccaccaggcgatcctacaaggaacctatctgcacccacaatgattgaaatggacccacgtattcagaatttttaatagactgtgagaatgtcaaggattaaagagaagtttctagaagttttcatagaaaaaagcagctcagctgcaaaggaatgagagccaaaggggcatcaggatgc

SEQ ID NO: 3978 - DNA, 579 bp, Homo sapiens
tttacaacatctgttttcttctttcattctctatcagattaagtaaagtctttaaaaggtgacactatccagaaccttataaaaatgtacacagtgatgctaaaccttaggctgccctctgtgatcagaaggacaaagcagccataggctgagcagaacagcctccaaatgacgatgcctctaaatatgtccccttttctaggtgaggacccgaatcagtgtaagccttttgatttcttattttggaacatatgcagtactagtccataaatgtacctcattttcttaactgcattacttatagaaacatcataaacacttttggaaataatatttttccctaaatgtttagatttaatggaaattttagaatagaagaaaattgaaacttcaagttgtatccttagtggacctttctcactttaatgaaaatgtactctataaagctartgtttttctattgccaattacagttcgttcccttattctatgtctaaaacttctaggttacagagttgcaatataatagaaatggcacccaactgggagctctgctctcatgctggtaacaccactact

SEQ ID NO: 3979 - DNA, 653 bp, Homo sapiens
gcacgaggacagcagtgccaaataaagtgaaaccttcatcatcagcccaaatttccacaggrcagtgagcatttcatttacacaggggctaacacacctcactcttcagactgaacccttgacaatttaacatgatccctaggtgtataaagcatcaagagttttaacagtcaacctcatctgcttgcctgaccaagatcaatcaaaatttatcacacaatggaattgtgtgatatattgtaaattaagaaaatttacaaattagagctagcactgaactatctgagtcagtggagtaaagttatatataatccataccagagggtaatctcaaggtaatttataacattgctctaaaaaattaatttgtctctgtcattatacttgccttaggctaccattaaaatgatcaaccttttctctggcatatacataatcaacatacgaaaaagaattaagacttattgctgttcagtctactttaggaaataacagcttggaatataaaaatttttgtaaataaactgctctcaagtagtcagtccatagttagccatgaggaatttcttctggtttatggtagctctaccagttttattttattgctactatgttatatttgacatggctcatctgtcattttataaatttca

SEQ ID NO: 3980 - DNA, 1229 bp, Homo sapiens
ggtggataattcgaaacccaagattattaccacatcaactacctcctcagcacatctggtatcaacaacttatgggccctctacaccaggtattccacatttgtccttccagagccactctctacccttctccacccttcttgtgctcagagatgctgacgttcatgaactgtatcatcaggctgccctgtacactgacttccagttggatttggccaatagaaatacccacaggagactaggcgaggtaggatggaagagagcagagtgaggtcagagtaatcatttccccggttcatatcctatcagatcatggcttagcagtggccatgtttctttaccaaagccatggatggctcttatcagatggctctctcctggagttactgctttttctgggttccattaattaccccattcctgctcctttggacctgcaggtggtaacgactctaaatcctcaggctgttaatagaagcaaggtgcttcctcatctcttgttggttttccttcatcttgcccacacctttgtaataatcctttcactaagccctcctgaaataccctcatttgagtggccatctgttttgtattgggaaactgattgctacagcttgggaaatggaacctaagaacttggtaggcaaagttatttccttcttttgttaatttaaaacaaaattaacgtatgtggcacagaccaatcctaaatggatcccttcagatgctcagtgcaaaatatctctttaactgtgttcttttttatctctctgtgaagattctcttccagcattgtcaggaggacaaagttattttattcattcaaggtactttcacttaagtttgatatttctttatctaaaacttcatctaaaagtttgaaaagttcaataaactctgagaccagacattaacatcttaatattaaactttaatataatcctttttgatattactaatgatgcctgattgctctaagttttagaatacaataagcatcattttgactttattttagaatgagagaacacgttgaaatcacatattattatttcaaaaaaggctaccagaaaaagagacacagatacaagttagtaagatggaatctattatcactcgyctccctagtcaatcctctaaaaatttgtctgctcagaaagccaattaaagcctcctacagtctccttcattggccagaataataatggtttaaaaaagcagttcagttg

SEQ ID NO: 3981 - DNA, 1330 bp, Homo sapiens
tgcatacgtgggtatttttaattattagatcaatgttagagagcctgtactttttttctaaaactttaacctgtttcaactactaattattttacatataaaaccttagttttctatataatttaaagagtatggtgaatttctgattttttgttaacatcttcacttacaatgcaatgttgagattcattttgccactcatcctggaactatgtttcttttaggcttttggttaattactaaattttgttcagtctttctagccttttctttccaaaagtaagtaacatttaaacctgtaaacattatttgttatagtaatatttaaatgttttacaagttaaagtatcaagtatttgttcatatctacactttgatatttgagtggtatagtagacatctgctattttgccaggtccacttaacctgaatttgattaaaacatctcacttctttgggaaaccactcctttcctcagtgaggtcccagtggagctatctctgtgtgcgcacacacatgtagacacacactccactcacgcacatgtaaacacacctgtttttccccagcacattaaggcccatcagtgtaataatcatcaaaggtcttcctgacaacagtgattggttccaagaggactgatccactaagattgtaagagactttttgtcccaggttacaaggtataagaatcatgtaagccttaatctctggcgtcttccgcagcttcatggagaaagctgtctacagaattaagtcaacacagaaaagtgagcagaacctagaaaaggaaaaagagaaaaagctccagatgacattgtgtgagctcctgaatccaggtttgcgtgaggctacctagattcaacccctgcactgccaaattccataaaccaagtaattccctttttcacttgagccaaatttttaactctatgctaagataattatagattcaaacaaagttgcaaaaatagtacagagatgtcctgtgcacgctttacctastttttcccaattgttcttaagtaactgtagtataatatcaaatccaggaaattgacattagtgcaatacgtgtgaatcattctatgccatttcattatgtgtgtatattcatgtaaccaccaccaaaagtgagacgcagaattattccatcaccacaaacttctccttcctatccattcttgcctttggcaatcactaatctgttctccatctctataatgttgtcattttgagaatgttatataaatggaataatatagtatatgaccctttgagattggctttatttttcaatcaccttaatgtcctttagattcatccaagt

SEQ ID NO: 3982 - DNA, 1330 bp, Homo sapiens
tgcatacgtgggtatttttaattattagatcaatgttagagagcctgtactttttttctaaaactttaacctgtttcaactactaattattttacatataaaaccttagttttctatataatttaaagagtatggtgaatttctgattttttgttaacatcttcacttacaatgcaatgttgagattcattttgccactcatcctggaactatgtttcttttaggcttttggttaattactaaattttgttcagtctttctagccttttctttccaaaagtaagtaacatttaaacctgtaaacattatttgttatagtaatatttaaatgttttacaagttaaagtatcaagtatttgttcatatctacactttgatatttgagtggtatagtagacatctgctattttgccaggtccacttaacctgaatttgattaaaacatctcacttctttgggaaaccactcctttcctcagtgaggtcccagtggagctatctctgtgtgcgcacacacatgtagacacacactccactcacgcacatgtaaacacacctgtttttccccagcacattaaggcccatcagtgtaataatcatcaaaggtcttcctgacaacagtgattggttccaagaggactgatccactaagattgtaagagactttttgtcccaggttacaaggtataagaatcatgtaagccttaatctctggcgtcttccgcagcttcatggagaaagctgtctacagaattaagtcaacacagaaaagtgagcagaacctagaaaaggaaaaagagaaaaagctccagatgacattgtgtgagctcctgaatccaggtttgcgtgaggctacctagattcaacccctgcactgccaaattccataaaccaagtaattccctttttcacttgagccaaatttttaactctatgctaagataattatagattcaaacaaagttgcaaaaatagtacagagatgtcctgtgcacgctttacctagtttttcccaattgttcttaagtaactgtagtataatatcaaatccaggaaattgacattagtgcaatacgtgtgaatcattctatgccatttcatyatgtgtgtatattcatgtaaccaccaccaaaagtgagacgcagaattattccatcaccacaaacttctccttcctatccattcttgcctttggcaatcactaatctgttctccatctctataatgttgtcattttgagaatgttatataaatggaataatatagtatatgaccctttgagattggctttatttttcaatcaccttaatgtcctttagattcatccaagt

SEQ ID NO: 3983 - DNA, 1074 bp, Homo sapiens
aatactcttccttcttgtcaagatgtggggttaggaaaacaaataaggaacttttgggaaaatcaacattaacatctcacagctgaattttaaggtccaggctgcactgaaaaaagttcctaaagatgctcctcagttcagactgaatgccactaaattcaacaaacctttacacaatgctatctcttagtcaagtactgcgttaaacactgacagcacaaaaatgaattaagaccatgcccaccctcagtctaatagggaaaatgggcatgaagaaatgcaagtgctagaggctctggagtcagacagcctgaatggaatctgctctgacctttgctgtatgaccttgggcaaatgtcttatcctctctgtgccttagttgcttaatctataaagtggaagagataatattagttttgaccttatgtgttattgttgcaaggattaaataataaatgcaaagcatctagaacaatctctaacatatggtaagaacaatctctaacacatggtaagagctaccatgaaaccattacatggcagggtgagaagtacagtaatagacaaatccaaggcttggaggagggaatggtgaattctttccagggcaatgaaggtaagggaaggcttcttgggtttagcagtatgactaggattttccccgggaggtggcagaatgagagcagatgttactattgttacaactacaaaaaaacccactaccatctattgggcacctactgtttgcaggccctgtgcttgtgctcaatgtggactatctcagtctttatttatttatacttttatggtagagatggggtcttgctatgtttcccaggctggtcccaagctcttgggctcaagtgatcctcgggcatcagcctcccaaattgctgggattacaggtatgagccaccttgcctggcctgtgggctgtctcatttaattctctcaatagtaattccattaagttggcmctgttactattagtcccattggacatataagaaatagaaacccagagaagttaaataactcacctaaagccatacagccgtagaagcctacagaagt

SEQ ID NO: 3984 - DNA, 1229 bp, Homo sapiens
attagcatgctaaaagacactcccaccaatgccataacagtttacaaatgccacagcaatgtcaggaagttaccctctatggtgtaaaaaggggaggaaccctcggttctgggcattgcccactcctttcctggaaaactcatgaataactcacctcttgtttagcatatcatcaagaaataaccataaacatgggcaaccagcagcctttgggactgctctrcctatggagtagccatccttttaaccctttactttcttaataaacttgctttcacttaactctatggcttgccctgaattctttcttgcgcaagatccaggaaccgtctcttggcctctggatcgggacccctttccagcaatattagcactgctcacttcaccagatggagcagatggtctgacatgctggctgagcacagcgacagcgtacaggagatcccagcctgtgactcatctaccaagtcagtgctgagctatgtcccaaactccctatctcgactgaccctcaccctccctggcaagcccctgttcccatggttccatcctggccccatttgggacatctcactctgacctcaggcttctgttcttctggttctctcattcacttactcccactaaacctatttggagggaagccctcaggctacttgatggctaaaaaaaaaaaaaaatggccaggtgcggtggctcacgcctgtaatcccagcactttgggaggccgaggcaggtggatcacgaggtcaggagatcaagaccagaaaaattctggccaacatggtgaaatcctgtctctactaaaatacaaaaaattagccggacatggtggctgtgcctgtagtcccagctacttgggaggctgaggcaggggaatcacttgaacctgggagatggaggttgcagtgagccgagatcgcgtcactgcactccagcctggcaacagagcaagactctgtctcaaaaataaataaataaataaaaataaataataacaacaacaaagtaatgagagctagcatgtaactgtgttttcagcactttacatttattaactccttgttaattcgatcacgtaataacatgatgagttatgtgctactgtgctgcccattttacagatgaagaaactgaggcacagagagttaaagaaaaaatagctctaagtcatccgactccatcccaggttgagctgggatttgaatcctggccatctgcagacacta

SEQ ID NO: 3985 - DNA, 1229 bp, Homo sapiens
attagcatgctaaaagacactcccaccaatgccataacagtttacaaatgccacagcaatgtcaggaagttaccctctatggtgtaaaaaggggaggaaccctcggttctgggcattgcccactcctttcctggaaaactcatgaataactcacctcttgtttagcatatcatcaagaaataaccataaacatgggcaaccagcagcctttgggactgctctgcctatggagtagccatccttttaaccctttactttcttaataaacttgctttcacttaactctatggcttgccctgaattctttcttgcgcaagatccaggaaccgtctcttggcctctggatcgggacccctttccagcaatattagcactgctcacttcaccagatggagcagatggtctgacatgctggctgagcacagcgacagcgtacaggagatcccagcctgtgactcatctaccaagtcagtgctgagctatgtcccaaactccctatctcgactgaccctcaccctccctggcaagcccctgttcccatggttccatcctggccccatttgggacatctcactctgacctcaggcttctgttcttctggttctctcattcacttactcccactaaacctatttggagggaagccctcaggctacttgatggctaaaaaaaaaaaaaaatggccaggtgcggtggctcacgcctgtaatcccagcactttgggaggccgaggcaggtggatcacgaggtcaggagatcaagaccagaaaaattctggccaacatggtgaaatcctgtctctactaaaatacaaaaaattagcyggacatggtggctgtgcctgtagtcccagctacttgggaggctgaggcaggggaatcacttgaacctgggagatggaggttgcagtgagccgagatcgcgtcactgcactccagcctggcaacagagcaagactctgtctcaaaaataaataaataaataaaaataaataataacaacaacaaagtaatgagagctagcatgtaactgtgttttcagcactttacatttattaactccttgttaattcgatcacgtaataacatgatgagttatgtgctactgtgctgcccattttacagatgaagaaactgaggcacagagagttaaagaaaaaatagctctaagtcatccgactccatcccaggttgagctgggatttgaatcctggccatctgcagacacta

SEQ ID NO: 3986 - DNA, 534 bp, Homo sapiens
atacgcttctgtgccctgacccacttcctttaggaatctctctgctcctcctcttcctcactgtgcccctgcagaaggtctggagcacacaaatccaagataaatgtttccttgatgacaaagaactcttgtcacggtctagagcagtcatacatccaaaaaaaayacgcacttgcatggtggcatgcacacattaaactcctaggaaaatggagaaattatgtattatctagtgccatgaaaatgctaaaggaatttggacaaagcggaagaccatggtgtagaataacctcggatgccctgatgttgcaaaatggaaagcattgtgtcagtaaagggatggatggaagaaaatgacctcaagcagagagagaaagtgagtattgggagtgtgtggtacagcttaggggccgccttatctggagaggaaaatctccaatgagaagcacaggagatgagcttggatgatccacacacttaccacccagccacaatttgggtgcaagttggtgccatctcttggttgaagcaatc

SEQ ID NO: 3987 - DNA, 534 bp, Homo sapiens
atacgcttctgtgccctgacccacttcctttaggaatctctctgctcctcctcttcctcactgtgcccctgcagaaggtctggagcacacaaatccaagataaatgtttccttgatgacaaagaactcttgtcacggtctagagcagtcatacatccaaaaaaaacacgcacttgcatggtggcatgcacacattaaactcctaggaaaatggagaaattatgtattatctagtgccatgaaaatgctaaaggaatttggacaaagcggaagaccatggtgtagaataacctcggatgccctgatgttgcaaaatggaaagcattgtgtcagtaaagggatggatggargaaaatgacctcaagcagagagagaaagtgagtattgggagtgtgtggtacagcttaggggccgccttatctggagaggaaaatctccaatgagaagcacaggagatgagcttggatgatccacacacttaccacccagccacaatttgggtgcaagttggtgccatctcttggttgaagcaatc

SEQ ID NO: 3988 - DNA, 2454 bp, Homo sapiens
ggcggctctgccattgggctggtagaaggcctgttctgcaggctaccaatatgagagtgccccattgtatcaatcaaatgttctaggcattcttctggggctttcctcacatagaaaatgaaatcatactcttccaagtgttaagtgcatcaattcaaacactggacacagaagactttaagacttactcgatgaaagcagctggaatcctgagtcttcaaagatatcttcttgtctctaggatgagtggcctgacctgcaagccctctgggtgtctgtcttcactctcactggtgtctctctcggcttctgctggctttaatcttgaatgcatcaactgtcttggactcctaccttgcccatgacaacatgaagtttctctttatgtcactttaggatctracacttccaggacacaacagctctcatgagttgacctgactctttctggattgatctctgtcactcctgtttgtaggctgagagactgctcttctggtctggttagagatgggaagaggtggaaggactgggaagaccacaggctcttcagacaatcctccataaatacagattctcccaggcgagttctaaggcactataggtagcaggaagttggcaatagtgctcttggtaatgtttagaatgtctcttacaaaaccctgtgctggactttgagggattcccatggggatgaatcaagatctttaagcccagactttcctcactgaccctgccttttcccttctcaccatcccctctggactccatcttatgctcttcaagttgtcaagttgtttcctctgaatgactgtggtatttggcctacatcacaattcacctgccacttgccatctcctgggtctgaaccttatccccgctttcagactatgagctcctaagttccctgagagaggatatcatattctctctgtttgcgtagcagtgaaaatcatcaaacttcctgaatgcaaaccctgtctctgtggtttactagttgtgtggcattaggcaagttacttaatctctctgtgcctccttttcctcatcagaaaatgagaagaagaatcatatctgctttccagggtttttgtgaggtttaaataaataaatacatgcaaatgactaaaacagtgcctggcttggaggaagccttcgtacgtgtaagcgcttgtttctgctctcggtggtagttttttttcatttctattttattttattttatttatttttgagacagagtcttactctgtcactcaggctagagggcagtggtgtgatcttggctcactgcaacctctgcaccctgggctcaagtgattctcctgcctcagcctcccaagtagctgggattacaggctcacaccaccacgccaagctattttttgtatttttaaccttgcccaggctggagtgccggacaaggtttcattacgttggcgaggctggtctcaaactcctgacctcaagtgatccacctgcctcagcctcccaaggtgctgggattaccggcgtgcagccgtgcgtggcctcagtggtagttttgtttctcctggcatgaaggtgcttaggaagcatcagccatggtgtgcatgcatgtgtacacatgtgagcatacagtcttcccccgtcctgtcatctgcatttccaccatctttgtcccttcaccagacaatggcaaaagacaggaccaaaactccagttgcttaaagacccaaaacatggatctatagtggaccaaggggtccccaaaaccgtggtcagaatgacaactcagaatatcccccaggaagtcaaggaagccaggcaggacaaggcctgtcacagactggacaagagacacagacacccagggctctgttttatggctttgcgatgtcggcggctgtcccactctgtgcttacggttggggtcagcagtgaggtgctgatttcctgtatttgccactacccagagggcatggggctccaggttaagatggatgacagcacttcaaagatgaatggagtgaacattgggaagttagggagctgtgcagcggccattatctctgagtgtcctcacaccagggcctaggatctgaaaaggtctcagggcccccaggcgttccatgggccatactttgaaaaccacagcagaagagcataaccaagggagggctgtgtagagaagagcagctgtgaggccggtgcgttcatggggttctaggtataattaagggctgttttacctttctgttagggcccaagggaaattaaacctggccttataccaattgcaaggggaaaaaaatgacgtaaaagagaatggagaaaaatgatggtttcatcagtaagtgtcattcactgctgtagagcaccctttctcaaactctggtttcagctcccctttaccatgttaaaaatgatggatgaccccaaagagcttttgtttatgggtgtcctatctatcga

SEQ ID NO: 3989 - DNA, 2454 bp, Homo sapiens
ggcggctctgccattgggctggtagaaggcctgttctgcaggctaccaatatgagagtgccccattgtatcaatcaaatgttctaggcattcttctggggctttcctcacatagaaaatgaaatcatactcttccaagtgttaagtgcatcaattcaaacactggacacagaagactttaagacttactcgatgaaagcagctggaatcctgagtcttcaaagatatcttcttgtctctaggatgagtggcctgacctgcaagccctctgggtgtctgtcttcactctcactggtgtctctctcggcttctgctggctttaatcttgaatgcatcaactgtcttggactcctaccttgcccatgacaacatgaagtttctctttatgtcactttaggatctaacacttccaggacacaacagctctcatgagttgacctgactctttctggattgatctctgtcactcctgtttgtaggctgagagactgctcttctggtctggttagagatgggaagaggtggaaggactgggaagaccacaggctcttcagacaatcctccataaatacagattctcccaggcgagttctaaggcactataggtagcaggaagttggcaatagtgctcttggtaatgtttagaatgtctcttacaaaaccctgtgctggactttgagggattcccatggggatgaatcaagatctttaagcccagactttcctcactgaccctgccttttcccttctcaccatcccctctggactccatcttatgctcttcaagttgtcaagttgtttcctctgaatgactgtggtatttggcctacatcacaattcacctgccacttgccatctcctgggtctgaaccttatccccgctttcagactatgagctcctaagttccctgagagaggatatcatattctctctgtttgcgtagcagtgaaaatcatcaaacttcctgaatgcaaaccctgtctctgtggtttactagttgtgtggcattaggcaagttacttaatctctctgtgcctccttttcctcatcagaaaatgagaagaagaatcatatctgctttccagggtttttgtgaggtttaaataaataaatacatgcaaatgactaaaacagtgcctggcttggaggaagccttcgtacgtgtaagcgcttgtttctgctctcggtggtagttttttttcatttctattttattttattttatttatttttgagacagagtcttactctgtcactcaggctagagggcagtggtgtgatcttggctcactgcaacctctgcaccctgggctcaagtgattctcctgcctcagcctcccaagtagctgggattacaggctcacaccaccacgccaagctattttttgtatttttaaccttgcccaggctggagtgccggacaaggtttcattacgttggcgaggctggtctcaaactcctgacctcaagtgatccacctgcctcagcctcccaaggtgctgggattaccggcgtgcagccgtgcgtggcctcagtggtagttttrtttctcctggcatgaaggtgcttaggaagcatcagccatggtgtgcatgcatgtgtacacatgtgagcatacagtcttcccccgtcctgtcatctgcatttccaccatctttgtcccttcaccagacaatggcaaaagacaggaccaaaactccagttgcttaaagacccaaaacatggatctatagtggaccaaggggtccccaaaaccgtggtcagaatgacaactcagaatatcccccaggaagtcaaggaagccaggcaggacaaggcctgtcacagactggacaagagacacagacacccagggctctgttttatggctttgcgatgtcggcggctgtcccactctgtgcttacggttggggtcagcagtgaggtgctgatttcctgtatttgccactacccagagggcatggggctccaggttaagatggatgacagcacttcaaagatgaatggagtgaacattgggaagttagggagctgtgcagcggccattatctctgagtgtcctcacaccagggcctaggatctgaaaaggtctcagggcccccaggcgttccatgggccatactttgaaaaccacagcagaagagcataaccaagggagggctgtgtagagaagagcagctgtgaggccggtgcgttcatggggttctaggtataattaagggctgttttacctttctgttagggcccaagggaaattaaacctggccttataccaattgcaaggggaaaaaaatgacgtaaaagagaatggagaaaaatgatggtttcatcagtaagtgtcattcactgctgtagagcaccctttctcaaactctggtttcagctcccctttaccatgttaaaaatgatggatgaccccaaagagcttttgtttatgggtgtcctatctatcga

SEQ ID NO: 3990 - DNA, 1064 bp, Homo sapiens
acatctctttatgattttctcagtctggatggtttctgctgggggctccccctgattggaaacatttgtccttgaacatcatttttgaagtattatataccagcctagctcagcaagaaaaktactcatgccagtgaccatcattattgtggaagctcttacttaaatcagttagggctgagcatagtggcacattgcctgtaatcccagtgctttgggagggagaggtgggagaattgcttgagcccaggagttcgagaccagcctgggcaacatagtgaaactcttgtctctacaaaagctttacaaaattagctgggtgtagtggtgcacacctgtagtcccagcaactcaggaggctgaagtgggaggattgcttgagcctcaggtggttgaggctgcagggagctatgattgcacccttgcactgcagtctaggcaacagaccaggaccttgttgcaataataataataataataataataataataaatttttagaaacaattagttttgggacaagaagtctaaatggaaatttcatggatagatttaccaatatttttcttccttttttttttttttttttttttttgagacaggagtctcactctgttgccaggctggagtgcagtggcatgatctcggctcattacatcctccgcctcctgggttaaagctattctcctgcctcagcctctcgaatagctgggattacaggtgcgtgccacgacacccagctaatttttgtatttttggtagagacagggtttcaccatgttggctaggatggtcgctgtctcttgaccacgtgatctgcccatcttggcctcccaaagtgctgggattacaggcgtgagccaccacgcctggccccttgacaattttgactctcacccttgaagctactgtctgtagatatgcagaatgtcatggatgggaacttcttcaatggagacccatatgcaaccagtgtctgccttacaggaaacaaagtggtacccgtttcactattttctcatgaattcccttcccttttgaaaatctaaaaggagaatgaggag

SEQ ID NO: 3991 - DNA, 597 bp, Homo sapiens
caaaagatttaggaaaactagcaaagaagtgaggcagtagaattgcttaagtataaaaagtgaaatccattgagaagtgtgaaaaaggagagtttcttccattgtccctgattttaatcaaccctacgccctctcctccctaacccctccgtacatctttttttttttttttttttttttttttgagatggagtctcgctctgtctcccaggccggagtgcagtggcacaacctcagctcactgcaacctctgcctcccaggttcaagcgattctcctccctcagcatcccaagtagctggaattacaggcgcctaccaccacacctggctaatttttgtatttttagtagagatggggtttcaccatrttggccaggctggtctcaaactcctgacctcatgatctgcccaccttgacctcccaaactgctgggattacaagagtcagccaccgtgcccggcccacacatcttttatgtactcaatttagacatggaaattagcaggttatcaacaaaaggactttcctttccttaatcttaatatccaaatttggaagaaaacaaaaacacacctaactctggcgatgccttccc

SEQ ID NO: 3992 - DNA, 1212 bp, Homo sapiens
gtttttaagaggcactgtgtcatttctcaaaagaattatacttcatgagcactagcacaagcttccccaattatgtgcttttagcatatccccaaattggactctgactgcattttttttttcagcaaaagtacatacttcatttttttttttttttttttttttttagacrgagtatccctctattgcccaggctggagtgtagtggctcaatcttggctcactgcaacctctacctcctgggttcaagcgcttctcctgcctcagccttcctagtagctgggactacaggcacatgtcaccatgtccaactagttgttttttgtttttttgtacattttttgtagagacggggtttcaccatattggccgggctagtcttgaactcctgaccttgtgatccacctgccttggcctcccaaagtgttgggattacaggcataagccaccgcacccagccacatacctcatttctccaagaaccctccttttctgagcttcttaacatccacagtcattcccttctatagaatatacagaaatgaggttagcattgcttcaggcaaccagtcattgcaaatagcgttcctaccccttagtattatgtatactgaaacagaaaagcaagcataaaatttcataaacataaaaagggaacactgcctaaaacacacattaataagtaatgtacttaaaatattctgtgtgatttttatatttgaggggtttttttttgtttaaaatttctttctcaatgaaaactagtcaaattaaaaaaggaacgaactaactcaaacttagaaaaaaaatcttatgagagttttctcgttcacattctgctttcagaggatgctataaatttcacctctgcctctgttccagaggtatttgggggattgcagtaagtagtctattaagtaagttctatttaagttaattaaatcttcaggtggctaactctgtctacctaatcattaggcatggttgttttatcttctttctcactccctgtcataaaatgtttttcaccatcaaattcattcattcatttactaattcaggcacatccttctataaatgatacaaagtaatatcagagagatacaaatcactaaaacatcaagttggacagaaaagatatgaatgcacacaaaattaaagataaaatagtaaataagaaatgtcaaataaacggtgcagacaaaaacagcc

SEQ ID NO: 3993 - DNA, 1212 bp, Homo sapiens
gtttttaagaggcactgtgtcatttctcaaaagaattatacttcatgagcactagcacaagcttccccaattatgtgcttttagcatatccccaaattggactctgactgcattttttttttcagcaaaagtacatacttcatttttttttttttttttttttttttagacggagtmtccctctattgcccaggctggagtgtagtggctcaatcttggctcactgcaacctctacctcctgggttcaagcgcttctcctgcctcagccttcctagtagctgggactacaggcacatgtcaccatgtccaactagttgttttttgtttttttgtacattttttgtagagacggggtttcaccatattggccgggctagtcttgaactcctgaccttgtgatccacctgccttggcctcccaaagtgttgggattacaggcataagccaccgcacccagccacatacctcatttctccaagaaccctccttttctgagcttcttaacatccacagtcattcccttctatagaatatacagaaatgaggttagcattgcttcaggcaaccagtcattgcaaatagcgttcctaccccttagtattatgtatactgaaacagaaaagcaagcataaaatttcataaacataaaaagggaacactgcctaaaacacacattaataagtaatgtacttaaaatattctgtgtgatttttatatttgaggggtttttttttgtttaaaatttctttctcaatgaaaactagtcaaattaaaaaaggaacgaactaactcaaacttagaaaaaaaatcttatgagagttttctcgttcacattctgctttcagaggatgctataaatttcacctctgcctctgttccagaggtatttgggggattgcagtaagtagtctattaagtaagttctatttaagttaattaaatcttcaggtggctaactctgtctacctaatcattaggcatggttgttttatcttctttctcactccctgtcataaaatgtttttcaccatcaaattcattcattcatttactaattcaggcacatccttctataaatgatacaaagtaatatcagagagatacaaatcactaaaacatcaagttggacagaaaagatatgaatgcacacaaaattaaagataaaatagtaaataagaaatgtcaaataaacggtgcagacaaaaacagcc

SEQ ID NO: 3994 - DNA, 1212 bp, Homo sapiens
gtttttaagaggcactgtgtcatttctcaaaagaattatacttcatgagcactagcacaagcttccccaattatgtgcttttagcatatccccaaattggactctgactgcattttttttttcagcaaaagtacatacttcatttttttttttttttttttttttttagacggagtatccctctattgcccaggctggagtgtagtggctcaatcttggctcactgcaacctctacctcctgggttcaagcgcttctcctgcctcagccttcctagtagctgggactacaggcacatgtcaccatgtccaactagttgttttttgtttttttgtacattttttgtagagacggggtttcaccatattggccgggctagtcttgaactcctgaccttgtgatccacctgccttggcctcccaaagtgttgggattacaggcataagccaccgcacccagccacatacctcatttctccaagaaccctccttttctgagcttcttaacatccacagtcattcccttctatagaatatacagaaatgaggttagcattgcttcaggcaaccagtcattgcaaatagcgttcctaccccttagtattatgtatactgaaacagaaaagcaagcataaaatttcataaacataaaaagggaacactgcctaaaacacacattaataagtaatgtacttaaaatattctgtgtgatttttatatttgaggrgtttttttttgtttaaaatttctttctcaatgaaaactagtcaaattaaaaaaggaacgaactaactcaaacttagaaaaaaaatcttatgagagttttctcgttcacattctgctttcagaggatgctataaatttcacctctgcctctgttccagaggtatttgggggattgcagtaagtagtctattaagtaagttctatttaagttaattaaatcttcaggtggctaactctgtctacctaatcattaggcatggttgttttatcttctttctcactccctgtcataaaatgtttttcaccatcaaattcattcattcatttactaattcaggcacatccttctataaatgatacaaagtaatatcagagagatacaaatcactaaaacatcaagttggacagaaaagatatgaatgcacacaaaattaaagataaaatagtaaataagaaatgtcaaataaacggtgcagacaaaaacagcc

SEQ ID NO: 3995 - DNA, 354 bp, Homo sapiens
ggtgggtcagagacacaggataaggaaggagtcaagacgtcaaaccccgttaagcagcacagcatggtggcgctataaagtctagtgtaaaatgctgactccactgcttaccacctgggtactttggacaagctgcttaaattctttgaacctctcttttcttccctgcataaacaggggtaataagagtttcctcatggttattatgagaatgaaatgaaatgatactttttctctgaaacaccaaggattgttcccatactaagtactaaataaataaatattagtaattgttaaygattgcaataactgattggtcatgagtttctgtcattgtttctgtcacccctcagg

SEQ ID NO: 3996 - DNA, 583 bp, Homo sapiens
ttcatatgtgtttattgatattttccacaatgtccaaaataatgtattttacatagcttctgctcatgaaatattagttgatttttttttttccatggaggattcatttcaagttatttcccaaaccttggtgagccaaaattcaatctgtctctcagaggtggaaacacctacttgtaactaaaaagtcactggggcttgtgtattgatgccagtaagactcattcatcattgttgatgatgttggtgcacctgtttataagttacaggtatagaaaagcctgaaatagtaatgttttacccagacagatatggggacattttctgttttcttctagagagaacactttttctcattttgtttcaaaatgactttgcagacagtgagagtgaaaggtgttttattcttactattgactctcaaatttgcagtaaaccacgtggtttctttcttagaaacatagaaattatgagctggaaagaaccttagaaaacagccccattattttacagatgaggaaacaggaacccagaaartgatgagcacctttccaaggtaccagatttagttagcggctgagcc

SEQ ID NO: 3997 - DNA, 618 bp, Homo sapiens
agtaaatattatttacttcaggctctatttttcttcaagtttgcaaggccacattttggaagagcatatgtgatgagacgtactgtggtgtctttagaaaataaaatctgccataggcaatgtccttctttcatattatgcctccatattgttcctttgatgaaaaactgcctttttttaagtgaaaaaaagaatgggacactggactacagttcttctcacagagttatactggagactaagctatgagattacatatatttctgagtggaaggagagcttttattttattttattttatttttagatggagtttcactcttgttgcccaagctggagtgcaacggcactatcttggctcacagcaacctccacctcccgggttcaagcaattctcctgcctcagcctcccaagtagctgggattacaggtgcgtgccaccaaaccctgctaattttttgtatttttagtagagacgggrtttcaccatgttagccaggctggtctggaactcctgacctcaggtgatccacccacctcagcctcccaaagtgctgggattataggcgtgagacgccgggcctggccaaggttttatttttatacaataaagttgtc

SEQ ID NO: 3998 - DNA, 596 bp, Homo sapiens
tcagagttatttactgcactgattgtaatagcctatttttacttctctatctttccctctagactttaaacttctggagagcaaggctctcatttcatctttgttatcccagtatctgacatgcagtagatatttttcaaaatgttagctamaacaataattaaggggtgtgaaaacacattaggaagcaaaaagtggccaggcacggtggctcacgcttgtaatcccagcactttgggaggccgaggcaggcggatgacctgaggtcaggagttcaagactagcctggccaatatggggaaaccccgtctctactaaaaatacacacgcacacaaaaaaattagctgggcatggtggcttgcgcctgtagtcccagctactagggaggctgaggcaggagaagcacttgaacctgagaggcggaggttgcagtgagccgagatcacatcactgcactccggcctgggtgacaagagcaaaactcttgtctccaaaaaaaaaagaaagcaaaaagtgcagcacaaatgtttatattagtgcctttacttgctggctgttgggtacctattgaacgttaattgtcagattaattctt

SEQ ID NO: 3999 - DNA, 596 bp, Homo sapiens
tcagagttatttactgcactgattgtaatagcctatttttacttctctatctttccctctagactttaaacttctggagagcaaggctctcatttcatctttgttatcccagtatctgacatgcagtagatatttttcaaaatgttagctaaaacaataattaaggggtgtgaaaacacrttaggaagcaaaaagtggccaggcacggtggctcacgcttgtaatcccagcactttgggaggccgaggcaggcggatgacctgaggtcaggagttcaagactagcctggccaatatggggaaaccccgtctctactaaaaatacacacgcacacaaaaaaattagctgggcatggtggcttgcgcctgtagtcccagctactagggaggctgaggcaggagaagcacttgaacctgagaggcggaggttgcagtgagccgagatcacatcactgcactccggcctgggtgacaagagcaaaactcttgtctccaaaaaaaaaagaaagcaaaaagtgcagcacaaatgtttatattagtgcctttacttgctggctgttgggtacctattgaacgttaattgtcagattaattctt

SEQ ID NO: 4000 - DNA, 1223 bp, Homo sapiens
cattacaattagcactatgtctcaaattgtgagatctcaagtgcaagattatgtcatttatattggtattcctaatgcttaagctggcagataagtattccataaatatacaaatgttctaattagctagatttaaactatcagctgacaaaccctgcttcctacaacacagaaaatgggcaatggaagagaatttccacaagcttccatttacttgcaagtgtgcccttatatcctacctctagtcctattactatgaaagagttgtccttattctcaaaacttacatctatgtattagatcccactcccttcttgcctacaagaaattattattctagaattctccactccctaaaaacaagaacattctcttacataacactccaactgttaagattttacatttgcttgtgttatcttctcattctctctgtgtatataaattttctgaaacacttttaaaaaactgtttgagagtaaaccgccaatctgcagacctttagccctaaatacttcagcagtgtgaatttcctaaaaacaaggacattctcttatataaccacagtacaattattaaatctgggaattaacatcaacatcataccatcattgaatctataggttttattcttgtcaattatcccaataatgtcctttactgccagttattccaatgtcctttatagcaaattaaatacttctttagaaagaaactttctcaattatttggttatcctgaggtacttagaacaaggagggagggagtgacggagggagggagaggaaaggaggataaatgctcgagtcagtctctggcatcttccaaaggggaccaatgagttttctccttaagtatattattattattattattattattaytattattattatgactcgtggatttaaacatgttttatagtaattactgattttcaagttttcctacagtttgaccagtagagcttctttgagttggctctcctgaatctgacataacctcaatggtctttaataacttctttgatttatggtatgacatgttccagccccactgtttacattttctggcccagatgcctaatttgtcacttcttcaagtagccctggttcctttggaaagaaaccgtatttacatgtggtaatgtgggctcattcctcctggtttaaatcttttcagtagacagagctagaaaatattaaaaattttcaaatgctaaa

SEQ ID NO: 4001 - DNA, 590 bp, Homo sapiens
ataccacggggtttctttgcaattcatgtaactgaggaatcaaacccacatctgcgcctcctctggccttacttattgtcagaragttcctctcttgtcctgtcagttagagcaccagtaggaactgagctgtgtatagtcagctgctagcttgagattctgacaaatctttacaaaaatacataggcttctatggccctctccttcatcacaagttaaacccacatgaaataatgtattatgagactttgcaaagaagaatgcaattcatcttactgagaaagcaaaaccctgccaggttgatttctttctcagtagcttcgtgacaatttcaaggaagccactgtaccagcacttcatttccctaaaacaggttatgactcttctttccctcatgcgttcggctcagttcctgagtggctgccgtatgccaggcaacgaactgggtgcttgagatcgatgcttttgaggggcttgtgttggagggagagagaggtactcaggaggactgtccttcactgtgacaatgctgggacagagacatgctctggggcctggaggaccaaggaattccacatccatgtgccagg

SEQ ID NO: 4002 - DNA, 590 bp, Homo sapiens
ataccacggggtttctttgcaattcatgtaactgaggaatcaaacccacatctgcgcctcctctggccttacttattgtcagaaagttcctctcttgtcctgtcagttagagcaccagtaggaactgagctgtgtatagtcagctgctagcytgagattctgacaaatctttacaaaaatacataggcttctatggccctctccttcatcacaagttaaacccacatgaaataatgtattatgagactttgcaaagaagaatgcaattcatcttactgagaaagcaaaaccctgccaggttgatttctttctcagtagcttcgtgacaatttcaaggaagccactgtaccagcacttcatttccctaaaacaggttatgactcttctttccctcatgcgttcggctcagttcctgagtggctgccgtatgccaggcaacgaactgggtgcttgagatcgatgcttttgaggggcttgtgttggagggagagagaggtactcaggaggactgtccttcactgtgacaatgctgggacagagacatgctctggggcctggaggaccaaggaattccacatccatgtgccagg

SEQ ID NO: 4003 - DNA, 590 bp, Homo sapiens
ataccacggggtttctttgcaattcatgtaactgaggaatcaaacccacatctgcgcctcctctggccttacttattgtcagaaagttcctctcttgtcctgtcagttagagcaccagtaggaactgagctgtgtatagtcagctgctagcttgagattctgacaaatctttacaaaaatacataggcttctatggccctctccttcatcacaagttaaacccacatgaaataatgtattatgagactttgcaaagaagaatgcaattcatcttactgagaaagcaaaaccctgccaggttgatttctttctcagtagcttcgtgacaatttcaaggaagccactgtaccagcacttcatttccctaaaayaggttatgactcttctttccctcatgcgttcggctcagttcctgagtggctgccgtatgccaggcaacgaactgggtgcttgagatcgatgcttttgaggggcttgtgttggagggagagagaggtactcaggaggactgtccttcactgtgacaatgctgggacagagacatgctctggggcctggaggaccaaggaattccacatccatgtgccagg

SEQ ID NO: 4004 - DNA, 590 bp, Homo sapiens
ataccacggggtttctttgcaattcatgtaactgaggaatcaaacccacatctgcgcctcctctggccttacttattgtcagaaagttcctctcttgtcctgtcagttagagcaccagtaggaactgagctgtgtatagtcagctgctagcttgagattctgacaaatctttacaaaaatacataggcttctatggccctctccttcatcacaagttaaacccacatgaaataatgtattatgagactttgcaaagaagaatgcaattcatcttactgagaaagcaaaaccctgccaggttgatttctttctcagtagcttcgtgacaatttcaaggaagccactgtaccagcacttcatttccctaaaacaggttatgactcttctttccctcatgcgttcggctcagttcctgagtggctgccgtatgccaggcaacgaactgggtgcttgrgatcgatgcttttgaggggcttgtgttggagggagagagaggtactcaggaggactgtccttcactgtgacaatgctgggacagagacatgctctggggcctggaggaccaaggaattccacatccatgtgccagg

SEQ ID NO: 4005 - DNA, 1291 bp, Homo sapiens
ggtggattgtctcaaaagagtttaaaatgtggatcaacaagatgtggggcagtgatagactaatgaaaacaggcttccagagttttagggaaatttatggatacgaaataataattcacagaaaggacattttttggacttttctatggcttgtaattacttcaacttaacaatcacaatattacattctcctcctagtggtttttatattacagctttacgattggctaaccaccttccctaaattagatctgtggttatctgtttcagcacttgtttaccaacttattctgctagaacaatgaaatttaacaaggagaagacatggcaaatgatttatatctgtcacctgcaataatattctactcaatagaaagtaaccaagaacaggaaaaaaaattctagtaatctttacacctgtttaaatccgtaactacctgtgtggcacttctttttctaagtgagtaaaacatttatctgttatagtaagacttcagtaactaggtatcacaaggaaccacttaatatcattcaaactgattactactgacagcaactcttttaatattaccacacaaaacaagtttagcactaatgaaaacaattagtgaagggcactttctgaaatgttaaatatatatttagatttaacaactaagtggaagagtaaccacactttgaaaaattgttttggctaatgtattttgaaatgatatttggaaaacgtttgtgtggaggctgctataacaagataccataaactggatgaattaaacaacagaaatttatttctcataaatctgaaggttgggatgtccaagatcaaggtgccagcaggttctgagtttgatgagggcctgttttctggttatgttctcctatgctggtgagggacagagggagagaaagcaaggtctatggcatgtgtcttggaagggtactaatctaattatgagtcacaccctcatgacctaactacctcccaaacccccatgttagtatcccactgggcggttagtgttttaacatatgaattgtggtacattcaagcaattcattatggtcctactcagttggggatgctataacaaggtaccataaactgggttgcttatacataacagcartttatttctcagagttctggtggctggaaatctaagatcagggtgctagcctgcttgatatttggtgacaactcccttccaggttgcagactgcctccttcttgttgtatcttcacataccagaaacgggcgagagagctctgtagggtttctgttaaaaggac

SEQ ID NO: 4006 - DNA, 1291 bp, Homo sapiens
ggtggattgtctcaaaagagtttaaaatgtggatcaacaagatgtggggcagtgatagactaatgaaaacaggcttccagagttttagggaaatttatggatacgaaataataattcacagaaaggacattttttggacttttctatggcttgtaattacttcaacttaacaatcacaatattacattctcctcctagtggtttttatattacagctttacgattggctaaccaccttccctaaattagatctgtggttatctgtttcagcacttgtttaccaacttattctgctagaacaatgaaatttaacaaggagaagacatggcaaatgatttatatctgtcacctgcaataatattctactcaatagaaagtaaccaagaacaggaaaaaaaattctagtaatctttacacctgtttaaatccgtaactacctgtgtggcacttctttttctaagtgagtaaaacatttatctgttatagtaagacttcagtaactaggtatcacaaggaaccacttaatatcattcaaactgattactactgacagcaactcttttaatattaccacacaaaacaagtttagcactaatgaaaacaattagtgaagggcactttctgaaatgttaaatatatatttagatttaacaactaagtggaagagtaaccacactttgaaaaattgttttggctaatgtattttgaaatgatatttggaaaacgtttgtgtggaggctgctataacaagataccataaactggatgaattaaacaacagaaatttatttctcataaatctgaaggttgggatgtccaagatcaaggtgccagcaggttctgagtttgatgagggcctgttttctggttatgttctcctatgctggtgagggacagagggagagaaagcaaggtctatggcatgtgtcttggaagggtactaatctaattatgagtcacaccctcatgacctaactacctcccaaacccccatgttagtatcccactgggcggttagtgttttaacatatgaattgtggtacattcaagcaattcattatggtcctactcagttggggatgctataacaaggtaccataaactgggttgcttatacataacagcaatttatttctcagagttctggtggctggaaatctaagatcagggtgctagcctgcttgatatttggtgacaactcccttccaggttgcagactgcctccttcttgttgtatcttcacataccagaaacgggcgagrgagctctgtagggtttctgttaaaaggac

SEQ ID NO: 4007 - DNA, 599 bp, Homo sapiens
tattaaaagtttgagaattgtttttaaagaatatttaataaagtgagaaaatgctgcacaatctagatgggtaggaaaggaagttgaaaatgctatgtatagttgataygaataccaatatctaagtttcgtagagtgtttcttatgtgccaagcatcatatttagtattttatatgaaatatcttcctattcttcagtgagtttaagttctagtcctatatccattttgcagttgaggaagttgaagtctagagctcttaggtttaaacgtctgtttctttttcagaatctgctcacctattttattataaactgcctttaattttttaatgcatctatactgtgtagtaaaagactgacaaaacatctgttaaaatgttactaatggtaggaataattggcaatttttattctttcttctccatacttttattaaaaccccaaaataaactgagttcaagccctaaactaattttcccccaccccagctcataccctttacccaatctgtcatagctgttttatgtatactgttattcaatggaaattcatgtctatagtggtggtcctgatataagataatcattgaggagctatt

SEQ ID NO: 4008 - DNA, 599 bp, Homo sapiens
tattaaaagtttgagaattgtttttaaagaatatttaataaagtgagaaaatgctgcacaatctagatgggtaggaaaggaagttgaaaatgctatgtatagttgatatgaataccaatatctaagtttcgtagagtgtttcttatgtgccaagcatcatatttagtattttatatgaaatatcttcctattcttcagtgagtttaagttctagtcctatatccattttgcagttgaggaagttgaagtctagagctcttaggtttaaasgtctgtttctttttcagaatctgctcacctattttattataaactgcctttaattttttaatgcatctatactgtgtagtaaaagactgacaaaacatctgttaaaatgttactaatggtaggaataattggcaatttttattctttcttctccatacttttattaaaaccccaaaataaactgagttcaagccctaaactaattttcccccaccccagctcataccctttacccaatctgtcatagctgttttatgtatactgttattcaatggaaattcatgtctatagtggtggtcctgatataagataatcattgaggagctatt

SEQ ID NO: 4009 - DNA, 599 bp, Homo sapiens
tattaaaagtttgagaattgtttttaaagaatatttaataaagtgagaaaatgctgcacaatctagatgggtaggaaaggaagttgaaaatgctatgtatagttgatatgaataccaatatctaagtttcgtagagtgtttcttatgtgccaagcatcatatttagtattttatatgaaatatcttcctattcttcagtgagtttaagttctagtcctatatccattttgcagttgaggaagttgaagtctagagctcttaggtttaaacgtctgtttctttttcagaatctgctcacctattttattataaactgcctttaattttttaatgcatctatactgtgtagtaaaagactgacaaaacatctgttaaaatgttactaatggtaggaataattggcaatttttattctttcttctccatacttttattaaaaccccaaaataaactgagttcaagccctaaaytaattttcccccaccccagctcataccctttacccaatctgtcatagctgttttatgtatactgttattcaatggaaattcatgtctatagtggtggtcctgatataagataatcattgaggagctatt

SEQ ID NO: 4010 - DNA, 1168 bp, Homo sapiens
tctcagttttaaagagaaaaatttcttgacaggttgactgctactgttgagacctcttttattattgttcttaaagatctaagttttaacttgatgggaagagtgaacccacatagttttgggagaaatgcacagaacaggatggctatgggtaaatttactaaaaatatccctgactgtttttaaaggaagcatgtcatgttctgtatatttgcatatagagaatatatgtatattcttaaaatgttacatggaagcaactggcttttctcagcaaggaaaagaaattgccgacctttgaygtttaacaacatgatttcctctctgtatgatctggtaggaccccagtgccattaggttcatttcttttcctgctccagattgctaccattccaaggcatggatcctactctgaatttttttttgtcggtcttggctgtgtgcaaatcaacacagctctgaaatcccactcttctggataatattatgaaatctctatttgtataaccaacttttggccacatctgcttttctggtaatgggcttatttctgatacattgcctgctgcaactaaacatccttcaaatttcactttttttttttttttttttttcctgagatggagtctcactctgtcggccaggctgaagtgcagtggtgcgatctcagctcactgcaacctctgcctcccacattcaagtgatcctcctgcctcaacctcctgagtagctgggattacaggtgcacgccatcacacctggctaattttttttgtatttttagtagagatggggattcaccatgttggccaggctggtcttgaactcctgacctcaagtgatctgcctgcttcagcctcccaaagtgctgggattacaggcatcagccaccatgcccagccaaatttcacttttgattctattctattgatttatcctaggctgcactggggaactttcatcagttgaaagtctcctttctgtccttttggctcatccttgcccatcatcttccaccatcactagctgtgctaagatcgacactttagattgggttgaccaattcaagtggctcatcactttaaggagcgtgagtctgtctgcaggatggtccttcaaatgaagaactgagggatgtatatttttgcagtgcacacacagccatgaa

SEQ ID NO: 4011 - DNA, 1168 bp, Homo sapiens
tctcagttttaaagagaaaaatttcttgacaggttgactgctactgttgagacctcttttattattgttcttaaagatctaagttttaacttgatgggaagagtgaacccacatagttttgggagaaatgcacagaacaggatggctatgggtaaatttactaaaaatatccctgactgtttttaaaggaagcatgtcatgttctgtatatttgcatatagagaatatatgtatattcttaaaatgttacatggaagcaactggcttttctcagcaaggaaaagaaattgccgacctttgatgtttaacaacaygatttcctctctgtatgatctggtaggaccccagtgccattaggttcatttcttttcctgctccagattgctaccattccaaggcatggatcctactctgaatttttttttgtcggtcttggctgtgtgcaaatcaacacagctctgaaatcccactcttctggataatattatgaaatctctatttgtataaccaacttttggccacatctgcttttctggtaatgggcttatttctgatacattgcctgctgcaactaaacatccttcaaatttcactttttttttttttttttttttcctgagatggagtctcactctgtcggccaggctgaagtgcagtggtgcgatctcagctcactgcaacctctgcctcccacattcaagtgatcctcctgcctcaacctcctgagtagctgggattacaggtgcacgccatcacacctggctaattttttttgtatttttagtagagatggggattcaccatgttggccaggctggtcttgaactcctgacctcaagtgatctgcctgcttcagcctcccaaagtgctgggattacaggcatcagccaccatgcccagccaaatttcacttttgattctattctattgatttatcctaggctgcactggggaactttcatcagttgaaagtctcctttctgtccttttggctcatccttgcccatcatcttccaccatcactagctgtgctaagatcgacactttagattgggttgaccaattcaagtggctcatcactttaaggagcgtgagtctgtctgcaggatggtccttcaaatgaagaactgagggatgtatatttttgcagtgcacacacagccatgaa

SEQ ID NO: 4012 - DNA, 1168 bp, Homo sapiens
tctcagttttaaagagaaaaatttcttgacaggttgactgctactgttgagacctcttttattattgttcttaaagatctaagttttaacttgatgggaagagtgaacccacatagttttgggagaaatgcacagaacaggatggctatgggtaaatttactaaaaatatccctgactgtttttaaaggaagcatgtcatgttctgtatatttgcatatagagaatatatgtatattcttaaaatgttacatggaagcaactggcttttctcagcaaggaaaagaaattgccgacctttgatgtttaacaacatgatttcctctctgtatgatctggtaggaccccagtgccattaggttcatttcttttcctgctccagattgctaccattccaaggcatggatcctactctgaatttttttttgtcggtcttggctgtgtgcaaatcaacacagctctgaaatcccactcttctggataatattatgaaatctctatttgtataaccaacttttggccacatctgcttttctggtaatgggcttatttctgatacattgcctgctgcaactaaacatccttcaaatttcactttttttttttttttttttttcctgagatggagtctcactctgtcggccaggctgaagtgcagtggtgcgatctcagctcactgcaacctctgcctcccacattcaagtgatcctcctgcctcaacctcctgagtagctgggattacaggtgcacgccatcacacctggctaattttttttgtatttttagtagagatggggattcaccatgttggccaggctggtcttgaactcctgacctcaagtgatctgcctgcttcagcctcccaaagtgctgggattacagrcatcagccaccatgcccagccaaatttcacttttgattctattctattgatttatcctaggctgcactggggaactttcatcagttgaaagtctcctttctgtccttttggctcatccttgcccatcatcttccaccatcactagctgtgctaagatcgacactttagattgggttgaccaattcaagtggctcatcactttaaggagcgtgagtctgtctgcaggatggtccttcaaatgaagaactgagggatgtatatttttgcagtgcacacacagccatgaa

SEQ ID NO: 4013 - DNA, 1168 bp, Homo sapiens
tctcagttttaaagagaaaaatttcttgacaggttgactgctactgttgagacctcttttattattgttcttaaagatctaagttttaacttgatgggaagagtgaacccacatagttttgggagaaatgcacagaacaggatggctatgggtaaatttactaaaaatatccctgactgtttttaaaggaagcatgtcatgttctgtatatttgcatatagagaatatatgtatattcttaaaatgttacatggaagcaactggcttttctcagcaaggaaaagaaattgccgacctttgatgtttaacaacatgatttcctctctgtatgatctggtaggaccccagtgccattaggttcatttcttttcctgctccagattgctaccattccaaggcatggatcctactctgaatttttttttgtcggtcttggctgtgtgcaaatcaacacagctctgaaatcccactcttctggataatattatgaaatctctatttgtataaccaacttttggccacatctgcttttctggtaatgggcttatttctgatacattgcctgctgcaactaaacatccttcaaatttcactttttttttttttttttttttcctgagatggagtctcactctgtcggccaggctgaagtgcagtggtgcgatctcagctcactgcaacctctgcctcccacattcaagtgatcctcctgcctcaacctcctgagtagctgggattacaggtgcacgccatcacacctggctaattttttttgtatttttagtagagatggggattcaccatgttggccaggctggtcttgaactcctgacctcaagtgatctgcctgcttcagcctcccaaagtgctgggattacaggcatcagccaccatgcccagccaaatttcacttttgattctattctattgatttatcctaggctgcactggggaactttcatcagttgaaagtctcctttctgtccttttggctcatccttgcccatcatcttccaccatcactagctgtgctaagatcgacactttagattgggttgaccaattcaagtggctcatcactttraggagcgtgagtctgtctgcaggatggtccttcaaatgaagaactgagggatgtatatttttgcagtgcacacacagccatgaa

SEQ ID NO: 4014 - DNA, 1306 bp, Homo sapiens
ggtcctggctgcaaactgcctttttagaaccatgcggattatcagatcccagctccaaccacgggagctttcactgtgcttttggagaaatgttgccatcagtacaggtgccaatctgaatgtcaacagcttttaaatcacacagctcttgggastgttgtaaaatcctgtttatatgacacatatcaacttttcatataaagaaagtaaaatggaaatcagaattacagctccctttctctgagtgcctactatacaccaggcactctgctaacccacacataggtgttatctgatttaatcctcatacaaacatttccacatgcaaatcatcttatggatgaggaaacagattctgaaaagtgaggttaagaagcttattcaaaggaagccaactcatctgttggactcagaaaactatgttctttccacaagacatccctgcctcccaccagcagggtctgagtcagaacgcagaatgtaatacaattactctgcccctacaggaggacaaggaaccttctgcacaggtttgccctggggattaggaaggcacaggtactctgggagcaacttagagccctgtcactgaggttcccccttagagtgcaggaagccccagcagaagacagcaccaggctccccacgggccaccatggctacaggttggccaagggagaaaatcacccctctctcgaaataggtggaccaaaattcttttaatctcacctccaaagtcagaaaactatgtccgtcctaaccagacaatctctaatacactgacacgcatatggaattcatgaaaaattactaatgtatataaaatacattaaaaggacaggaaacttttgaaaagatagcatcttccatcagctggagagcaatccatcaatcctggaagggatactgggcaagattttcagcctgggaaggagaagctggaccttgagccacttgggcttgtctcagagcggctgcagtgctcgtttcacaataaagagctctgggttttcccctcgctccctcttaatcttccccatccttccagctggaatacacacacacacgctgtgtcggctgcagggccagcagaatcacaggccagccacgcagaggagggagcagatgcccaggaggcccaccctgggcccaggcgccagccctgcccgtgctacccccagtgcctggctgactctcccagggtcccacagagccccagccccagttcagacatttgggagggaagggacagtgaagaaacaaagcccctaggtccagaagctctgttaacataatctgagcaggt

SEQ ID NO: 4015 - DNA, 1529 bp, Homo sapiens
gcacacacattcttattttgcttagatttaaatgatgcttccagaggttatgcaaactgttcaagatcatagagctacagagggtaaggaccagtgccactggtactgcccttttcttcctccctgtggcaaacatcatgaccctttgaaacctaccaaatccaggaagtccgcacagcaccaaccaaacccctgtgtcccctcttgtgagccaatgaggaccacttcacatgctaccactcctgatcagtctcatgcactggcacttggatggaggcaatcctcccagcccttcacaaaacctccaatcgacagcagagaagaggctgcatgcttggaagccaggcccctaaaatgcctacaccctactctccagaagaactgaacacaaaatagaagttgcaaaatatataaaggcatcctcttgaagtaaactaacattaactgctaatctttttcactgaagcctaaagtccccaaaccccctctgaataccacttgtaaagctgttataggataaggatgctctggaactacctaggggcgatggtctcatgactccgtaaatctactgaatgctggtgcaatgttcaccttcaaatagatgcttttatgttatgtgtttatatttttaaaaaattatgaaatagtttggaagctgagatgtatcagaaccacgactcttttttttttttttttttttgacagagtctcactctgttgtcaggctgcagtacagtggtgcgatctcggctcatgcaacctccgcctcctgggttcaaacagtatttaaatcctgcctcagcctcccgagtagctggaactacaggcatgcgccaccatgcccagctaattcttgcatttttagtagagacagggtttcaccatgttggccaggatggtctctatctcttgacctcatgatccgcctgccttggcctcctaaggtgctgggattacaggcatgagccactgcgcctggcgagaaccacgactttttaaaggaaaccttttctcatgtctttattattcatttgttttgaaaatatcatcaagattaaggatcagctaagaaacagaataatttacatcttacatttcataattttatctatttttgcttataggggagacttgagattaaacgactcccattgttacatttttacaaatatttttgttttcaagaaaagcatgtccatttgaggctcccatgtggaatttctgagaagcctaaggatactgtcctmcaacacatggctcctggggcataatgtggccatgtggcaatacattcaacagacggacgatggcgagggctgccactgacgctcccgcttgagggccccaaatgggtgaagcctggttgggcccgtcctcataaagctggaggcattacatcagtgcctacagctgctctgccatctcctgctcctgtccccagtccttcatgctaatcacaacctcttttaaatgacaacacatccctaggagaattaaacagtatttaaattcatatttaaatatgc

SEQ ID NO: 4016 - DNA, 617 bp, Homo sapiens
aggcggaaggcctggccgcagtcgggacagcagtgcgggcggtcggccgtgctgcaccgcctggtgccgtcgcagcgccgagctctggctgaagctgcggccgcagtgcgaacacgggtagggtcgctcgccggtgtgcgtgcgctggtgcgtgaccaggtaggagcggcgcccgaagcccgccgcagaaggcgcacggctacgggccgctcgccagtatggatgcgtcggtgcgtaaccaggtgcgacttgtagacgaagcgcttgccgcagtccgggcacgggaagggcttctcgccggtgtgcgtgcgctggtggatggccaagtgcgagcggtacacgaagcccttgccgcactcctcgcagccgaagggcttgacggccgcgtggtagcgctggtgcttggccagccgcgagcggtgcgggaagaccttgccgcacacgtcgcacgtggtctccggcctcccggccggcggggccactgcggcggggaacgcccagggcgacagcaggttcgcacccggctcccggccgggcaggaaaggcttcgcttcagagccgtcggccaggacccccaggccgcctgggtcgggtccccacccctctggartctgcgc

SEQ ID NO: 4017 - DNA, 1421 bp, Homo sapiens
tgacggaaaatgggtttctcactgtggatcatgagccagaagtgttcaaaatcactgagttagagaattcgcttttgtttttgagacagcatctcactctgttgccccagctggagtgcagtggtgggatcttggctcgctgcagcctcagccttccaagcagctgggaccacaggtgcatgccaccacactcagctaatttttaaaatttttttgtagcgatttcaccatgttgcccaggctggtctcgaactccagggctcaagggatcccccgcctcagcctcccatagtgccgggattacaggcgtgaactaccgtgcctggtcctagcatgtattgttataatcaggaaaaaaaaaagagcaaagatcataaagctttatttaatagatataacccagtaattcaaaatactttattccatatgtagccaattagagaaagaaaaaagggagatagaaggaaatgttggacgagattaagtgaaaagatcaggataaaaggaatgaatcagaaaaggaaggaggttggggaaaccggcaaaagagaaaggaaataacaaaggtagatggaggggaaagtgacgctcagggctgagggaccctctaagtgccacctttcgtgactcacatttcacaagtcactagggtttaattcctccttggcaataaagggtgtctactttttttcctatgaccattggatgggggagggtatttttctccctataaactttttttttaagtatttggctggacagtcaactataagttctatcggggaaccttttttttttttttttttttttttttggtgagataggktcttgttctgtcacccaggctggagtgcaatggaaaaatcatagttcactgcagcctctgcctcccaggctcagcccccagagtagctgggactatagacgtgcgccaccacacccagctaatttttgtattttttatagagacaagagttttgccgtgttgtcccagctggcctcgaactcctgagctcaaggaatccatctgagctcaagggatccgccttggcctcccatagtgctgggattacaggcatgagccatcgcacccagcctcatttaacttttctgaatagactgtaagatcctcaaggggctccattttttaactaggtctttgtatttgtctgccactcaaacgtctgtttcagacatggagtcttgatacgttgcccaggttggccttgaatttctggtctcaggcgatcctcccacctcagcctcccaagtagatgggactacagatgcataccactatgcccggctttttttttttttttttttttttttttgaaatattaggttgctctggccgggcgcggtgactcacacctgcaatcccagcactttggaaggccaagacaggcagatcacaagat

SEQ ID NO: 4018 - DNA, 1421 bp, Homo sapiens
tgacggaaaatgggtttctcactgtggatcatgagccagaagtgttcaaaatcactgagttagagaattcgcttttgtttttgagacagcatctcactctgttgccccagctggagtgcagtggtgggatcttggctcgctgcagcctcagccttccaagcagctgggaccacaggtgcatgccaccacactcagctaatttttaaaatttttttgtagcgatttcaccatgttgcccaggctggtctcgaactccagggctcaagggatcccccgcctcagcctcccatagtgccgggattacaggcgtgaactaccgtgcctggtcctagcatgtattgttataatcaggaaaaaaaaaagagcaaagatcataaagctttatttaatagatataacccagtaattcaaaatactttattccatatgtagccaattagagaaagaaaaaagggagatagaaggaaatgttggacgagattaagtgaaaagatcaggataaaaggaatgaatcagaaaaggaaggaggttggggaaaccggcaaaagagaaaggaaataacaaaggtagatggaggggaaagtgacgctcagggctgagggaccctctaagtgccacctttcgtgactcacatttcacaagtcactagggtttaattcctccttggcaataaagggtgtctactttttttcctatgaccattggatgggggagggtatttttctccctataaactttttttttaagtatttggctggacagtcaactataagttctatcggggaaccttttttttttttttttttttttttttggtgagatagggtcttgttctgtcacccaggctggagtgcaatggaaaaatcatagttcactgcagcctctgcctcccaggctcagcccccagagtagctgggactatagacgtgcgccaccacacccagctaatttttgtattttttatagagacaagagttttgccgtgttgtcccagctggcctcgaactcctgagctcaaggaatccatctgagctcaagggatccrccttggcctcccatagtgctgggattacaggcatgagccatcgcacccagcctcatttaacttttctgaatagactgtaagatcctcaaggggctccattttttaactaggtctttgtatttgtctgccactcaaacgtctgtttcagacatggagtcttgatacgttgcccaggttggccttgaatttctggtctcaggcgatcctcccacctcagcctcccaagtagatgggactacagatgcataccactatgcccggctttttttttttttttttttttttttttgaaatattaggttgctctggccgggcgcggtgactcacacctgcaatcccagcactttggaaggccaagacaggcagatcacaagat

SEQ ID NO: 4019 - DNA, 546 bp, Homo sapiens
gcttccagaaacagaagtgagttcagcttgtgtgactgcattacttgtaacacaggacaagatggaagaatgtcatagctacactggaaaggaaaaggaaagtctcattttcccccaggactgaagttgaatgggagaagagctactaccaagctagtccggggattagtccaacaaagcaaaggcagtagagccccaggggaacccaggtgtgcacagagaccacgccccaagggctcagcctttgggctctgtctccttgttcagctggaagcatcttcatgtcactgagggaagctggccactgccagcactactacagcactaactgtggtcccagcctccctgtggccttcaggagcagtatcatcaaacacacagygtattagaagcgtgattttactacaagtgttctcttggtaggatttttcttagaagaagaagagatttatttaaatgaatattacatgaaatatgtgtatacatctaatcctgtccttctgttctgatgacaaagttgagaagaaaaactttttcttcaaaaac

SEQ ID NO: 4020 - DNA, 1361 bp, Homo sapiens
aatgtctaaccaatataaaagttattaattagatatgtttaattttatttcctactaagtcttcaaaatctggtgtgtgttttcccctgacagcacatctcaatccagcctagccacatttcaaatgctcaatattcacatggctgtggctaccatatttgtcagggcagcactaaagcactaaagaacttcttccttggagaagttctaagctttcaaaatgtttggcaaatacattttataaaattcttcagaatccataaataggcaattacacatttagtaagccatagaatccaacatgacattaaaaatgaatccctcgacaaaaaagaaggtaggcaaaatgttcttcacaccaaatggacaaatcaattatgattacctagcatgcccattattattttttaacatccttcattaatacccccaaaccccatcaacaggtaaatgaataaatgcattgaggcctatctgaacaatgtcccgattccttaccattyttacttcttttgcaagcagaaaagactcagtattagcaaagactattcggataatttgttcttatgccagtagttgtaatttcctggaggtctatgtgatatcacttatgtacttcagtacctctcacaagtacttttcctgtttggccattttctgcagtatatccatgctctcattttctctattcttttatttctatcctacacttttctttcatcctataattctttatcctaaaaatattaatttaaggataacatcacaaaatagtatatttcttcagatgatactccaaattgatacctaatacacagaaatgactatcatggacataacccacaacatgtgaaatgtatggctcatcctactgacattataaaggaaagttaatgacaactgaatttctagtcattttccacccaaccagttgcttataaactggcaaggaattgtaggtatgtacacagtggctattttttggtggggtgttcagcaaccctcctcttgagagccccccttttctttgaggaccatttcaatgggcaccaactaggcctgacccaacctaccagccccagccctagaggtgatcatgatgcccagctctggcaaaagactctacccttggatcatagcaactgtttcagtactttttttttggaatcatcaggaaggactcttgctttttctaccactgtggtctgcgaggacaaagtaaagtgggttatttgtagcactatctcttgctacagagagagaagagagtcaccttcagaaggaaaaaatgaggctaaaacaaaaggaaaagtgtcaagagaaagaaggagaacatttcttgatgatcttatataagcccc

SEQ ID NO: 4021 - DNA, 571 bp, Homo sapiens
gctttgacatcacccatcattggtcagcggaacttgtaagaagggaaaaggaatactgttgcttggtggggtggaatgccaggaatagycatttaaacattttataagcctgattctttagtgacatcctttaaggtagactgaatgtaaatcatattgtagttgtcctctgaacttagctttctccctacttttacgcatatttgcgtgcattggagaatagaagatgactaacaaagagagagctgccctaacgtgccttcccttcttccccattgaaaagatttttaactgtgggaaaaagataaataaataaataaataactttttttcttttttcccattcttttcttgtctttttccagctaacctgcaaatttaaaggttagctggagacatcacttaaaaataaatatataaaagaagcctccggtggtttggaccaccctaaaagaaaagggaagaaagtgtctggggaaggttagggttccgggaagctgagggagggggcgggcgtcacgggcactgtgacttcctcgtgcgctgcctttgggaagaggatgggcctgag

SEQ ID NO: 4022 - DNA, 571 bp, Homo sapiens
gctttgacatcacccatcattggtcagcggaacttgtaagaagggaaaaggaatactgttgcttggtggggtggaatgccaggaatagccatttaaacattttataagcctgattctttagtgacatcctttaaggtagactgaatgtaaatcatattgtagttgtcctctgaacttagctttctccctacttttacgcatatttgcgtgcattggagaatagaagaygactaacaaagagagagctgccctaacgtgccttcccttcttccccattgaaaagatttttaactgtgggaaaaagataaataaataaataaataactttttttcttttttcccattcttttcttgtctttttccagctaacctgcaaatttaaaggttagctggagacatcacttaaaaataaatatataaaagaagcctccggtggtttggaccaccctaaaagaaaagggaagaaagtgtctggggaaggttagggttccgggaagctgagggagggggcgggcgtcacgggcactgtgacttcctcgtgcgctgcctttgggaagaggatgggcctgag

SEQ ID NO: 4023 - DNA, 571 bp, Homo sapiens
gctttgacatcacccatcattggtcagcggaacttgtaagaagggaaaaggaatactgttgcttggtggggtggaatgccaggaatagccatttaaacattttataagcctgattctttagtgacatcctttaaggtagactgaatgtaaatcatattgtagttgtcctctgaacttagctttctccctacttttacgcatatttgcgtgcattggagaatagaagatgactaacaaagagagagctgccctaacgtgccttcccttcttccccattgaaaagatttttaactgtgggaaaaagataaataaataaataaataactttttttcttttttcccattcttttcttgtctttttccagctaacctgcaaatttaaaggttagctggagacatcacttaaaaatawatatataaaagaagcctccggtggtttggaccaccctaaaagaaaagggaagaaagtgtctggggaaggttagggttccgggaagctgagggagggggcgggcgtcacgggcactgtgacttcctcgtgcgctgcctttgggaagaggatgggcctgag

SEQ ID NO: 4024 - DNA, 568 bp, Homo sapiens
ctgatttccccctttggaaaggctaatcagaaactcaaaagaatgtttgtgcatcacctatctgtgacctggaagctccctccctgcttccagtcttcctgcctttgcttcaagatgtcccgcctttctagaccgaaccagtgtacttcttacatgtactgattgatgtctcatatctccctaaaatgtacaaaactaagctstgccccaaccagcttgggcacatgtcatcaggtcttcctgaggctgtgtcacatgcgtgtcctcaaccttggcaaaataaactttctaaattaactgagacttgtctcagattttctgggttcacataaccaaaaaccacttataccccaaaagctattgaagtaaaaaaattaaaaaattaagtaaatcctctaaagaaagaaatggggagtctcttttgcttcttgtactggagaaaattcaagtttcctttttttacatttgtctttgccgttacaccagaacccgagaaggctcccataggcccttttgttttggggtcccatccctagctggatgccttgctgaaggtcagatgaatctg

SEQ ID NO: 4025 - DNA, 568 bp, Homo sapiens
ctgatttccccctttggaaaggctaatcagaaactcaaaagaatgtttgtgcatcacctatctgtgacctggaagctccctccctgcttccagtcttcctgcctttgcttcaagatgtcccgcctttctagaccgaaccagtgtacttcttacatgtactgattgatgtctcatatctccctaaaatgtacaaaactaagctgtgccccaaccagcttgggcacrtgtcatcaggtcttcctgaggctgtgtcacatgcgtgtcctcaaccttggcaaaataaactttctaaattaactgagacttgtctcagattttctgggttcacataaccaaaaaccacttataccccaaaagctattgaagtaaaaaaattaaaaaattaagtaaatcctctaaagaaagaaatggggagtctcttttgcttcttgtactggagaaaattcaagtttcctttttttacatttgtctttgccgttacaccagaacccgagaaggctcccataggcccttttgttttggggtcccatccctagctggatgccttgctgaaggtcagatgaatctg

SEQ ID NO: 4026 - DNA, 561 bp, Homo sapiens
gggtagtattttctgagcattgtaagtaacaatgaaaattattgactaaagtgaattcaagtaatatgtagccaaataaaaatctcattaaaaaatttaaaagtactggatgcagcagctcatgcttgtaattcctgcactgtgggaggccaatgcagaaaaattacttgagcccagaagtttagacggtgcctcaaaaataaaaattttaaattaagttcttaatcaaatggaagatttaagctgagatcatttttattgattcagaacrgtgctggctgggtgcagtgggtcatgcctataatcccagcactttgggaggccgaggtgggtggatcacctgaggtaaggagttccagaccagcctgaccaacatagagaaatcccatctctactaaaaatacaaaattagcagggcgtggtggcgcatgcctgtaatctcagctactcgggaggcagaggcaggagaatcgcttgaacttgggaggcaggggttgtggtgagctgagatcacatcattgctctccagcctgggcaacaagagcgaaactctgtctcaaa

SEQ ID NO: 4027 - DNA, 588 bp, Homo sapiens
tctggtttttttttaggtattgtttatttttacctgtcaaaaacacataaaaaatttacaatcaagtatttttaaatattcagtttagtcatcttaatgttatgcaacatatccctaggatgtttttaccttgcaaagctacatctcactacacattaaacaactaccatttttttccatttcatggcagttttcaaacactattttgtttcctgattctaagagtgtaactgctttatatatcttaatacaatcttttccatggctggcccatttcattttgcatgttatgaagatttatgcttatagttgttacaatatttcctgctttttgaaaaatgagtgatattttaaattatatttactgaatgatttgttgaccgaaatttgcattgcttttacctattggctttcactaacaattctgcaaaaattatgagtataaaaatgactcttcatatgactgtatatttgaaagtatatatatgttgcattctattttattagtctactttttaacatttgtactcataccaaattgttttaattctgtagctttgtaatatgttttgaaatcagraactgttc

SEQ ID NO: 4028 - DNA, 1236 bp, Homo sapiens
agaaactctacaaatgtgaagaatgtggcaaagcttttaaccaagtctcaacacttactatacataagataatttatactggagcaaaaccttggaaattcaaagaatgtggtaaaacttayaatcctcaaaacttcttacacctaaaattcatgcaggagagaaacaccacaaatgtgaaaaatttggtaaattctttaacaagtcttcaaccctttctgcacataatataattcatactggagagaaaccccacaaatatgaagaatgtggtaatgcttttaaccaattctcaaatcttactaaacaaaattaatactgaaaatgttacaaaccagaaaaatgtgaaaatgattttaacaaaaccttcaaatttttctaaacataaaggaaatcatactggtaagaaattataaaaatgtgaagaatgtgacaaagcctttaaatggttgtcacacttgattgtaggtaagataattcatactggcagaaactcccagaagtgtgaagaatatggcaaaactttaattcctataccttattgcacaggaaagcatttatacttcagaaaatgttgtactgatataaagaatgtagaaaagccattaatatgtgcttacatcttattcaacattagagagttagtacttaataaaagcattataaatgcaattactgtcaaaactcagcataaggttttgttttagtgtgtggtttgtttgtttgtttgttttgttttgttttttttaaatgagactacgtaatactctctcccaggctggagtgcactggtgcaatcttggtttaccgtaacctctgccttccaggttcaagcaattctcctgcctgggcctccagaatagctgggactacaggcatgtaccatcacgcccggctaagttttgtattttttagtagagacaggattttactgtgttggccaggctcatctcgaactcctgacttgaaatgatccatacacctctgcctcccaaagtgctggaataacaggtgtgagcactgttcccagccaatataagcctttaaagtaaaaagagagtttttattttgaagacaacattagctacataaagagggttgtagtgcctgccttactgtatcacagatcttattgtcctcattttgtaatccgatgcagttgctcaaacttcgcttcaacatcagggaatttatatcggagaaaacctacaatggtaatacatttcaaaaattttt

SEQ ID NO: 4029 - DNA, 1236 bp, Homo sapiens
agaaactctacaaatgtgaagaatgtggcaaagcttttaaccaagtctcaacacttactatacataagataatttatactggagcaaaaccttggaaattcaaagaatgtggtaaaacttacaatcctcaaaacttcttacacctaaaattcatgcaggagagaaacmccacaaatgtgaaaaatttggtaaattctttaacaagtcttcaaccctttctgcacataatataattcatactggagagaaaccccacaaatatgaagaatgtggtaatgcttttaaccaattctcaaatcttactaaacaaaattaatactgaaaatgttacaaaccagaaaaatgtgaaaatgattttaacaaaaccttcaaatttttctaaacataaaggaaatcatactggtaagaaattataaaaatgtgaagaatgtgacaaagcctttaaatggttgtcacacttgattgtaggtaagataattcatactggcagaaactcccagaagtgtgaagaatatggcaaaactttaattcctataccttattgcacaggaaagcatttatacttcagaaaatgttgtactgatataaagaatgtagaaaagccattaatatgtgcttacatcttattcaacattagagagttagtacttaataaaagcattataaatgcaattactgtcaaaactcagcataaggttttgttttagtgtgtggtttgtttgtttgtttgttttgttttgttttttttaaatgagactacgtaatactctctcccaggctggagtgcactggtgcaatcttggtttaccgtaacctctgccttccaggttcaagcaattctcctgcctgggcctccagaatagctgggactacaggcatgtaccatcacgcccggctaagttttgtattttttagtagagacaggattttactgtgttggccaggctcatctcgaactcctgacttgaaatgatccatacacctctgcctcccaaagtgctggaataacaggtgtgagcactgttcccagccaatataagcctttaaagtaaaaagagagtttttattttgaagacaacattagctacataaagagggttgtagtgcctgccttactgtatcacagatcttattgtcctcattttgtaatccgatgcagttgctcaaacttcgcttcaacatcagggaatttatatcggagaaaacctacaatggtaatacatttcaaaaattttt

SEQ ID NO: 4030 - DNA, 1236 bp, Homo sapiens
agaaactctacaaatgtgaagaatgtggcaaagcttttaaccaagtctcaacacttactatacataagataatttatactggagcaaaaccttggaaattcaaagaatgtggtaaaacttacaatcctcaaaacttcttacacctaaaattcatgcaggagagaaacaccacaaatgtgaaaaatttggtaaattctttaacaartcttcaaccctttctgcacataatataattcatactggagagaaaccccacaaatatgaagaatgtggtaatgcttttaaccaattctcaaatcttactaaacaaaattaatactgaaaatgttacaaaccagaaaaatgtgaaaatgattttaacaaaaccttcaaatttttctaaacataaaggaaatcatactggtaagaaattataaaaatgtgaagaatgtgacaaagcctttaaatggttgtcacacttgattgtaggtaagataattcatactggcagaaactcccagaagtgtgaagaatatggcaaaactttaattcctataccttattgcacaggaaagcatttatacttcagaaaatgttgtactgatataaagaatgtagaaaagccattaatatgtgcttacatcttattcaacattagagagttagtacttaataaaagcattataaatgcaattactgtcaaaactcagcataaggttttgttttagtgtgtggtttgtttgtttgtttgttttgttttgttttttttaaatgagactacgtaatactctctcccaggctggagtgcactggtgcaatcttggtttaccgtaacctctgccttccaggttcaagcaattctcctgcctgggcctccagaatagctgggactacaggcatgtaccatcacgcccggctaagttttgtattttttagtagagacaggattttactgtgttggccaggctcatctcgaactcctgacttgaaatgatccatacacctctgcctcccaaagtgctggaataacaggtgtgagcactgttcccagccaatataagcctttaaagtaaaaagagagtttttattttgaagacaacattagctacataaagagggttgtagtgcctgccttactgtatcacagatcttattgtcctcattttgtaatccgatgcagttgctcaaacttcgcttcaacatcagggaatttatatcggagaaaacctacaatggtaatacatttcaaaaattttt

SEQ ID NO: 4031 - DNA, 1236 bp, Homo sapiens
agaaactctacaaatgtgaagaatgtggcaaagcttttaaccaagtctcaacacttactatacataagataatttatactggagcaaaaccttggaaattcaaagaatgtggtaaaacttacaatcctcaaaacttcttacacctaaaattcatgcaggagagaaacaccacaaatgtgaaaaatttggtaaattctttaacaagtcttcaaccctttctgcacataatataattcatactggagagaaaccccacaaatatgaagaatgtggtaatgcttttaaccaattctcaaatcttactaaacaaaattaatactgaaaatgttacaaaccagaaaaatgtgaaaatgattttaamaaaaccttcaaatttttctaaacataaaggaaatcatactggtaagaaattataaaaatgtgaagaatgtgacaaagcctttaaatggttgtcacacttgattgtaggtaagataattcatactggcagaaactcccagaagtgtgaagaatatggcaaaactttaattcctataccttattgcacaggaaagcatttatacttcagaaaatgttgtactgatataaagaatgtagaaaagccattaatatgtgcttacatcttattcaacattagagagttagtacttaataaaagcattataaatgcaattactgtcaaaactcagcataaggttttgttttagtgtgtggtttgtttgtttgtttgttttgttttgttttttttaaatgagactacgtaatactctctcccaggctggagtgcactggtgcaatcttggtttaccgtaacctctgccttccaggttcaagcaattctcctgcctgggcctccagaatagctgggactacaggcatgtaccatcacgcccggctaagttttgtattttttagtagagacaggattttactgtgttggccaggctcatctcgaactcctgacttgaaatgatccatacacctctgcctcccaaagtgctggaataacaggtgtgagcactgttcccagccaatataagcctttaaagtaaaaagagagtttttattttgaagacaacattagctacataaagagggttgtagtgcctgccttactgtatcacagatcttattgtcctcattttgtaatccgatgcagttgctcaaacttcgcttcaacatcagggaatttatatcggagaaaacctacaatggtaatacatttcaaaaattttt

SEQ ID NO: 4032 - DNA, 1228 bp, Homo sapiens
catgtttttcattttatacaggacacttggctggttggtaaaaaataaggtaacatgaagttttcagatgaacaaaaactgaaataacttatttattagaatagaatactaaatacaatagaatagaacactaaaaaatgtaaaaaagtatgtacttcaggcagaaggagcattatcacagatgaaaaattgaagatgcagaaagggatcaaaagaattgtgagactatattgaaatgaacactgtattaaaacaagaacacyaacatttttaggatgtagactatacaggtgaaattaaaatatatgacaacgagagcatagaaatcaggaaagggacaaacagaactgaaatgtctgagtgtgcttttgcttcacaggactagagtacaattatcaattaatatttgaattttataaattaagaaggcttattgtaatttctaggaaatactacaggatgactaaaaaaaaaaaaaaacacttcaaaactaccaggaaaaagcattataaaatcataaaattaatcaactaggaaagctccttctagctaggattagacctctacagctacaaaaatcactgattacaactaaaatatctagtaaacaaaagtcaacaattgtggggagagtcaaaacacggaaaagtagcctaaaaggaggtgttttctagttttgttttttctcttttctcttacaacatggatccaaaggcagtcctaatcatagactgttcaacattggtggttaagaattcatggattctgtgtgttaggcctgagaaaccaagaaaagggctcctgaggctaaacgagtgtacatgggagtcccctattttccccattattttttctccaagatatcccctcagggtgtgcctggtcctggaatatagcttagacaactgaatgttctttaacttgcaactgagtaaaaaagctgtggtgcatccaaagttaatgttattggccgatactctttggcaataaaaaggaatggattattattacacacacacacaccatgaatgaatttcaaacacatcgttataactgacagaaaccatgctcaactatgatttgatttatatgacattctggaaaattcaaaattagaggaacacaaacacattggttgttgccagagagtggagatgagataactgagtgcaaatgggcagcgcaggggagagttttgcgatgacgctgccttgtggttacataagtg

SEQ ID NO: 4033 - DNA, 1228 bp, Homo sapiens
catgtttttcattttatacaggacacttggctggttggtaaaaaataaggtaacatgaagttttcagatgaacaaaaactgaaataacttatttattagaatagaatactaaatacaatagaatagaacactaaaaaatgtaaaaaagtatgtacttcaggcagaaggagcattatcacagatgaaaaattgaagatgcagaaagggatcaaaagaattgtgagactatattgaaatgaacactgtattaaaacaagaacactaacatttttaggatgtagaytatacaggtgaaattaaaatatatgacaacgagagcatagaaatcaggaaagggacaaacagaactgaaatgtctgagtgtgcttttgcttcacaggactagagtacaattatcaattaatatttgaattttataaattaagaaggcttattgtaatttctaggaaatactacaggatgactaaaaaaaaaaaaaaacacttcaaaactaccaggaaaaagcattataaaatcataaaattaatcaactaggaaagctccttctagctaggattagacctctacagctacaaaaatcactgattacaactaaaatatctagtaaacaaaagtcaacaattgtggggagagtcaaaacacggaaaagtagcctaaaaggaggtgttttctagttttgttttttctcttttctcttacaacatggatccaaaggcagtcctaatcatagactgttcaacattggtggttaagaattcatggattctgtgtgttaggcctgagaaaccaagaaaagggctcctgaggctaaacgagtgtacatgggagtcccctattttccccattattttttctccaagatatcccctcagggtgtgcctggtcctggaatatagcttagacaactgaatgttctttaacttgcaactgagtaaaaaagctgtggtgcatccaaagttaatgttattggccgatactctttggcaataaaaaggaatggattattattacacacacacacaccatgaatgaatttcaaacacatcgttataactgacagaaaccatgctcaactatgatttgatttatatgacattctggaaaattcaaaattagaggaacacaaacacattggttgttgccagagagtggagatgagataactgagtgcaaatgggcagcgcaggggagagttttgcgatgacgctgccttgtggttacataagtg

SEQ ID NO: 4034 - DNA, 1228 bp, Homo sapiens
catgtttttcattttatacaggacacttggctggttggtaaaaaataaggtaacatgaagttttcagatgaacaaaaactgaaataacttatttattagaatagaatactaaatacaatagaatagaacactaaaaaatgtaaaaaagtatgtacttcaggcagaaggagcattatcacagatgaaaaattgaagatgcagaaagggatcaaaagaattgtgagactatattgaaatgaacactgtattaaaacaagaacactaacatttttaggatgtagactatacaggtgaaattaaaatatatgacaacgagagcatagaaatcaggaaagggacaaacagaactgaaatgtctgagtgtrcttttgcttcacaggactagagtacaattatcaattaatatttgaattttataaattaagaaggcttattgtaatttctaggaaatactacaggatgactaaaaaaaaaaaaaaacacttcaaaactaccaggaaaaagcattataaaatcataaaattaatcaactaggaaagctccttctagctaggattagacctctacagctacaaaaatcactgattacaactaaaatatctagtaaacaaaagtcaacaattgtggggagagtcaaaacacggaaaagtagcctaaaaggaggtgttttctagttttgttttttctcttttctcttacaacatggatccaaaggcagtcctaatcatagactgttcaacattggtggttaagaattcatggattctgtgtgttaggcctgagaaaccaagaaaagggctcctgaggctaaacgagtgtacatgggagtcccctattttccccattattttttctccaagatatcccctcagggtgtgcctggtcctggaatatagcttagacaactgaatgttctttaacttgcaactgagtaaaaaagctgtggtgcatccaaagttaatgttattggccgatactctttggcaataaaaaggaatggattattattacacacacacacaccatgaatgaatttcaaacacatcgttataactgacagaaaccatgctcaactatgatttgatttatatgacattctggaaaattcaaaattagaggaacacaaacacattggttgttgccagagagtggagatgagataactgagtgcaaatgggcagcgcaggggagagttttgcgatgacgctgccttgtggttacataagtg

SEQ ID NO: 4035 - DNA, 756 bp, Homo sapiens
tcttctcttttcatatttgtgaccatttacttgtgttagaacattttgatttgtgtagaacttaattgtgctttgctcattactatccatttttataaaatatstttttgaattcattattttattttatttcaccaccagctggataatttctttgagaattttcttttcagggtgaaacactggcacacataatttcagtttttctgcacatctaaagctgtcttccttttgggttcaaataagtaatttaagaatacttatatcagaatatttttgcttcagcttggatagaactggaggtcattagtctaagtgaagtaagcagaaatggaaaaccaaataccgtatgttctcacttataagtgggaactaacctatgaggatgcaaaggcataagaatgttgtaaaagactttggggactgaggagagaagattgggagggggaatgagggatagaagactacacattggaaaaaagaccacactgctcaggtgatgggtgcactaaaaattcctagaaatcaccactaaagaatttatccgtgtaaccaaaaaccacctgtacccccgaaactattaaaatttaagaaaatttaaaaagtatttttgcttcaaaattctttaagtatcgctccgtggtcgtctacatttgaggatgtttgacactgacgtttgatatctgatgtttgaggatgatggtatcaatacagttgctttcctttgcaggtcactttaaatgaccagtgaattga

SEQ ID NO: 4036 - DNA, 574 bp, Homo sapiens
tgatgtggagaaggaatattacagcaaaaagagcagactttgtcaaaacaatgtctctgtcagtccctgtcattgaaccacatgagaaaaactaactcgtcaactggagcttcgcagaaggtccggccacctgcaggctggggtcttaaagaggaaaagtgcccagcccctggttgacttacctcaccgcaccttaaatgtcttgatattattacaagccgtgtttgggagagaagggagacagccccggcccagccccaccacatgactgtcaatggtccttacacacatttgaccagctgcagggtgcccaggcttcatatctggttgctgtccttggctcatttctctccttcacatcccagatcctgtcatcagcaaggcctgacacctctacttccaagagataactgaaaacaaccacctccgctgttmctactagcccaacctgccctaactgctggcctaaatcgctgcgagagccctaacctgtctccctgctttcttgctgtgaactgttctccacaaagcaccagggcgatctttctaatggcttcccacttcaatcagtaaa

SEQ ID NO: 4037 - DNA, 1148 bp, Homo sapiens
gtgtaaaattgtagctcatacacaaggtccaagggctgagaattatgatgagtygctcatcgtaatgagtggttttaattttccacattctgaaaacagtatttttcatcattattattactattgttgccattattactattattagaatatggaagtcctttcttccgaaataataaaatatactctcatgttattattataatttgtgtaattgtaacattgaactcacaatccctaaagtggaccgtatttgtttttactcttacaagttttttagctccaggacatttaattatttctttctgaatctgcatttctcaactgatatttataaatctttgtttctgtgcttgcctgaaattagaaaagttcacagtatgattatctggttgttttacaagagaaataattctatgatacaagtaaagaaatactttaaactgatggctattcaaagtcctgcattttatgctgactgcttaaaataggctttttattatttactcaagataatttacagatattctaatgtgtatcaagccttagaataggcactgaaaaatggagatcagtaaaacacttcttattttgggagcagtttcaaaatggaataaaatattgataggtgctaacatctggaatagctgagtagggagcttggaatagctccttcacaaaaagcagtgatacaactggacacacttgtttagcctggggctgcaaccatttcccccaccctcatccagagtttgtggcataagttacaccaagtgatggggcatcccatgaggactggcagctttgctgccacaggaggatgacttgaaaatatccaagtccccaggggcattgtcagacaatgatataaatctcaaaggtaaccaataaacaaaattttgtggttgcagtaatgattaggacatgcagcaaactggcagaacagcaagaaatatagcagggagttctgggaaataagatagtgaaagtgggctttgataagcaactttatattcataccatagatgatattagggtgacaaacatgttgaagactttacacgtgttctggaaagacagagaaagtcttaacatccctggatgaatgtgagatcttgcacatgcagaaagcaaaagctgggcagata

SEQ ID NO: 4038 - DNA, 595 bp, Homo sapiens
attttcagatgataatgtgattatcccagcttaagttgcgtccacttctggtctagtgaattgtgaaaggcagttttagagaaaggagtcatgagtaacatgaacagcagttggctatgtctttccagttctctgctgatgtcagaaagacccagaaataccaaggagaaaaagccatcttagggatctaaggaggccctatggaaagttactaccttagacatttgaagatagcttactgcttagtacatacactgtaaacaacgatctcattttaaatgagaactttctcataaatattttacaaatgaggtcaaactagcataaagccatttaaagagattawcagtccaatatgaaccagttaagtctttggactatccctttcctccttgactactgctttgacgtacctaaatcattcgtcttacatgtcagaggaaattagttttggatagttctcctttctgctgtacctcatgggggagtgagagagcagcaatagagaacacaatgaaaaaaatggaatactgggtaaacaccaataatatttccattagtctcctaaagatgttcatgccatacttcctatgca

SEQ ID NO: 4039 - DNA, 595 bp, Homo sapiens
attttcagatgataatgtgattatcccagcttaagttgcgtccacttctggtctagtgaattgtgaaaggcagttttagagaaaggagtcatgagtaacatgaacagcagttggctatgtctttccagttctctgctgatgtcagaaagacccagaaataccaaggagaaaaagccatcttagggatctaaggaggccctatggaaagttactaccttagacatttgaagatagcttactgcttagtacatacactgtaaacaacgatctcattttaaatgagaactttctcataaatattttacaaatgaggtcaaactagcataaagccatttaaagagattatcagtccaatatgaaccagttaagtctttggactatccctttcctccttgactactgctttgacgtacctaaatcattcrtcttacatgtcagaggaaattagttttggatagttctcctttctgctgtacctcatgggggagtgagagagcagcaatagagaacacaatgaaaaaaatggaatactgggtaaacaccaataatatttccattagtctcctaaagatgttcatgccatacttcctatgca

SEQ ID NO: 4040 - DNA, 1082 bp, Homo sapiens
ctcatcacgtattagctgtgcagtctcaggcaagttacttaattgttctcggcctcctatctgtaaaagtagggaatcatagcagacctgccacatgtggttgctgtaagggttaagtgagatcatatatgcactctacttgtcacttacccctctgtaagcattagctcttgttaatgctcacaacagtgctggaaaatggtactattgctccctttttaaggagaaggtaactgaggcaccaggagcttaaggcttccaaggcctgttgcttcatgaattcccactgattgtgtttccatgtgtccccagctccaggaggcagctgagcagaattgcattctttccatgagacttacacgagcctggagtctctacctgtccctgaagagtcctttgctcccctacagcctcactcaacctcctggctccaactgatatttgcagaaaatcactgtaataatattaacagctgggggcttttctgagcctgtacaaagtgtgcatcttggagggcagagtccttaggtgaaactgaaagtctttggggtctgaagctgccttgagcctggacaggtcatggaagcccttggtgcatcctctcagccgtctttctgctgaggtttattgactggagctttgtgaacctgtgagttacattagcgctctgaggctggaagtcttcctgtaaatgctccatgtaattaattataaacaaagcagcmagccaggagcacaatacccaaataaatccttagcgagcctcaacatgtgctctttatttctcctctgcctttccatccatccaagagcttcaaagtgtaatcctccttaacgacaggttcatgatgatgaggccattatttttgatactgcagttttaagaagtgacccagaaaacaggctttacaagcaacctctccccattcccctttaccctaagcaaaggcccagattaaaagagccttagcttgtacgaatatttatgctagagcctctgccaaatcagattaggggagttcatcccgccaggcaaacacgggttctgtactcagatttaatgagaaactgacatgttaata

SEQ ID NO: 4041 - DNA, 1082 bp, Homo sapiens
ctcatcacgtattagctgtgcagtctcaggcaagttacttaattgttctcggcctcctatctgtaaaagtagggaatcatagcagacctgccacatgtggttgctgtaagggttaagtgagatcatatatgcactctacttgtcacttacccctctgtaagcattagctcttgttaatgctcacaacagtgctggaaaatggtactattgctccctttttaaggagaaggtaactgaggcaccaggagcttaaggcttccaaggcctgttgcttcatgaattcccactgattgtgtttccatgtgtccccagctccaggaggcagctgagcagaattgcattctttccatgagacttacacgagcctggagtctctacctgtccctgaagagtcctttgctcccctacagcctcactcaacctcctggctccaactgatatttgcagaaaatcactgtaataatattaacagctgggggcttttctgagcctgtacaaagtgtgcatcttggagggcagagtccttaggtgaaactgaaagtctttggggtctgaagctgccttgagcctggacaggtcatggaagcccttggtgcatcctctcagccgtctttctgctgaggtttattgactggagctttgtgaacctgtgagttacattagcgctctgaggctggaagtcttcctgtaaatgctccatgtaattaattataaacaaagcagcaagccaggagcacaatacccaaakaaatccttagcgagcctcaacatgtgctctttatttctcctctgcctttccatccatccaagagcttcaaagtgtaatcctccttaacgacaggttcatgatgatgaggccattatttttgatactgcagttttaagaagtgacccagaaaacaggctttacaagcaacctctccccattcccctttaccctaagcaaaggcccagattaaaagagccttagcttgtacgaatatttatgctagagcctctgccaaatcagattaggggagttcatcccgccaggcaaacacgggttctgtactcagatttaatgagaaactgacatgttaata

SEQ ID NO: 4042 - DNA, 1082 bp, Homo sapiens
ctcatcacgtattagctgtgcagtctcaggcaagttacttaattgttctcggcctcctatctgtaaaagtagggaatcatagcagacctgccacatgtggttgctgtaagggttaagtgagatcatatatgcactctacttgtcacttacccctctgtaagcattagctcttgttaatgctcacaacagtgctggaaaatggtactattgctccctttttaaggagaaggtaactgaggcaccaggagcttaaggcttccaaggcctgttgcttcatgaattcccactgattgtgtttccatgtgtccccagctccaggaggcagctgagcagaattgcattctttccatgagacttacacgagcctggagtctctacctgtccctgaagagtcctttgctcccctacagcctcactcaacctcctggctccaactgatatttgcagaaaatcactgtaataatattaacagctgggggcttttctgagcctgtacaaagtgtgcatcttggagggcagagtccttaggtgaaactgaaagtctttggggtctgaagctgccttgagcctggacaggtcatggaagcccttggtgcatcctctcagccgtctttctgctgaggtttattgactggagctttgtgaacctgtgagttacattagcgctctgaggctggaagtcttcctgtaaatgctccatgtaattaattataaacaaagcagcaagccaggagcacaatacccaaataaatccttagcgagcctcaacatgtgctctttatttctcctctgcctttccatccatccaagagcttcaaagtgtaatcctccttaacgacaggttcatgatgatgaggccattatttttgatactgcagttttaagaagtgacccagaaaacaggctttacaagcaacctctccccattcccctttaccctaagcaaaggcccagattaaaagagccttagcttgtacgaatatttatgctagagcctctgccaaatcagattaggggagttcatcccgccaggcaaacacgggttctgtactyagatttaatgagaaactgacatgttaata

SEQ ID NO: 4043 - DNA, 677 bp, Homo sapiens
  misc_feature (1)...(677): n = A,T,C or G
gccagrtgcggtggctcacacctgtaatcccagcactttgggaggccaaggcaggcagatcatgaagtcaggagttcgagaccaacctggccaacatggtgaaaccccatctctactaaaaatacaaaaattagccaggcgtggtggcaggcgcctgtaatcccatctactcaggaggctgaggcaggagaatcacttgaaaccagaaggcggaggttgcagtgagccgagatcgtgccactgcactccagcctgtgcaacaagaatgaaactccgtctcanaaaaaaaaaaaaaaaaaaaaaaaaaaaaaaaaaaaggcaatgggagtttgccccaccttcctgggaccacaactattccagggaagaggcagtctccctcaaacctctttggaattctaggcacctgtatgtccccactatttctgctgtcactgccaggagaccactttcccagatctagagtgagaactagagggtttcttcttgaagtgacctgtctgggctgcttctgggttttgggctgcctttgatccaggttggagaatccagaggatagcataaggctaacctcactgctaattggngggnggccctaattctgaatttcttcntcacttggcctggtatttaatttccagagggctccagtttttcatacactttgtgcaaggttt

SEQ ID NO: 4044 - DNA, 537 bp, Homo sapiens
caattccaaaaagtctaaagaatctaaatagaaagatttttcatcagtttggcacaaaaactcatttggcagcaaaactggatctcaaataataagaagcaatacaaggtctttacttatcccatttatcccagtaatatatctaggaatatttttgccgcagaaatactgaagtgtttattattcctgaatcattgtatatatgtaatggaacttgagtaagaatcatgaggccgggcgcagtggctcacgcctgtaatcccagcactttgggaggccgaggtgggtggatcacgaggtcaggagatcgagaccatcctggctagcacggtgaaaccccttctctactaaaaatacaaaaaattagccgggagcggtggcgggcgcctgtagtcccagctactcgggaggctgaggcgggagaatgccgtgaacccgggaggcrgagcttgtagtgagcggagatcgcgccactgcactccagcctgggtgacagagcgagactctgtctcaaaaaaaaaaaaaaaaaaagaatca

SEQ ID NO: 4045 - DNA, 537 bp, Homo sapiens
caattccaaaaagtctaaagaatctaaatagaaagatttttcatcagtttggcacaaaaactcatttggcagcaaaactggatctcaaataataagaagcaatacaaggtctttacttatcccatttatcccagtaatatatctaggaatatttttgccgcagaaatactgaagtgtttattattcctgaatcattgtatatatgtaatggaacttgagtaagaatcatgaggccgggcgcagtggctcacgcctgtaatcccagcactttgggaggccgaggtgggtggatcacgaggtcaggagatcgagaccatcctggctagcacggtgaaaccccttctctactaaaaatacaaaaaattagccgggagcggtggcgggcgcctgtagtcccagctactcgggaggctgaggcgggagaatgccgtgaacccgggaggcagagcttgyagtgagcggagatcgcgccactgcactccagcctgggtgacagagcgagactctgtctcaaaaaaaaaaaaaaaaaaagaatca

SEQ ID NO: 4046 - DNA, 528 bp, Homo sapiens
aataaaaaataaaaactgagaatcaggaaaaaagaaattaaaacatttaaaagccactttggaaattattgttgacagaataagaacagaacactgaggaagactacaagtctttgatactacattatagcttcttagattgttaaaatacttggcaatattatatatcctgctttgagtgtttcaaggtttgtaaattgagctataagcttttgaattttaaggcatctagcatgtcttctgcgttatgccaatttgtaagagctagccaaaagctggtgtagaagaaatgatcaacatttatagtaaagcaagttatgttttcttattgcttttgtgtaaggccttgaaaaggatctgatgaggaaaaactgtgtaaattgaacttttagaaacttttctccccactatgacttactgactcccttatttctttaagaagcacctgtagtgcatgtagtggatgccaagactgcagttgsgagcagctgtaggaggaaatgtggacctgagctcaggagcttagag

SEQ ID NO: 4047 - DNA, 594 bp, Homo sapiens
ctcctggccccggcccctgattccgcctccggccccaagcgcccgggttgcgccctcggctgcctcgcgaggtagccccaggaggcctaggggcccgcctgcgccccyggcgccagaccatgggtgggcagctccggccaggagcctcagccgccgcgagccaacatcgcctgcagccagcccccgccccacccgagcggacgcgacgggtattcgcagcgcgcggggtcacttccttcctcggccgggatgggcggcgcgggactgagtgatcggccttgcgtccggcgggtaatccccatctgatctgctgcctgtgagctgctgactgccggggcgcgcgacctagggggcacgggcagcagcgcggcgatgacctgatcccgagccggccagggccccttccttccctcccttccctcgctccctctgagcctgtgcggagaccagctcggtgcggcggccccgggtggaccatggcggggagctccagttaaaggcgtgtgggcgccgagctggagaggacaccttcggcatcgctgccttttgagggggcttatttaaactactgagtcattccagatttaggattcc

SEQ ID NO: 4048 - DNA, 700 bp, Homo sapiens
  misc_feature (1)...(700): n = A,T,C or G
tttgtgatcaggctgatatctaccaacntgcataaagtaatttaggaagctagatattttgtagtgaaacgtcttttaaattattaagaactatttgaggaaaaatttaaaatccctaatgaatgaaaatgcccttgtccaccctttctaagttattctttgttcagttaatattacacatttaaaatataatttacaataaataaaagatcttattataaagaatttcatttcagttttcttgytctcagattttttgctaagttgttgattggctgattttggtttgcattgttggcttgtgtttttgtgaaagcattctttaaatgattaaagctttcaactcagtgtagaagaatcaggatacttttctctccatgtactttcatttattgcgtctgtaactgaatgtcgatttagtgaggctacaaatatagatgcaagaaccagggaaccacttatttgtgtcacttatctgcactaactccaagatattactagttctcaggtttaatttctataaaatctaatggctggagatggtgatgatatatcaacatccctgtcagcatcgtccatctaactttaaaaaaaattgaaaaattataaattgatgaagatagaatcaatccccaagtaagacgattagccatattcaatctacaaaatgctacctttacccagccaactatcttgcaaa

SEQ ID NO: 4049 - DNA, 700 bp, Homo sapiens
  misc_feature (1)...(700): n = A,T,C or G
tttgtgatcaggctgatatctaccaacntgcataaagtaatttaggaagctagatattttgtagtgaaacgtcttttaaattattaagaactatttgaggaaaaatttaaaatccctaatgaatgaaaatgcccttgtccaccctttctaagttattctttgttcagttaatattacacatttaaaatataatttacaataaataaaagatcttattataaagaatttcatttcagttttcttgctctcagattttttgctaagttgttgattggctgattttggtttgcattgttggcttgtgtttttgtgaaagcattctttaaatgattaaagctttcaactcagtgtagaagaatcaggatacttttctctccatgtactttcatttattgcgtctgtaactgaatgtcgatttagtgaggctacaaatatagatgcaagaaccagggaaccacttatttgtgtcacttatctgcactaactccaagatattactagttctcaggtttwatttctataaaatctaatggctggagatggtgatgatatatcaacatccctgtcagcatcgtccatctaactttaaaaaaaattgaaaaattataaattgatgaagatagaatcaatccccaagtaagacgattagccatattcaatctacaaaatgctacctttacccagccaactatcttgcaaa

SEQ ID NO: 4050 - DNA, 633 bp, Homo sapiens
gggcaaaagaacaaaaccctgtcttaaaaaaaagaaaaaaaaaaattaccatggccagaggtttgttccagaatatcacccaaaaatattcctcaaatgaatactctgggaagtactggcttactaatacagagcaaaaggtatatattaatagaataaatgtgagaaamctatggaaataagtaggggaaataaatatatggaaacaaatgagtcatagaaatacattctttctatgttttaagggaaatactaaagttatgtaacctttgacacaacttgtggagcaaaagattgtgaatcttaactaaaaggaaaaaagaactattttcccaaagtcctcataaaagcaaagtgtgctatattcaacaatacgtgtatcaaattggcattgggatcatgcagctaacccaatttgaaatgccatttaagtagaaataggaaggcaaatcataataattccacaatcaaagctcaaaacatgtgttgacactcaaccaaaatatgaaaatggctaacattcacaccaaattttgattacactcatagtaaatttaaaactactcactaatattgctcagaatcagaagtttgttcagcgtgttataagcgactttctaagggcaagttact

SEQ ID NO: 4051 - DNA, 633 bp, Homo sapiens
gggcaaaagaacaaaaccctgtcttaaaaaaaagaaaaaaaaaaattaccatggccagaggtttgttccagaatatcacccaaaaatattcctcaaatgaatactctgggaagtactggcttactaatacagagcaaaaggtatatattaatagaataaatgtgagaaacctatggaaataagtaggggaaataaatatatggaaacaaatgagtcayagaaatacattctttctatgttttaagggaaatactaaagttatgtaacctttgacacaacttgtggagcaaaagattgtgaatcttaactaaaaggaaaaaagaactattttcccaaagtcctcataaaagcaaagtgtgctatattcaacaatacgtgtatcaaattggcattgggatcatgcagctaacccaatttgaaatgccatttaagtagaaataggaaggcaaatcataataattccacaatcaaagctcaaaacatgtgttgacactcaaccaaaatatgaaaatggctaacattcacaccaaattttgattacactcatagtaaatttaaaactactcactaatattgctcagaatcagaagtttgttcagcgtgttataagcgactttctaagggcaagttact

SEQ ID NO: 4052 - DNA, 1033 bp, Homo sapiens
  misc_feature (1)...(1033): n = A,T,C or G
ttgcctctgctttcatgctacaacaacaaaggtaagtagttgcaacagataccctatatcctgcaaagactgaaatctttactaacagaccctttaatgagaaagtctgccagcccwttctctacttgctttctcttgcttctgtagacacctctgcctgaaaagcacaacccctgccttcctcctctgcccaggggtcctccagagccttctaagcacagctttcttccacagggtcttccctgacaccctgaggcaaaattaatcacttcctcttcaaagctccattgtgcataggttaggagagctgtgcactattttagaggtgcttgtttacacccctgtctctgctgctgaactatgaacctctcagggcagagaccttattcatcaactctatcccagcacctaacacagtgccaggcacaaggtagatgaggagtgtttgtatgctgaaggaatgaaagtaataagatatacctggcattttcctttgtcacctgtgactttcaaaggagcttctcatttgtacaaagagctgcttatagcctttgaatataatgcctctggcctctaatgcgtttcttccaattttgtcctgcacactgaacacagtctgacaagcacagcagcctcctccataaactgcacagtctccaaagccctgagttgcctcacatttcaacaggaatcgaatgaccttgagacaggcaatcctcaatcttcatattgtctcaaagctacatggaaagaaaataaccttcatttttggagtttcctcttcaccaaagcagtctgagctgtagaagacatgagacggagggcaggaaaactgagctacgatggaaatgccaatagggacaaggtttttgtactgagccagttttattcctcatagcattagcccccttcctcctagattcttctttgtaatatgctcatgaaaatttaaaatagttccagcaccacttattgacttccaacatgcatagagagatgggtacaaagatgagtaagatnggatttcctgcct

SEQ ID NO: 4053 - DNA, 1033 bp, Homo sapiens
  misc_feature (1)...(1033): n = A,T,C or G
ttgcctctgctttcatgctacaacaacaaaggtaagtagttgcaacagataccctatatcctgcaaagactgaaatctttactaacagaccctttaatgagaaagtctgccagccctttctctacttgctttctcttgcttctgtagacacctctgcctgaaaagcacaacccctgccttcctcctctgcccaggggtcctccagagccttctaagcacagctttcttccacagggtcttccctgacaccctgaggcaaaattaatcacttcctcttcaaagctccattgtgcataggttaggagagctgtgcactattttagaggtgcttgtttacacccctgtctctgctgctgaactatgaacctctcagggcagagaccttattcatcaactctatcccagcacctaacacagtgccaggcacaaggtagatgaggagtgtttgtatrctgaaggaatgaaagtaataagatatacctggcattttcctttgtcacctgtgactttcaaaggagcttctcatttgtacaaagagctgcttatagcctttgaatataatgcctctggcctctaatgcgtttcttccaattttgtcctgcacactgaacacagtctgacaagcacagcagcctcctccataaactgcacagtctccaaagccctgagttgcctcacatttcaacaggaatcgaatgaccttgagacaggcaatcctcaatcttcatattgtctcaaagctacatggaaagaaaataaccttcatttttggagtttcctcttcaccaaagcagtctgagctgtagaagacatgagacggagggcaggaaaactgagctacgatggaaatgccaatagggacaaggtttttgtactgagccagttttattcctcatagcattagcccccttcctcctagattcttctttgtaatatgctcatgaaaatttaaaatagttccagcaccacttattgacttccaacatgcatagagagatgggtacaaagatgagtaagatnggatttcctgcct

SEQ ID NO: 4054 - DNA, 1033 bp, Homo sapiens
  misc_feature (1)...(1033): n = A,T,C or G
ttgcctctgctttcatgctacaacaacaaaggtaagtagttgcaacagataccctatatcctgcaaagactgaaatctttactaacagaccctttaatgagaaagtctgccagccctttctctacttgctttctcttgcttctgtagacacctctgcctgaaaagcacaacccctgccttcctcctctgcccaggggtcctccagagccttctaagcacagctttcttccacagggtcttccctgacaccctgaggcaaaattaatcacttcctcttcaaagctccattgtgcataggttaggagagctgtgcactattttagaggtgcttgtttacacccctgtctctgctgctgaactatgaacctctcagggcagagaccttattcatcaactctatcccagcacctaacacagtgccaggcacaaggtagatgaggagtgtttgtatgctgaaggaatgaaagtaataagatatacctggcattttcctttgtcacctgtgactttcaaaggagcttctcatttgtacaaagagctgcttatagcctttgaatataatgcctctggcctctaatgcgtttcttccaattttgtcctgcacactgaacacagtctgacaagcacagcagcctcctccataaactgcacagtctccaaagccctgagttgcctcacatttcaacaggaatcgaatgaccttgagacaggcaatcctcaatcttcatattgtctcaaagctacatggaaagaaaakaaccttcatttttggagtttcctcttcaccaaagcagtctgagctgtagaagacatgagacggagggcaggaaaactgagctacgatggaaatgccaatagggacaaggtttttgtactgagccagttttattcctcatagcattagcccccttcctcctagattcttctttgtaatatgctcatgaaaatttaaaatagttccagcaccacttattgacttccaacatgcatagagagatgggtacaaagatgagtaagatnggatttcctgcct

SEQ ID NO: 4055 - DNA, 1033 bp, Homo sapiens
  misc_feature (1)...(1033): n = A,T,C or G
ttgcctctgctttcatgctacaacaacaaaggtaagtagttgcaacagataccctatatcctgcaaagactgaaatctttactaacagaccctttaatgagaaagtctgccagccctttctctacttgctttctcttgcttctgtagacacctctgcctgaaaagcacaacccctgccttcctcctctgcccaggggtcctccagagccttctaagcacagctttcttccacagggtcttccctgacaccctgaggcaaaattaatcacttcctcttcaaagctccattgtgcataggttaggagagctgtgcactattttagaggtgcttgtttacacccctgtctctgctgctgaactatgaacctctcagggcagagaccttattcatcaactctatcccagcacctaacacagtgccaggcacaaggtagatgaggagtgtttgtatgctgaaggaatgaaagtaataagatatacctggcattttcctttgtcacctgtgactttcaaaggagcttctcatttgtacaaagagctgcttatagcctttgaatataatgcctctggcctctaatgcgtttcttccaattttgtcctgcacactgaacacagtctgacaagcacagcagcctcctccataaactgcacagtctccaaagccctgagttgcctcacatttcaacaggaatcgaatgaccttgagacaggcaatcctcaatcttcatattgtctcaaagctacatggaaagaaaataaccttcatttttggagtttcctcttcaccaaagcagtctgagctgtagaagacatgagacggagggcaggaaaactgagctacgatggaaatgccaatagggacaaggtttttgtactgagccagttttattcctcatagcattagcccmcttcctcctagattcttctttgtaatatgctcatgaaaatttaaaatagttccagcaccacttattgacttccaacatgcatagagagatgggtacaaagatgagtaagatnggatttcctgcct

SEQ ID NO: 4056 - DNA, 571 bp, Homo sapiens
tttgaggcctggttccagtgtatcttcctttaagatatattctaattgccctcaattgaaacaaactcccattcttttgactccaatagaaatttctctctctcatcttatttgtggtctttcttttagagtaggtggagttttttataggtagaaaaatgatttgtggccaggtgcagtggctcacacctgtaatcccagcactttgggaggccraggtgggtggatcacttgaggtcaggagttcgagaccagcgtggccaacatggcgaaaccacatctctactaaaaaaaaaaaaaaaaaaatacaaaaattagctgaacctggtggcacacacctgtaatcccagctgcttgggaggctgaggcaggagaattgcttgaacccgggagttagaggttacagtgtgctgagatcatgccattgcactccagcctaggtgacagagtgagactccgtctcaaaaaaaaaaaaaatcaccccctccccaaacttcatctccagtgcttggccaagtgccctgtgtgtaataatgtgtttttcattaaagtaaaaaaggatactaatcca

SEQ ID NO: 4057 - DNA, 571 bp, Homo sapiens
tttgaggcctggttccagtgtatcttcctttaagatatattctaattgccctcaattgaaacaaactcccattcttttgactccaatagaaatttctctctctcatcttatttgtggtctttcttttagagtaggtggagttttttataggtagaaaaatgatttgtggccaggtgcagtggctcacacctgtaatcccagcactttgggaggccaaggtgggtggatcacttgaggtcaggagttcgagaccagcgtggccaacatggcgaaaccacatctctactaaaaaaaaaaaaaaaaaaatacaaaaattagctgaacctggtggcacacacctgtaatcccagctgcttgggaggctgaggcaggagaattgcttgaacccgggagttagaggttacagtgtgctgagatcatgccattgcactccagcctaggtgacagagtgagactccgtctcaaaaaaaaaaaaaatcaccccctccccaaacttcatctccagtgcttggccaagtgccctgtgtrtaataatgtgtttttcattaaagtaaaaaaggatactaatcca

SEQ ID NO: 4058 - DNA, 1253 bp, Homo sapiens
aaaaaaaaatcaaaggcatcatggcactgtcatggcaatgatgtaatatttccatctataatcactacatgcagatttagtaacatcgatttcatttcacctatttctggggctacagttcagtgtatttctgcctggttagtttgaaaattgttaatatggtataaatggaagtaaattgaagatgcaatatagagaattgaaccgtagcttaaaacatgctgcacctaaaataataggagggctaatgttcagaaaatggatgaacagcccacacatttcttccatttatttctaaagcttgaaatttaaatgagaggttctgttttggatatggcatttagtgatcataaayaagtataatctgctggaaattattaggattctaattttatactagggacccagtgtcagcctaacagtcaagtatcaacttctctaagatatacaaatattttcttatgggaagaaataatttggggaagcggtttcacattgatttctctgtacatcttacacagaatttccttgtgctatccctaccattattctcctttcttccctcactgtgttttcttcaggattctcaaaggaggaggatcgaactgatagcagtgggtccctcctgctttcctcatagacatgcacattatctgcagacagaaaaggaaccctttctcaaaaaatttctgacttcttgatctaaagaattgaaaaaaatacacaggatcagattcaccattgtcctcccacgttgaacacattattcagtaggttttagaaacatgtgctgacttaacaggtgctattgactgaatgtttgtccccctaaaatttctatgttgaaacctaacccccagtgtgatggaatttgcaggtgggccctttgggaggtgattaggtcgtgagggtggcaccctcaagaatggaatcaatgcccttacaaaagaggcctcagagagttcccttgccctatttccccatgtaagaacacgcagagaagatgggcatccatgaagcagagaatgattggcccttgacagatgctgaatctgccagtgccctgacctgggacttaccagtttccagaactgtgggtaatgaatttctgttgtttataagcacccagcttacggtattttgttattgcagcctgaatgaactaagaaaacagttgacaacagcataatttttatattgagggaatatagttttattttgggttgttacaatattaagaatattatagtcat

SEQ ID NO: 4059 - DNA, 1253 bp, Homo sapiens
aaaaaaaaatcaaaggcatcatggcactgtcatggcaatgatgtaatatttccatctataatcactacatgcagatttagtaacatcgatttcatttcacctatttctggggctacagttcagtgtatttctgcctggttagtttgaaaattgttaatatggtataaatggaagtaaattgaagatgcaatatagagaattgaaccgtagcttaaaacatgctgcacctaaaataataggagggctaatgttcagaaaatggatgaacagcccacacatttcttccatttatttctaaagcttgaaatttaaatgagaggttctgttttggatatggcatttagtgatcataaataagtataatctgctggaaattattaggattctaattttatactagggacccagtgtcagcctaacagtcaagtatcaacttctctaagatatacaaatattttcttatgggaagaaataatttggggaagcggtttcacattgatttctctgtacatcttacacagaatttccttgtgctatccctaccattattctcctttcttccctcactgtgttttcttcaggattctcaaaggaggaggatcgaactgatagcagtgggtccctcctgctttcctcatagacatgcacattatctgcagacagaaaaggaaccctttctcaaaaaatttctgacttcttgatctaaagaattgaaaaaaatacacaggatcagattcaccattgtcctcccacgttgaacacattattcagtaggttttagaaacatgtgctgacttaacaggtgctattgactgaatgtttgtccccctaaaatttctatgttgaaacctaacccccagtgtgatggaatttgcaggtgggccctttgggaggtgattaggtcgtgagggtggcaccctcaagaatggaatcaatgcccttacaaaagaggcctcagagagttcccttgccctatttccccatgtaagaacacgcagagaagatgggcatccatgaagcagagaatgattggcccttgacagatgctgaatctgccagtgccctgacctgggacttwccagtttccagaactgtgggtaatgaatttctgttgtttataagcacccagcttacggtattttgttattgcagcctgaatgaactaagaaaacagttgacaacagcataatttttatattgagggaatatagttttattttgggttgttacaatattaagaatattatagtcat

SEQ ID NO: 4060 - DNA, 1253 bp, Homo sapiens
aaaaaaaaatcaaaggcatcatggcactgtcatggcaatgatgtaatatttccatctataatcactacatgcagatttagtaacatcgatttcatttcacctatttctggggctacagttcagtgtatttctgcctggttagtttgaaaattgttaatatggtataaatggaagtaaattgaagatgcaatatagagaattgaaccgtagcttaaaacatgctgcacctaaaataataggagggctaatgttcagaaaatggatgaacagcccacacatttcttccatttatttctaaagcttgaaatttaaatgagaggttctgttttggatatggcatttagtgatcataaataagtataatctgctggaaattattaggattctaattttatactagggacccagtgtcagcctaacagtcaagtatcaacttctctaagatatacaaatattttcttatgggaagaaataatttggggaagcggtttcacattgatttctctgtacatcttacacagaatttccttgtgctatccctaccattattctcctttcttccctcactgtgttttcttcaggattctcaaaggaggaggatcgaactgatagcagtgggtccctcctgctttcctcatagacatgcacattatctgcagacagaaaaggaaccctttctcaaaaaatttctgacttcttgatctaaagaattgaaaaaaatacacaggatcagattcaccattgtcctcccacgttgaacacattattcagtaggttttagaaacatgtgctgacttaacaggtgctattgactgaatgtttgtccccctaaaatttctatgttgaaacctaacccccagtgtgatggaatttgcaggtgggccctttgggaggtgattaggtcgtgagggtggcaccctcaagaatggaatcaatgcccttacaaaagaggcctcagagagttcccttgccctatttccccatgtaagaacacgcagagaagatgggcatccatgaagcagagaatgattggcccttgacagatgctgaatctgccagtgccctgacctgggacttaccagtttccagaactgtgggtaatgaatttctgttgtttataagcacccagcttacggtattttgttattgcagcctgaatgaactaagaaaacagttgacaacagcataatttttatattgagggaatatagttttatttygggttgttacaatattaagaatattatagtcat

SEQ ID NO: 4061 - DNA, 1070 bp, Homo sapiens
taatagataagaaatggctgtattctgcaacattaaaataatattttcctccacttttttcttatctagctattccactttagaagttatttgaaagtacaaaggaagatgaaccaacwttagtaagtgatcacaatgaaggttaagataggcaacttgagaaaagagtattttgtcagtaagttaggaatttgattttatctaaggtagaaaatttttacaagaggaaagacagaaaagattatcttttagcatcaacctctctaacagtaagaatgaggaaatacagaacaaaaccacccacatggatgatacaagaaacatctccaaaactcctacacagaaatctaaacatctgagtttttgttccgagtctattcaagttgagttgtatgaccttaggtaaatctttaatatttgtgattcttggggtccatatgtgtaaaataacttggttggaaataagaaacttaatttccttgaatctctggcattctatagcatggctttccagtgtggaaacacaagtgatgatgcggtttttatatgtttttgttttctttcctttcgttttgtgggaattcattatttcactgtagatcctttgagaagcacgattttaggagatggtaccaatgaaccaaagtcattttgagtttatgtaaattgaagcaaaagtcatttcttcttattaaagtcatttaggatttctacagtcttgaaggttatatggaatttgccatgttcgacttttgtaatttggtctttgatgtacccattaacctctcttactggattcaagggtaagatgccttttattaatgtgtatttcatcatcaaagttaacaaacttggtacaattgtcttttgttattgattattagacattccccttacctagaaaaggggagaaatgatggagtggaaatatatagtgctagactattaggcaaagacaatgagtcatttaaattcccttgcggagagagagcaacacactttcatatccacttaacagaggctcaattgctctcctttgcactctgatttcgatgagagctatatgacat

SEQ ID NO: 4062 - DNA, 1205 bp, Homo sapiens
tccagaatggctctttctctctctctctctttttttttttaagagtcagggtcttgctctgtcacccaggctggagtgcagtgttatgatcatagctcaccgcagcctccaccccccaggctcaagtgatcctcccactttagcctcccaagtagctaggactacaagcatgtgccacaatacccagctaatttgttttgtaatttttttttttttggagagacagggtcttgctatgttgcccaggctggtcttaacttctttgctcaagcagtcctcccacctcagcctcccaaggtgctgggattacaggcatgaggctctgaacctggcccttaattggttttgtgtgtctctaattttctctagatgaggaactcaatacatgtttcctcattggattaccactgtgggaggctccaggacagtgaagaggttaagatcacaggagtcaaagtcataaatgcctaggttcaacttttagtgactggtcaaatgacttcgcttctctgaatctcagttctccaactataataacggagatgcagagagtacctattccactgggttgttggaaagattgaatgagatgatgaatgtaagattcttagtgatgtgcctggcaagtaagtatatacttaataagtgttagcagaagggacagatccctgaaccagaaccaagatacaccagatactcagtaagtatttgtgcaatgctgtttatgaagcctgggggaaagtgtctctttctctggacctcagtatcctcatctgtggactggcaataggaaggtgtgctgtgggactggcatgaagatctagtgagatggtatggttgagaacacttagcaaatcatacaggctgtctgatgacacagctacttttacaggtattgtctgcagtatcctctgtctccttatctccttagtaacccccaaccctcagctctccctcccctaattctttctgacaactgtttatctaccttggtgttattgacattttgggctggagatttctctggtgtatggggctgtcctgcatactgtagaatgccaagcagcatccctgacctttacccattcaatgccagaagcrccctctgcctccaccagttatgacaaccaaaactgtcttcagacattgccaaatacccctggaaggaggtcagaaatgccctctgctctggttaaaagccatta

SEQ ID NO: 4063 - DNA, 1205 bp, Homo sapiens
tccagaatggctctttctctctctctctctttttttttttaagagtcagggtcttgctctgtcacccaggctggagtgcagtgttatgatcatagctcaccgcagcctccaccccccaggctcaagtgatcctcccactttagcctcccaagtagctaggactacaagcatgtgccacaatacccagctaatttgttttgtaatttttttttttttggagagacagggtcttgctatgttgcccaggctggtcttaacttctttgctcaagcagtcctcccacctcagcctcccaaggtgctgggattacaggcatgaggctctgaacctggcccttaattggttttgtgtgtctctaattttctctagatgaggaactcaatacatgtttcctcattggattaccactgtgggaggctccaggacagtgaagaggttaagatcacaggagtcaaagtcataaatgcctaggttcaacttttagtgactggtcaaatgacttcgcttctctgaatctcagttctccaactataataacggagatgcagagagtacctattccactgggttgttggaaagattgaatgagatgatgaatgtaagattcttagtgatgtgcctggcaagtaagtatatacttaataagtgttagcagaagggacagatccctgaaccagaaccaagatacaccagatactcagtaagtatttgtgcaatgctgtttatgaagcctgggggaaagtgtctctttctctggacctcagtatcctcatctgtggactggcaataggaaggtgtgctgtgggactggcatgaagatctagtgagatggtatggttgagaacacttagcaaatcatacaggctgtctgatgacacagctacttttacaggtattgtctgcagtatcctctgtctccttatctccttagtaacccccaaccctcagctctccctcccctaattctttctgacaactgtttatctaccttggtgttattgacattttgggctggagatttctctggtgtatggggctgtcctgcatactgtagaatgccaagcagcatccctgacctttacccattcaatgccagaagcaccctctgcctccaccagttatgacaaccaaaactgtcttcagacattgccaaatacccctggarggaggtcagaaatgccctctgctctggttaaaagccatta

SEQ ID NO: 4064 - DNA, 1202 bp, Homo sapiens
tgcattttttattcctaaattattagtttttgttattttccaggataatacccctaagtcagaataaaataatatttcaaagcctgcatattgttatcatcaatgtcattgcttatgggatacacatttgaaataagtacaagtcacatagaattagagagaaatcagttaaacaccaaaaaawcacagggaaataggattgagatgttgaagtgttttgtgatggtaagagagagaaaaaaatagaatttaggatttctaaataagaatagaaaaatgtaatgggcccacttaacccaaaggagcctaaaaaccattaagccatatctggtgaaggcacatatataatgatttgtagaatcattgataattcaaggagatgaacatctccagcatttcatgaatttctaaaagagaaagctggagcaatgattgttggaggattaagaaaactgttaatgaattttaaagactgagctctagataatttaaaacagagacacagaagtctttgcacttttctttcattctaattcaaggaagtgaattgcatgacttgtgataagaaatataatcaagaatagattaactgtcctaatacaaattctacaaaaacatgtttgagaaggaattggtatgtcaattattcctattttaacttaatatgttttaccctccttacaacccttagacatggccagctatattatgtgatcttgtatgttcagttagacatcactggatttccaatatattatctggttagaaaacaaaaaaatatggtgttctttctctggctgttgaatgagaaagtatatgaaaaggtagtcagtcagaagtgacatataagaaaagacacattgggtataaatgattgatgttaatagtccaatattagtgcacaggctcataaactgctccccagtggtacccagtgatgaaatttgttccctttgtaatgtcagaacgctcagaatttttttttaatttctatgagatgtgtcttccccttaaaaacaatcccatcctcttttatttcaattagtttggatttctctttctgaaatttaataaattataattcaaagaataatctactagtattttcctctctttctctcttcctcataccatctgtgattgggaaagcaaagagagaatgaagttttcatttagtgacaagttgaaatgaatgctaatgc

SEQ ID NO: 4065 - DNA, 628 bp, Homo sapiens
tattatgtatatacatatatatatatacatatatgtataagataaaaatcattgactttcctaaaaaaatccacagacttcttagaacttatatttttatacgttacctaaaaatatcatatacatattagacagtgaaaggaagaatgtcactctcgtagaaacatagataaaaaaatagtcctggaatattctattttaactatagctaaagttgtatgctctaagaaatttgaattatagtatttgagaaataagaatttatttttcccagaaattgagtctcttaaaatgaattkccaaatgacagggatgttttacagtataaacttcaacgtgaagtggtaatgcaaagtagatagtgggaggaggggggacaatatgggcctacaagacatttctgccaaagtaccagagtattaatatcctaaattattgtggcagcttccactagtgcccaaaagaaccgagatctctgataaattcattgacttcagattgggaacatgctcattgtttttaaaatcagttaaagatttttcataattttgtaaatacacccttactctaagatcagtattctgcatacaaatgggttaaaacttaagaagcacaacatttctcaaac

SEQ ID NO: 4066 - DNA, 350 bp, Homo sapiens
gtttggtattagaaagtctgtacaaagcaaggtctgttttatttatttattttttctaaagatgggggtctcaccatgttgcccaggctggtctcaaactcctgggctccagcaatcctcctgcctcagcctcccaaattgctgggattacaggtgtgagccaccatgcctggcctaaagcaaggtttagcccgtwctttctcatgctggccatctatgttctggttctaacgtttgtgtggttggtgttaatgttagacctaaaaagagaaagatgaaattcggtatttgttatcaactgtcaaagacacttgttttccccagacttttattatgtacattttcaaaca

SEQ ID NO: 4067 - DNA, 575 bp, Homo sapiens
tccaagccttggccgatctgaatcatagtgcatttctttcagcacacacatggcratagatacttcagagcatcgttggggtgagttttgtgtgcgtgaatgcctgtgccctggcctgggccaccaccgcacacaaccagcaggcggagtgtggctctaccagccacgacctccctccagggcagtgcggggaggccaccggcagggggtgctgcacccacactgctggcaccagtacgtgggcattaccaggcttcataaattgctggaaatttaaagctggaggggatgttagaaaccgtatcatccactggtttccattcgctcgtgaggaacccatgatcccgagagttgagtttgtggtggaaatggagctaaaatagagccctctccacttccaggccaggacctccacctttcacatccccactgccttcccctggcatgactacaaatgtcttaccagtgttgagagggaaatgatttgcatgtagaagaatcagcaaggacaagaacaggtacttagtgctatttgcctgggaaatcgcagattgaggctttttgcatttggcccc

SEQ ID NO: 4068 - DNA, 575 bp, Homo sapiens
tccaagccttggccgatctgaatcatagtgcatttctttcagcacacacatggcaatagatacttcagagcatcgttggggtgagttttgtgtgcgtgaatgcctgtgccctggcctgggccaccaccgcacacaaccagcaggcgragtgtggctctaccagccacgacctccctccagggcagtgcggggaggccaccggcagggggtgctgcacccacactgctggcaccagtacgtgggcattaccaggcttcataaattgctggaaatttaaagctggaggggatgttagaaaccgtatcatccactggtttccattcgctcgtgaggaacccatgatcccgagagttgagtttgtggtggaaatggagctaaaatagagccctctccacttccaggccaggacctccacctttcacatccccactgccttcccctggcatgactacaaatgtcttaccagtgttgagagggaaatgatttgcatgtagaagaatcagcaaggacaagaacaggtacttagtgctatttgcctgggaaatcgcagattgaggctttttgcatttggcccc

SEQ ID NO: 4069 - DNA, 622 bp, Homo sapiens
tgagtactatttaaatatgtagtaatttcacaatgtatcccatcacctgctgatgaccatgtgggttgtttccactttgggctattatggataaagctaccacgaatggcattatacaaggctttgcatgaatatttctttatttcttttaggcaaatacctaggagtgcagttactgggtcttacagtaagtgtttaatactctgtcatactgttttccaaagtggttataccattttacatctcagcccagaattgatgagarttctcaatgtttcagctacttgtttttaagactttttcttaatcatcactcaacagtgaccagaatggctaatgatcattaagtcatgttttccttacaatttccttgacttttgtgggtgcttgacttgtatcagaatattgaaaacaggatcaatattgtcttaacccccttttaaacactttttctaagtaatgatatttaggatgataacaggagatctaaagggaatattggtagtagtaacaggcattattcaatatttattatcatactccttaagacaatacattttgagtgaaatagcattcagctagactcgggataaaaaggttctaatctcagctttagcattaa

SEQ ID NO: 4070 - DNA, 622 bp, Homo sapiens
tgagtactatttaaatatgtagtaatttcacaatgtatcccatcacctgctgatgaccatgtgggttgtttccactttgggctattatggataaagctaccacgaatggcattatacaaggctttgcatgaatatttctttatttcttttaggcaaatacctaggagtgcagttactgggtcttacagtaagtgtttaatactctgtcatactgttttccaaagtggttataccattttacatctcagcccagaattgatgagaattctcaatgtttcagctacttgtttttaagactttttcttaatcatcactcaacagtgaccagaatggctaatgatcattaagtcatgttttccttacaatttccttgacttttgtgggtgcttgacttgtatcagratattgaaaacaggatcaatattgtcttaacccccttttaaacactttttctaagtaatgatatttaggatgataacaggagatctaaagggaatattggtagtagtaacaggcattattcaatatttattatcatactccttaagacaatacattttgagtgaaatagcattcagctagactcgggataaaaaggttctaatctcagctttagcattaa

SEQ ID NO: 4071 - DNA, 622 bp, Homo sapiens
tgagtactatttaaatatgtagtaatttcacaatgtatcccatcacctgctgatgaccatgtgggttgtttccactttgggctattatggataaagctaccacgaatggcattatacaaggctttgcatgaatatttctttatttcttttaggcaaatacctaggagtgcagttactgggtcttacagtaagtgtttaatactctgtcatactgttttccaaagtggttataccattttacatctcagcccagaattgatgagaattctcaatgtttcagctacttgtttttaagactttttcttaatcatcactcaacagtgaccagaatggctaatgatcattaagtcatgttttccttacaatttccttgacttttgtgggtgcttgacttgtatcagaatattgaaaacaggatcaatattgtcttaacccccttttaaacactttttctaagtaatgatatttaggatgataacaggagatctaaagggaatrttggtagtagtaacaggcattattcaatatttattatcatactccttaagacaatacattttgagtgaaatagcattcagctagactcgggataaaaaggttctaatctcagctttagcattaa

SEQ ID NO: 4072 - DNA, 622 bp, Homo sapiens
tgagtactatttaaatatgtagtaatttcacaatgtatcccatcacctgctgatgaccatgtgggttgtttccactttgggctattatggataaagctaccacgaatggcattatacaaggctttgcatgaatatttctttatttcttttaggcaaatacctaggagtgcagttactgggtcttacagtaagtgtttaatactctgtcatactgttttccaaagtggttataccattttacatctcagcccagaattgatgagaattctcaatgtttcagctacttgtttttaagactttttcttaatcatcactcaacagtgaccagaatggctaatgatcattaagtcatgttttccttacaatttccttgacttttgtgggtgcttgacttgtatcagaatattgaaaacaggatcaatattgtcttaacccccttttaaacactttttctaagtaatgatatttaggatgataacaggagatctaaagggaatattggkagtagtaacaggcattattcaatatttattatcatactccttaagacaatacattttgagtgaaatagcattcagctagactcgggataaaaaggttctaatctcagctttagcattaa

SEQ ID NO: 4073 - DNA, 622 bp, Homo sapiens
tgagtactatttaaatatgtagtaatttcacaatgtatcccatcacctgctgatgaccatgtgggttgtttccactttgggctattatggataaagctaccacgaatggcattatacaaggctttgcatgaatatttctttatttcttttaggcaaatacctaggagtgcagttactgggtcttacagtaagtgtttaatactctgtcatactgttttccaaagtggttataccattttacatctcagcccagaattgatgagaattctcaatgtttcagctacttgtttttaagactttttcttaatcatcactcaacagtgaccagaatggctaatgatcattaagtcatgttttccttacaatttccttgacttttgtgggtgcttgacttgtatcagaatattgaaaacaggatcaatattgtcttaacccccttttaaacactttttctaagtaatgatatttaggatgataacaggagatctaaagggaatattggtagtagtaacaggcattatycaatatttattatcatactccttaagacaatacattttgagtgaaatagcattcagctagactcgggataaaaaggttctaatctcagctttagcattaa

SEQ ID NO: 4074 - DNA, 1260 bp, Homo sapiens
cagctcctggggctcctgctgctctggttcccaggtaagaaaggagaacactaggattatactcggtcagtgtgctgagtactgctttactattcagggaacttctcttacagcatgattaattgtgtggacatttgtttttatgtttccaatctcaggttccagatgcgacatccagatgacccagtctccatcttctgtgtctgcatctgtaggagacagagtcaccatcacttgtcgggcgagtcagggtattagcagctggttagcctggtatcagcagaaaccagggaaagcccctaagctcctgatctatgctgcatccagtttgcaaagtggggtcccatcaaggttcagcggcagtggatctgggacagatttcactctcactatcagcagcctgcagcctgaagattttgcaacttactattgtcaacaggctaacagtttccctcccacagtgttaccaacccgaacataaacccccagggaagcagatgtgtgaagctgggctgccccagctgctcctcctgatgcctccattggctgagagtgttgctcagatgcagccacactctgatggtgttggtagaggggtacgtgaaatcgcctctgcaccctaattcttttctctttctcagccccaactgcacagacatagcaatgcatctcctgatttgataaatacagagatcatgacacttgaggagtctagtttatggcttcacttgaattcatataacacagaagaagccactatagatattctaagcaggaattgtcttaatacagagaattaaagtaaactactaaagtcaaaataaaatgtagagatgaatctctaaatttaagttttatttgcaaagaaatatttgccaggtggggcatacaggaaaactcagtggtcttcaagatattggaagaacgaagagaaaattagcattttatgaaaaagggaaaatgttacctgtggctctttgagaaagttcattggcactaggaagggttgggagctggcaagctcagactggtaagcagtggtggacaaaatgaatcctagaattatatcaagttatctcagaagttgtggacaaatttgatttcaggttacaataagccaaagcagtgaaggttgcagagaattttgttactgaaatgycagggattcagtgaagaccctgcagcttaccccacagaaagccaatcactaagacaacaagcattgccaaggaacaggctttaatcaggtgctgcagccta

SEQ ID NO: 4075 - DNA, 1157 bp, Homo sapiens
taactcccaagcatttaccttagataaattaaaacattaacaaaaaaacttgtacaagaatactcacagcagctttagctatattcatagtagcaaaaaactggaaacagctcagttgttcctcgataggagaatgggtaaactgtggtatattcatagaatggaatatcactcagcagcaaaaaagagcaaagtagtaccacatgcaacaacatggatgaatctcaaaaacattatgtgtgttaagaaaaatttacacagatgagcacattttatttgattccaacaatataagattctagaactgaaaatgattctctatggaggaaaaaattagaacagtggtttccactgggagtttaagggcagagattgacaaatattgagcccttgcgaatcatatgtgtattgaaatatttaggagggactgaactgatgtctgcaatttaatttgaaatgcataaaaaataagatgaaatactgaatgaatagagaaattaatagaaggatggaaatgtaataaagccagcataattgtcattaattgcatgtagtaggtaggtatatgggtgtttactgtaaaattaattctttcaactttgctgcttgtttgaaatttttcttcgaagtttttgggatttaaaagaatcaactatccatagttggctaattgcaataactggtgactaaaaatcacaccccaatactacaagtcagtgtaatttcccaaaacactctgattcaggagaagcaggttaagtaggastaggctcagcaatgctactgaaaggtgccaccaataaacagtgaccatcattatcttgatgtggagtatcaagaggcatttcaaagtggggtagcagcaagtgtttctctatcctctcttctccccctgcctcctcttctactttctatttgtactgacaagtgtccaggccaaagcaagcagtcaggataggaatattaatttatttgtgaggacagtagtattagggggaaaaaaagaggagcacatgcaaagacatgatatgctatcatttaaaatcccatgatacaccaaaaccaaaattaaataaaccaagctaaaaatcttctgcaaaacaaaggaaacaatcaatgaaatgaaacagcagcctatggatagggaaaatatattt

SEQ ID NO: 4076 - DNA, 1035 bp, Homo sapiens
gcatgggtatttggtgtasgtacttggaattaaaataaatattctgtctggagtatgtcctcagatataaatttttaagataaaagtcagtaattatcttattcagtaatctttccatcaggcatttttatttatgtaatgtatcataccgagagaggtgttaaaattgtttctctcaacttgtttggcaattgctgacaattattgcgtaatagatgtgtcagtgcatacagccagatttttgttaaggattgtaatcactgtcagtaaaacaaaccctctcaatcccatatcataaaatgtgtgctaaattctactctgcatattactgatattgcattcatgtttgcctatttccattttcttaattttattcagtggtgtttactgaatgcccccaataaagaatagggaattgtggctcatttttatcttacctttaccttcattcccccaaacagcagcaacaaaagcaacagaaggaaaaatgattttgtttttctgtcttctttcatgctgtacatatctttcttactgtacactttccctcaagaattatacgctttaaatttgatttgatatatgcttattcaattatacatgttacttgataactaacttttatcatagttattgaagtctacattcaataggtatgaatcataaactattcaattgaatctgtactttcttccagtttcatatcataattaaaaataacttaatcacttttatagtgtcttgcatttccttggtgtattatgtatttcaaatagactttctgttgcctttatatatgaatgacaatttggatatgaaatccttggtcacattcttttttctgcccaaatgctgtaatcttctggtatctaatattatggaagacaaatctgaaataacttgatttatttttgtattgtggatggcatgtcccttctacctggaagtttatggcatcctttatttttggaaccaataatcctttcacagaatgttttcatgtggttcattttcattaattttatgctatttaca

SEQ ID NO: 4077 - DNA, 1035 bp, Homo sapiens
gcatgggtatttggtgtaggtacttggaattaaaataaatattctgtctggagtatgtcctcagatataaatttttaagataaaagtcagtaattatcttattcagtaatctttccatcaggcatttttatttatgtaatgtatcataccgagagaggtgttaaaattgtttctctcaacttgtttggcaattgctgacaattattgcgtaatagatgtgtcagtgcatacagccagatttttgttaaggattgtaatcactgtcagtaaaacaaaccctctcaatcccatatcataaaatgtgtgctaaattctactctgcatattactgatattgcattcatgtttgcctatttccattttcttaattttattcagtggtgtttactgaatgcccccaataaagaatagggaattgtggctcatttttatcttacctttaccttcattcccccaaacagcagcaacaaaagcaacagaaggraaaatgattttgtttttctgtcttctttcatgctgtacatatctttcttactgtacactttccctcaagaattatacgctttaaatttgatttgatatatgcttattcaattatacatgttacttgataactaacttttatcatagttattgaagtctacattcaataggtatgaatcataaactattcaattgaatctgtactttcttccagtttcatatcataattaaaaataacttaatcacttttatagtgtcttgcatttccttggtgtattatgtatttcaaatagactttctgttgcctttatatatgaatgacaatttggatatgaaatccttggtcacattcttttttctgcccaaatgctgtaatcttctggtatctaatattatggaagacaaatctgaaataacttgatttatttttgtattgtggatggcatgtcccttctacctggaagtttatggcatcctttatttttggaaccaataatcctttcacagaatgttttcatgtggttcattttcattaattttatgctatttaca

SEQ ID NO: 4078 - DNA, 1035 bp, Homo sapiens
gcatgggtatttggtgtaggtacttggaattaaaataaatattctgtctggagtatgtcctcagatataaatttttaagataaaagtcagtaattatcttattcagtaatctttccatcaggcatttttatttatgtaatgtatcataccgagagaggtgttaaaattgtttctctcaacttgtttggcaattgctgacaattattgcgtaatagatgtgtcagtgcatacagccagatttttgttaaggattgtaatcactgtcagtaaaacaaaccctctcaatcccatatcataaaatgtgtgctaaattctactctgcatattactgatattgcattcatgtttgcctatttccattttcttaattttattcagtggtgtttactgaatgcccccaataaagaatagggaattgtggctcatttttatcttacctttaccttcattcccccaaacagcagcaacaaaagcaacagaaggaaaaatgattttgtttttctgtcttctttcatgctgtacatatctttcttactgtacactttccctcaagaattatacgctttaaatttgatttgatatatgcttattcaattatacatgttacttgataactaacttttaycatagttattgaagtctacattcaataggtatgaatcataaactattcaattgaatctgtactttcttccagtttcatatcataattaaaaataacttaatcacttttatagtgtcttgcatttccttggtgtattatgtatttcaaatagactttctgttgcctttatatatgaatgacaatttggatatgaaatccttggtcacattcttttttctgcccaaatgctgtaatcttctggtatctaatattatggaagacaaatctgaaataacttgatttatttttgtattgtggatggcatgtcccttctacctggaagtttatggcatcctttatttttggaaccaataatcctttcacagaatgttttcatgtggttcattttcattaattttatgctatttaca

SEQ ID NO: 4079 - DNA, 1035 bp, Homo sapiens
gcatgggtatttggtgtaggtacttggaattaaaataaatattctgtctggagtatgtcctcagatataaatttttaagataaaagtcagtaattatcttattcagtaatctttccatcaggcatttttatttatgtaatgtatcataccgagagaggtgttaaaattgtttctctcaacttgtttggcaattgctgacaattattgcgtaatagatgtgtcagtgcatacagccagatttttgttaaggattgtaatcactgtcagtaaaacaaaccctctcaatcccatatcataaaatgtgtgctaaattctactctgcatattactgatattgcattcatgtttgcctatttccattttcttaattttattcagtggtgtttactgaatgcccccaataaagaatagggaattgtggctcatttttatcttacctttaccttcattcccccaaacagcagcaacaaaagcaacagaaggaaaaatgattttgtttttctgtcttctttcatgctgtacatatctttcttactgtacactttccctcaagaattatacgctttaaatttgatttgatatatgcttattcaattatacatgttacttgataactaacttttatcatagttattgamgtctacattcaataggtatgaatcataaactattcaattgaatctgtactttcttccagtttcatatcataattaaaaataacttaatcacttttatagtgtcttgcatttccttggtgtattatgtatttcaaatagactttctgttgcctttatatatgaatgacaatttggatatgaaatccttggtcacattcttttttctgcccaaatgctgtaatcttctggtatctaatattatggaagacaaatctgaaataacttgatttatttttgtattgtggatggcatgtcccttctacctggaagtttatggcatcctttatttttggaaccaataatcctttcacagaatgttttcatgtggttcattttcattaattttatgctatttaca

SEQ ID NO: 4080 - DNA, 668 bp, Homo sapiens
gtctgtgccaaacactgtgctagcttcttagtataaaaaggtaactaaaagcacagcttcactcaaacataaattatgatttagtatgtcttgaaggtatcattttgcctgacagtataagcaaaaagcagaaaatagtgattgattaaccttattttgtagtgatgcaggaatctaataaacccaaattaaggattgaaatgaagataacaaaattgaagtaaccaatatttctggttggagcccacttttattacagcgctaaaaatagtcattgacataagaaaggatagatgaatgccatcttgttattttccagcactgagataggtttagatgagtatgtcggagataggaacattaagaagttggtagccctcgcacatatgatgaataaagatagatcattataaatggcttcaaaactcttttcttcgaaggttcttactgggcttattataaaaggaacaaagattgttagaagatatgctgtcttcactgtctcaaaaacaatactttttgaaaccttctcaagaatatagtgaaatggataaagaacctctctgagaaactcctgttgtcattggattttgaaagttgtcataaaccacctctgtacctaacctaaataatgaatgttgttgtctttgttgtrtttaaaatataag

SEQ ID NO: 4081 - DNA, 1246 bp, Homo sapiens
gtacatatataaacatacacacacacgtatatacatacatatatagacacatacatattctactggttttgttcctctgaagaaccttcactgataaaatagccaactcaaatttttgtgaaactctgtgtaggccaaacaaaacacatacatgggcctagaccctacctcaagccaccagtttataacctcagcacccccacaatccagcccatctcttcaggcattaatgttttatccacattcctttcccatgttaccttcccagtcaaatccattgcttgctaaaagcatgagccaagagccaaataaacttcaaggctcttctctttcaggaagattctataataatttgacgccatgatgatttccacacattacttttagtttcttctacatttagcattcatagattctgcgtgatactttatactatgtttattttttatttatttttttgaggcagggtctcactctgttgcccaggcttgagtacagtggcataaccttggctcactgcagcctcaaccagctgggctcaagcaatcctcccacctcaccctcctgaatagccgggaccacagtcacatgccaccatgccaggctaatttttgtgttctttgtagagacaggattttgccatgttgcccaggctggtctcaaactccttagctcaagcaatccacctgcctcagcctcccaaagtgctgcaattacaggtatgagtcaccacacccagccttatcctacatttataatctttttaaattgctttcaaaatattattgactttgtctctcaaataataacaaacatctaaactgtagagattgtctgccatcattcagcaacttgtaatgaaaacaaattgctctagaaattagaagacatgagttccaatctaaactctgctatgagtttaaggcagagtaaccttgaggaggtcactaagcatctcttggctggagtcccctcatctgtaaaccaagatggagctacttaatggctaaaatgtacttattggttaccctgtgtgagattctgttctacaagctttacrtatatccattcacttaatccttagaatttgataaggaggtactactgtatagaataaacaaaggggcagaaatgtgaagttacttgtccaaggcaggcttgcaagcaatggaaccaggatttggacccaggcagtatggttcctgagtccatgttcctaaccattacattaaacaggctcataatg

SEQ ID NO: 4082 - DNA, 842 bp, Homo sapiens
atctaaagcacaaatgactaatatctgcagcagtaatctcccctcttgtgctgtggaatagttgccctaccagggcatttccccatcagggaaagtatacgttctcttgagcctaatcaaacgtttctcacataaacttgcagtcatagccttcaatcccaawgactaggtttagcacctggaatgaagatgctgaagatgaaaacctagttatgaccaaggggctcaggtcattcattcatatgtcaggtctgacatacaccatggtttacaagcactctataattatttttgtcatccctcacagccaccttgtgagaaaagccagactgaaagggacagtgtggtctccagaatctagagaaaataataacacttttgttcacaataactctgagactcagggtactgattgccagagcagacaaatcactgttataaaaataaaatacatttatcttggaaaggtgactcactatgaatgctagggaattatctaattaaagtgtttcacaaatagaataagaccatttctcgaatattcaatggaagttggatagctgcttgctgatagcacagagcagagcatctcaacgatggctgaagattagaatcacttgggggatcttttaaaagtctgattccctggggtcatcccagaccaattaatcagagtcactgaggtgggtcttcaggtgatttcaaagtgcagctgaggcacaaagtttctcaatttcagtgtgcattatccttgggcggcttgcctccacctgtccaccaccccaaagaaatttggtttcgtaggtgtgggattttctcacagatctacattcacacatgca

SEQ ID NO: 4083 - DNA, 1309 bp, Homo sapiens
ccacgctgtgttggaataataaagatcaaattgtttttcctcaagaaaaggatttacacrtatgtcagaatgaaaaaacacaagctgcttgacacagtgaatcatttgtaattatttaaaactctactgaatgtgtgcttccatccaaaggtagagtctaattgctgagatggggagggttcagttatttgcttcaaataccaagaaaaagaaatcctcaaaaaaatcttcagtattttttaaatcagtaggttttttttctatattagatgacaaattaaaatttactcatgataggccaggcgcagtggctcatgcctgtaatcccagcactttgggaggccgaggcgggcggatcgtgaggtcaggagattgagaccatcctggctaacacggtgaaaccctgtctctattaaaaatacaaaaaaattatcctggcatggtggcgggtgcctgtagtcccagctacttgggaggctgaggcaggagaatggcgtgaacccgggaggcggagcttgcagtgagccgagattgcgccgctacactccagcctgggctacagagtgagactctgtctcaaaaaaaaacaaaaacaaaaacaaacaaacaaaaaaatttactcatgataaaaaaaaaaaactccttttaaaatccttaatatcttaaaggtcaaacatgaccatgcaatatcatatttaatattttaaaatattaaagtatttttgaaggggacaaataaacattaaatagaaagatttttcccaagccattaggactctgtgaaatacaattcataacattatattttatagaaagccatatgacttttgccaccctccctttgttacctaagtaacttctggtttttttcttttgttattatatttacattatatttatatttatattatatattgtattatatttacttattataaatattctatgatcgtcttgtgcaaaaacttttgcatttcaaaatatttttccaggttagatttctagaagtagaattagaagtctaaaagacatgggtatatgcagtgctaagttacttttaaagaaagttggaacaatttataaccctaccaacagtatttgagagtgttcattttaaacacatgatcgtggttgtttggcattttcaattaaaaaatattgttcacggttttaggacatggaattatgttttgttttgttgtttgtatgattgttttttcattgtatattatgattgtttactttttgttattagcaaagcaaggcatttgtcccaatatttagtaatcatttatatatcaaactggta

SEQ ID NO: 4084 - DNA, 600 bp, Homo sapiens
actggaattctcttcagagcctgtgagacactgttttacatatcctcagacaactctttgtcttttgatggtgaatttgatttttggaaacagctaatagtcacttgaagccaagtctgcgggttatatctgggtgatgtttggggaaaagaatgaggtgtgaaaacaatgtaacaagattgattttctaatgtggctcataaacttttcctgactacagttctaaaagaggagtttcaaaaattttttgaactctgggagcaataataaaatgagtttgcagcctcccaaggtgactrctttgaatgcaacactcattttgggaatataaattctggtctatgtggtaaaatgaaactagttccattgctctatagttatacattgttttcagcataataatttagatccatgtctaggaattcccgagtctatggaaaaactatatttccttaagctttatttgacagtccaaccccatatgaccttcaatagcgtgtaaaattgcttaagatgggaaggccaagcctccataatagcatatatccttggacctctttgcagggttcataaagatcatttcaattaagaaaactatag

SEQ ID NO: 4085 - DNA, 630 bp, Homo sapiens
aatcatttttggccaggtgtggtggctcacacctgtaatcccagcactttgggaggcagaggtgggtggatcacaaggtcaggagctcgagactagcctggycaacatggtgaaaccccgtctctgctaaaaatacaaaaattagctgggcgtggtggcatgtgcctgtaatcccagaggctgaggcaggagaatcacttgaacctgggaggcggaggttgcagggagccgagattgtgccactgcactccagcctagtgacagagcaagactctgtctcaaaaaaaaaaaaaaaaaatcaattttaaggacctgtgttctactccatcttttctctctctgagcagattctgtaaatgtcatgttatgaattacacttctaaaatcttattttctcccttgctttttagtccattggaaatgctaaaacaaccaggaatgataatagcagccgttttgggaagtatattgagattggttttgataagagatatcgaatcattggtgccaatatgagaacttatcttttagagaaatccagagtggtattccaggtaagctggccatatacacatatgcacttgtgttagattgctgtataattgttgagtccatgcttgctggtatgca

SEQ ID NO: 4086 - DNA, 585 bp, Homo sapiens
ttgctttctcttactcatttttgtagaccttgttcagctgtcatctctagggaatcttccctgataacctcttcttcctcttacggccccatcacatgtattacagtcttgaattattggcctgtctttcctattagatgactgtcttagtccagtttctgctgctataacagaataccacagactgggtgatttataaagagcagaagtttatttgactcactgttctggaggctgaaaagtccaagagcacagcgctggcatctggcaaaggtcattcagtagtaggagggcacatgagcatgtgaggcagagaggaartcagcttaaactcatccttttatcaggagcccactcccgtgatgactagctcactcctgcattcatgccattaatccattcctgagggcaggggcctcatgacctaatcagctcttaaaggccccacctcccaatatcatcatgttggcaattaaatttcaacatgaattttggagagaacattcaaaccacaacatccgtcaaccacatgaggatacagatcatgacttatttaacttttagttgaatgaagccaagccagca

SEQ ID NO: 4087 - DNA, 585 bp, Homo sapiens
ttgctttctcttactcatttttgtagaccttgttcagctgtcatctctagggaatcttccctgataacctcttcttcctcttacggccccatcacatgtattacagtcttgaattattggcctgtctttcctattagatgactgtcttagtccagtttctgctgctataacagaataccacagactgggtgatttataaagagcagaagtttatttgactcactgttctggaggctgaaaagtccaagagcacagcgctggcatctggcaaaggtcattcagtagtaggagggcacatgagcatgtgaggcagagaggaaatcagcttaaactcatccttttatcaggagcccactcccgtgatgactagctcactcctgcattcatgccattaatccattcctgagggsaggggcctcatgacctaatcagctcttaaaggccccacctcccaatatcatcatgttggcaattaaatttcaacatgaattttggagagaacattcaaaccacaacatccgtcaaccacatgaggatacagatcatgacttatttaacttttagttgaatgaagccaagccagca

SEQ ID NO: 4088 - DNA, 1031 bp, Homo sapiens
  misc_feature (1)...(1031): n = A,T,C or G
tttgccaggaagatattcttatttttctagaaaagcatttaaaatgttaatctaaaatatagcagtgtcctcactgccaaaacaaaataggatgtctacactctatttcagaaagtgaaaatatattttctttgattgatcaaagaatctaatgtgttgacttgtatggctatgttactattgttttcattacttacatttgtatcactcttaaaactacattgtattttcacatctttctgtctgctgtggtttcaatttactaatcctgacataggctttacacaagtgaaagatattaatttttttgaaatttgcttattaaacatttaatatatgcattatgtaaacacttggttttctaactacatcttttttttttttgctttgccttaaaaaaatttatagaagcgagttacctaaatcagaaagacatatgtcattaaaatttttaaggttatataaaacatttagcagcaagttatattctctgtattctgtagcagatattttgtaagctagatttaactatcaaaatccaaagccaaattttactttttctggttctgaaaatggcctttaaattgagtgggtaatactaatactctactaataaatagtctaactggacctttgttgccacaggataaggtgatagaaacatcaggctaaagagaccctgaacaccagagcagcatttccaggaaatattcattggtcttaaccatcttatttatgtaaagcaggtgaagttttttggaaaaaaataaaaacctgaagcttacctaacaaagcctatgccttggcagctcccatcctcgtttgttctctttctttgctggcatgaatgttcagataacccaaaaggtkttatgaaaatattctaacctctgagttcaggtctgctgtttctgaaaatcattttgtgagnnnnnnnnnnnnnnnnnnnnnnnnnnnnnnnnnnnnnnnnnnnnnnnnnnnnnnnnnnnnnnnnnnnnnnnnnnnnnnnnnnnnnnnnnnnnnnnnnnnnt

SEQ ID NO: 4089 - DNA, 718 bp, Homo sapiens
tgagtagctgggattacaggagtgcaccaccatacctggctctagtaaatgatctgagtgctgcccatcctgaatgaggatggtcccaaagggaatatcctgtcagtgtggaaaggctggctagggatttgggcacaggggaattatggaatatacctcctacagtatgatactgctgaactctgatttggagtctcctctgagtttaagagcggagtttccagggcccaggatgatggtcctatatcctctctttgtttctggctgtcctcaggggtatttcacccttcaggcactcatgatacttcctgtgggttgaggcaaagataggtcttctgtcaggtaacccaagrtggcagggaagttgtaccttgatctcactttttccagtgtagaaactcagtcagagggaaattttccttgcacttggtgccagacagatttggtggagctgcgtcattgatataggagtctgattatcttaccatctgctcagagttttttttaatacttctctgtggccctgggaactgtctcattctcattttaattctgggatattgctggtgataatcttggcattatatttttgtttttggttttcagtggggggagggggtggtgaaaccagcttgcttctgtgccaccattttggagaagaatctgcctatatttactcaattctgacatacacattgttttttatagtaggaatgca

SEQ ID NO: 4090 - DNA, 718 bp, Homo sapiens
tgagtagctgggattacaggagtgcaccaccatacctggctctagtaaatgatctgagtgctgcccatcctgaatgaggatggtcccaaagggaatatcctgtcagtgtggaaaggctggctagggatttgggcacaggggaattatggaatatacctcctacagtatgatactgctgaactctgatttggagtctcctctgagtttaagagcggagtttccagggcccaggatgatggtcctatatcctctctttgtttctggctgtcctcaggggtatttcacccttcaggcactcatgatacttcctgtgggttgaggcaaagataggtcttctgtcaggtaacccaaggtggcagggaagttgtaccttgatctcactttttccagtgtagaaactcagtcagagggaaattttccttgcacttggtgccagacagatttggtggagctgcgtcattgatataggagtctgattatcttaccatctgctcagagttttttttaatacttctctgtggccctgggaactgtctcattctcattttaattctgggatattgctggtgataatcttggcattatatttttgtttttggttttcagtggggggagggggtggtgaaaccagcttgcttctgtgccaccattttggagaagaatctgcctatatttactcaattstgacatacacattgttttttatagtaggaatgca

SEQ ID NO: 4091 - DNA, 624 bp, Homo sapiens
aatagatgctttccacttcactgcagtctctggagacacaaacgcttgtccacaccccagcatgaatccaagctgaggttcagcacaattagttatttgtttcctctaacatctgaaccttgtgagattcagccacctcccgggaaccagccgtctgccaatgaggcatgaataaaacagagarggttccagctggcatcacctgctgtgttttgccttattgctctacacacatttctagacttctgaaatccaggggcctctctctagaggacgcatgccacatgggctgggtctctgagaccatgattctgattttgacttttttattttttgagcctcagcctgactcaggcattagacaatggatgggagaccacaatcctcagattcttgcctggctctgacccctggccaccctcacattcaaaccctttcctgatcagccccttacatgttattaatcttcagatcataaaaatatctcgtttaagagcccatcttttatgagaacctatactctgccaagatttctctcttgtcctgtaatatggccgtttggattcattttcattatacagctataagctatggtattgttgaggtttcactgcttgcctttcc

SEQ ID NO: 4092 - DNA, 619 bp, Homo sapiens
aaagagttctttaagtggggataatctgaagagcccttaagaactccctactccaaatagtatttcccatgttgactgaaattcttcattttgtttcactgcttcagaactgatcgatctgtgatcatctcaccataactgcagaggcagttatagcatagtatagtaattagagcgtgaattctgaaatcagattgccttgttcaccctggacttcaccacaaattgttcatgtgtcttaataattactaagaattacattgacggccgggcgcggtggctcacgcctgtaatcccagcactttgggaggccgaggcgggtggatcatgaggtcaggagatcgagaccatcctggctaacaaggtgaaaccccgtctctactaaaaatacaaaaaaaattagccgggcgcggtggcgggcgcctgtagtcccagctactcgggaggctgaggcaggagaatggcgtgaacccgggaagcggagcttgcagtgagccragattgcgccactgcagtccgcagtcccgcctgggcgacagagcgagactccgtctcaaaaaaaaaaaaaaaaaaaaaagaattacattgactgagcatgtaatcatgtagcaaggatggg

SEQ ID NO: 4093 - DNA, 619 bp, Homo sapiens
aaagagttctttaagtggggataatctgaagagcccttaagaactccctactccaaatagtatttcccatgttgactgaaattcttcattttgtttcactgcttcagaactgatcgatctgtgatcatctcaccataactgcagaggcagttatagcatagtatagtaattagagcgtgaattctgaaatcagattgccttgttcaccctggacttcaccacaaattgttcatgtgtcttaataattactaagaattacattgacggccgggcgcggtggctcacgcctgtaatcccagcactttgggaggccgaggcgggtggatcatgaggtcaggagatcgagaccatcctggctaacaaggtgaaaccccgtctctactaaaaatacaaaaaaaattagccgggcgcggtggcgggcgcctgtagtcccagctactcgggaggctgaggcaggagaatggcgtgaacccgggaagcggagcttgcagtgagccaagattgcgccactgcagtccgcagtcccgcctgggcgacagagcgagactccgtctcaaaaaaaaaaaaaaaaaaaaaagaattacattgactgarcatgtaatcatgtagcaaggatggg

SEQ ID NO: 4094 - DNA, 631 bp, Homo sapiens
tccccgctcaccaactatctctcaaaccatttgtcttcattggaccagaatcttctctcttgcagcttattgattagttctcttccctccctctttcttccattctccctttttcctcttttcttccatctaccaatatttagtaagcacctactctgtgccaggtcctgtgctaagtgctgggaagacagcagtgaataaaacagacacagtatgagccactctcaagaaacacacccgtctagagtaggagatagtcatggggaaaagcaattgcaatgcaacataataggagcacatacacagactagccttagaaaatctggacgcgtcgctggaggtgacaccaaaaccaagacctgaagcacaaccaggagagtgccaaattttacagtaaattccctcacaccagagaactgagtgcattggtgaacacaattttctgrttaactgaaataactcaagtatctgacctacacattttctatttcctcccataatctaaccttatttgcacttctctctagattaccttttgcaatctccaatcagtgaccatgctgctaccccacagacttattccctcatgctctgcacctttgctcagctccttcagttgccttttctccat

SEQ ID NO: 4095 - DNA, 295 bp, Homo sapiens
cttcaccgccggacgtttctggaccctgggtgcatattgggtacagcgctggtcgtggggctcgggactggctctgtgtttgctttcattggaatacttgcctccaagcaaattactgaggctgctgtaaacctcagagaggtttgtactctctaaargcagaatcagctggcgttttctgtttttttccagtgctaccggtaaaagaaccaccaccgcagcttctaccaggaggagatcggcttcagcacacacggggacgcctcctccccacccttcctcgcagctcttcctg

SEQ ID NO: 4096 - DNA, 443 bp, Homo sapiens
tgttgattccttttctttttttttcgagatggaatctcgctctgtggcccagcctggagtgcagtggtgcaatcttggctcactgcaacctccgcctcctgggttcaagcgattctcctgcctcagcctccctagtagctgggattacagggatgcaccactgtgcccagctaatttttgtatttttaggagagacggggtttctccgtgttggccasgatggtctccaactcctgaccttaggtgatttgcacatcttggcctcccaaagtgcaggaattacaggcgtaagccgcgcccggcaagtccttcttttcatgaaaccaaaccagaccccaacgttaagtataaaatacatgagaaatagagacatcaaataaatatttcgataatttcccactttcaaaatctcttcattcattccttccttccattcattcatt

SEQ ID NO: 4097 - DNA, 1075 bp, Homo sapiens
atggaaacaggaatatttagatggtattctgcagaatactagataactaaaattttctgagtgtttattttgtgccaggcactaagatacgttctttattgtcattatcttgttgaatcctgataagaacctatgggtaggtgctgttcttatttgcagtctatagatgagaaaactgaggctgaaggaagttcatgtgtttaaagacacrttaggtgttgagcccgtatctgtgtgatatcatgccttcaataattctttattggaagtctactgtttgccagataagcagtaaggggaacacagaaggggataacatggctgggtggagactgaaagggaccatcgtacaaagtaaagctagagaaacgtggatggccagaccatgcaaaaccttctaggccatgttaaagagtttgttctgactcaggagcagtgaaagccactgtaaggttttaactgtggggcatgaaatatcttcaactctgccttttgaaggcactttctgtggagtgtacataggaaactagttaaaaggccacctcagtgatcatgcaggggatgaggctaacttgggctggggtgacgttggtttgtggtttctgcagctggatgaatggtgctgtccttcatggagacaggaaactgcaagagaagcagctcagaggggaaatcaagagttgaattttggaaatgtggacttttagctttctctaagagttcccagaagagaagttaagtaagaaattggagactcatgccattaagttctaaaatattttcacgtatcttatctttgataattttgttgtcttcgttttctctgttctctgttgctgggaattttgtggataatgtctaagagcttcgagtttgatcttctaattttatttttaaaagttattttttggctatcttccatatctgtatttttatttgagtttccagaaatattcaatgaaatagagcagaacttgtactaaattttattaatttcagttactgtacttttaattgccaaaaagtctttctcttcctgtgactattctttacttccttatgtcttggatttctt

SEQ ID NO: 4098 - DNA, 610 bp, Homo sapiens
actatggcccctcagtaattatgctataattctgttggagaaaacaattattttgcaagccctatattcagacacttgctttaaacttcctgaaaaagggaaaaccattccttttagctgagattattttgttctttgcatgtgttcaaaaatgactaatatttcctgttcattttttaaaaagagagaacacattatacacacataaacacatgtgcatagacaaacatgtgtctttatgctctgagaatcttcttaaatacactttagtcttgtcatttttattcataaaggataggttttatcagcttactgagtctgaaaagggatctcaagcattctaaccgtgcttcaagacaaatgtgtgagggttartagagctcttactttgtttgagaaagattcatgactgcatagtacaagtcaacctcattgtggataaaaataattgctttatatttacccattgaataaccttagcccagaatcaattcacataccttctcacttgtgacagaaacaccaaagaatcctaatgggccaaaacatcctaataatacaagtagtgagaatctgttgtcatactctgataattatatgtaactttcaa

SEQ ID NO: 4099 - DNA, 634 bp, Homo sapiens
aagaatctctgggattatattgtttaatcctcttgttttataaaaaaggaatctatgattcacagaggagaaatgagttggattttaattaaatgaatccaaatgaattcatgaaatgaataaaaaaattcaagttcttagaaattgaggagataattggtacattagctcctcaaaccttagtccatggtttctcaatctaagcattattgacattttggactggataattctttgttgtgtgtgtgggtggggtggagggggaagagttgttttgtgcattgtgggatgtttagtaccatccgtgggctctacctactagaagtcaatagcacactcctgcaagttatcagtggcaaatgaaggcaagaatgtttttagatattacaaagtgtccctgagggacaaaattgccactgcccttgaaaatcactataccctcttccaatccctttgtcttatggttgagaggactcagaaaactcgagagctttcctcaaagtcacatggggaattattggcattgctggtaccaacacttgaatctcatcttaactccttctagagtgcyctattaacaaaagcctgcaaatatgagccacaatttgatcagtaagttttgtaaaactgcata

SEQ ID NO: 4100 - DNA, 749 bp, Homo sapiens
aggcatggtggcagctgcctgtcatcccagctactcaggaggctgaggcagagaattgcttgaacccaggaggtggaggttgcagtgagccaagatcatgccactgcactccagcctggccaacagagcaagatcccatctaaaaataaataaatgaataaataagtaaaattcccaatcttacagaacttttgagataatttatgtggaagtacctaaaaccatgtcttggatttcattgatgacgcttacaccactgtcaccaacctgtccaacaacaaaggttgtatgtgtaaatctcattcctctccagccaaagggagaataaaattcaaatagacatccctgcctcttccttccaaacctaagatatgtatatgaaatgatcaacatttgctcacctgcagggctgttgactgaagcttacaaaaaaggaattgatttgtaagtctggatggttttatgttttgcattttaaaattttatttctttatgttttaaagttaaggtcattttttaaattcctgctctctccatttgtctctgtacatcccttggtaacttgcacagggcctagcacaaggaggtgttcaacaaatataastaacaaatatgagtcagtagagcacatataggggtctctgtctcctattttccaggcactgtattaggtcagggtgtgcagagataattaaagcaaggtttctcttctcaaggtcacagacataaatctaaagaaaaatatatgc

SEQ ID NO: 4101 - DNA, 1510 bp, Homo sapiens
acacacacaaataccctcacaaaaaccatatcctacattattcaamtcaatattgattagaattttgtaattcaagttctatgaaaatacttattaacatttcatcattttatacctcagataagcacacaatgcttttccaaactattcagttttgctgtggaacaaatatctttattaaatgaatattcatcaataatgaaacactaactatagtgtttgaatattttaaggttactaatgtactgctagtcaaaaatgttttagaaatccaaacttttgcaaatatgcctctattcacaacaaagtatttatatgtgaatgtcatgatatctgggattttctttaaaatactcctccagcacctctcccaaatagtggggaggatagatgaaacaagatccccaaaatgttataatttatcaaagccaaatgatggatacataggaatccattatactattctctctacttttgtgtatgttttcatttttccataataaaaacagattttaaaaaaaataatgccttgagctgggtgcagtagctcacacctgtaaccctagctacttgggaggctgagggtaaaggactgcttgagcctgagaatttgaggctgcagtgagctgattgtgctgccactgcactccagcctgggtaacagaataagatgctgtcttcaataaataaataaataaaatgactctacgctagtggcctgaaacatataaacgcataacaaatgtgtgttgaattaaagtgcataagaagaaacaataaacaaataataaagaaataaagctaataagtagaaacatttttaaatttcaatgaagactactgtaaccattgagaaattaaattatattcctgggtccctttagtgtttgtttcccttatacattatataatttttcaatcctattgccttattttgtgatcttaagatcacatcaaagggtgaaaggtggcttgtatatcatcaatgattaacatttacaaagtccccactatgtaaacacacagcactctgctggactccttttaatatataagacaatagcatggagtgctagccaatgagaaccgtctttatgagaccgcaggaagatataaaaaacaaaagtcattctcatatagaaaatgcatttcattacgtttgtgtttatcaccatgtgctctaattctcctatacttgttatcacttgctaactgtattaatccaaatgagctgctgccactatatgcaacatcaaaccacagtgacttaacccactatgtatcaacttttagaactaaatactacttttgagatgatctgtcattcacaactatgacttctcataatgttcataatgtattcattgttccaatgtaaccattcaatttttcctaactactcactaatatgtaaatatctatctaaggcagtcttttaagagtttcacttctcattaccatgcaaagattgaaaaagagggatatcccaaaaagaaaaatcattctctcc

SEQ ID NO: 4102 - DNA, 565 bp, Homo sapiens
ggttgtytcagaaactagctacaagaagaattattattacctaacaattctctctactgtggctgatgaaaataaacagaaaagttgttaaagatgctttccattgtgttttgtgtgtgtgtgtgtgtgtgtgtgtgtgtgtgtgtggcagggtttcaccctgtcacccaggctggagagcagcggtgggatctcagcacactgcaacctccacctttctggttcaagcaattctcctgcctcagcccctcgagtagctgggagcacctgtaaaggtgcatgccaccatgcccagctaatttttgtatttttggtagagatggggtttcaccatgttggccaggctggtctcaaactcctgacctcaagtgatctgcccaccttgacctcccaaagtgccaggattacaggtgtgagccaccatgcctggcctccattgtgttggtgatgtacattgaacatggttgttttgttgtcttgcttagcccattccattcgtccaagttctcctgtgttttctcctctgaggactctcatggatctgattttttagtggtttgtgatt

SEQ ID NO: 4103 - DNA, 571 bp, Homo sapiens
tgaggattttttttttttgagataagagtcttgctctgtcgtccaggctggagtgcaatggtgtaatttaggctcaccacaacctccgcctcatgggttcaagctattctcgtgactcagcctcccaagtagctgggactacaagcccgcaccatcacgcctggctaattttttatatttttagtacaagtacatacggggttttgccatgttggccaggcttgtcccgaactcctgacctcaggtgatctgcccrccttggcctcccaaagtgctgggattacaggcataagccactgtgccagcttttttttttttttaattaagagagtcttgctctgttgcccaggcatgagtgcagtggcatgatcttagctcactggaccctcaaactcctacacttaggtgatcctcccgcctcagcctcccaaaatgctgggattacaggtgtgagccaccacacttggccacatctgaggttttgaatttgttagagaaagcttctgaaaccctaaagcagacaccaacgattctgtaaaattaactcaggccgttttaatgtaagacaccg

SEQ ID NO: 4104 - DNA, 1221 bp, Homo sapiens
aagtgggctggatcagttggatacaaggtgactgttctaaaataaaatgaaaaacagcataatctcgaatttgtaggcaacatgtgagacccagcaaatggaactttttgtttgtttgtttgagacggagtctcgctttgttgccaggccggagtgcagtggcacgatctcggctcactgcaacttccacctcccaggttcaagcaattctcctgccagtagctgggactacaggcacctgccaccatgcccagctgtgtttttttttttttttttggagacggaatcttgctgtgtcgcccaggctgaagtgcagtggygtgatctcggctcactgcaagctccgcctcccaggttcacgccattctcctgcctcagcctccagagtagctgggactacaggcgcccgccaccactcctggctaattttttgtatttttggtagagatggggtttcaccgtgttagccaggatggtcttgatctcttaacctcttgatcccccttcttggcctcccaaagtgctggaattacaggtgtgagccaccgctcccagccgcaaatggaacttttgcaggtggtttggccattagccgtgtacatgcttagagtgtgtttaggctagtggacaggatgttctctgtgtgtactgtgtaaccttgaggctttgcgtctatttctatttccctagaaatgaaatctaaaacaggctgctttccttccccctagctttccaaacaaaagtaaggcttgtagatgtgaactagactgttgcaaagttctggagaggatggctgtggtttgggatttgatttttggtaggcttttttttttttttaattgttagaacttgagtgtgataaatggcttcttttttttttttaagtgggaagaaaatacaagatcattaaccacttgtgcatattctatttcaaatggcttagaaatttaaagcaaacttgttaaagtttgtagaagctgagttgttgatttctgtggtggataaaagccagtgctgtatctggaaactgttttcctgtttttcttagataccccttgaatcggatctgtttaatggaagaggatttttctgttaagctggttataatgccggttaaactttgtgtttaggatgttaaagtcctggaatgaatataattacctgcctatataaaaaaagctgaagtcatttgatgaaaagttaacaagtgcaggcatgtga

SEQ ID NO: 4105 - DNA, 1221 bp, Homo sapiens
aagtgggctggatcagttggatacaaggtgactgttctaaaataaaatgaaaaacagcataatctcgaatttgtaggcaacatgtgagacccagcaaatggaactttttgtttgtttgtttgagacggagtctcgctttgttgccaggccggagtgcagtggcacgatctcggctcactgcaacttccacctcccaggttcaagcaattctcctgccagtagctgggactacaggcacctgccaccatgcccagctgtgtttttttttttttttttggagacggaatcttgctgtgtcgcccaggctgaagtgcagtggtgtgatctcggctcactgcaagctccgcctcccaggttcacgccattctcctgcctcagcctccagagtagctgggactacaggcgcccgccaccactcctggctaattttttgtatttttgrtagagatggggtttcaccgtgttagccaggatggtcttgatctcttaacctcttgatcccccttcttggcctcccaaagtgctggaattacaggtgtgagccaccgctcccagccgcaaatggaacttttgcaggtggtttggccattagccgtgtacatgcttagagtgtgtttaggctagtggacaggatgttctctgtgtgtactgtgtaaccttgaggctttgcgtctatttctatttccctagaaatgaaatctaaaacaggctgctttccttccccctagctttccaaacaaaagtaaggcttgtagatgtgaactagactgttgcaaagttctggagaggatggctgtggtttgggatttgatttttggtaggcttttttttttttttaattgttagaacttgagtgtgataaatggcttcttttttttttttaagtgggaagaaaatacaagatcattaaccacttgtgcatattctatttcaaatggcttagaaatttaaagcaaacttgttaaagtttgtagaagctgagttgttgatttctgtggtggataaaagccagtgctgtatctggaaactgttttcctgtttttcttagataccccttgaatcggatctgtttaatggaagaggatttttctgttaagctggttataatgccggttaaactttgtgtttaggatgttaaagtcctggaatgaatataattacctgcctatataaaaaaagctgaagtcatttgatgaaaagttaacaagtgcaggcatgtga

SEQ ID NO: 4106 - DNA, 1221 bp, Homo sapiens
aagtgggctggatcagttggatacaaggtgactgttctaaaataaaatgaaaaacagcataatctcgaatttgtaggcaacatgtgagacccagcaaatggaactttttgtttgtttgtttgagacggagtctcgctttgttgccaggccggagtgcagtggcacgatctcggctcactgcaacttccacctcccaggttcaagcaattctcctgccagtagctgggactacaggcacctgccaccatgcccagctgtgtttttttttttttttttggagacggaatcttgctgtgtcgcccaggctgaagtgcagtggtgtgatctcggctcactgcaagctccgcctcccaggttcacgccattctcctgcctcagcctccagagtagctgggactacaggcgcccgccaccactcctggctaattttttgtatttttggtagagatggggtttcaccgtgttagccaggatggtcttgatctcttaacctcttgatcccccttcttggcctcccaaagtgctggaattacaggtgtgagccaccgctcccagccgcaaatggaacttttgcaggtggtttggccattagccgtgtacatgcttagagtgtgtttaggctagtggacaggatgttctctgtgtgtactgtgtaaccttgaggctttgcgtctatttctatttccctagaaatgaaatctaaaacaggctgctttccttccccctagctttccaaacaaaagtaaggcttgtagatgtgaactagactgttgcaaagttctggagaggatggctgtggtttgggatttgatttttggtaggcttttttttttttttaattgttagaacttgagtgtgataaatggcttcttttttttttttaagtgggaagaaaatacaagatcattaaccacttgtgcatattctatttcaaatggcttagaaatttaaagcaaacttgttaaagtttgtagaagctgagttgttgatttctgtggtggataaaagccagtgctgtatctggaaactgttttcctrtttttcttagataccccttgaatcggatctgtttaatggaagaggatttttctgttaagctggttataatgccggttaaactttgtgtttaggatgttaaagtcctggaatgaatataattacctgcctatataaaaaaagctgaagtcatttgatgaaaagttaacaagtgcaggcatgtga

SEQ ID NO: 4107 - DNA, 1221 bp, Homo sapiens
aagtgggctggatcagttggatacaaggtgactgttctaaaataaaatgaaaaacagcataatctcgaatttgtaggcaacatgtgagacccagcaaatggaactttttgtttgtttgtttgagacggagtctcgctttgttgccaggccggagtgcagtggcacgatctcggctcactgcaacttccacctcccaggttcaagcaattctcctgccagtagctgggactacaggcacctgccaccatgcccagctgtgtttttttttttttttttggagacggaatcttgctgtgtcgcccaggctgaagtgcagtggtgtgatctcggctcactgcaagctccgcctcccaggttcacgccattctcctgcctcagcctccagagtagctgggactacaggcgcccgccaccactcctggctaattttttgtatttttggtagagatggggtttcaccgtgttagccaggatggtcttgatctcttaacctcttgatcccccttcttggcctcccaaagtgctggaattacaggtgtgagccaccgctcccagccgcaaatggaacttttgcaggtggtttggccattagccgtgtacatgcttagagtgtgtttaggctagtggacaggatgttctctgtgtgtactgtgtaaccttgaggctttgcgtctatttctatttccctagaaatgaaatctaaaacaggctgctttccttccccctagctttccaaacaaaagtaaggcttgtagatgtgaactagactgttgcaaagttctggagaggatggctgtggtttgggatttgatttttggtaggcttttttttttttttaattgttagaacttgagtgtgataaatggcttcttttttttttttaagtgggaagaaaatacaagatcattaaccacttgtgcatattctatttcaaatggcttagaaatttaaagcaaacttgttaaagtttgtagaagctgagttgttgatttctgtggtggataaaagccagtgctgtatctggaaactgttttcctgtttttcttagataccccttgaatcggatctgtttaatggaagaggatttttctgttaagctggttataatgccggttaaactttgtgtttaggatgttaragtcctggaatgaatataattacctgcctatataaaaaaagctgaagtcatttgatgaaaagttaacaagtgcaggcatgtga

SEQ ID NO: 4108 - DNA, 1221 bp, Homo sapiens
aagtgggctggatcagttggatacaaggtgactgttctaaaataaaatgaaaaacagcataatctcgaatttgtaggcaacatgtgagacccagcaaatggaactttttgtttgtttgtttgagacggagtctcgctttgttgccaggccggagtgcagtggcacgatctcggctcactgcaacttccacctcccaggttcaagcaattctcctgccagtagctgggactacaggcacctgccaccatgcccagctgtgtttttttttttttttttggagacggaatcttgctgtgtcgcccaggctgaagtgcagtggtgtgatctcggctcactgcaagctccgcctcccaggttcacgccattctcctgcctcagcctccagagtagctgggactacaggcgcccgccaccactcctggctaattttttgtatttttggtagagatggggtttcaccgtgttagccaggatggtcttgatctcttaacctcttgatcccccttcttggcctcccaaagtgctggaattacaggtgtgagccaccgctcccagccgcaaatggaacttttgcaggtggtttggccattagccgtgtacatgcttagagtgtgtttaggctagtggacaggatgttctctgtgtgtactgtgtaaccttgaggctttgcgtctatttctatttccctagaaatgaaatctaaaacaggctgctttccttccccctagctttccaaacaaaagtaaggcttgtagatgtgaactagactgttgcaaagttctggagaggatggctgtggtttgggatttgatttttggtaggcttttttttttttttaattgttagaacttgagtgtgataaatggcttcttttttttttttaagtgggaagaaaatacaagatcattaaccacttgtgcatattctatttcaaatggcttagaaatttaaagcaaacttgttaaagtttgtagaagctgagttgttgatttctgtggtggataaaagccagtgctgtatctggaaactgttttcctgtttttcttagataccccttgaatcggatctgtttaatggaagaggatttttctgttaagctggttataatgccggttaaactttgtgtttaggatgttaaagtcctggaatgaatataattacctgcctatataaaaaaagctgaagtcatttgaygaaaagttaacaagtgcaggcatgtga

SEQ ID NO: 4109 - DNA, 1262 bp, Homo sapiens
cccaataatttcccagtgattttcccatttatgggggataagatgagaaaatataaatggatctctgagaacccaggtttcagtatccttgaaacataatatgcagcattgtaatcagtggtgatatccccgtgaaataatactcttgtgctggcaaagttactatgcttggaaagtatacaatcaaaattcaaactggcctgggaaacagtggaggcaagtaatttagtaatgagaaaaagatcagtatttgaaacataacacagtcttctccctagcaaagtcaaacaataacgcaaacctttcttttttctagtcagcccattatcctactgacatgtacagttatgtgcctggaactggtcagaaacaagctagaagagacatatccaaagagattcttagaggctccctttgcacttttatttgcttcccagcacctcctgactgargaagaaataatacaaggccttttcccaagggcatgttcccaaaagggccactgtttctttcaggttatttggaggcacagggatattgccttgaatcctgtcaaaatctacattcagattcctgaatttcacccagtttttaaaaaatgctatagtattgggaagaaactcaactccttcaaattataactcttaaaaaaatgaaagctggcggggcatggtggctcatgcctattatcccagtactttggaaggctgagaagggtggatcatctgaggtcagggggagtttgagaccagtctggccaactgaaaccctgtctctactaaaaatacaaaaatcagttgggcatggtagtgcatgcctgtaatcccagctactcgggaggctgaggctactcgggatggctggaatccgggagcggaggttgcagggagctgagatcacgccactgcactccagcctgggtgacagagcgagactccgtctcaaaaaaaaaaaaaaaaaaaaaaaaagctaagtcaaagatgtttctggtttttcagtgtcatctgggggtttcttctgttgtaactccaagagccacaattaattcccagaaatgtgaaaaaaggctcacaggtttcgaagctaaagtaaaaaacaatcactaaggctctgacttttctgatatcctactttaaggcaaaggtaaaatatgattgtaataatgtaatagcaagcatagtgcatttgaagagctatggtttttaaattgagttggcatgtattatttcgttcaaatttcataccatctccatcaaacagca

SEQ ID NO: 4110 - DNA, 1262 bp, Homo sapiens
cccaataatttcccagtgattttcccatttatgggggataagatgagaaaatataaatggatctctgagaacccaggtttcagtatccttgaaacataatatgcagcattgtaatcagtggtgatatccccgtgaaataatactcttgtgctggcaaagttactatgcttggaaagtatacaatcaaaattcaaactggcctgggaaacagtggaggcaagtaatttagtaatgagaaaaagatcagtatttgaaacataacacagtcttctccctagcaaagtcaaacaataacgcaaacctttcttttttctagtcagcccattatcctactgacatgtacagttatgtgcctggaactggtcagaaacaagctagaagagacatatccaaagagattcttagaggctccctttgcacttttatttgcttcccagcacctcctgactgaggaagaaataatacaaggccttttcccaagggcatgttcccaaaagggccactgtttctttcaggttatttggaggcacagggatattgccttgaatcctgtcaaaatctacattcagattcctgaatttcacccagtttttaaaaaatgctatagtattgggaagaaactcaactccttcaaattataactcttaaaaaaatgaaagctggcggggcatggtggctcatgcctattatcccagtactttggaaggctgagaagggtggatcatctgaggtcagggggagtttgagaccagtctggccaactgaaaccctgtctctactaaaaatacaaaaatcagttgggcatggtagygcatgcctgtaatcccagctactcgggaggctgaggctactcgggatggctggaatccgggagcggaggttgcagggagctgagatcacgccactgcactccagcctgggtgacagagcgagactccgtctcaaaaaaaaaaaaaaaaaaaaaaaaagctaagtcaaagatgtttctggtttttcagtgtcatctgggggtttcttctgttgtaactccaagagccacaattaattcccagaaatgtgaaaaaaggctcacaggtttcgaagctaaagtaaaaaacaatcactaaggctctgacttttctgatatcctactttaaggcaaaggtaaaatatgattgtaataatgtaatagcaagcatagtgcatttgaagagctatggtttttaaattgagttggcatgtattatttcgttcaaatttcataccatctccatcaaacagca

SEQ ID NO: 4111 - DNA, 1262 bp, Homo sapiens
cccaataatttcccagtgattttcccatttatgggggataagatgagaaaatataaatggatctctgagaacccaggtttcagtatccttgaaacataatatgcagcattgtaatcagtggtgatatccccgtgaaataatactcttgtgctggcaaagttactatgcttggaaagtatacaatcaaaattcaaactggcctgggaaacagtggaggcaagtaatttagtaatgagaaaaagatcagtatttgaaacataacacagtcttctccctagcaaagtcaaacaataacgcaaacctttcttttttctagtcagcccattatcctactgacatgtacagttatgtgcctggaactggtcagaaacaagctagaagagacatatccaaagagattcttagaggctccctttgcacttttatttgcttcccagcacctcctgactgaggaagaaataatacaaggccttttcccaagggcatgttcccaaaagggccactgtttctttcaggttatttggaggcacagggatattgccttgaatcctgtcaaaatctacattcagattcctgaatttcacccagtttttaaaaaatgctatagtattgggaagaaactcaactccttcaaattataactcttaaaaaaatgaaagctggcggggcatggtggctcatgcctattatcccagtactttggaaggctgagaagggtggatcatctgaggtcagggggagtttgagaccagtctggccaactgaaaccctgtctctactaaaaatacaaaaatcagttgggcatggtagtgcatgcctgtaatcccagctactcgggaggctgaggctactcgggatggctggaatccgggagcggaggttgcagggagctgagatcacgccactgcactccagcctgggtgacagagcgagactccgtctcaaaaaaaaaaaaaaaaaaaaaaaaagcwaagtcaaagatgtttctggtttttcagtgtcatctgggggtttcttctgttgtaactccaagagccacaattaattcccagaaatgtgaaaaaaggctcacaggtttcgaagctaaagtaaaaaacaatcactaaggctctgacttttctgatatcctactttaaggcaaaggtaaaatatgattgtaataatgtaatagcaagcatagtgcatttgaagagctatggtttttaaattgagttggcatgtattatttcgttcaaatttcataccatctccatcaaacagca

SEQ ID NO: 4112 - DNA, 1262 bp, Homo sapiens
cccaataatttcccagtgattttcccatttatgggggataagatgagaaaatataaatggatctctgagaacccaggtttcagtatccttgaaacataatatgcagcattgtaatcagtggtgatatccccgtgaaataatactcttgtgctggcaaagttactatgcttggaaagtatacaatcaaaattcaaactggcctgggaaacagtggaggcaagtaatttagtaatgagaaaaagatcagtatttgaaacataacacagtcttctccctagcaaagtcaaacaataacgcaaacctttcttttttctagtcagcccattatcctactgacatgtacagttatgtgcctggaactggtcagaaacaagctagaagagacatatccaaagagattcttagaggctccctttgcacttttatttgcttcccagcacctcctgactgaggaagaaataatacaaggccttttcccaagggcatgttcccaaaagggccactgtttctttcaggttatttggaggcacagggatattgccttgaatcctgtcaaaatctacattcagattcctgaatttcacccagtttttaaaaaatgctatagtattgggaagaaactcaactccttcaaattataactcttaaaaaaatgaaagctggcggggcatggtggctcatgcctattatcccagtactttggaaggctgagaagggtggatcatctgaggtcagggggagtttgagaccagtctggccaactgaaaccctgtctctactaaaaatacaaaaatcagttgggcatggtagtgcatgcctgtaatcccagctactcgggaggctgaggctactcgggatggctggaatccgggagcggaggttgcagggagctgagatcacgccactgcactccagcctgggtgacagagcgagactccgtctcaaaaaaaaaaaaaaaaaaaaaaaaagctaagtcaaagatgtttctggtttttcagtgtcatctgggggtttcttctgttgtaactccaagagccacaattaattcccagaaatgtgaaaaaaggctcacaggtttcgaagctraagtaaaaaacaatcactaaggctctgacttttctgatatcctactttaaggcaaaggtaaaatatgattgtaataatgtaatagcaagcatagtgcatttgaagagctatggtttttaaattgagttggcatgtattatttcgttcaaatttcataccatctccatcaaacagca

SEQ ID NO: 4113 - DNA, 631 bp, Homo sapiens
tgcagtatttctggaagatagtatgcatatgtgggatgtaaaatatatcttttaagacattttcagtctaaatagacttcccaatctctttcactaagcccatggatcagcaggaatgtttttggagtgttcccacagaatcatcatttcatttatgatggcattacatttttagtcagtcttcaaaaactcatctttgaaattgtgtgaaaaaaatataagcaaatatctttcccccmaaatcctctaatatttcattagccttacagaatgagttaacatatttagcaaacttccaacatttttctcatgttacactggcttataatgttaaaagggacttaggaaaaaagagtttgatgtaccacaggtggactgcaaatttaaatggtaaaataactgagaatattgtttattaagattatagtaggggaaaatatcctagctctatccttgaattattgtgattttacggaaacaaaatgttttatctttagtcacttagaatacaatactttctgatagttttaatctggtttattttccatatgggttaagcattatgtgtatgaaatagttttcccaaactcttttctgggtcaccttctgcctcaagacaggaaccccagag

SEQ ID NO: 4114 - DNA, 1379 bp, Homo sapiens
  misc_feature (1)...(1379): n = A,T,C or G
cagaatcacttgcaggatttgttaaaatcatagaatttagggccttatcccaagaatctctgttttagcacatctgggttggggcttgatagtttgcattttcctaagtttccaggtcatgccgatgctattgagccggagaccaccctttggaaccacctcttatactatgttcattttataatacacatcatcatttcttcttgcttatgcacccaaaccctctaacatcataattgtctcctatcaacctcacaaccactcacatttgcaactgtaaataggcaggcctggctttgacgcagggaacaacgctttcttgtaagacaaacatcgtcagtaatggatgtgcgcactytgtcttcaccccaacactactttcaaggtctcctatgaggtgaggtatccttcattcatctgttgaacagcaaatcttttggattcatattttattgtagatgcaaacaaacaatacaagatgataattgttgtaacagaaaaatgtgaagagtgtcaaataagcaaagaaggtaaaacagaagtcttgaagttcaaagactggagtagcacttgacattatgcttagggaatggagaatgggtggggtttccataggttgacaaattgagaaggaaatttgtgaataaaatgcctaaaatgtaatttagtggttcatttcactcatttactcattcatttattcatcagcagatctattgactcccccggccaaattttcactagataacaaactctaaggcattaggcatgaaaaataactgagcacatatttccgctttcagtgacagggcaaacagcattgtgagtgttttaatggtaatgtggccagatttcctttagaacactgtggaagagtgattaatttgtcctgaggaaattggcatatcttcctaggagggaagagttagttggagaatatactaccttggctttaaatcattaactatatttacaatcggagtatgtagctaacatgagctaattttgcaacaaataaattcacacatgtattaggactcaaatgaaatctcatggttattcttgttagacaacactaagctttctctgccagggtgatacatggatccaggctccttccatggtgtagttctgggggccttctcgctncacaccacctgtgtccacccagcagaatgagaaatgacaatttagagcggcagtggcaggtgcctatgagctgttcggttcttctgctcaccttacgttaactagaaatcagtcgtgtggctacaatgaactgtaagagagaattggaaatgtagtgtagttgatccagggagaagaagaaatccaggatttgagaaaaggatacttggtataatagtaggtgcaaatgc

SEQ ID NO: 4115 - DNA, 1379 bp, Homo sapiens
  misc_feature (1)...(1379): n = A,T,C or G
cagaatcacttgcaggatttgttaaaatcatagaatttagggccttatcccaagaatctctgttttagcacatctgggttggggcttgatagtttgcattttcctaagtttccaggtcatgccgatgctattgagccggagaccaccctttggaaccacctcttatactatgttcattttataatacacatcatcatttcttcttgcttatgcacccaaaccctctaacatcataattgtctcctatcaacctcacaaccactcacatttgcaactgtaaataggcaggcctggctttgacgcagggaacaacgctttcttgtaagacaaacatcgtcagtaatggatgtgcgcactctgtcttcaccccaacactactttcaaggtctcctatgaggtgaggtatccttcattcatstgttgaacagcaaatcttttggattcatattttattgtagatgcaaacaaacaatacaagatgataattgttgtaacagaaaaatgtgaagagtgtcaaataagcaaagaaggtaaaacagaagtcttgaagttcaaagactggagtagcacttgacattatgcttagggaatggagaatgggtggggtttccataggttgacaaattgagaaggaaatttgtgaataaaatgcctaaaatgtaatttagtggttcatttcactcatttactcattcatttattcatcagcagatctattgactcccccggccaaattttcactagataacaaactctaaggcattaggcatgaaaaataactgagcacatatttccgctttcagtgacagggcaaacagcattgtgagtgttttaatggtaatgtggccagatttcctttagaacactgtggaagagtgattaatttgtcctgaggaaattggcatatcttcctaggagggaagagttagttggagaatatactaccttggctttaaatcattaactatatttacaatcggagtatgtagctaacatgagctaattttgcaacaaataaattcacacatgtattaggactcaaatgaaatctcatggttattcttgttagacaacactaagctttctctgccagggtgatacatggatccaggctccttccatggtgtagttctgggggccttctcgctncacaccacctgtgtccacccagcagaatgagaaatgacaatttagagcggcagtggcaggtgcctatgagctgttcggttcttctgctcaccttacgttaactagaaatcagtcgtgtggctacaatgaactgtaagagagaattggaaatgtagtgtagttgatccagggagaagaagaaatccaggatttgagaaaaggatacttggtataatagtaggtgcaaatgc

SEQ ID NO: 4116 - DNA, 1379 bp, Homo sapiens
  misc_feature (1)...(1379): n = A,T,C or G
cagaatcacttgcaggatttgttaaaatcatagaatttagggccttatcccaagaatctctgttttagcacatctgggttggggcttgatagtttgcattttcctaagtttccaggtcatgccgatgctattgagccggagaccaccctttggaaccacctcttatactatgttcattttataatacacatcatcatttcttcttgcttatgcacccaaaccctctaacatcataattgtctcctatcaacctcacaaccactcacatttgcaactgtaaataggcaggcctggctttgacgcagggaacaacgctttcttgtaagacaaacatcgtcagtaatggatgtgcgcactctgtcttcaccccaacactactttcaaggtctcctatgaggtgaggtatccttcattcatctgttgaacagcamatcttttggattcatattttattgtagatgcaaacaaacaatacaagatgataattgttgtaacagaaaaatgtgaagagtgtcaaataagcaaagaaggtaaaacagaagtcttgaagttcaaagactggagtagcacttgacattatgcttagggaatggagaatgggtggggtttccataggttgacaaattgagaaggaaatttgtgaataaaatgcctaaaatgtaatttagtggttcatttcactcatttactcattcatttattcatcagcagatctattgactcccccggccaaattttcactagataacaaactctaaggcattaggcatgaaaaataactgagcacatatttccgctttcagtgacagggcaaacagcattgtgagtgttttaatggtaatgtggccagatttcctttagaacactgtggaagagtgattaatttgtcctgaggaaattggcatatcttcctaggagggaagagttagttggagaatatactaccttggctttaaatcattaactatatttacaatcggagtatgtagctaacatgagctaattttgcaacaaataaattcacacatgtattaggactcaaatgaaatctcatggttattcttgttagacaacactaagctttctctgccagggtgatacatggatccaggctccttccatggtgtagttctgggggccttctcgctncacaccacctgtgtccacccagcagaatgagaaatgacaatttagagcggcagtggcaggtgcctatgagctgttcggttcttctgctcaccttacgttaactagaaatcagtcgtgtggctacaatgaactgtaagagagaattggaaatgtagtgtagttgatccagggagaagaagaaatccaggatttgagaaaaggatacttggtataatagtaggtgcaaatgc

SEQ ID NO: 4117 - DNA, 1379 bp, Homo sapiens
  misc_feature (1)...(1379): n = A,T,C or G
cagaatcacttgcaggatttgttaaaatcatagaatttagggccttatcccaagaatctctgttttagcacatctgggttggggcttgatagtttgcattttcctaagtttccaggtcatgccgatgctattgagccggagaccaccctttggaaccacctcttatactatgttcattttataatacacatcatcatttcttcttgcttatgcacccaaaccctctaacatcataattgtctcctatcaacctcacaaccactcacatttgcaactgtaaataggcaggcctggctttgacgcagggaacaacgctttcttgtaagacaaacatcgtcagtaatggatgtgcgcactctgtcttcaccccaacactactttcaaggtctcctatgaggtgaggtatccttcattcatctgttgaacagcaaatcttttggattcatattttattgtagatgcaaacaaacaatacaagatgataattgttgtaacagaaaaatgtgaagagtgtcaaataagcaaagaaggtaaaacagaagtcttgaagttcaaagactggagtagcacttgacattatgcttagggaatggagaatgggtggggtttccataggttgacaaattgagaaggaaatttgtgaataaaatgcctaaaatgtaatttagtggttcatttcactcatttactcattcatttattcatcagcagatctattgactcccccggccaaattttcactagataacaaactctaaggcattaggcatgaaaaataactgagcacatatttccgctttcagtgacagggcaaacagcattgtgagtgttttaatggtaatgtggccagatttcctttagaacactgtggaagagtgattaatttgtcctgaggaaattggcatatcttcctaggagggaagagttagttggagaatatactaccttggctttaaatcattaactatatttacaatcggagtatgtagctaacatgagctaattttgcaacaaataaattcacacatgtattaggactcaaatgaaatctcayggttattcttgttagacaacactaagctttctctgccagggtgatacatggatccaggctccttccatggtgtagttctgggggccttctcgctncacaccacctgtgtccacccagcagaatgagaaatgacaatttagagcggcagtggcaggtgcctatgagctgttcggttcttctgctcaccttacgttaactagaaatcagtcgtgtggctacaatgaactgtaagagagaattggaaatgtagtgtagttgatccagggagaagaagaaatccaggatttgagaaaaggatacttggtataatagtaggtgcaaatgc

SEQ ID NO: 4118 - DNA, 1379 bp, Homo sapiens
  misc_feature (1)...(1379): n = A,T,C or G
cagaatcacttgcaggatttgttaaaatcatagaatttagggccttatcccaagaatctctgttttagcacatctgggttggggcttgatagtttgcattttcctaagtttccaggtcatgccgatgctattgagccggagaccaccctttggaaccacctcttatactatgttcattttataatacacatcatcatttcttcttgcttatgcacccaaaccctctaacatcataattgtctcctatcaacctcacaaccactcacatttgcaactgtaaataggcaggcctggctttgacgcagggaacaacgctttcttgtaagacaaacatcgtcagtaatggatgtgcgcactctgtcttcaccccaacactactttcaaggtctcctatgaggtgaggtatccttcattcatctgttgaacagcaaatcttttggattcatattttattgtagatgcaaacaaacaatacaagatgataattgttgtaacagaaaaatgtgaagagtgtcaaataagcaaagaaggtaaaacagaagtcttgaagttcaaagactggagtagcacttgacattatgcttagggaatggagaatgggtggggtttccataggttgacaaattgagaaggaaatttgtgaataaaatgcctaaaatgtaatttagtggttcatttcactcatttactcattcatttattcatcagcagatctattgactcccccggccaaattttcactagataacaaactctaaggcattaggcatgaaaaataactgagcacatatttccgctttcagtgacagggcaaacagcattgtgagtgttttaatggtaatgtggccagatttcctttagaacactgtggaagagtgattaatttgtcctgaggaaattggcatatcttcctaggagggaagagttagttggagaatatactaccttggctttaaatcattaactatatttacaatcggagtatgtagctaacatgagctaattttgcaacaaataaattcacacatgtattaggactcaaatgaaatctcatggttattcttgttagacaacactaagctttctctgccagggtgatacatggatccaggctccttccatggtgtagttctgggggccttctcgctncacaccacctgtgtccacccagcagaatgagaaatgacaatttagagcggcagtggcaggtgcctatgagctgttcggttcttctgctcaccttacgttaactagaaatcagtcgtgtggctacaaygaactgtaagagagaattggaaatgtagtgtagttgatccagggagaagaagaaatccaggatttgagaaaaggatacttggtataatagtaggtgcaaatgc

SEQ ID NO: 4119 - DNA, 1379 bp, Homo sapiens
  misc_feature (1)...(1379): n = A,T,C or G
cagaatcacttgcaggatttgttaaaatcatagaatttagggccttatcccaagaatctctgttttagcacatctgggttggggcttgatagtttgcattttcctaagtttccaggtcatgccgatgctattgagccggagaccaccctttggaaccacctcttatactatgttcattttataatacacatcatcatttcttcttgcttatgcacccaaaccctctaacatcataattgtctcctatcaacctcacaaccactcacatttgcaactgtaaataggcaggcctggctttgacgcagggaacaacgctttcttgtaagacaaacatcgtcagtaatggatgtgcgcactctgtcttcaccccaacactactttcaaggtctcctatgaggtgaggtatccttcattcatctgttgaacagcaaatcttttggattcatattttattgtagatgcaaacaaacaatacaagatgataattgttgtaacagaaaaatgtgaagagtgtcaaataagcaaagaaggtaaaacagaagtcttgaagttcaaagactggagtagcacttgacattatgcttagggaatggagaatgggtggggtttccataggttgacaaattgagaaggaaatttgtgaataaaatgcctaaaatgtaatttagtggttcatttcactcatttactcattcatttattcatcagcagatctattgactcccccggccaaattttcactagataacaaactctaaggcattaggcatgaaaaataactgagcacatatttccgctttcagtgacagggcaaacagcattgtgagtgttttaatggtaatgtggccagatttcctttagaacactgtggaagagtgattaatttgtcctgaggaaattggcatatcttcctaggagggaagagttagttggagaatatactaccttggctttaaatcattaactatatttacaatcggagtatgtagctaacatgagctaattttgcaacaaataaattcacacatgtattaggactcaaatgaaatctcatggttattcttgttagacaacactaagctttctctgccagggtgatacatggatccaggctccttccatggtgtagttctgggggccttctcgctncacaccacctgtgtccacccagcagaatgagaaatgacaatttagagcggcagtggcaggtgcctatgagctgttcggttcttctgctcaccttacgttaactagaaatcagtcgtgtggctacaatgaactgtaagasagaattggaaatgtagtgtagttgatccagggagaagaagaaatccaggatttgagaaaaggatacttggtataatagtaggtgcaaatgc

SEQ ID NO: 4120 - DNA, 1308 bp, Homo sapiens
catttctcttctcttatgtccaatattttttacttgttcatgagttttgatcaatgaagactaaaaatggtgcatcaataatatttggaaataatactaatattaaataagaaaatattaataaaattatattttaactgttttcatatactattatatattttataatatagagttataaagttaaaatgatacaagagaatttttataatattagattataattcttaactgaaatgagatattaaaagtatcatataagctatcttgaaagaaatcagtaaaaatggcatggaaactaataagggaagtaagtggaatgctgttgtgaacctccagatgaatattcaatttgttcaattttaatttcaatttaggagaaaaatcacattttttcttaatagacctttgttctatctccataaaaatwttagttctcattaaaattgaccgaatctaaaaatgaattaagaatgaggaatgatgtcagcaaaatagtgagataagctgcttcaagctcctggcccccacaaagacattttaaaaaacaagaagaaactgtcagaactcaccttgtcagagctctgagaaacagtcgaagacctacagcaaacactgaatagagaacaaggcagtggtggaaaagcttcttggtatttttttctcctcctcgcctgcctgctccacagctccactaaagttagaggaggagctcctgttcccagttgggaccatgggtccagtcttcaaatggagctaagcggaccttacaaattgctgtgtggcttgttctctctttctcagagctactataaggtctaatgcaaaatgtttgttgtctgactttgatgtcacacacaataactcttaaagatccatatttaagaaaataaaagctccagaaattaaagtaaaaatagaaaaaaaaggaccctatcaattaacccacataagagcccaacatatccacagtctctttgcaccaccgtctcacctctcatctgtcttcttcttaagctcactgtaatggttatgtttgtccttatgatgcagttctacttctcgtatgaaaggaacatgcggtaaattattttaggtaatgtcaccatgccttaggacactatggaaagtcattttacatttcttctcaaataatttacccacttcgggaaagcatatgctgcagcagttaaaattttcatttttaactcaaacttttcaaaacttctttatttatttaacctaaaactcatttagaaaagcaagttatcatgtgggggagaaataaggaaagttacatcctatgca

SEQ ID NO: 4121 - DNA, 1372 bp, Homo sapiens
tgcatgcacctgtaatcccagctacttgggagactgaggcaggagaactgtttgaacctgggagagggaggttgcagagctgagatcacattgtggcattccagcctggatgacacagcaagactccatctgaaaataatactaatagtaataataataataataataataataataataataaatatatgtaaaaagcatttgtttataatagggatccacaaactrctggtacctgtctcactgcctcattttggggaaaaaaaaaaaaaaaaagaaaagagaaaagaaaaaaaaagccctgttggaatcccactgtgggttttttctagatggtctttttcaatccacagactgagttgaacagttgcagtggcggctgcatggcccacaaaactgtacatatttactctctggtcctgcagagaaatcgtttgccagctcaagtactgactaagtttattatagccctcaggcaggaaaacaaaaacaaaaacaaaaaccactaaagaatagaagtaatctggtaaattagtaccctattaattatatttttatacatgagcactccaagatcagaaaagacaccatctttcaaagttctaattaccttttaagacaaactaactgtacatcaaactgcaaagtaagcaatatattctcaaggtagcaagagacatggatggattctttcattacaattcaatatgctgaagtattaaaatgatcataaaattaaatggtgctctttcctgggaaatgttttcctgacatagcacttgggtataatggaaaatctatctggaatgttattggatatatagaataatacacaaaggagaaactatatttcagaaccgaagggacagagcaacagtagcaccaagagaaaaatatttgttcttatgtacttgaagtactaagaaaagaagagtaaatgtaaaagaattcaaggcctgagatgaaggaattagagggtgcgcaaagttatgaaatcaggccaggcacagtggttcacccctgtaatcccagcactttgggaggccgaggcatacttcagcctgacgtcaggagttcaaaaccagcctggctaacatggcgaaaccccgcctctactaaaaatacaaaaaatagccagatgccgtggcatgtgcctctaatcccagctacttgggaggctgaggcaggagaatcacttgaacccgggaggcggaggttgcagtgagctgagattgcaccattgccctccagcctgggtgatagagtgagactccatctcaaaaaaaaaaaaaaaaaaaagttatgaaatcattttataaaatagagacttaccactctagtaacctttgtgactgtgtggtaatctcatgca

SEQ ID NO: 4122 - DNA, 1372 bp, Homo sapiens
tgcatgcacctgtaatcccagctacttgggagactgaggcaggagaactgtttgaacctgggagagggaggttgcagagctgagatcacattgtggcattccagcctggatgacacagcaagactccatctgaaaataatactaatagtaataataataataataataataataataataataaatatatgtaaaaagcatttgtttataatagggatccacaaactactggtacctgtctcactgcctcattttggggraaaaaaaaaaaaaaaagaaaagagaaaagaaaaaaaaagccctgttggaatcccactgtgggttttttctagatggtctttttcaatccacagactgagttgaacagttgcagtggcggctgcatggcccacaaaactgtacatatttactctctggtcctgcagagaaatcgtttgccagctcaagtactgactaagtttattatagccctcaggcaggaaaacaaaaacaaaaacaaaaaccactaaagaatagaagtaatctggtaaattagtaccctattaattatatttttatacatgagcactccaagatcagaaaagacaccatctttcaaagttctaattaccttttaagacaaactaactgtacatcaaactgcaaagtaagcaatatattctcaaggtagcaagagacatggatggattctttcattacaattcaatatgctgaagtattaaaatgatcataaaattaaatggtgctctttcctgggaaatgttttcctgacatagcacttgggtataatggaaaatctatctggaatgttattggatatatagaataatacacaaaggagaaactatatttcagaaccgaagggacagagcaacagtagcaccaagagaaaaatatttgttcttatgtacttgaagtactaagaaaagaagagtaaatgtaaaagaattcaaggcctgagatgaaggaattagagggtgcgcaaagttatgaaatcaggccaggcacagtggttcacccctgtaatcccagcactttgggaggccgaggcatacttcagcctgacgtcaggagttcaaaaccagcctggctaacatggcgaaaccccgcctctactaaaaatacaaaaaatagccagatgccgtggcatgtgcctctaatcccagctacttgggaggctgaggcaggagaatcacttgaacccgggaggcggaggttgcagtgagctgagattgcaccattgccctccagcctgggtgatagagtgagactccatctcaaaaaaaaaaaaaaaaaaaagttatgaaatcattttataaaatagagacttaccactctagtaacctttgtgactgtgtggtaatctcatgca

SEQ ID NO: 4123 - DNA, 1372 bp, Homo sapiens
tgcatgcacctgtaatcccagctacttgggagactgaggcaggagaactgtttgaacctgggagagggaggttgcagagctgagatcacattgtggcattccagcctggatgacacagcaagactccatctgaaaataatactaatagtaataataataataataataataataataataataaatatatgtaaaaagcatttgtttataatagggatccacaaactactggtacctgtctcactgcctcattttggggaaaaaaaaaaaaaaaaagaaaagagaaaagaaaaaaaaagccctgttggwatcccactgtgggttttttctagatggtctttttcaatccacagactgagttgaacagttgcagtggcggctgcatggcccacaaaactgtacatatttactctctggtcctgcagagaaatcgtttgccagctcaagtactgactaagtttattatagccctcaggcaggaaaacaaaaacaaaaacaaaaaccactaaagaatagaagtaatctggtaaattagtaccctattaattatatttttatacatgagcactccaagatcagaaaagacaccatctttcaaagttctaattaccttttaagacaaactaactgtacatcaaactgcaaagtaagcaatatattctcaaggtagcaagagacatggatggattctttcattacaattcaatatgctgaagtattaaaatgatcataaaattaaatggtgctctttcctgggaaatgttttcctgacatagcacttgggtataatggaaaatctatctggaatgttattggatatatagaataatacacaaaggagaaactatatttcagaaccgaagggacagagcaacagtagcaccaagagaaaaatatttgttcttatgtacttgaagtactaagaaaagaagagtaaatgtaaaagaattcaaggcctgagatgaaggaattagagggtgcgcaaagttatgaaatcaggccaggcacagtggttcacccctgtaatcccagcactttgggaggccgaggcatacttcagcctgacgtcaggagttcaaaaccagcctggctaacatggcgaaaccccgcctctactaaaaatacaaaaaatagccagatgccgtggcatgtgcctctaatcccagctacttgggaggctgaggcaggagaatcacttgaacccgggaggcggaggttgcagtgagctgagattgcaccattgccctccagcctgggtgatagagtgagactccatctcaaaaaaaaaaaaaaaaaaaagttatgaaatcattttataaaatagagacttaccactctagtaacctttgtgactgtgtggtaatctcatgca

SEQ ID NO: 4124 - DNA, 1372 bp, Homo sapiens
tgcatgcacctgtaatcccagctacttgggagactgaggcaggagaactgtttgaacctgggagagggaggttgcagagctgagatcacattgtggcattccagcctggatgacacagcaagactccatctgaaaataatactaatagtaataataataataataataataataataataataaatatatgtaaaaagcatttgtttataatagggatccacaaactactggtacctgtctcactgcctcattttggggaaaaaaaaaaaaaaaaagaaaagagaaaagaaaaaaaaagccctgttggaatcccactgtgggttttttctagatggtctttttcaatccacagactgagttgaacagttgcagtggcggctgcatggcccacaaaactgtacatatttactctctggtcctgcagagaaatcgtttgccagctcaagtactgactaagtttattatagccctcaggcaggaaaacaaaaacaaaaacaaaaaccactaaagaatagaagtaatctggtaaattagtaccctattaattatatttttatacatgagcactccaagatcagaaaagacaccatctttcaaagttctaattaccttttaagacaaactaactgtacatcaaactgcaaagtaagcaatatattctcaaggtagcaagagacatggatggattctttcattacaattcaatatgctgaagtattaaaatgatcataaaattaaatggtgctctttcctgggaaatgttttcctgacatagcacttgggtataatggaaaatctatctggaatgttattggatatatagaataatacacaaaggagaaactatatttcagaaccgaagggacagagcaacagtagcaccaagagaaaaatatttgktcttatgtacttgaagtactaagaaaagaagagtaaatgtaaaagaattcaaggcctgagatgaaggaattagagggtgcgcaaagttatgaaatcaggccaggcacagtggttcacccctgtaatcccagcactttgggaggccgaggcatacttcagcctgacgtcaggagttcaaaaccagcctggctaacatggcgaaaccccgcctctactaaaaatacaaaaaatagccagatgccgtggcatgtgcctctaatcccagctacttgggaggctgaggcaggagaatcacttgaacccgggaggcggaggttgcagtgagctgagattgcaccattgccctccagcctgggtgatagagtgagactccatctcaaaaaaaaaaaaaaaaaaaagttatgaaatcattttataaaatagagacttaccactctagtaacctttgtgactgtgtggtaatctcatgca

SEQ ID NO: 4125 - DNA, 1372 bp, Homo sapiens
tgcatgcacctgtaatcccagctacttgggagactgaggcaggagaactgtttgaacctgggagagggaggttgcagagctgagatcacattgtggcattccagcctggatgacacagcaagactccatctgaaaataatactaatagtaataataataataataataataataataataataaatatatgtaaaaagcatttgtttataatagggatccacaaactactggtacctgtctcactgcctcattttggggaaaaaaaaaaaaaaaaagaaaagagaaaagaaaaaaaaagccctgttggaatcccactgtgggttttttctagatggtctttttcaatccacagactgagttgaacagttgcagtggcggctgcatggcccacaaaactgtacatatttactctctggtcctgcagagaaatcgtttgccagctcaagtactgactaagtttattatagccctcaggcaggaaaacaaaaacaaaaacaaaaaccactaaagaatagaagtaatctggtaaattagtaccctattaattatatttttatacatgagcactccaagatcagaaaagacaccatctttcaaagttctaattaccttttaagacaaactaactgtacatcaaactgcaaagtaagcaatatattctcaaggtagcaagagacatggatggattctttcattacaattcaatatgctgaagtattaaaatgatcataaaattaaatggtgctctttcctgggaaatgttttcctgacatagcacttgggtataatggaaaatctatctggaatgttattggatatatagaataatacacaaaggagaaactatatttcagaaccgaagggacagagcaacagtagcaccaagagaaaaatatttgttcttatgtacttgaagtactaagaaaagaagagtaaatgtaaaagaattcaaggcctgagatgaaggaattagagggtgcgcaaagttatgaaatcaggccaggcacagtggttcacccctgtaatcccagcactttgggaggccgaggcatacttcagcctgacgtcaggagttcaaaaccagcctggctaacatggcgaaaccccgcctctactaaaaatacaaaaaatagccagatgccgtggcatgtgcctctaatcccagctacttgggaggctgaggcaggagaatcacttgaacccgggaggcggaggttgcagtgagcygagattgcaccattgccctccagcctgggtgatagagtgagactccatctcaaaaaaaaaaaaaaaaaaaagttatgaaatcattttataaaatagagacttaccactctagtaacctttgtgactgtgtggtaatctcatgca

SEQ ID NO: 4126 - DNA, 852 bp, Homo sapiens
tattaccctacacatagtargtgctcaaaaaacttctggtgaatgaaggaaggttaaatgaatgaatatgtgctaaataaccccttgatttttcaatatgtaataagcaagagtgagaatgagaatgttacgggatttttttaacaagacatttccaaaactgggttcattacagtttcttaaatattttgcagcctggattttgtcatcttttatgaaatgccagaacttcatgtttcagtgtttatgaccagacgttgttgcttagcctcccaccgtgcgcccagagtgctattctactctgatccccttacctgatggacagtgtaacaggaggtgggtagggacaacaaataggaatagaaaagttcacaagggcggactttaaattagacttaatctctctctctttttcctatttgtcttttctctctttctctttcaggaattcagaagttgagcggtaaatgtcacagacatgagtaaacaggcgtttactctgttgttcctgagtcaccaagcagccacactctccaacaccacaagctttcttctaatacccaaagtttcccacaggcaattgatcaatcaacatttcagttcagagaagctaagattattgcattatccacaatagggttttatgtaaatcataaagcccaatgaaatgatagtcaaactattagatattccataaaggcagatgttcaattgtagtttcagatgcttgacgtgtgcagaatgcctttcgaaaggagctttcttttcatgaaagagaagacaatccaaaggatcataaatgcttcctggcttagtttattctttcccactgtgttgatatcagatgtgatc

SEQ ID NO: 4127 - DNA, 852 bp, Homo sapiens
tattaccctacacatagtaggtgctcaaaaaacttctggtgaatgaaggaaggttaaatgaatgaatatgtgctaaataaccccttgatttttcaatatgtaataagcaagagtgagaatgagaatgttacgggatttttttaacaagacatttccaaaactgggttcattacagtttcttaaatattttgcagcctggattttgtcatcttttatgaaatgccagaacttcatgtttcagtgtttatgaccagacgttgttgcttagcctcccaccgtgcgcccagagtgctattctactctgatccccttacctgatggacagtgtaacaggaggtgggtagggacaacaaataggaatagaaaagttcacaagggcggactttaaattagacttaatctctctctctttttcctatttgtcttttctctctttctctttcaggaattcagaagttgagcggtaaatgtcacagacatgagtaaacaggcgtttactctgttgttcctgagtcaccaagcagccacactctccaacaccacaagctttcttctaatacccaaagtttcccacaggcaattgatcaatcaacatttcagttcagagaagctaagattattgcattatccacaatagggttttatgtaaatcataaagcccaatgaaatgatagtcaaactattagatattccataaaggcagatgttcaattgtagtttcagatgcttgacgtgtgcagaatgsctttcgaaaggagctttcttttcatgaaagagaagacaatccaaaggatcataaatgcttcctggcttagtttattctttcccactgtgttgatatcagatgtgatc

SEQ ID NO: 4128 - DNA, 603 bp, Homo sapiens
gatttcacccattaactagttttaccaacattgcaaagtcacratggtaaatgttgggaatgaaatcttcaaaacatagcttttaactattctgtgtaaattgaaggtgtatctttttacataaagttctatgtacaaattgtattcatttaattttatagaattttgaaaagcactttaatttcacagacatttactacagaatacttactgttggctagtaaagatgacattaacaccattggagattttctttgtattaccttgaaataaaattatttgcaaaggtataacagactaaaagcataactataaatcttcattatcaagtttatgaaagagtattgagagaaactgtaaaatttaagatcaaatgagatttttaaagcatacacaattattgcctgaacatgtatagctggaataattatccttctgaaaattcagaaagacacattaataaatttaaaaataaaccatattaaagtatacctgtgtgtgcattagttctgtgtttcttccttgagcttcttttgtggatgagttaagtttattgaaattttaatattttacttggccataaatcctcatatattttctgtg

SEQ ID NO: 4129 - DNA, 603 bp, Homo sapiens
gatttcacccattaactagttttaccaacattgcaaagtcacgrtggtaaatgttgggaatgaaatcttcaaaacatagcttttaactattctgtgtaaattgaaggtgtatctttttacataaagttctatgtacaaattgtattcatttaattttatagaattttgaaaagcactttaatttcacagacatttactacagaatacttactgttggctagtaaagatgacattaacaccattggagattttctttgtattaccttgaaataaaattatttgcaaaggtataacagactaaaagcataactataaatcttcattatcaagtttatgaaagagtattgagagaaactgtaaaatttaagatcaaatgagatttttaaagcatacacaattattgcctgaacatgtatagctggaataattatccttctgaaaattcagaaagacacattaataaatttaaaaataaaccatattaaagtatacctgtgtgtgcattagttctgtgtttcttccttgagcttcttttgtggatgagttaagtttattgaaattttaatattttacttggccataaatcctcatatattttctgtg

SEQ ID NO: 4130 - DNA, 639 bp, Homo sapiens
aggacaggtctacaaggtgaaaggtgacagtgcccaggagacacgtgctacacccggagggttgacaaaagaagcagatgtggccaggcatggtggctcccgcttgtaatcccagcactttgggaggccaaggcgggcggatcacctgaggtcaggagttcgagatcagcctggccaacatggtggatcctcatctctactaaaaatacaaacaattagctgcgtgtggtggcccgtgcctgtgatcccagctcctcagraggctggtgcacgagaaccgcttcaatccgggaggctgagattgcagtgagccgagatcacaccactgcactgcagcctgggcgacagagtgagactccaactcaaaaaaaagaagcagatacggtcaggcatggtggctcccgcctgtaatcccagcactttgggaggccgaggtgggcagatcacccgaggtcaggagttcgagaccaacctggaagacatggcaaaaccccattgctactaaaaacacaaaattaggccgggcatgggggctgacgcctgtaatcacagcactttgggaggctgagatgggcagatcacgaggtcaggagatcgagaccatcctggctaacacagtgaaaccccatctctactaaa

SEQ ID NO: 4131 - DNA, 639 bp, Homo sapiens
aggacaggtctacaaggtgaaaggtgacagtgcccaggagacacgtgctacacccggagggttgacaaaagaagcagatgtggccaggcatggtggctcccgcttgtaatcccagcactttgggaggccaaggcgggcggatcacctgaggtcaggagttcgagatcagcctggccaacatggtggatcctcatctctactaaaaatacaaacaattagctgcgtgtggtggcccgtgcctgtgatcccagctcctcaggaggctggtgcacgagaaccgcttcaatccgggaggctgagattgcagtgagccgagatcacaccactgcactgcagcctgggcgacagagtgagactccaactcaaaaaaaagaagcagatacggtcaggcatggtggctcccgcctgtaatcccagcactttgggaggccgaggtgggcagatcacccgaggtcaggagttcgagaccaacctggaagacatggcaaaaccccattgctactaaaaacacaaaattaggccgggcatgggggctgacgcctgtaatcacagcactttggraggctgagatgggcagatcacgaggtcaggagatcgagaccatcctggctaacacagtgaaaccccatctctactaaa

SEQ ID NO: 4132 - DNA, 2020 bp, Homo sapiens
tgtcttatctccattatcttctgctttcattatggagatgatggtagtatgaacaaaaacatctatatcttattatcgratacctattaaatttatctgtagtgaaaaataagtttatcttctccaggaaacagtatccttgatgtttttgggctgtaggaccactgggaagctaaagaatgttgagccttttcttataattgtatgagatcatttttgcttgcaggttacaaaaactcaatctgatctacttgggcaaaaattatttggctcagagaataaaaccacatgaagagtttgaatgaagttgaaccctagaggcagggcttcagggggatatgccagcctccattctatctaaatatctgcctatgtctgcatgctgattttattcttttcatttatcccacatcatcacatcctcaccatcagatagaaggacttgctttcattggttccaattaaaaattcccaggaatggaatttcactgatgtggaggtggggaagataacatttccacctttggttggtgccatggaagttgagtgaagtaattgacagtccccacaagagccacatggcatatagtcagacaacatagagttcttccaaaaaggagggcagctgggaaaaattaattattttttaaaacaatacatttctatcaaatataatatttaacaagttgccttcacattctcctttaagccttaataattttgttataaaaacatattagaaatggtgagattgattcccaaaagacttaaatggtttacaaagttaacatacatactaaatgccagagattagactagaatttaggatttcacactttgagactcgtgttctctctgcatttcaaattaggtgtttgcatcacttattcggactgtcaggactattcaaagtcatgcattcataaatcttttaatattgggagcttaatactaattatacaaaaaaatactgtacaaagagaaacagaataagttgagctgaatgacagaaggttgcttactctttctaacatcaacctcccactaatgttttctctatatttcaaccagtcccttctaatgctaaacgacctggatttcaaaatgaatttcctctctcataagatttgtaatagagagtatttgcctcaatgtaaagattatgaaggcattatttcctggaaataaatgaagacattatctttgaggaagtagatatatagagtgtacatttcatgtacttggtatataaaaatccacatgctttctgattatggatgtctagaatagtcacaaaagcatttggctacagaagattaggtggaacatcaatgatcagaacaagttctggaatgagtcaaatatcccctaacttcctattttacctctttactaatagaatctttcataaactccaaatgtctgaaaatgttaaatatgatcatgactagtattatttagtcacaaacatacagaaagtacacatgatagtgcaaaaccagtgggagtccggcttttttctgtctcaattattcgtccctcttttccttctgcctattagccttgccctcttctgtcagatttttccatattttttttcttcactcttactgggcagactattgtagattcctcatttgccctttatttgatggcttacattttctgattactctttttttaatttccaatttttattttaagttcaggggtacatgtgcaggatgtgcagctttgttacataggtaaatgtgtgccatggtggtttgctgcacagatcatcccatcacccaggtattaactctaacatccgttagctattcttcctgatcctctcccttctcccacccactaccctctgacagactctagtgtgtgttgttccccccccccaatatatccatgtgttctcatcattaatctcccacctataagtgagaacatgcagtatttggttttctgttcctgtattagtttgctaaggataatggtctccagctccatccatgtccctgcaaag

SEQ ID NO: 4133 - DNA, 553 bp, Homo sapiens
tgtgccatgttggtgtgctgcacccagtaactcgtcatttaacattaggtatatctccaaatgctatccctccccgctccccccaccccacaacaggccccggtgtgtgatgttccccttcctgtttaaaatgttcacagcttctttgagattaaattcttattacattcattattaatatatctaataatatatgagagttgaatggttgtccttagctaagttataataaaaggacattttaaaattgtacatcagacatgctttctctataccatgtaagttagtataagttcatcttaactatataaggataatataatttaaagagctgaacttttgttcttcatgatcatttcactgatttagaaaaaatagcttagaacaaaactggrgattctgtgatacactgatgtctatgtgaaatttaatgttctatatggattcctttgggtgaaattatcaattagattattttaacaatttaagaagcattgatatttccctaatataatcttttagaattatgattttcttataattaaatcctact

SEQ ID NO: 4134 - DNA, 587 bp, Homo sapiens
aagtctgtatctgtgctttaaactaagaatgataaccgtattccaaaaacacatcgaataatgtttattctactacaaatggatttgattgaggaaggcttgactgaatatataacctctcaaatttgaagttatgattaaygtgaaatatatatgagattgatattgtttggctccgagtcccgacctaaatctcaccttgaattgtaataattctgacatgtcatgggagggaactggtgggagctatatgaatcatggaggtgggtctttcccatgctgttctcatgacagtgaataagtttcatgagatctgatggttttataaagggaagttcccctgagcatgctctctgagcctgctgccatgtaagatgtgactttgctactcattcgccttccgccatgattgtgagtcctcgccagccatatggaactgtgagtcaattaaacctctttttctttataagtttcccagtctattgaaacttaattgtctctttagatgttgaaaaatgaggtgctggttggctgtggagcagatggaaacatgataacttttataatagtaactgtgatcatgccaa

SEQ ID NO: 4135 - DNA, 567 bp, Homo sapiens
tgggtgggagaggtctgtgcccctgaggaagccgatcctgccaaatcttgatgcgacaccagcagcccactctaccctcttcatcccaaggagccatctctggggaagggatggagggcagccacaggccaggctgggacatgggaacctaggcggtgcctggccctggatgcccatcggggcccagctcgggatgcccgtcagcagccaggatggggtgtgcatccgggccctcccgccgggggctgccccagttgttcctcaggatggtgcccgtcttctcctccttgaactgctgtcggtcttcccgaggaatcttcaccgcatggtactggggcacggtggcctcggggtgttcgcccgtttgaagaatcccatctataaggacascaggccagaccatgaggagcctgaagagctgcggtccctggagcagatgcctagcgcggcacagctcctcaccctcaccatccctgctgcggcagaaaggaaataggctgaatagcatctggtgtggtgggcagcacccacggtgctcccatcagtgctgtgtccccaggttctcat

SEQ ID NO: 4136 - DNA, 1171 bp, Homo sapiens
aaggtgggttctcaccatgttcctcaggctggtcttgaactcctgggctcaagcaatcctcctggctcaggctcccaaagtgctgggattacaggaatgagccactgcgccagcccagcaaatgtttattgcgtgtctcctatgcataaggcacagtgctgagtgccagaatcagaaagcaagaaatgcttaatagttctgagaacctttaacaaaatgctacagtttggtgtggccgtggtggaaagtaggctggcgtttggaagatcaggctctcgctctatactggagactcctccttaaggctcccccagcacctgagcgaacctatgtcccggtactgaccactcggctgctgttttccaagaatctctgtctgtgtctgtctcccctaattcccctcacgctgtgagcctcttgggcttaataaagagtcctctgagccctgtgaccttgagcaaatcgcttggtctgtctgaaagacacgcttctccacccgcggtgcgagggcgtgacaccaccgcagggctctcgcaaggatgatgtaaaatcattgaaaggcccaacgtgcagacaaactggccgcttttcatagctgtttagcactctttagaatgaaatgctacgtgttaaggagctgttctcttgcgatggaaacaggttgtttctgttggtgtgtttgtgacgcccgtgcccgtcatgagcgctcctgaggagacgcgccagggccaggcttcctctgccagagctgcccgggggcaggcgagcctcaaggatggaagctggagcatgaaggaggcccctagattctgcttcacacagacagccagggatgcggcttttcagcaggaaacgaggtgagcagagcctgagatgtcggaagagaagacaaaaaggaaggactggggctgggygcggtggctcacacctgtaatcccagcactttgggaggccgaggcaggcggatcacctgaggtcaggagtttgagaccagcctggtcaacatggtgaaaccccgtctctactaaaaatacaaaaattagccagccttggtcacgggcgcctgtagtcccagctgctcgggtgactgaggcaggagagtcactagaacccagggggcagaggttgcagggagctgagatcatgccattgcactccagcctgggcgaca

SEQ ID NO: 4137 - DNA, 942 bp, Homo sapiens
tgcatgggtacactgcatcttacagaagatgtgaaagggtaataaaaaaacatgcttataaacttttaaaaaaattaaaattgagctggctgaaaaatataacttttctgaaaaagtttaatgttcaagttttgccacacaacttttcaatttaagatatatcaaacaaacsattattttctatattcatgacatgtcattcatgtgccaggaagtatattgaatataaaatcagatacttttcttgatattaactatatgacagggttgttatactgatatgtcatcctatttttactgttttgccttgctactctatctctgcacatataaattctattaagtcatcagagagtccaacacacatcgagagaagggaagtcaaccaaaaatttaaactgtcattcagtttttacaagtgcatccaacaagttatttttttttggattatagaaagcccatctacatctctttatttctggtattcaattctctgtacttatgatcattttttaatctgaaaatatttgagtgtcttaatgagagccatgttgtgattctcttaagtgagacaaccacagctggagagaagtacctggtctgcattcagcccagttggaaaagacttaacagttacatgatcattacaaacaaatagtacaggagccattgaaagtcttagaatgtattaaaaattatatatattacatataataaatattgtatctattttggaccaaggatgtgatttcagttggaaaattgcatctagttttgttctgggcatgtgcttgaaggactttgataagttagtatatactaggatcaggaaaactagaaaagagaggagacattgtgattgcgggcttttattatgtttcagactttattctagaagttctcacatatgttacctcattaaaatgctaagccttattaaag

SEQ ID NO: 4138 - DNA, 942 bp, Homo sapiens
tgcatgggtacactgcatcttacagaagatgtgaaagggtaataaaaaaacatgcttataaacttttaaaaaaattaaaattgagctggctgaaaaatataacttttctgaaaaagtttaatgttcaagttttgccacacaacttttcaatttaagatatatcaaacaaacgattattttctatattcatgacatgtcattcatgtgccaggaagtatattgaatataaaatcagatacttttcttgatattaactatatgacagggttgttatactgatatgtcatcctatttttactgttttgccttgctactctatctctgcacatataaattctattaagtcatcagagagtccaacacacatcgagagaagggaagtcaaccaaaaatttaaactgtcattcagtttttacaagtgcatccaacaagttawttttttttggattatagaaagcccatctacatctctttatttctggtattcaattctctgtacttatgatcattttttaatctgaaaatatttgagtgtcttaatgagagccatgttgtgattctcttaagtgagacaaccacagctggagagaagtacctggtctgcattcagcccagttggaaaagacttaacagttacatgatcattacaaacaaatagtacaggagccattgaaagtcttagaatgtattaaaaattatatatattacatataataaatattgtatctattttggaccaaggatgtgatttcagttggaaaattgcatctagttttgttctgggcatgtgcttgaaggactttgataagttagtatatactaggatcaggaaaactagaaaagagaggagacattgtgattgcgggcttttattatgtttcagactttattctagaagttctcacatatgttacctcattaaaatgctaagccttattaaag

SEQ ID NO: 4139 - DNA, 1258 bp, Homo sapiens
ataaaacatcacggttttgctctctggggcctttgtgtgtgatttttcagattgtgtgtgcagtgctcacataccctgaactctaagggaaatcrtgctcgcggacgatgcagaacacatccttcacagcctaaggcagcccttattccgtccctttaaataattagtcattattctgtatttggatttataatttccagctatgcttgactgtatacacatgcagaccctaatttattaaacaggaatttattaagggtatgaaacagaggtaccttatttttctccagatatcgtctttaaccatcctgcaagattatcttcttccactctcagcctctcaaaactaaatgtatttaatatatatggatttattcaggttgtttttatttcttgacattgttttactaacttgtatctttctagaaaagagtgaaataaatatttttctaatttaatggtgtaacacaatacatactgtctttaatgattaactactaaatgaagtaatatatgtgtcatgcttagaaaaatgtttggaacatcataagggccatataaaacttagttattaatgttattgcaatgtaatttttaaaaacgaatgtatcaacaattagtaattatatccattttattccaaattatttgatgatgttttctctatttttattaaataacactttcaaaatattttgctgttttgtcttatatttccctttatttttaaattcttaaattcataatatccccatttaactactcagtatctctaacctccttcctaagatcttaggtagctttaaatctgttcatatttcctctcttattcttaatttctggctccattattaaagttctaacttttgtaaaacgactaaagatagtccctttttaaattgtttcatacaatcaatgcttgtttagttttaaccatggtttatatttttcatactcctttcctttagggttaaatatccttattcttgaagaaagtcttttcaaggaaatattagtgctaataactttcagtcttctcatcaaaacacctgtatttttttctaactcttgaatagtgtcttagctgctgttagaatgccagaggaaaccaggtgtttcctctcaacaccagaagacatttctcaaatgtcttttggcttcttttttaagccattgaccagtctacttgttagcatcactgtcatttctatgttgctaatgtcttttctctaagcttgtttcaaatagattctcttgt

SEQ ID NO: 4140 - DNA, 590 bp, Homo sapiens
aatacttatatgtacatttctgtattcctgaagggtgatgatttgcaataaggggtattatctcatggcataaagggaggagagatgaggttaaaattctgaagcctgttcaggtagctcactctgcgttctgtgattgaagatgtgaaaaacaacatggtagtcttccagcattcagtgtgtgtccacatactgagatcttagtgcttggacctgtaccgccactgtgcttggttttgttcatcactttgtagtttgacctccagaaatgagtggggtaaaacaaaggtgtgagtcaggacaatgttttaggcaagtttgagtgtcatggggtggtaggttggagaaaagtgtatttttaaatatgttttaatgtgaaagaatatgtatgaatagtagtgagaaacagccattcatggacaaatacattaatgatgaaggctaagaggagaagtcaggggcagatgggattcagaggagaatggggcagaggatgtgtggaattcaggtrgatcacgggaaattaagggaattaccttctggtgaagcttctcattttaatatatcattcaagtgaaaacacagtcatc

SEQ ID NO: 4141 - DNA, 629 bp, Homo sapiens
tacgatcattatttgacaatttattttttgaaaggcagaaagccttttgtaggttagcttaataagtttaaatttgtgctaagtgcaataagtaatgaacgaggtataagggaagcaattttcagatttggattttaagacaactcactctgattgcaatgtgaagaataagctggagaggaacaaacggaagagagaaaacacttaggagcctgttatatgtgacacagacaatgacaatttgaaagatgatgcaacactgtgaaatgtgaaagatggtgtcacagatgtgaaatgtgaaagatgatgatgtaaaatggtgatttgggacatttttggaagactatttggttaagtgatgtggagmatggaagcacaggaaggaatcaggcataattcccaagtttccttaactaatctcagaaatccctttttataaatgtgcttcaacatttcactatgctgttgcaaatgctcaatatatatgagggatacacttatagaagaaaaaacaaactcatgcaataaatccctttcagaaatctatatcaaagtaacactttcttaccttttgaaccagtatattccattttattacctaataagagcaagtcaaatgcaagtcatgt

SEQ ID NO: 4142 - DNA, 569 bp, Homo sapiens
atgcatttataaattatcatgcttttattatattgtgttagttttatattgtcatgaatgtcacttgttcttattgctacttctaaataattcttaatatatgtcatattggatattatatactatattaattataatcattggcatatataatatattataattaatatatactatattaattataattattagaatatattatatattgtgatatatgttatataatatatactaataattataattatatacactaataattgtaattatatactaatatataygaataattgttatactatattaactgtaattaatatagtatataatattaactttgcatatcttatattgattattatgcattttactcatctattatgtatgatattattatgtatcacttattctttattatatatactatttcatattatgtatgatattattatgagtatcacctgttctccataagtcatttgcaacgagttgtatagttactctgtgataatatactatttaattactttatattaaagtagtttgtagtcacagaagtctagtga

SEQ ID NO: 4143 - DNA, 1255 bp, Homo sapiens
acaccctttcttcaatctggaactattcactcagttgactttaccaccatgcacccagattccttcattctaagtgtttcctctgccactatttaatccatgttattcttaagacctgtttgcagttttccaaacagctttttaaaatgagtcttacatacattattcttataaactctaatttttaacgagtaccagcttacctattcctaaatatagtaaatgtatgttcattgtgcattcaaatattgagagtccccagttgctcaggctgataaggcactacatgccatgttgtcatctcattcattcatgcttttagaagtacaaattgagaacatatcagctaagatgtctgctccatgctgagaatagagacatgaatataaaagtcataatcttcttcttttttgagtcraagtctcactccgtcacccaggctggagtgcagtggcgcaatcttggctcaccgtaatgcctacctcccgggttcaagtgattctcgtgcctcagtcttccaagtagctgagattacaggcatgcgccaacatgctcagttaattttttgtatttttagtagagatgaggtttcaccatgttggccaggccggtctcaaactcctcacctcaggtgatctgcctaccttggcctcccaaagtgctgggattacaggtgtgagccaccatacccagcttataaaaggcataatctctttcacttttaaacatgagtccagatcaaaatatctagaggtctttttttgcaacatatgttaacacgatgctgtgatttgcatgcttgtgtccttccaaaatttatctgttaaaacttaatgcccaaggtgatggtattaagaagtgagatatctggaaggtgattattttgccctcatgaatggtattagtgccttcacaaaaaggctaaagggacctagctagactttttctgccttttcaccttctaccatgtgaggacacagaatttctacggcaggagggcacagcaacaaggcaccattttggaagcagagagcagccctccccagacactgaatctgccagcaccttgattttggacttcccagcctccagaactgtaagaaatacatttccattcttaaaatttgctcagcttcaggtattttgttatagcagcccaaatggactaagacacacaattttaacctatttgtcaaagaatccaaatacacagaatgtataaagaaaactgtgaaagtcttccagatatatttct

SEQ ID NO: 4144 - DNA, 629 bp, Homo sapiens
tctttccaagacccttttgcctacctcaccccttggatctcggtggtgttctgcacagaagcctccaacaataggtccccttgtcacatgctcctactcccctctgtgtctccctctcacaacagcatcacacttcgaattacttatttaaccatctgcttcctccacatctgtctccttcaatggtatatcatcaccacctagcccagcacaggtctgaaacatagcaggcacccaattaatggttaacgtaattgagataagcataaattctgtctaagtgactttttaacttgttaaccctgggcaagctgcttaacctccttgagcttctgtgtcttcatctttaaaaaatgcaaaggataatacccacctcacagggctatttgatgattaaattaaatataattggggcacatagtaaatggtgaacaaatctctagtgtcttagttagcagtctccagagaaacagagccaaaaggaaacacacacacacacacacaccacacatacaccacacacacatacacacatatatataggcactagagcatgtacatatatatatgttttatatatatatatattatatatatatatattatatatatatatwatatatatatat

SEQ ID NO: 4145 - DNA, 1153 bp, Homo sapiens
agaataatataggacagagagaaatacctcttttcttagataatacatgtagttttctagatattttttaaaaaattgtttttaacccatctggaatttactttggcttttacagtattatataggagtccatttcttataccaaaaatggatatcaacaccacttactgaacagtttttctttgtctaacagaattaaacaactttgtcacatatcaaattcttgtgtaacctaggatctgcatctggaatctctattctgttcaactattctttttgtctttttcttaatcaataccatatttatttgattgcagagttaatactatattctaataatggcagaacagttccctgtccttcttgagaatatacttacctccttcactgctgtcacagtgagaacttcagaatgattttgctacccttctcttctaaattttgcgtccttattgtcataatcctaagaaatctrtccctccccaattaaatttaaatttacatgagtaaccagtgtttcctattctctaattccatcttgaggcctcttttctagttacttttcttttgccctgaaagatgaataattaattggccaggtaaaggatcactggaggcagtccattctctcagggtggatagatgctgtttgtctcagggtggatagactggctctttcattgccagtgtaacctctttccttataagtaacttgttctttctgcctggatgtttataagatcttctgtttagagttcaggaactttaccaaccatgtctaaatgtacagcttgggacttactgagtagatttcagtctttctctaactcaggtaaaattttctactattacctgctgaataattttatttttttcatttattcctttgtctccttctagaactcccattgtatgttagatttctttgatccattctttaaatcttttccctcacagtttccatttacatatgtttgctttgtactttgagatatttcttgtgcttagtgaccatcctccttttaaaactatcattcaaattttttttgttttttttttttaagagacagggtatcgctctgtcacccaggctggagtgcagtggcaggatcatagctcactgcagccttgaactcctgggcccaagtgatcc

SEQ ID NO: 4146 - DNA, 1305 bp, Homo sapiens
tattaatatttttaaatcaggtgtgtgccaccacgctcagctaatttttgcattttttgtagagacagggttttaccatgtttccgggctggtcataaacttctgtgctcaagggatccacccgcygtagcctcccaaattgctgggattacatagcttctaattcctttttttggtatttgtcaatatcttcttttccattctcttttttcttgtcagtttttaattttctataattttctttacattcacagaaagattaaaaaattttagcatttatgtcaatggatctttttatttgctattttggactgctataagattgtttatatttatataatagaatgtaaattgttctttttttcagtgtttgtgatgtgttagatagagcatggataaatattttaattttaatatttatgaccttattttaaatggatgcgaatattttttaaattttattattattatacctgaagttttagggtacatgtggcacacgcggggtttgttacatatgtatacatgtgccatgttggtgtgctgcacccattaactcgtcatttagcattaggtatatctcctaatgctatccctccctccgccccccaccccacaacagtccccagtgtgtgatgttccccttcctgtgtccaagtgttctcattgttcgattcccacctatgagtgagaacatgcagtgtttgattttttgtccttgtgatagtttgctgagaatgatggtttccagtttcatccatgtccctacaaaggacatgagctcatcattttttatggctgcatagtattaatggatactaatttttatctattacttattgcaaatgactctggtttatgtatacaactatgatatacattttattttctatatggattatagttaaacagtcagttggcttaaaatttaaaaactaaataatagtacatgcagtttgctgatatggcaaaattcattaaggtgatttgcaaatgatgataactttagaaacatatgaaagcttagttttataaagagattcctttccctgaaaacaattcctctttcgtgaacatctctctgttccttggacactaatactttgtatacaaacaaccaaagaaataaatatctgcttctcatgctgtatagcatggtcatctcagtggtagaacttatggtggttaacaccgatattagctgttaagcaataaataattgccaaattgctaacactttgatgtaaataaaattaccaatcctttttcagtctgatcggctatgagcaaagacatgttaaaaac

SEQ ID NO: 4147 - DNA, 744 bp, Homo sapiens
agtgaagtactcggtgacagcaaattaaagtattgttttctggaacttagtataattttttttttaatattttctatctgcagttgggttgaacgcatgaacatgaaacccacagatatggagggtaaactgtatmtgtctaccttgccagatttaaaaaaaaattgtgctggagtatcaccatacttatggactgtgatggctttctgcatctatgaatggaatagtcaatatcaatagtatgccattaaataagacctccttccacaccaatgaacttaacattggcttctctttaatgctagtaaatcaaaacaaaatgaaagcgattttcgacgtttatatctgttgcacatttttaagaatactgatgtcaaaagcaacatatttcctagagaaatacctttcactgggaaagtatgggcatggcataagagtctatgttaatattattctttcaagtgttttcaatgtatataaacatgaccttttattgactcattgaagactcctaatggaaatcttatagaacatgttacaataactgatctttagggattcaagttggtaattactcaactaaataaagtgattgcttttctaatctgctcttgtaatgtttagttaatatgttcaaaacaaagcacatagtggcactatttcttgtttcctttttcttatgagactcatgggactattaatgaattccaacagagctattataaactggatcttataaatgca

SEQ ID NO: 4148 - DNA, 579 bp, Homo sapiens
tgcctagtatgccaagtgtgttggttgcttgctgaacctgtatatataactctgttggatttaggaatcatggaaaaccctgagcatttattgttaaggggagccccagctgacttttgttttgccatttgttagctaaaatcaatacattctatcattataatctctgcaaaaccttggatgtgtgtgcctggcaggcaaaaccatcagagagtctaagatcctccccagacaggagagaaaacttatttttatttttaattaacataaaatgcacatccaaaccagcagcttcaagacccaaaggaatgtgttctaaagccttcagcagtgtgcagtacactctcgtttccatatctgcatccttcaatgcttatgtgatattcctttgaaattcattcagcttgagccaaaataactctggaaagtgaaagaagcttatacaaacaaacaattttattcaaggatctctatcttttctactttcttttkttttgattgtttaacacactgtcaaaagtttgaatatgcatctcttatctctttgctgtccatttcttaaaccttacaaaatatgcc

SEQ ID NO: 4149 - DNA, 652 bp, Homo sapiens
gtattagactacaaaaaagaggggaatattttttcttaattatcagatattcttcaaagaaacattgctatccattggccttatccaaaaattgatgggatacctaagaaaaacatgtaaatttgatgtctcaggtcaagrtgaatattctcagtggacgataaatttattttcaattgctatacatttcagttttaagacataagaaaacccagtactggtaaatgaggtttgatgttacattctaaggacctcaactatttattattgagctgccttgtaaagataacaaaagtcaataacgcattgctaagtatctcatctattagggccataaaataattgtatgtgttcgtaaatgttaatgagaaagaataggtaaacaaatgtcactgactataaattagagtttagaaagccaataataagtagtatagcattttaaattataagattccttaatctttatccactgaatgaaccttgatgtagtagcagatttcttcaataagggagaggagccagggctcttgatggcagtggtacacttctaacattgatggtaatatcattgaataattatattagaaagtagcagtttgtattgtaaacctcaatgaacagaaccataatgccacaaaagacagccatt

SEQ ID NO: 4150 - DNA, 652 bp, Homo sapiens
gtattagactacaaaaaagaggggaatattttttcttaattatcagatattcttcaaagaaacattgctatccattggccttatccaaaaattgatgggatacctaagaaaaacatgtaaatttgatgtctcaggtcaaggtgaatattctcagtggacgataaatttattttcaattgctatacatttcagttttaagacataagaaaacccagtactggtaaatsaggtttgatgttacattctaaggacctcaactatttattattgagctgccttgtaaagataacaaaagtcaataacgcattgctaagtatctcatctattagggccataaaataattgtatgtgttcgtaaatgttaatgagaaagaataggtaaacaaatgtcactgactataaattagagtttagaaagccaataataagtagtatagcattttaaattataagattccttaatctttatccactgaatgaaccttgatgtagtagcagatttcttcaataagggagaggagccagggctcttgatggcagtggtacacttctaacattgatggtaatatcattgaataattatattagaaagtagcagtttgtattgtaaacctcaatgaacagaaccataatgccacaaaagacagccatt

SEQ ID NO: 4151 - DNA, 1093 bp, Homo sapiens
acctgagaaagtcttcctgatattcagaaactggttaaaatcctccccaggaaagcattctgagaaaataacatcagaatgttttgtgtgttggttgatggcatatagctacatcctaatgtagacaaaggaagggcagctctgaccacatctcaaaatacaacacattctgtggatgagtctctcaaataattaaaagcttatatgacgaagtccaacattagtttttggccacaaatcaatacactgatgaaatcgctaattttggttttatccaaaatagaaccagtcttcctgtccattctaatgtacagtgccatggagtaatggagaacagatcggacacaaggccttccagcacttgggcttgccaaaggggccctggaccagaggcatattctcctggaggccagaagccacgtggtccaacagcctggggaaaggaggcacttcccttccaactggagagtctgggctaatgaagtgaacccaattataaaatggctcgttatgttaacagaggtcgtggtgtctggaaattattgctggggtgtctggaattcttaataaaaattacaggaagtctgattgcttgtgggaaaatctatgaagctaagggagaaagaaagaattctatcttctgggaaaaccccaagagccaagagctgactcatctttacaaggtgttaatcaggagggcaaggtgtgacctgaactctgttccctggagctctcctctcctggatgagaggggcccatttggccatggctgtccctggctgacacgtacccctttcacaaagctctgtatgggaaccagagggaaggatgccttaggttaacttatgccatatctacrtcaatggttcccagcttgacccttggaaaagcacaaaacacacatgcctgcatttcaagcactgctggttaattttctatagttgatcttcttcctctattcccttgttatgcttcgtttccttcatctgttactagcagaatgatgttgagaaagttatttcaagcatccttaagtaaaaatgaggccgaagggtccccacttcatgggaatgtaataagaattcaacaggaa

SEQ ID NO: 4152 - DNA, 1193 bp, Homo sapiens
  misc_feature (1)...(1193): n = A,T,C or G
cacgactgaagccatttaactgcttatatctttaatagagtcatttagctaagcttggctaaaattagggtttctggtactgaaaaagaaaagcagcatggcrataactttgctaccaattgcaggtatgtggtactaggaaggcctgcgaaaagagcatatgacaagagagggtaaacaagtcttctttgagacacagacaactgaccagagaaataggtgtttgccaggcaagtggagaggggtcttaggaagagctccaggatgagaggacagaacaaatgtctgtgaccagagagagcacggacagtcttcatgttgcaccatccacctgatacaccacatattgaaaaccatggtggctgggttctctgtcctccatccagactcttccataaggagtcgtgccaggatttctcatccctgctttctcttctgggtgatgcccagatggaatggcccatgaggtccccaagtcctttggggggtgtaggtttgtgctgctattgtgtggtcgtgtgagaagtagcactggttggagcagacgtgggtccacacagagccttgtccttgactttcaacaggaacatttcctgactggggtgaccttggtgagatacttaaccattctaaatattgtctgtttcctcacctggaaactgagaagatactaatatctaatccagagattcactacaaaaagcaaaagagctaaaactgatcaagcatntagccaggtccctggtttaaggaaanagtccaatcaacagtgactatttctgttattgctgtcacctttatcttcatcatttcctctccttcatccccttctgaatacacattctccatgtttgaatgtgaagtgtcacctgaaatgtatcctgcacccagctttttctcaggagtgtgtaaacccacagcacaccacaacttttttctttaaccttcttttggaaaaatgacttgaggatgtattcagttatacagagaatcctacagtctgcggtgtgggccaggaaggaacccaatgctgcctgtccagacccctcatggagtaaatgaggaaatagacccagcaaggcagagcctggttggcaatgcctgacaaggtggctttgaagaagaaaacatctccccggtgtgttgaggaagagatgtgacctcatctggagcctcatgatgatgagaagtgc

SEQ ID NO: 4153 - DNA, 1193 bp, Homo sapiens
  misc_feature (1)...(1193): n = A,T,C or G
cacgactgaagccatttaactgcttatatctttaatagagtcatttagctaagcttggctaaaattagggtttctggtactgaaaaagaaaagcagcatggcaataactttgctaccaattgcaggtatgtggtactakgaaggcctgcgaaaagagcatatgacaagagagggtaaacaagtcttctttgagacacagacaactgaccagagaaataggtgtttgccaggcaagtggagaggggtcttaggaagagctccaggatgagaggacagaacaaatgtctgtgaccagagagagcacggacagtcttcatgttgcaccatccacctgatacaccacatattgaaaaccatggtggctgggttctctgtcctccatccagactcttccataaggagtcgtgccaggatttctcatccctgctttctcttctgggtgatgcccagatggaatggcccatgaggtccccaagtcctttggggggtgtaggtttgtgctgctattgtgtggtcgtgtgagaagtagcactggttggagcagacgtgggtccacacagagccttgtccttgactttcaacaggaacatttcctgactggggtgaccttggtgagatacttaaccattctaaatattgtctgtttcctcacctggaaactgagaagatactaatatctaatccagagattcactacaaaaagcaaaagagctaaaactgatcaagcatntagccaggtccctggtttaaggaaanagtccaatcaacagtgactatttctgttattgctgtcacctttatcttcatcatttcctctccttcatccccttctgaatacacattctccatgtttgaatgtgaagtgtcacctgaaatgtatcctgcacccagctttttctcaggagtgtgtaaacccacagcacaccacaacttttttctttaaccttcttttggaaaaatgacttgaggatgtattcagttatacagagaatcctacagtctgcggtgtgggccaggaaggaacccaatgctgcctgtccagacccctcatggagtaaatgaggaaatagacccagcaaggcagagcctggttggcaatgcctgacaaggtggctttgaagaagaaaacatctccccggtgtgttgaggaagagatgtgacctcatctggagcctcatgatgatgagaagtgc

SEQ ID NO: 4154 - DNA, 1193 bp, Homo sapiens
  misc_feature (1)...(1193): n = A,T,C or G
cacgactgaagccatttaactgcttatatctttaatagagtcatttagctaagcttggctaaaattagggtttctggtactgaaaaagaaaagcagcatggcaataactttgctaccaattgcaggtatgtggtactaggaaggcctgcgaaaagagcatatgacaagagagggtaaacaagtcttctttgagacacagacaactgaccagagaaataggtgtttgccaggcaagtggagaggggtcttaggaagagctccaggatgagaggacagaacaaatgtctgtgaccagagagagcacggacagtcttcatgttgcaccatccacctgatacaccacatattgaaaaccatggtggctgggttctctgtcctccatccagactcttccataaggagtcgtgccaggatttctcatccctgctttctcttctgggtgatgcccagatggaatggcccatgaggtccccaagtcctttggggggtgtaggtttgtgctgctattgtgtggtcgtgtgagaagtagcactggttggagcagacgtgggtccacacagagccttgtccttgactttcaacaggaacatttcctgactggggtgaccttggtgagatacttaaccattctaaatattgtctgtttcctcacctggaaactgagaagatactaatatctaatccagagattcactacaaaaagcaaaagagctaaaactgatcaagcatntagccaggtccctggtttaaggaaanagtccaatcaacagtgactatttctgttattgctgtcacctttatcttcatcatttcctctccttcatccccttctgaatacacattctccatgtttgaatgtgaagtgtcacctgaaatgtatcctgcacccagctttttctcaggagtgtgtaaacccacagcacaccacarcttttttctttaaccttcttttggaaaaatgacttgaggatgtattcagttatacagagaatcctacagtctgcggtgtgggccaggaaggaacccaatgctgcctgtccagacccctcatggagtaaatgaggaaatagacccagcaaggcagagcctggttggcaatgcctgacaaggtggctttgaagaagaaaacatctccccggtgtgttgaggaagagatgtgacctcatctggagcctcatgatgatgagaagtgc

SEQ ID NO: 4155 - DNA, 1193 bp, Homo sapiens
  misc_feature (1)...(1193): n = A,T,C or G
cacgactgaagccatttaactgcttatatctttaatagagtcatttagctaagcttggctaaaattagggtttctggtactgaaaaagaaaagcagcatggcaataactttgctaccaattgcaggtatgtggtactaggaaggcctgcgaaaagagcatatgacaagagagggtaaacaagtcttctttgagacacagacaactgaccagagaaataggtgtttgccaggcaagtggagaggggtcttaggaagagctccaggatgagaggacagaacaaatgtctgtgaccagagagagcacggacagtcttcatgttgcaccatccacctgatacaccacatattgaaaaccatggtggctgggttctctgtcctccatccagactcttccataaggagtcgtgccaggatttctcatccctgctttctcttctgggtgatgcccagatggaatggcccatgaggtccccaagtcctttggggggtgtaggtttgtgctgctattgtgtggtcgtgtgagaagtagcactggttggagcagacgtgggtccacacagagccttgtccttgactttcaacaggaacatttcctgactggggtgaccttggtgagatacttaaccattctaaatattgtctgtttcctcacctggaaactgagaagatactaatatctaatccagagattcactacaaaaagcaaaagagctaaaactgatcaagcatntagccaggtccctggtttaaggaaanagtccaatcaacagtgactatttctgttattgctgtcacctttatcttcatcatttcctctccttcatccccttctgaatacacattctccatgtttgaatgtgaagtgtcacctgaaatgtatcctgcacccagctttttctcaggagtgtgtaaacccacagcacaccacaacttttttctttaaccttcttttggaaaaatgacttgaggatgtattcagttatacagagaatcctacagtctgyggtgtgggccaggaaggaacccaatgctgcctgtccagacccctcatggagtaaatgaggaaatagacccagcaaggcagagcctggttggcaatgcctgacaaggtggctttgaagaagaaaacatctccccggtgtgttgaggaagagatgtgacctcatctggagcctcatgatgatgagaagtgc

SEQ ID NO: 4156 - DNA, 632 bp, Homo sapiens
ctgggtcaaatggttgttctgtattaagtttcttgaaaagtggtttgaaaatataatgctcaatagaatcaggtatagtaaaatagtacacatgattcaaagactgtgaactgagagtaacaacaaatttccacacaaacatattgcaagttagaaaatagctgtattttaatcaattattccacaatcatttactgaatagctattataagcyaagactttaatcagattctggaatatacatacagaggagaataaggtatgattcctgtcctcaagaaattcattatcaagaattgaggtcagatgggaaaacaccacccgtggtagaatgcaagaagtactaccacagagggatgttcaagagtgatttatcacatatcacaagacaggtcagtggttcttcctctacactatactaatctcttatgactctttcagctgcaaagggccaattttagcacaaggccagtgggcttgggtactactatacgtagtagctgactacttacagataaaaggaagagatggaaagctcagagatcaaaaaactcagatttctgcctgtttctaccaagtggtcaaccttgacaattaccactgtcttcagaaaagcatgacctttatttccc

SEQ ID NO: 4157 - DNA, 1267 bp, Homo sapiens
tacctcaacccttgcagaggagcactaagctagtgtcctgtgacttactgagcatattgatggtcttgctttactgcttacttttaggtcatcttctattcattagaaaacactaggcactgcatgaagcactcctatyatcttgttcaattcttataatcttgtagtaattccccttacgatgtgatagttgagataagatacataagatatgcttttttgcccaagtcacctacctaggaaatggaagagacaacgtttgaactcaagtctgattgagagcaaggatgacatctgtataatgccagcttcctggcatagattactgctattcatcaagagagtaaacccagagaaaaatttgttttaccctacataccttttaaaattgtatttatttgtaattatttacaaaattatctaacagcactttctcttgcactttaggttggctgcaacacagcaatcatgattgttgatttttctgtcattattgatcctactaattctaacacatgcttatgggattttagatgaataagtaaacgaagttatttttgagaactagagaagtatgaaatctggggacccatcctttgtaatctttaaaaatgccacaaaaggccaggcaaagtgagtggctcatgcctataatcccagcactttgggaggttgaggcaggaggatcacttgagcccaggagtttgagaccagcctgggcaacatggtgagaccccatctctacaaaagaaaaaaatgccgcaaaagataatctgctcataaaagactgaccacatgctgcctctttgtctatcccatctaactatatggtcttgtttgctattgtgctcctagttcaattgcaacttctgcttttaaaatggtgataatgacactatagctactactataaatcaccatctgcacttatgttgagcacatggtatgaatcagagtatcaggcactcattatttcaatagcactgtgtagcaaacctccctagaactcaatgagcattttccccagcaagtggacatggatcaaccaatttacactcagcttaaatgggcatctctgcttcacactgtgggtctacatttgattcttcactgtgagttgggctcacgtctcccacatgaatcttccttctggtcccaggctgaaggaacagtagctactcaagggaagctcttctagtagagacgccacaagtgcaagtgggcaaacccaactgggcaagcacatttccgggttttgctgtgtcac

SEQ ID NO: 4158 - DNA, 582 bp, Homo sapiens
aaattgagctcaattgtttctttaatctgaaaagaaacttgaatctcctcagtcttctctgagctgcagaaatgggcagtaacccaatcctcttctgctgctcaagaagcaggcccaatacagatgtcagcacaccctcactgaggacttttccatgtcaaacactatatgcggcattgaaacaaggatcctaaggcagcttttgctctcagggcttcctctgtgcacaattcccagggcacatttcccttatgagtttctgtgcatgacagctctagtctygatgtacgtgcttgtgatactatctactcagatacagctcctagtctcaagattgcaatgtgacatgggaagtgctggaatagagataggacaaaaacattcaagaggtgaaagtggttccataaagatagtagtgtctgaggagagtcttaggggctatattgaatttagacaaggaaaaagaagggcaggtgattataccagagggaaacagcaatccctaaagacatgaaggagcaaacaagcaagaaaagtgctgaagttcagataaaattccacattgctctggctgctccaaag

SEQ ID NO: 4159 - DNA, 718 bp, Homo sapiens
tgagatttgggaggcgacacacaccgaaaccatatcaccatccatgacatcgtttgcattgattataaggagaaaccagttgtgttacttgtgcatttaaaagattttctaggacttggaaaaatttcttcattcaagttgatataattgtggatagctttcctaacaacaaccattaaattactgtaacttatggcttattctcggtgcttatgtaagcagagggcctgctgcccaaggagaacttggtgcataatttttccagggacggaaatatcgtgatccaagtaaacaattctgtttttactgttgagtcctagatcatggggggaatgaatgacrtgatcatccgtcaaatatttgttcgtctttttgttcgggtgcacagcaaacaatacaaacagtactctcttgtgaagatttcctcatttctgtttctcatttcacttctcagtgttttcgttttgtccttttcactttgctaagtcagtcagtaaaggtgaccagtgatttaattgcagtcaaatccagcgggcatttcctagccccttcctcacaggaccctttgtctgcctttgacatccgttacttccaaactgatattttctccatggagtctctcttttcttggcttttgaaaagattcatctgtaagtatttgtttgtctttaaatggtgaagtctgttttgttttgtttctttttttctttttttgaga

SEQ ID NO: 4160 - DNA, 628 bp, Homo sapiens
gtgtcacttaagatctaaacttgtaaccatgctagatgtgtttctaatgtgacaacatcacgaaccacgagtccagaagcctaatccttaatcctacctcctcatgatgaagtctcatgctctgtgctcaacgtggttagctgcacaagatgtaaaccaaagcttcactgaaccctcgacccaaatcagtaactcaagtgcgtcaatcataatgaacctccccaaactcagtttttatgattatttttgaggcagggtctcactctgtcgcccagactggagtgcagtggcaggatcagggctccgtgcgrccccgaccttccaggctccagcgatcctcccgcctcagcctcctgagtagttgggagtagagatgcgtcccacatcgcctggctaatttttgtatttttgtggagaggggatctcgccacgttgcccaggcttgaagccagatcaagcaattgggttcttcggatttccgaaatagaccccaatattctgcctttagcgcccagaggatgcagatgtaccttctctcaggccgatgacctcaggcctccccggtccctggagctctaggaaaggtgagcgcgatctcgcgcccacacccagtgctctgggtcataag

SEQ ID NO: 4161 - DNA, 939 bp, Homo sapiens
cgaaagtgttcttaaaagaggcagaacaaattccttccttaactacaaaaatctataaaataggaattctttttaaaatcatgacaactcattgtaacaacattataaatttataagagaaaaaatgagaaatgaatcatattttatgcacgaaatttgcagtagtccaagcaattagagataattagcccaatggctccagacggaaagggaagactttgtttactcttgctgtagcagggactcagagctgaaggttgcagccagatttgtaaagcagcttgtcgtagaatagagtaagaattctgtaactttctagcaacaatatagttgacagtagttatgatattactgataaacttggttgatctactaaaacattcacagactcaatttttattatctttaattgtagtaaaaaaagacatagaacaaaatttaccatcttaatcatttgtaattgtactgttcagtagtgttaagtatatttagattgttgcgcaactgatctacagaattttttatcttgcaaagctaaactttatatccttttaaaaactccccattttccctcctcccagtccctggctaccaccattctactttttgtctctatgaatttgactaggtctctaatataagtggaatcacacagcatttgtccaattctgtgttgcttgtttcattagcataatgtcttcaagctccatccattccttcctctttaaggcttgccaaggcattcttacaatttaattactttccatttataagaacttgtaaaatgcttactttaaaatttttattttaattaaaattggagaaaataaaatttttattctttatctcatggtttgtgctcaaatcagaaatatagttagatatttacactgtaaactctacctataaawtcttgacatcaatgatggttattttaca

SEQ ID NO: 4162 - DNA, 550 bp, Homo sapiens
tgtggaataacagaaggaagactatgtgaaggcacagggagaagacagccatctacaaacccagaagagaggcctagaacagatcccttccttcccccacasccctcaggagtaaccaaccctaccaacaacttgatcttggacttctaacctccagaactgtgagaaaataaatttttgttgttaaatatacccagtctgagacattttattatggtagcctgagcagactaatacaaaggcagatgcctgactcttcctaggtcttaataaagcaaaacagtaccttcccacttgagctcaacacaacagtgccttgttgctatatcctagttacctaccctcaccattcagacttgatactttaaaactctttcctatagccctcatatcaaaacccacattataccaaaaatgaaatgaatcaaggcacctcactaggtctcttcaatcttttatatataactaatcacttttccccacttcctccctcctttcatatcaaccgccaactgtactccttgaaccccttcatgacaaatttagggtg

SEQ ID NO: 4163 - DNA, 745 bp, Homo sapiens
gcatgtctatagtcccagctgctctgggggatgagatgggaggatcccttgagcccaggaagtcgaggctgcagtgagctatgatcgtaccactgcactccagcctgggtgaaagaaaaaagtccctgtctctaaagaaaaaaataaattaattaaatgaataaatggagaagattgcatttgaaatatcactgcatgtatttttttcctttggagaccttcagcttcattcctgtggcccaatggaaattcctgccccaaggaagggagagacagaaagctacctgagaggagagggccctctgaggtaggatctgtctcygtgcaacaggatgggagtgggaagccctcctggtgctgggaggtgggggaaacagagggagagggaaagaggaaggggtggaagatcagaggcatggttctgattcccccggttggaggattcagggggatcagggcctccctgcccttggcatctcctgggggcactgcaggtctctcagagaagtccgacagcaggatggcaatgacggagagaagtcatcaagaatctaggtggcggacgtgaggttgagctagcatctacgaagcccagaagtacttaagagaggtccgctgggactaaagcagagaggcttccgagagagagccatgagtccagaggctcttctgtggacaccgcagacttcagcaagcagccacccgtggtccctcactaaaccaggagagaactgcacacctctgt

SEQ ID NO: 4164 - DNA, 745 bp, Homo sapiens
gcatgtctatagtcccagctgctctgggggatgagatgggaggatcccttgagcccaggaagtcgaggctgcagtgagctatgatcgtaccactgcactccagcctgggtgaaagaaaaaagtccctgtctctaaagaaaaaaataaattaattaaatgaataaatggagaagattgcatttgaaatatcactgcatgtatttttttcctttggagaccttcagcttcattcctgtggcccaatggaaattcctgccccaaggaagggagagacagaaagctacctgagaggagagggccctctgaggtaggatctgtctctgtgcaacaggatgggagtgggaagccctcctggtgctgggaggtgggggaaacrgagggagagggaaagaggaaggggtggaagatcagaggcatggttctgattcccccggttggaggattcagggggatcagggcctccctgcccttggcatctcctgggggcactgcaggtctctcagagaagtccgacagcaggatggcaatgacggagagaagtcatcaagaatctaggtggcggacgtgaggttgagctagcatctacgaagcccagaagtacttaagagaggtccgctgggactaaagcagagaggcttccgagagagagccatgagtccagaggctcttctgtggacaccgcagacttcagcaagcagccacccgtggtccctcactaaaccaggagagaactgcacacctctgt

SEQ ID NO: 4165 - DNA, 850 bp, Homo sapiens
taaagttaacaaaggagtaatctcttatgaatgagagctccagagacttgaaaataactgtaaaatttctgtctcctctctttattaacacaggtaattattacttttacttaccatacacaagacaattaagtaactgagtattttaccaaataacatacaagaattctatcagaaatctgaacgccgaaggaaaaaagatagctaamcttcaacaagtagctctccatgtccttaagagcagacctcttttttcttggaatatgttttctgttgagaccttcactatcattaagatttccaacgcaaggtgactctaggactggccttgtagcataagcagtgaatagagatctggatctggtctgctctttctccacagtaagttgtgtactgacctctgctatcatctcattagttctatgaagattgcaaaagacaaatgcttagtatttcattttttcctaaatgattcctaaatgacttcgattgttctaaaagttgccattaagagtaaatggaatataccataagccgtgttttaactctgaaaatgtgttagagcatgcctactgtatccaattatagttttaacattgttctaaagaagtacatctatttctagagggatttctaacaaacaagtagttcaaagagagggagggggcagaaaagactatcaatgatgtatggcttcatagttaacacttgttgcccatctggaatgactctacttatacgattcttaaggatgccattagaattacttgtattccaagggtaactatgtgaaatgatgaagatattaatttgcttgacaaaataaccatttcactgcgtataaatatat

SEQ ID NO: 4166 - DNA, 850 bp, Homo sapiens
taaagttaacaaaggagtaatctcttatgaatgagagctccagagacttgaaaataactgtaaaatttctgtctcctctctttattaacacaggtaattattacttttacttaccatacacaagacaattaagtaactgagtattttaccaaataacatacaagaattctatcagaaatctgaacgccgaaggaaaaaagatagctaaccttcaacaagtagctctccatgtccttaagagcagacctcttttttcttggaatatgttttctgttgagaccttcactatcattaagatttccaacgcaaggtgactctaggactggccttgtagcataagcagtgaatagagatctggatctggtctgctctttctccacagtaagttgtgtactgacctctgctatcatctcattagttctatgaagattgcaaaagacaaatgcttagtatttcattttttcctaaatgattcctaaatgacttcgattgttctaaaagttgccattaagagtaaatggaatataccataagccgtgttttaactctgaaaatgtgttagagcatgcctactgtatccaattatagttttaacattgttctaaagaagtacatctatttctagagggatttctaacaaacaagtagttcaaagagagggaggggrcagaaaagactatcaatgatgtatggcttcatagttaacacttgttgcccatctggaatgactctacttatacgattcttaaggatgccattagaattacttgtattccaagggtaactatgtgaaatgatgaagatattaatttgcttgacaaaataaccatttcactgcgtataaatatat

SEQ ID NO: 4167 - DNA, 655 bp, Homo sapiens
atatttcattattttatatttcatgttgattattttgttatatattccatttaccttgtgtattttatttatttatttatttatttttatcagcatggaaactctgcccacaatagctakcaactgattattgctgacataagaaaaagctattacatttgacaaattacttgtacattattccatattaaataattttttcacttgatcttcttgagtgaatacattttttgtttctgtatctcttcctcattccttaacagaaattttaaaataactttcatttcaatggtaaaatacggttggttggtgtgatttccaaacaaatgtactttttttttccccctttttcaacttcttgtttagatttaggagatacatgtgcagggctgctacctgggtatattgtgtgacactgaggttggagcacgaatggtcccgtcacctaagtagtaagcacataacacttaatttctaaacccttacctcattctgtccctccccaccagtagtccccagtgtttattgttgccgtctctacgtacatgagtactggacatttagctcccacttgtaagtaagaatacccagtatttgttctcctcttcctgagttaatttacttagcataatggcctccagttgcatccatgttg

SEQ ID NO: 4168 - DNA, 1203 bp, Homo sapiens
cactgcacactgcacacccacactcacgtctgtcggttgcgctcacagaagggctggtttggacagcatagatgtggctgctccgagccaggctgggtttggcagatgtgttgggaaacrgcgatctgttggatgctgggctgtaacctgtggctggtgttgggcattttggggcctgagagagggccaggctggagggtaagtcaggcagggaagcagtgacgcctccagcgtctcccggacagatttgtcacgagactcatcttccgtgcgaagccctggtcttttagagcctcatgtgctcatcgtggccactgacttctggaggctcgtccccagtctagggctcttcagggtggctttgggaggagtcaggatgtctctgatcacagcagctcccgggagggggcaccaagctcaggtggttcccagcaggcactttgtcaccagggcttgaacacccgtccctgcctgggtcactgcctgcctctgtggtcacatttatcaaggctgtggacaggcagaatctacctgaatccaccagcgtccgcagtgtctgcactgggccagagggtgatgctgccccgcgtgtcctgcgtggttttgtgtgttttttgggggtgttgggatgggttgggcttccgctgtcctgttgaccaggagacagaactcttcaaggtgtaacggaggcagaatcctagcttcgccttctcccatcctgggagacttttcctattccagaaagagggcccaggaatgcagcctcccaggggtgctgtgggaaggacacgagtccactgcgacacagtcacggatccagcgctcagcccaggcgcccctcgctccctaacagaaaccaccagcaaacctaagccacggggttctgtgtgcagaggcctgatggaccacagttaactctcagatcaatggagacagggccctggtttttggaagtgacttgtaatgctgctggggcagatggagataacctcatctttaaattccatggaaaataaaatggcagatgctcctgagctgcagcccctcacagggcgaaagacgcacgtggcacctgcagccagtgtgatcccggcctcactggccgacgggcagctgctcacgtgagcgcgtatgagcctcactctgcagaagacgccagagggaaacagctattcctgtttccaaagagaaggccctttcttt

SEQ ID NO: 4169 - DNA, 1203 bp, Homo sapiens
cactgcacactgcacacccacactcacgtctgtcggttgcgctcacagaagggctggtttggacagcatagatgtggctgctccgagccaggctgggtttggcagatgtgttgggaaacagcgatctgttggatgctgggctgtaacctgtggctggtgttgggcattttggggcctgagagagggccaggctggagggtaagtcaggcagggaagcagtgacgcctccagcgtctcccggacagatttgtcacgagactcatcttccgtgcgragccctggtcttttagagcctcatgtgctcatcgtggccactgacttctggaggctcgtccccagtctagggctcttcagggtggctttgggaggagtcaggatgtctctgatcacagcagctcccgggagggggcaccaagctcaggtggttcccagcaggcactttgtcaccagggcttgaacacccgtccctgcctgggtcactgcctgcctctgtggtcacatttatcaaggctgtggacaggcagaatctacctgaatccaccagcgtccgcagtgtctgcactgggccagagggtgatgctgccccgcgtgtcctgcgtggttttgtgtgttttttgggggtgttgggatgggttgggcttccgctgtcctgttgaccaggagacagaactcttcaaggtgtaacggaggcagaatcctagcttcgccttctcccatcctgggagacttttcctattccagaaagagggcccaggaatgcagcctcccaggggtgctgtgggaaggacacgagtccactgcgacacagtcacggatccagcgctcagcccaggcgcccctcgctccctaacagaaaccaccagcaaacctaagccacggggttctgtgtgcagaggcctgatggaccacagttaactctcagatcaatggagacagggccctggtttttggaagtgacttgtaatgctgctggggcagatggagataacctcatctttaaattccatggaaaataaaatggcagatgctcctgagctgcagcccctcacagggcgaaagacgcacgtggcacctgcagccagtgtgatcccggcctcactggccgacgggcagctgctcacgtgagcgcgtatgagcctcactctgcagaagacgccagagggaaacagctattcctgtttccaaagagaaggccctttcttt

SEQ ID NO: 4170 - DNA, 580 bp, Homo sapiens
aaatgatataataataccatataagatattttctaagaccttggattttgtcttgttttcatgacttcactctgatacattgtgctccccttatccttccaataaactacctttctgctcaggagaaccagagtcagcgtctgttgctggcatccagacatctctaacaccccctcacaggctgctagaagcctccactgagatcatgtgtgtgagccccttgatggttcctaatgatggcaatagttaaccttttccacggacctgccctgygcctggtcctgctctgttttacatgagtgaagtcattcaattgctcagcccttgccagctgcgcacactcttgccccactttacaaatgaagccacgaagccacatggtggttggaggactcacggcaagtgacggagctgggaaggggccaattcaggactcaggtcaagacatcctggttccagagccccaccgtgacccaccatgttactcagcacaggtgagttacactgatctttatctgtcttttcatgccctggagatggaattttcctagaatagccactggctcccccgcctggtaca

SEQ ID NO: 4171 - DNA, 1217 bp, Homo sapiens
  misc_feature (1)...(1217): n = A,T,C or G
cactctggcacctggtgtccctgagtggatggccaagcccctgggtctctgcagagcctcattaagctgcacacctkcctctccagctataactggatgtttgctttcctgtttctttgattctgaatacatgctgtcctggccaccacagtctccgtctccctgcggaggtcacaaagtggtctcggtctcggtctccctgccaaggtcactagttataccctcaagggtggggtgggaggcaaaagccgcttcaggtggctgggtcagctccccatcgaggctttccactggacagggaaagggcggacctctgccctgtccacacctgctcttcttctccccagacaacttcctccttccagggctggtatcctctgcagctcctttgcacccacatcccccacccacaccctccggcgtccacaagatcatccaagaaccaggccctggaggatccttctgggtgcctccccacattctctgcgccagtggccagcaccaagacccccgattttctgtgctcagtgaagtccctgctaccctttcctggtaagagcatcgaaacattcaccccaggacaagtgagggcatcagcgaaatggtggcatcatcaccacaggtcacaactcagatgtccccagggacatccaggtggggatgatggcaaactccngggggggccaccattcagccccactgtcctgccacacagcaggtcagacctgcaccgcgagaagttcaggtttcaggaagaagctagcaattctgatgctaaggtaagaatcgtctgatgtaaatattggccactgtcttgaaactgaaacagtgtttgggtcacctgcaggctgagtggtgcaaagaccactgcccggcaggctccggtccaagagcgagcaagcctgccgtttcccaaatgactgtcgcatgcgatctggcagccagcagcccctgaggctggcacacacaaggttgttctatccctgtcttacagataacaaggcagctctggagggcgggtggtttacccaaaatcacagttcacctaggtgtgcacctggggctgtttctgagctgcacggcccaggcctctattagttccctgccctggctcaaggggcaggctgcccacggtggtgctcacaggacgatcctaggtccctgcaagtatgagaagcgtgtgagtattttgtttaatagttaagtatataatgcat

SEQ ID NO: 4172 - DNA, 1217 bp, Homo sapiens
  misc_feature (1)...(1217): n = A,T,C or G
cactctggcacctggtgtccctgagtggatggccaagcccctgggtctctgcagagcctcattaagctgcacaccttcctctccagctataactggatgtttgctttcctgtttctttgattctgaatacatgctgtcctggccaccacagtctccgtctccctgcggaggtcacaaagtggtctcggtctcggtctccctgccaaggtcactagttataccctcaagggtggggtgggaggcaaaagccgcttcaggtggctgggtcagctccccatcgaggctttccactggacagggaaagggcggacctctgccctgtccacacctgctcttcttctccccagacaacttcctccttccagggctggtatcctctgcagctcctttgcacccacatcccccacccacaccctccggcgtccacaagatcatccaagaaccaggccctggaggatccttctgggtgcctccccacattctctgcgccagtggccagcaccaagacccccgattttctgtgctcagtgaagtccctgctaccctttcctggtaagagcatcgaaacattcaccccaggacaagtgagggcatcagcgaaatggtggcatcatcaccacaggtcacaactcagatgtccccagggacatccaggtggggatgatggcaaactccngggggggccaccattcagccccactgtcctgccacacagcaggtcagacctgcaccgcgagaagttcaggtttcaggaagaagctagcaattctgatgctaaggtaagaatcgtctgatgtaaatattggccactgtcttgaaactgaaacagtgtttgggtcacctgcaggctgagtggtgcaaagaccactgcccggcaggctccggtccaagagcgagcaagcctgccgtttcccaaatgactrtcgcatgcgatctggcagccagcagcccctgaggctggcacacacaaggttgttctatccctgtcttacagataacaaggcagctctggagggcgggtggtttacccaaaatcacagttcacctaggtgtgcacctggggctgtttctgagctgcacggcccaggcctctattagttccctgccctggctcaaggggcaggctgcccacggtggtgctcacaggacgatcctaggtccctgcaagtatgagaagcgtgtgagtattttgtttaatagttaagtatataatgcat

SEQ ID NO: 4173 - DNA, 1271 bp, Homo sapiens
tgaaatcacagaattttttttcttagagatgaagggagcagagacagaggtaaatagtagtgatgattgtatattgggatgcaaattactcaggaatggtattctaaaatcagctcaagacaaaatggaggtgttcaaaattgcatttgaaaactacccaggaaggcacctgatgcagatgagccaaccatctcttacgaagctcaacactgccaggttttctttggttgagcagcagataaaataatttatttgcactgcaggggccacagtgaacttttaaatacggctacgtgctcacaagggatctgagacagacttggaccatggcagatttctgtctcttgtctcagtctggggaggataatcattgatggggacagcaggagagtactattttaacatctctcggtttctctaaaaagcaggcatagtttaatttgcatgaattatttaaaataattatttaatgcaatgaaacactctaccaagcagcctcagttcttgtgtttattagctgctgtcagtgagcctccatctccctatatctgactcattgagtgaccatctgaccttcatttgcctgttttctttctttcttttttgagatagagtctcactttctcgcccaggctggagtgcagtagtgcaatctcagctcactgcaatctctgcctcccgggttcaagtgattctcatgcctcagcctcccaaatagctgggattacaggcatgcaccaccacactcagctaatttttgtatttttagtagaaacagggtttcaccgtgttgcccaggctggtctcgaactcctgacctcagatgatccacctttcttggcctcccaaagtgctgggattataggcatgagctatcgtgcctggccgagttgcctgctttctactgctatgcacagtcaccaaagtttaggagctttgcraagtcaccaaagtttaggaccatgtgacaatcactgttattttctgtccaatagggttatctcttctaagctgctgaaacaaggactgtcacctgaatatttttctcttggtttgtttcatttggttaaataaaaataagtcaaattagttaaagaaaaaacttacacagaatatcacaattcacatctatacacttactacatatagacaagatccaaattaagagagctgctaccgacagtgtcagagtttagggaaagttcacaatatcataaagcttgaagactcctagttcagtttttagacaggatttttctgattacatatgc

SEQ ID NO: 4174 - DNA, 1271 bp, Homo sapiens
tgaaatcacagaattttttttcttagagatgaagggagcagagacagaggtaaatagtagtgatgattgtatattgggatgcaaattactcaggaatggtattctaaaatcagctcaagacaaaatggaggtgttcaaaattgcatttgaaaactacccaggaaggcacctgatgcagatgagccaaccatctcttacgaagctcaacactgccaggttttctttggttgagcagcagataaaataatttatttgcactgcaggggccacagtgaacttttaaatacggctacgtgctcacaagggatctgagacagacttggaccatggcagatttctgtctcttgtctcagtctggggaggataatcattgatggggacagcaggagagtactattttaacatctctcggtttctctaaaaagcaggcatagtttaatttgcatgaattatttaaaataattatttaatgcaatgaaacactctaccaagcagcctcagttcttgtgtttattagctgctgtcagtgagcctccatctccctatatctgactcattgagtgaccatctgaccttcatttgcctgttttctttctttcttttttgagatagagtctcactttctcgcccaggctggagtgcagtagtgcaatctcagctcactgcaatctctgcctcccgggttcaagtgattctcatgcctcagcctcccaaatagctgggattacaggcatgcaccaccacactcagctaatttttgtatttttagtagaaacagggtttcaccgtgttgcccaggctggtctcgaactcctgacctcagatgatccacctttcttggcctcccaaagtgctgggattataggcatgagctatcgtgcctggccgagttgcctgctttctactgctatgcacagtcaccaaagtttaggagctttgcgaagtcaccaaagtttaggaccatgtgacaatcactsttattttctgtccaatagggttatctcttctaagctgctgaaacaaggactgtcacctgaatatttttctcttggtttgtttcatttggttaaataaaaataagtcaaattagttaaagaaaaaacttacacagaatatcacaattcacatctatacacttactacatatagacaagatccaaattaagagagctgctaccgacagtgtcagagtttagggaaagttcacaatatcataaagcttgaagactcctagttcagtttttagacaggatttttctgattacatatgc

SEQ ID NO: 4175 - DNA, 1271 bp, Homo sapiens
tgaaatcacagaattttttttcttagagatgaagggagcagagacagaggtaaatagtagtgatgattgtatattgggatgcaaattactcaggaatggtattctaaaatcagctcaagacaaaatggaggtgttcaaaattgcatttgaaaactacccaggaaggcacctgatgcagatgagccaaccatctcttacgaagctcaacactgccaggttttctttggttgagcagcagataaaataatttatttgcactgcaggggccacagtgaacttttaaatacggctacgtgctcacaagggatctgagacagacttggaccatggcagatttctgtctcttgtctcagtctggggaggataatcattgatggggacagcaggagagtactattttaacatctctcggtttctctaaaaagcaggcatagtttaatttgcatgaattatttaaaataattatttaatgcaatgaaacactctaccaagcagcctcagttcttgtgtttattagctgctgtcagtgagcctccatctccctatatctgactcattgagtgaccatctgaccttcatttgcctgttttctttctttcttttttgagatagagtctcactttctcgcccaggctggagtgcagtagtgcaatctcagctcactgcaatctctgcctcccgggttcaagtgattctcatgcctcagcctcccaaatagctgggattacaggcatgcaccaccacactcagctaatttttgtatttttagtagaaacagggtttcaccgtgttgcccaggctggtctcgaactcctgacctcagatgatccacctttcttggcctcccaaagtgctgggattataggcatgagctatcgtgcctggccgagttgcctgctttctactgctatgcacagtcaccaaagtttaggagctttgcgaagtcaccaaagtttaggaccatgtgacaatcactgttattttctgtccaatagggttatctcttctaagctgctgaaacaaggactgtcacctgaatatttttctcttggtttgtttcatttggttaaataaaaataagtcaaattagttaaagaaaaaacttacacagaatatcacaattcacatctatrcacttactacatatagacaagatccaaattaagagagctgctaccgacagtgtcagagtttagggaaagttcacaatatcataaagcttgaagactcctagttcagtttttagacaggatttttctgattacatatgc

SEQ ID NO: 4176 - DNA, 622 bp, Homo sapiens
taatgtgataatgggaatgtgtgtgtttctccctaccccagataacatatttgtattttattttcactcagacacagaggagcagggaggtggtaggagcagggccaaagctattagatagcatcaaagttactgtcgttcagtctttttgttattgtttttgttttacaaaaagcaaagaacaagccaaccaacaaacaaaacagaagctgttttgcaaattcaggtccagcttatggttcactgtggctctgaagttttcttttttttcctttctggttgaactcctacacaaccaggcttcctccagctggtatgttgtacatcatttttatcaatgatctgcataaacaagaaaatcctgtcccattccccacctccaacagcacagataagatgcccatttctttccatctccttctttgcaataagacccttcctcactgacagcattgtgacgaaggagacataacaaggaccatatcccctgaatctttgccccagcgcccccacccgtatcctgtgtaggattctaggttggtctgcgcraggggtaagagtggcagtgcaaactgtgggcaatcagagcttcagcccttgttctttaccttccttttgactt

SEQ ID NO: 4177 - DNA, 373 bp, Homo sapiens
gaagagctagactccaaggcactcttcactttcgaagtatttgttgagagttcagggagcccttgaacttacggaaaactgcatctttatttctactaactctaactgaagagtagtcaattatgatgtggaccacaaaccacaatagcataagcagttcctgtgatgttgcatgaatagaaaycatagattttttttttatcactttacagttggcagagcatctcaaaatatcatttggactcattgcaacattgaaagtgtagtagttattagccaggcgcagtggcacatgcctgtaatcctagcactttgggaggccatggcaagcagcttatttgtgcccaggagtttgaggccattcttgggcaac

SEQ ID NO: 4178 - DNA, 736 bp, Homo sapiens
gctcttcagagaaaaaacatgggagcggggctggcctgcaaatgatctcgagggttttttttttcatctgccagggaagaaagaagtgctgtggctcccagatcaattctccattcccaacaaaggctgggtgagaggcgtgatcctgaaagacttatacttctctccatgaacggctgttaaagtttctaatcaatcatgtctctcacccaggagaattagctaaacatagcaaggcttgtattttaaaacacaaatcgctgacaataacttaaaatgtgcgtaagtggtcatttagggtgaaggatgtgaaaacctttaaggtttactctttttgtttcgctcccagagatgagaagaaagacatgcaaatagtggattgaagatgcttgctaraccaggaaatatgattccccttgactgttaggtaacaggaaaaacaaactgggatggcagcatgggcttgggctgacagcccggagctgaggctgggctccattgcttccaagttttctggccttaagcaactcaatttcccaatgccacgctttcttcatcaatttaaaaaaaaaaaaggatgaagtttgatcagacgatgcctgaaggtctttcccagcatgctgtgcctttgtaaggaacaccatatcttagaaacattgaaacttctgaagtatgaactagaggtagggaactgggactgtcacctctgtagccttaacacctagatggggtcatt

SEQ ID NO: 4179 - DNA, 738 bp, Homo sapiens
acctccatgctggtatgaacccatgattgtactcatggccctaaacccatgtatgagagtcaacatctctttaattgacctgctccggagaggagattcctcaattgcccatgagatggttttagaaatgagtcaccatctcatttgtggtcaggtgtttacatatgacagtcacaattccaactgtaagctgcatccatgtatgaagttcaagaactcwccagtacactgtgtccttgtgtgaatgcaataatcctaataattggtggggtgtgcacacaagataaacagtctcgtctgtgtgctgggcctgtgatgacactctctgtatcacctgagggctttatacagtatgtgagggagtggaaataatctatgaccttcctacaaaaaggagactcaggatcttacccatttctctaagcttagctacaagagacagtatctctcctggtgactggtatgagagttattattgcacctgtcagccaggccaagatgtatgtaacaatcccatttgtcagtagagagtgagcaggatggtcacatcacatgagtgctgggaaagggtaaaatcacaatcatttttgaggccagggaccagggataaaagaaacatcaccttagtgctaggccaagggctatgttccactgttttctgtgggcaaggtgcaggcaaaacaaattcatcacctgttgctgggcccagcgatgtgtcacaattttccctgtgggcaa

SEQ ID NO: 4180 - DNA, 738 bp, Homo sapiens
acctccatgctggtatgaacccatgattgtactcatggccctaaacccatgtatgagagtcaacatctctttaattgacctgctccggagaggagattcctcaattgcccatgagatggttttagaaatgagtcaccatctcatttgtggtcaggtgtttacatatgacagtcacaattccaactgtaagctgcatccatgtatgaagttcaagaactctccagtacactgtgtccttgtgtgaatgcaataatcctaataattggtggggtgtgcacacaagataaacagtctcgtctgtgtgctgggcctgtgatgacactctctgtatcacctgagggctttatacagtatgtgagggagtggaaataatctatgaccttcctacaaaaaggagactcaggatcttacccatttctctaagcttagctacaagagacagtatctctcctggtgactggtatgagagttattattgcacctgtcagccaggccaagatgtatgtaacaatcccatttrtcagtagagagtgagcaggatggtcacatcacatgagtgctgggaaagggtaaaatcacaatcatttttgaggccagggaccagggataaaagaaacatcaccttagtgctaggccaagggctatgttccactgttttctgtgggcaaggtgcaggcaaaacaaattcatcacctgttgctgggcccagcgatgtgtcacaattttccctgtgggcaa

SEQ ID NO: 4181 - DNA, 1206 bp, Homo sapiens
ttcagataaatatcctgtgttatattgagaaaaaaaattttytggtatatcattttactaatgtacttttttttttttgagacagagtttgctcttgttgcccaggctggagtgcaatggtgtgatcttggctcaccaaaacctccacctcccaggttcaagggattctcctgcctcagcctcccgagtagctgggattacaggcatgtgccaccatgcccggctaattttgtatttttaatagagatggggtttctctatgttggtcaggctggtctcaaactcccgacctcgggtgatccacccacctcggctcccaaagtgctgggattacaggcgcgagtcaccatgccctggccaattgtacttttatgtaaataaaatgtagtacattttaaaataattagataatgtgtgaacttattaatcaggctttttaaaaaaacatgttaagaccatcgtgcattcaatgaagcattattatgccattaaatttaacttatcccatcttactcaagggtataggtaaatgatggtaactatacactatttaataagataatggactaacatttctagtaatctgtttgccagtggctttaaattgcaaataagtcagagaatattattcctgtaggttgaattattactcattttttcttatttaaacttatttttcttaatttttgtgggtacatagtatgtgtaaatatggcatatatggcatattttgatacaggtatataatatgtaataattacatatgggtaaatgaaatattcattacctgcagcatttattgtttgtatttgtttgtattataaactaattctgcacttttcggtttttttttgagacgagtctcactatgtcacccaggctgtgcacgcctgggtgcattggcgtggtctcagctcactgcaacctccgcctactgggttcaagtgattcttccgcctcagcctcctgagtagttgggactacaggcgcatgccaccacactcagctaatttttgtatttttagtagaaacagtttcactacgttggccaggtttgtcttgaactcctgaccccatgattagccccctcggcctcccaaagtgctgggattacaggtgggagccaccacacccagccacttttagttgttttcaaatgtacattaaattgttgttggctacagggtctcttttatggtcataaga

SEQ ID NO: 4182 - DNA, 1206 bp, Homo sapiens
ttcagataaatatcctgtgttatattgagaaaaaaaattttctggtatatcattttactaatgtacttttttttttttgagacagagtttgctcttgttgcccwggctggagtgcaatggtgtgatcttggctcaccaaaacctccacctcccaggttcaagggattctcctgcctcagcctcccgagtagctgggattacaggcatgtgccaccatgcccggctaattttgtatttttaatagagatggggtttctctatgttggtcaggctggtctcaaactcccgacctcgggtgatccacccacctcggctcccaaagtgctgggattacaggcgcgagtcaccatgccctggccaattgtacttttatgtaaataaaatgtagtacattttaaaataattagataatgtgtgaacttattaatcaggctttttaaaaaaacatgttaagaccatcgtgcattcaatgaagcattattatgccattaaatttaacttatcccatcttactcaagggtataggtaaatgatggtaactatacactatttaataagataatggactaacatttctagtaatctgtttgccagtggctttaaattgcaaataagtcagagaatattattcctgtaggttgaattattactcattttttcttatttaaacttatttttcttaatttttgtgggtacatagtatgtgtaaatatggcatatatggcatattttgatacaggtatataatatgtaataattacatatgggtaaatgaaatattcattacctgcagcatttattgtttgtatttgtttgtattataaactaattctgcacttttcggtttttttttgagacgagtctcactatgtcacccaggctgtgcacgcctgggtgcattggcgtggtctcagctcactgcaacctccgcctactgggttcaagtgattcttccgcctcagcctcctgagtagttgggactacaggcgcatgccaccacactcagctaatttttgtatttttagtagaaacagtttcactacgttggccaggtttgtcttgaactcctgaccccatgattagccccctcggcctcccaaagtgctgggattacaggtgggagccaccacacccagccacttttagttgttttcaaatgtacattaaattgttgttggctacagggtctcttttatggtcataaga

SEQ ID NO: 4183 - DNA, 1206 bp, Homo sapiens
ttcagataaatatcctgtgttatattgagaaaaaaaattttctggtatatcattttactaatgtacttttttttttttgagacagagtttgctcttgttgcccaggctggagtgcaatggtgtgatsttggctcaccaaaacctccacctcccaggttcaagggattctcctgcctcagcctcccgagtagctgggattacaggcatgtgccaccatgcccggctaattttgtatttttaatagagatggggtttctctatgttggtcaggctggtctcaaactcccgacctcgggtgatccacccacctcggctcccaaagtgctgggattacaggcgcgagtcaccatgccctggccaattgtacttttatgtaaataaaatgtagtacattttaaaataattagataatgtgtgaacttattaatcaggctttttaaaaaaacatgttaagaccatcgtgcattcaatgaagcattattatgccattaaatttaacttatcccatcttactcaagggtataggtaaatgatggtaactatacactatttaataagataatggactaacatttctagtaatctgtttgccagtggctttaaattgcaaataagtcagagaatattattcctgtaggttgaattattactcattttttcttatttaaacttatttttcttaatttttgtgggtacatagtatgtgtaaatatggcatatatggcatattttgatacaggtatataatatgtaataattacatatgggtaaatgaaatattcattacctgcagcatttattgtttgtatttgtttgtattataaactaattctgcacttttcggtttttttttgagacgagtctcactatgtcacccaggctgtgcacgcctgggtgcattggcgtggtctcagctcactgcaacctccgcctactgggttcaagtgattcttccgcctcagcctcctgagtagttgggactacaggcgcatgccaccacactcagctaatttttgtatttttagtagaaacagtttcactacgttggccaggtttgtcttgaactcctgaccccatgattagccccctcggcctcccaaagtgctgggattacaggtgggagccaccacacccagccacttttagttgttttcaaatgtacattaaattgttgttggctacagggtctcttttatggtcataaga

SEQ ID NO: 4184 - DNA, 1206 bp, Homo sapiens
ttcagataaatatcctgtgttatattgagaaaaaaaattttctggtatatcattttactaatgtacttttttttttttgagacagagtttgctcttgttgcccaggctggagtgcaatggtgtgatcttggctcaccaaaacctccacctcccaggttcaagggattctcctgcctcagcctcccgagtagctgggattacaggcatgtgccaccatgcccggctaattttgtatttttaatagagatggggtttctctatgttggtcaggctggtctcaaactcccgacctcgggtgatccacccacctcggctcccaaagtgctgggattacaggcgcgagtcaccatgccctggccaattgtacttttatgtaaataaaatgtagtacattttaaaataattagataatgtgtgaacttattaatcaggctttttaaaaaaacatgttaagaccatcgtgcattcaatgaagcattattatgccattaaatttaacttatcccatcttactcaagggtataggtaaatgatggtaactatacactatttaataagataatggactaacatttctagtaatctrtttgccagtggctttaaattgcaaataagtcagagaatattattcctgtaggttgaattattactcattttttcttatttaaacttatttttcttaatttttgtgggtacatagtatgtgtaaatatggcatatatggcatattttgatacaggtatataatatgtaataattacatatgggtaaatgaaatattcattacctgcagcatttattgtttgtatttgtttgtattataaactaattctgcacttttcggtttttttttgagacgagtctcactatgtcacccaggctgtgcacgcctgggtgcattggcgtggtctcagctcactgcaacctccgcctactgggttcaagtgattcttccgcctcagcctcctgagtagttgggactacaggcgcatgccaccacactcagctaatttttgtatttttagtagaaacagtttcactacgttggccaggtttgtcttgaactcctgaccccatgattagccccctcggcctcccaaagtgctgggattacaggtgggagccaccacacccagccacttttagttgttttcaaatgtacattaaattgttgttggctacagggtctcttttatggtcataaga

SEQ ID NO: 4185 - DNA, 1206 bp, Homo sapiens
ttcagataaatatcctgtgttatattgagaaaaaaaattttctggtatatcattttactaatgtacttttttttttttgagacagagtttgctcttgttgcccaggctggagtgcaatggtgtgatcttggctcaccaaaacctccacctcccaggttcaagggattctcctgcctcagcctcccgagtagctgggattacaggcatgtgccaccatgcccggctaattttgtatttttaatagagatggggtttctctatgttggtcaggctggtctcaaactcccgacctcgggtgatccacccacctcggctcccaaagtgctgggattacaggcgcgagtcaccatgccctggccaattgtacttttatgtaaataaaatgtagtacattttaaaataattagataatgtgtgaacttattaatcaggctttttaaaaaaacatgttaagaccatcgtgcattcaatgaagcattattatgccattaaatttaacttatcccatcttactcaagggtataggtaaatgatggtaactatacactatttaataagataatggactaacatttctagtaatctgtttgccagtggctttaaattgcaaataagtcagagaatattattcctgtaggttgaattattactcattttttcttatttaaacttatttttcttaatttttgtgggtacatagtatgtgtaaatatggcatatatggcatattttgatacaggtatataatatgtaataattacatatgggtaaatgaaatattcattacctgcagcatttattgtttgtatttgtttgtattataaactaattctgcacttttcggtttttttttgagacgagtctcactatgtcacccaggctgtgcacrcctgggtgcattggcgtggtctcagctcactgcaacctccgcctactgggttcaagtgattcttccgcctcagcctcctgagtagttgggactacaggcgcatgccaccacactcagctaatttttgtatttttagtagaaacagtttcactacgttggccaggtttgtcttgaactcctgaccccatgattagccccctcggcctcccaaagtgctgggattacaggtgggagccaccacacccagccacttttagttgttttcaaatgtacattaaattgttgttggctacagggtctcttttatggtcataaga

SEQ ID NO: 4186 - DNA, 1206 bp, Homo sapiens
ttcagataaatatcctgtgttatattgagaaaaaaaattttctggtatatcattttactaatgtacttttttttttttgagacagagtttgctcttgttgcccaggctggagtgcaatggtgtgatcttggctcaccaaaacctccacctcccaggttcaagggattctcctgcctcagcctcccgagtagctgggattacaggcatgtgccaccatgcccggctaattttgtatttttaatagagatggggtttctctatgttggtcaggctggtctcaaactcccgacctcgggtgatccacccacctcggctcccaaagtgctgggattacaggcgcgagtcaccatgccctggccaattgtacttttatgtaaataaaatgtagtacattttaaaataattagataatgtgtgaacttattaatcaggctttttaaaaaaacatgttaagaccatcgtgcattcaatgaagcattattatgccattaaatttaacttatcccatcttactcaagggtataggtaaatgatggtaactatacactatttaataagataatggactaacatttctagtaatctgtttgccagtggctttaaattgcaaataagtcagagaatattattcctgtaggttgaattattactcattttttcttatttaaacttatttttcttaatttttgtgggtacatagtatgtgtaaatatggcatatatggcatattttgatacaggtatataatatgtaataattacatatgggtaaatgaaatattcattacctgcagcatttattgtttgtatttgtttgtattataaactaattctgcacttttcggtttttttttgagacgagtctcactatgtcacccaggctgtgcacgcctgggtgcattggcgtggtctcagctcactgcarcctccgcctactgggttcaagtgattcttccgcctcagcctcctgagtagttgggactacaggcgcatgccaccacactcagctaatttttgtatttttagtagaaacagtttcactacgttggccaggtttgtcttgaactcctgaccccatgattagccccctcggcctcccaaagtgctgggattacaggtgggagccaccacacccagccacttttagttgttttcaaatgtacattaaattgttgttggctacagggtctcttttatggtcataaga

SEQ ID NO: 4187 - DNA, 551 bp, Homo sapiens
ggatcaaaacaaatgaaatggtcagaattataagtcaagtctcttgtttttagtagctmttggaagatcatgatatatagctcttttcaatgtgatattttctctttaacatttgggaaattatgaagacatttcagatttttccagtagatggcagaattgttttaaacattttagattcactgttaaattttttttgaattgatttgaaggagtaatcatttctctaaaataactggatgtattttttcttccaaataagccctgcactactgttttataaactaacttttaagataaagatttttaaatgataatatggatcattcctaatcagtaatgcacaatgatagaagtggcaattatattttgaagaatggataaaaaaattttaaatcaaacatttagttttttcaatagtaagtaacattctttctttagttatcagagatccagaggtcacatgatgtaatcatcaccatgggcatcatcagattgatagaatatcctaaaatattttgattttagctaaaacatgccttcggtttagt

SEQ ID NO: 4188 - DNA, 572 bp, Homo sapiens
atggcattaagaaaattttcaattagttcaaaagtgttaattggtctattttgtggtatgcactaataaaaagtagcatagtaaaaaaatcactttgaaaattttttgttcaactataccaggaaaatacagcctgagttcgtaggagctttgggctagtcacaaactctccaaatctcagctgcctcatccataaatgaagaaaaggacagatccaaaaggctctgcattgacaatccatatctgggaggaaataatagcgtcttaaagttacacacacacacctagaaatacacaaaattaaaaattttaatgataatgatttatctttcatcttcaaggtggttacgtgatttctgaaataaaattggagttaaaacatatttaaattagaaatactttttaatacaaattatgcttagactttttgtaaaaatttgctatatagaaaactacaagtacaaagtcaatcctctcatgtgaaaacattaaagataaaggcaggaggattacttgagccaagtaattcaagaccagcctgggyaacatagctaaatgctattttaataaat

SEQ ID NO: 4189 - DNA, 578 bp, Homo sapiens
tcatatcttataaataagaataggatgcaataaaagttaaaataatgaccatatctccataatcatttgctgtggaaacaagaagtatatttctaawacactgtttggcatcatcagtataatacaagaagaagaggtagaaactgtaaggagacatcagtagagataaaaggatggtattacttaatgacacatgttcatggactgtcagacttaatattattaagttgtcatttttaactgaaatgatctctagagctaaaacaataccaataaagattctatgttattttctttttgtaaaaatcaacaaaaattatttggaaatgcaaatcacttaggataaccaaatcattttatttttcaaaataagaaagaaagctatttccatacattatctgattgagttactataaagctacagttattagtacagtgtgatatgatgaaaggatagatatgtagatcaatggaagagagcagagaatgcggaagtagacccacacagatatggtacattgatttctgacaatgatgccaaggcaattctatgagacaaggaaagatttttcaacaaa

SEQ ID NO: 4190 - DNA, 578 bp, Homo sapiens
tcatatcttataaataagaataggatgcaataaaagttaaaataatgaccatatctccataatcatttgctgtggaaacaagaagtatatttctaatacactgtttggcatcatcagtataatacaagaagaagaggtagaaactgtaaggagacatcagtagagataaaaggatggtattacttaatgacacatgttcatggactgtcagacttaatattattaagttgtcatttttaactgaaatgatctctagagctaaaacaataccaataaagattctaygttattttctttttgtaaaaatcaacaaaaattatttggaaatgcaaatcacttaggataaccaaatcattttatttttcaaaataagaaagaaagctatttccatacattatctgattgagttactataaagctacagttattagtacagtgtgatatgatgaaaggatagatatgtagatcaatggaagagagcagagaatgcggaagtagacccacacagatatggtacattgatttctgacaatgatgccaaggcaattctatgagacaaggaaagatttttcaacaaa

SEQ ID NO: 4191 - DNA, 1175 bp, Homo sapiens
taccaatgagctcatttgtaattggcaaacaggaattttgtactagtataatgcagaagttgtgtagctttatatacaatttattctaggcaaagggaagcagaatagtcagcgtagaattataaccttgggtgggcaaagaagccctcagtttgaatgttgtatagtcagcaggagcccttttggctcagtttyaagaaaactaaaaacaaaaacaaaaatgaatgcctgcatctggggcttcctcttcaaaggggcatgcccctggccttgtgcagctcttaaatatttgcagttgccctgaccctgtacccatttcaatggcaagcctactggcttggagtttgccttccaaccggatttcttccaccaattctggttaaagtgttgccagcatttatacccaattatttttttatgtaattctgagtcacttccttgagtggtccaaattattttctgaggtgccaatattatttttgctagcaatatactcccaaagttgcatatgttttgagtgaacttcctagaatcaatttttcccacaagttctattatttaggtgctgttttgttttgcattgtgaggattacaagttgcatatgtcttattatgaactaaacctcattttacgaacatgaacctctccaactctgtattaccttatagtttctgaaagttataatgtgttgaatggtttgcaaattgcaaaataacttacttcctcagagagattatttcatttctttgataccactagtgttgtatttgttttgtattaccccgctgtgtaaagcccacttgggttactatttttaaagcctgcaagacttctaacttacatttcctgtcttctatgctgcatcagcagaacatatacttttagttattggctctttcatctataaattactgcttcttagataaaagtacgtagtgatttaaagacctggaaacagtaggccaaagatgaccatttcttcactaaagaaagacattttctataaaaaatggttacgatttaataatttccatgattcattgtgtctatactaagtgtccaccactcatttttctaagacctttggttgcattattactaatttttatatttggtgtatataattgctctctgtatccattttctgagtgcaatcagtttcagaacaataatg

SEQ ID NO: 4192 - DNA, 592 bp, Homo sapiens
tttttaaattttttatagagatgtgttgcccaggctggcttgaacttctgggctcaagcagtccttcctgcctcagcctctcaaagtactgggattacaggcatgattcagtatgctcagccagcattctttttaatctttgcaaatgagattcatagayttaaaaaaaatctaaacttacttgcattgctttattactagtaaacaatttcttgtggttagtaaaaaaaaaaatctaatttcactctatattgtcttattagtgaatgtgtgtaaagtgtaagaacagctcagaatgggtttatatattttaattaccactagggagcttttgtggaccaaatttcacaggtctgtgatgcactagattaccatctttcaaatgaggttaataataccatccttactatgttattataatgaatcaatgaattaagcatcagagacacctggatcaataaaatattattttattctgtattttttttatagatttgttactctgaagtttacatctttcatgaaacgtgtacagaagtatacattagaggaaatgaaataaagtggcacaactaatctatatttcattgta

SEQ ID NO: 4193 - DNA, 592 bp, Homo sapiens
tttttaaattttttatagagatgtgttgcccaggctggcttgaacttctgggctcaagcagtccttcctgcctcagcctctcaaagtactgggattacaggcatgattcagtatgctcagccagcattctttttaatctttgcaaatgagattcatagatttaaaaaaaatctaaacttacttgcattgctttattactagtaaacaatttcttgtggttagtaaaaaaaaaaatctaatttcactctatattgtcttattagtgaatgtgtgtaaagtgtaagaacagctcagaatgggtttatatattttaattaccactagggagcttttgtggaccaaatttcacaggtctgtgatgcactagattaccatctttcaaatgaggttaataataccatccttactatgttattataatgaatcaatgaattaagcatcagagacacctggatcaataaaatattattttatyctgtattttttttatagatttgttactctgaagtttacatctttcatgaaacgtgtacagaagtatacattagaggaaatgaaataaagtggcacaactaatctatatttcattgta

SEQ ID NO: 4194 - DNA, 592 bp, Homo sapiens
tttttaaattttttatagagatgtgttgcccaggctggcttgaacttctgggctcaagcagtccttcctgcctcagcctctcaaagtactgggattacaggcatgattcagtatgctcagccagcattctttttaatctttgcaaatgagattcatagatttaaaaaaaatctaaacttacttgcattgctttattactagtaaacaatttcttgtggttagtaaaaaaaaaaatctaatttcactctatattgtcttattagtgaatgtgtgtaaagtgtaagaacagctcagaatgggtttatatattttaattaccactagggagcttttgtggaccaaatttcacaggtctgtgatgcactagattaccatctttcaaatgaggttaataataccatccttactatgttattataatgaatcaatgaattaagcatcagagacacctggatcaataaaatattattttattctgtattttttttatagatttgttactctgaagtttacatctttcatgaaacgtgtacagaagtwtacattagaggaaatgaaataaagtggcacaactaatctatatttcattgta

SEQ ID NO: 4195 - DNA, 625 bp, Homo sapiens
agagagagagaagcaacgaattgttttatattatagggagttatatagaaattttgttcatttgtttgttgttaaatacattwtgttagaacgtctaaataccctaaatattattcttaacaatattgtcttaaattataataagtagaaaactcaaacaaaattaattttttaattactgcaaacagcagtaaccacatagatttcaaaggggttaaacattaattaatgaggatatgttcttatatttcaaagacagctatagtttaaaagaacctcaaattctccctttgaaaatatatttgtaataacagatgactaggcaataaaaacaagttccattatgtgtgtttagaagagggcttgaaatatgtggtaccttatagacattatgagggtaaaggaaatcatctgtttttctttcttattcaatagaaacctttcacatatcagtcttttctctcgctttaaagtaaaataaaagtataataatatacagacacatctacataaactacaagagttctgaaatgtagaatgaataaattttagtaaaactatctatttttacagatgaagctaacgtaataaacataccttagattccctcacccactatttatat

SEQ ID NO: 4196 - DNA, 574 bp, Homo sapiens
gaaatttaccaccaaggtggtaggctttgcattgctaatattattattaggtttcactgcaacatgattaggtttctataaaatgaaaacttttattattagataatcaatctatccctaataatgtttttggtttaagttctattttatctaatattaatgtggctataccagccttgttttgaatagtaattgtatggtatatctttttctaccccttaaacttttttcttatgttttaggtatgtttttccttatgtttagatgtgtttattgtaattagcaaaagggaggttaatttattttatgtctttagttcatgctgacatgttctgttttaattagaatttagtccattttcaattttagtgattactaatgcatttggacatatttctgatatctyacattttgctttctactttgctttttcctatgcttccttttttgcttccatgttttggcttagttttgttgttgttgccgttattgtcttttattttgctttttagattgattaaaaagcaaaataaaattgattaattcctttctcttaatgattacctatgaattc

SEQ ID NO: 4197 - DNA, 694 bp, Homo sapiens
atctcctgatccctggccctcctctggcccccaccctacaggctgccagcagtgggtgaggaggaagaagtgctcccgaaggagaagtatccacctggaccagaccctaaggaacagggtgccacaggaccggcaggttagttttcactaaggggttcccagtcaaagcactgccatcccccaccatggggcagacacaggaggctgtgagaggggcagtgccaaattccacctagcttgggactgagaccagtacacacaagacctcagcataccagcaatgctgatcacctgcacagttgagcctggcacttcacaatttcccagatcctgacacatccacccttcccttcaacaaatacttattgagcactcctctgtgccaggcacggttctaggtacttgggacagagcagygaacgagatcaacaagatcatgtggaactactattccacactatctctactattcgtgtggagagcaagcaacctgcgaagtcagaacacagaggccagggggatggaggagccataggcggtgagaggagcaggtcgggggccggaacagccccagctctgaacacattaaatctggggtgccgcctgggtgtccacatggagacacagggatggcaggcagacaggcaagtctgagttccggggaagatccagatgggcatagaaatttgggagt

SEQ ID NO: 4198 - DNA, 531 bp, Homo sapiens
aaatgtgaagatccaggcagtcggccttgtggcctagctgaggcaccttctgttgtcctggactcctgtgggaaggagggaggggagcaggtagaaggggtactggggatcttacggaagtatctgaagcactcattttttctgcctgtggccagactctcttaagctccaatcactgtcatgttcactggcaactcagcctgatcagaaatgaccccgtaagccaaactggctcccaaaacttggggttcagcagakgctgggaagaatacactcacatttaaatgtggtaggcaactagggacagcgggaagatcatggggcagagccaggacctgagctggaggcgcagatgtaacactggccaagtagcttccactctgtgcatttcagtgaccccactgtgaaacagcaatccagccaccgccctgtgccttccctgagcacaggatctagccatcaaaactctgcagcccagggccctgcccagggcctgactgttccccaggaagatacaaatgttacttttgg

SEQ ID NO: 4199 - DNA, 2184 bp, Homo sapiens
tggtgagggttgggggctgaaagataggatcaggtctgggttccttctgtacccctcacttttaagaggaacactacattttattttacaaggtgctttcatacccattgtcccctttggcgctcctaacccccacatgagtcaccaaacattatagatgaggaaactgaggcacagatgaggcctgggcattctcccagacaatcttcaggtaagctgggccctcctagctcagcgctcctgcagacctctatctgggcctccactcatgtggtccccaacagtccctgaacatgtcctctgtgcctggccctgggctcatcctccccccacctagaggagtttccaggtgagagacctggacacggagatgtgcactcaagtgccatgggggctacagtggggcacccacaggaagggggtggagtgtgagcagagctccatgttgcccaccctgtgggcccatgagccccctatgtatatcactaccaacacagggcctggatcccagcgtgtggtcagmgagggagaaatgaaagaaagggagaagggaaggggaggggtaagagggggcagagagaaggggagatctgtcaaccaggtaaggctagtgaagaccagatctcctgcatgtaccaaagctgggtcagacacttcctagtcattcatcacaaacacccactgaatatccactctatgccaggctagggactggaggtccttcggagaacaagccagacacatcccagcccctgtggaccttataggctgcaggatgtctgggctccatagccccagtgctgcctttgatcccagcccctcccatcacgtgctaactgcctgctatgtgcctatcccacatagactgggactccctgaaagcagaggacaggtccaaccctttgctgtgtccccggcacccagcacaagcctggccctgaatggcccatctgttggctgaactgaagaaatcatgcatccaaggattcaggcagcagagggtgggggaactgctttagagaggacttcctgaccaggacagcagcttgcagcccagccaaggcccagccagcttgttttgtcagacaagcagtagatacttaaagtgggacagactccgtgacaacacatggagattactggtctggctttttatctgcttttatcaaatgatccaaagcataaaacaagagtggctcagcagccacaacccaggccaggatcctatttctggactggaccactctctggattcaatattaaactagctctggccaagaatggctcagccaacaggaatctgaatgctcccccagcccgaacccacatctccatcaagaggaggcagcgtcccagagtcacgaagcacctggccaaacagagacagaacaattctggctgtgtgagatttttaaaaccttttggactataaatctccaaaaagtgagactcctcccgacagaccccaatctgatgccccgcttttctaagccctctaacttcttagcatgtcatcttagatgtctacattgtcttaccaagaagactgttattgattcaaagacaaggatgggtctcattcattgcttcctgctccagatcccagtacacaggaggtgcttaatacaaatttatagttttcacaacttagcagttctctaagaggaagacaccttccatccaacccctaacacaccagccacatgaaattccaaagggataaatgttaagtcctgtgataggattcaaattgcttcatgctgggtctccctgagttcccacagcaaagctccagtgtctatgtaaactcccagtggagaactaaccagactctagtctaacatttgttcccaagtcagcctccctgactgtgccctgcctaaggtgccttgttcatctctgctctgcagcacccagcacctcacctgacccatgggaggagcttactggttctttgttaaatgaagatgtttatcacgttactatttgccatagcgaatgaaaagcaggcaacaatctaaacgtccagcaccagaggaaagactgtgtaattatatcagggtgtgtgcaggtaaagaaatactgtatgaccactattttgagaggatgtggcacacgaagaaaaattttaaagtagagtatgaaagtatcatccatgccatgattcaaactatttttaaacca

SEQ ID NO: 4200 - DNA, 422 bp, Homo sapiens
ctacccaggaggcgcttacatttgaagagatgaaattaagaaacagacaataaatgataaatatagtaagcaaattatgtagaatgtagaaggtgataaatgccasgaaaaaaggcaagtaaatgccatgaaaaaggagaacaagataattccctctctgtttttattggtcatttaacattcaattaagtttttattttaaacaattatttttttatttctaaatgttctacttgattatttttcaaacctgtctggtcacttttgaaagtctatggtttctgctcatttaaaaagtttcacattttactgctaagattatccaaggaatagtaattttatataattactaattacaataataaaagttttgaagatctctgtatttattgcttatttctatttactcacaaaggtagatt

SEQ ID NO: 4201 - DNA, 1209 bp, Homo sapiens
catacatacagttattatgtattttattttctgctttcttctgtacattggaaatatgtcataataaaaattatttaagttttttaagaactgagaggaaaagggaattatgcaaacaaagatgcagaagtagaaatgaatgcaatctggtagctttgatctgatttgatctcaccaaagggagtgtgacagtgaacagcaaaaaatgaggttgggtgcaaggatgtagattttttttttttttgagacggagtcttgctctgtcgcccaggctggagtgcagtggcgtgatctcggctcactgcaagctttgcctcccggtttcatgccattctcctgcctcagcctcccaagtagctgggactacaggaccccgccaccacgcccagctaatatttttgtatttttagtagagacagggtttcaccatgttagccaggatggtctcgatctcctgacctcgtgatctgcccacctcggcckcccaaagtgctgggattacaggagtgagccaccgcgcccagcctagtgcaaggatgtggatgaatgggaatcacatgtcagttaactgctgcctttcaaacttcttaagtggtgccaaagaacttattctattcttcctccttagaattttgaatttctgtatttgtggagaaaaattgttcacatccattaagttagaattaggtgggggagagaaacatttaatcttatttcatagggaaatggacagcctaaataaaaacatttgctattgtgaaaaaaatcaatggtattaagaagtgtttattaatgtagctgcctctatattcaatacactccagttatccagcccccattccctcccctaaagttatacatattgtgaagcagcctaaaatagcgtccagttggacaagtgtatggaatggcagagggtcccttggattttatagttgtgttccattcattgaattaaacaaagaataaatgaaatgtaaatttacacagtgttgaaagtctattgttgataaaaggaaacaggacaaaatgttataatcacagcaagccggcattcaaggcactggaaagaatatagagaaaggcactctccactctgctttgtacatttctcattactgtattagcatcttataatcataaataacaccttagaaaataacccagagcacaaaagctctcaaaaacattcactgtatcatcaatgca

SEQ ID NO: 4202 - DNA, 1209 bp, Homo sapiens
catacatacagttattatgtattttattttctgctttcttctgtacattggaaatatgtcataataaaaattatttaagttttttaagaactgagaggaaaagggaattatgcaaacaaagatgcagaagtagaaatgaatgcaatctggtagctttgatctgatttgatctcaccaaagggagtgtgacagtgaacagcaaaaaatgaggttgggtgcaaggatgtagattttttttttttttgagacggagtcttgctctgtcgcccaggctggagtgcagtggcgtgatctcggctcactgcaagctttgcctcccggtttcatgccattctcctgcctcagcctcccaagtagctgggactacaggaccccgccaccacgcccagctaatatttttgtatttttagtagagacagggtttcaccatgttagccaggatggtctcgatctcctgacctcgtgatctgcccacctcggcctcccaaagtgctgggattacaggagtgagccaccgcgcccagcctagtgcaaggatgtrgatgaatgggaatcacatgtcagttaactgctgcctttcaaacttcttaagtggtgccaaagaacttattctattcttcctccttagaattttgaatttctgtatttgtggagaaaaattgttcacatccattaagttagaattaggtgggggagagaaacatttaatcttatttcatagggaaatggacagcctaaataaaaacatttgctattgtgaaaaaaatcaatggtattaagaagtgtttattaatgtagctgcctctatattcaatacactccagttatccagcccccattccctcccctaaagttatacatattgtgaagcagcctaaaatagcgtccagttggacaagtgtatggaatggcagagggtcccttggattttatagttgtgttccattcattgaattaaacaaagaataaatgaaatgtaaatttacacagtgttgaaagtctattgttgataaaaggaaacaggacaaaatgttataatcacagcaagccggcattcaaggcactggaaagaatatagagaaaggcactctccactctgctttgtacatttctcattactgtattagcatcttataatcataaataacaccttagaaaataacccagagcacaaaagctctcaaaaacattcactgtatcatcaatgca

SEQ ID NO: 4203 - DNA, 646 bp, Homo sapiens
ccttactcttgatcatctcgtaaataaacaatatgacctgagttcttgtctcaggctctgctttcagaggaacccaacttatagaaccccagtgtatggcattcatagtcgtaaacatttgaatccaaattaactatatggtaaaatgcatctggttcacatcccagagtctgaactcattcattctcattggccattttgttatcagacattggtctgagttaaagaaccccttctgatattgtcatgaatcagtgacatagcctctggatggctgcctcctgtattagtcaagattgtggctaacaaaatgtatttctgtctgggtgtgctatacattaaaatagatgtatttgtattaaataggcttccaaaccataaactaactgtattcctaaatcctttagccaagagaacttaagatttttaacattttatatcaagacaggtgactggaaattgcttctcagattattaactcagtcattctggaaaaactatgatctaatgaggaatgtgattccatgctatccgttgagaattaaaagtatatgtgaaaatcaggctgtctttgaggtgctgcctaacaaatttaaatattyctccctaacagttatatttacatcattcaatattgtacaaaaaa

SEQ ID NO: 4204 - DNA, 612 bp, Homo sapiens
agcattttgttgacgtctatgtttgtgttgagaatggagatgccgagatttttttttttaatttttaaacctgtaaccttgtcatgcatgtaaaactggtacttgctgaaaacacaaatggagaaaaagactttcctgggggattctcacaacagatgggcaacagatctaccyaagaagttagatcagaagtacccaaaatgttttccctggagcaatagcatcagcatcaactgaaaatatgttagagatgcaaattctctggcccctcttaagacctggtgagtcagaaactctcaaactgggaaccctaaatctgtgtttgaacaagctctccagatgcttttgctgtgctctaacgtttaataactacttagttagattattgtcttattatggtattttttcagtcttaagctactcagcatggctctggaagggacaccactgagaatatctgttattggaatggaagaaactttacatggggccagtaaggcacagccgtaactacagaataacaattagctctgttgtaacactccattaccttttcaattttcttattgctaccttggacatatattattaatgtccttcatatattttaaa

SEQ ID NO: 4205 - DNA, 612 bp, Homo sapiens
agcattttgttgacgtctatgtttgtgttgagaatggagatgccgagatttttttttttaatttttaaacctgtaaccttgtcatgcatgtaaaactggtacttgctgaaaacacaaatggagaaaaagactttcctgggggattctcacaacagatgggcaacagatctacctaagaagttagatcagaagtacccaaaatgytttccctggagcaatagcatcagcatcaactgaaaatatgttagagatgcaaattctctggcccctcttaagacctggtgagtcagaaactctcaaactgggaaccctaaatctgtgtttgaacaagctctccagatgcttttgctgtgctctaacgtttaataactacttagttagattattgtcttattatggtattttttcagtcttaagctactcagcatggctctggaagggacaccactgagaatatctgttattggaatggaagaaactttacatggggccagtaaggcacagccgtaactacagaataacaattagctctgttgtaacactccattaccttttcaattttcttattgctaccttggacatatattattaatgtccttcatatattttaaa

SEQ ID NO: 4206 - DNA, 358 bp, Homo sapiens
gatcttccagaatgcaattaagttgttagggtgaactctacatatctatacatattacttctttatttcctttgctttttaattcttagcactgatgcatctgagattaaggaagtgtttttcaagattggcattttgggccagataattacaatttttttttttttttaaacacagtcacactctgttgttcaggctggagtgcagtggcacgatcctggctcactgcagcctccaccttttgggttcaagtgrttctcctgcctcagcctcccgagtagctgtgattacgggtatgcaccaccatgccccagctaatttttgtatttttagtagagacggggtttcaccatgttgg

SEQ ID NO: 4207 - DNA, 635 bp, Homo sapiens
gggtttcatgctggtcactgagaacacagggataattcattgctgctgtccctttcctcggggagtgcctgtcttgcaggatagagacaagtgcctcatgggggatacagcaacaacagagggatgtggggctctgagattgggctggtcccagcaagcttgtatagcatggggtctggtacagtgcaccacaagagcaccaagtactcaatcaggagttggaggtgagcattgaagcattctggcaactacctgatcacccaagggtctgcctcagtgtgagcacctctgagccccagcctcacatttcctcaattcctgggcccaggctccaggctttcakttcctccacatgttgcccaacccaacatagtgaacactttttcctcaaacattctaggttttctgagtcatttggctggctgtgaaaaaaagctactcttttcggctcaggctagctgaggccaggtcatttcagccctggctgccccagtgctaaccaggtcattgagcagcgggaggctggaactagagtttgtggttgctaccatcttgtgtccccttctcccatttagtggctagaagcacactgggaaactgtcttttagcaatttttatggggcaggtgtaagtgt

SEQ ID NO: 4208 - DNA, 1239 bp, Homo sapiens
ttttctcttctttgatatttctatattcttttcccccttttattatgctctaagtaaagtgcttactacacatagactaggaaaggaaatatctttatgaatcaagtagactactatcaaagtctgtaatagtcaggcatgttggctcrtgcctgtaatcccagcactttgggaggccaaggcaggagatttgcttgattccaggtgtttgagacagcctgagcaacatagtgagatgacgtctctacaaaaaacaaaagccaaaaaacaaaatccgtaataaatgttgagctctggggctaggcatggtggctcacacctgtaatcccaacactttgggaggtcaaggctggaggatcacttgaggtcaggagttcaagaccagcctggtcaacatggtgaaacctcatctctactaaaaatacaaaaattagctgggcgtggtcgtgggcccctgtaatcccagctactcaggaggcagaggcagaagacttgattgaatctgggaggcagaggttgcagtgagctgagattgcgccactgcacaccagcctgggtgaaagaagtgactccatctcaaaaacaaaaaccaaaaaaccaaaaaaccaaaaaagttgatctctgtaatgaattcataaatcattcagaggaatttttaaatgcagccatggtttattcatgtctcttctacaaccagtcttcctctctacctctttcccttcctctttttctctcatctctttgacaaatgtatttaaggcttattatgtatcaagttctttaaaattatcttggccttaaaaaataatataagataataaaattatgtgtgtgttgtgtgaaaatagttttcaaactttgggattctcatgaaatttatcaacttaaccttaattctattggtaattatggaggtaactttaggtaaacagggtaataacctaatgtatttaatagtgaaaaaactgtattgtgtagctatttcattggaagattaaatttacagtccagatgttttagcatttgagtaattaataagcgtaaaacatatcatctagtttgttgaaatgttgcagtagaaacctgtttttgatgaattctagttaggtattatattttattgatgtgagctgaaacagttttctttaacataaaataagccaaatcaattcctatcttaaaagttaagcatctttaaatgtataaattttgaaatgtgttaacctttaaaatgagaca

SEQ ID NO: 4209 - DNA, 1239 bp, Homo sapiens
ttttctcttctttgatatttctatattcttttcccccttttattatgctctaagtaaagtgcttactacacatagactaggaaaggaaatatctttatgaatcaagtagactactatcaaagtctgtaatagtcaggcatgttggctcgtgcctgtaatcccagcactttgggaggccaaggcaggagatttgcttgattccaggtgtttgagacagcctgagcaacatagtgagatgacgtctctacaaaaaacaaaagccaaaaaacaaaatccgtaataaatgttgagctctggggctaggcatggtggctcacacctgtaatcccaacactttgggaggtcaaggctggaggatcacttgaggtcaggagttcaagaccagcctggtcaacatggtgaaacctcatctctactaaaaatacaaaaattagctgggcgtggtcgtgggcccctgtaatcccagctactcaggaggcagaggcagaagacttgattgaatctgggaggcagaggttgcagtgagctgagattgcgccactgcacaccagcctgggtgaaagaagtgactccatctcaaaaacaaaaaccaaaaaaccaaaaaaccaaaaaagttgatctctgtaatgaattcataaatcattcagaggaatttttaaatgcagmcatggtttattcatgtctcttctacaaccagtcttcctctctacctctttcccttcctctttttctctcatctctttgacaaatgtatttaaggcttattatgtatcaagttctttaaaattatcttggccttaaaaaataatataagataataaaattatgtgtgtgttgtgtgaaaatagttttcaaactttgggattctcatgaaatttatcaacttaaccttaattctattggtaattatggaggtaactttaggtaaacagggtaataacctaatgtatttaatagtgaaaaaactgtattgtgtagctatttcattggaagattaaatttacagtccagatgttttagcatttgagtaattaataagcgtaaaacatatcatctagtttgttgaaatgttgcagtagaaacctgtttttgatgaattctagttaggtattatattttattgatgtgagctgaaacagttttctttaacataaaataagccaaatcaattcctatcttaaaagttaagcatctttaaatgtataaattttgaaatgtgttaacctttaaaatgagaca

SEQ ID NO: 4210 - DNA, 1239 bp, Homo sapiens
ttttctcttctttgatatttctatattcttttcccccttttattatgctctaagtaaagtgcttactacacatagactaggaaaggaaatatctttatgaatcaagtagactactatcaaagtctgtaatagtcaggcatgttggctcgtgcctgtaatcccagcactttgggaggccaaggcaggagatttgcttgattccaggtgtttgagacagcctgagcaacatagtgagatgacgtctctacaaaaaacaaaagccaaaaaacaaaatccgtaataaatgttgagctctggggctaggcatggtggctcacacctgtaatcccaacactttgggaggtcaaggctggaggatcacttgaggtcaggagttcaagaccagcctggtcaacatggtgaaacctcatctctactaaaaatacaaaaattagctgggcgtggtcgtgggcccctgtaatcccagctactcaggaggcagaggcagaagacttgattgaatctgggaggcagaggttgcagtgagctgagattgcgccactgcacaccagcctgggtgaaagaagtgactccatctcaaaaacaaaaaccaaaaaaccaaaaaaccaaaaaagttgatctctgtaatgaattcataaatcattcagaggaatttttaaatgcagccatggtttattcatgtctcttctacaaccagtcttcctctctacctctttcccttcctctttttctctcatctctttgacaaatgtatttaaggcttattatgtatcaagttctttaaaattatcttggccttaaaaaataatataagataataaaattatgtgtgtgttgtgtgaaaatagttttcaaactttgggattctcatgaaatttatcaacttaaccttaattctattggtaattatggaggtaactttaggtaaacagggtaataacctaatgtatttaatagtgaaaaamctgtattgtgtagctatttcattggaagattaaatttacagtccagatgttttagcatttgagtaattaataagcgtaaaacatatcatctagtttgttgaaatgttgcagtagaaacctgtttttgatgaattctagttaggtattatattttattgatgtgagctgaaacagttttctttaacataaaataagccaaatcaattcctatcttaaaagttaagcatctttaaatgtataaattttgaaatgtgttaacctttaaaatgagaca

SEQ ID NO: 4211 - DNA, 598 bp, Homo sapiens
tttttcataataccacgaacaaacctattgcaaaagcaattcaaagcatggttcccataatgaagaaccagttgggtcctcttcaggaggaaagatagccccatataccatgaatatctaatacatctgaataaatgataataagtcattagatgacgggtgtatatgagaaaagccaaacttactaagttaggtccccactgcttttattttctggaagacattcataaggaaagatgtatcttcatgcttcagccaaaacccagatgggaataagaccttctattatacaggattccccagagaaacagaaccaatagtgagggggtcaggggaagaggcagttgggagagagggagaaagagagagaggctttatcttaaggaaytggctcattcaattttagagtttggcaagtccaaaatttgcagagtagcccagtagactggagacccaggaaatacttgatgttcagtccaaaggcactctgctggcaaaattccctcttcttcaggggaggtcttttttctcttaaggcttctaactgattggataaagcccacctagtgacctcattgtaatttaattacttctttaa

SEQ ID NO: 4212 - DNA, 609 bp, Homo sapiens
tactgagtggccacttttgagcaagaatgtaatttatattatgtcccaaaacaccttccacaccctcacaaaagtagcatttgcaaatacaccagcattaaacaagcctctcccccatgttctttgagaaactacagtacacaggagcaagaagttttaattcacctgtgagttatttccaagtcttgctggatggtcagatctgtgaacagwcatacacacaaccaacttatctggagaagtcagcttcatccgagcatatattctacttagtggtcaagtacatgtaactaaaggtaaagcctacatccaggaagcttacgtgacttgcgacttgcgtagcgtaggtttcagcacataagatgctagatcagattgcataatgcaacgagagctaacactcataattacttatgtaaattatatggcaagaatttcccaggcctttagggaaaaaatgtttatttgcggagcctaattttttatatcagctatcacgaaaaagatagtcaaggagcaaatttgactattggacttggatctagatgtaccctctttgtgacattgtcacataatgacaacctggagttaatacattaaggcagcctg

SEQ ID NO: 4213 - DNA, 609 bp, Homo sapiens
tactgagtggccacttttgagcaagaatgtaatttatattatgtcccaaaacaccttccacaccctcacaaaagtagcatttgcaaatacaccagcattaaacaagcctctcccccatgttctttgagaaactacagtacacaggagcaagaagttttaattcacctgtgagttatttccaagtcttgctggatggtcagatctgtgaacagtcatacacacaaccaacttatctggagaagtcagcttcatccgagcatatattctacttagtggtcaagtacatgtaactaaaggtaaagcckacatccaggaagcttacgtgacttgcgacttgcgtagcgtaggtttcagcacataagatgctagatcagattgcataatgcaacgagagctaacactcataattacttatgtaaattatatggcaagaatttcccaggcctttagggaaaaaatgtttatttgcggagcctaattttttatatcagctatcacgaaaaagatagtcaaggagcaaatttgactattggacttggatctagatgtaccctctttgtgacattgtcacataatgacaacctggagttaatacattaaggcagcctg

SEQ ID NO: 4214 - DNA, 609 bp, Homo sapiens
tactgagtggccacttttgagcaagaatgtaatttatattatgtcccaaaacaccttccacaccctcacaaaagtagcatttgcaaatacaccagcattaaacaagcctctcccccatgttctttgagaaactacagtacacaggagcaagaagttttaattcacctgtgagttatttccaagtcttgctggatggtcagatctgtgaacagtcatacacacaaccaacttatctggagaagtcagcttcatccgagcatatattctacttagtggtcaagtacatgtaactaaaggtaaagcctacatccaggaagcttacgtgacttgcgacttgcgtagcgtaggtttcagcacataagatgctagatcagattgcataatgcaacragagctaacactcataattacttatgtaaattatatggcaagaatttcccaggcctttagggaaaaaatgtttatttgcggagcctaattttttatatcagctatcacgaaaaagatagtcaaggagcaaatttgactattggacttggatctagatgtaccctctttgtgacattgtcacataatgacaacctggagttaatacattaaggcagcctg

SEQ ID NO: 4215 - DNA, 628 bp, Homo sapiens
  misc_feature (1)...(628): n = A,T,C or G
cnnnnnnnnnnnnnnnnnnnnnnnnnnnnnnnnnnnnnnnnnnnnnnnnnnnnnnnnnnnnnnnnnnnnnnnnnnnnnnnnnnnnnnnnnnnnnnnnnnnngtgctccgatctcccaggtgagagtgtcaaaaaatgtttgtcaaaagtagtgattcatctcagtgccataactttgtgtctataacatacatagmaatggaatgtaaagtcatttaaaatatgtttgnctgaattcacatacattttacatgctagtgttaagctgagtattaagcatttttgtacctagttcaggtacagccactctgattacgtgccctcataagtaatgtaagttgtcacttattttaatactaaactgttcaaatagtcttgtttttgatatctaagaattacagaattatatatatgaaagattctttttggcatataaatctaatcttacaaaattttttatattttgtgtataaaatataaagccttttacacaaaagcttttatatttgcagttgcaaatgagcatatgtttaagaggttgttaggccaaatagcaatacttgaatctgctggatattttcaaagcttgttttcagttccttgtttattgtatagttcagcactcagta

SEQ ID NO: 4216 - DNA, 628 bp, Homo sapiens
  misc_feature (1)...(628): n = A,T,C or G
cnnnnnnnnnnnnnnnnnnnnnnnnnnnnnnnnnnnnnnnnnnnnnnnnnnnnnnnnnnnnnnnnnnnnnnnnnnnnnnnnnnnnnnnnnnnnnnnnnnnngtgctccgatctcccaggtgagagtgtcaaaaaatgtttgtcaaaagtagtgattcatctcagtgccataactttgtgtctataacatacatagcaatggaatgtaaagtcatttaaaatatgtttgnctgaattcacatacattttacatgctagtgttaagctgagtattaagcatttttgtacctagttcaggtacagccactctgattacgtgccctcmtaagtaatgtaagttgtcacttattttaatactaaactgttcaaatagtcttgtttttgatatctaagaattacagaattatatatatgaaagattctttttggcatataaatctaatcttacaaaattttttatattttgtgtataaaatataaagccttttacacaaaagcttttatatttgcagttgcaaatgagcatatgtttaagaggttgttaggccaaatagcaatacttgaatctgctggatattttcaaagcttgttttcagttccttgtttattgtatagttcagcactcagta

SEQ ID NO: 4217 - DNA, 530 bp, Homo sapiens
gtcaattttttacacatatttataatagggaaacatagtatctaaaattatttcaaaccaaaagtaattatttagtgcctgctstataggagcagtacatacaaaatatcaatttctgccaccacagaatataggataatttggaagaataaggcaaataactagaacatacaaataaaattggcaagtgctatatgcatgaggcttatggagaattccaaggacagggagactctgatcaaagaagcaggggaaatatcgcaaatttgttaatgaggtctcagcaacactttatagtcaaagcaaattagccatatgaatatatccaaaaggatttctcacattcaagattatcagttggattgccatcaacatttctgtcccaggttcacaagcaacttctgctgcaaatatatgagggattagtaatgacatcaagggtgtggatatgtggtagcatttggaagtaggcaggagagttagctctgcctttggtaatgaaaacctatttattttcatctccttctttt

SEQ ID NO: 4218 - DNA, 530 bp, Homo sapiens
gtcaattttttacacatatttataatagggaaacatagtatctaaaattatttcaaaccaaaagtaattatttagtgcctgctgtataggagcagtacatayaaaatatcaatttctgccaccacagaatataggataatttggaagaataaggcaaataactagaacatacaaataaaattggcaagtgctatatgcatgaggcttatggagaattccaaggacagggagactctgatcaaagaagcaggggaaatatcgcaaatttgttaatgaggtctcagcaacactttatagtcaaagcaaattagccatatgaatatatccaaaaggatttctcacattcaagattatcagttggattgccatcaacatttctgtcccaggttcacaagcaacttctgctgcaaatatatgagggattagtaatgacatcaagggtgtggatatgtggtagcatttggaagtaggcaggagagttagctctgcctttggtaatgaaaacctatttattttcatctccttctttt

SEQ ID NO: 4219 - DNA, 917 bp, Homo sapiens
ttcattgtatctgtgcacagtacatataatgaattgtagagccttatacgtgaagctgtggaaagagacagatgattgaaaactctgcctgaaatctagaataatgggcccacataaataaaataaagtttattcaactctatctatagtataaaaaattaatagagaaaatgtaaagtcttgcatttaatttcaaaacaaaattgctgcttctttgtaagtattggatgagttaagatttacctcggcagttaatgtgaaaaaataactaagggtttttatggactaaaactcattaggcaccagtaaaatgttgtaaatgctaaaaaaagaaaaagctaatgcaatactaggttacattagcatatagtgctcagcacaaaaatagtagcagtttcactgaattctgagaaggccagagagaagctgcatgattttgtttagctctagatgtcatattttaagaggaacagtgaatagaatggtctctgttcaaaggagagtataaagttttgtaaatcaagcaacataaaccgttgaaggaattggaaatattaaatttcgagaatataaggcagtgtggtgtcatcttttgaagtgcattttgcccacagggattttttctttagcttgcatagtatttaaaataatgagtcacattrtcaatgggaggcttcacctaatattttaagtttccaccttcccttacaaaatctgaaatttgagcaacacagagctttgggggtttgccacctttttagatggagttttactctccattttgcaatagttctcaccattccttattgtacacaaaactgaattcaagtatctggtgctcttaacatcatcttacattgttgctttcttatggtagagaaatacttgtttccatgtttcagtcaaaatacagaaaa

SEQ ID NO: 4220 - DNA, 558 bp, Homo sapiens
ccctgtagggattggacaatacgagaaagagttgggcattagaaattgagatttctttgaccacatacaagtttaggttgcattaaataaagtggatatatgttattagtaagactacacagagggggaaaaaagacagaaatccagtgataaattcctaaaatacaaaactcatggaagagtaaagaagttgatgaagagataaatgagctgtcaaagactattgggtaaagtagaacagcagtgtgtcatggaagctaaattaagagagagtttcagagaaacaatagtcatttccatgtgaaagaatgttttttaaagtactgcttaaagtttggaagaaacaaacaatagggaggctctgagcytactccagctccagaagctgcccgttgaaaattttaagttaaaaaaaagaaataaaaatgattaaagcaggcaatctacccttatagtgttttcagtctaatggggcagaagtagcagacttcatcctcatcatcaccattcccatcattttccgagtgcttagtacaggccatcatctgtatattgaat

SEQ ID NO: 4221 - DNA, 558 bp, Homo sapiens
ccctgtagggattggacaatacgagaaagagttgggcattagaaattgagatttctttgaccacatacaagtttaggttgcattaaataaagtggatatatgttattagtaagactacacagagggggaaaaaagacagaaatccagtgataaattcctaaaatacaaaactcatggaagagtaaagaagttgatgaagagataaatgagctgtcaaagactattgggtaaagtagaacagcagtgtgtcatggaagctaaattaagagagagtttcagagaaacaatagtcatttccatgtgaaagaatgttttttaaagtactgcttaaagtttggaagaaacaaacaatagggaggctctgagcctactccagctccagaagctgcccgttgaaaattttaarttaaaaaaaagaaataaaaatgattaaagcaggcaatctacccttatagtgttttcagtctaatggggcagaagtagcagacttcatcctcatcatcaccattcccatcattttccgagtgcttagtacaggccatcatctgtatattgaat

SEQ ID NO: 4222 - DNA, 600 bp, Homo sapiens
tctttcttgcttccctggttctgtcaccaactcgttcttctccttggactgttgctttgctcactcttcactgcctcctttttgtgactcctgtgcagtttaagggcctgtctgggcagtccctccccatctctcctttctcgtcgttctctctcctggcaggtacacatatgaaatcgcccccgtgtttgtgctcatggaagaggaggtgctgaggaaactgcgggccctggtgggctggagctctggggacggaatcttctgccctggtttgtgagaaggaggaggacctttctttgccctttttatgagttcctcctcccccaccgttctcttgctctagtgtctggcagggagggatgattcctctttgattcctctccagctggacccaggccaggccagggaggcggctgcctggtcccttcatgctcatgtttgtcaccattccctggggtcagtggtctagttcctgctrtctccggacgggggctgtctcttgggggcagccccagatgtggagaggtgtggtcaagaggatctgctgatcctggatccattctgggatggtatgatcctgagaattgtggcctgggagcc

SEQ ID NO: 4223 - DNA, 595 bp, Homo sapiens
tggggggtgttccaggctgcgctcctggcccctccccacaccccacccccgccaggcactgcggcccaagcttcaaagccgcctctcatctggacttcatttttactgcctctcagtccccagctttttattactgctctggaaaggggttccagggccccaggcctggcatctcccatttcacggagggggaagayagatatttggggacccagtaatggtgctcgccctgccgctgtcaacttcaggccaccccccaccacacacacagactttgctttaaacttttcgcttcctgctgaagttgttgtgtgttggagccataggaaaaagtaatctctgcatataaccgcatacacgtttccaaacatttctttttttatatggggggtggcgtacaaaactcagccttctccctcttgtgtgcacaaccttttccacccggcatgagaacacacaggatgcactctcgaacacagcactttccaaaaccgcccccgcagccacgcaggggcacacgccctcccggcctcacgccacaaacatcccctcacaggccatgtggacctggcagctgtcgcaggcgacactggtg

SEQ ID NO: 4224 - DNA, 689 bp, Homo sapiens
aatcataggtgcacacacgtttgtgcaaacacaccttgctcgggagaatgcttgcaggcatactctccacagctcataggctttgcatgcatttgcactgaggcgcgtgcccaggtcggggttggaagaaggagaggaggaaccaagcataagcatttcctttcagagttttccctctccccaaactctccctttttcacactagtcaatacaggggtgttaaggatgactggggagaggggaacgtggaggtccccgcgcgcagctgctctcctgaggctcgggacctgcactacctccacccctctcattcccaggcctggctccgccctcgccctccgcgcgcccgcttcagggccgaaaagtgcattcctgcggctcggcgcgcgctgcctcctccttccttcccgtctccccacccgcggtcctagggccggagcgcgctcccgccgtgaactctctgggaacccccctcggggcgggtggccgagcgcgctcacctcctcctgacccggccccgccccaccccgcccaggccgtcttcagcgctgccgcggagtccccccgccccctccagcgcagccagagtctacccctcctagcccgagcrgtccgccctccgccgcgggcccgggccgcctccctccgagtccccgaagccttatcccgcaactgacgccccctaagcg

SEQ ID NO: 4225 - DNA, 635 bp, Homo sapiens
  misc_feature (1)...(635): n = A,T,C or G
tgagactaagttttagttaagtgttaattgcagaaaaatttagtatagtaaaatgaaagtttatttctgttctgtgggacactctgagccaccagggtcatagattattttaagttgtctgtgcctttgctgatagggaactttgatgagcaaagaggaacctggtagtggtagaggattgtgaactggcctgtgttcagtcatcattgtatatttagaattgacagctactgtactgttttcccatttataacacttctcatttytcttctctagaaatgaatctttgcttttgttagactttttaaaagaattaatagactgtttttagagcataaaactgctttatggtttacagaaaaatgagtagaaagtacagagttcccaaatactccctctccccatccccatggtttcccttattattaacaacttggattcatatacgtttgttaccattgctgagccaacatgatacataattgttaattaaaatccgtaaatagtttaggcttcattctttgtgttgtgtattctctgggtttgacaaatgtatgaagacctatatccaccattacagtattatatagaatgtttcagtgccctanaaatcccctgtgctccacctatccatc

SEQ ID NO: 4226 - DNA, 635 bp, Homo sapiens
  misc_feature (1)...(635): n = A,T,C or G
tgagactaagttttagttaagtgttaattgcagaaaaatttagtatagtaaaatgaaagtttatttctgttctgtgggacactctgagccaccagggtcatagattattttaagttgtctgtgcctttgctgatagggaactttgatgagcaaagaggaacctggtagtggtagaggattgtgaactggcctgtgttcagtcatcattgtatatttagaattgacagctactgtactgttttcccatttataacacttctcatttttcttctctagaaatgaatctttgcttttgttagactttttaaaagaattaatagactgtttttagagcataaaactgctttatggtttacagaaaaatgagtagaaagtacagagttcccaaatactccctctccccatcccyatggtttcccttattattaacaacttggattcatatacgtttgttaccattgctgagccaacatgatacataattgttaattaaaatccgtaaatagtttaggcttcattctttgtgttgtgtattctctgggtttgacaaatgtatgaagacctatatccaccattacagtattatatagaatgtttcagtgccctanaaatcccctgtgctccacctatccatc

SEQ ID NO: 4227 - DNA, 924 bp, Homo sapiens
gcataccaccacacccagctaatttttgtgtttttttatgttttgttatatatgtttgtgtatgtatatatatatatrtatatatatatataaattaaaaaatataaatagagacaaggtctcaccctgttacccaggctggtcttgaactcctgggctcaagcagtcttcctgcctcggtctcccaaagtgctgggattacaggcatgagccaccgcacccagcctcttttatatcttcttcatgaacccaaaaggaagctttttaaagaaccatttttattttagagtccatccctgccttgaggagccttatcaagttggatcaaaatgaaacttgtgtgcctaatatagaactgaaggatgaggacttatctttagaaagtttgttttggtggggatcatcttttttctttattgaggattcttcttccaattacttctgccccatgggcagtaagtagaaaagagtttatcccaattacaatataatattttagagctatcagcaagctaccttcaatttatttttttatctcagtttctgtgtattacaacttaattctgttaaaagacatctttgttcagaatccctccagtagttctagacattccagaatccgtatggaagaagtatggtgtagtggttaaaagaataggctctggagccagcctgctcatactgaaattctgaatctgccactttctttctgtgacaggttactggacttttatttattttcactgcccctaagtagatgtcttaaatgttagagatttgtgaattaattaagtttattctccccactgagctttagagccatggacaagaaccaaaagatgaaatctagcatcttatatttacctaagcacttttcatcaaagacagtgcatgctaacatgtaatatgcacatactacatgca

SEQ ID NO: 4228 - DNA, 592 bp, Homo sapiens
tgaaaagtttgattccaaacaataagcaaccaaatcaccccattttgcaagctcctgcaaccagcagcataatacagccagaaaaaaaagctgacagcctgacaaaacccaaatggaaaattaaaatgagcaagaacagccacacacccaaagagagagcaaacccgcactgcttggaggaggaaatcctctaattgcctccacactcctgctcgcttccatctgcttgcatttaaggaaacccaactactgggctcctcgcagctgtagagaaaaagataggcatcctaartgcctggatggctgcagcaggcagggaccgacaagaggacagaagatccacaggcaaggctcaacagcacatctaaaaacaaatttaatgtgtgttatgcaaaatggcaaaccagctcccctggctgtgaggtcacatgaaataataacggaactccttctcaggagaaaggcagcagtggcgtgtgtgggcaggaatgctgcagcgcgctcctcacacaaagaagcccatgggcctcccctcaagctgggagttgcacggagcccaggctgcaattaggtttcttgtggggaagtgact

SEQ ID NO: 4229 - DNA, 592 bp, Homo sapiens
tgaaaagtttgattccaaacaataagcaaccaaatcaccccattttgcaagctcctgcaaccagcagcataatacagccagaaaaaaaagctgacagcctgacaaaacccaaatggaaaattaaaatgagcaagaacagccacacacccaaagagagagcaaacccgcactgcttggaggaggaaatcctctaattgcctccacactcctgctcgcttccatctgcttgcatttaaggaaacccaactactgggctcctcgcagctgtagagaaaaagataggcatcctaagtgcctggatggctgcagcaggcagggaccgacaagaggacagaagatccacaggcaaggctcaacagcacatctaaaaacaaatttaatgtgtgttatgcaaaatggcaaaccagctcccctggctgtgaggtcacatgaaataataacggaactccttctcaggagaaaggcagcagtggcrtgtgtgggcaggaatgctgcagcgcgctcctcacacaaagaagcccatgggcctcccctcaagctgggagttgcacggagcccaggctgcaattaggtttcttgtggggaagtgact

SEQ ID NO: 4230 - DNA, 1183 bp, Homo sapiens
aataactgcagaccacaagtaagagacatcagtaattggatgacaaggccagagaaggtcagtgtcataggagtaaataggaattcaaacaaaaaaaaaggaatgagcaatttatgtaaatatttccagtgtgtcgaccccattaaattacattttgcaaatgtggttagggagaacagtgtgtctcccacagatctttaaaatcccaaggatgcctcccagaatctcatcaagaagacaccaataagatatattatgagtagtgatcaggagagagcatgaggggagcccctggggtgctgggtgaggttctgtttcttgatctggatgtcaattatcasaggtattgagtttatgaaaatcatcgagctgtattcttatgatctgtattcttttcagtatgtgtttatacttcaattaaaaaaaacttaggccagtttcagtggctcatacttgtaagcccagcactttgggaggccaaagtaggaggatcacttggggtcaggagttggagactagcctgggcaacatagtgaggccccatctctacaaaaaataggaaaagtagcctggtctggtagtgtttgcttatagtccaactacttgggaggttgaggtagaaagatcacttgagcctgggaagtggaggctgcagtgagctatgctcatgccactgcacttcagcctgggcaacagagcaagaacctgtctcaaaaaatatatgtgtatatataaagagagaagaggaagagaaagagacacacagagagagagatactcttgtaaattaagttatgatttgatgtctaagaattttgaagaagtcccccaataatagaagtcatttgtcattgctagggaatatggacacacaataatttcgtggtaggaccattttgggtttatctaggtctttgtatgggaaaaacaaactgacagattgagtggtctggttaaagagtgggctcttctgttacaagcaaagaggattctcacaggtccttcaagagcctggtgctcaaccagcgtcttctgattgggtgccatgctcccctgctggccttggggtcctgtttctcaggcactttgacaccagcgaggggtttcacccagggctgggtgtaaggtctctgacctctggcagcacaagtgcactgttcctcacctgaaaccactgggacca

SEQ ID NO: 4231 - DNA, 604 bp, Homo sapiens
gaagaaaggccctggagacgtgtagctstttctcgttatttagttgtcggctgaaagtcttatcagtcagccagataatttaaaatgttatatataaataaagggcacttgcttccttctaaattatgccactttctagcccagcttgcttaaatatttacccccagtgaccaccaaggatttatttgaagatatctatccagattcacattctcgctaattcttcaacttgttttatttttcttagggtggggtaccagtgttccaagattccctcttgtcttctaatgctttgaattgcccccttcattctatgcccggccaagaaagggtcattcattcatccattcattctcacatgcaccaggaattccctttacaacccatacttttaggtctcttttagcatataagtttggatctttccttttctgacaccaacgtggacagtctgtggttctatcattctgggagttcctttccgccttgaattaattgtagcctcttctttcctgtgtccctaggaaaaggttgcctaatgacatagcagaactataaactaaataggtgtcagtgacagtgcagagtctcagtgcttaggaga

SEQ ID NO: 4232 - DNA, 1248 bp, Homo sapiens
taagacataagtataagcataaaattaatttgtgttttatatacactttatacacatagtttattgtatagcctttcatatacaatactgttatttttgttgttatcatcattatamttttagagtcagggtctcactctgtcactggagctgcagtgcagtggtgcagtcacagctgactccagcctcagtctctcgggctcaagtgatcctcacaactcagcctccccagtagctgggactacaggcacgtgccaccatgcctggctattttttttctagaaatgggctcttgctgtgttgcccaggctgatctcgaactcctaagctaaggctgtcctccgccctcagcatcccaaagtgctaggattataggcattatccactgtgcccaacctatacaatattttaaaataattttgtgcatgagacaaagtttgtttacagcgaaccaacagaaagcaaaggttgaccaggtttggtggctcacacctgtaatcccagcacttcaggaggccaaggggggtggatcatttgagcccaggggttcaagaccagcctgggcaacatggcaaaaccttgtccctacaaaaaaatgcaaaaattagccgggtgtggtggcacacacctgtagtcccagctactcgggaggctgaggtgggaggatctcttgagcccaggaggtggagattgcagtgagccatggttgcaccactgcactccagccagggtgggcaatggagtgagaccctatctgaaaaaaagtaaaaaatagatagataaataaataaataagacaggaagcaaaggtgtcagttgtcagtctctcggtcatccatgcagaaaatctgacatcatgtgagcattccaaaagttaaagattttggaacattttggattttggattttcagatgaggaatgtccaccttgtactgagaaagccttcatttattggtaggagggaggaatctagggaaatctaaggaaagtactcatgtcagaggtgtttgaaccagggcgactctatcttgaataggggctgggtaaaatgaggccaagacctactggactgcattcccaggaggtgaggcattctaagtcacagaatgggataggaggctggcacaagatacaggtcttgctggtaaaacagcatgtggtaaagaagccagccaaaagccaccaaatccaagatggcaacaaaagcaacctctggtcattctcactaatcattatactctaattat

SEQ ID NO: 4233 - DNA, 1248 bp, Homo sapiens
taagacataagtataagcataaaattaatttgtgttttatatacactttatacacatagtttattgtatagcctttcatatacaatactgttatttttgttgttatcatcattatacttttagagtcagggtctcactctgtcactggagctgcagtgcagtggtgcagtcacagctgactccagcctcagtctctcgggctcaagtgatcctcacaactcagcctccccagtagctgggactacaggcacgtgccaccatgcctggctattttttttctagaaatgggctcttgctgtgttgcccaggctgatctcgaactcctaagctaaggctgtcctccgccctcagcatcccaaagtgctaggattataggcattatccactgtgcccaacctatacaatattttaaaataattttgtgcatgagacaaagtttgtttacagcgaaccaacagaaagcaaaggttgaccaggtttggtggctcacacctgtaatcccagcacttcaggaggccaaggggggtggatcatttgagcccaggggttcaagaccagcctgggcaacatggcaaaaccttgtccctacaaaaaaatgcaaaaattagccgggtgtggtggcacacacctgtagtcccagctactcrggaggctgaggtgggaggatctcttgagcccaggaggtggagattgcagtgagccatggttgcaccactgcactccagccagggtgggcaatggagtgagaccctatctgaaaaaaagtaaaaaatagatagataaataaataaataagacaggaagcaaaggtgtcagttgtcagtctctcggtcatccatgcagaaaatctgacatcatgtgagcattccaaaagttaaagattttggaacattttggattttggattttcagatgaggaatgtccaccttgtactgagaaagccttcatttattggtaggagggaggaatctagggaaatctaaggaaagtactcatgtcagaggtgtttgaaccagggcgactctatcttgaataggggctgggtaaaatgaggccaagacctactggactgcattcccaggaggtgaggcattctaagtcacagaatgggataggaggctggcacaagatacaggtcttgctggtaaaacagcatgtggtaaagaagccagccaaaagccaccaaatccaagatggcaacaaaagcaacctctggtcattctcactaatcattatactctaattat

SEQ ID NO: 4234 - DNA, 731 bp, Homo sapiens
ggtaagctaaaatatatctgtatttggatttagctgcataagtacaggaactgaacatcagactttaataaacattaataaacccttatgctatatgtttttcaatgagttattatatagtatatataatatktagatactatatatactttaaattctcaacattgttttgataatttgctctaataacgctctaataatttgagcacttgtagagaatatttagttaagtggttaatggaagaaactcgttggggatttttggattccgtttctaggagggcagttctctcatgaggtaaatttcctatctggtctgtgcatgaatttcttgaagaactgacaataattcttcctattagtgtcacaggcaagggggcaaaggggttaggtgtcaatgcctggctgatttcctgcattacaaaatttacctcttacttttctgtcttcctgatgttaccccctcttttctttcacctcttgggcctgcacatgatttgtttgctatcaggggccaataagctttctctgtgttttcagctttacagaccccatggtatatgtgtgaagcctttagctttgctgtgttaagaagcaagtagctgtaaacagtgcgtgagtgggtgctggtgctgcactccagtcaaactgtctctacagacacagaaagtggaacttcatctcattttcacaggttataagatcatattttttgactcttttcatttaaa

SEQ ID NO: 4235 - DNA, 731 bp, Homo sapiens
ggtaagctaaaatatatctgtatttggatttagctgcataagtacaggaactgaacatcagactttaataaacattaataaacccttatgctatatgtttttcaatgagttattatatagtatatataatatttagatactatatatactttaaattctcaacattgttttgataatttgctctaataaygctctaataatttgagcacttgtagagaatatttagttaagtggttaatggaagaaactcgttggggatttttggattccgtttctaggagggcagttctctcatgaggtaaatttcctatctggtctgtgcatgaatttcttgaagaactgacaataattcttcctattagtgtcacaggcaagggggcaaaggggttaggtgtcaatgcctggctgatttcctgcattacaaaatttacctcttacttttctgtcttcctgatgttaccccctcttttctttcacctcttgggcctgcacatgatttgtttgctatcaggggccaataagctttctctgtgttttcagctttacagaccccatggtatatgtgtgaagcctttagctttgctgtgttaagaagcaagtagctgtaaacagtgcgtgagtgggtgctggtgctgcactccagtcaaactgtctctacagacacagaaagtggaacttcatctcattttcacaggttataagatcatattttttgactcttttcatttaaa

SEQ ID NO: 4236 - DNA, 731 bp, Homo sapiens
ggtaagctaaaatatatctgtatttggatttagctgcataagtacaggaactgaacatcagactttaataaacattaataaacccttatgctatatgtttttcaatgagttattatatagtatatataatatttagatactatatatactttaaattctcaacattgttttgataatttgctctaataacgctctaataatttgagcacttgtagagaatatttagttaagtggttaatggaagaaactcgttggggatttttggattccgtttctaggagggcagttctctcatgaggtaaatttcctatctggtctgtgcatgaatttcttgaagaactgacaataattcttcctattagtgtcacaggcaagggggcaaaggggttaggtgtcaatgcctggctgatttcctgcattacaaaatktacctcttacttttctgtcttcctgatgttaccccctcttttctttcacctcttgggcctgcacatgatttgtttgctatcaggggccaataagctttctctgtgttttcagctttacagaccccatggtatatgtgtgaagcctttagctttgctgtgttaagaagcaagtagctgtaaacagtgcgtgagtgggtgctggtgctgcactccagtcaaactgtctctacagacacagaaagtggaacttcatctcattttcacaggttataagatcatattttttgactcttttcatttaaa

SEQ ID NO: 4237 - DNA, 595 bp, Homo sapiens
caacatggtgaaaccccgtctgtactgaaaatacaaaaattagctggttgtggtggtgtgcatctgtaatcccagctactcaggagattcacttgaaccctcggggtggaggttgcagtgagctgagattgcatcattgtacttcagcctgggagatacagtgagactccgtctcaaaattaatacatatataatatatatatttgttttaatatatataaaaaattagccaggtgtagtggtgggcacctgtaatcccagctattcaggaggctgaggaggctgaggctggagaatcacttgaacccgggaggcggaggttgcagtgagctgagatctcacattgcactccagcctggatgacagagcaaaactccatcttaaaaaaaaattaatttataatacaagggcctttgcagccytgctgtatagtgtgggcattaagagccagacttatttctttttgacctctagatccacatggggaatcacttcatctctccaacctcaatttcattatctgtgaaatgggagataatattgaataatagcatctactgccaagagttgttgagaggtttacatgagataatgc

SEQ ID NO: 4238 - DNA, 1300 bp, Homo sapiens
tgagagattttaaaatgtggaaaaatttgtttattagcatcaaagagaaatgatactaactaaaagtaattaaattaacagctttctataaataaacgactatacctgaaggaaaattatctatgcttgcaatgaagattaactcaatcaccagacagaaatacaccatgrtgcaatgtcaatttcagcagcacataaaataccatactgaccttgaaagtgatcttggaaagcatccttactcagacgcttattttgtaccatccccaattttgccatcccctaagagacaattactcccacaaaaatctgtacttgcatttgtttttcctttcactttggaaaccacagttgtgctttataagttttaagggcaaaaaatatcttattgacttctgaatcctagctcagtgcttgtttaatgaatcaccaatgactctttgacatatctgaaacaacagacactaccagcataagacaatcaagactggtctataaatggtagagtataaggcagggcataaaaccaacagactctcaaacttctcagccccagttttagcatactatcaaggaactgtttgctggtattactggagagttatgaatagcttcatttcataacttactaaattggaagaaatactgtgtctgaaacaaggattaaaatacagctctaaagacacaaagagaaaggaaatacttacagaataataccctgggcaaataatcaaatttgaattggaggctgggactttctctcttaatgatagcatagaggtaaacagatgtggtccacatctgagtgcatttttaaaatgtagcaggtcactgggtaagggcatgtaaaaattaagttattagcactataaagtacttcaatattattgtcaggccatcatataaagaaaagtctccacagaaagaaaaatgcaagagtatgaaatctgtaaggtttcatgtgtatttggagatggggctacatagaggtgaagtcctgagttactgttattacagacaggaatctccaagatgtttcttattgccgttatgggtaacagcagaattacatgttccatttcttttgtgcttacaatgtgccaggtgccgtatactgtgttaagcacttaagatctaatatctcacttaattctcattaccatccttcactccccatttcgaatgttaccaactcttggtaattatagcacctaaatttctctccagccatctgcacctttccatcgccactaccactacactaaactgggccctcctcccctttaacataaaccagtga

SEQ ID NO: 4239 - DNA, 1283 bp, Homo sapiens
tgcattaattaatcctgggatagagtacaccatcaaatgacaatctgacatttatctttcatttctcagtattctattaaagcaacagacaccttatattgtyaatgtatgatctttctcacatgagaatgtcttacagaggaatatgcaaaacagcaaagaagagagggaccagctttttattacatgaaactcaatgggagaatgaaacaagcattacataggtgaaaagtaaaaggctgcaaaagcaattaggagagcattacaaaagtagcagatgttcccctctaaattgcatcatgtgtagctcatagacttgaaatctcgtgcatctgaaggttaaaaatggggctgggggtgtggaaactcacttgtcgaagctattcagaattgaaaatagtctgataaatccaggattctcatgacccctggcagcattcacatctcatcacagtgataaatgtcccattgatgctttggagagcatcgatcacatcagcacagactgcccttgctgtaaaccatcttggtgatttataggcttgggcggcctgactgtgccctttcagctctgctgcacgcaacaggaggcctcccaagtcatctaggtgaaagaaactttcatttgctgttcaattccatcttcctggcagctgaattctcattatctcacacacctagcaaggatttgcctataaaatgtgtgtgtgtgtgtgtgtgtgtgtgtgtgtgtgtgtgtgtgagagagagagagagagagaatctcgctctgtcgcctaggctggagtgcagtatcatgttctcagctcactgcaacctctgcctcttgggttcaagcgattctcctgcctcagccttctgagtagctgggactacaggcgtgtgccactatgaccagctaattttcgtatttttagtagagacagagtttcaccatgctggccaggctggtctcgaactcctgacctcaggtaatacacccaccttggcctaccaaagtgctgggattacaggcatgagccacagtgcccagccatatttgcctacaaggtttcattcagtatcttccaaatgcctcacctcttctcttagagatgctcctgaaaaaaaacaaactgattttgtaatttccttcttgtacaaggtaacattttcgagttttatttttgcgaaggaatttataaaatcaaatttattttatagatagacatctctggcctacttctactgcacacagccactccctccttaacaaaacaaaaaaacctcaatggcttcgttaa

SEQ ID NO: 4240 - DNA, 1283 bp, Homo sapiens
tgcattaattaatcctgggatagagtacaccatcaaatgacaatctgacatttatctttcatttctcagtattctattaaagcaacagacaccttatattgttaatgtatgatctttctcacatgagaatgtcttacagaggaatatgcaaaacagcaaagaagagagggaccagctttttattacatgaaactcaatgggagaatgaaacaagcattacataggtgaaaagtaaaaggctgcaaaagcaattaggagagcattacaaaagtagcagatgttcccctctaaattgcatcatgtgtagctcatagrcttgaaatctcgtgcatctgaaggttaaaaatggggctgggggtgtggaaactcacttgtcgaagctattcagaattgaaaatagtctgataaatccaggattctcatgacccctggcagcattcacatctcatcacagtgataaatgtcccattgatgctttggagagcatcgatcacatcagcacagactgcccttgctgtaaaccatcttggtgatttataggcttgggcggcctgactgtgccctttcagctctgctgcacgcaacaggaggcctcccaagtcatctaggtgaaagaaactttcatttgctgttcaattccatcttcctggcagctgaattctcattatctcacacacctagcaaggatttgcctataaaatgtgtgtgtgtgtgtgtgtgtgtgtgtgtgtgtgtgtgtgtgagagagagagagagagagaatctcgctctgtcgcctaggctggagtgcagtatcatgttctcagctcactgcaacctctgcctcttgggttcaagcgattctcctgcctcagccttctgagtagctgggactacaggcgtgtgccactatgaccagctaattttcgtatttttagtagagacagagtttcaccatgctggccaggctggtctcgaactcctgacctcaggtaatacacccaccttggcctaccaaagtgctgggattacaggcatgagccacagtgcccagccatatttgcctacaaggtttcattcagtatcttccaaatgcctcacctcttctcttagagatgctcctgaaaaaaaacaaactgattttgtaatttccttcttgtacaaggtaacattttcgagttttatttttgcgaaggaatttataaaatcaaatttattttatagatagacatctctggcctacttctactgcacacagccactccctccttaacaaaacaaaaaaacctcaatggcttcgttaa

SEQ ID NO: 4241 - DNA, 631 bp, Homo sapiens
caggttgattggtacagcaaaccaccatggcacttgtatacctatgtaacaaacctgcactttcagtatatgtatcccagaacttaaagtaaaattaaaaaaaaaaaggaaatatcagttctttgggatacaattttaggcaacagttatccctattcccttattttaaaaaactaggaaagtataattgactaatcagcaagtatttactgaatacccactaaattcccagtactgctatgtgttttaaggaatgaaatcgtagtcaaaggttatttgttattagtcctacaggacaytaacaagtttcttccaaatatctagctgaatgcaagaaaaaacaagaccagaaacaagttactaaggaataactttataagtaatgatgtgcaaataaatgcagcacaaacagtaactattctaaaaattctaacttctattttgggcaggcgttgcaaagttgtcatagtttacactgacctacccacaattaacaaggtttcacacaaactcaattaagagaatttttgaaaaatttacttgaaaagaatatccatagcctgtcatcaatccaactgtaggaatgaatagatgaacattctaagtttattataaatatgtatgaatgcaa

SEQ ID NO: 4242 - DNA, 1221 bp, Homo sapiens
tgcatatccctaatagttttttgttttcctttttgtttgttggttggttttaggtaatattcccgaaaggacaaaatttcagtctttgttatgaatttccaaactatttttcaaaaaagctctaactgaaactcagaggctatgactcaagaattccactttcatcaccttctacctcaacctcaacaaatggcatccatcaaataacaacatggctgtgacaaccactacaagagacttaaaaacctaatgtttctttcaggaaaccaaccatataagactactataaaacaaagatgtgtccttaagcacacaggaggtgaaaaatcccagagctcatatagtgtgaaaaacttgagtagaggaaaggattatattgggtaaaatgtgggttttaaaatttgttccgccaatgagactattaagataataatacagtgaaayattacgcatttatctcacgtggagtccagttctacataacgtttgaaggagtagaggtcaggtgcttaggagtaaagggcagtattttctgagatggagggagtccacatgaccacatgtgggtaatattctcagcatggaatattagaagatattctcaagaaaattttaaaattagaattcagataaatttaaaaaacagtcatatcatattaagttaatgggcaacatcaatcttaaccccttaaacaaaagggtgcaagcatctagaaagttcaggaggaaaaggatcttcaaaattttaagtcataaatgtatgcaatagatgttgagctaattcatgtcaatggacaagatagctctttagagcatgatacacaaatttccatctattcatatgtttatttcatggtctctaccatacctcatgtaagtcatctcctagtaacagtagcattagcttctctctcaccttccaccccaactaaattactagcaagcagttacttctgatttatcagatctttctaacggtcccaagagcgtaggtcacacttgttaaggataccaccattagctaatttggaggccaccaaggtcttaaagggtctaagagaaatgagataagtttaggaaatgggattcagtgagaggttggtggtattatccgacttgagcccaaatgaaggcaggaaaaggcggcagttggcaagattgtttttttttttttttgattttttttaagcctaataatcttttctgtaagagccatggcct

SEQ ID NO: 4243 - DNA, 921 bp, Homo sapiens
tttaaagtgcactcaaccatcagttgccagataattctcaggtgagggaggtgtcgcaggtcccttggccttggggagcagggcagcgagtgctcacactctgatccctgggagcactgcctctatgcttggcatggggaagggcccttccacccccacagacatgtacttgcttccaacagggtggaggcaaacagggaagtttgtgcggaattgaagggagtcaggcccagctctaatgctaacctgctgtgatgtgggtgagagccagcatggagggtgaccatggcaaggtacctccgtggtcacctacaagcctgcaaaatgggtagttcctgccataaccccacccccaccctgaggatggcaattctgcctcttgaaagcagtgcctttatgactcacaacttctgctctcctcctgccgcctctttgacctccagggaagtgggacattttgctaggtctatgcctctaaagaaactctcctcctcacacccgcgagcaggatgcagccacttcagcaacactagtgctagaagattcgagaagcacagcattacccatcttaccgactgtggccatgctgccaagagctctakgtacctcttcacagcaacaccaagagatgggcctacagattccaggtggggaaacagagtcagagggctcaagtgactggcctgggactatgcagccactgaggcgagaagtgagactgaacacaagtccattgaatcttcacagagccagagtgggtgcccgcctgccaggcagacacacgaccccgttctccctcaatgtgtggtagataaagaggcggtagagatctctgaagagaattaggccactgtttcagtacagcattcagcaaagagagggccctgctatcttagcagaaagccaacaatcccaaatgca

SEQ ID NO: 4244 - DNA, 648 bp, Homo sapiens
acactaatgatgtgctgtgcagatcccttcctgtgcacattaaaggtactaaatcaaggggccttctatttaaaagcttcacctttatctgacattcagtagcaagacgtccatttctaaacttcagttgtgtattccttgcttctttttttgtgatgggatgtcatttatgtctacctagtgaaatataaatagaaaagtttatgatccatatggcctcaaattgtggcaatatgcagaaatttccttgttttagttccacaatgttcaaccacactaataaaatcaggtttgaacatccatttgttccagaaagccaaattttattgctaaaacattcataactcataacaagcaagctcaataccaattcagggacaatcatctttatctgcatgtcttaagtaaaaattaaaagtggagtttaggcaggaatyatgttctttttgccttgttgtattaggaggaaaccttccaaatatatttcattagcatttccaatgactttattttaaaattaaatggaatagaaagaagttactgaaagctaattctataattatttgtttatgtacttttgttatatacttttgtctctactgagcgattattcttgaaagacaaaactgtaatccataaactagcaca

SEQ ID NO: 4245 - DNA, 707 bp, Homo sapiens
tgcatgcacgcagtcccagggtcacttttcgcggaccgtacccggtactccggcaggaggcgaagcagtgcgcatgccagtgcctcgtcgcagtggaaggtgccattgtgcgtcccgattcggggcggtgccatgagtttgctgcgggatcgttttgggggcgggacggactctggaccgagcatgcggtgccgggtatacaggggtggcggcggcagcagcagcgttaagaggccgcgcaggaattggtgtcccataagcagctccctgcagggaggcaggagcgccgacccggaagaggaagcgccagcgcagccccacttccgcttgccaaccgttcccttggcaaccagctctgcagagtgagcagcagcasactcccagcctaggatttcttccagctggtcaaagggccctgcgatggagcctccaagaggcgcatcgcatcacccctgcgcatcaggctctgagacggggcccacactctggaccacaccccccatctcatcaccagtcccttgcttaatccagaaaagacaacattctgcccagctggcacattaattggcattaaaacacaggacccttcccatcaccagaagccccgcccaaaaggtgtccctctgccccaatttctgcaaaacctctaaggccttaacagtagcctgacctgcccccaggcttgggagctgctgaattttctgact

SEQ ID NO: 4246 - DNA, 540 bp, Homo sapiens
gtttctccttgaacatttctccaatctgtcccctcctctccatttctactctaatatcaccctagtctagaaatttgggtggactttccttgttttatttactacagcttcctaactagtttttctctgtcagctcacacattccctaattcaatgctgattgtgccagcaactgagtaaagggtttagtttagttgacattgtagcaagatttccctgtgaaggaaaaaaataggtaaattaatattctgtaataagttcctttctcatcaagttcattcccgatgatgcttgaccagcactttcagtaacactacgattctctacactgcagccagaggacttttcaatatgcaaatctaatcgtgccattcttttttaaaccctccatggyttctcaagtactcttaggataaaacagaaaatacttaagtagcacacaggacccaatctgtcatcctttggtctcatttgaaatgtcacatcctttgaaaaagtgttctttgactttccaagactaagttaggtctctgaatgttt

SEQ ID NO: 4247 - DNA, 636 bp, Homo sapiens
tgctacctgtttttatgaaaacccgagggaagaacacaattctgatatactggtaatgtgagccctcagaataacacccattttaaatgaaagttccaaccaaaaatcatgattgagtgttcaaatattctcggagagacaaaggactagtttaataatggtataatactaccttcctaccagcacatagatcggctgggtacacagttagcattcaatgaagtaattaaataaatctgtcccgggtgtgactggttggagccagtgtcacagatgaaaaaagaatttaccaagacagttgtaggtaaagaaaggcaaatttattaaagaaagtacaaacatatgttgcaagggtgcaataggcagcacagcaaagaaggtgctgtctgccaagaggcagaggatggagggaagttttataggttcatactggaggggctatgtgcagataaggtgtgcagataaggtcctgctgctggggctacatgtggagcgaggtatrtgggaacagggtgtggtgcctgcaggttgtctgtgattagccgtgtctcagaacaattgttctccctgacctggggctccttctttgttgttgcttacctatcttattagaactccacaggatgaatgtcaatg

SEQ ID NO: 4248 - DNA, 636 bp, Homo sapiens
tgctacctgtttttatgaaaacccgagggaagaacacaattctgatatactggtaatgtgagccctcagaataacacccattttaaatgaaagttccaaccaaaaatcatgattgagtgttcaaatattctcggagagacaaaggactagtttaataatggtataatactaccttcctaccagcacatagatcggctgggtacacagttagcattcaatgaagtaattaaataaatctgtcccgggtgtgactggttggagccagtgtcacagatgaaaaaagaatttaccaagacagttgtaggtaaagaaaggcaaatttattaaagaaagtacaaacatatgttgcaagggtgcaataggcagcacagcaaagaaggtgctgtctgccaagaggcagaggatggagggaagttttataggttcatactggaggggctatgtgcagataaggtgtgcagataaggtcctgctgctggggctacatgtggagcgaggtatgtgggaacagggygtggtgcctgcaggttgtctgtgattagccgtgtctcagaacaattgttctccctgacctggggctccttctttgttgttgcttacctatcttattagaactccacaggatgaatgtcaatg

SEQ ID NO: 4249 - DNA, 636 bp, Homo sapiens
tgctacctgtttttatgaaaacccgagggaagaacacaattctgatatactggtaatgtgagccctcagaataacacccattttaaatgaaagttccaaccaaaaatcatgattgagtgttcaaatattctcggagagacaaaggactagtttaataatggtataatactaccttcctaccagcacatagatcggctgggtacacagttagcattcaatgaagtaattaaataaatctgtcccgggtgtgactggttggagccagtgtcacagatgaaaaaagaatttaccaagacagttgtaggtaaagaaaggcaaatttattaaagaaagtacaaacatatgttgcaagggtgcaataggcagcacagcaaagaaggtgctgtctgccaagaggcagaggatggagggaagttttataggttcatactggaggggctatgtgcagataaggtgtgcagataaggtcctgctgctggggctacatgtggagcgaggtatgtgggaacagggtgtggtgccwgcaggttgtctgtgattagccgtgtctcagaacaattgttctccctgacctggggctccttctttgttgttgcttacctatcttattagaactccacaggatgaatgtcaatg

SEQ ID NO: 4250 - DNA, 609 bp, Homo sapiens
tatatatatatrtgtgtgtgtgtgtgtgtgtgtgtgtatgtgtgaaaaaataactctttacaataaaatgcccagtcttgactgctaaatatggagcaaacgctgttgttcaggggctccccctgaccaaggaccagtcctggcacagcaggaggtgagcggtgggtgggcaagccagtgaagtttcatctgtattcacaaccactccccatcacttgcattactgcctgagctctgcctcctgtcagatcagcggccgcatttgattcccacaggaccttgagccctattgtgagctgcacatgtaaggcgtctaggtttcatacttctcatgagaatctgatgtctgacgatcttttactgtctcccatcacccctagatgggattgtctagttgcagaaaacaagctcaaggctcccactgattctgcatgatggtgagtcatataattatttcattatatattacaatggaacaataatagaaaaaaagtgcacaatcaaggtaatgtgcttgaatcagcctgaaaccatcccccagccaacccccgactggtccatggaaaaactgtcttccatgaaaccaatccctcgtgccataaaggttgg

SEQ ID NO: 4251 - DNA, 609 bp, Homo sapiens
tatatatatatgtgtgtgtgtgtgtgtgtgtgtgtgtatgtgtgaaaaaataactctttacaataaaatgcccagtcttgactgctaaatatggagcaaacgctgttgttcaggggctccccctgaccaaggaccagtcctggcacagcaggaggtgagcggtgggygggcaagccagtgaagtttcatctgtattcacaaccactccccatcacttgcattactgcctgagctctgcctcctgtcagatcagcggccgcatttgattcccacaggaccttgagccctattgtgagctgcacatgtaaggcgtctaggtttcatacttctcatgagaatctgatgtctgacgatcttttactgtctcccatcacccctagatgggattgtctagttgcagaaaacaagctcaaggctcccactgattctgcatgatggtgagtcatataattatttcattatatattacaatggaacaataatagaaaaaaagtgcacaatcaaggtaatgtgcttgaatcagcctgaaaccatcccccagccaacccccgactggtccatggaaaaactgtcttccatgaaaccaatccctcgtgccataaaggttgg

SEQ ID NO: 4252 - DNA, 609 bp, Homo sapiens
tatatatatatgtgtgtgtgtgtgtgtgtgtgtgtgtatgtgtgaaaaaataactctttacaataaaatgcccagtcttgactgctaaatatggagcaaacgctgttgttcaggggctccccctgaccaaggaccagtcctggcacagcaggaggtgagcggtgggtgggcaagccagtgaagtttcatctgtattcacaaccactccccatcacttgcattactkcctgagctctgcctcctgtcagatcagcggccgcatttgattcccacaggaccttgagccctattgtgagctgcacatgtaaggcgtctaggtttcatacttctcatgagaatctgatgtctgacgatcttttactgtctcccatcacccctagatgggattgtctagttgcagaaaacaagctcaaggctcccactgattctgcatgatggtgagtcatataattatttcattatatattacaatggaacaataatagaaaaaaagtgcacaatcaaggtaatgtgcttgaatcagcctgaaaccatcccccagccaacccccgactggtccatggaaaaactgtcttccatgaaaccaatccctcgtgccataaaggttgg

SEQ ID NO: 4253 - DNA, 627 bp, Homo sapiens
ttggcccttccctataggcattggaaggtaatatgccagctggcggggtagggggggcactttgtgtgctgtagaattcagctctcatcatcaatggcaacctctgggatggaggacaatcaatcaaaaagaaccaagatattaaggaagcttgagggtagggtggaatccaatgaaataaaggagcttctaccatctgcaaccctcttcgagaggatcggagggagaagtagcaggatttttctgctacaagaaaggagggaagcatgtgggcttctctctgcttccaagtataaaggacttgaaacccaagcaagattacagaggtacctggcgagtcatggtacagagcaactggtaagccaaatccaggaaaagacccaatcctggcagcaacacctccatatggaattatgaacytctctctgggggaactaggtaagcattaaactttcccttgtccctaccttccatccaaggacagaaggtggaataagtacttctagcatctgcctttctctgatgtacaaactaaaaggcaataaatacactgcaaccttcattcaactctcagtcctggcccagtgtagcttccctaacctctaaaaacagcttcttagaaggcta

SEQ ID NO: 4254 - DNA, 647 bp, Homo sapiens
gacatggggtagtacccttacctttgccatctgtgcctgtacaccgctggccttcagtgctgttacagctttctgtgctgctgaagggctgtcaaaatctacaaagccatagcctggaacagaggaaacagcatcactaggaagtgggaggtgtaaggaacagagaggtccaggcttttcaggagacagaggaagagttatgatccatgtaacagaaatgggagggagaaagagctattgagaggtttcaggtagttatccacatgctcctcaaaccctgagatgtgatctactttgtggctaagaatgccaaggcaatgagctactctggtgtccctgcccttctccctcccccttaagaaatttgaggtttcaggaactaggctctgctaataacccaaagcccccctatacctctaaaagaattcactcccctcttttcttgatataccccagaaatgctaggcatgtagggaatgcagcctctccagagcagaccaccagccacctgctggaagaagaccctcaccaccccarcttatagccctttctcttccttccactcttccagctctatctagaactgctcaaaaccccaataaaactactcaccctcagaaaataacacccaccaaaacactccccaa

SEQ ID NO: 4255 - DNA, 439 bp, Homo sapiens
taaaaaataaataaataataggtcaaaacataccactaaattaaaagataacattagaagaaaacatttacaacatgcttaacaaagcatttgaagaacacttaatcatgacaagccaaaaggaaaaaattgacaaaagatggaaacaagtaattaactgaagatatacaactgaccaacaaacatgaaaatattccatcttactagccattagagctgagcrtggtggctcatgcctgtcatctcaacactttggaaggccaaggaagatggattgcttgagctacccccgtcccaccaccagacttgaaggtagccatgggcaatatgttgaaaccccccccttttttttttttttgagacagagtttcgctctcattgcccaggctggagtgcagtgacatgatcttggctcactgcaacctccaccttatggtgg

SEQ ID NO: 4256 - DNA, 439 bp, Homo sapiens
taaaaaataaataaataataggtcaaaacataccactaaattaaaagataacattagaagaaaacatttacaacatgcttaacaaagcatttgaagaacacttaatcatgacaagccaaaaggaaaaaattgacaaaagatggaaacaagtaattaactgaagatatacaactgaccaacaaacatgaaaatattccatcttactagccattagagctgagcatggtggctcatgcctgtcatctcaacactttggaaggccaaggaagatggattgcttgagctacccccgtcccaccaccagacttgaaggtagccatgggcaatatgttgaaacccccccyttttttttttttttgagacagagtttcgctctcattgcccaggctggagtgcagtgacatgatcttggctcactgcaacctccaccttatggtgg

SEQ ID NO: 4257 - DNA, 756 bp, Homo sapiens
tggtaggcactaaatcaaggttaagcaaaggaaggaagcattatgttctatacaaaccctgaaatacggagttagatagatctgaatttatttttaagtaattatttattgattgatctgaatttaaatgtggctttgtcacatattagctgtgtgaccagcgccaggtgtcttaggctttctgaccttgaatttttcatcttaaagtactgatatattggcccagcgcggtggctcatgcctgtaatcccagcactttgggaggctgaggcgggcggatcagaggtcaggagttcgagaccagcctggccaacatagtgaaacccagtccctactaaaaatacaaaaaaattagctgggcgtggtggtgggcacctgtaatcccagctacttggaaggctgaggcgaggaacctgggaracagaggctgcagtgagccgagatctgccactggactccagcccaggcgacagtgcgagattccatttcaaaaaaaaaaaaaaaaaagtactgatatattttgtcgaattattttgaggattggtaatgtttataatcacatatcagcctgtatattggctgtttttctcttatttaaaaaaaacattgtgggccgggcactgtggctcaacgcttgtaattccagcactttgggaggccgaggtgggcagatcacctgaggtcaggagttcgagaccagtctggccaacgtggtaaccctgtctctattaaaaaatataaaattagctgggcatg

SEQ ID NO: 4258 - DNA, 640 bp, Homo sapiens
aaaagttcgattttttatagcatatgcttactgaaaaacattttggtttctattaatgccaccacttctgaaggctcacaaaccttctatttaattatcaaaaccactagaccaatatggaagttctgcttaagtatccagcttccctactttaaaaaatatgccccttgagctcatctccagtgtttaaattctttccatttttcatatttcaggcatcacccacttttgttcttggataaccataagttgtttagcatggcattctgtctcactgttgcttatttagcatagtattcatctgaaacatgtttttgttttttgytttttgttttttttctaccaactgtagctcactatccttgacagagaagaaaggacttagaaccggaattcaactttgtgaccataatctgtgagtatcacaacatttgtcctaagcattaaggttattcattgttcttttgatttgaacatagctcaaaaatatctgcttatattttcattgccatttttgtaagcttacatcagtcttacgtttgctgtccttgatacttttctcatgattatgaatctcaattttttattaacctttaactgtaagttcattgtattttttacatttgtctctttctttaaa

SEQ ID NO: 4259 - DNA, 550 bp, Homo sapiens
ctttctaggacttgtgcagtaaaataaaatgtgttttcagatacattttttcatattatatctgatttttagaaatctatagaatacataataatcaagaattatttagatttaactgctatccaccttccgctactgataatcattgcctctcataagttatacctttctttattgaattctgcatgctagtttrtttttcatttttgtctgataagtcattaaatatgagaactattgtcttacacaacccaatactttcttaaaatttagctgtgctctgcagacccaacttagtagaatatttaatcataggagtcaatcatcacaagagccaggacacctgcttgacacttttggtaaagatgtacaatttcttacaagaaggaccaactccactttgaactaggtcctgttgaaaaggctgttcataaaccttaccagccagtagctcctgtcctttcttgatggatgcagaagatgaaacatcctggctagaaaacaaaatggccatgattttgaagagatgaagtttcaggacaactctgca

SEQ ID NO: 4260 - DNA, 550 bp, Homo sapiens
ctttctaggacttgtgcagtaaaataaaatgtgttttcagatacattttttcatattatatctgatttttagaaatctatagaatacataataatcaagaattatttagatttaactgctatccaccttccgctactgataatcattgcctctcataagttatacctttctttattgaattctgcatgctagtttatttttcatttttgtctgataagtcwttaaatatgagaactattgtcttacacaacccaatactttcttaaaatttagctgtgctctgcagacccaacttagtagaatatttaatcataggagtcaatcatcacaagagccaggacacctgcttgacacttttggtaaagatgtacaatttcttacaagaaggaccaactccactttgaactaggtcctgttgaaaaggctgttcataaaccttaccagccagtagctcctgtcctttcttgatggatgcagaagatgaaacatcctggctagaaaacaaaatggccatgattttgaagagatgaagtttcaggacaactctgca

SEQ ID NO: 4261 - DNA, 654 bp, Homo sapiens
tgcatgtgggacttaaaacctagatgacggattgataggggcagcaaaccaccatggcacatgtataccaatgyaacaatcctgcatgttctgcacatgtatcccagaagttaaagtaaaatttaaaaaagaaaagaaaagaaaaacaaacaaacaaaaacctctaccagcctataggatactggggagagaaaagccctccagagcttacagactaatataaaaagaaaaataagtatttaattatagtttggcgtgtgcttttcagaaaatagacaagtaagtacttttccttaaatctacaggttatcatgagagtgagccaaggaggaacaactagaggatggagtggaggatcagacaaagcttacccaagaagtaagataaaggctgagaagctgaggcttgagaagactttaggcagggtaatagtaaaagaaggatcattcctgggacaaagaacataatggtgcaaaggtctttacctaagaagcatcagtacaagtactagggacagagggggtagaagtgagacagagagtggctggacaaaacagggttccatcaagccaggcctcactgggccatcttaacctaaaaatgcagctgaggcctggaagagccatgtaagctggaacatctaaaaaagctttt

SEQ ID NO: 4262 - DNA, 1135 bp, Homo sapiens
gcattgaaattctgaaactagaagtggggagtgagggttagtttctcaccagaaaatgacctccaaggtctctctttgagtcttaagatgctaggacatgatccatttgttgtacatctatcataaacaagggctaaggtcaaggctgcaataacaagaagcactgttctaggtcagacactaaaatggtgggggggacaaatgtgttctcagcatyttaacagctgataaaattcaacatatgtcttatgagtgaatcataacaatgaaaggaaaattaattttaaaactcaaaatggaattgggatggggggggaaaccccatttgggagacaaaaaatcaaccccaactgtcaggaaaccataaattagcaaaggagagagagaaacaagctacttttttactatgaaaggaagttaaatagctacatttccttcaaaccaggaacagatttgagcagttataatttgccaggatgagtgggccacctaaattacctagttggatgagggtcatttgatcagagtaactatgatcgcattaactccatgtaattctccaaccaaaacaaatcaactcagaatttttcagtggtcttagctgatgacagtattgtttgtctttaacatactacttcttgagcacttgaaaatgtaaccaacaacacaaaaagtaaaataaaaagcacattttctgtagcattttaaaactacagaagatcttttaaaggccttggatattctaaaataagtagcaatacatttggaaagaaaaaaaccataacaaaattcagaccagcaacccagaagaatacagaaaaaaaaaactattagaattaataaatgaatctggcaaagttgcagcgtacaagattaacatgcaaaaatcagttgtgcttctctatacaccaacaataaacaaaaaagggaaattaaaacaattctatttacaaagtacagtgattacaatcacaagttttgaagacaggcttcttgagttcgaggcccaactgccactactaactggggaatcttctggaaattacctaatcattctgtagtttagttgccttatctgtatacatggaaataaaccacaacctatttcacgggttgttctgagaataaatcagct

SEQ ID NO: 4263 - DNA, 1135 bp, Homo sapiens
gcattgaaattctgaaactagaagtggggagtgagggttagtttctcaccagaaaatgacctccaaggtctctctttgagtcttaagatgctaggacatgatccatttgttgtacatctatcataaacaagggctaaggtcaaggctgcaataacaagaagcactgttctaggtcagacactaaaatggtgggggggacaaatgtgttctcagcatcttaacagctgataaaattcaacatatgtcttatgagtgaatcataacaatgaaaggaaaattaattttaaaactcaaaatggaattgggatggggggggaaaccccatttgggagacaaaaaatcaaccccaactgtcaggaaaccataaattagcaaaggagagagagaaacaagytacttttttactatgaaaggaagttaaatagctacatttccttcaaaccaggaacagatttgagcagttataatttgccaggatgagtgggccacctaaattacctagttggatgagggtcatttgatcagagtaactatgatcgcattaactccatgtaattctccaaccaaaacaaatcaactcagaatttttcagtggtcttagctgatgacagtattgtttgtctttaacatactacttcttgagcacttgaaaatgtaaccaacaacacaaaaagtaaaataaaaagcacattttctgtagcattttaaaactacagaagatcttttaaaggccttggatattctaaaataagtagcaatacatttggaaagaaaaaaaccataacaaaattcagaccagcaacccagaagaatacagaaaaaaaaaactattagaattaataaatgaatctggcaaagttgcagcgtacaagattaacatgcaaaaatcagttgtgcttctctatacaccaacaataaacaaaaaagggaaattaaaacaattctatttacaaagtacagtgattacaatcacaagttttgaagacaggcttcttgagttcgaggcccaactgccactactaactggggaatcttctggaaattacctaatcattctgtagtttagttgccttatctgtatacatggaaataaaccacaacctatttcacgggttgttctgagaataaatcagct

SEQ ID NO: 4264 - DNA, 1243 bp, Homo sapiens
agagagaggggagagaggttctagactcttattaacaaccagatctcatgggaactaacagagagaactcacttagtctcctgagaatggcaccaagccattcatgagggatccacccccatgactcaaacacctcacactaggcccctcctccaacatgggggatcaaatttcaacatgagatttggaggtgacaaatatcctaattatattagtgtccatctaggaaacacgaatcaaagtgctccaccatggattgtatgccaacggctaaacactttagctgaccttactttaggatagggtgcctgagacatggggatcaggaattgaagtcttggtgagtgtttccaaagacctcatcatcgaaactgcaaaagttcattcactcgtgcagcagatgttaagcaaatgctctgtgtgtgtgtgtgtatgtgtgtgtgtgtctgtgtgtaaaccttacggaagcctgggaatggaacaggcagtaagacaaatatgtagttactacccttatttagactaccttgtgataccrtgaggcagaaagacattaaacatccacaaaggaaaaggacaggatgcaataaaatgataaaggagagaacctagtctcctgtaaaggtaacattttgctgagcctgagaatatagttatataataaataatttttgattgattggatgccaatagcattgttacagatttaatgttttgaaaattttttaattcataaagttttcactagtcaaattcccaatcttttcttggctttcaaaatagcctagaaagaataggcatctacatttttttttttttttttgagacagagtcttgctccatcacccaggctgcagtattgctgagtggcacaatctcagctcactgcaatctccacctctctgattcaagcaattcccctgcctcaggccccgagtagctgggattacaggcgcacaccaccacgtccaggtaatctttttgtatttttagtagagatgggatttcaccatgttggccagactggtctcgaactcctgacctcaggcaatccacccacctcggcctcccaaaatgctgggattacaggtgtgagccaccgcacctggccaggcgtctacctttaacaaagctaagaaatgatccacaattcaaagcccaaggaaaatataagtgaaagaaatataaaagatggagtcaaatgtgataactttcttttaatactattgccatattttaattt

SEQ ID NO: 4265 - DNA, 1243 bp, Homo sapiens
agagagaggggagagaggttctagactcttattaacaaccagatctcatgggaactaacagagagaactcacttagtctcctgagaatggcaccaagccattcatgagggatccacccccatgactcaaacacctcacactaggcccctcctccaacatgggggatcaaatttcaacatgagatttggaggtgacaaatatcctaattatattagtgtccatctaggaaacacgaatcaaagtgctccaccatggattgtatgccaacggctaaacactttagctgaccttactttaggatagggtgcctgagacatggggatcaggaattgaagtcttggtgagtgtttccaaagacctcatcatcgaaactgcaaaagttcattcactcgtgcagcagatgttaagcaaatgctctgtgtgtgtgtgtgtatgtgtgtgtgtgtctgtgtgtaaaccttacggaagcctgggaatggaacaggcagtaagacaaatatgtagttactacccttatttagactaccttgtgataccgtgaggcagaaagacattaaacatccacaaaggaaaaggacaggatgcaataaaatgataaaggagagaacctagtctcctgtaaaggtaacattttgctgagcctgagaatatagttatataataaataatttttgattgattggatgccaatagcattgttacagatttaatgttttgaaaattttttaattcataaagttttcactagtcaaattcccaatcttttcttggctttcaaaatagcctagaaagaataggcatctacatttttttttttttttttgagacagagtcttgctccatcacccaggctgcagtattgctgagtggcacaatctcagctcactgcaatctccacctctctgattcaagcaattcccctgcctcaggcccygagtagctgggattacaggcgcacaccaccacgtccaggtaatctttttgtatttttagtagagatgggatttcaccatgttggccagactggtctcgaactcctgacctcaggcaatccacccacctcggcctcccaaaatgctgggattacaggtgtgagccaccgcacctggccaggcgtctacctttaacaaagctaagaaatgatccacaattcaaagcccaaggaaaatataagtgaaagaaatataaaagatggagtcaaatgtgataactttcttttaatactattgccatattttaattt

SEQ ID NO: 4266 - DNA, 1243 bp, Homo sapiens
agagagaggggagagaggttctagactcttattaacaaccagatctcatgggaactaacagagagaactcacttagtctcctgagaatggcaccaagccattcatgagggatccacccccatgactcaaacacctcacactaggcccctcctccaacatgggggatcaaatttcaacatgagatttggaggtgacaaatatcctaattatattagtgtccatctaggaaacacgaatcaaagtgctccaccatggattgtatgccaacggctaaacactttagctgaccttactttaggatagggtgcctgagacatggggatcaggaattgaagtcttggtgagtgtttccaaagacctcatcatcgaaactgcaaaagttcattcactcgtgcagcagatgttaagcaaatgctctgtgtgtgtgtgtgtatgtgtgtgtgtgtctgtgtgtaaaccttacggaagcctgggaatggaacaggcagtaagacaaatatgtagttactacccttatttagactaccttgtgataccgtgaggcagaaagacattaaacatccacaaaggaaaaggacaggatgcaataaaatgataaaggagagaacctagtctcctgtaaaggtaacattttgctgagcctgagaatatagttatataataaataatttttgattgattggatgccaatagcattgttacagatttaatgttttgaaaattttttaattcataaagttttcactagtcaaattcccaatcttttcttggctttcaaaatagcctagaaagaataggcatctacatttttttttttttttttgagacagagtcttgctccatcacccaggctgcagtattgctgagtggcacaatctcagctcactgcaatctccacctctctgattcaagcaattcccctgcctcaggccccgagtagctgggattacaggcgcacaccaccacgtccaggtaatctttttgtatttttagtagagatgggatttcaccatgttggcsagactggtctcgaactcctgacctcaggcaatccacccacctcggcctcccaaaatgctgggattacaggtgtgagccaccgcacctggccaggcgtctacctttaacaaagctaagaaatgatccacaattcaaagcccaaggaaaatataagtgaaagaaatataaaagatggagtcaaatgtgataactttcttttaatactattgccatattttaattt

SEQ ID NO: 4267 - DNA, 673 bp, Homo sapiens
atgaatgacactatggttggaacagtattcatgctgtaaaactgtcacatgagttggttgatacaaagtaaaaagtaatttaataaatgatttttaaaggctacattgaaattggaaaaagattgaaaaatcactattttggtggagggggataatgcttttatgtgtttacattttccattaaggctgtcaaatgaaaaacaaaccctgagaattctagatcaaagggaccttaatatgatgactctcctaagtgtggtgaargatggagctgctgtttcacttttagcacagcttgaagtccagcttctcctctctgtgttagataaagtgcctaggaagggaaggggacacttcagaagtcagtaatgataggaaacaggataatgagagccacatttactgagggaacattttcattagacagctcatgacttgaaagcagcaatcatttaataaccctttctgcttctctccagccaccagccccaccgcccccgcttccacgtacattttttttttttagtgacaattctttttttttctttattctaaaaaaaacaaaaaaaccaaaaacaggctacatgtgcagaacgtgcacgtttgttacataggtgtacatgtgccgtggtggtttgctgcacctattgacccaccctctaagctctctccc

SEQ ID NO: 4268 - DNA, 673 bp, Homo sapiens
atgaatgacactatggttggaacagtattcatgctgtaaaactgtcacatgagttggttgatacaaagtaaaaagtaatttaataaatgatttttaaaggctacattgaaattggaaaaagattgaaaaatcactattttggtggagggggataatgcttttatgtgtttacattttccattaaggctgtcaaatgaaaaacaaaccctgagaattctagatcaaagggaccttaatatgatgactctcctaagtgtggtgaaggatggagctgctgtttcacttttagcacagcttgaagtccagcttctcctctctgtgttagataaagtgcctaggaagggaaggggacacttcagaagtcagtaatgataggaaacaggataatgagagccacatttactgagggaacattttcattagacagctcatgacttgaaagcagcaatcatttaataaccctttctgcttctctccagccaccagccccaccgcccccgcttccacgtacattttttttttttagtgacaattctttttttttctttattctaaaaaaaacaaaaaaamcaaaaacaggctacatgtgcagaacgtgcacgtttgttacataggtgtacatgtgccgtggtggtttgctgcacctattgacccaccctctaagctctctccc

SEQ ID NO: 4269 - DNA, 897 bp, Homo sapiens
tttggtttgtctctcatgcagtggatgtaagtatattccatattttaaaagaaaattacatttatattttcatgtcccaaatagtagaattttacagaaattgcaaactcatcacctacctcatttcctcttttttctaaacacacaggcaaacaatacttcccagcctctcatgttgttagaagtagatttgtgacagttttagcaaacagatgatatatgggaaaacatgagaaacatttccaagcatgatacatcaaaactcrttatggttgatcccccatgatcaatccccccaccccaaacaactggacaccggtgcagctgaggatgacagagctgtcagcaacgtggggcccagaatgactgagaggtcagtcctatcacctccaactctgaagaccaggaaaatcagcattggaaagttcagaatgacaaaaaaaggttgactttattttgttactgaaacttcgtggtttgtttgttacagtagctaatgtaaccctaactcagacattcttacaatccaatgaggtagattcaattattgacttcattttagaggtgagaaatctgaggcactaagaaattatgttacttgtccaaggttacactagttaatgtgtggcagagtcagaattgagccaaagaagtgtggctacagatgctcttctctcaattgctattctgagacaaaattattgggtttgaacaagaataagttgctgctgaccctggaaaggtgtatttcaaagtagcagtgggaataagttatgattatacacagataatattaatatggttaatataaactatcacagtattttactaaatctctctaaaactctcaatattttactaaatgagatttataattttcacacattctgacagcct

SEQ ID NO: 4270 - DNA, 897 bp, Homo sapiens
tttggtttgtctctcatgcagtggatgtaagtatattccatattttaaaagaaaattacatttatattttcatgtcccaaatagtagaattttacagaaattgcaaactcatcacctacctcatttcctcttttttctaaacacacaggcaaacaatacttcccagcctctcatgttgttagaagtagatttgtgacagttttagcaaacagatgatatatgggaaaacatgagaaacatttccaagcatgatacatcaaaactcgttatggttgatcccccatgatcaatccccccaccccaaacaactggacaccggtgcagctgaggatgacagagctgtcagcaacgtggggcccagaatgactgagaggtcagtcctatcacctccaactctgaagaccaggaaaatcagcattggaaagttcagaatgacaaaaaaaggttgactttattttgttactgaaacttcgtggtttgtttgttacagtagctaatgtaaccctaactcagacattcttacaatccaatgaggtagattcaattattgacttcattttagaggtgagaaayctgaggcactaagaaattatgttacttgtccaaggttacactagttaatgtgtggcagagtcagaattgagccaaagaagtgtggctacagatgctcttctctcaattgctattctgagacaaaattattgggtttgaacaagaataagttgctgctgaccctggaaaggtgtatttcaaagtagcagtgggaataagttatgattatacacagataatattaatatggttaatataaactatcacagtattttactaaatctctctaaaactctcaatattttactaaatgagatttataattttcacacattctgacagcct

SEQ ID NO: 4271 - DNA, 1337 bp, Homo sapiens
cgggtagaaagaccacgaaaccccactgtatagactcagacttttgcattttgatagctgcattcattcatttgctaacaaatataagcaatttacctagcacctgggtatactgtgcctgggattatactgtgcctgggattctagtaatactttggctgaggatacagtgaaggacaaggtaatctgggccctttcctcataggtcttatatactagctggggaartataaaaatgtttttaataatgtaagtaaatttattcttgcagattgtaatgttatgaagctcagcgttctttagaggtaggagcaagtacacgtggttatcttctttagatttggaagtcagaaaaggccttcttatgaattcatatttaagctgagacatgaagaaagacttggagtgaagtagggggagtaaggaatgactaatcagaggccctggagaaaaagagagactcatacatctgtggaaatcaaaggcagccagtgtggcagaagcaatgaagcactgggagcttaaagagtgtgttgtgaaaggaggctgtgggggtgttggggtcaggcaggacctcaaggtcttgaataccaagggtcttgaattttattccacttgaagtgttttgatcacccagcataacataaccttgtctgatttttaaaaagatctccctggcagaagggcagttaggaggtttagtagtggtccaactgagagatgatgagacttgggccagtgggatcagggaaggaagaggaaagtggatgaattcaataagcactttagaggtaagggccaggctttcacgcctgtaatttcagcactttgcgaggccaaggtgggtggatcacctgaggtcaggagttcaagaccagcctggctaacatggtgaacccccatccctactaaaaatacaaaaaattagctgggcgtggtggtgtgcccctgtggtcccagctacttgggaggctgaggtacgagaatcacttaaacccgggaggcagaggttgcagtgagccgagattgcaccactgcattccagcctggacgacagagtgagactccgtcataaataaataaataaataaataaataaataaataaataaatgtaagaacaacagggctgaaaaacacaaatattctctttagttctattttgatactgtcactagcagttgaagtcaaacctaatacaaatgctcattgcattatgattttaggatggtaaaactttagtgtttgacgatgttttatgatgtctgttaactaattatcacctaactcagaaaacagatcaaaagtcattttaactagaaataaaatgggaataaa

SEQ ID NO: 4272 - DNA, 593 bp, Homo sapiens
aacaaacaatccagagaccattgtcaaagacattagtgacattagtaaaccaaagtcagaatgagctatttgtaacaggcaagaatgagactgtacacaatatctatttttggacaagagattggaaaataaaatgtttctttttttttgaggcggagtctcgctctgtcgtccaggctggagtgcagtggcgcgatgtaggctcactgcaagctccgcctcccgggttcacaccattctcctgcctcagcctccagagtagttgggactacaggcgtccaccaccacgcccggctaatttttttttttttgtatttttagtagagacggggtttcaccgtgttagccaagatggtctcgatctcctgacctcgtgatctgccctcctcggcctcccaaagtgctgggattacaggtgtgagctrctgcggccagctggaaaatataaattctaaaataaattctatattcttttctttgaaaaaaattaagtgtattttataacattttacctgactccattgttctgtctcagaactcccgaatattataagcaaatttatttgtgtatatatagatgcacatctttctgg

SEQ ID NO: 4273 - DNA, 1097 bp, Homo sapiens
attaggtttgtaaagtctatatataatgctttagattagcagaagttgccttaagggatagaatgtctcccaaattagaatgggaaagtagaatctaaaaatctaatgaagatatgtctaaaattagagtaaagcttataagatgatgatgatgacaggggtgataaggatagccatcatttattaaatacctattatgtgctaggctctgtagcagatgttttataaacattatctgcaaagctttgaaaatacctacaaagatattgtttccatttcagttctccagaaactaaagtacaagtagtttgaactactttcttggagtgaaacaactaataactggcagaataggaattagaatttagatattttctgactccacagctagatgtaatagactaccatcgtactccattggaagaaatgtcacgaaagtattcttccaagaaactactaaaaggaaacttaaaaatcaaataaaaaatggtgttgcatcttaagcattatttgaaggagctgtcattgctctgactggctggtatggaattctggtcactttacagttttagccctgtgtagatgtagatatagctggttaaccacattattcattttataagaaataaacttggtttttgtgactcaaaaattcatgaacttaattatcactggatacattgaccatgtttctgcatcttcagtgttgaatctagtctctgaaaagtgttgtcccataaggcctggactacacccacttatcaataagtacagcttagatcacttagccaatcttctgctgtgacattgctggtttttgttatggttaataacatctaccatcttaaaaccacatgacagtaatcttctgctgtgacattgctggtttttgttatggttaawaacatctaccatcttaaaaccaaatgacagtcaaatgaacattttaaacagatttcacggcatttggtatgtaggtaatatatgcaaaataacaatctaaccaaagagagtattcacatcctcttttaattttcctatttttttctttaactttcttttcctccctacttcaataaaggtaaaagaattgtttc

SEQ ID NO: 4274 - DNA, 550 bp, Homo sapiens
tgagctattgagttacatagaggaaatagatttgcatttgtcaggcagacatttatacaacaccacgatgttttatacattatgcttgttttaataaaactgaaattctaaaaaaaaaaaaaaaaaaagaaaagaagatgtttaaagatcctgtatataatcctgaaccactccatayactgaaatggctcaattaatgctaactcttgtagagacttgtaaaaattatttataattcatttctaccaagtagcatctgagggttgtgttggaattttcccaggaattaggggctgtataaaacatccaacttactaataatgttacccaactgcattattatcttctgtcccctatctctacagagaaaaaaaaaatgtactatttaggaattacatttgtgtctgaaaagggatgacccttcatgttttagaataacaacatcttcacatcagcaggcagtgatgtaacaattagggctttttgaatggtaggctaaggtgtagtacaggagacttgtctttgaatcagataaaattgatttaccatc

SEQ ID NO: 4275 - DNA, 982 bp, Homo sapiens
atcagagtgaagcctactcagtagtggagttaattggaggtgttgagaactattgaatgtctgtgaaattaaatttgtctaatggtctttttatgtttgcttttggtatagccccagatcctgggacaactggtaccccagatcctgggacaactggtaccccagatcctggaacaactggtaccacacatgctaggacaacgggtcccccagatcctggaacaactggtaccactcctgtttctgctgaatgtccagtggtaaatgaattggaacgaattaattgcatccctgaccagccgccaacaaaggtttgagttatgaattttgtttccattttagaatttatgcaacttgatagtttatttttttttgttgttttgttttggttttctttattagtgactctcaagagaggtgtttatgttgcmgccattagtggctcaggcaaattaacctgtgtccatgcttgtatgacagtgcagcttcaggaaaggaagacctggaaaattcccttgggttgccagattcagcaaataaaagtgcggttgcccagccaaattcaaatttcagaaaaacaatgaataagcttttagtataagtgtgtcccgtgaaagattttgggcttacttactaaaaacgtatttgtcttttatatggcaacactacatgattactagttctttctgactctgttcatgccctgtatgtctctcctcctttcagaatttccaaagctcatctagaatctgcagtaaaaattcacaaaacattatttaaaataagggcaaagtttcaagagctctgttttggaaggaagaaggtaatgaataccagattaaagacagtgcagacatctgggcatttaccttagcccagtgtttctagattatcggctgaagtccacctgattatgatgattataaagtacttgcccacaccctatgtttgatgtgccaaatttacagaaagttgatgcaca

SEQ ID NO: 4276 - DNA, 556 bp, Homo sapiens
caccttcttctccyagcagttattctgacgtggggatgcaccacgcttcgtttaaccagccctgcacccatacgtctgtggatggtttccgccttttcccagtcacagacggtgttctgatgaatttcctcgcacatatcacttggtgctctgtgcgtgcatttctgtgagatgttcctggaggtgggctgtctaggtctgagggggatctgtgcttaatttgcatcctgtgcaaaattccatccagtcatccggctccccaagggctcacatggtactgtcctctgtagacatcatcttctgcagatgatggcacgaccgcctctttcttttactcacaccagtctgcaccctggtgtcctgggggggtccagcccctacccgcttgtctgcccccagtccccccagcccctgctaatagggactctggcttctgagctttggcagactgcttcactctggagaagtttgctttctcaaacattcctggcaatgttactgtaaatcccgaggcctgtgtttgccttctttgggcctcagttttctcataagtaaa

SEQ ID NO: 4277 - DNA, 773 bp, Homo sapiens
tgcatttgtgtaatcccaagagtatttattcttttagtaaagaagaaagctattgattcataagcaatacgtatgctaccacatttacaaaggggtatttattctttgggagtcaagtcacctatctgaaatgtcttaactcttaaaatgccacataatagaatatgcaaaataaaaatatatgtatttgagtttcygagcgtaaagtcatctcaaaccagaaagaataatttctttcaagatagtacattccttacactgggatttgaggtcttaaagtcacaaatcctgtttgaacagaaataccatactgatgtatcttacgacagcttcttgccagagtagtaaaatccaactgtaaaggtatacatgcctttacagaattatttccctgggttcattagagaaagataagtgttggcagacctgactggtactcctacgggtattgccttatgaaaattcttggtttccattttattcagatacacttattcttcttagttcttagtgcctaacttgtagcaaacatacctgtttaattgtttttatttattttgtatagttcaaagtgtttctttttcctttggaatagttataaaatgatttgggtgggggggacattagcgggcatttaatttgtagttaaaatcaatatccaaatccaagatggtgattttttttttccccagccagtggtacaggagtacaatggtatgttttgaagagtagaagttactttttattttgttacatgacgctctgtcagtatt

SEQ ID NO: 4278 - DNA, 578 bp, Homo sapiens
ccgagtcttgctctgtcgcccaggctggagtgcagtggtgcgatcttggctcactgcaacctcttcccgccgggttcacgccattctcctgcctcagccttccgggtagctaggattacaggtrgacgctaccacgtccggctaatttttgtatttttagtacagacggggcttcatcatcttggccaggctgatttcgatctcctgacattgtgatctgcctgcctccccctcccaaagtgctgggattacaggcgtgagccaccacgcctggccaaggcctgctcctcttatctataccccctacccctgcagctgtgccgggggaaagctgggcagtttccctcctccgagcccctgtacataccatgaattgtgggaccttcagagcttttcacttttcggaaaatagctcctgctggggctacaagatggagtgtgaagagggccttgggccacagggaggcgcctgtggactagggggagttcatgcaccccttctttccccagaggggctggactcaggtgagtatgggggtgggggctcctgcacttcgacacaggcagcgggagggttt

SEQ ID NO: 4279 - DNA, 578 bp, Homo sapiens
ccgagtcttgctctgtcgcccaggctggagtgcagtggtgcgatcttggctcactgcaacctcttcccgccgggttcacgccattctcctgcctcagccttccgggtagctaggattacaggtagacgctaccacgtccggctaatttttgtatttttagtacagacggggcttcatcatcttggccaggctgatttcgatctcctgacatygtgatctgcctgcctccccctcccaaagtgctgggattacaggcgtgagccaccacgcctggccaaggcctgctcctcttatctataccccctacccctgcagctgtgccgggggaaagctgggcagtttccctcctccgagcccctgtacataccatgaattgtgggaccttcagagcttttcacttttcggaaaatagctcctgctggggctacaagatggagtgtgaagagggccttgggccacagggaggcgcctgtggactagggggagttcatgcaccccttctttccccagaggggctggactcaggtgagtatgggggtgggggctcctgcacttcgacacaggcagcgggagggttt

SEQ ID NO: 4280 - DNA, 706 bp, Homo sapiens
tgcatatatacacatataataattgcaattttaatcttataagaatctggactttttaggggcaagattagctaaagtttagctgtccattcaagtttaaagtttatctttaaagtttatctatcttcttttattatttgatcttgttaaatatgtattttaacttaataatacttaaataactttgtaatatttctatatcttagtgaatttttatgctattttaatgaaaggtagtaggaaaacccaggaaagtaatttarcttttttttggtagtaatgtaaattgaagcacagcaattagaagtagaaaaagattaaaagttaataagtaataaaagacttaaaaatctagatgatagccacagctagtctacagaaaatataaaacaaataacttctattaaaaataaaaatatctgaatatgtgctataagaatacaagtaaacattaaaactggtttatttattttcaaggaaaatgctaccaaatgatttctccctgggagttatataactatgtccttcattttacttgaaatgaattgaatttcattaaaatacttaaaatgacaatgtaaatgaaaatggaatatattttaaaagttgatttgaaattgctgaaataatatacagcacctaaacgagtaataacttagtcattatttaaatatactaaagtggttttcttatattggataactat

SEQ ID NO: 4281 - DNA, 1180 bp, Homo sapiens
tacagctccctccctaatcttgctagaaggtagggctaatgcattgtcaattcagaaatagggggtgttcctgagtctggggacactctagtgaaattctatgtgtaaaataatttgtacaagtttatatttttagctaaattaaaatactcacattcccattattttttagaggttgtaagctaagtaataacattctagaaactctctgttttttgaaagggcatcaccactgttgaaggcgctaatgggagatcctaagtttcaggctctgctacagacgtcaggtcccctaggagttgggctgcctttgctctcctctccgcgactcggtacctggtgtatagttggctaaaaagaagttgttggggctgggtgcagcacctcacacctgtaatttcaacacgtagggaggctgaggcaggaggatctcctgaagcccagaattcaagaccaggctgggcagcatagcactacccatctctactataaatttaaaaattaactgggtgtggtggtgcacatctctagtctcagctgcttgggactactagaaaggtaaggcaagagaatcccctgagcccaggagttggaggttgctgcagctatgttcgcaccactgtattccagtctgggcaacagagcaagaccccatttccaaaaaataaatgaaataaataaatacataataaataaacagtagtggttgaaagaaagggaaggaagaaatgctgttttaggaaatcaataggataatttttttttttttttgargcggagtctcactctgttgcccaggctggagtgcagtggcacagtctcggctcactgtaagctccgcctcccgagttcacgccattctcctgcctcagcctcccgagtagttgggactacaggcgcccgccaccacactcagctaattttttgtatttttagtagagacagggtttcactgtgttagccaggatggtctcgatctcctgacctcgtgatctgcctgccttggcctcccaaagtgctgggattacaggcgtgaactactgtgcctggccaggataatctttaagaagaagataacattagctattcttctcacttcctacgtagaattccataccctgtgtctttggcctggaaagggtattggtagcaattgtcttcggctttccctgccatgtgt

SEQ ID NO: 4282 - DNA, 1180 bp, Homo sapiens
tacagctccctccctaatcttgctagaaggtagggctaatgcattgtcaattcagaaatagggggtgttcctgagtctggggacactctagtgaaattctatgtgtaaaataatttgtacaagtttatatttttagctaaattaaaatactcacattcccattattttttagaggttgtaagctaagtaataacattctagaaactctctgttttttgaaagggcatcaccactgttgaaggcgctaatgggagatcctaagtttcaggctctgctacagacgtcaggtcccctaggagttgggctgcctttgctctcctctccgcgactcggtacctggtgtatagttggctaaaaagaagttgttggggctgggtgcagcacctcacacctgtaatttcaacacgtagggaggctgaggcaggaggatctcctgaagcccagaattcaagaccaggctgggcagcatagcactacccatctctactataaatttaaaaattaactgggtgtggtggtgcacatctctagtctcagctgcttgggactactagaaaggtaaggcaagagaatcccctgagcccaggagttggaggttgctgcagctatgttcgcaccactgtattccagtctgggcaacagagcaagaccccatttccaaaaaataaatgaaataaataaatacataataaataaacagtagtggttgaaagaaagggaaggaagaaatgctgttttaggaaatcaataggataatttttttttttttttgaagcggagtctcactctgttgcccaggctggagtgcagtggcacagtctcggctcactgtaagctccgcctcccgagttcacgccattctcctgcctcagcctcccgagtagttgggactacaggcgcccgccaccacactcagctaattttttgtatttttagtagagacagggtttcactgtgttagccaggatggtctcgatctcctgacctcgtgatctgcctgccttggcctcccaaagtgctgggattacaggcgtgaactactgtgcctggccaggataatctttaagaagaagataacattagctattcttctcacttcctacgtagaattccmtaccctgtgtctttggcctggaaagggtattggtagcaattgtcttcggctttccctgccatgtgt

SEQ ID NO: 4283 - DNA, 1336 bp, Homo sapiens
tagggacatgcaaaacaaaggctggctcattaataggatatgtctagagttctgctttagaaatcataatgtggacatcattgatttctctgatgctggaagctgctgctgcttcttcatctttatcttctcctccctgtgtattgagagcagggacctccttgtgctgttttgggctctccttgttcacccagattggctgcatcagcaccttcttaaaatattagtgttgctgagataggagcttttggtagatggataaactgggatttgtaaatattttgcttagtttttttcccagagttttgcagaagagaataaggtgttggtttgttataaggtggtcctttataaagtttagacctattttaataaggctgacttgggttgaagataactagagccatgactttcatcttgatggacaatgagtactcactctacttttttagtttatatttttattttagttcatttcatttaagacagcgtctgttacccaggctggagtgcagtgacatgatctcggctcactgcaacctacaccttctgggttcaagtgattctgatgtctcagcctccccagtagctgggattacaggcatgtgccaccacaccggctaattttatgcatttttagtagagacgcgtttcaccatgttagccaggctggtcttgaactcctgaattcaaatgatctgcccacctcaacctcccaaaatgctgcgattacattttaaaactctaccttttaaaaattagaacctggacaaagaggtattaaagaatgtgtctcttattaatttattatggtaatgagaagagtttggatttggacctacctaggtttttctttcctccagctccgccaccccaactccttactcatgcttcctctgtaaaatgatcactccccagtttgacaggaattgcccctggaatcccatctggtgttctaattgttaccaaatycaggcaaatcttgcctgtgatacaggtggtgaagctactggatagaactggagcatctaactggtgtgagatggtatctcattgtggttttgatttgcatttctctgatggccagtgatgatgagcattgtttcatgtgtctgttggctgcataaatgtcttcttttgagaagtgtctgatcatatccttcgcccacttgggtggatgaagctggaaaccatcattctcagcaaactgttgcaaggacaaaaaaccaaacaccgcatgttctcactcataggtgggaattgaacaatgagaacagttggacacaggaaggggaacatcacacaccggggcctgttgtggggtgcggggagggga

SEQ ID NO: 4284 - DNA, 1336 bp, Homo sapiens
tagggacatgcaaaacaaaggctggctcattaataggatatgtctagagttctgctttagaaatcataatgtggacatcattgatttctctgatgctggaagctgctgctgcttcttcatctttatcttctcctccctgtgtattgagagcagggacctccttgtgctgttttgggctctccttgttcacccagattggctgcatcagcaccttcttaaaatattagtgttgctgagataggagcttttggtagatggataaactgggatttgtaaatattttgcttagtttttttcccagagttttgcagaagagaataaggtgttggtttgttataaggtggtcctttataaagtttagacctattttaataaggctgacttgggttgaagataactagagccatgactttcatcttgatggacaatgagtactcactctacttttttagtttatatttttattttagttcatttcatttaagacagcgtctgttacccaggctggagtgcagtgacatgatctcggctcactgcaacctacaccttctgggttcaagtgattctgatgtctcagcctccccagtagctgggattacaggcatgtgccaccacaccggctaattttatgcatttttagtagagacgcgtttcaccatgttagccaggctggtcttgaactcctgaattcaaatgatctgcccacctcaacctcccaaaatgctgcgattacattttaaaactctaccttttaaaaattagaacctggacaaagaggtattaaagaatgtgtctcttattaatttattatggtaatgagaagagtttggatttggacctacctaggtttttctttcctccagctccgccaccccaactccttactcatgcttcctctgtaaaatgatcactccccagtttgacaggaattgcccctggaatcccatctggtgttctaattgttaccaaattcaggcaaatcttgcctgtgatacaggtggtgaagctactggatagaactggagcatctaactggtgtgagatggtatctcattgtggttttgatttgcatttctctgatggccagtgatgatgagcattgtttcatgtgtctgttggctgcataaatgtcttcttttgagaagtgtctgatcatatccttcgcccacttgggtsgatgaagctggaaaccatcattctcagcaaactgttgcaaggacaaaaaaccaaacaccgcatgttctcactcataggtgggaattgaacaatgagaacagttggacacaggaaggggaacatcacacaccggggcctgttgtggggtgcggggagggga

SEQ ID NO: 4285 - DNA, 1681 bp, Homo sapiens
tgacctgtgcaatgcacctgcttcggtgcctggcacagagtcgcaaagccacaaagatggtgcttgttggttgtatgtgttgtttccatctgataycaccattgaggggagcaagatgacatgtgcctaccccacgtgtccagcagcaaagccacctggcatagtgggctgctcagcgtgcctggttcatactgcgtgtttatagtcccagggtgttttcagagagcaaaagtcctttatgattagcaaattgcaggtcctcccctttctgatatttacagcccttgcaaccgcctgtacaaaaatcgggaaaaggccaagaagcgggctgtcattaatgtaaaagcagctggttacctccccctccccagcgcacacatcacctcctagtacaattagtcaccatgtcttttcccttccgtcaagccttttagcggagttcacagggatgccttcggtccagacactatgaccgttgacgaaggatttgaaatattttgagaactctgaaataatgcacaccagaaacgtccagctgaaaacaaaaagggaacaagatgacattttgcaatcccatgcacgttgcaggcgcgttgaatgtgaaggtcagtagtacttcagagggcaggcctgttgcccccaagcctgttgcctaagaaatgcccaggccctttgaacaaaatggattcgagtgattacagcacgtcctcacttacatctcccaatatatttcttgttattctcgttgagtactgcattcagacagaggttgccaataaagtttattgtaggagctaagtgtcaatatctgtagtaccccccgcctagggtgctgctaataaaatgccacagatagtcttgggagaggcatgaaaatttgatggcaaattgatttcaggttcatcttgaaatttgtcctcagctggactcgatacttctggcagacatgggatggcttttgtcagaagggatccgctggaatgagacagagatgtcttgatctgaatattaaatacaacatgctgtttatgacattatccgtttactgctaaaatacccagctacttctgtttacacattcttctgcgttgaatgggtaagatagcatctcatagatccactttacatatgaaaaagaagttgtatcaaacttgctgggcatcagaaataaagggttttagagacactggcttcaaacacaagttattccatccaagattctaaacttagcaatgcaacttgcacttaattttaaaacgctggaaaaataatgataaagattgtgtgatcaagtatagcagccctgtggtgtttcctcagaatggtgtattacagaaaaggaaaaaagccatatacatggagaaaaaactcccgatatttaatattatcaattgctggttcctgtaaatttgcatttatggatcacattataaaagcaattactcttatggattgttcatgcagaaatgcactatgatgatgatatacttttaaaagtatatttatttccagaattcaatttgtaagaggtttgagggaaaaataatactgagttttgagtgtttctgattttaaaaaatgggggtcgagaggaataaaacgtgttcaccccaaaacccattttatccccttttaaattaattgggggcaacttaaattgtatttacttagcatttgaatg

SEQ ID NO: 4286 - DNA, 1681 bp, Homo sapiens
tgacctgtgcaatgcacctgcttcggtgcctggcacagagtcgcaaagccacaaagatggtgcttgttggttgtatgtgttgtttccatctgatatcaccattgaggggagcaagatgacatgtgcctaccccacgtgtccagcagcaaagccacctggcatagtgggctgctcagcgtgcctggttcatactgcgtgtttatagtcccagggtgttttcagagagcaaaagtcctttatgattagcaaattgcaggtcctcccctttctgatatttacagcccttgcaaccgcctgtacaaaaatcgggaaaaggccaagaagmgggctgtcattaatgtaaaagcagctggttacctccccctccccagcgcacacatcacctcctagtacaattagtcaccatgtcttttcccttccgtcaagccttttagcggagttcacagggatgccttcggtccagacactatgaccgttgacgaaggatttgaaatattttgagaactctgaaataatgcacaccagaaacgtccagctgaaaacaaaaagggaacaagatgacattttgcaatcccatgcacgttgcaggcgcgttgaatgtgaaggtcagtagtacttcagagggcaggcctgttgcccccaagcctgttgcctaagaaatgcccaggccctttgaacaaaatggattcgagtgattacagcacgtcctcacttacatctcccaatatatttcttgttattctcgttgagtactgcattcagacagaggttgccaataaagtttattgtaggagctaagtgtcaatatctgtagtaccccccgcctagggtgctgctaataaaatgccacagatagtcttgggagaggcatgaaaatttgatggcaaattgatttcaggttcatcttgaaatttgtcctcagctggactcgatacttctggcagacatgggatggcttttgtcagaagggatccgctggaatgagacagagatgtcttgatctgaatattaaatacaacatgctgtttatgacattatccgtttactgctaaaatacccagctacttctgtttacacattcttctgcgttgaatgggtaagatagcatctcatagatccactttacatatgaaaaagaagttgtatcaaacttgctgggcatcagaaataaagggttttagagacactggcttcaaacacaagttattccatccaagattctaaacttagcaatgcaacttgcacttaattttaaaacgctggaaaaataatgataaagattgtgtgatcaagtatagcagccctgtggtgtttcctcagaatggtgtattacagaaaaggaaaaaagccatatacatggagaaaaaactcccgatatttaatattatcaattgctggttcctgtaaatttgcatttatggatcacattataaaagcaattactcttatggattgttcatgcagaaatgcactatgatgatgatatacttttaaaagtatatttatttccagaattcaatttgtaagaggtttgagggaaaaataatactgagttttgagtgtttctgattttaaaaaatgggggtcgagaggaataaaacgtgttcaccccaaaacccattttatccccttttaaattaattgggggcaacttaaattgtatttacttagcatttgaatg

SEQ ID NO: 4287 - DNA, 1681 bp, Homo sapiens
tgacctgtgcaatgcacctgcttcggtgcctggcacagagtcgcaaagccacaaagatggtgcttgttggttgtatgtgttgtttccatctgatatcaccattgaggggagcaagatgacatgtgcctaccccacgtgtccagcagcaaagccacctggcatagtgggctgctcagcgtgcctggttcatactgcgtgtttatagtcccagggtgttttcagagagcaaaagtcctttatgattagcaaattgcaggtcctcccctttctgatatttacagcccttgcaaccgcctgtacaaaaatcgggaaaaggccaagaagcsggctgtcattaatgtaaaagcagctggttacctccccctccccagcgcacacatcacctcctagtacaattagtcaccatgtcttttcccttccgtcaagccttttagcggagttcacagggatgccttcggtccagacactatgaccgttgacgaaggatttgaaatattttgagaactctgaaataatgcacaccagaaacgtccagctgaaaacaaaaagggaacaagatgacattttgcaatcccatgcacgttgcaggcgcgttgaatgtgaaggtcagtagtacttcagagggcaggcctgttgcccccaagcctgttgcctaagaaatgcccaggccctttgaacaaaatggattcgagtgattacagcacgtcctcacttacatctcccaatatatttcttgttattctcgttgagtactgcattcagacagaggttgccaataaagtttattgtaggagctaagtgtcaatatctgtagtaccccccgcctagggtgctgctaataaaatgccacagatagtcttgggagaggcatgaaaatttgatggcaaattgatttcaggttcatcttgaaatttgtcctcagctggactcgatacttctggcagacatgggatggcttttgtcagaagggatccgctggaatgagacagagatgtcttgatctgaatattaaatacaacatgctgtttatgacattatccgtttactgctaaaatacccagctacttctgtttacacattcttctgcgttgaatgggtaagatagcatctcatagatccactttacatatgaaaaagaagttgtatcaaacttgctgggcatcagaaataaagggttttagagacactggcttcaaacacaagttattccatccaagattctaaacttagcaatgcaacttgcacttaattttaaaacgctggaaaaataatgataaagattgtgtgatcaagtatagcagccctgtggtgtttcctcagaatggtgtattacagaaaaggaaaaaagccatatacatggagaaaaaactcccgatatttaatattatcaattgctggttcctgtaaatttgcatttatggatcacattataaaagcaattactcttatggattgttcatgcagaaatgcactatgatgatgatatacttttaaaagtatatttatttccagaattcaatttgtaagaggtttgagggaaaaataatactgagttttgagtgtttctgattttaaaaaatgggggtcgagaggaataaaacgtgttcaccccaaaacccattttatccccttttaaattaattgggggcaacttaaattgtatttacttagcatttgaatg

SEQ ID NO: 4288 - DNA, 1681 bp, Homo sapiens
tgacctgtgcaatgcacctgcttcggtgcctggcacagagtcgcaaagccacaaagatggtgcttgttggttgtatgtgttgtttccatctgatatcaccattgaggggagcaagatgacatgtgcctaccccacgtgtccagcagcaaagccacctggcatagtgggctgctcagcgtgcctggttcatactgcgtgtttatagtcccagggtgttttcagagagcaaaagtcctttatgattagcaaattgcaggtcctcccctttctgatatttacagcccttgcaaccgcctgtacaaaaatcgggaaaaggccaagaagcgggctgtcattaatgtaaaagcagctggttacctccccctccccagcgcacacatcacctcctagtacaattagtcaccatgtcttttcccttccgtcaagccttttagcggagttcacagggatgccttcggtccagacactatgaccgttgacgaaggatttgaaatattttgagaactctgaaataatgcacaccagaaacgtccagctgaaaacaaaaagggaacaagatgacattttgcaatcccatgcacgttgcaggcrcgttgaatgtgaaggtcagtagtacttcagagggcaggcctgttgcccccaagcctgttgcctaagaaatgcccaggccctttgaacaaaatggattcgagtgattacagcacgtcctcacttacatctcccaatatatttcttgttattctcgttgagtactgcattcagacagaggttgccaataaagtttattgtaggagctaagtgtcaatatctgtagtaccccccgcctagggtgctgctaataaaatgccacagatagtcttgggagaggcatgaaaatttgatggcaaattgatttcaggttcatcttgaaatttgtcctcagctggactcgatacttctggcagacatgggatggcttttgtcagaagggatccgctggaatgagacagagatgtcttgatctgaatattaaatacaacatgctgtttatgacattatccgtttactgctaaaatacccagctacttctgtttacacattcttctgcgttgaatgggtaagatagcatctcatagatccactttacatatgaaaaagaagttgtatcaaacttgctgggcatcagaaataaagggttttagagacactggcttcaaacacaagttattccatccaagattctaaacttagcaatgcaacttgcacttaattttaaaacgctggaaaaataatgataaagattgtgtgatcaagtatagcagccctgtggtgtttcctcagaatggtgtattacagaaaaggaaaaaagccatatacatggagaaaaaactcccgatatttaatattatcaattgctggttcctgtaaatttgcatttatggatcacattataaaagcaattactcttatggattgttcatgcagaaatgcactatgatgatgatatacttttaaaagtatatttatttccagaattcaatttgtaagaggtttgagggaaaaataatactgagttttgagtgtttctgattttaaaaaatgggggtcgagaggaataaaacgtgttcaccccaaaacccattttatccccttttaaattaattgggggcaacttaaattgtatttacttagcatttgaatg

SEQ ID NO: 4289 - DNA, 1820 bp, Homo sapiens
  misc_feature (1)...(1820): n = A,T,C or G
cattgcctggatcaccttgttaatatggtttcttattaaacgtgctggaaaaaagaggctctaagtgcgtatgcttttaaagcaacactattagcaaatggccactggcttcatttttcctgtgcatatatttttgtgtattccgggaggattttcttttctttttctttttaatcctcctcctcaagggaaacattcttctcacaatagcttcctggtagaaagttctaactaatgactttgatcgtgtgcatgtattgcagaaatggacagggcaattctcagcccattcatcttacagacctcaagtgaacaggcacaaaacaacaggctccaccctccttcccccctctatctcatactttacctcaatttatgacttggcttacaatccgttgcagaaagcctagctccccagcttctcctgaatctacgtttttctattttgtctgaactagccaaggtctctggtgtttgctgttatcttgcttcagagaccttagtgacattgaaaggctgttgtcttttttattgtacttttggttgttaggagaaattttctaggccatttttttctttccgtctttgcagttcaggagattatattagaaaatattctatacaaaaaatatgcatagtagggcttttctccagctagtagctcagaataagtcaktattactgaaacaggtacccttttgtggaattgattctgaaatctgtttggatctgaaatctttctttcttgcctttgagtaagatacggcagagaaaaacaattacactagctgctggtctgtatttactggttagaatagaatattattaccatcaagaataacattagtggccaggtgcggtggctcacgcctgtaatcccagcactttgggnaggccgaggtgggtggatcacctgaggtcnaggagttcaaaaccagcctggcncaacatggtgaaancccccgtctnctactaaaaatacnaaaaanttagccgggnntngtggcggtgcatgcctgtaatcccagctacttgggaggctgaggcaggagaatcccttgaacctgnggaggtnggaggttgcagtgagctgagatcacgccattatactccagtctaggcaacaagagtgaaactctgtctcaaaaaaaattaatgataataatgttacaataataataatgttagtgatacatatcattatgaaaccagttcttaagcaattaaaaaaaagcagctatggtgattgagtttttgtgttatggattttatactctggaggcatggtcatagtgaatgccaaagaaatgaacaggagaaaattttatttgaaaagctgggattgttgcatgctgcagaatttttttttcttttgctattgctgtgtaacaaatgaccacacacttagcagttcacattcacatcttgtttattaactacaattctctagatcagaagcctagacacaatgtgactggcttctctgctcagggtctcttggggacaaaataaaggtgtccgctggaggaacatcctttcctgcatgctctgtggaagaatccactgccaagctcattcaggatgctggcaggattcagatccttgaagttgtaagactagggcccctgtttcctactgacttctgctggtggctgccctcagctcccagaggcaacccacattccttgacttttggccccctgcatctcaaagccagcaacagaaactctcttgtgcatggagtcccctccctgcttttgaattctttctgacttttctttgatttttgatgtttaggtttggatttcaagggttcagaa

SEQ ID NO: 4290 - DNA, 1820 bp, Homo sapiens
  misc_feature (1)...(1820): n = A,T,C or G
cattgcctggatcaccttgttaatatggtttcttattaaacgtgctggaaaaaagaggctctaagtgcgtatgcttttaaagcaacactattagcaaatggccactggcttcatttttcctgtgcatatatttttgtgtattccgggaggattttcttttctttttctttttaatcctcctcctcaagggaaacattcttctcacaatagcttcctggtagaaagttctaactaatgactttgatcgtgtgcatgtattgcagaaatggacagggcaattctcagcccattcatcttacagacctcaagtgaacaggcacaaaacaacaggctccaccctccttcccccctctatctcatactttacctcaatttatgacttggcttacaatccgttgcagaaagcctagctccccagcttctcctgaatctacgtttttctattttgtctgaactagccaaggtctctggtgtttgctgttatcttgcttcagagaccttagtgacattgaaaggctgttgtcttttttattgtacttttggttgttaggagaaattttctaggccatttttttctttccgtctttgcagttcaggagattatattagaaaatattctatacaaaaaatatgcatagtagggcttttctccagctagtagctcagaataagtcattaytactgaaacaggtacccttttgtggaattgattctgaaatctgtttggatctgaaatctttctttcttgcctttgagtaagatacggcagagaaaaacaattacactagctgctggtctgtatttactggttagaatagaatattattaccatcaagaataacattagtggccaggtgcggtggctcacgcctgtaatcccagcactttgggnaggccgaggtgggtggatcacctgaggtcnaggagttcaaaaccagcctggcncaacatggtgaaancccccgtctnctactaaaaatacnaaaaanttagccgggnntngtggcggtgcatgcctgtaatcccagctacttgggaggctgaggcaggagaatcccttgaacctgnggaggtnggaggttgcagtgagctgagatcacgccattatactccagtctaggcaacaagagtgaaactctgtctcaaaaaaaattaatgataataatgttacaataataataatgttagtgatacatatcattatgaaaccagttcttaagcaattaaaaaaaagcagctatggtgattgagtttttgtgttatggattttatactctggaggcatggtcatagtgaatgccaaagaaatgaacaggagaaaattttatttgaaaagctgggattgttgcatgctgcagaatttttttttcttttgctattgctgtgtaacaaatgaccacacacttagcagttcacattcacatcttgtttattaactacaattctctagatcagaagcctagacacaatgtgactggcttctctgctcagggtctcttggggacaaaataaaggtgtccgctggaggaacatcctttcctgcatgctctgtggaagaatccactgccaagctcattcaggatgctggcaggattcagatccttgaagttgtaagactagggcccctgtttcctactgacttctgctggtggctgccctcagctcccagaggcaacccacattccttgacttttggccccctgcatctcaaagccagcaacagaaactctcttgtgcatggagtcccctccctgcttttgaattctttctgacttttctttgatttttgatgtttaggtttggatttcaagggttcagaa

SEQ ID NO: 4291 - DNA, 590 bp, Homo sapiens
tgcatacctgagtttaattccaaaaagtctttttgaagtcttttccctggtataggtaaggtgtttttctttctgtcttaggaagacttttcttctctgggacattttccctcaactatttcctttcctattagtcatactttttgtaatctgttctacttggagccatgcaattatgactgtatgaattatataaattaattataaggtggttttatgtagtttaaaccagttatggtggtaaatttcgtgttgattggtacaagtttatttttttttaaatataccactgggctaatactgcacagtaaactgattttgtaatgktttagtctcatatttacttattccttctgatcacatgcggtagacatttatgtatgggtcatttatatatatttttttctttttttcttttctttttttttttttggttggtgtgttttgagacagagtctcactcttgcccaggccggaatgcagtggtgtgatttcagctcactgcaatctccacctcccaggttcaagtgattctcctgcctcagcacaagtagctgggactacaggcgtgcatcaccatgcctggctaa

SEQ ID NO: 4292 - DNA, 590 bp, Homo sapiens
tgcatacctgagtttaattccaaaaagtctttttgaagtcttttccctggtataggtaaggtgtttttctttctgtcttaggaagacttttcttctctgggacattttccctcaactatttcctttcctattagtcatactttttgtaatctgttctacttggagccatgcaattatgactgtatgaattatataaattaattataaggtggttttatgtagtttaaaccagttatggtggtaaatttcgtgttgattggtacaagtttatttttttttaaatataccactgggctaatactgcacagtaaactgattttgtaatggtttagtctcatatttacttattccttctgatcacatgcggtagacatttatgtatggktcatttatatatatttttttctttttttcttttctttttttttttttggttggtgtgttttgagacagagtctcactcttgcccaggccggaatgcagtggtgtgatttcagctcactgcaatctccacctcccaggttcaagtgattctcctgcctcagcacaagtagctgggactacaggcgtgcatcaccatgcctggctaa

SEQ ID NO: 4293 - DNA, 1290 bp, Homo sapiens
tgtgacaaagatctaatgtccaacactgataaggaacttaaacaaatttacaagaaaaaaaaaaatctcattagaaagtgggcacaggacataaacagacacttcaaaagaagacacacatgcggccaacaagcatatgagaaaaagctcaatatcactgatcattagagaaatgcaaatcaaaaccacaatggcataccatctcacaccagtcagtatggttattattaagaagtcaacgccgggcatggtggctcacgcctataatcccagcacttcaggaggccaaggcaggcagatcgcatgaggtcaggagttccagaccagcctggacaacctggcgaaaccccgtctctactaaaaatacaaaaattagcccagcgtggtggcgggtgcctgtaatcccagctactcaggatgctgaggcaggagaatcgcctgaacccgggaggcagaggttgtagtgagccgagatcataccactgcactctccagcttaggtgacagagcgagactctgtctcaaaaaaaaaaaaaaatatttgaattttgtttaaatcgctaacacatactgggcatttaataacaaaaaaaaaggacatgagattgtgatccttatgaaggtttgagaggcatttcactagggttcaacatacagcagtctgaaacatactgtaataatttaatccaatggctcatctacagcacctaaaaagattacagcagattctcattattcagtgtagttacggtctasaaagttccatgaacaaataaaaagttaggtttcagcaagctactggtcacacttttgtaagcttaccaacacctacttttgttgtatgtgtgcttatttaatatatattgttggccaggcacagtggctaacgcctgtaatcccagcactttgcgaagccaaggcgggcagatcatttgaggtctggagttcgagaccagcctggccaacgtggtgaaaccccgtctctactaaaactacaaaaaaaaaaaaaaaaaaaaaaattagccaggcatggtggcgcatgcctgtagtcttagctacttgggaggctaaggcaggggaatcgcttgaacccaggaggcagaggttgcagtgagccaagactgcaccactgcactccagcctgagcaacagagtgagactctatctcaaaaaaaataataataataattaattaaatgaagaataaataaataatatacattgttcattcattaacattgaactcacagccaacggcactacagcactcacgcctgaatggagtttatt

SEQ ID NO: 4294 - DNA, 608 bp, Homo sapiens
atagtgttgaaaatgtccttcagtatatcacatagtatttgcatttgggccagatgccatggcttacgcctgtaatcccagcattttgggaggccgaggtgggcagatcacgaggtcaagagatcaagaccttcctggccaacttggtgaaaccccgtcactactaaaaayacaaaaattagctgggcgtggtggcatgcctgtaatcccagctactcgggaggttgagacaggagaatcacttgaacccaggaagcagaggttgcagtgagcccagaatgtgccactgcactccagcctgggcaacagagtaagactctgtctcaaaaaaaaaaaaaaaaaaaagagagagagtatttgcctttggatgatccttgagggttttgtttgtttgtttggccttacgttaggaataggtatgcttttcctgagcatttggtctgtttttatctggtggaactgaaaccaccccagttgtcccatggaacagatgtttatggtttctttgaataaacataaaaattaatctcccttaaaacttgagaaagttaacatttgtcttatctgagttcctttctcgggaaaccaaccatgaggactgccagata

SEQ ID NO: 4295 - DNA, 666 bp, Homo sapiens
tgtgctttattttgttttcgcagagaagtgagcaatagggtgggtgaggtttgggggaaggaaacctaggatagaggtataatttttttgaagtttatatcagagcatgagttgatcagggaaattgaagaatgagaaggcaagtgtagatgtacagaacagagtggcttcctcagttccttggagttctttatacttctggaagtttctaaggggaatgttccattgtaccatctgccaccttttgtcttttggtatgctgtctctctctctcaccttcagaaatggtgggaaaacggctaggacagcaggatagaacrtaggaaatggagtcctttaacttcacctacattttgttcctaacatcttgattttagtatattgtctttgtagcaataaaatcggaactattgcctctgcaccaaatttgactaaggctaaaaatagattagcgaggttgagcatggaagaagtggcaagcttctccttcctccttttcattttgtttcagtttgaatagaaggaggtagctcacacaattaaccagaacagcaactggctggatgtctgggtgctttgagccaattaggatatttttgtggaaagtttccaattcttaattctcagttatgtagaggtgggaggcagctggtgtgaatgtctgtc

SEQ ID NO: 4296 - DNA, 630 bp, Homo sapiens
ttacctctttgtttcataccaccgccatcctccagaccatgagctcattgaggataggactatgtctaattccttgttgagaggcaaaaaaaaaaggacacagagatgaacttggtacacttcaaggtctagccttaggttccaatgcatcaggtgacatcccccgccataggagcaagtcttctgggccatttacccctagcagaaatgggtcaggtcttccccagaaagctgattcatcacacagcaccagtcctgcccttcttgtttccttaggaacccacttaggatcatgaaagagcttctctttgggttcagaaagacagactggaggcaaaaacatggttctcctgttttcaggttcttgatctgtttctccaaaactaagagagaaaacaagctaacaaatgcaagatcaaaaactagatctttgttcatttattttggtccaaaagataagactgtagacttaaatgtcatcagacctcatgactttcctggcagcatttctgtgtgaagcttttaaccagtcagtttaatccaaattagtaggagcttcagaaaaggcttttggcyggtccacaggtggaaagacattgtcatgagctctgccaaatgcataaggatata

SEQ ID NO: 4297 - DNA, 619 bp, Homo sapiens
gcattcatcagcttcatgttactggactctttcattcaatccaaaataaaaaattacataaactgtcatcaactgccactgtgaccttccagtattcctcttttaaataatctaaactatatgatgtagctataaaaaaaaagacaactgatttatacattaaactttagtctgaattaatagccatataataccttgaattaaacgtacccatacttcaaaacttctcaaaccactaggaatataaggtagcatgtsaagtaaataaaccacaaaataaatagggcacatgatggcccacttaatgtaatagtaatttaaaataattttttatttttaatcatgtatctattatagagtagactataaaagttgcatgaattttttgaaaagatttcaaggaaatcttgaaaaggctaccctgggtgctcttttcatctgttcaagtagattctatggagaaggttgagagagaattgcttcaggtgaccgtcattgaaaacgtaactattatacctcagtctgttgtggacaactctggagatcagccttttatcctatacatttcatataagaaaaatgttttatagaagtaaccactgtgactacaaccacatat

SEQ ID NO: 4298 - DNA, 1178 bp, Homo sapiens
attgtgcattaacaggatcattttagaaatgttttggggtttcttattgcagcctgttttgttttacttgtcttcactcttccccttccccaatgccacctcctcccctcaagcaactcgtgttaacaacttagcatatgccattctgtattttccccattcttatctagcacataaaacacacccttagaggctagactttagattgyctgctttaagaaaaatgggattatattttatacattactctgcttatcagtttctcttccaaaaataccccatgaaactgtttccaaggtaactgttttagctctaaatctttctttgtaatggctgcatgatgtttcatgtatggatacaccatgatttattcattcatctcaatattgctggcattatgaataaagcataataaattaatatttttatgtatacacatatatatgtatatatatatacacacacacatatatatgtgtatatatatatacacacacacatatatatgtgtatatatatatatacacacacatataccctgatgtatttatttctatagtatattctcctaagacaagatagccaggttgaaagtacatttctcatgttaaaaaatgtttccattgcatttcaaaaaaaaggatttaaattttacatttccactaattgtgtatgataagggctttctcccccatactgctatcagctataggtgttatcatttgattaaacttttgccaatctgataggagcaaagtgggaacccatttttcctcttctgtctgcttaattgatattttttaaaaatagacacattccatttggtgaggagctgcaagttccacagcatgcttttgatccttacttcacttcagtggacctctccataactcacttcataaagggagcagtattttccctttaaagcataatgagagtgggccctcttaaaattcctgtttagagaaatctagaaatctagattatctcttctgcgtgagctgaaagtcggacagtgcatcttatattattcatatgtaacctgcctcactccccagttctctctagagcctccattttcagaacctttctttctgccttcttctgctccacccattcccctgtttattttaaacctccagtatttcctttaaaaaatgattttaaactaagcttgg

SEQ ID NO: 4299 - DNA, 1178 bp, Homo sapiens
attgtgcattaacaggatcattttagaaatgttttggggtttcttattgcagcctgttttgttttacttgtcttcactcttccccttccccaatgccacctcctcccctcaagcaactcgtgttaacaacttagcatatgccattctgtattttccccattcttatctagcacataaaacacacccttagaggctagactttagattgtctgctttaagaaaaatgggattatattttatacattactctgcttatcagtttctcttccaaaaataccccatgaaactgtttccaaggtaactgttttagctctaaatctttctttgtaatggctgcatgatgtttcatgtatggatacaccatgatttattcattcatctcaatattgctggcattatgaataaagcataataaattaatatttttatgtatacacatatatatgtatatatatatacacacacacatatatatgtgtatatatatatacacacacacatatatatgtgtatatatatatatacacacacatataccctgatgtatttatttctatagtayattctcctaagacaagatagccaggttgaaagtacatttctcatgttaaaaaatgtttccattgcatttcaaaaaaaaggatttaaattttacatttccactaattgtgtatgataagggctttctcccccatactgctatcagctataggtgttatcatttgattaaacttttgccaatctgataggagcaaagtgggaacccatttttcctcttctgtctgcttaattgatattttttaaaaatagacacattccatttggtgaggagctgcaagttccacagcatgcttttgatccttacttcacttcagtggacctctccataactcacttcataaagggagcagtattttccctttaaagcataatgagagtgggccctcttaaaattcctgtttagagaaatctagaaatctagattatctcttctgcgtgagctgaaagtcggacagtgcatcttatattattcatatgtaacctgcctcactccccagttctctctagagcctccattttcagaacctttctttctgccttcttctgctccacccattcccctgtttattttaaacctccagtatttcctttaaaaaatgattttaaactaagcttgg

SEQ ID NO: 4300 - DNA, 2176 bp, Homo sapiens
ctccttgttcacacaataaggccttaacaaactctttgtgaatgtagtttctctgacctctctactctcatagaaaaccacaggatactcaggagtcttgggctcttttcttcctaatgagctctgtttgccatggtttaggagaggaagaactctgagtataggggatgatagattttgctagtgttcacttagacctcttctctcaaaaacatgggtgagagaatcacaaatttttgacactaggatacttgacagtttggcccagtggtcttttaccaagatggctccacatctcctacatcccaatgatgatcataaacacttgctgatttaatagacaataatgttagtagcctgaaatcacactagtagtttgaaacccatgatgagggtacagatacaccatggaaatctaaatgctgtgaaacagtccccgcttcccactgctgggctggttgttaatcatttactggcatacctgtatcaaacccttcccttatcatgcgggtggggagtggtgagaaacaggcttcttatcactagattctatgtggccattaaatgatggaaaataaaagaaagggagagctgtaatgcataatgctcttcatttttgtttagtaatttatattactttggaacaagatgaaataaaagatttaagatgagatttttctctttgcataataaaatgtgaaaaaatatttgattacaaaagctatctttatagtagccacattttatttggtgacttgccttcagacttaagaatcttttctaacaattttatcccatttacaaaaaaatgctcaataaatatttcgaaagattaggtcaaaagcccttaaactaatctgtagggttgacaattaagatatcattttttttctataactgatcattgaattttgtagtgatgagggaagggtagaatgcatagtgagtgacacacaagtacaaaaaagagttggttataatccaagacttacatcttaaagtaggaataatttttaggttttgccattcaaatcagcagatagccacrgttattacattacaaaagatttctgagctccaagtgtttgcctgtactttgacttactaagcattcaaaaatattttcctaacagcatcatacttttattttcatgttgtatatattttaacctttaagttatcgtggaaattccttaacagggtcttcttcccagtaaacatgcaaactgaaacattagcacccatttattcagcatcttagaagaaatatgcttaatatagtagattttcctaaataacttaaaccttaacccttcaaattctaagaccttttagaaaccatttatctgaaatcctttttaaatattttaaacatatttcttatttcttaaactaagaatttaaactctccttgctgtgatagggcaatcgtttttctgcaatgtagaaacaactactttcaccagcttttaaattttatttagttatatccttaaatgccaaactgcaaaatgacctttgtcactggtgtggtcattgtattggctcagaagccctgctcccccctccccttttagtttcctgagtagtgtttatttattattggcactgaaatccattcataaaacttgtttagagttacatactagattcgattttattaagactctaagtgagggtgtgagaaggaaaatccttcgcttttcagaagactttgttgtggtcatatcaggcacttggaatatggagataatgaaatctactccaagggatggttgtgagaggcaacaaggaaaggcatatgaaatgaatctataggatgctactgagaggtccctttatgcacacaactgctacaggccccaccactgttgttcaaagttccccaccgctccatccccttaggcagtgtggggagagccagtttcccctccttacaagaggagctgccagagcaattccagtagacccttgggtatatttatctacctaactggtttttagttaggttgatgaaagggaatgagaagagataaaacttttgcatctgagtttctctgtttttaaatatggagtattactttgagcctaaaaatgctcatcactttcgacttagtaatctcccttctagaacttaaccctaaagaaataatcagacataaggagaaagatttat

SEQ ID NO: 4301 - DNA, 2176 bp, Homo sapiens
ctccttgttcacacaataaggccttaacaaactctttgtgaatgtagtttctctgacctctctactctcatagaaaaccacaggatactcaggagtcttgggctcttttcttcctaatgagctctgtttgccatggtttaggagaggaagaactctgagtataggggatgatagattttgctagtgttcacttagacctcttctctcaaaaacatgggtgagagaatcacaaatttttgacactaggatacttgacagtttggcccagtggtcttttaccaagatggctccacatctcctacatcccaatgatgatcataaacacttgctgatttaatagacaataatgttagtagcctgaaatcacactagtagtttgaaacccatgatgagggtacagatacaccatggaaatctaaatgctgtgaaacagtccccgcttcccactgctgggctggttgttaatcatttactggcatacctgtatcaaacccttcccttatcatgcgggtggggagtggtgagaaacaggcttcttatcactagattctatgtggccattaaatgatggaaaataaaagaaagggagagctgtaatgcataatgctcttcatttttgtttagtaatttatattactttggaacaagatgaaataaaagatttaagatgagatttttctctttgcataataaaatgtgaaaaaatatttgattacaaaagctatctttatagtagccacattttatttggtgacttgccttcagacttaagaatcttttctaacaattttatcccatttacaaaaaaatgctcaataaatatttcgaaagattaggtcaaaagcccttaaactaatctgtagggttgacaattaagatatcattttttttctataactgatcattgaattttgtagtgatgagggaagggtagaatgcatagtgagtgacacacaagtacaaaaaagagttggttataatccaagacttacatcttaaagtaggaataatttttaggttttgccattcaaatcagcagatagccacagttattacattacaaaagatttctgagctccaagtgtttgcctgtactttgacttactaagcattcaaaaatattttcctaacagcatcatacttttattttcatgttgtatatattttaacctttaagttatcgtggaaattccttaacagggtcttcttcccagtaaacatgcaaactgaaacattagcrcccatttattcagcatcttagaagaaatatgcttaatatagtagattttcctaaataacttaaaccttaacccttcaaattctaagaccttttagaaaccatttatctgaaatcctttttaaatattttaaacatatttcttatttcttaaactaagaatttaaactctccttgctgtgatagggcaatcgtttttctgcaatgtagaaacaactactttcaccagcttttaaattttatttagttatatccttaaatgccaaactgcaaaatgacctttgtcactggtgtggtcattgtattggctcagaagccctgctcccccctccccttttagtttcctgagtagtgtttatttattattggcactgaaatccattcataaaacttgtttagagttacatactagattcgattttattaagactctaagtgagggtgtgagaaggaaaatccttcgcttttcagaagactttgttgtggtcatatcaggcacttggaatatggagataatgaaatctactccaagggatggttgtgagaggcaacaaggaaaggcatatgaaatgaatctataggatgctactgagaggtccctttatgcacacaactgctacaggccccaccactgttgttcaaagttccccaccgctccatccccttaggcagtgtggggagagccagtttcccctccttacaagaggagctgccagagcaattccagtagacccttgggtatatttatctacctaactggtttttagttaggttgatgaaagggaatgagaagagataaaacttttgcatctgagtttctctgtttttaaatatggagtattactttgagcctaaaaatgctcatcactttcgacttagtaatctcccttctagaacttaaccctaaagaaataatcagacataaggagaaagatttat

SEQ ID NO: 4302 - DNA, 1561 bp, Homo sapiens
gcacatgcacacatacagctgtgcacaygcatatacacatgaacacacaaatacatgcaacacgaaacacacatcatgaggtttccactttagaatactcagtctagtggttcgcaggggaacatggggaagtttcttctctccggatcacggcttcctcatctgaaaaatgggggtcctgatcttcccgtaatgaatgggaaaattctttgtaaactgcaaagctaaaagcatgtaagccatgttttcaaaccccatgtccttgtcaaaagattaaaatatgaaagttaccaacatagctcgcaacaccctatgtcagcacagggcagtggtggtaaaatgtatgtgcgtatctgcgtgtagcaaatggagaaactgggtcccaaaaaaggataagaagaatgtctaggggcacccaataagtttgtgtctgatctggcatttaaatccgggtctttttgactggaggcctcattgggtacctgcgtgatatctacagtgtttttaagcaagagccaaggttaaacaaatttttctcaggccatttgtctccagtgaccacgtgacctacccactccaaggacagagctagtgaacacttccagcaggtctcacaggacaacaatctaaaatccattagccacaggcaccctttgtccacttcaaaaaaaaagagatgtgcattattcatagcttgacaagtggtacgatgcccttggcctgttccttcttcctgcaccccttcttgccttttctgttgctacttgcaagagagcttctccgcagagtacactgacatcagaacaagggaggcagctcagcagaggcttggatactggcccgaaggtctgggttccatttctggccccaacacttctaagctattaaataggcagaaactaattgcccttgggtaacctatgaaaaacgcctagcccagtgccagggaagagggtgtgctcaatatgtgctgagaaatgaaaagtgttgggggcaggtgtggagccatggccctctgcggtgggacagctgtgcaaaggaggcaatgaatattagcttcatccaacttccaagaaacagatgctgcaggaaacagagccaaagaggtgaccctgtgatccacaggtcccaatgcttggatggtgacagaatggacagaacaggggtcatgggtttggaaaggtcagtggagccggaaagacctgggctggagtcccagctctgtgacctcaccaaacccacatagcctctctgagcatcagtttcctcttccaggaaattgcgataattgcattgacttctgaactgttacgagagctgcaggctccatggaaaggcagagcgcacagtagatgctcaataaacagcagttgctgcagttgtcgctgttgatgggacatttctcccaactgaggcagaaaacctacccagccagatcccaggaaaactccagactgcctgcagggaagaaaagcttccagcgcctcccctccaaccggcccttgaggcttcgcttacctttctgaaaattaaattaaaattcaacagtagcgccattgtg

SEQ ID NO: 4303 - DNA, 1561 bp, Homo sapiens
gcacatgcacacatacagctgtgcacatgcatatacacatgaacacacaaatacatgcaacacgaaacacacatcatgaggtttccactttagaatactcagtctagtggttcgcaggggaacatggggaagtttcttctctccggatcacggcttcctcatctgaaaaatgggggtcctgatcttcccgtaatgaatgggaaaattctttgtaaactgcaaagctaaaagcatgtaagccatgttttcaaaccccaygtccttgtcaaaagattaaaatatgaaagttaccaacatagctcgcaacaccctatgtcagcacagggcagtggtggtaaaatgtatgtgcgtatctgcgtgtagcaaatggagaaactgggtcccaaaaaaggataagaagaatgtctaggggcacccaataagtttgtgtctgatctggcatttaaatccgggtctttttgactggaggcctcattgggtacctgcgtgatatctacagtgtttttaagcaagagccaaggttaaacaaatttttctcaggccatttgtctccagtgaccacgtgacctacccactccaaggacagagctagtgaacacttccagcaggtctcacaggacaacaatctaaaatccattagccacaggcaccctttgtccacttcaaaaaaaaagagatgtgcattattcatagcttgacaagtggtacgatgcccttggcctgttccttcttcctgcaccccttcttgccttttctgttgctacttgcaagagagcttctccgcagagtacactgacatcagaacaagggaggcagctcagcagaggcttggatactggcccgaaggtctgggttccatttctggccccaacacttctaagctattaaataggcagaaactaattgcccttgggtaacctatgaaaaacgcctagcccagtgccagggaagagggtgtgctcaatatgtgctgagaaatgaaaagtgttgggggcaggtgtggagccatggccctctgcggtgggacagctgtgcaaaggaggcaatgaatattagcttcatccaacttccaagaaacagatgctgcaggaaacagagccaaagaggtgaccctgtgatccacaggtcccaatgcttggatggtgacagaatggacagaacaggggtcatgggtttggaaaggtcagtggagccggaaagacctgggctggagtcccagctctgtgacctcaccaaacccacatagcctctctgagcatcagtttcctcttccaggaaattgcgataattgcattgacttctgaactgttacgagagctgcaggctccatggaaaggcagagcgcacagtagatgctcaataaacagcagttgctgcagttgtcgctgttgatgggacatttctcccaactgaggcagaaaacctacccagccagatcccaggaaaactccagactgcctgcagggaagaaaagcttccagcgcctcccctccaaccggcccttgaggcttcgcttacctttctgaaaattaaattaaaattcaacagtagcgccattgtg

SEQ ID NO: 4304 - DNA, 589 bp, Homo sapiens
atttagaccccattcaattctctctctccttgcctaccatcacatccatccatgcccttcagattaattttcgcaatatcatggaaattgattgctaagtgaaattgcaaattgtgctcaagatgttgcattttgtgaaactgatagaaaagaccattggcagcctgctgattcacacccattggcagaatcagactaggtgacaaatgaacaagagaaaagtgacaaagatgataactctaggagagtgacttgaatatcagaggcttaagagaagtctttggaaagattgataaagctctataatattttttkgggggtgggagtccttcttgatgacctagcaattaaagtaaatgcgaggtaaatagtccattggtctaccctacaattttatgtaaaaatgtatgtcctcatcaatacttgactacgttttgttgatttttaacaattagctcatagtttgccattataacctccaaaatggaggtttatttttattttatcgttgtgggcatattagcttattttcacaacttttggttttgtcgtttttccagataaattctcaaagtccttaatactattc

SEQ ID NO: 4305 - DNA, 649 bp, Homo sapiens
taaaggtgctttaaaaagtcactagatggtacaatttatatcttaagattcagcttcttcagagtttttactcctatcagtaartgaatcctctttctggctatgtgcaggaaatagccagttgcatttttttcatagcctctggctcagataccagatatttatataaactggaatggaagaaaaacattgtatttttcattcacagaatcaaatcttaccaattctcagtaactgagaagaaaagcccatttgatctaatgaaaaatctgaactatatgaagaagcatatgctcatcatatataattattctaataaaaccttttaaagatatttaaataaaaccatttatttaaaagtgaagaggtcattttaaatagctactatttattaattgcctattatgtgcaaggcacagccttaattaagcacacacacaaacatacatacgtcactaatagtaacaaaaaccctaataatgatgccaattaattatatataaatatgacaattttctcttttcattacgtacttaagctctacttgtatgattttaaatattataccaaaatttagaatcttgttccaaatgatgtattgtttcaagatttatctggggttcatagttatcaaagtatagtaaaattt

SEQ ID NO: 4306 - DNA, 615 bp, Homo sapiens
gattgaacacctgctacatatgccagaagctgtgcaaagcacatcacatgtgctagttaacctttttaataccctaggacactgtgattatctccactttacagatgagaaatctgaggcttaaataggttaagtacttcagaaggttaccagaaagaagcgaagccaagatgtgaacccatgtcctctaagggcacaagccctaggctcagcccatctgccatatgtgccacctgtgcatcaaatgaaatgatgcttgccaaggactcacgtcaagtaaccagagctgtcattgcatggccacaatgtggacagagaaaatgcatttgcacctagcccagcgcctggcactttgggagccccaataactgtgtgtattaatggttccagttgtctcaggcatggcaaggctacctgtagcagccaagacctcttcgcctctttgttcagcccagtgagrgctcctggggaagcaagcaggtcccatctccccaaaactctacagttgactagggaagtgaagaaagacacagctgcagcagttacataactgcttcctcctccacaaaccaatgagagcagataggagccccttgaaccccttccagccctaat

SEQ ID NO: 4307 - DNA, 1198 bp, Homo sapiens
tttattttaaagtgcatgagtgttctaatacccctaaattaaggtacatattgaccagatgattttatcccccttctacagatagtgaaacaggtttaaagaagaaaaataagttaggaaaggtggtttaagttccttgagttcagagctgactaattcatagaaaataataataattataatgattaaaatttattgttctcttaatatatgcaagagtgttccaataacattaactcatttaatcccttcaacaaccctacgaggtaggtagcattataaccatccttttcttacagataaggaaatggaagtacaaactagttaggtaatttgcccaaggtctcaaacatatatgtgcagcaatatatcatattaaatatatgttacataataggcccacattcatgttcgttatctcactgacaagcaattctaacatactgagcttttctcaatcaggttttccattatgagcaacactgcatctggaagaatgatttctggttcctcttggtcatcattccctgtcttccctctacctctccagcccttgctctctctgccttctctcttcccttttcttctttttccccccactccctgctgttcagtagtaaaatctctgacagagccacttttttgccaggctatcatatacaaggtcagtgttcccacattccaaaggtaggtaaaaatgtgtgtggagagcagggaattctgccagaacaatgactcactgtgttacatgcaaaacggttcaataataggtcactgccttagcaagagcaacactgcctgtccctacggaaaataagggggcttccacatggcactcctgatgctttaatagaagctttgtatgacaaacgggaaagctatacccatcttaaaccatatactggctttttgtttcatgggcatatgaggtgagtttcaaaaagggaagtgtataaaatgcagttcttgacatgtaatgtcacaygtattcatagtaagcatgcacacaaagtcacctctaggttactcagctaattacataggtggtggaatatctggttcctttgcttctccaagtggcttgtttactagtttgttttttggctcatgttcctgttcattagaacttccattagcagaaatataggattatggtggaactggatgggctgcttcttgtcttgttttcttccaggct

SEQ ID NO: 4308 - DNA, 1173 bp, Homo sapiens
gcaaatagatgattccagtcctggaattttaaaaccaatgttttaaaacaatgttttaggtcttaattttctacacactgggcatacagattcattaaagaaataagctaaaagaagattggagaggacactcctctcttcatattctttcccaattcgtttgttctctgcctggctataaactgtgatccccgtaaatctcagatttgcagtgacttcatcaattattcagcctsaattgttcagtaaatacacatgtacgtataccctgtgttaggctcagaaaatgtggcaccagatcccaaaatgcaactgtgctgtttttcattgctctgctgtttttcccagggcctgctgcttcttccttcttagcaccttggctccatctcttactcttcactctgcaagccaagccctgattatagctcaactgggatgttgcaactgccttctcttggggcctccctgacttcagtgatccaccccttccaaacatcctgcatcctgctaccagacttttcactgaagtatagacaattaattgcttatagtatcaaaatccaaactcctttgcctgacttgtgaagccttcatgatcacaccccaccctctctattcaattttctttcccacgaagtcaatacacagtcactgagtcactgtgagcttaactgaagaggcagcaacccacatgcctctgcaactgctatttttctcaccttggatgacctcccaatcactcaggtatccagctctctaaattttacccattgctcaaaagcctagctcaagtctcagttctattattaaactttccctactgttgcagcagccagctttcacttctttctcttacctcctattaaaagttaataattatttacatgacagtaatgaagagctaacttctactgagcacttcctatataccatatcctgttgggataaatagttttattattcctgttttgcagatgaagaaacacaggcacagaaaagaagacaattctggttaacacctgattgtttgctaatcattttgtgtgacctctctaactagctttccacttccttgagagcagagactaagctcatatttatcctgtgcctcctacacagctagcagagtgctgggtgcagtataagtgattagttagtatagttgggtggtca

SEQ ID NO: 4309 - DNA, 578 bp, Homo sapiens
acacacacacacacacatgccatggcatactattcagccataaaaagaataaaataatgtcttttgcagcaacatggatggaactagaagccattatcctaagtgaaatgactcagaaacagaaagtcaaatattgcatattctcactcacaagtgggaggtaaataataggtatacatgaccatacagagtgaaataatagacattggagactatgaaaggtgagagggtgggaatcgggcaaggggttaaaaattacctactttataaagtttataacctttaatccttacaacatgcaagataggtattcctatcttatagatgaggaaaccaagactcagttgttattcgatctaaagtcacatagctcataaatgtgaaacctggatttgaacctaggttcagctgcctctcaggtctttgcttttaatcccttcttggycttgcttcagaagcagacaatttataatctgctaaatctgatatttcttgggtaaacagttaaattgtaaacacttaaattgggtaaacacttaaattgtagcctcatcacaatttcaggttgtgagattgca

SEQ ID NO: 4310 - DNA, 1332 bp, Homo sapiens
taaaaaggaagagttgctgaggaagacaaacttgactgagcctcagtcttgtaaagcaattaagtaaatgtcaccacagagcggattttagcacttaaggtttgactctgatgattaaggctctcacctactcacaatgtgaaattctacaaagtaaactggggctatgaaatgttttgacacttgttaagaagaaataccttctaattattcagtgattgatatgaaaaatgaatacagtgcattcaaatatgtaatttatagtacattaaaatmcagaaatctgagagaacaaaagtgtctgattttaccattgatgtctgtgggtagaaaggaagcagtaatcaagatggcacattctgactattctgtgattccagtctaagccttcagttaagtcctaggaacagcagaggtgtaccttgtttaactaattcaccaaaatgtgttgatgcaaggccctttggcagttgcatgggaaacacaaaggccatcaatacttagccctagttttgaaggagattatgagtagctgaggtaggtacaaatgactacctcagaaggcaaaaggtgattataaagtgcctctgcatatctcttgttccaacttttgaacaaatcatccaaagaatttggaccttacataggaagtaagcagtacccaacatgtaattaacagcaacttcaacagtagtatttttttctttaacgtatcactactacttatcagataacttttttttttttttttttgagtcagaattttgctcttgttgcccaggctggagtgcaatggcacaatctctgctcaccgcaatctctgcctcccaagttcaagcgattctcctgcctcagcctcccgagtagctgggattacagacatatgccaccatgctcagctaattttgtgtttttagtagagacaaattttctccatgttggtcaggctggtctcaaactcccaaactcaggtgatctgctcgactcagcctcccaaagtgccgggattacaggcgtaagctaccaagcctgacctatggggtgcctttttaaccaggagcagactacatcagtatgtaattaaagctacaaccttataagtgcttccaattaattgtctccaaaagcaatttctacatagcccaattgtgaaaatcaaaggtacctggctgaaatatttcctgggacacagtaggcaaatttgttttaaatttggtacagacaaactgagttgtatatttacaatgtgaactaactgctatcacttgaaacttaaatttatcacattatttagacagacataattagtagaactcttctttggaggttgaa

SEQ ID NO: 4311 - DNA, 1332 bp, Homo sapiens
taaaaaggaagagttgctgaggaagacaaacttgactgagcctcagtcttgtaaagcaattaagtaaatgtcaccacagagcggattttagcacttaaggtttgactctgatgattaaggctctcacctactcacaatgtgaaattctacaaagtaaactggggctatgaaatgttttgacacttgttaagaagaaataccttctaattattcagtgattgatatgaaaaatgaatacagtgcattcaaatatgtaatttatagtacattaaaatacagaaatctgagagaacaaaagtgtctgattttaccattgatgtctgtgggtagaaaggaagcagtaatcaagatggcacattctgactattctgtgattccagtctaagccttcagttaagtcctaggaacagcagaggtgtaccttgtttaactaattcaccaaaatgtgttgatgcaaggccctttggcagttgcatgggaaacacaaaggccatcaatacttagccctagttttgaaggagattatgagtagctgaggtaggtacaaatgactacctcagaaggcaaaaggtgattataaagtgcctctgcatatctcttgttccaacttttgaacaaatcatccaaagaatttggaccttacataggaagtaagcagtacccaacatgtaattaacagcaacttcaacagtagtatttttttctttaacgtatcactactacttatcagataacttttttttttttttttttgagtcagaattttgctcttgttgcccaggctggagtgcaatggcacaatctctgctcaccgcaatctctgcctcccaagttcaagcgattctcctgcctcagcctcccgagtagctgggattacagacatatgccaccatgctcagctaattttgtgtttttagtagagacaaattttctccatgttggtcaggctggtctcaaactcccaamctcaggtgatctgctcgactcagcctcccaaagtgccgggattacaggcgtaagctaccaagcctgacctatggggtgcctttttaaccaggagcagactacatcagtatgtaattaaagctacaaccttataagtgcttccaattaattgtctccaaaagcaatttctacatagcccaattgtgaaaatcaaaggtacctggctgaaatatttcctgggacacagtaggcaaatttgttttaaatttggtacagacaaactgagttgtatatttacaatgtgaactaactgctatcacttgaaacttaaatttatcacattatttagacagacataattagtagaactcttctttggaggttgaa

SEQ ID NO: 4312 - DNA, 1095 bp, Homo sapiens
tcatgaagtattattaccaaaagagaaaatgtccattgaacttgtcatttaattattataactattatattaaccctagctctkttgtttcttgtttattttaattttattgttatttctttattattattattattattatactttaagttctggggtacatgtgcaggacatgcaggtttgttacataggtatacacatgccatggtggtttgctgcacccatcaacccatcacctacattaggtatttctcctaatgctatccctcccctagtccaccatcccaactggccccggtgtgtgatattcccctccctatgtccatatgttctcattattcaactcccacttgtgagtgagaacatatgatgtttggttttctgttcttgtgttcttaatcaatcttttcccttccaagatacctaacttctttttgtttcaatttttccctctataaaatggtgacataatagagctccccaatgtcttacattcctttgttgtgagcattgatggcttgtaaaccaatgtgttctacaactacaagtatttgtgtttcccagttactacagcaaacccccacaatttgaaatgggttatcctaatacatcactttgccctgaataattttcatgatcaaagctgttattcatattatcagaatttctttcttctttatttcagttcatggccactggcctctatgataccatcttatctgaatcagtcaccatctttctttttttggaaagtggtacaaaaactgctgccaaggttacaagtaaataactgtagttaagaccaaaaaatattagtgattaaaaaatctgtctctgtctctcttctgtgtggggaatatctgtttttcatttagtgacttttatctagtaatagccactggggagtaggctagaaagcagtgggactacttagagagacttggggcagggctgtaggtgaatgaaatggctttaccaagcagccctacaagcttcactctgggttataggcctcttggcgggggcggggagcgaaagaaagaagagccagacactgcctcaggtggaccctgagcagagacgaaaggaagaaag

SEQ ID NO: 4313 - DNA, 1095 bp, Homo sapiens
tcatgaagtattattaccaaaagagaaaatgtccattgaacttgtcatttaattattataactattatattaaccctagctctgttgtttcttgtttattttaattttattgttatttctttattattattattattattatactttaagttctggggtacatgtgcaggacatgcaggtttgttacataggtatacacatgccatggtggtttgctgcacccatcaacccatcacctacattaggtatttctcctaatgctatccctcccctagtccaccatcccaactggccccgktgtgtgatattcccctccctatgtccatatgttctcattattcaactcccacttgtgagtgagaacatatgatgtttggttttctgttcttgtgttcttaatcaatcttttcccttccaagatacctaacttctttttgtttcaatttttccctctataaaatggtgacataatagagctccccaatgtcttacattcctttgttgtgagcattgatggcttgtaaaccaatgtgttctacaactacaagtatttgtgtttcccagttactacagcaaacccccacaatttgaaatgggttatcctaatacatcactttgccctgaataattttcatgatcaaagctgttattcatattatcagaatttctttcttctttatttcagttcatggccactggcctctatgataccatcttatctgaatcagtcaccatctttctttttttggaaagtggtacaaaaactgctgccaaggttacaagtaaataactgtagttaagaccaaaaaatattagtgattaaaaaatctgtctctgtctctcttctgtgtggggaatatctgtttttcatttagtgacttttatctagtaatagccactggggagtaggctagaaagcagtgggactacttagagagacttggggcagggctgtaggtgaatgaaatggctttaccaagcagccctacaagcttcactctgggttataggcctcttggcgggggcggggagcgaaagaaagaagagccagacactgcctcaggtggaccctgagcagagacgaaaggaagaaag

SEQ ID NO: 4314 - DNA, 1184 bp, Homo sapiens
gcatcacaaatattatccttccatgttaataattatagatccatattgtcacttttaatggctgtttaatagtctaaggtaaaaatgtgctgtggtttatttagtcaactgcctgtagttagatgtttcagctgtcactaggttattgatataaacaggtatctttatataaatatcaccaaatgctgctcagatcattcccttaaggggaattctttaaaatggaagtgctgggtcaaatcctgtcatcttctttaagggcatgttgtcaaaatttccctacacagtctcaatcaggataccaagcatccagcagcaaatgaaaacacccattttcctccttcaccctcaacactgggcactatgagtctttttaatctcttccagtctgatgattgtgtatggcatagctcatttgctgttttaacttgttcactgttttctcttctccctctggcaccttctgtaatctcttggagcctcttttcgccagtatcctcttcatttaatagtaaacattaattgagcacttcctgtgtgcagacacttgccaaacattagtgctccaactataggagctgtactgtataaaatgttctgggcgctgagagggaggcctggggaagctagagagagctttgcagagaaggcaatatttatgctagatctgatggaatggtgagagctttgcagagaaggctagatctgatggaatggtgaagaaaggagtagaataggaaaaggccatttcatgcagaggaaagagcataagcagtgtcaccaaagcctgtgttccagtggtggacatgggggagtggctagatggagacaggctctgtgtagtgtactacagagtttagactttattctgtagctatggcagattgttacaggaagcgtttttggaggagaatggtgatcagatttgtgttcagatggttaattttggcagtaatatggaagaggaaataaagtagaaacagggagatgaagggagaaagaccaataaaaaggtcatttgcaattggctgtgtgaagaaactgagagccagaaagaagccatgggcagtgcggggttasagcagagaaatgtatgagataaaacctctggaaagggtgatcgagtcgaggggggacattcaaaaaggcttggattagagaaaaggtgtgagtatgggcaaaaa

SEQ ID NO: 4315 - DNA, 487 bp, Homo sapiens
catcccctagtcttcctgatgtgccccactcttggctcaactgggtctccagtcttacaggtgtccttgaaacaaccagaagctgatcaacagtcactgccaaggatatagcccaaaagtctagrgctgtgtgcctcccgaaccagcatttctttgttttgttttggagatcgtctcctctgtcgcccaggctggagtgcagtggcgcaatctcagctcactgcaaccttcgcctcctgggttcaagcgattctactgcctcaggctcccgagcagccagactataggcgtgcaccaccatgcccaaataatttttgtatttttagtagagatggggtttcgccatgttggccaggctggtctcgaactcctgacctcaagtgatctgcctgcctcagcctcccaaagtgctgggattacaggcataagctactgagcccggatttgaaccagcatttcaaaaggaggccctgggagttactgctgg

SEQ ID NO: 4316 - DNA, 1248 bp, Homo sapiens
tttgggcatatattgagatgatcatatggtttttttcctttcactatctgatgtattacaggatgcttagttcaacaaagatttcttaatgttgaaccaatcattcttcctgaaataaacactacttggtcatggtacataactcttttaatatactgcttggtatgacttactaatattttatttaagactttcataccagcaagtgcttggttagatttttgcattataaaatgaaattggatcttttttgatgctagtttaaatatctagtttaaacaacatacaaatggtatttttaataagatttcctagaacctactcataaaaccatctggggcagaattacctaggggcatagattatttacattttcagttttatcaatggattttagtataggttccttttgttttgttttagtttttagaggtatgtacttgctctgttactcaggctggggtacaggggcactatgatagctcactgtagcctsaaactcctgggctcaagggatcttcctggcccagcctcccaagcacctaggactgcaggtgcttgccattatgcccggctgattttttaaaacatgttttgtagagacagggtctctttgtgttacccaggctggtcttgaactcctggcttcaagagatcctgccacctcggcctcccaaattgctgggattacaggcatgagctactgcatctagcctatataggtttcttagaatcaattttaggagcttatatttttatgggataccattcattttaggtaaatgttcaggtatattaacatcaattttaacataaaattttcaaatagcttaattattcttaatatgtggagataaagaccctactcctgagccctggcattgtgttacttgtgatttatttcttaatttttgcttatgcttaacagtagtttttccttttcttcttcattttcgtctttttaaagaagaagcttagttttatttatcaagtctggttattttgacatcttagcttttatctttaataattcctttctcctaaaatatcgatggtctaccctcatacttattgatagctttgctaagagaattctagttcaaatttttttacaaagaaataaaaaagtcattgctctattataataagaaatgagataaaattgttcatatcaacaatgtgttacatacccagcgctgttgagtgtgtgagtaaaagccactttcagacaccactactgagaatgca

SEQ ID NO: 4317 - DNA, 1248 bp, Homo sapiens
tttgggcatatattgagatgatcatatggtttttttcctttcactatctgatgtattacaggatgcttagttcaacaaagatttcttaatgttgaaccaatcattcttcctgaaataaacactacttggtcatggtacataactcttttaatatactgcttggtatgacttactaatattttatttaagactttcataccagcaagtgcttggttagatttttgcattataaaatgaaattggatcttttttgatgctagtttaaatatctagtttaaacaacatacaaatggtatttttaataagatttcctagaacctactcataaaaccatctggggcagaattacctaggggcatagattatttacattttcagttttatcaatggattttagtataggttccttttgttttgttttagtttttagaggtatgtacttgctctgttactcaggctggggtacaggggcactatgatagctcactgtagcctcaaactcctgggctcaagggatcttcctggcccagcctcscaagcacctaggactgcaggtgcttgccattatgcccggctgattttttaaaacatgttttgtagagacagggtctctttgtgttacccaggctggtcttgaactcctggcttcaagagatcctgccacctcggcctcccaaattgctgggattacaggcatgagctactgcatctagcctatataggtttcttagaatcaattttaggagcttatatttttatgggataccattcattttaggtaaatgttcaggtatattaacatcaattttaacataaaattttcaaatagcttaattattcttaatatgtggagataaagaccctactcctgagccctggcattgtgttacttgtgatttatttcttaatttttgcttatgcttaacagtagtttttccttttcttcttcattttcgtctttttaaagaagaagcttagttttatttatcaagtctggttattttgacatcttagcttttatctttaataattcctttctcctaaaatatcgatggtctaccctcatacttattgatagctttgctaagagaattctagttcaaatttttttacaaagaaataaaaaagtcattgctctattataataagaaatgagataaaattgttcatatcaacaatgtgttacatacccagcgctgttgagtgtgtgagtaaaagccactttcagacaccactactgagaatgca

SEQ ID NO: 4318 - DNA, 1248 bp, Homo sapiens
tttgggcatatattgagatgatcatatggtttttttcctttcactatctgatgtattacaggatgcttagttcaacaaagatttcttaatgttgaaccaatcattcttcctgaaataaacactacttggtcatggtacataactcttttaatatactgcttggtatgacttactaatattttatttaagactttcataccagcaagtgcttggttagatttttgcattataaaatgaaattggatcttttttgatgctagtttaaatatctagtttaaacaacatacaaatggtatttttaataagatttcctagaacctactcataaaaccatctggggcagaattacctaggggcatagattatttacattttcagttttatcaatggattttagtataggttccttttgttttgttttagtttttagaggtatgtacttgctctgttactcaggctggggtacaggggcactatgatagctcactgtagcctcaaactcctgggctcaagggatcttcctggcccagcctcccaagcacctaggactgcaggtgcttgccattatgcccggctgattttttaaaacatgttttgtagagacagggtctctttgtgttacccaggctggtcttgaactcctggcttcaagagatcctgccacctcggcctcccaaattgctgggattacaggcatgagctactgcatctagcctatataggtttcttagaatcaattttaggagcttatatttttatgggataccattcattttaggtaaatgttcaggtatattaacatcaattttaacataaaattttcaaatagcttaattattcttaatatgtggagataaagaccctactcctgagccctggcattgtgttacttgtgatttatttcttaatttttgcttatgcttaacagtagtttttccttttcttcttcattttcgtctttttaaagaagaagcttagttttatttatcaagtctggttattttgacatcttagcttttatctttaataattcctttctcctaaaatatcgatggtctaccctcatacttattgatagctttgctaagagaattctagttcaaatttttttacaaagaaataaaaaagtcattgctctattataataagwaatgagataaaattgttcatatcaacaatgtgttacatacccagcgctgttgagtgtgtgagtaaaagccactttcagacaccactactgagaatgca

SEQ ID NO: 4319 - DNA, 892 bp, Homo sapiens
cttttaagaagctggtgaggcttcctatgctttctttctgcttctgctggctagaaacaaaggacactgaggccctcgggggatggtagagccacaggaagcaccccgggtccttaaatcaacatgcggaggaaagccaacggccagccatggatacttgcattggacttttaagtgaatgagaggtaaatttctattatgtgaagatattgcaaatactgggtttatttgttataatagctagtgttattctaactaataaagccatcgtataaaaggggtgtactagtttgaagtgcttcacaaacccaggttgcaaatgtcgtattcattgatgtattcatctgttcgctttcaaaaataaatatttattaagcacattctgtaggccctgctctaagtgctggagatacagtgaagtgcaagacagatgaaagccctgctcatataaggcatttacaaatataaggatgatgaaaataacctccttcccctcttcccacactggtgatatttcatctccatcaaatacttgcttctaaaccatgctctttcctgcctccatgctgttggagaagtgttctcttcctgtgaactccttctctttatagacccagctctcccgtgggcagcccctgaggagaggaactcctcaggccaaggcagcaactcccttctacctgtcttcctgccctgacaacagcatgagctgtgttgtagtctgtttgctttyttatgcactgatttccctctgcagtctgtgacctccttctcatccacctttgtattttagactattgcacaatgctgggcatacagcaggtgctcgctgaatatttgtagagttaatctgaatataaaaccaccagaaatgactatttggttttgtcag

SEQ ID NO: 4320 - DNA, 650 bp, Homo sapiens
caagtcctgtgtaaattaatcaagcctgactatagatccatctgctggcccccttatcccaaaacactgacagccctgtcttgccaccaggtaggctttttgttgttggtgttgttgttgttttgtggggtttttttgacatggagtctcgctctgtcacccaggctggagtgcagtgtgcagtcttggctcactgcaacctccgactcccaggttcaagtgagtctcctgcctcagccaactgagtagccgggattacaggcatgcgccaccatcccagctaatttttgtatttttagtagagatgggattttcaccatgttggccaggctggtcttgaactcctgacttcaggtgatccacctgcttcagcctcccagagtgctggaattacaggcatgagccaccgtgcctgaccaaggtaggtgtatttctgaataagctcctgcataaatctacctgggtaaaactcttgcattttatatttacactttgtacttttcaatgccattccatatrtatgtgtgtcattttataaatgatacatgatagatcatttttcacattttatacatgttacatcactaaccatgtggtgaaatcaaaaggattcccactttacagaagggaaaactgaggcatgaagaggt

SEQ ID NO: 4321 - DNA, 1268 bp, Homo sapiens
tgcatgtagctctatgtagtaatgtatgctagatgcagagtgtatggggtactctccttacaactttttgtctggcactgtcctttaatcttgcctatagggagcatcttctcctatacttggatgaacakttggggcagcctttggttttgtttttttaattcagaaaaaatttacatgacataaaattaaacattgacgattgcaagggtacaatgcagggacagttaggacattcccagtgatatacaaccaccagctctgtctagttccaagacatttacatcatcctggaaggaaaccatgtacccactagtggtccccttaccccgtcccccaggccctggcaaccatgagtctgctttctgtccctatgaattaacttcttccgatgtttcatatcaatgaacccatacactatgtggccttgtgtctggcctctttcacttaggacaatattattattaaggtccatccacattgtagcatggatcagtacttcattcctgttaattagccctttgattttggtttactctttggttttaaaaagtcctagagtaactttcctttttttgagacagagtctccctctgtcgcccaggctgaagtgcagtggcacaatctaggctcactgcaacctccacctcctgggttcaagcgattctcctgtctcagcctcccgagtacctgcgattacaggcactggccaccatgctggggtaatttttgtattttcagtagacagggtttcaccatgttgaccaggctggtcttgaaatcctgacctcaggctgatccacctcagcctcccaaagtgccgggaatacaggcgtgagccgctgcgcctcacctgaagctagctttgtttgcaaacatggtctccactcagaaaatcaaatctccagtccaatccacacttaagtcttgactcacagatgagccttctgcccctgctcttgccacagccacctgcaggaagatcaccccccttggggacagcagacagtgtccttctctccctcctttttcctccctggtttgctcacttctgtttctggtttctggcccatctgggatggagcatgaggagggaaagcagggagaaagaggaagaaaatttgcacttgattggtactgtagtaaagtggctctaagctctctgagtctgatggaatttgacaacctttccccaacgtcggcctcgtgttctttggcaactcccactgcggccctgcagttgcaaacatcttgaggtgggcaatgca

SEQ ID NO: 4322 - DNA, 1268 bp, Homo sapiens
tgcatgtagctctatgtagtaatgtatgctagatgcagagtgtatggggtactctccttacaactttttgtctggcactgtcctttaatcttgcctatagggagcatcttctcctatacttggatgaacagttggggcagcctttggttttgtttttttaattcagaaaaaatttacatgacataaaattaaacattgacgattgcaagggtacaatgcagggacagttaggacattcccagtgatatacaaccaccagctctgtctagttccaagacatttacatcatcctggaaggaaaccatgtacccactagtggtccccttaccccgtcccccaggccctggcaaccatgagtctgctttctgtccctatgaattaacttcttccgatgtttcatatcaatgaacccatacactatgtggccttgtgtctggcctctttcacttaggacaatattattattaaggtccatccacattgtagcatggatcagtacttcattcctgttaattagccctttgattttggtttactctttggttttaaaaagtcctagagtaactttcctttttttgagacagagtctccctctgtcgcccaggctgaagtgcagtggcacaatctaggctcactgcaacctccacctcctgggttcaagcgattctcctgtctcagcctcccgagtacctgcgattacaggcactggccaccatgctggggtaatttttgtattttcagtagacagggtttcaccatgttgaccaggctggtcttgaaatcctgacctcaggctgatccacctcagcctcccaaagtgccgggaatacaggcrtgagccgctgcgcctcacctgaagctagctttgtttgcaaacatggtctccactcagaaaatcaaatctccagtccaatccacacttaagtcttgactcacagatgagccttctgcccctgctcttgccacagccacctgcaggaagatcaccccccttggggacagcagacagtgtccttctctccctcctttttcctccctggtttgctcacttctgtttctggtttctggcccatctgggatggagcatgaggagggaaagcagggagaaagaggaagaaaatttgcacttgattggtactgtagtaaagtggctctaagctctctgagtctgatggaatttgacaacctttccccaacgtcggcctcgtgttctttggcaactcccactgcggccctgcagttgcaaacatcttgaggtgggcaatgca

SEQ ID NO: 4323 - DNA, 1268 bp, Homo sapiens
tgcatgtagctctatgtagtaatgtatgctagatgcagagtgtatggggtactctccttacaactttttgtctggcactgtcctttaatcttgcctatagggagcatcttctcctatacttggatgaacagttggggcagcctttggttttgtttttttaattcagaaaaaatttacatgacataaaattaaacattgacgattgcaagggtacaatgcagggacagttaggacattcccagtgatatacaaccaccagctctgtctagttccaagacatttacatcatcctggaaggaaaccatgtacccactagtggtccccttaccccgtcccccaggccctggcaaccatgagtctgctttctgtccctatgaattaacttcttccgatgtttcatatcaatgaacccatacactatgtggccttgtgtctggcctctttcacttaggacaatattattattaaggtccatccacattgtagcatggatcagtacttcattcctgttaattagccctttgattttggtttactctttggttttaaaaagtcctagagtaactttcctttttttgagacagagtctccctctgtcgcccaggctgaagtgcagtggcacaatctaggctcactgcaacctccacctcctgggttcaagcgattctcctgtctcagcctcccgagtacctgcgattacaggcactggccaccatgctggggtaatttttgtattttcagtagacagggtttcaccatgttgaccaggctggtcttgaaatcctgacctcaggctgatccacctcagcctcccaaagtgccgggaatacaggcgtgagccgctgcgcctcacctgaagctagctttgtttgcaaacatggtctccactcagaaaatcaaatctccagtccaatccacacttaagtcttgactcacagatgagccttctgcccctgctcttgccacagccacctgcaggaagatcaccccccttggggacagcagacagtgtccttctctccctcctttttcctccctggtttgctcacttctgtttctggtttctggcccatctgggatggagcatgaggagggaaagcagggagaaagaggaagaaaatttgcacttgattggtactgtagtaaagtggctctaagctctctgagtctgatggaatttgacaacctttccccaacgtcggcctcgtgttctttggcaactcccactgcggccctgcmgttgcaaacatcttgaggtgggcaatgca

SEQ ID NO: 4324 - DNA, 1179 bp, Homo sapiens
tttaaaagtctagccaggggccctgaaagtaattctataaccacataatggtcctctgccctttaaggtacaaaaatgtgttacagaaaatgttgaacagaagttgctccatgtgaaacaggaaaggttcccttgttcccctcgcagggcgtgcgctgggggcgtggctcgcttcttctgtgccccgctgctcaaacctctacggaaacacacagacaggcaggttgtggggctcccaccctacagcagtgtctaagggtgaatgtttayagttcctgaagcccctgtgggcgtgtgttacagggtgctctcttaatttgccatctataggcagcttgtgttagctcaattagaccctctaccttgtcacaaagacagagggctttctgtatcccgggctttcttgccttagtttactggaagaattggatcacacgtgggcttagagaatgagtgcaaggttttattgagtagaagtagctctcagcagatggggcagccagaagggagatggttttcccctggagtccagcagctcaatgacccgactcttctctgacaactctggccaaactctgtgttgctccaccagccaatggctccatggcctgctggcctgcccgtgcctgtcggcatgctcttccgcagggtgggcgctccacgaccagctgcttgtgtcttattccaccgatatcttcctcgtgacgtccagcctcttctatctctgccttgctagggtcttgggtttttataggcacaggacaggaacatggcaggtcacagtggtcttgggaaatgcaacaataatgcctgtcctcacctaggtccgtgtgggtggagccccagccagggaccacaccctcctctacccagcacttcccttcccccttccgtatcatttaaagggaccaggctcttcccttcccagcacttccatatcatttcccctctctgaagaagtgcatttaactgccattagaatagggatgatgaccagtcttagctgcttcctgctgacagggggcgttgttttggggaaaatggcagtcagactcctcccagaggtctacctaagggttcctagcaaagcagagccactgttggaggctctggttgcctgaccttttggagtttgatggcttctaggcgtgagagaaaaaaacaagttttataaggtta

SEQ ID NO: 4325 - DNA, 1179 bp, Homo sapiens
tttaaaagtctagccaggggccctgaaagtaattctataaccacataatggtcctctgccctttaaggtacaaaaatgtgttacagaaaatgttgaacagaagttgctccatgtgaaacaggaaaggttcccttgttcccctcgcagggcgtgcgctgggggcgtggctcgcttcttctgtgccccgctgctcaaacctctacggaaacacacagacaggcaggttgtggggctcccaccctacagcagtgtctaagggtgaatgtttatagttcctgaagcccctgtgggcgtgtgttacagggtgctctcttaatttgccatctataggcagcttgtgttagctcaattagaccctctaccttgtcacaaagacagagggctttctgtatcccgggctttcttgccttagtttactggaagaattggatcacacgtgggcttagagaatgagtgcaaggttttattgagtagaagtagctctcagcagatggggcagccagaagggagatggttttcccctggagtccagcagctcaatgacccgactcttctctgacaactctggccaaactctgtgttgctccaccagccaatggctccatggcctgctggcctgcccgtgcctgtcggcatgctcttccgcagggtgggcgctccacgaccagctgcttgtgtcttattccaccgatatcttcctcgtgacgtccagcctcttctatctctgccttgctagggtcttgggtttttataggcacaggacaggaacatggcaggtcacagtggtcttgggaaatgcaacaataatgcctgtcctcacctaggtccgtgtgggtggagccccagccagggaccacaccctcctctacccagcacttcccttcycccttccgtatcatttaaagggaccaggctcttcccttcccagcacttccatatcatttcccctctctgaagaagtgcatttaactgccattagaatagggatgatgaccagtcttagctgcttcctgctgacagggggcgttgttttggggaaaatggcagtcagactcctcccagaggtctacctaagggttcctagcaaagcagagccactgttggaggctctggttgcctgaccttttggagtttgatggcttctaggcgtgagagaaaaaaacaagttttataaggtta

SEQ ID NO: 4326 - DNA, 1179 bp, Homo sapiens
tttaaaagtctagccaggggccctgaaagtaattctataaccacataatggtcctctgccctttaaggtacaaaaatgtgttacagaaaatgttgaacagaagttgctccatgtgaaacaggaaaggttcccttgttcccctcgcagggcgtgcgctgggggcgtggctcgcttcttctgtgccccgctgctcaaacctctacggaaacacacagacaggcaggttgtggggctcccaccctacagcagtgtctaagggtgaatgtttatagttcctgaagcccctgtgggcgtgtgttacagggtgctctcttaatttgccatctataggcagcttgtgttagctcaattagaccctctaccttgtcacaaagacagagggctttctgtatcccgggctttcttgccttagtttactggaagaattggatcacacgtgggcttagagaatgagtgcaaggttttattgagtagaagtagctctcagcagatggggcagccagaagggagatggttttcccctggagtccagcagctcaatgacccgactcttctctgacaactctggccaaactctgtgttgctccaccagccaatggctccatggcctgctggcctgcccgtgcctgtcggcatgctcttccgcagggtgggcgctccacgaccagctgcttgtgtcttattccaccgatatcttcctcgtgacgtccagcctcttctatctctgccttgctagggtcttgggtttttataggcacaggacaggaacatggcaggtcacagtggtcttgggaaatgcaacaataatgcctgtcctcacctaggtccgtgtgggtggagccccagccagggaccacaccctcctctacccagcacttcccttcccccttccgtatcatttaaagggaccaggctcttcccttcccagcacytccatatcatttcccctctctgaagaagtgcatttaactgccattagaatagggatgatgaccagtcttagctgcttcctgctgacagggggcgttgttttggggaaaatggcagtcagactcctcccagaggtctacctaagggttcctagcaaagcagagccactgttggaggctctggttgcctgaccttttggagtttgatggcttctaggcgtgagagaaaaaaacaagttttataaggtta

SEQ ID NO: 4327 - DNA, 1221 bp, Homo sapiens
tgcattaaactctctcttcccttggcgtctgccatgtgatcattctacttgtgaaaccaacccaataatcccatagacagggttttttttaataaacatggaaattgacctttctagtcttaaagtgtgacacttacaattgttttatctgagcttccccttcaggaaaggacccccaggcctctcagaaagtaacaaaggactgaaactcaccagatcatggcatccagaccatgagacgaccagggccctcactgatcatgattgctttcctacccctccggagttcctgttttccacacattgttaaatttctctcctgctagataagcccctagttttagtcagtcaggagttggattcgagatggaccatcccccatctcctcagctgcagcacccaactaaagccttcttccttggcaacatacctcatctcagtgatagacttctgtgaggccagcagcaggatttagaacaagcccctggggtttcaataacaattgtttttacattttttctgcttttccctccctccaactgctactctattgtttctttcacaagcctatttccctttacatggctgtttaatgttgttcctcaaggctgggtcctaggccttcttagatgtgcccactgagctccctaattttcaggctatctttaaatctgctctccccctacctggaatgtatttccctctcctcctaacttggagaatttaactcatctttaagaatcaactgaagcattgtctccctcacaaggcttccctgatcagcttctcctgggggcagtgcctttctggctttggtgagtgtccctggagtagcccctgtgatctgcttcattgtttagctctgatgagcatgaggacgttggccatccatctcctcctcttgacaggggctgcatggccatcatgcttggctccccagtgcccaccagagttcctgatgcaaagtagtcacatcagtatttactgaagaaaggaacttggaaaggtggtaaacaggaactgatgcttggcactttcaggcacatcatagcctcctggcaaacactgtacagttgacctttgaataacacaggggtcaggagtgccactgacccgtgctgttgactcctcaaaaacttaactacttatagcctgctgttgactgaaaccttctcaacaacataaacagtggtttaacacakattgtgtatgttgtatgca

SEQ ID NO: 4328 - DNA, 1915 bp, Homo sapiens
cataaaataaataatgcttttaatttcaggttttatattaatatcataaagtcagatagccattagaaggtatttcaaccttccaaccaatgtagagattcattctacatctgtgtaaattttttaccatctgttatgtggtgataatagttcttacttcttaggaatagtgtgaaatagctaatgagataatataaagtacatagcataatacctggcaagagtaaatacccaataaatgttagcattattatttatatctccatcagatgatcaattggcctcttaaatacttctggagctggaatgcttgttatttaatgatacagcttattccacttctggatagattgaatgatgaagaaatagttcacttatcaacctttyagttgcttaatgtcaatgattgttatgattcttaggtttttgttctttaggctaaatatttccacattgtcttgcaaatagtggatgatggatatatatttgtttaattgtcaaatattcttgattcaaaaataccattgatttaggttatacattttcatttaaaaaatcgcttcattaaatgtatataatttttaaaaaatgaacaagaaacagtgtaaattttctcattaaagttttcttttttgggacagagctcactctgttgcccaggctggagtgcagtggtgcaatcatgactcacggcagccttaacctctccagctcaagtgatcctcccacctcagcctcctgattagccaccatgcttggctaatttttaaattttttgtagagacagggtcgcactatgttgcttaggctggtcttaactcctgggttcaaacagtcctcccaccttagcctcccaaagtgttgggattacaggggtgagtcaccatacctggctctcattaaaattttatgctactttttctgattttgcagtgaggctaaatattttttgcattcagtctgaagattcatctaaattacattagttttcagtagttatgcatagtatcacgatgatgttgatctccgtagcactcccctcctttgagatttgcagtataattttaagacatatataagaataattgagtgtggtaaactcaccatgtcaaatgcaataaatcattttccaatcctgttcacgtagcctattcttttattccctgtatttcttaataccacactacccacccaagtcaaaaagcttgaagtcattcttgaccccatttttttttttagatggagtcttactctgtcacccaggctggagtacactggcacaattttagctcattgcaacctccgccttccaggctcaagtgattctcctgcctcagcctcctgagtagctaggattacaggtgcctgccgcctgccaccacacctggctaatttttgtatttttagtagagatggggtttcgctgtgttggccaggctggtctcgaactcctgacctcaagtgatccactcacctcggcctccgaaagtactgggactacaggcgtgagccaccgcgcccagctggccccattctttccacccttagtcgcttatgttcttttgattcagctgtctaaatacctgcatctctctgtttctggtcaccctgcttggtgcaggccatcattttatctcaactggatcattacagtagcttctgtagggttgcctctgttcctttcattttccttgctacagccagagtgataattctaaaatacaaatctgataatgccacttcctttaaaatccttttttcttctttctggattgcttgcttctgttcctttatttgttctaatacagtctcatctctgaccattccctccctcctcctcacatggtgaacttcgactcaactaaccttctttgtttctgatgtgtaccaggcctcatgtgcctctgggccctta

SEQ ID NO: 4329 - DNA, 637 bp, Homo sapiens
tttttttttttttttaccaggaattgaattccaggttgccagttatttcctttcagcacttttaggattctattgctttctgatttccacattttatcttgagaagtctgctgctagggtgccatgacaagccaaagctaatatgagtcaaactcagtggggaggcagaaaacaaaggtcttgtaaggcaatggagctggctaagaggagtggagatgggagcctacgtagccctgggggaagcgagatggagagggcagctgcttggtgacttcctgtttttcacmaggtttctgtgagcattatctgtatgtttttcagtaaattccatcttactttgggcttgagtaaatttctttacttttaaatcaacaaatttaaaaacaaaaacaaaaaccttttaccggaaaatttgacacataataggcactcaataaatggtagttgctgctgctattgttatttggagcctaaaacagaataaagaactgatccttaggattttctagtcataccagtggaatgagccacatgttttagggagctcacttgacataaagcaaagttattactttgaataatggttgccatatagttgtgagtggacacactgatagttaaagtagctgcaaatgca

SEQ ID NO: 4330 - DNA, 637 bp, Homo sapiens
tttttttttttttttaccaggaattgaattccaggttgccagttatttcctttcagcacttttaggattctattgctttctgatttccacattttatcttgagaagtctgctgctagggtgccatgacaagccaaagctaatatgagtcaaactcagtggggaggcagaaaacaaaggtcttgtaaggcaatggagctggctaagaggagtggagatgggagcctacgtagccctgggggaagcgagatggagagggcagctgcttggtgacttcctgtttttcaccaggtttctgtgagcattatctgtatgtttttcagtaaattccatcttactttgggcttgagtaaatttctttacttttaaatcaacaaatttaaaaacaaaaacaaaaaccttttaccggaaaatttgacacataataggcactcaataaatggtagttgctgctgctattgttatttggagcctaaaacagaataaagaactgatccttaggattttctagtcataccagtggaatgagccacatgttttagggagctcacttgacataaagcaaakttattactttgaataatggttgccatatagttgtgagtggacacactgatagttaaagtagctgcaaatgca

SEQ ID NO: 4331 - DNA, 591 bp, Homo sapiens
tttagttggggcttctcaatatgaaatccctagagctatctttaattagtgcctttccttttttgcttccttcctttactctcaccaagactacattttccccttttgggtttgcctttcttgttttattcgagtgaactacttacccaccctcccaaccctgcaccccccgacacacagacacacacacacactcctttttgctgctttgtagtcactcactyaccccttttgtaggcgggatgtcatacaccccttgaggttttatctctcccactggaactgaaaacacagggccttttgctgatgagggagggatgtcgtatacctgaagagaaacccgtgagttacccagaatggaaatgtcttatacttggtcattttttatgctcctaagcacttaattatggatttatttaccaggttatgtacaagcttgatctttggcagtgctccatgttataacagatttattgcctttttttttaatacattttatggtttttaacttacatttaatataaaaatgattttggccaggcacggtggctcacgcctgtaatcccagcactttgggaggctgaggtgggc

SEQ ID NO: 4332 - DNA, 766 bp, Homo sapiens
ataaaagagcccagagcctagtatactgctaacacatggtagggccacatatgcttcctaattaattttttaattacagaaccaaagaattattttggaaatagtattacctgcaagttttgcttgcaatggataatactggtctagtaaatacctgatgtgtttgttcaaatatttgtgcccttattttttatgtttaatatatcacagaaaaacaatgaccctagtttaaaagggcaattcgatatagctatgatggtaaaatttcagctctggtaaaataattttcttataaagtctttttaaatgaccccttctccagttttaaattcaaaaaaagaaaagcagcattatagtcaatttccttaagtatcaagtaatctgtattttgcaaaaatgattattgcagagagaaatttgaaaaaagaatatttcagcgatcaaagtctctccggggacaggttaaagaaaccgaagatcataacagatgtttttagctatctagttagctagggctatgatgcaaataattgttactgccattatctttgaaaccagatgtctgatgtccccatgagagacaacaaaataataatgataatggtatagatgattttcaagcctattgctgagttacaacttaatattkatttttgcctgtatgactgctgacaggcatgccaaaatgttgagaccagaaacactttttttcctaaattttgctggaatatcatttacaattaagacctaatttattattagtgat

SEQ ID NO: 4333 - DNA, 1013 bp, Homo sapiens
tcattcataagacagatttctatgaacttaagcaaagtttacaaagagaaaatggtaattttttaagatttcataattctgaattttgtttaattttgtggtggtagtcagcattgtctagataattcttaccacattattattattaatctcacactttaaacatttttctgtcttaaaaattgatgacttatttaagcggtccattttgcatccaggtgcatagaatgttcatcccatattttctaaacaatcaatattatgtattatgggactatcattagttcttgttggcagtgctattttttttctgtctgtcaggatttccctatccttttttgtctagttcctttgcagaatcacttcactgacttcaccgtttctgaagcatccatccattatagtactcatttccaattccaggaacagtcctctgtccccggttggccagagataccatcccttctcccgagtgactacttcaggaatgactatattacccctttatagacaaggggttcttagaggagaaatctctgcatagacaatgcagatatgaagtagttagccatcttgctcacaatatgaagttcttctctatagaataatgccacatagagacaagctgagccgagagagagaaagacatggaggtgactatacgtatatctaaaaacagctttttaaataactgtttcagttatatgtcctaatatagaccacttttcttaagctcaggtaatacatcacttcagagagcccttccctgccttcagtaaataaacttttagttattcttttactgcatacttttataacaagcataacactctgatctgaattctctaatttatttattttatttttatagtctctttcccccrgtaaaacataagctccactttggcagaatctttgctagcaacatgcctggctttcaataaactgttgttaaatggataaatgaatgaataaagcttgtttgaggggagtttctgtaaatagaaactgaa

SEQ ID NO: 4334 - DNA, 731 bp, Homo sapiens
tttttgagacagagtcttgctctgtcacccaggctggagtgcagtggcacgatcttggctcactacaagccctgccttgggttcacaccattctcctgtctcagcctccagagtagctgggactacaggcgcccgccaccacacccggctaattgttttgtatttttagtagagacggggtttcactgtattagccaggatggtcttgatctcctgacctcgtgatctgcccacctcggtctcccaaagtgctgggattacaggcgtgagccaccgcacttggcccaaagttcccatttttatagggaaaccagtaatattggattaaggtccactttaaggacctcaccttaactatattaattgtaataatcataattaattaattgtatctgcaatgactgtatttccatataaggacatactctgagttgctgggggttaggacttcaacataggaattttsgggggatacgatgcaacccataatagcaaatgttgtgaataaaactgtaaaaagcacccctcctttttccctaacaaatgaaggctttgtcacttggttttctgtcttctctccaccctggttctgccgtcttcctgggtgccttcagcatgcgcttgatggcctgtcctcttggtgccccacatgtggccactcccccactttgtcatgtgtcccccaccccgccccaccaacttgatgcagtgtcattgccaagattcttaat

SEQ ID NO: 4335 - DNA, 731 bp, Homo sapiens
tttttgagacagagtcttgctctgtcacccaggctggagtgcagtggcacgatcttggctcactacaagccctgccttgggttcacaccattctcctgtctcagcctccagagtagctgggactacaggcgcccgccaccacacccggctaattgttttgtatttttagtagagacggggtttcactgtattagccaggatggtcttgatctcctgacctcgtgatctgcccacctcggtctcccaaagtgctgggattacaggcgtgagccaccgcacttggcccaaagttcccatttttatagggaaaccagtaatattggattaaggtccactttaaggacctcaccttaactatattaattgtaataatcataattaattaattgtatctgcaatgactgtatttccatataaggacatactctgagttgctgggggttaggacttcaacataggaattttcgggggatacgatgcaacccataatagcaaatgttgtgaataaaactgtaaaaagcacccctcctttttccctaacaaatgaaggctttgtcacttggttttctgtcttctctccaccctggttctgccgtcttcctgggtgccttcagcatgcgcttgatggcctgtcctcttggtgccccacatgtggccactcccccacttygtcatgtgtcccccaccccgccccaccaacttgatgcagtgtcattgccaagattcttaat

SEQ ID NO: 4336 - DNA, 613 bp, Homo sapiens
aggctccagtgcctccactcaggaaagctcaagtaggttttcttgagaatttttagtggataccctgttttgcaatgttcttttctttttctaatgaggctgaaccagattgtaatgccatgaggcttctacatggagagctggacgttggtgaggattgggtggagaaggccgggtggaggctgggcctgggagaagagcagcagattcccaaacgtactggtattggtgcatactctgagaaagacatctcagagcacttctgccgtcarttacgaagtttcaatataagaattctttctacacatgcctgcctgtcttttcttgtgacgctttgacagaagaattgttttccttatgtgtcacatactatacggttagacactaacacatgtttgtttgagcatatgacaatttcaacctgacaagcttgaggctttccttctcctctctctctttctttccttccttcctttcatgcacttattttagaaatatgtatgaaacttctcttagaggcaggctctgtgctaggtactcgcgataaaagggtaaactgaaaaacagatctaattgagtctagaacttgttatttcaagctgaaattcataat

SEQ ID NO: 4337 - DNA, 1451 bp, Homo sapiens
ttttatatattagaaatataagtgggcttgactctttttctccttagggtcttaccagactaaaattagttgttggccagacagatcttttctggaggctctggggaggaattttttataagctcattcaagttgtgcttagaatccagttccttacaggtagattgaacatgcacatttccttgttgagtgttaatcacaggccaccctttgttgctagaggcaacctgtgtaccttctcatgtagtgccccccatctttaatatcaccaaagaaagacttccccttatgttcaccagctggacaaaattttctactaaaaaaaraaaggtatgtgattagattaggcccagccataggagccccttttttatataataatttaatataatcatgggagttatatctcatcatattagtaggtttcactcacactcacagggagaagattacaggaaggcagtatttatggaagtcattcctacaattttgcttattacaggagccgatattttatctgaaaaaattgagattaattatatcttccatgaacaattgttggtagtagtagaagagctaatgtttagactcacttgccacatcataaacagcgaaattactaattgttctgataaacatttgaccctcatggatgcatattttatttataaacaagaatgtatgttagcacattctttctatattaactataaatctatctccttataatttcccccagcctttgaagtcaaacagataatatgtaatctctcatccatgtttattcactctgtggcattggtccagcatttgtagaaactccatttcatgtaaggcactcagtgctggggatcagtgaacaaaaatacatgacccccataatctcagagggtcctccctgaagaagtaacttgaaatgagatatggtagaagttaattaggtgaatagggaaagaatgagcctttcagaaataagcataggcatattagaaagggaaataagacagcaggaggaattaaacagctagaagactgaaaattattcaaaaagtgttacagtattagatagaaaaggtaggcagaacttgttacaggtagctgagagggagaaaagacagtaattgaaagccactaaagttttttaaaagttttttaagcatgaaggtaacataatagacattaattgtgagaataaaattattctatttactatgcagatgaaggtaaattagttcaaaagtaattaagaagaccgatcagatagaatattagactagttttgtggtaatagagatagacatgatttattttgaaatagctagatgacaaccaacataattttattgtaaatttaatatagtagggaagatgcaagggatattaggaatttcttcaagattcctagttggcatatgttgataatttgtgtatcattaactgttttaagttca

SEQ ID NO: 4338 - DNA, 654 bp, Homo sapiens
ctatctaaggatttaggaatactaataatacttgagagttaaatagcacctattcattctttcattcggtcttctcarcagtcatatagagttgtcataaggtcaatcattattcccattttactgccaagaaaactggagtaagagaggttttagtgacctgtttaagttcacctcaagagaggttttaatgacctgttcacagactacccctaaatatccagctaaaccttgaatcaggtcttcaaattgagtttaatccatcttaaggtctaccattgtccttaatgcaacacatttaagtccttatataaaagtattttttagaaaacttactatgttgtgtttgccagtggcagcagtgattcattttattatttataagttatttttcatctttaattcatacttttaacgattttgtttgttgattagctttattgcctttcatgggtattgtgccaaacaaaagctgaataacctgaaatttgacatgctatctataactcatcaaattgtgaggtacttcgaagaactagaagtggaacatatctgtaaagtcatttgatgagaatgagttttttcattgtttcctgaaactgtttcatattgttatagaatctgtttgcagtataaaagattgtcattgcttca

SEQ ID NO: 4339 - DNA, 654 bp, Homo sapiens
ctatctaaggatttaggaatactaataatacttgagagttaaatagcacctattcattctttcattcggtcttctcaacagtcatatagagttgtmataaggtcaatcattattcccattttactgccaagaaaactggagtaagagaggttttagtgacctgtttaagttcacctcaagagaggttttaatgacctgttcacagactacccctaaatatccagctaaaccttgaatcaggtcttcaaattgagtttaatccatcttaaggtctaccattgtccttaatgcaacacatttaagtccttatataaaagtattttttagaaaacttactatgttgtgtttgccagtggcagcagtgattcattttattatttataagttatttttcatctttaattcatacttttaacgattttgtttgttgattagctttattgcctttcatgggtattgtgccaaacaaaagctgaataacctgaaatttgacatgctatctataactcatcaaattgtgaggtacttcgaagaactagaagtggaacatatctgtaaagtcatttgatgagaatgagttttttcattgtttcctgaaactgtttcatattgttatagaatctgtttgcagtataaaagattgtcattgcttca

SEQ ID NO: 4340 - DNA, 654 bp, Homo sapiens
ctatctaaggatttaggaatactaataatacttgagagttaaatagcacctattcattctttcattcggtcttctcaacagtcatatagagttgtcataaggtcaatcattattcccattttactgccaagaaaactggagtaagagaggttttagtgacctgtttaagttcacctcaagagaggttttaatgacctgttcacagactacccctaaatatccagctaaaccttgaatcargtcttcaaattgagtttaatccatcttaaggtctaccattgtccttaatgcaacacatttaagtccttatataaaagtattttttagaaaacttactatgttgtgtttgccagtggcagcagtgattcattttattatttataagttatttttcatctttaattcatacttttaacgattttgtttgttgattagctttattgcctttcatgggtattgtgccaaacaaaagctgaataacctgaaatttgacatgctatctataactcatcaaattgtgaggtacttcgaagaactagaagtggaacatatctgtaaagtcatttgatgagaatgagttttttcattgtttcctgaaactgtttcatattgttatagaatctgtttgcagtataaaagattgtcattgcttca

SEQ ID NO: 4341 - DNA, 575 bp, Homo sapiens
cccatatgctgcaagaaaggaagctgggtcagcatgggagggtggttccaggtgactcaggagaagcctgrtcagccctggcagagaggtacccccgaccctctccagtgagaagcagatgatgaatcaactctctccagccatggggacagtaatgagggtttagatggaacgttcttaggtataatcctcctcatccttctagctacttccaggaagtcctcctagacccccatgcatctccttctctcctgaactcctacagcccttaacacctgctctgcatggcctatcacttattcccattgtcttatagagcctctcgttgtctcatgtgtgttagactttctcttccaattaagtagcaggcaagttggaggcaaaggctgacctaggtttcatgtccccagtcacccccaggttggcacagcggtggcaacctgtagggggtgcaccataaaatcaaccagatgattgatttgcagtgacagtgggctgtcaaggacagcagtgagctggcaagaccaccaacctaaccagtttggctgtgagagacacaggaacatacaagtgat

SEQ ID NO: 4342 - DNA, 1947 bp, Homo sapiens
ctgtgagaagattcaaatcgtatatttcatcaagacataagatatatcataagtttgttaaatgtcaaatatgcgaaaatttttctagatgccttcaatttgcccatgaacttattttgctctaatattaattaacatcatgaaacatctattctgcaaagcatatgaaaacaaaatgtgcatacaatgggcttcctacttgaatgttagctgtgttagtggtatgataaattgtttacttggggtaagataacttgcaatgttttttacaaatattcttagggaaatcattctaaaagcaaaaataaacaaaatgaaatgtaaagatataggtgtttctctgtgagtgtgtgcacgtgtgaacatttctcacttcaacctatagggtgcttcctataccaagtttcaagctagaccctggaaatgcaacaaaagagtgagttttattagcagcgagttttattagtagtagcaagtgctactcctacacgtaagctcagcctcataagggagactgatattaatcaaataatcatttttttatttgttctttaattcagctaacattatgtggcattaagcaatgggaaattactctaagtgctacagattcaattgcctaaatataaatgcattactcacagatatgaagtaatagagtttgtaccttcatatattctataactggaacacacaaccggatctgcctgaaagcagaggctcgtgaaaagttcaccataccacagacctttttcgcatacctagaaagtaccaactcaagctggaaatttatttgaagcatctcttttggctcaaaaatgtatgtaagtttgcattattaaaatatatgtaaatatgtatttatacaatataatagtatatatatattattatagtataaagacatacagaatttacctccaaatttttgagtaaaattgattcttggagtagatgttctattgagacacagttgsggagtgggaagcaattatttcctttgcaatatttttttaaaatatatttttaaaagtacaggaattaagactgagagacatagaataagaaactgttctgaagacccagaaatgcaaagatggaataacatactgagaaggtcttattgcattcttttttcatggtattagagtgattaatacctatcttgcagaaaaccaatgaaataatatatgtaaaggcagttctcagagcctaggacatatagtaaaaaatcaatcaatattaaaatatattcttggctgctttttgcaatagctcagtttggaagtgatgaggcgctcattaaagagagagatattggggatgtaacatctctggcatatgtcctatctgttcttcttcaatctgtgccccaattcaatataagaacaaggaaaagataaccccattgttaggaatcggagtgactgtacaaaagataatgaattgaatagaattaagaaagccagtgagctgggtctagtttgctgatataggtgaaaaaatacatgttgttttatttaactcttaataagaaacttgttttttttttaataacaaagtaaaatactgaagttcctgctattatttttgaaaactatttggaaaaattattttcatcattatccccccaggtgcagtatgatagctgtgatgaatgcttgatctgtaataaatgaccaccttttatctcacaggtaattttacacaaccagagaaagctgtcaacatttcaaaataggaagtatgatgatgtggcacatattaagtcttacaagggttaattataaacatggtcctacaagtctatggttcaaatataaaatcaaaaagtctttgttagttatttccaaaaacaaaattgtaattctttactaggtggaaatataaagtgggacttttaaagttagtgaagcagtcctgtgtaacatgacttgtactcctatg

SEQ ID NO: 4343 - DNA, 1013 bp, Homo sapiens
tgcattgatatgtatgatggctagttttatgtgtcaactagattaggctaagggatgctcagatatctgacaaaacattatttctgggtgtgtctgtgaggatgtttctggaagagattagcatttgattcagtagactgagtaaagaagatctgccctgactaatgttggtaggtatcttccaatccactgtgggtccaaataaagcaaaaaggcagggtaagggtgaatttactctctatttcagctggaacatctatcttctgctgcatccaatattagcactcctattttggggcattcagattcagactaaatcatgcaaccagctcgtctggttctccagcttgtagatggtagatggtgggacattttggcctctgtaatggggtgggccaatccctgtaatatatctatcatctgtctgtcccttattggtgctttttctaaggagaaccctgactaatacatctgtcttctactagatataaagaaatatgttaggctcttagagagatagaataaaacatactatttcctgctttcatgatgttttggtgtggaccatattggattagagggtttgagagcaagagttgatttgtctttgatattttcacagatgactctatggatcataattttaattttctatctccaaaaggttcattttgattttaactaattactaagatgcttcatarcaaagttttttttctttaaaattatccttctcagagattgagctttgcgtctttcatttctaatttactactgactaaaccaacaatacaaatactgaaaggatagcatggtaattttgtctcttaagtgtctgtgtgtgatgttatgtgatggatgacacactttgcatcaagagacctgactttcctttccttcttctttattaaccaattctatagtgtctaatgaagtgagtcactgaatctttattttattatcttgaaaattcaatgcacaatgactaaattgcaataaatgagataatatat

SEQ ID NO: 4344 - DNA, 634 bp, Homo sapiens
ccaatttcatcatctaaaaaatggggattgtaatcctccttcatgggttatggtcagggttgaatgatctcattcacacaaatagtttaacatctgctagggttggataactgttagctattgttggtaagcataaaccttactgtgcctagtatgagacatctctaggaccaggggttctcagccctgaatgcacatgaaaatcactgtggaaacttttagaaaatactgatgtcctggcccaagtctgggctggtaaacatttaacaattggctctcagggacctgatctgaagcgcctgctgactacaccrtgtaaatactgccatcttggcagatttcaagctaccaacgtgaggctgctggacatgggaagagaagcacacagtaggctccagcacacagctactccgaccccctcctgaaccaagggaatccatatctctttaaagcacccccagatatttctaatgaggtgccaaggtttacagtcacagcagtagactaacagcactaaaaggagtgaatggcagagttggggtggaggttgaacgtgactcaggacaaaataaggcaaaaggcctccacctttctcccttctcctggcagcggtattagactaagatgtcatgtc

SEQ ID NO: 4345 - DNA, 2310 bp, Homo sapiens
cccaaacaaaacaagaatattcacacctctgactttattcatacacagtgatgctctcgtctctctgccctcagacttactcaacaatgttcagcccaaattttatcttttctgagtgtctctgatgttctcccataaaataaataaattattcatctctacttctgtggacatttacagaaatttacagaaacctttatttatagaactatatatggatgtaaatacgtacataatgtggatatagatacatagatataaatgtttaatttaaaattatataaaaaattgactattgtgttttctggatctaacaacgtttgagaaatagtggttactgaataatttcaattagtatgaatccactggagagtatcatttgttcatatgaagtagtaccaaaaggcatgaataaaatttagtgtagtgatagcaggaaaaaataataaacataaaattagaaaaaaaaaaataaagataaaattagataaaatttttattacagagtttggacatttcttggccctcatttaacatgttgaaatcctactaatccctaagatacaatgaaaataaagccttcttcaaaagtttttctggaatcttaatcagattgaaataatttatccttctttgaattctcatatactttaaaaatgatcttcttcaattattctgtcttaatttccattgtgacatggtttggatcggtgtccccacctaaatctcatgttgaattgtaattcccaatattggaggtggggcctggtaggaggtgattggatcatggaggtggtttcttgtgaatggtttagyaccatcctcttgggactgtccttgggatagtgagtgatttctcatgagatctggtcctttaaaaggatgtggcacctctcctttccctctctcttgctcctgctttcaccatatgaagtgcctactccgctttgcctttcaccgtgagtaaaagctccctgaggccttcctagaagccaagcaatgttggtgccatgcttgtacagcctgcagaaccataagccaaataaacctcttttattaaaaagttacccagtctcaggtatttcttcacagcaatatgagaacagactaatacacattgctatacatttatattagcttggtgcaaaagtaattgcggtttttgccattacttttagtatttctacatgcttatgtatacttatctagtagcagtctcttttttgttaaataaggatataaattctttgaaagcagatttcttatagaatgcattattttgtttgcaacagcaccaatataataaaatgcactaagaaataaatcaatatataagtttttggcatatgtattaatgaaagataatttcctctattagataattttcaaacatgaaatgatatttaaaacagggttttccagctgcagtgctattggctttttgaagatactgtggtgcatttgaacattgttatggactgcctgtgcattgtcagatgtttagcagcatcccgggcctctatccactaaatgacagcagctcccagctcccttctcatagttgtaataaccataaatgtcttcagacatggagaaatgtcccctggagcaggagtaggtgggggagatggttgagaatcactgatttaaaagatgaaactacagttgcaaaagtgcttttaatttatataagcaataatcactcattaacctttgtatcatgcagggaatactgccttagatattaaatgtagacaatgtgggggctgtgatactatttacctgagaaaagtgagaaaatatgaaggagacagaaacttggaatctgtaaaacattgcgtccgtacactcttcttattataaatcttttcgacagtgatataaattgacattatgttcagggtcaaatgaatagctttgtcactggatttttttatatgttaaggaaagcaaaatttatccacaacctttacaaagcatcaaacagaatggaagtacgtaagcttaagtactcagcactaaagcataatatattacatatgtaatatattcatatttatatagatactaatacagttttgtaatttagcattttgtttcctttatcttgctatatgttagttgatttctgaatgacttagtctatttttatcaaatatttactaaacatcaaatttgtgtgtgtgtgtgtttgtgtgtttccagaagttctattaccagcatacaactgaaaagacatgctcatagccctcaaagaacttatagcaggaataagctattctacaaaaataataacacaatgtacttagt

SEQ ID NO: 4346 - DNA, 1293 bp, Homo sapiens
tggacttcccagagtgattggtgttgcattttgtctgtgattttccatagatggcagcctctcctgataaattcccaggcacttcttgggggtgtaagtgagtgaaggctctttgccaaggacctctgactcccaaagctggcgaggctgggaggcatttctcagtctccctcccactctgtcttggctgtgcctcttccctgctacccccctgaccctgaggacaccactgcactgatgtagcgccagagcaatgcgaaggcacctgagaataacagagatggacagccatcttctttcatttttgacctcttggagctaagacatgactttgaaaaagctcaaggcccttcattgtacaacacaaagcaggctcagggcaccagctgcttcatgattgttctcttgctatggaaggcaaccccagccccctggagtcttatgccaagaaatcaagatgtatggattatttggatggaaggaaggaaggagggagggagggtaggaaggaaggagggagggagggagggaaggaaggaaggaaggaaggaaggaaggaaggaaggaaggaaggaaagaaggaaggaatttaggtcaggagaggaaagtttgaccttgtagtttggaggcaggtctattctagataggcaatatatctgagcaaccagcaaagccatcgagagagccctgtggctgatgctgtggccggcacaacataaagagctaaaagtgccagtgaaatggatgtggctgctgaccaataaccatcatcccctgacagcaggtgcagggggcagagggacaagtggaacctctttgtcttgtcattgcagaccagagtgcccacagcgatgtgaaacctatttgtcctggaggaggagggaggagggaaagggaaaaaaaacaactggctcactctggctccataaatcactggaagggagagcccttgcctggtgaagttggagattctacctggaagctccctgatggtgcactgagcyggggtgtcgtaaatcaccagggctccgccaatggcagccctgcccactggcccattgaaaaggggctggttgttttgctggcagctgatgcagtgcactgtcccagaaagccggggacaggtgtctgccaggccatggacccaggcctactttgtgtgcttcccttgggtgtgatggggggagagaggcggtggattgctgtccctgggaacttggcccggtggcctggcatagccggaatgtccttggccagctctttgtgaacagccagaggcagtcaggagatgca

SEQ ID NO: 4347 - DNA, 1293 bp, Homo sapiens
tggacttcccagagtgattggtgttgcattttgtctgtgattttccatagatggcagcctctcctgataaattcccaggcacttcttgggggtgtaagtgagtgaaggctctttgccaaggacctctgactcccaaagctggcgaggctgggaggcatttctcagtctccctcccactctgtcttggctgtgcctcttccctgctacccccctgaccctgaggacaccactgcactgatgtagcgccagagcaatgcgaaggcacctgagaataacagagatggacagccatcttctttcatttttgacctcttggagctaagacatgactttgaaaaagctcaaggcccttcattgtacaacacaaagcaggctcagggcaccagctgcttcatgattgttctcttgctatggaaggcaaccccagccccctggagtcttatgccaagaaatcaagatgtatggattatttggatggaaggaaggaaggagggagggagggtaggaaggaaggagggagggagggagggaaggaaggaaggaaggaaggaaggaaggaaggaaggaaggaaggaaagaaggaaggaatttaggtcaggagaggaaagtttgaccttgtagtttggaggcaggtctattctagataggcaatatatctgagcaaccagcaaagccatcgagagagccctgtggctgatgctgtggccggcacaacataaagagctaaaagtgccagtgaaatggatgtggctgctgaccaataaccatcatcccctgacagcaggtgcagggggcagagggacaagtggaacctctttgtcttgtcattgcagaccagagtgcccacagcgatgtgaaacctatttgtcctggaggaggagggaggagggaaagggaaaaaaaacaactggctcactctggctccataaatcactggaagggagagcccttgcctggtgaagttggagattctacctggaagctccctgatggtgcactgagccggggtgtcgtaaatcaccagggctccgccaatggcagccctgcccactggcccattgaaaaggggctggttgttttgctggcagctgatgcagtgcactgtcccagaaagcyggggacaggtgtctgccaggccatggacccaggcctactttgtgtgcttcccttgggtgtgatggggggagagaggcggtggattgctgtccctgggaacttggcccggtggcctggcatagccggaatgtccttggccagctctttgtgaacagccagaggcagtcaggagatgca

SEQ ID NO: 4348 - DNA, 1293 bp, Homo sapiens
tggacttcccagagtgattggtgttgcattttgtctgtgattttccatagatggcagcctctcctgataaattcccaggcacttcttgggggtgtaagtgagtgaaggctctttgccaaggacctctgactcccaaagctggcgaggctgggaggcatttctcagtctccctcccactctgtcttggctgtgcctcttccctgctacccccctgaccctgaggacaccactgcactgatgtagcgccagagcaatgcgaaggcacctgagaataacagagatggacagccatcttctttcatttttgacctcttggagctaagacatgactttgaaaaagctcaaggcccttcattgtacaacacaaagcaggctcagggcaccagctgcttcatgattgttctcttgctatggaaggcaaccccagccccctggagtcttatgccaagaaatcaagatgtatggattatttggatggaaggaaggaaggagggagggagggtaggaaggaaggagggagggagggagggaaggaaggaaggaaggaaggaaggaaggaaggaaggaaggaaggaaagaaggaaggaatttaggtcaggagaggaaagtttgaccttgtagtttggaggcaggtctattctagataggcaatatatctgagcaaccagcaaagccatcgagagagccctgtggctgatgctgtggccggcacaacataaagagctaaaagtgccagtgaaatggatgtggctgctgaccaataaccatcatcccctgacagcaggtgcagggggcagagggacaagtggaacctctttgtcttgtcattgcagaccagagtgcccacagcgatgtgaaacctatttgtcctggaggaggagggaggagggaaagggaaaaaaaacaactggctcactctggctccataaatcactggaagggagagcccttgcctggtgaagttggagattctacctggaagctccctgatggtgcactgagccggggtgtcgtaaatcaccagggctccgccaatggcagccctgcccactggcccattgaaaaggggctggttgttttgctggcagctgatgcagtgcactgtcccagaaagccggggacaggtgtctgccaggccatggacccaggcctactttgtgtgcttcccttgggtgtgatggggggagagaggcggtggattgctgtcccygggaacttggcccggtggcctggcatagccggaatgtccttggccagctctttgtgaacagccagaggcagtcaggagatgca

SEQ ID NO: 4349 - DNA, 639 bp, Homo sapiens
ttcaaggccctttaagaacactagattctttcatatacaacttaaaactcaaagaagcactaactgtsttcactttttttttttttaagatggagtttcactcttgttgcctaggctggagtgcaatggcgcgatctcagctcactgaaacctctgcctcctaggttcaagcaattctcctgcctcagcctcccaagtaactgggattacaggcacctgccaccatgcctggctaatttttgtatttttagtagcgacgggatttcgccatgttagccaggctggtctcaaactcctgacctcaggtgatctgcctgccttggcttcccaaagtgctaggattacaggtatgagccaccttgcctggcctccatcttcagttttacagatgacaacattgaggtgcagagaggttaagaaacatttttaagggtaccgaggtgataaatggcagaggcaggcctggagtccaggtgattccagagcctgggctcatacatctgcaagggtggatgccctgggctggggcatcgacctcaggtcttgaatagccctggagaagtgaaagaaagggcaacagagccagctgcagaggggctggaggaatgggaaggggaaagctgccataaaggagtgtgt

SEQ ID NO: 4350 - DNA, 639 bp, Homo sapiens
ttcaaggccctttaagaacactagattctttcatatacaacttaaaactcaaagaagcactaactgtcttcactttttttttttttaagatggagtttcactcttgttgcctaggctggagtgcaatggcgygatctcagctcactgaaacctctgcctcctaggttcaagcaattctcctgcctcagcctcccaagtaactgggattacaggcacctgccaccatgcctggctaatttttgtatttttagtagcgacgggatttcgccatgttagccaggctggtctcaaactcctgacctcaggtgatctgcctgccttggcttcccaaagtgctaggattacaggtatgagccaccttgcctggcctccatcttcagttttacagatgacaacattgaggtgcagagaggttaagaaacatttttaagggtaccgaggtgataaatggcagaggcaggcctggagtccaggtgattccagagcctgggctcatacatctgcaagggtggatgccctgggctggggcatcgacctcaggtcttgaatagccctggagaagtgaaagaaagggcaacagagccagctgcagaggggctggaggaatgggaaggggaaagctgccataaaggagtgtgt

SEQ ID NO: 4351 - DNA, 639 bp, Homo sapiens
ttcaaggccctttaagaacactagattctttcatatacaacttaaaactcaaagaagcactaactgtcttcactttttttttttttaagatggagtttcactcttgttgcctaggctggagtgcaatggcgcgatctcagctcactgaaacctctgcctcctaggttcaagcaattctcctgcctcagcctcccaagtaactgggattacaggcacctgccaccaygcctggctaatttttgtatttttagtagcgacgggatttcgccatgttagccaggctggtctcaaactcctgacctcaggtgatctgcctgccttggcttcccaaagtgctaggattacaggtatgagccaccttgcctggcctccatcttcagttttacagatgacaacattgaggtgcagagaggttaagaaacatttttaagggtaccgaggtgataaatggcagaggcaggcctggagtccaggtgattccagagcctgggctcatacatctgcaagggtggatgccctgggctggggcatcgacctcaggtcttgaatagccctggagaagtgaaagaaagggcaacagagccagctgcagaggggctggaggaatgggaaggggaaagctgccataaaggagtgtgt

SEQ ID NO: 4352 - DNA, 653 bp, Homo sapiens
ataaaaggcaaatcaagtgctagacagaaaaaacagtttaagggtattgtagaacatacgtaagaaagggctcaaatatagcttagtggatgaggcaagggaatctgggattaatgggggtagtagcgagccattatctgggattaatgggggtagcagtgagccattatctgggattaatgggggtagtagtgagccattataggttcttgagcaagagagtaatactatgaaagcaggattccaaggagaccagagaacagtaacaggcaaaatgggctggaagacatacatctgctagcaggtagatatggcaatccagtagttgtgcattggagtcatctgggaagctctaagaagtttatcgatgcctgggtcgtaaccctcagagatttggatttaaytggttggggtggaacctgcatgtggtaatttttgcaaagttgcccaagtgatgccaaagaacagcctgaagtgataatcactgcaatacttcaggcacaaagagatgaaggctgagatttagataggagtctggcaggaggctgggtcagcataaaagcaaatctaggaggcatttcaaagaagaactgacattgtgacagattagaggtaaagagtagaaggacacagtctgttagattcctttatgc

SEQ ID NO: 4353 - DNA, 653 bp, Homo sapiens
ataaaaggcaaatcaagtgctagacagaaaaaacagtttaagggtattgtagaacatacgtaagaaagggctcaaatatagcttagtggatgaggcaagggaatctgggattaatgggggtagtagcgagccattatctgggattaatgggggtagcagtgagccattatctgggattaatgggggtagtagtgagccattataggttcttgagcaagagagtaatactatgaaagcaggattccaaggagaccagagaacagtaacaggcaaaatgggctggaagacatacatctgctagcaggtagatatggcaatccagtagttgtgcattggagtcatctgggaagctctaagaagtttatcgatgcctgggtcgtaaccctcagagatttggatttaactggytggggtggaacctgcatgtggtaatttttgcaaagttgcccaagtgatgccaaagaacagcctgaagtgataatcactgcaatacttcaggcacaaagagatgaaggctgagatttagataggagtctggcaggaggctgggtcagcataaaagcaaatctaggaggcatttcaaagaagaactgacattgtgacagattagaggtaaagagtagaaggacacagtctgttagattcctttatgc

SEQ ID NO: 4354 - DNA, 583 bp, Homo sapiens
tgcctaatttgtaactgtcttgagggcaaggactacatttattttacctgccactacaagtattgccatttacagcttaatacatatttatcraattaatacatgaacggacacaatgtaaaatactttttcttacctactatagtctccagtcaaaaattctgcaatagcagcaggaagctctgttttaataattaaaagataagatgacatagctgcaaaagaataaatagtgttcctattagaattctatgattcttaaccatttaaacaataatccatctaggaaaagagatgtccattagagctatgacaacatatggaagattaacatataacacactataccaaagatacatacacacacacacacacacacacacacacacacacacagaaaagtaactgtagagaagaataacaattgttaagttcattaagtatcttttgtttacatttcaagtccaaagcaaactaggtaagagaaacagtcttgattacaggctacttttaaatgaaattttgtacaaagttttacaaaaactctcttatatgttatcactccgtctaaggcattagaggt

SEQ ID NO: 4355 - DNA, 583 bp, Homo sapiens
tgcctaatttgtaactgtcttgagggcaaggactacatttattttacctgccactacaagtattgccatttacagcttaatacatatttatcaaattaatacatgaacggacacaatgtaaaatactttttcttacctactatagtctccagtcaaaaattctgcaatagcagcaggaagctctgttttaataattaaaagataagatgacatagctgcaaaagaataaawagtgttcctattagaattctatgattcttaaccatttaaacaataatccatctaggaaaagagatgtccattagagctatgacaacatatggaagattaacatataacacactataccaaagatacatacacacacacacacacacacacacacacacacacacagaaaagtaactgtagagaagaataacaattgttaagttcattaagtatcttttgtttacatttcaagtccaaagcaaactaggtaagagaaacagtcttgattacaggctacttttaaatgaaattttgtacaaagttttacaaaaactctcttatatgttatcactccgtctaaggcattagaggt

SEQ ID NO: 4356 - DNA, 583 bp, Homo sapiens
tgcctaatttgtaactgtcttgagggcaaggactacatttattttacctgccactacaagtattgccatttacagcttaatacatatttatcaaattaatacatgaacggacacaatgtaaaatactttttcttacctactatagtctccagtcaaaaattctgcaatagcagcaggaagctctgttttaataattaaaagataagatgacatagctgcaaaagaataaatagtgttcctattagaattctatgattcttaaccatttaaacaataatccatctaggaaaagagatgtccattagagctatgacaacatrtggaagattaacatataacacactataccaaagatacatacacacacacacacacacacacacacacacacacacagaaaagtaactgtagagaagaataacaattgttaagttcattaagtatcttttgtttacatttcaagtccaaagcaaactaggtaagagaaacagtcttgattacaggctacttttaaatgaaattttgtacaaagttttacaaaaactctcttatatgttatcactccgtctaaggcattagaggt

SEQ ID NO: 4357 - DNA, 583 bp, Homo sapiens
tgcctaatttgtaactgtcttgagggcaaggactacatttattttacctgccactacaagtattgccatttacagcttaatacatatttatcaaattaatacatgaacggacacaatgtaaaatactttttcttacctactatagtctccagtcaaaaattctgcaatagcagcaggaagctctgttttaataattaaaagataagatgacatagctgcaaaagaataaatagtgttcctattagaattctatgattcttaaccatttaaacaataatccatctaggaaaagagatgtccattagagctatgacaacatatggaagattaacatataacacactataccaaagatacatacacacacacacacacacacacacacacacacacacagaaaagtaacwgtagagaagaataacaattgttaagttcattaagtatcttttgtttacatttcaagtccaaagcaaactaggtaagagaaacagtcttgattacaggctacttttaaatgaaattttgtacaaagttttacaaaaactctcttatatgttatcactccgtctaaggcattagaggt

SEQ ID NO: 4358 - DNA, 629 bp, Homo sapiens
aatgaattcggcatcagaagatggtaggaccagtggccaatcttgcccagggaggtcactacacttatatcagcctcagtttcctcttccaaaaaataagatacatctctttggatctaaaatgtcattgattgcgaaatgcaccatagttttacatgtcacaaaggaaaggcagttgttttatttcagttaatgtaaatcgttaaaattattatgtttattgatgagttcaaatgttccagaatataaaaataaaacatttgtctcactgaaaaaatccttyaaataaatttcttaaagccaatttgttaataattcctattaagtaagactcatcgtgagggtggtggggggagtgcggtggctcacgcctgtaatcccagcactttgggaagctgaggcaggtggatcacctgaggtcaggagtttgagaccagcctggccaacacggcgaaaccccgtctctactaaaaatacatagccggggcgtggtggcgcacgcctgtagtcccagctaattgggaagccgaggcaggagaatcacttgaacctgggaggcggaggttgaagtgagccgagatcgcaccactgcactccagcctggttgccagagtgagactccgtctcaa

SEQ ID NO: 4359 - DNA, 1249 bp, Homo sapiens
cattattttccatcttaccttacaaaggtattcacccccattatatttccatttcccaaagttccaaaaccgttcagaagatagaattgtaggagtctctcctgtgcatccccatctccattgccatcaccctagctgggtccttgatgcttatcctggctgtttgaaatatcctccttattgttcataatcactctcattactccctcttgcagattcataatccacattgcttccagggttatcctttccaaacctaaagggactaagttagtcagggttctccagagggacagaacgaataggaaaaatgtatatataaaggggagtttattaaggagttttaactcacatgatcacaaggtcctgcaataggctgtctgcaagctaaggagcaaggaaggcagtcagagtccaaagctgaaaacttggaatccagtgtttgagggtaggaagcatccagcatgggagaaagatgtaggctgggaggctaagtcaatctggttatttcacattcttcggcctgctttattctggccacactggcagctgattagattgttcccacccagcttgaaggtgagtctgccttttccagtccagtgacttaaatgttaatctcctttggcaacctcttcacagacayacccaagaacaatactttgcatcattcaatccaatcaagttgacactcagtattaaccatcacaggaactaagtttatttcctactcaaaactttccaatagtctccccttatgtgaaaaataacatacagcttctcaggcttctaacccaacttttacaattttccccaaactctccaaagaccttcactaaaacattcttaattctaagagactagaaattgtatttgcagttctccaacgacagcttgtatatttcctgcttctgtgtccgaaagcacactggtcttcccttctttctaggattctaattgcttcttagctaccttccagaatcttccaatttttcaaaggctcattaaaatctaatctcctctgaaaagccttcctgtggtcttcatttttctcagcttcttttcaactctattatgtatttatcagagtctgctactattaattatttatgtatttggcttgcctgaaacactgcaattcctggagaagaacattcactgcacatcataggcacttaaaaggttttatggattgaattgaattccaactgatgttagcatattcacatatttatttattcatcatgca

SEQ ID NO: 4360 - DNA, 1155 bp, Homo sapiens
taaggaaaggatgacttcatattgcattcaaaagctattcaagttaaattaccattatcttaagtcatttttaaagatgttttagaaagctgaaaaagatgtgtttgcttatttataaaattactacatatataagaaattattgctgctttgaaaatttatatatatgtgtgtgtgtgtgtgtgtrtatatatatatatatatatatatatatatatatatatatatatatatatctgtcccacagaataaatattaatgtctcaggtttaccaaagttcagttcatgaacacaactgaaatgtcagctgtcctcagtaagaactgattcctgaatgtcaagtccccaagtaagtctgacttatgcactgtagataaaggcagcaggagagcagttagccttgtcaaaagacttcgctggcctcttaggtgctcatgataaggcgatacccttctgatctgtcattactttgagccatacattttaaaagttttcatgtaaagggtaccaagtgggaaagccattgcatctctttactttcttcaaaataatcaaagtctctaaaagctgaaacctgaggtacattctatctatgtttatgaaggtgaaaataagttcagaacattgcaagattgtgcttttgatgaagaattgcttcaccatttttagctccccttttctgcctttttaaaactttcagtcattttttttaatgttgagctctaaaccataaaagactatatgtttcttacatgcaaagccagtctatttcatattttaaagtctgattcccatcataatgttggcactttaagagtacagtactaattaatgtgttaatactcttatagtggaggaacgtttcttccactataagaaatgctcctagatagaagggctttcctatacaattttggatgtgttgtatgtctagtttatataaattttgtcaagagtgtagtgtgattgtttagaaataaaatatgaagttggattaattagatatcagtctcagttcctccacttgttaattacctaatcttaaatgatttaagtgcttttaacttcggattcctcaactttaaaatggggtgtcaatattcatttcacgaaactgtttttgtgttgtaacatatataaataaaacaatcaac

SEQ ID NO: 4361 - DNA, 1155 bp, Homo sapiens
taaggaaaggatgacttcatattgcattcaaaagctattcaagttaaattaccattatcttaagtcatttttaaagatgttttagaaagctgaaaaagatgtgtttgcttatttataaaattactacatatataagaaattattgctgctttgaaaatttatatatatgtgtgtgtgtgtgtgtgtatrtatatatatatatatatatatatatatatatatatatatatatatatctgtcccacagaataaatattaatgtctcaggtttaccaaagttcagttcatgaacacaactgaaatgtcagctgtcctcagtaagaactgattcctgaatgtcaagtccccaagtaagtctgacttatgcactgtagataaaggcagcaggagagcagttagccttgtcaaaagacttcgctggcctcttaggtgctcatgataaggcgatacccttctgatctgtcattactttgagccatacattttaaaagttttcatgtaaagggtaccaagtgggaaagccattgcatctctttactttcttcaaaataatcaaagtctctaaaagctgaaacctgaggtacattctatctatgtttatgaaggtgaaaataagttcagaacattgcaagattgtgcttttgatgaagaattgcttcaccatttttagctccccttttctgcctttttaaaactttcagtcattttttttaatgttgagctctaaaccataaaagactatatgtttcttacatgcaaagccagtctatttcatattttaaagtctgattcccatcataatgttggcactttaagagtacagtactaattaatgtgttaatactcttatagtggaggaacgtttcttccactataagaaatgctcctagatagaagggctttcctatacaattttggatgtgttgtatgtctagtttatataaattttgtcaagagtgtagtgtgattgtttagaaataaaatatgaagttggattaattagatatcagtctcagttcctccacttgttaattacctaatcttaaatgatttaagtgcttttaacttcggattcctcaactttaaaatggggtgtcaatattcatttcacgaaactgtttttgtgttgtaacatatataaataaaacaatcaac

SEQ ID NO: 4362 - DNA, 1155 bp, Homo sapiens
taaggaaaggatgacttcatattgcattcaaaagctattcaagttaaattaccattatcttaagtcatttttaaagatgttttagaaagctgaaaaagatgtgtttgcttatttataaaattactacatatataagaaattattgctgctttgaaaatttatatatatgtgtgtgtgtgtgtgtgtatatrtatatatatatatatatatatatatatatatatatatatatatatctgtcccacagaataaatattaatgtctcaggtttaccaaagttcagttcatgaacacaactgaaatgtcagctgtcctcagtaagaactgattcctgaatgtcaagtccccaagtaagtctgacttatgcactgtagataaaggcagcaggagagcagttagccttgtcaaaagacttcgctggcctcttaggtgctcatgataaggcgatacccttctgatctgtcattactttgagccatacattttaaaagttttcatgtaaagggtaccaagtgggaaagccattgcatctctttactttcttcaaaataatcaaagtctctaaaagctgaaacctgaggtacattctatctatgtttatgaaggtgaaaataagttcagaacattgcaagattgtgcttttgatgaagaattgcttcaccatttttagctccccttttctgcctttttaaaactttcagtcattttttttaatgttgagctctaaaccataaaagactatatgtttcttacatgcaaagccagtctatttcatattttaaagtctgattcccatcataatgttggcactttaagagtacagtactaattaatgtgttaatactcttatagtggaggaacgtttcttccactataagaaatgctcctagatagaagggctttcctatacaattttggatgtgttgtatgtctagtttatataaattttgtcaagagtgtagtgtgattgtttagaaataaaatatgaagttggattaattagatatcagtctcagttcctccacttgttaattacctaatcttaaatgatttaagtgcttttaacttcggattcctcaactttaaaatggggtgtcaatattcatttcacgaaactgtttttgtgttgtaacatatataaataaaacaatcaac

SEQ ID NO: 4363 - DNA, 1155 bp, Homo sapiens
taaggaaaggatgacttcatattgcattcaaaagctattcaagttaaattaccattatcttaagtcatttttaaagatgttttagaaagctgaaaaagatgtgtttgcttatttataaaattactacatatataagaaattattgctgctttgaaaatttatatatatgtgtgtgtgtgtgtgtgtatatatrtatatatatatatatatatatatatatatatatatatatatatctgtcccacagaataaatattaatgtctcaggtttaccaaagttcagttcatgaacacaactgaaatgtcagctgtcctcagtaagaactgattcctgaatgtcaagtccccaagtaagtctgacttatgcactgtagataaaggcagcaggagagcagttagccttgtcaaaagacttcgctggcctcttaggtgctcatgataaggcgatacccttctgatctgtcattactttgagccatacattttaaaagttttcatgtaaagggtaccaagtgggaaagccattgcatctctttactttcttcaaaataatcaaagtctctaaaagctgaaacctgaggtacattctatctatgtttatgaaggtgaaaataagttcagaacattgcaagattgtgcttttgatgaagaattgcttcaccatttttagctccccttttctgcctttttaaaactttcagtcattttttttaatgttgagctctaaaccataaaagactatatgtttcttacatgcaaagccagtctatttcatattttaaagtctgattcccatcataatgttggcactttaagagtacagtactaattaatgtgttaatactcttatagtggaggaacgtttcttccactataagaaatgctcctagatagaagggctttcctatacaattttggatgtgttgtatgtctagtttatataaattttgtcaagagtgtagtgtgattgtttagaaataaaatatgaagttggattaattagatatcagtctcagttcctccacttgttaattacctaatcttaaatgatttaagtgcttttaacttcggattcctcaactttaaaatggggtgtcaatattcatttcacgaaactgtttttgtgttgtaacatatataaataaaacaatcaac

SEQ ID NO: 4364 - DNA, 1155 bp, Homo sapiens
taaggaaaggatgacttcatattgcattcaaaagctattcaagttaaattaccattatcttaagtcatttttaaagatgttttagaaagctgaaaaagatgtgtttgcttatttataaaattactacatatataagaaattattgctgctttgaaaatttatatatatgtgtgtgtgtgtgtgtgtatatatatrtatatatatatatatatatatatatatatatatatatatatctgtcccacagaataaatattaatgtctcaggtttaccaaagttcagttcatgaacacaactgaaatgtcagctgtcctcagtaagaactgattcctgaatgtcaagtccccaagtaagtctgacttatgcactgtagataaaggcagcaggagagcagttagccttgtcaaaagacttcgctggcctcttaggtgctcatgataaggcgatacccttctgatctgtcattactttgagccatacattttaaaagttttcatgtaaagggtaccaagtgggaaagccattgcatctctttactttcttcaaaataatcaaagtctctaaaagctgaaacctgaggtacattctatctatgtttatgaaggtgaaaataagttcagaacattgcaagattgtgcttttgatgaagaattgcttcaccatttttagctccccttttctgcctttttaaaactttcagtcattttttttaatgttgagctctaaaccataaaagactatatgtttcttacatgcaaagccagtctatttcatattttaaagtctgattcccatcataatgttggcactttaagagtacagtactaattaatgtgttaatactcttatagtggaggaacgtttcttccactataagaaatgctcctagatagaagggctttcctatacaattttggatgtgttgtatgtctagtttatataaattttgtcaagagtgtagtgtgattgtttagaaataaaatatgaagttggattaattagatatcagtctcagttcctccacttgttaattacctaatcttaaatgatttaagtgcttttaacttcggattcctcaactttaaaatggggtgtcaatattcatttcacgaaactgtttttgtgttgtaacatatataaataaaacaatcaac

SEQ ID NO: 4365 - DNA, 1155 bp, Homo sapiens
taaggaaaggatgacttcatattgcattcaaaagctattcaagttaaattaccattatcttaagtcatttttaaagatgttttagaaagctgaaaaagatgtgtttgcttatttataaaattactacatatataagaaattattgctgctttgaaaatttatatatatgtgtgtgtgtgtgtgtgtatatatatatatatatatatatatatatatatatatatatatatatatatctgtcccacagaataaatattaatgtctcargtttaccaaagttcagttcatgaacacaactgaaatgtcagctgtcctcagtaagaactgattcctgaatgtcaagtccccaagtaagtctgacttatgcactgtagataaaggcagcaggagagcagttagccttgtcaaaagacttcgctggcctcttaggtgctcatgataaggcgatacccttctgatctgtcattactttgagccatacattttaaaagttttcatgtaaagggtaccaagtgggaaagccattgcatctctttactttcttcaaaataatcaaagtctctaaaagctgaaacctgaggtacattctatctatgtttatgaaggtgaaaataagttcagaacattgcaagattgtgcttttgatgaagaattgcttcaccatttttagctccccttttctgcctttttaaaactttcagtcattttttttaatgttgagctctaaaccataaaagactatatgtttcttacatgcaaagccagtctatttcatattttaaagtctgattcccatcataatgttggcactttaagagtacagtactaattaatgtgttaatactcttatagtggaggaacgtttcttccactataagaaatgctcctagatagaagggctttcctatacaattttggatgtgttgtatgtctagtttatataaattttgtcaagagtgtagtgtgattgtttagaaataaaatatgaagttggattaattagatatcagtctcagttcctccacttgttaattacctaatcttaaatgatttaagtgcttttaacttcggattcctcaactttaaaatggggtgtcaatattcatttcacgaaactgtttttgtgttgtaacatatataaataaaacaatcaac

SEQ ID NO: 4366 - DNA, 455 bp, Homo sapiens
tctcctcttccttttctttttcttcctctcttcctctttcttcttttccactaagtagttctgtttctccattttctttcataacctcaatatcattatcatacctaacaaaattaataattctttaatattatttaagactgaacccatgttcaaactttcccaattgcctcaaaatggttggttcttaagcaaaaatctccaatcaatgtccgaaacatgaaataagagccattaatgaatcatccctctttttgcattaaacattagcttaagtcacactttcctcctccacaccaggtggtactgtatgaaaatactaaggttgacctttttgcraaatgtaattgtgcatgtaaatttaaaatggttatatttatcaatggctactaatggtgagtaaacaaggtataagcatgttagctgaaagaagagcttatttgaaatataaataa

SEQ ID NO: 4367 - DNA, 706 bp, Homo sapiens
catagtgatttagagcatagcctctatgatcaaaggaactgaatctttcctttaacttggaatgttgagccttgggtgatttacttaaccaccaaaatactatactcgatggcttagtttcctccactctaaaataaagctagtagccattcttagattcttgagttgccatgagractgactgaaaacatctaaagcatttcaaatagtgtctggcacataatacgttcatctttactttagcctttaaataacaatgtggaatagaacatgtaacatttgttatcgaaaaggatttttttctctctttttctaggattgtcaattcaaatccctgcaaaagtcaggcagacaatttgaatgaattgtattgtccaggtggtattttttaaaagacacttttgcatattaaacacatagggatatcattcatttccaccaaaatatatttccctatatttcatgtggccctctccaactacctggtttcccacacttcacctccccatcttttacagagtacaagggaaaaacaatcaacagttacacacactatgatgaaagggcaacagatacttggtctgagtttgagagaagctggagtgagaagagagaactggactgaagggatgctgaactgacaacatgtcactatgtcaaggtaacaaccactacacacccctaggcacttcatcctcacatgaat

SEQ ID NO: 4368 - DNA, 1241 bp, Homo sapiens
catctgtttgaggtatgtgagtatatgatgatcrtgattatgatgataacaaaatgactcattggatgcagagagatccgtaataaaaatgtcatgtgagaggcctgaactaatgtagtggcagaagataggcagatgcaaacataaagtacaggatgatttttaggagtcattgatgtcatcaatgaaggagaggaagctgttgacaaaaacaagtgatgcagcccaatgagtatcagaagcctatgtctgctagtgctgcgtaaaagctaaacatatttctttagcacctgctgcatgtttcacacagtggggcactagggggctgtgaatgtagttgcgtggcacatggttggcttcaggatgatgacactgtagctattagtctaaagagaattgaggatgcaactgctctagaaggaagtgggtttattatgtaactcattaagtcagtgattctcagccttctctgtacatcagaatcacctggggggattaaaaagctacacatgtggaatttacaacttctattcaactggtctgaagtggtctcaggtattgcccagatgtgaattcaaggtgtgaactacttcatgagcacactaattaataaaattcagcctccaaaatttctactcatttttccaaatgggtattgcctatttggcaacactttctttgcttacagagccagtctgccaccctcttcccaacttctgtagcactttgctcacatccttattaaaccaagtactgcaccatttgcctagctgtgccagaggtctgtccctttccctcactgagggcatagccagagatcagctggctgcagaggacagaaacctgaggacatttggaacttaactgcaaaaaagatcatggggcgttctaggcagtgagaaggcttgttttccttggagatatgtggcatctcttccctttaagcacctgcctcatcctttttgcaagttgtcactgggcacatcgtgaataagactgctccacagtgaacaagaaaacaggggcttcatctcctaattcactgtggggctgatacatggccagatatccattcctgatccaatcagctgaggccagggagacaaaacctgtgttgcttaaattcacttttccctagaaggcagaagagagcaggtctccaaaggagggcttatggctgggagaaagtgaccaatgccttgtcccatccacctccttgtcaacccagtttctagcccagg

SEQ ID NO: 4369 - DNA, 590 bp, Homo sapiens
aaatgttaaaatacccatttctgttttcctagaagtacaggaaggatgaaattatttttgatggagagagcatttagtgtctcagagagaagacaggacatcattcatcactttcatgatggtgagcctatagatcttactgtatttcttctgtcggttggccaggaagccggccagttgagttacaaaacatttctctttgaggtttctgaactgctgtttgttctctgccagctgggggcgcaatttctcgttgatttctaaaatgttcgtctctgccttctcgctggaccaagggccagctgataccaccatgctgacgtttgtggcagaagaggtggagccagggactggggagaagaaacccaaacatatgatgggttaaaaactggtgaaatcaaataggtttaatcaggactgagggatgtcagtaactgaaattcttaacttactgttgtgaaaaatgtgatcactccccacagcactttaggatccttcaccacaaaaacaaggttygaggtgcctgaactcagagctgaaagcactgccagtagctcagactctgataagagtgaggtagactgtggcca

SEQ ID NO: 4370 - DNA, 590 bp, Homo sapiens
aaatgttaaaatacccatttctgttttcctagaagtacaggaaggatgaaattatttttgatggagagagcatttagtgtctcagagagaagacaggacatcattcatcactttcatgatggtgagcctatagatcttactgtatttcttctgtcggttggccaggaagccggccagttgagttacaaaacatttctctttgaggtttctgaactgctgtttgttctctgccagctgggggcgcaatttctcgttgatttctaaaatgttcgtctctgccttctcgctggaccaagggccagctgataccaccatgctgacgtttgtggcagaagaggtggagccagggactggggagaagaaacccaaacatatgatgggttaaaaactggtgaaatcaaataggtttaatcaggactgagggatgtcagtaactgaaattcttaacttactgttgtgaaaaatgtgatcactccccacagcactttaggatccttcaccacaaaaacaaggttcgaggtgcctgaactcasagctgaaagcactgccagtagctcagactctgataagagtgaggtagactgtggcca

SEQ ID NO: 4371 - DNA, 608 bp, Homo sapiens
atgaataggtaagtagctaggtagatggatagatgatagagaaagagatttattttaaagaactggttcacatgattatgtaggcagagatgtttcaagatctatactcagcaagctagagacccaggagattacatggtgtagtttcagtacaagtctgaagcttgagaatcagcggggagcagatggtatagattccagtccaagtaaaagttcaaagggaggagaagactgatgttctagctcaaagacaatcatgtggagagagtgaattctcccttgctcaaacttctcgttctaawcaggccttcgacagattggataggcccacctacattgggaggacaatctgctttagtcagtctactgattgaaatgtcagtctcatccagaaacaccctcacagtcatactcagaataatgtttagccaaacatgggggcaccctgtggcccagtcaaggtgacataaaattaaccatcacaggtggtccagtgaattgtgatgttttcacaagcaggaagagaagaaatattggacttatagacatgcacagtgtgaggtggtcatggaatatccagttggaaacatagatttgagcccagaaaa

SEQ ID NO: 4372 - DNA, 1049 bp, Homo sapiens
tatagaattccctcccttcttatgtccgaaaacatgttatatcctttctacatcttcactgtattatttctcctctactgagcaatccttctcatctgtaatttaacttatatagtgctgcctccattatcttttgaaataataatagtgatcatctattcaaaaaaattactctcacctctttctgagcttgaatttaaccctttctttagtatgacaccacatttccttttttatcatatttattaataatttgtcttactccttgtcctgacatttacttccacaaaattccatttgcactagattgcaaaccatttaacagaaagaaccatgctattcaacttgatgtctccactcccccagatttttttaaaaaattattataatattaatcagattgcctgatgtttgtgaatgacatgtatgtttcattgactcagtacctaacaccttttccttttggatactcagtagatatttattgactgtaaaaatgaatgtgtgtctaagtgaagggaaacttcttaattatctactaggggtgcattgataatcagacacatactgttgcttacctctactcactcttgataaagcagcaggtgtttcttgataaagcagaaaatcagcaggtgcttcttttctgtgccaagaaaactctcrttgaaattcacaatgaattagagctttgtaatagtcaggaaaaaaaaaaagagaaatgtcacccataaaacccataataccaagcacgtggatccagatctagtttggctttcgggtttatgaaaatagttgggggtggataggtggataaagataatagaaagctcaaaataacacaatgtcttgggtcaaatgaaaatatatttctttgaaaatagggatgattatcacttaatttttagaggcccaccttgtctctagagtgtatagtgtgagtgtgtgtgtgtgtgtgtgtgtgtagtgaagggaggtgtaaaagaaaccaggacactgcgtttttaaactgttaccatcacatacttgttgtggtccttacagagaaa

SEQ ID NO: 4373 - DNA, 1049 bp, Homo sapiens
tatagaattccctcccttcttatgtccgaaaacatgttatatcctttctacatcttcactgtattatttctcctctactgagcaatccttctcatctgtaatttaacttatatagtgctgcctccattatcttttgaaataataatagtgatcatctattcaaaaaaattactctcacctctttctgagcttgaatttaaccctttctttagtatgacaccacatttccttttttatcatatttattaataatttgtcttactccttgtcctgacatttacttccacaaaattccatttgcactagattgcaaaccatttaacagaaagaaccatgctattcaacttgatgtctccactcccccagatttttttaaaaaattattataatattaatcagattgcctgatgtttgtgaatgacatgtatgtttcattgactcagtacctaacaccttttccttttggatactcagtagatatttattgactgtaaaaatgaatgtgtgtctaagtgaagggaaacttcttaattatctactaggggtgcattgataatcagacacatactgttgcttacctctactcactcttgataaagcagcaggtgtttcttgataaagcagaaaatcagcaggtgcttcttttctgtgccaagaaaactctcgttgaaattcacaatgaattagagctttgtaatagtcaggaaaaaaaaaaagagaaatgtcacccataaaacccataataccaagcacgtggatccagatctagtttggctttcgggtttatgaaaatagttgggggtggataggtggataaagataatagaaagctcaaaataacacaatgtcttgggtcaaatgaaaatatatttctttgaaaatagggatgattatcacttaatttttagaggcccaccttgtctctagagtgtatagtgtgwgtgtgtgtgtgtgtgtgtgtgtgtagtgaagggaggtgtaaaagaaaccaggacactgcgtttttaaactgttaccatcacatacttgttgtggtccttacagagaaa

SEQ ID NO: 4374 - DNA, 1214 bp, Homo sapiens
ttagtaatcttcctccactgtgtccctcctctgtcagtcctggtacaccacaagtatgtgcattttgagaataattcagatattgctaggcaagttcaggtagttagatgcaaagacagaagaaagggaacatttagcatggtgagttctccactctgtcctaggctcagagacattgatttatttattcctttttgtggacaaagaggtaatatagcttagtggttaagaaaatgcatcccagttctgatcatttctacctgtgtgatcttggccaagtttctctctgtgtcccagattctacatttataagatggaggtaatagtaggtttgaattaatgattaaatgagtttatgtatctatatttatattcacatttatatgcatatataacttagatattttctayatagaattggtactattttttaagttattcaataatagctagctataactgagaggaaatatgtattagaaaacaacatatcaacccatattagttatctaatgctgcattaaaaattactctacaatttaatgacttaaatcataataatcatttatatttatcatgattcctgtggaacttgagcatgggtcagcagagagattctaacctgggtgtgtcttgtgagattgttgtttaatgtcaactgctgctatagtcatctgaaggctggaagggagctgctgattcacttccaatgtaactcatatgcatggctgggaatatggtacttgctagttgagtggagacctcaatttctctccatgcaggtccttcagtgatgctgcttgagtgttttcacagtatggtagctggcttacccctagaaggagtgatgcaaaagaccaaggtgtactttatcatactttttatgacctagcttggaagattttctttcccactgaggacaattgaataccttcaactgaacagttgccttttgaatttatagtttaatgcttacaggacaattttatcaaaactgagagggaacaacccagtgttccctccatatgctgtggatacaccctaagcttttgttctgctctttcccatttttcttgtcttcaccgtaatttgtacctcatgccccacttgggtctctcagaagggatttattcccaaatttaatttctacttcctatggtaggagactgtagtctactactcttcaatccactcactcactaactcactcactc

SEQ ID NO: 4375 - DNA, 1214 bp, Homo sapiens
ttagtaatcttcctccactgtgtccctcctctgtcagtcctggtacaccacaagtatgtgcattttgagaataattcagatattgctaggcaagttcaggtagttagatgcaaagacagaagaaagggaacatttagcatggtgagttctccactctgtcctaggctcagagacattgatttatttattcctttttgtggacaaagaggtaatatagcttagtggttaagaaaatgcatcccagttctgatcatttctacctgtgtgatcttggccaagtttctctctgtgtcccagattctacatttataagatggaggtaatagtaggtttgaattaatgattaaatgagtttatgtatctatatttatattcacatttatatgcatatataacttagatattttctacatagaattggtactattttttaagttattcaataatagctagctataactgagaggaaatatgtattagaaaacaacatatcaacccatattagttatctaatgctgcattaaaaattactctacaatttaatgacttaaatcataataatcatttatatttatcatgattcctgtggaacttgagcatgggtcagcagagagattctaacctgggtgtgtcttgtgagattgttgtttaatgtcaactgctgctatagtcatctgaaggctggaagggagctgctgattcacttccaatgtaactcatatgcatggctgggaatatggtacttgctagttgagtggagacctcaatttctctccatgcaggtccttcartgatgctgcttgagtgttttcacagtatggtagctggcttacccctagaaggagtgatgcaaaagaccaaggtgtactttatcatactttttatgacctagcttggaagattttctttcccactgaggacaattgaataccttcaactgaacagttgccttttgaatttatagtttaatgcttacaggacaattttatcaaaactgagagggaacaacccagtgttccctccatatgctgtggatacaccctaagcttttgttctgctctttcccatttttcttgtcttcaccgtaatttgtacctcatgccccacttgggtctctcagaagggatttattcccaaatttaatttctacttcctatggtaggagactgtagtctactactcttcaatccactcactcactaactcactcactc

SEQ ID NO: 4376 - DNA, 1214 bp, Homo sapiens
ttagtaatcttcctccactgtgtccctcctctgtcagtcctggtacaccacaagtatgtgcattttgagaataattcagatattgctaggcaagttcaggtagttagatgcaaagacagaagaaagggaacatttagcatggtgagttctccactctgtcctaggctcagagacattgatttatttattcctttttgtggacaaagaggtaatatagcttagtggttaagaaaatgcatcccagttctgatcatttctacctgtgtgatcttggccaagtttctctctgtgtcccagattctacatttataagatggaggtaatagtaggtttgaattaatgattaaatgagtttatgtatctatatttatattcacatttatatgcatatataacttagatattttctacatagaattggtactattttttaagttattcaataatagctagctataactgagaggaaatatgtattagaaaacaacatatcaacccatattagttatctaatgctgcattaaaaattactctacaatttaatgacttaaatcataataatcatttatatttatcatgattcctgtggaacttgagcatgggtcagcagagagattctaacctgggtgtgtcttgtgagattgttgtttaatgtcaactgctgctatagtcatctgaaggctggaagggagctgctgattcacttccaatgtaactcatatgcatggctgggaatatggtacttgctagttgagtggagacctcaatttctctccatgcaggtccttcagtgatgctgcttgagtgttttcacagtatggtagctggcttacccctagaaggagtgatgcaaaagaccaaggtgtactttatcatactttttatgacctagcttggaagattttctttcccactgaggacaattgaataccttcaactgaacagttgccttttgaatttatagtttaatgcttacaggacaattttatcaaaactgagagggaacaacccagtgttccctccatatgctgtggatacaccctaagcttttgttctgctctttcccatttttcytgtcttcaccgtaatttgtacctcatgccccacttgggtctctcagaagggatttattcccaaatttaatttctacttcctatggtaggagactgtagtctactactcttcaatccactcactcactaactcactcactc

SEQ ID NO: 4377 - DNA, 1177 bp, Homo sapiens
ctgtgttctaactactcaagagaatgaggttagagtatcacttgagcccaggaggtcaagagttgcagtaagctatgatcatgctactgcactccagcctggacaacagaggtagactctatctccgaaataaataaataaataaataaataaataaataaataaataaatatgaagagtaacgttgccatgaacaaacgtgtacactgaaaattataaagattttagagcaacgagaagcttctggaaaaactggaataattaggggaaaataccaagaaaaaagtttatttgagtaggacttttatttaaaagacttttttgcaagtcatgctgaaacacgatcttaaaaacctacctaaatatcttcactaagtttggtgagccaagattaaaatcaattttcattcatttttcaggttaaaaccagccgtttcaaccagaatcaacacagtatatatttatatatgttaatacatgaataaaggactaactatatctttatacccttttaggctgtgaaataaaagccaaaatatgtgctatttacttacccatctccttaaactccataacccaattaaatctagctcttcttcatttgattcattcaaaaatatattcatgttatattttctgtcatttggccactgctctgggataaaaattaaaagataagagtttctcttctcaaaattcttactctctgaaatggggaacagaaaaacaacacatacagtagcaaaatagattctctatttaaaacagtcataaaytgctattggctcaaataatagagaaaagaaggttgaggatgtgtagaatttctgaaataaaatgctggagctgaaagaggcataaaaaataggcaaacagaaagactgttgacttgtttgaagaaaaaaagaactgtgcataatctaatcagtgagataatacagactagaccattcaaggaattgtaaacttcatattaaattagggttagggagctccaaggaatgatgaaatcttaactggagagataaacaatgctcaaatcttaaggagcttgtatactacactatactatactatgctatactacactacactacactatactacaatatactatactatactatactatactatactatactatactatggagttatactatattacagagttt

SEQ ID NO: 4378 - DNA, 1176 bp, Homo sapiens
aatagacaatccctcctctcatacagacaggaacatacacacagataaatatacaaaaattcaagacagttttctataggaggtgtatagtagagattgtatgataaccaacagagattagtaaaataaacttgaatatccttaatgcaatacatcacagtttttaagtaattttgtacttcttatttaactcttctaagtagagtacatatgaagcttcacttatatattaaacctacataactgttcttaaaattaaagttaaaataatgttaaatattggatgtttcagtcccagggttattttgatcatatataatttttatggatattattttttttaatttccctttaagtttttaactttgaaattattccaaatatggtgtgatatggtttggatatttgttctctggaaatctcatgttcaagtgtaattcccagtgttggaagtggggtctggtaggaggtaattagatcctgggggtggattccccaggaatggcttatcaccatccccttggtgataagttagttcttgctcagttagttcatgtgagacctggttgtttaaaagtgtgtggcacctccccctttgctctcttgctccagctcttgccatgtgagatgtctgctccccattcgccttccaccatgattgcaggcttcctgagattctcaccagaagcagacaccagcaccgcatttgtacagcctgcagagatgtgagccaattagacctcttttctttataaattacccagcctcaaatatttttatagcaacacaaacagcctaacatatggtgtttaaagtaagatgtaataaactaaaaaatttacactgtatgtaaaaaatgtgcattaagcaaaaatacttaacggtattaacattttgagaacaataaatttctcaaagcattattaacattgtcttaagtagtatttgtgttagactaatcattttataaatgttctaatgrcattgtcattctaataccattaaatttaacatatctatttaattgcactaacccactacttctaatatgtcttcagtattagttccagcttacgtgaggaaagtaacgttgatatatgatcatcattacacagccacaaaggctcacagcctacatataaacccagatacgtctattgtcaaatttcatgctgt

SEQ ID NO: 4379 - DNA, 724 bp, Homo sapiens
ttttagcctccagaactgtgggctttttaggccacccagtttgtgctattttgttatggaagtctgagaagactaatacactcatctctaccattcccacattatctaacacagggtttctcaacctcagtactactgactttgggggctagacatttctttgttttggaggcctattccccacactgaaggatgtttagcaacattcctggtatctacccaccaaatcccagtagctgtgtccctcccccatcccagttgtgacaatcaaaaatgtctcyaaacattgccaaatgttccccgaggagtaaaattgcctctagttgagaactactaatctaatataaaatgcttaaatagtggttaaccttatatcttggtatttaagtgacaggatctcaaagggggagtgtaactcagctagtagaaattaaacataatccaggatggataaagtagactgttttttttttgtttttttttttgagagttagttagcatgtcttcagtcctatgaaggacagttacaccttgttaggtggaagcatacttttacttctgtctttatttggaagctaaatatcgttataaggttataaggggcgtggacagatgtcaggttgacaaagggtggactgtaggggtttgtactgagtccatttggttaagctaggaactatgcttgacagaatccccttctcttcatggttccaacttaaacttg

SEQ ID NO: 4380 - DNA, 1056 bp, Homo sapiens
ttagcatcccagatctgccctaccagggtcttggtgcagtctctcttgctcccccatcctaaaacctgctcttgaaagagtggtaagtcatagtaactaacaatatgggtgtccactctcccctgtgtattacaaggattatagcctttagctagttggaggctcctcagggagaagtgctgtctactctcatacttcctccttccgggaatgcagcatcaggaaaaatcatttggaacaatataaagaaggagatttagccctaccacctaaattgaccctggcagttgagtaagataaaacattgcagtgaaattgcactcatggccaaaacgaagctctaactttggaatctggtttctatgcacagtgggcagtattgtattggatggggcagcaggcttcccagcatctgtgaagtcacgtcacctgggcaatagtctactatgcctctaccagccgcctgtggccaggagtgtcacaggctttcgataggttgcttggttcgagactcgacactcatatctcaccaaagcagacactggcactttgcactgggtttggggttccacctactgcaactgayatactgcagctaagcaggcatgaatcacctggggttttccccaatttcatagccttttgggagtacaagaccacatagactccaagtgaatggggttctaccttaaatctgagtagtttctaagcagtataaatgtatgactaattttttgttctttgtggtttttttttttttttttttgagacagggtctcattctgtcatccaggttggagtacagtggcatgatcttgactcactgcagcctcgacctccccagctcaagtgatccttccacctcagcctcctgagtagccaggaccacaggcacacaccaccgcacccagttcatttttttttattttctgtagagacagggttttgccatgttgtccaggctggtcttgaactcctgggctcaagtgatctgcctaccttggcctcccaaagtcctgggattacatgcaggagccaccatgcctggcactagtt

SEQ ID NO: 4381 - DNA, 1056 bp, Homo sapiens
ttagcatcccagatctgccctaccagggtcttggtgcagtctctcttgctcccccatcctaaaacctgctcttgaaagagtggtaagtcatagtaactaacaatatgggtgtccactctcccctgtgtattacaaggattatagcctttagctagttggaggctcctcagggagaagtgctgtctactctcatacttcctccttccgggaatgcagcatcaggaaaaatcatttggaacaatataaagaaggagatttagccctaccacctaaattgaccctggcagttgagtaagataaaacattgcagtgaaattgcactcatggccaaaacgaagctctaactttggaatctggtttctatgcacagtgggcagtattgtattggatggggcagcaggcttcccagcatctgtgaagtcacgtcacctgggcaatagtctactatgcctctaccagccgcctgtggccaggagtgtcacaggctttcgataggttgcttggttcgagactcgacactcatatctcaccaaagcagacactggcactttgcactgggtttggggttccacctactgcaactgacatactgcagctaagcaggcatgaatcacctggggttttccccaatttcatagccttttgggagtacaagaccacatagactccaagtgaatggggttctaccttaaatctgagtagtttctaagcagtataaatgtatgactaattttttgttctttgtggkttttttttttttttttttgagacagggtctcattctgtcatccaggttggagtacagtggcatgatcttgactcactgcagcctcgacctccccagctcaagtgatccttccacctcagcctcctgagtagccaggaccacaggcacacaccaccgcacccagttcatttttttttattttctgtagagacagggttttgccatgttgtccaggctggtcttgaactcctgggctcaagtgatctgcctaccttggcctcccaaagtcctgggattacatgcaggagccaccatgcctggcactagtt

SEQ ID NO: 4382 - DNA, 1056 bp, Homo sapiens
ttagcatcccagatctgccctaccagggtcttggtgcagtctctcttgctcccccatcctaaaacctgctcttgaaagagtggtaagtcatagtaactaacaatatgggtgtccactctcccctgtgtattacaaggattatagcctttagctagttggaggctcctcagggagaagtgctgtctactctcatacttcctccttccgggaatgcagcatcaggaaaaatcatttggaacaatataaagaaggagatttagccctaccacctaaattgaccctggcagttgagtaagataaaacattgcagtgaaattgcactcatggccaaaacgaagctctaactttggaatctggtttctatgcacagtgggcagtattgtattggatggggcagcaggcttcccagcatctgtgaagtcacgtcacctgggcaatagtctactatgcctctaccagccgcctgtggccaggagtgtcacaggctttcgataggttgcttggttcgagactcgacactcatatctcaccaaagcagacactggcactttgcactgggtttggggttccacctactgcaactgacatactgcagctaagcaggcatgaatcacctggggttttccccaatttcatagccttttgggagtacaagaccacatagactccaagtgaatggggttctaccttaaatctgagtagtttctaagcagtataaatgtatgactaattttttgttctttgtggtttttttttttttttttttgagacagggtctcattctgtcatccaggttggagtacagtggcatgatcttgactcactgcagcctcgacstccccagctcaagtgatccttccacctcagcctcctgagtagccaggaccacaggcacacaccaccgcacccagttcatttttttttattttctgtagagacagggttttgccatgttgtccaggctggtcttgaactcctgggctcaagtgatctgcctaccttggcctcccaaagtcctgggattacatgcaggagccaccatgcctggcactagtt

SEQ ID NO: 4383 - DNA, 1155 bp, Homo sapiens
gcatctctaacgcagaacctccatacgtatctctaacgtagaacttccatacgtacctctaatgtaaatatccacaacataagatctagaagacagtgcacccagctattggcagtggcgtctggggaggggctggggggactttgtttcctggctgctgtctgggctcctgcccccaccccacctgccccgcctccacgtgcaccaggcaggtacctctgggatcacatactggccagccatgagcagtgcccccagmaggttctcacggccgtcgctccacagggcatggatgggcacctgggggagaggccacggagtagctgaggcctgggaagcccagaagcctgggatgtctggctcatctctccaggtaaacccccaggcccagcccaggagccccaggcgggtgtgggaaagagaaggacaggcgggcttggactgcagcaggcagcctggagatgggtgccttgggggaacggggcactcagaggagctgggcagtaagcctgtctccaaggccgccaacaacagctgtccctgcagacgatgccagcctgcacccagggcctcaacccacccaccaacagctgtggctgcagaccatgccagcctgcacccagggcctcaacccacccaccagctccctctacaggtccaagagcccagtgctggcagcaggggccagccggtccccatactggagaacgcatcacaggcctcccaccgcagctgccctgcccagctccctcgctaccccagcagaactatgggctggaaggagggtggtgggggtgaggggtgggtgggctgtgacagaaaggaactgcctcgggatgccaggcacagtacagctcctcccacagctgcctgtgtctagcatgggcgactgtgctatggttgactgaacagcgcgtcccaggagggcgcaggtggcggtgcagaggccagggttttcaggaggaggcggccgggaagtggtcagtcagaggctctggagggagagagccctggcagggggtggcagtcctgggtcctgggtgctccctggctcagccctcacgtggtacgtggctgtgggtgagcccctagcctgtaagcctcagtttccccacaggtataacagggataaggatgtcccggcacaggccaaca

SEQ ID NO: 4384 - DNA, 689 bp, Homo sapiens
caaaatctactagtgagaaaaaccagaaattgtggtcttctatagagagtgagaaagatttggttttgaatctgggtctggccatgcagatgactctgggcaaattaatttctctaagccataatgtcctcatttgtaaaaaggatatacygatatctgcttgataggtatcagtttcagttagaactaaatgagtttttgtatatggaatgactcgtactatgtcaccccgcagaggacaagtattcaataaacaccgttaggtgcagagctcccccaacattatagcctgtattcacaattaatgttatctgtgaatgaataaaaagtgtcaaagcagccagagaaaaccatgaaatcctcctgcataaaaataacaacagcccctccaaatacaagacttctttagaagggataagcatagtggaaaagaatgctacttgtcagcagtagatatgagcttggctctttgctttgtcactagcagaatgactatgaaaacgtctaaatatgaccactgccctgctgcatgacatatagaagcctgagacacaaaatcctctaaaaattatgaagaatgattcatcctgatccctcataccagtaaagagtttcaagtgaagataaagaagaacgagggtatctggcctgtgatacctgcagaattcacaatgtttagggattagtca

SEQ ID NO: 4385 - DNA, 2439 bp, Homo sapiens
caacttgcatattatttcaggggagtttaaagcctgcccctctttctccataagagacatccataaattccacattaaaggaccattctctacagaaaattatttgtttggcttgttctttcttttcatctctatctccctctcttccatttctcaattaagtatcatttttttcatggtctgaataggaatcttaacaataacaatagctatgatttaaaaaaaaatcaaattctgtgtgtcaggacattctatacattaatgcttataataacgctagcaggtggctattattatcctgctatttttagatgagaaaactgagactctaaaagattgttattttaagttaagaacttctaagatcaaaaccagattcaaattgtggctgactggcatgatattttttaaacccccaggtgattcgattgtgcagcaagggacctggtgttgagaactgctgtctgaaagactgtttctaactgtcatatcccctgcctaccagactggtaatgcagagaagtcaacacatctgcatgattgtggggttaccaggagaggggctcttgtgtgttatatcctcagtctggtcattgtgtgagtgatgattttaagcactcatttgcatacttgaacactaatgtgagcattaatttatgtgagtattaatcaacgtggcagggagaggaaagaacgtggccaatgagcagtcctgatggaagctgtacaaataccagcgaagctggcactccttagggctaggtgaacacatatggtggcctcagatctgctcccctctgccagacacactcatctgggcttgtcacaatctaggtcctacactccaaggaatgaaccaagggtgtgcctttgtcaaggctggaaagttatctcagggagggcctgtctctcaatacatactttatagccacaggtcaagaattaagagggttacacagtagagcatcatggctaaaagccagtgatgggaaatgcagtgaaacccaggtttaaatcctgcctccatcacttaccagctgtgtgtctttgaacaagtctcctaatctcttgaagcctcagtgtcctcattataaaatgggagtcatgggaaatctgggggaattcaatgagttcatgcataaagcacttagcacggtgcctagccaaggtatccagtaatgttaattattacttttacacatcacaatagctacacacctaccatgtcttaactctggttccaatgctgttcatgtcactcattcaaactctagtgagatgtgtaagagcaaaagatgcagaccttgggcctcaagtttgtacaataacacagggtgagccaacacagagaagtcaaaccaatggagttacaagtaggtcgatggccatctaactgcagtcagcttgcaaggaaggacagtttgaggtgagacagatttacaactgaggcctgcacatcaaggagcattcaggatctcaggcccttctcactcataatactaagttttcccatgagaacaatagcatgttagtgttggatggaatcttcgagatcttacgcaagatgctcaatgtcaaattaaggaaaccaaagcccagagatcaaggagctggcccaaggcttcacactggtaggcggcagtccaggagtggaacttgggcttcctgagctcagagtcaatgttgtttctgtgacgccacattgtgcctcattaaacatgggaattactgattagaattgacagtgctagtcatttatgttcattctaaccgctgggaatgtattatctatgtgccaagataaaaagaacagtctaattaggcatttagaaaatttagaactcagaatttagaggttaagtgctggatgaggttctgctcctcattagctagggaatcatttgactcctttgagattttctatcttttaggatagaaggtggcaaactttttctgtaaaggggcagkcagtaaatatttagactttgcaggccatatggtctctgttgtaactagtcaactctgctgctgtagcagcaaagaagccacagacaatacataaacaaattgacacagctgtttccagtagcacgttacttaaggacacttggattttatttaattttcacatgtcatgcaatattcttcttcttttgaattcttttcaaccattgaaaaaatgtaaaaaccatttgtagtttgcagactatactaaaataggcggtgggcctgatttggtcctctggctatagtttgccaacctctgctctaggaataaactcagcaatatctgctccaatttgccaactgtgaaatgttttgcaagtaaatatattaattatataagaatagggaagccctggtttgactgtagtttgaagaaaaaacatctaaagattttagtgacacacaggtaacgcaaccaagaacataaagtag

SEQ ID NO: 4386 - DNA, 532 bp, Homo sapiens
gggaacaacagacacgggactactaaggcagggatgcagggcaagggctgaaaaactatcttttgggtcctatgcccactacctgggtgctgggcacagtcgtatcccaaacctcagtgtcacacaaaatatccatgtaacaagcctgcacacatatccccaaatctaaaacaaaagttgaaatgataatttttttwaaaaaaaaaaagacctgcatatgtatcccagaacttaaagtataataattaaaaaaaataaaaataaataataaaagagggaaaaaaggagaaagaaattccactggcattgagattaaaaacttaataaactggaaaactatacatatatagaaaaaaggagacctgcctccccagctctgcctgccactataccctgagtttatgactcgcccaccccactagagagcacttagtttctttcctaaaatatagttattcctatagtgttttaaaaatttaataccccatgatacgagataaaactgtgctaccgacagggttctctggaagcc

SEQ ID NO: 4387 - DNA, 532 bp, Homo sapiens
gggaacaacagacacgggactactaaggcagggatgcagggcaagggctgaaaaactatcttttgggtcctatgcccactacctgggtgctgggcacagtcgtatcccaaacctcagtgtcacacaaaatatccatgtaacaagcctgcacacatatccccaaatctaaaacaaaagttgaaatgataatttttttawaaaaaaaaaagacctgcatatgtatcccagaacttaaagtataataattaaaaaaaataaaaataaataataaaagagggaaaaaaggagaaagaaattccactggcattgagattaaaaacttaataaactggaaaactatacatatatagaaaaaaggagacctgcctccccagctctgcctgccactataccctgagtttatgactcgcccaccccactagagagcacttagtttctttcctaaaatatagttattcctatagtgttttaaaaatttaataccccatgatacgagataaaactgtgctaccgacagggttctctggaagcc

SEQ ID NO: 4388 - DNA, 646 bp, Homo sapiens
cttgattcatcttgccaatgtctcttaagtttattattaagattctcctattgatttaaataagaaggaacctcagaagggagaactataaaggagaaaaagaaaaccctaagagatgcaataaataattatccagattattctaatttatcagacctacataattctatagtattatacaagcacacattgtataatattatagtattagacaatcctctgccttggtaccactattgtcccatcaagtcctgagaaaatgagagaagatttcaatgagagctgaacctcctgttacattactatgatcctatagtattatgtaaatgtaatcctatagttttatagttatgtttccataaatattcatggacacatagggaaaaatttccttttggtaacatctatgaggtttagacttttcttggtgtggcacttgctgtgagttgtctacttgttatatgttctctttctttcttactaagagaaatctgagttttttcagagcaataggccccgttaaatattcagtttctcagtgtgtcttacagctaaytggccaggggacacagttctgaccaatataaagtaagcagaagtctgtgatgttgtcttttccccttcctccttccttttgcctgggatg

SEQ ID NO: 4389 - DNA, 646 bp, Homo sapiens
cttgattcatcttgccaatgtctcttaagtttattattaagattctcctattgatttaaataagaaggaacctcagaagggagaactataaaggagaaaaagaaaaccctaagagatgcaataaataattatccagattattctaatttatcagacctacataattctatagtattatacaagcacacattgtataatattatagtattagacaatcctctgccttggtaccactattgtcccatcaagtcctgagaaaatgagagaagatttcaatgagagctgaacctcctgttacattactatgatcctatagtattatgtaaatgtaatcctatagttttatagttatgtttccataaatattcatggacacatagggaaaaatttccttttggtaacatctatgaggtttagacttttcttggtgtggcacttgctgtgagttgtctacttgttatatgttctctttctttcttactaagagaaatctgagttttttcagagcaataggccccgttaaatattcagtttctcagtgtgtcttacagctaactggccaggggacacagttctgacmaatataaagtaagcagaagtctgtgatgttgtcttttccccttcctccttccttttgcctgggatg

SEQ ID NO: 4390 - DNA, 646 bp, Homo sapiens
cttgattcatcttgccaatgtctcttaagtttattattaagattctcctattgatttaaataagaaggaacctcagaagggagaactataaaggagaaaaagaaaaccctaagagatgcaataaataattatccagattattctaatttatcagacctacataattctatagtattatacaagcacacattgtataatattatagtattagacaatcctctgccttggtaccactattgtcccatcaagtcctgagaaaatgagagaagatttcaatgagagctgaacctcctgttacattactatgatcctatagtattatgtaaatgtaatcctatagttttatagttatgtttccataaatattcatggacacatagggaaaaatttccttttggtaacatctatgaggtttagacttttcttggtgtggcacttgctgtgagttgtctacttgttatatgttctctttctttcttactaagagaaatctgagttttttcagagcaataggccccgttaaatattcagtttctcagtgtgtcttacagctaactggccaggggacacagttctgaccaatataaagtaarcagaagtctgtgatgttgtcttttccccttcctccttccttttgcctgggatg

SEQ ID NO: 4391 - DNA, 1626 bp, Homo sapiens
ttccagcttaatgtaaagcacatacacgtgtgaattgatcaattgtcatgttaattccagatactcaagagagagccctaaaggtttatctgacagaggtctctaggatgaggcatgtttgaaattaagctggaagtggagacacttcccaagtatctgaatgcagaaccttatttggcttattggatatttaagaccaatacagggggtattaatagtattgtttagtgtgacttatgtaagtagttgtctcattcaacatgtttctttaaatgtgcagaaaatagtgcctgatattcctctccaaaccaacagcgtaactttgcagttggtcagctgccgtcacagccctatattcagaatgtccaaagtcatcctttctatgacatcaacacccactgtctccgcgtaagagaatgggagctatgacattttgcacaagctgttgtttaaattcaatccaaatccctcgcatttgaaatggaagcttagcaatttgtcttcgtgtgttctcaaaggaattacgaaagagatgttctcaaacgtttcttattctttggattagaaaagaacacttgccttgggagctttgagtctctagcaacttgataaagaaacttggaaaaagtttaaaatctctgactccaggctgtactgtttgcttctcaagccaggtgtttgaaacttttcaaaaaggaatgtgccattatttttcataaaatccacatttatttaactggtgcttcatgatggaaatctaactagaaatagcattccaaaatgtagtattttttattgttttcagaagtgataccataaaagttaatgttcactaagattttgatataaaaattatatgataaatattgaaattcactggagccaaactaaaaacagtctgccctttttatctcagtagtgaactttagggggttttttgcatgtattttcataagtgcctttaaataaagacacggcatccctttaaaatttagtttacattaatgtaaaccagaatattctcaggtcacaatgcagttttatatttgatttgtaggaaataaatctctagcctgaaagacattccagctgttgcctgtcttcatgggaggattgttcacattttctgaatctctcccagtgactgcaggaagaccaaaggctgcacattgcttttatgcaaggatgaatttttttaaaagatgattttggattttgtttgctttaatgaatttaagccctatctattagaggtaaatgtcaagaaaactgttgtgttctttggctatctgctctgctgactcccacagactttgatatgattcatataactcaaaccatgatcaggtttgtgacgaccatatttacaatatcgttggagatcaaaaatagcatctcacaaaagtttccccgtcctataccttcccacatcttatcatggatcatgtgcagcacagtcactcaattggcgaacatttattaacggactactgcattcacagtattatagtaggcatgtgaggtcctccyctgatgggatcctcaagtgagatatgctgctggcatagagaacccaagggcctttatggaccctggcttttgtttgcttgagcttttattcaaaca

SEQ ID NO: 4392 - DNA, 588 bp, Homo sapiens
catacaagaagctaataatacactttgagcaatttttaaagaaattaatactcttgcgcataattaagaaccctgtggctatttaattgttgctcttctcattagaccctgccctgctccctgcagataccccatgctctcatatttgttccctcttgccaggaccttctcctggggctgcctgcctataatttaatcaagtccctcgtccatattttatattttatatatttttctgccacccctaggaagagttgcttcctgaatcattcattgaactaatatttactgtaaccttatgctgtctctgactctgtcctatgtgcttactagaaagatgagtctttgctcttayggaattctagtgtcttaatcctttggagtattcttaagttattttggtaaactaatttatactataatatcagttgcaaacattggagtaaatgatatttaccccccagataatacccaatgacaatccactaagtaaacatttattgaacgcctaacaggttgtaggaatacaaagatgaatggggttctgtcccatattctcataatctacaggaggagattgatacctac

SEQ ID NO: 4393 - DNA, 588 bp, Homo sapiens
catacaagaagctaataatacactttgagcaatttttaaagaaattaatactcttgcgcataattaagaaccctgtggctatttaattgttgctcttctcattagaccctgccctgctccctgcagataccccatgctctcatatttgttccctcttgccaggaccttctcctggggctgcctgcctataatttaatcaagtccctcgtccatattttatattttatatatttttctgccacccctaggaagagttgcttcctgaatcattcattgaactaatatttactgtaaccttatgctgtctctgactctgtcctatgtgcttactagaaagatgagtctttgctcttacggaattctagtgtcttaatcctttggagtattcttaagttattttggtaaactaatttatactataatatcagttgcaaacattggagtaaatgatatttaccccccagataatacccaatgacaatccactaagtaaacatttattgarcgcctaacaggttgtaggaatacaaagatgaatggggttctgtcccatattctcataatctacaggaggagattgatacctac

SEQ ID NO: 4394 - DNA, 1276 bp, Homo sapiens
accaggtatagaaaagtgacagtcattcactgcaaaatactatctgcagatgtgtcttgtttagccaagagtatttgcaaatgattttaaatttgaaacactttggccgggcacagtggctcacgcctgtaatcccagcactttgggaggccaaggcaggcggaccatgaggtcaagagatcgagaccaaactggccaacatggtgaaactaaaaatacaaatacaaaatactaaaaatacaaaaattagccgagcgtgttggcgggcgcctgcagtcccagctactcgggaggctgaggcaggagaattgcttgaacccgggaggcagaggttgcagtgagcagagattgcaccaytgcacttcagcctggtgacagagcaagactccatctcaaaaatagataaataaataaattaattaatttttaaaaaattaaatagtttaagcaggtcaacaggcattctagttttgacacccctccatccttccctacccaggtccccagcaggccctctactagccctggtggtgccttaccggaaactcaactaaagcacctgctctgggaacatgcagccccaaggcacacagctgttggaaaagcaggattgggattgtggcccctcctttctactgtgtcttgacattttgtgagatttaaaaattgcacatacttgcatagaaattcttactacggccctgtacattatcatgtttcacattgatatgaccggcttggctcctgaagcctttcattattgactctgaaatagaattaggctccatctttaggacattgtcataagcatagtctaatgtaaagaaatgtaaattggccagtaggtggtttagtttggaaagaatactgaattacttgactttttccttcctaacaccaacatcaggaatatacagaatttaatggtgagaggaaaattaactccatatgaggaaatatggcaaagagattatgctgatgggacctttgttagcatatttagttagaacagagtaaataatacctgctaaatcaatgccattttaaaaagacttaatttatatacaaagacttattttaaagataatttgatagttttccttttctttgagaaaaataagttggatacttgtctaggagagtatggaagacaaattttgttattgattactcctgggtatgagacagtgaggaaaaagaactgatttcacatcttcttttgcctctgctcttccttgctgctgatcattgttatatgatagtgcaatggtataag

SEQ ID NO: 4395 - DNA, 1276 bp, Homo sapiens
accaggtatagaaaagtgacagtcattcactgcaaaatactatctgcagatgtgtcttgtttagccaagagtatttgcaaatgattttaaatttgaaacactttggccgggcacagtggctcacgcctgtaatcccagcactttgggaggccaaggcaggcggaccatgaggtcaagagatcgagaccaaactggccaacatggtgaaactaaaaatacaaatacaaaatactaaaaatacaaaaattagccgagcgtgttggcgggcgcctgcagtcccagctactcgggaggctgaggcaggagaattgcttgaacccgggaggcagaggttgcagtgagcagagattgcaccattgcacttcagcctggtgacagagcaagactccatctcaaaaatagataaataaataaattaattaatttttaaaaaattaaatagtttaagcaggtcaacaggcattctagttttgacacccctccatccttccctacccaggtccccagcaggccctctactagccctggtggtgccttaccggaaactcaactaaagcacctgctctgggaacatgcagccccaaggcacacagctgttggaaaagcaggattgggattgtggcccctcctttctactgtgtcttgacattttgtgagatttaaaaattgcacatacttgcatagaaattcttactacggccctgtacattatcatgtttcacattgatatgaccggcttggctcctgaagcctttcattattgactctgaaatagaattaggctccatctttaggacattgtcataagcatagtctaatgtaaagaaatgtaaattggccagtaggtggtttagtttggaaagaatactgaattacttgactttttccttcctaacaccaacatcaggaatatacagaatttaatggtgagaggaaaattaactccatatgaggaaatatggcaaagagattatgctgatgggacctttgttagcatatttagttagaacagagtaaataatacctgctaaatcaatgccattttaaaaagacttaatttatatacaaagacttattttaaagataatttgatagttttccttttctttgagaaaaataagtyggatacttgtctaggagagtatggaagacaaattttgttattgattactcctgggtatgagacagtgaggaaaaagaactgatttcacatcttcttttgcctctgctcttccttgctgctgatcattgttatatgatagtgcaatggtataag

SEQ ID NO: 4396 - DNA, 2213 bp, Homo sapiens
tgcatattcagtgacattgaaggagttttccagtgtctgatcaacttttgagtgggatgtgggtagaaagcaagttagtattgagttctttattctaattcatttctctatcaatgtgtttccatttgttttggagaaacaaacagaagtagaggatggcaaacactggaatctcctttctaacaccagagggcctccaaacaaaatkttcagtgaattaaaagaaatagaattctagtcattgaaaactccaccttctaatctttggatgcaaaatgtcttcatttttcgattggctccatctttctttcatacattcaaatttattcgatctttaagtagtgaaaaatacataaagagaatattgaagaaaaaaaattcaacctcatttattacaccaaaattggttttaggtagatgctttaaaacaattttaggaaatggaatgccattctaagcaggatatgaattcaaagagtggtaatcagcaataattatatctggatagtttgtcagagtttgtgggggtaaagatttttcctaacttaggccttcatgtccttgtatccccctgtctttcttgctccacacttttcttcacttaagtcctacagaactatttatactttccatcatccacatgagtcattttccctcttcaaagtatttccatctacgccacttctttaactccatagttatctgtcttgactgcatatttgaccagctaaataatttctatcccatgtgcaaaatgaaaatgagggatctcttgttgaacaagtactaagaatttcaaaaggacactagcagagcagaaaacccaaaagcagagtcctttgaaacgttgggccctgtaccacagcacaggtcacgtccccatgaatctggcccaactgcacgttataatcacataggaagttgttttttgctttgtttcatttttaaataatgatgctaaggtagtgctcagatgcattagatcagaatttctgggggtaaggcccagacctcagttttgtaattttaattgcattttaattgtaaaaaatttaagtttattttaattttaatgtgtagccaaggctgggcaccaaattcaaaggctatttccttgtgacttggcatatacttacctatttacttttctatctctctcatgagaccattgagttccttaagagtagatatcatatctttttagccttttcatctttatgacatagaacaacacctggaacattttagatatctattaaatagattatactgaatgaatgattaaatagatactaatatgacctcatttttaattttacagggtgtaatcaagaaaaaaagaaagtaaaggcagacttattggatgataatttgaaagtgtaaagagaaaacatactcttagaaaaaatgtaataaaatatttgagaaattagatctaaatttactttttaaatgaagggtattgagagatacaatagtcccctcaattctgtgcttaaggggaaaattatcttatttacactattactcattaaactttcagagttgaggaaaagcaagaataaggaaaaaagatgggagaatgtttacagaattaaggaaatatgatgtttctcaatatgtgtgtaatacagttgaataataggagaataaatttgtggtagaagattccttctcaaagaacgacatggcttgtgaatggtactagaactggaaaataatgagccattattagcactagttttgtctgatcaaattaatagaataaatgtaattgctcataagcactagtaaagaacaatcttaagcatttgctagttttaaataatttggtccagattttaacatagcatacattttccattatatgattgtgctagatgtttacacataatgtaagagtatggcacatataaatagcccattattatgttgtgtttatagtatatcatagcaatttgaggacacatgacatgtctcatttttttctttttggtacagcgtttggcaaactaagttcagagggctagatacatgttttttgtattttctcttttatttaggtaaaacttacatgatgcaaaattcatcattttcaccaaagtatgtaattcagtggttttcagtatgttcacaatattgtgcagatatcaccactatctagttccagatcattttcataacccctaaagaaaactctgtatccattaatc

SEQ ID NO: 4397 - DNA, 1305 bp, Homo sapiens
ggaatagatgaaagaaggaattttgcaaatggtatttattgtttaaggtatattttaaagctaaatctaatttttgtgggaaatttatatcatgagacccttgtattttgattatttggctactaataaaaatactatgttttgaatgacttgatttcaatccgaattaaaaattgaaagggcaaatctctcctaattttgggggtgatagccagggaagtgacgggaatcaggcacaaaggactctagatgtcccaaactcacattttatatttttgtttgagaattgtcatctcaattgaaatttctaaatttctatgatgaggttgcaaatttactcccattgtatttagatggcaaaaaaaaaatttagcttagctcttatataattgatttgttcttctcccatgggttcctctctgaaattacaggaaagtatactattaaatatactcacactcaggtacacatacacacacagacacacactgcacgtgtagtattgtgagacttgagaaacttagaatggccaaatgatttgcatcattagtttatgcaatccaatctgttcatgacatttcagtatttcatattcaaatatttcctctgactctttccaatatagtatctgtgtatgaaagtttgtataatcatgtcttggggaatgtatactggctagtgttttcagtgaagatgttgggcaaaacctattcttgggcattctgcaggcaaagttggtggattctgcaatctgtaatctggtttcccagaggagtcacatcacctcaccttggctattgccagcattttatattcccatagttctgacccaaattatctgtcctgcagcttttagtttcagggtagcttcacacttacttcagcaaaatccccagcgagcttgactaacagcaccctcagatttcatacattcttccatagagcacagaacaacttctgaatgccatttatgtgacacaggaactgaaagaggccctacctagcaaaacatgaaggggagcacagcatgtcctctctctaccttcttgaaaatcttcacccttcatttcacaatgctactggatgtttggagtcagttttctctgtcatttttctacaattcacaggagcagaagagakgtcctgccttttggccctttttcctagtggagatgctcataaatatctcatactgcatgtctaaaataatatgcatgttctgtctttttcccatatctgccataaagaaactagattgttatttttatttttgacacataatatttgtatatatttatgggctcc

SEQ ID NO: 4398 - DNA, 1305 bp, Homo sapiens
ggaatagatgaaagaaggaattttgcaaatggtatttattgtttaaggtatattttaaagctaaatctaatttttgtgggaaatttatatcatgagacccttgtattttgattatttggctactaataaaaatactatgttttgaatgacttgatttcaatccgaattaaaaattgaaagggcaaatctctcctaattttgggggtgatagccagggaagtgacgggaatcaggcacaaaggactctagatgtcccaaactcacattttatatttttgtttgagaattgtcatctcaattgaaatttctaaatttctatgatgaggttgcaaatttactcccattgtatttagatggcaaaaaaaaaatttagcttagctcttatataattgatttgttcttctcccatgggttcctctctgaaattacaggaaagtatactattaaatatactcacactcaggtacacatacacacacagacacacactgcacgtgtagtattgtgagacttgagaaacttagaatggccaaatgatttgcatcattagtttatgcaatccaatctgttcatgacatttcagtatttcatattcaaatatttcctctgactctttccaatatagtatctgtgtatgaaagtttgtataatcatgtcttggggaatgtatactggctagtgttttcagtgaagatgttgggcaaaacctattcttgggcattctgcaggcaaagttggtggattctgcaatctgtaatctggtttcccagaggagtcacatcacctcaccttggctattgccagcattttatattcccatagttctgacccaaattatctgtcctgcagcttttagtttcagggtagcttcacacttacttcagcaaaatccccagcgagcttgactaacagcaccctcagatttcatacattcttccatagagcacagaacaacttctgaatgccatttatgtgacacaggaactgaaagaggccctacctagcaaaacatgaaggggagcacagcatgtcctctctctaccttcttgaaaatcttcacccttcatttcacaatgctactggatgtttggagtcagttttctctgtcatttttctacaattcacaggagcagaagagatgtcctgccttttggccctttttcctagtggagatgctcataaatatctcatactgcatgtctraaataatatgcatgttctgtctttttcccatatctgccataaagaaactagattgttatttttatttttgacacataatatttgtatatatttatgggctcc

SEQ ID NO: 4399 - DNA, 1305 bp, Homo sapiens
ggaatagatgaaagaaggaattttgcaaatggtatttattgtttaaggtatattttaaagctaaatctaatttttgtgggaaatttatatcatgagacccttgtattttgattatttggctactaataaaaatactatgttttgaatgacttgatttcaatccgaattaaaaattgaaagggcaaatctctcctaattttgggggtgatagccagggaagtgacgggaatcaggcacaaaggactctagatgtcccaaactcacattttatatttttgtttgagaattgtcatctcaattgaaatttctaaatttctatgatgaggttgcaaatttactcccattgtatttagatggcaaaaaaaaaatttagcttagctcttatataattgatttgttcttctcccatgggttcctctctgaaattacaggaaagtatactattaaatatactcacactcaggtacacatacacacacagacacacactgcacgtgtagtattgtgagacttgagaaacttagaatggccaaatgatttgcatcattagtttatgcaatccaatctgttcatgacatttcagtatttcatattcaaatatttcctctgactctttccaatatagtatctgtgtatgaaagtttgtataatcatgtcttggggaatgtatactggctagtgttttcagtgaagatgttgggcaaaacctattcttgggcattctgcaggcaaagttggtggattctgcaatctgtaatctggtttcccagaggagtcacatcacctcaccttggctattgccagcattttatattcccatagttctgacccaaattatctgtcctgcagcttttagtttcagggtagcttcacacttacttcagcaaaatccccagcgagcttgactaacagcaccctcagatttcatacattcttccatagagcacagaacaacttctgaatgccatttatgtgacacaggaactgaaagaggccctacctagcaaaacatgaaggggagcacagcatgtcctctctctaccttcttgaaaatcttcacccttcatttcacaatgctactggatgtttggagtcagttttctctgtcatttttctacaattcacaggagcagaagagatgtcctgccttttggccctttttcctagtggagatgctcataaatatctcatactgcatgtctaaaataatatkcatgttctgtctttttcccatatctgccataaagaaactagattgttatttttatttttgacacataatatttgtatatatttatgggctcc

SEQ ID NO: 4400 - DNA, 1305 bp, Homo sapiens
ggaatagatgaaagaaggaattttgcaaatggtatttattgtttaaggtatattttaaagctaaatctaatttttgtgggaaatttatatcatgagacccttgtattttgattatttggctactaataaaaatactatgttttgaatgacttgatttcaatccgaattaaaaattgaaagggcaaatctctcctaattttgggggtgatagccagggaagtgacgggaatcaggcacaaaggactctagatgtcccaaactcacattttatatttttgtttgagaattgtcatctcaattgaaatttctaaatttctatgatgaggttgcaaatttactcccattgtatttagatggcaaaaaaaaaatttagcttagctcttatataattgatttgttcttctcccatgggttcctctctgaaattacaggaaagtatactattaaatatactcacactcaggtacacatacacacacagacacacactgcacgtgtagtattgtgagacttgagaaacttagaatggccaaatgatttgcatcattagtttatgcaatccaatctgttcatgacatttcagtatttcatattcaaatatttcctctgactctttccaatatagtatctgtgtatgaaagtttgtataatcatgtcttggggaatgtatactggctagtgttttcagtgaagatgttgggcaaaacctattcttgggcattctgcaggcaaagttggtggattctgcaatctgtaatctggtttcccagaggagtcacatcacctcaccttggctattgccagcattttatattcccatagttctgacccaaattatctgtcctgcagcttttagtttcagggtagcttcacacttacttcagcaaaatccccagcgagcttgactaacagcaccctcagatttcatacattcttccatagagcacagaacaacttctgaatgccatttatgtgacacaggaactgaaagaggccctacctagcaaaacatgaaggggagcacagcatgtcctctctctaccttcttgaaaatcttcacccttcatttcacaatgctactggatgtttggagtcagttttctctgtcatttttctacaattcacaggagcagaagagatgtcctgccttttggccctttttcctagtggagatgctcataaatatctcatactgcatgtctaaaataatatgcatgttctgtctttttcccatatctgccakaaagaaactagattgttatttttatttttgacacataatatttgtatatatttatgggctcc

SEQ ID NO: 4401 - DNA, 638 bp, Homo sapiens
gggtcataacttccaagggttctctaccctttgacctctggattggggttcccagtgactgccttaatatccttctctacctactgccttaaggccaactcaatgtatccacgtaaagagtaccctaaagccagtaaaagattatcacgaacacccagagatgtttatggccatcattccagatcctctttgctttttcttgacttactccttttttgataaagttattcatatggtttcaaatccagaattcagctattcacttcatggccctagtttggattaaaacaatcagctttcttttgctctgtagatggccttggacagtacatattaacagtctatggggccccttttccactcatgaccacatcctgcttgcagatctgctgctgggttaacaccacatcatctgctagttgatgccatttatttgacatcctggggttacagcacgctaaagggcacccactgtccttaacagagaaaaatacactgctgagcagaggattaaacagactcctcacactaccggaagttcagtgcattttccaggattttcaagkcttcgatgctgtcatgttgagagtccactatccacgtttgtttatccaggaataatgcagaaaatctgagca

SEQ ID NO: 4402 - DNA, 600 bp, Homo sapiens
ctcatattttgctatatctcacatcattgttcatctgataatatatgaaaactacaatgtgtttcttattccagaaaggggagtaattcttattcatgaataaacactgaaggagaaagattatggatcatagtgggaaaagccacaataccatctacattctctctctctcattttttctacttaggtaaaacatgattactttagaacttgaggaaatggttaaaacccacaagtcaaacaaaaagtaattaatttttaattaattgaaaccttcccaagccratattaataaatttttctctgtatttttagatatactctttataagttgcattttttgcaatatagtatcctataatgattactattttagtacttgttttattcatttaactatcagatcgatcttttcaagtctatgaattaaaatacaaattattatttagtggcaatgtaatgttgaattgcacaaatattggaatttattttaaaaataattctctatttacttccaatatcccaacctcaatgcctgtcctaggaacattcatgcacctgtgccctttgaggctcctattatgtcctttagagtagttg

SEQ ID NO: 4403 - DNA, 600 bp, Homo sapiens
ctcatattttgctatatctcacatcattgttcatctgataatatatgaaaactacaatgtgtttcttattccagaaaggggagtaattcttattcatgaataaacactgaaggagaaagattatggatcatagtgggaaaagccacaataccatctacattctctctctctcattttttctacttaggtaaaacatgattactttagaacttgaggaaatggttaaaacccacaagtcaaacaaaaagtaattaatttttaattaattgaaaccttcccaagccaatattaataaatttttctctgtatttttagatatactctttataagttgcattttttgcaatatagtatcctayaatgattactattttagtacttgttttattcatttaactatcagatcgatcttttcaagtctatgaattaaaatacaaattattatttagtggcaatgtaatgttgaattgcacaaatattggaatttattttaaaaataattctctatttacttccaatatcccaacctcaatgcctgtcctaggaacattcatgcacctgtgccctttgaggctcctattatgtcctttagagtagttg

SEQ ID NO: 4404 - DNA, 1360 bp, Homo sapiens
tttcgcatatcaataaacattttcctacattataatttttaaataattgccttgacttttattacaggaatgctctttataataatatggtttgtttggatcaagattcaaatgagcactgcytattgcatttgattgtaactcgttaaaagtttttttgagtctagactagggtttctcaacagtggtgctgttgacactttgaaactgctaatttttgttgtttgtgtacgtgtgtgggtgtgaggtgagttaggaggggagatggtcttctgtgttacaagatgtttagcaggatcactggcctctacccacccagaggacagatgccagtagaatccttctctcttttcccactgtattggaaaaaataaaaaatgtctctaaacattaccaaatattgcctggagggcaagggtatttcaacatcccattgcccccatattttaaaaagtctcatttacacattaaaaagccaggtcaaaatcttactttctagatggcatttactcatagtatcattaaatttgttatatcttctgtactttttataaattggaaattagttttaaaggcttaattagattcaggttcagcttattaaattatattagatatattaaactggatatactataacctgtaatatagtatattaaactatggactatattaaactatatataaaaacacacataaaatttggtgtatatatcagtttaatatatatataaattataaatttgataatcaagtaaagttgtctgatttaacaaaaatacaggacatccagttaaattttaattttaaataaatagcataatttttaggataagtatgttacaaatattgcatggaatatacaaaataaattatttattgttttttgaaattcaaattcagtgcagcattctgtattttatctgggaactctaatcaggagacacatactgttttgttgtcttactctaagcaaagctgatttcaaaatactatattgtacctcataaatacaaacaattattatttgtctattaaaaaataaaatttaatccaggcactgtggctcatgcctgtaatcccagcactttgggaggccaaggcagctggatcacttgagatcaggagtgcaagaccagcctggacaaaccaacatggtgaaacacaatctctaccaaaaatacaaaaattagcaggacgtggtggcgcgcccctgtaattccagctactcaggaggctgaggcaggagaactgcttgaacccgggaggcagaggttgcagtgacccgagatcatgccactgcactccagcctgagtgacagagtgagaccctgccaccaaaataaataaataaataaat

SEQ ID NO: 4405 - DNA, 1360 bp, Homo sapiens
tttcgcatatcaataaacattttcctacattataatttttaaataattgccttgacttttattacaggaatgctctttataataatatggtttgtttggatcaagattcaaatgagcactgcctattgcatttgattgtaactcgttaaaagtttttttgagtctagactagggtttctcaacagtggtgctgttgacactttgaaactgctaatttttgttgtktgtgtacgtgtgtgggtgtgaggtgagttaggaggggagatggtcttctgtgttacaagatgtttagcaggatcactggcctctacccacccagaggacagatgccagtagaatccttctctcttttcccactgtattggaaaaaataaaaaatgtctctaaacattaccaaatattgcctggagggcaagggtatttcaacatcccattgcccccatattttaaaaagtctcatttacacattaaaaagccaggtcaaaatcttactttctagatggcatttactcatagtatcattaaatttgttatatcttctgtactttttataaattggaaattagttttaaaggcttaattagattcaggttcagcttattaaattatattagatatattaaactggatatactataacctgtaatatagtatattaaactatggactatattaaactatatataaaaacacacataaaatttggtgtatatatcagtttaatatatatataaattataaatttgataatcaagtaaagttgtctgatttaacaaaaatacaggacatccagttaaattttaattttaaataaatagcataatttttaggataagtatgttacaaatattgcatggaatatacaaaataaattatttattgttttttgaaattcaaattcagtgcagcattctgtattttatctgggaactctaatcaggagacacatactgttttgttgtcttactctaagcaaagctgatttcaaaatactatattgtacctcataaatacaaacaattattatttgtctattaaaaaataaaatttaatccaggcactgtggctcatgcctgtaatcccagcactttgggaggccaaggcagctggatcacttgagatcaggagtgcaagaccagcctggacaaaccaacatggtgaaacacaatctctaccaaaaatacaaaaattagcaggacgtggtggcgcgcccctgtaattccagctactcaggaggctgaggcaggagaactgcttgaacccgggaggcagaggttgcagtgacccgagatcatgccactgcactccagcctgagtgacagagtgagaccctgccaccaaaataaataaataaataaat

SEQ ID NO: 4406 - DNA, 1360 bp, Homo sapiens
tttcgcatatcaataaacattttcctacattataatttttaaataattgccttgacttttattacaggaatgctctttataataatatggtttgtttggatcaagattcaaatgagcactgcctattgcatttgattgtaactcgttaaaagtttttttgagtctagactagggtttctcaacagtggtgctgttgacactttgaaactgctaatttttgttgtttgtgtacgtgtgtgggtgtgaggtgagttaggaggggagatggtcttctgtgttacaagatgtttagcaggatcactggcctctacccacccagaggacagatgccagtagaatccttctctcttttcccactgtattggaaaaaataaaaaatgtctctaaacattaccaaatattgcctggagggcaagggtatttcaacatcccattgcccccatattttaaaaagtctcatttacacattaaaaagccaggtcaaaatcttactttctagatggcatttactcatagtatcattaaatttgttatatcttctgtactttttataaattggaaattagttttaaaggcttaattagattcaggttcagcttattaaattatattagatatattaaactggatatactataacctgtaatatagtatattaaactatggactatattaaactatatataaaaacacacataaaatttggtgtatatatcagtttaatatatatataaattataaatttgataatcaagtaaagttgtctgatttaacaaaaatacaggacatccagttaaattttaattttaaataaatagcataatttttaggataagtatgttacaaatattgcatggaatatacaaaataaattatttattgttttttgaaattcaaattcagtgcagcattctgtattttatctgggaactctaatcaggagacacatactgttttgttgtcttactctaagcaaagctgatttcaaaatactatattgtacctcataaatacaaacaattattatttgtctattaaaaaataaaatttaatccaggcactgtggctcatgcctgtaatcccagcactttgggaggccaaggcagcyggatcacttgagatcaggagtgcaagaccagcctggacaaaccaacatggtgaaacacaatctctaccaaaaatacaaaaattagcaggacgtggtggcgcgcccctgtaattccagctactcaggaggctgaggcaggagaactgcttgaacccgggaggcagaggttgcagtgacccgagatcatgccactgcactccagcctgagtgacagagtgagaccctgccaccaaaataaataaataaataaat

SEQ ID NO: 4407 - DNA, 1360 bp, Homo sapiens
tttcgcatatcaataaacattttcctacattataatttttaaataattgccttgacttttattacaggaatgctctttataataatatggtttgtttggatcaagattcaaatgagcactgcctattgcatttgattgtaactcgttaaaagtttttttgagtctagactagggtttctcaacagtggtgctgttgacactttgaaactgctaatttttgttgtttgtgtacgtgtgtgggtgtgaggtgagttaggaggggagatggtcttctgtgttacaagatgtttagcaggatcactggcctctacccacccagaggacagatgccagtagaatccttctctcttttcccactgtattggaaaaaataaaaaatgtctctaaacattaccaaatattgcctggagggcaagggtatttcaacatcccattgcccccatattttaaaaagtctcatttacacattaaaaagccaggtcaaaatcttactttctagatggcatttactcatagtatcattaaatttgttatatcttctgtactttttataaattggaaattagttttaaaggcttaattagattcaggttcagcttattaaattatattagatatattaaactggatatactataacctgtaatatagtatattaaactatggactatattaaactatatataaaaacacacataaaatttggtgtatatatcagtttaatatatatataaattataaatttgataatcaagtaaagttgtctgatttaacaaaaatacaggacatccagttaaattttaattttaaataaatagcataatttttaggataagtatgttacaaatattgcatggaatatacaaaataaattatttattgttttttgaaattcaaattcagtgcagcattctgtattttatctgggaactctaatcaggagacacatactgttttgttgtcttactctaagcaaagctgatttcaaaatactatattgtacctcataaatacaaacaattattatttgtctattaaaaaataaaatttaatccaggcactgtggctcatgcctgtaatcccagcactttgggaggccaaggcagctggatcacttgagatcaggagtgcaagaccagcctggacaaaccarcatggtgaaacacaatctctaccaaaaatacaaaaattagcaggacgtggtggcgcgcccctgtaattccagctactcaggaggctgaggcaggagaactgcttgaacccgggaggcagaggttgcagtgacccgagatcatgccactgcactccagcctgagtgacagagtgagaccctgccaccaaaataaataaataaataaat

SEQ ID NO: 4408 - DNA, 607 bp, Homo sapiens
ttgaaaaggaagtaattaccttcagctctctgagttctagaatttgtaacatttcaccccctgctccttcctgatctgcactggagcatcttccttctgtccctgctctactcagagttcactttcccttccctcacatcagcttcattgaggctggtttgaacttaacgcaaaacattctcactaatgactgaattcccaccaagatttccatattatcacagtatgcttttaatcttctaagatattaaatatttgttctcatcatagcgaaaatgcaatgcaaatcccatctcagatgtgggtcagatacctatgaatctcctgaggtagtcattgaaatgacttttttcttgagatggagtgtcactctcaaccatgctgaagtgcagtggcrctaccttggctcacggcaacctccacctcccagattcaagcgattcttgtgcctcggcctcccaagtagctgggattacaggtgcctgctaccatgcctggctaatttttgtctttttagtagagatggggtttcaccatgttggcccatctggtcttgaactcctgacctcaagtcatccacctgcctcagcctcccaaagtgctggga

SEQ ID NO: 4409 - DNA, 250 bp, Homo sapiens
tttttttttttaacttcttaaatgcacaaatttattttttctcaacaaacacacatcttaatgcctttacaacttttatctccccaaatataycttgcttttctttatacatgctgtatacagagttgttttccttatatttagtagttattgcttttttgtgcccttttgggtcctgaatttacacatcaggcatagatcttgggacaggaaagagctgtgaagcaaattcctggaagatcaaacccct

SEQ ID NO: 4410 - DNA, 250 bp, Homo sapiens
tttttttttttaacttcttaaatgcacaaatttattttttctcaacaaacacacatcttaatgcctttacaacttttatctccccaaatatatcttgcttttctttatacatgctgtatacagagttgttttccttatatttagtagttattgcttttttgtgcccttttgggtcctgaatttacacatcaggcatagatcttgggacaggaaagagctgtgaagcaaattcctggaagatcaaamccct

SEQ ID NO: 4411 - DNA, 590 bp, Homo sapiens
ttttccagtgtaaaattctgccttatctcccacttggagtcctcctttgaaaagtctgagcagaatgccaactctttatgtttggcagaacattcaccaaacagacctcctggcatcatttctactaaatgactctggccctaatcatagcaaaaataaagtaaattgagtagttgaaaaagatgatagastcaagggatagttttatgagctctataaaatgaatttctgtgctttttttggattaaaatttgttttcagaaacgcaggcttgtgacattatacaatgcacaaaaaaaatcaccaaaaagcagacagatgtattctctagaggtctttgttttttaggtcatgaagctcccagactttgggctctaatgtaatttttttgtattttcaactattattcataacttttttcactttttatcacctgtgcctcctttgaggaagagagccaagtgaggcagagtaagaagcaacaaacaaaaggtagaaaacaaaagaaggatatacaaggtagagacaaagaatgaagtattcagattagatgctctaatatgacccaggtcaatacaatttcaccgcat

SEQ ID NO: 4412 - DNA, 672 bp, Homo sapiens
gataaggggcaagggcttgatccaccttgtgacccagaacctcaaaaccagcccctttgtacagagggacagtcagatgttgagccaggctggaagtgtagcttgaacagcatccccagggctgagccccaggcacaaggcccaggaggagctgccaggcccacatctgcggtcaagattctcactgggaaattcttacatgtttgcaaaacgcagctaatgtttcacacaccgtctgcatgagcagctgctttctgttcttgacgtgggccataggatctcgaaccggagtggacgtgtgtccacatgtaatatagacacaccctctcctgataagtctgaagcagggtatgtctgtaacttcagctaaggtagggctctgatggttccctgatcaaccgtggaagtctaaatcaggccttccatgtgtactagccagtttcagcaataggcgtgggtgctttaattttagacaagagcaatcctaacgcttacagcagagccttcccaccaggctaaaagttccagaaagttttatatwacagcaccaaatccagtgttatggttccaatcaattcaggaaataaaaagtctacaatttatttgggtctctaagactcagaactcctggccaaaaatgtgccctttgatcttcatccctttaatctgaag

SEQ ID NO: 4413 - DNA, 686 bp, Homo sapiens
gtacagggtgtccccgaccagttctccaagtccatgggtgcctggtaggagacagggggatgaatgtgaacccctgcatggctatagccacctgcctcctcccctgccctgcatcactacctggcctattttttgcctctagaagcactgcttcctaygctccttaggaccactgcccgcatatgacagataagaacatcgaggctaaggcaacgcaaatcttttccttaaagtcatacagctgtcaaaagaaagctggacaacctgggcaacatagcgagataaaaaattatttaaattagccagatgtggtagccccctgtagtctcagcgactcaggaggctgaggcaggaggctcaccagagtgcagagttcaaggatgcagtgagctatgatcctgccactgcactgaaagctgggtgacagagcaagaccctggctctaataaatgaatacataaagtctcacagctagtggtagctaatcctgccagagtcaggcctctacctgtctgatgacaaatggcacactatgtcttttaacctgattgcagaccacaaatgttttgtgaatattttccccagggaaaaaaccggaagtagttctaaattctatacatccattatattagttttacctgtggattgggaaaacccagctctgattgcatttcagggcgggacag

SEQ ID NO: 4414 - DNA, 686 bp, Homo sapiens
gtacagggtgtccccgaccagttctccaagtccatgggtgcctggtaggagacagggggatgaatgtgaacccctgcatggctatagccacctgcctcctcccctgccctgcatcactacctggcctattttttgcctctagaagcactgcttcctatgctccttaggaccactgcccgcatatgacagataagaacatcgaggctaaggcaacgcaaatcttttccttaaagtcatacagctgtcaaaagaaagctggacaacctgggcaacayagcgagataaaaaattatttaaattagccagatgtggtagccccctgtagtctcagcgactcaggaggctgaggcaggaggctcaccagagtgcagagttcaaggatgcagtgagctatgatcctgccactgcactgaaagctgggtgacagagcaagaccctggctctaataaatgaatacataaagtctcacagctagtggtagctaatcctgccagagtcaggcctctacctgtctgatgacaaatggcacactatgtcttttaacctgattgcagaccacaaatgttttgtgaatattttccccagggaaaaaaccggaagtagttctaaattctatacatccattatattagttttacctgtggattgggaaaacccagctctgattgcatttcagggcgggacag

SEQ ID NO: 4415 - DNA, 752 bp, Homo sapiens
taaggctcagtagctctacaggaagtgggggaagcctggagcagccctgcacacacagcactaggccccgggtggaggaggtggacgaaggggacggggcagccagtctgctgcatggcaggttgcagggcccaggtgtccgggtcctgcctacagtggcccggtgacactcagggcccggccaccccagccccaggcaggacccctccctccccacagtgagccgactcactcggccctgaggctgaggcctccacccacgtccacctgccccagtgcccgagagccttgctgctccctgacttgcccgctgcgtctctggggatgtcagtcgagggaccctctgataggcctaggaaggtccccagggcccctgacaggggacctaggagaagggggtggaggagcagggccagggcttctggcccgtkggggggactctacctggtgcacggcctcggcgctctggcctctggtcctgacctgggtgcagggctcctgacgagtggctgtgggaggaggcagccgtgagcacaggtgtctgggttctgcccgacatggctcctccccagggcagttccctgcacttctggggccctggtctcggaccggcatctcctgaggctcacaccgcccccttgctctcagtgcggtgactgcttttgctccattccccgacatctgataaaacggccccttgctgtgcagatgcgggattagcacggtgattcccgctgggttacaggccacag

SEQ ID NO: 4416 - DNA, 787 bp, Homo sapiens
atcagcccccagggaagggatggagtgggtcaggtgcacaggtcatgaagggagcacaaattctaacccactcctcaagagtccagtcaccacctccagatctatgtccaaaaacagctcttcgtatggctgagtgacattagcaasaagcacacagccatgtttgtttttttgttttgttttggtgtgtgtgtgtgtgtttttgatagagtcttgtgtcacccaggctggagtgcagtggggcaatcaatcttggctcactacgagctccacctcctgggttcaagtgattctccagcctcagcctccaagtagcttggactgcaggcactcaccaccacacctggctaatttttgtatttttagtagagacagggtttcactatgttggccaggctggtcttgaactcctgaccttctgatccacccgactcggcctccaaaagtgctgggattacaggtataagccactgtgcccagccacaaacaagtatttttaagcaaaagacacagtgaagagacttcagtatgagcccacacacaaaccttcctgtgggagtttacagaacagcagtgggtgctgaggacagaagccagcacccaggaaccagcagggaaacccagggggcatttggcaccgcctgaaggctcaggaccattgtggggctcagtggtcaggcaggctcaaggttcagcctcagagcaggtgtagcaggcggcgaaaggctctgaagacggagtttagtgtcaccttctcatttccactactaaacaccctccagcacat

SEQ ID NO: 4417 - DNA, 787 bp, Homo sapiens
atcagcccccagggaagggatggagtgggtcaggtgcacaggtcatgaagggagcacaaattctaacccactcctcaagagtccagtcaccacctccagatctatgtccaaaaacagctcttcgtatggctgagtgacattagcaacaagcacacarccatgtttgtttttttgttttgttttggtgtgtgtgtgtgtgtttttgatagagtcttgtgtcacccaggctggagtgcagtggggcaatcaatcttggctcactacgagctccacctcctgggttcaagtgattctccagcctcagcctccaagtagcttggactgcaggcactcaccaccacacctggctaatttttgtatttttagtagagacagggtttcactatgttggccaggctggtcttgaactcctgaccttctgatccacccgactcggcctccaaaagtgctgggattacaggtataagccactgtgcccagccacaaacaagtatttttaagcaaaagacacagtgaagagacttcagtatgagcccacacacaaaccttcctgtgggagtttacagaacagcagtgggtgctgaggacagaagccagcacccaggaaccagcagggaaacccagggggcatttggcaccgcctgaaggctcaggaccattgtggggctcagtggtcaggcaggctcaaggttcagcctcagagcaggtgtagcaggcggcgaaaggctctgaagacggagtttagtgtcaccttctcatttccactactaaacaccctccagcacat

SEQ ID NO: 4418 - DNA, 787 bp, Homo sapiens
atcagcccccagggaagggatggagtgggtcaggtgcacaggtcatgaagggagcacaaattctaacccactcctcaagagtccagtcaccacctccagatctatgtccaaaaacagctcttcgtatggctgagtgacattagcaacaagcacacagccatgtttgtttttttgttttgttttggtgtgtgtgtgtgtgtttttgatagagtcttgtgtcacccaggctggagtgcagtggggcaatcaatcttggctcactacgagctccacctcctgggttcaagtgattctccagcctcagcctccaagtagcttggactgcaggcactcaccaccacacctggctaatttttgtatttttagtagagacagggtttcactatgttggccaggctggtcttgaactcctgaccttctgatccacccgactcggcctccaaaagtgctsggattacaggtataagccactgtgcccagccacaaacaagtatttttaagcaaaagacacagtgaagagacttcagtatgagcccacacacaaaccttcctgtgggagtttacagaacagcagtgggtgctgaggacagaagccagcacccaggaaccagcagggaaacccagggggcatttggcaccgcctgaaggctcaggaccattgtggggctcagtggtcaggcaggctcaaggttcagcctcagagcaggtgtagcaggcggcgaaaggctctgaagacggagtttagtgtcaccttctcatttccactactaaacaccctccagcacat

SEQ ID NO: 4419 - DNA, 787 bp, Homo sapiens
atcagcccccagggaagggatggagtgggtcaggtgcacaggtcatgaagggagcacaaattctaacccactcctcaagagtccagtcaccacctccagatctatgtccaaaaacagctcttcgtatggctgagtgacattagcaacaagcacacagccatgtttgtttttttgttttgttttggtgtgtgtgtgtgtgtttttgatagagtcttgtgtcacccaggctggagtgcagtggggcaatcaatcttggctcactacgagctccacctcctgggttcaagtgattctccagcctcagcctccaagtagcttggactgcaggcactcaccaccacacctggctaatttttgtatttttagtagagacagggtttcactatgttggccaggctggtcttgaactcctgaccttctgatccacccgactcggcctccaaaagtgctgggattacaggtataagccactgtrcccagccacaaacaagtatttttaagcaaaagacacagtgaagagacttcagtatgagcccacacacaaaccttcctgtgggagtttacagaacagcagtgggtgctgaggacagaagccagcacccaggaaccagcagggaaacccagggggcatttggcaccgcctgaaggctcaggaccattgtggggctcagtggtcaggcaggctcaaggttcagcctcagagcaggtgtagcaggcggcgaaaggctctgaagacggagtttagtgtcaccttctcatttccactactaaacaccctccagcacat

SEQ ID NO: 4420 - DNA, 917 bp, Homo sapiens
ggaataagtccctgtatttgaggacctcacaaattaataattatgtagaatcactttctttttcagtctcctttccttcctctttctttctttctcactcacacactgacaaacacacggggtgccataacattaattacctgatgtattaaagaatattgattcatttgcaacttgaccagtttagctgttgttcatgttgttgtaagatcaggaacatgtttctcagctgtgtactcctctaagctgagcagcagctttatttgaaatacacagaaactgaaaacaatccaaatattaatcagcaccttcataagtaaacaaattgtggaaaagtcgtttattgggatagtacccactactacaatcagtaaatgttggatacgatcaacagcatggttcaattcacaagtacatatgatgagtatagtgagccaaagcacatacatatgattccgttttataaactgtacaaagtgaatactcattggaaattacataacaaagatcactaactgacttctccatagtaagagaagcgaaggtataggagggagaaattgygagagacaaagagaaaattgagaggcgaattgatttgttttctctgtgaatggtcattaggtcaatgtttgtcaaatggtgaacatattgtgtgaagattatatgtctgtattacttcattaaagctattataaataaaagtctaatgtggtagaaaaagatgaagagagaaataaaaataatacaagaaaagtcatgaactcctgaatgaattaacccttagtttttctctattacttataaaaacaccaagatacagccaaataatatcacgatatcattataagaagagtgttttgtaaacctcactgggaatttatagctctttcctagagttaattttgggaacagtt

SEQ ID NO: 4421 - DNA, 917 bp, Homo sapiens
ggaataagtccctgtatttgaggacctcacaaattaataattatgtagaatcactttctttttcagtctcctttccttcctctttctttctttctcactcacacactgacaaacacacggggtgccataacattaattacctgatgtattaaagaatattgattcatttgcaacttgaccagtttagctgttgttcatgttgttgtaagatcaggaacatgtttctcagctgtgtactcctctaagctgagcagcagctttatttgaaatacacagaaactgaaaacaatccaaatattaatcagcaccttcataagtaaacaaattgtggaaaagtcgtttattgggatagtacccactactacaatcagtaaatgttggatacgatcaacagcatggttcaattcacaagtacatatgatgagtatagtgagccaaagcacatacatatgattccgttttataaactgtacaaagtgaatactcattggaaattacataacaaagatcactaactgacttctccatagtaagagaagcgaaggtataggagggagaaattgtgagagacaaagagaaaattgagaggcgaattgatttgttttctctgtgwatggtcattaggtcaatgtttgtcaaatggtgaacatattgtgtgaagattatatgtctgtattacttcattaaagctattataaataaaagtctaatgtggtagaaaaagatgaagagagaaataaaaataatacaagaaaagtcatgaactcctgaatgaattaacccttagtttttctctattacttataaaaacaccaagatacagccaaataatatcacgatatcattataagaagagtgttttgtaaacctcactgggaatttatagctctttcctagagttaattttgggaacagtt

SEQ ID NO: 4422 - DNA, 917 bp, Homo sapiens
ggaataagtccctgtatttgaggacctcacaaattaataattatgtagaatcactttctttttcagtctcctttccttcctctttctttctttctcactcacacactgacaaacacacggggtgccataacattaattacctgatgtattaaagaatattgattcatttgcaacttgaccagtttagctgttgttcatgttgttgtaagatcaggaacatgtttctcagctgtgtactcctctaagctgagcagcagctttatttgaaatacacagaaactgaaaacaatccaaatattaatcagcaccttcataagtaaacaaattgtggaaaagtcgtttattgggatagtacccactactacaatcagtaaatgttggatacgatcaacagcatggttcaattcacaagtacatatgatgagtatagtgagccaaagcacatacatatgattccgttttataaactgtacaaagtgaatactcattggaaattacataacaaagatcactaactgacttctccatagtaagagaagcgaaggtataggagggagaaattgtgagagacaaagagaaaattgagaggcgaattgatttgttttctctgtgaatggtcattaggtcaatgtttgtcaaatggtgaacatattgtgtgaagattatatgtctgtattacytcattaaagctattataaataaaagtctaatgtggtagaaaaagatgaagagagaaataaaaataatacaagaaaagtcatgaactcctgaatgaattaacccttagtttttctctattacttataaaaacaccaagatacagccaaataatatcacgatatcattataagaagagtgttttgtaaacctcactgggaatttatagctctttcctagagttaattttgggaacagtt

SEQ ID NO: 4423 - DNA, 798 bp, Homo sapiens
gtgtgtgttagagttgttaatactacagtgattgctgtatggtgggctttagtaaaataaacaataattacaaaattagttataagattttccttttagcacattggggaagatgatggataagacgaataaaaataaagggtaattgagttaacttaaattggaagacctgggttttttcaataggagatttggccatttttttctgaaggaggaaagtggatttgagacttggagaaactagtaaggctgtgagattcacagtacagaactaagaagacaaccagaaatacctatcagtactttcatttttacggatttgagtgctaggcaacgtgctatgtaatgactactacagataaaacagtgtgcaaaacagacagggtgcctttcttcatggagtaaatttacattttaaaagtatctatgtgtatgtagagtgtagtatatcttaatagtgatcacaggcaatgccattttatgatcatttccccactttttgacagcttgagaatagtagcagagaaaacagacagtggagtttagccagaattgagtcgacacagtacgcaagtaggtgaggaagtgaaggatgctagctagcaaggcatttttgcartgacttagttgggtttgggtttgagtaaagaatcaagggattgatggatttagggagagagaaacgatcaaggggctggtagtattcaggaaggctaagagcagtttcagcaggaatcaagtgagagaagtagaatgcaaaaacttatgatcagaaagaggaacttcagaagttcagga

SEQ ID NO: 4424 - DNA, 798 bp, Homo sapiens
gtgtgtgttagagttgttaatactacagtgattgctgtatggtgggctttagtaaaataaacaataattacaaaattagttataagattttccttttagcacattggggaagatgatggataagacgaataaaaataaagggtaattgagttaacttaaattggaagacctgggttttttcaataggagatttggccatttttttctgaaggaggaaagtggatttgagacttggagaaactagtaaggctgtgagattcacagtacagaactaagaagacaaccagaaatacctatcagtactttcatttttacggatttgagtgctaggcaacgtgctatgtaatgactactacagataaaacagtgtgcaaaacagacagggtgcctttcttcatggagtaaatttacattttaaaagtatctatgtgtatgtagagtgtagtatatcttaatagtgatcacaggcaatgccattttatgatcatttccccactttttgacagcttgagaatagtagcagagaaaacagacagtggagtttagccagaattgagtcgacacagtacgcaagtaggtgaggaagtgaaggatgctagctagcaaggcatttttgcaatgacttagttgggtttgggtttgagtaaagaatcaagggattgatggatttagggagagagaaacgatcaaggrgctggtagtattcaggaaggctaagagcagtttcagcaggaatcaagtgagagaagtagaatgcaaaaacttatgatcagaaagaggaacttcagaagttcagga

SEQ ID NO: 4425 - DNA, 789 bp, Homo sapiens
tctgcaattttgcagaatttcacagtatcttttgcagttctgtgtaaaattgatttgtttaaatctagtttattttaccttgttggtcctggacttactatcagctgaaatatttatatcgctgccccttaggagttatgcatttcccttgttctgtaaaaacaataataaaataaaagtgctgacctgctctatgtatatgagtaattgtttttattttaattgcttgagtgcttgtggaaggagattgaattgtctggcctcttttctctttgaccatttcttgcattactttcgtttttttccttttgccaccaaaagtattatgctggtcaccaaccatgtctttggagactatttgaagttgaaattttcatgctaaatctagccatttaaaagragatgtgggaagcatagacatacacaatcatgccttgctacccaatgcagaagtcctcctcaccaagacaggccccgggacactggaaaaaaaagcctaagcatattcttgctgttgtttaagtcttatttttgaaagcaagccccccctccccgcacacacacaaatagacacacatattttttcttacaaataacgttgtcttcccaacacactccccttctgaccgcattcatttattcaacacaattaatgaataatcattgtgtgtcaatcagagagcaaaacagtcaagtatatgactgtatagtctctggtttatcatggaaagtggacaacttagcatttaacactatcatggggcgatataccatgggagagtgtttttc

SEQ ID NO: 4426 - DNA, 810 bp, Homo sapiens
cttgagcccaggcgttctttgttgtctggacaacaaaatgagaaccatctctattaaaaaatatatatatacaaaaattaaccaggtgtggtggtgtgtacctgaagtcccagctacttgggaggctgaaatgggaggatcgcttgagcccaggaggttgaagcttgcagtaagccagggtctccagcctgggtgacagagcaagaccttgtctctgaaaaaaaaaaaaacaaggaaagaaagattagctgggcatgatggtgcmcacctgcagtcccagctacttgggaggctgaggcagcagaattgcttgaacctgggaggcagaggttgcagtgagccaagatcacactactgtaccccaggctgggagacagagtgagactccatctcaaaaataaaaccagaaataaaaaaagaaagaaatatttttaaaaagtcatactgctaagaataataggttttcatttagttcatcaatagaattccaatgaccttaaatgacaacattgcaaatattttccacgtaggcacggaagacatatgcttgtgagacaaaggtgtctctgaaactatggatggtacaagaacttcacttgacattgaagagtactcggatactgaggtacagaaaaaccaagtactaactctggaagaatggcaagacaagtgggtgaacggcaagactgcttttcatcaggaacaaggacatcagtaagaaatatttggtatacaatagagaaatgttctatcaaaaagtgactttgagatagaaataataaaagtacacattatttgactaacttttag

SEQ ID NO: 4427 - DNA, 810 bp, Homo sapiens
cttgagcccaggcgttctttgttgtctggacaacaaaatgagaaccatctctattaaaaaatatatatatacaaaaattaaccaggtgtggtggtgtgtacctgaagtcccagctacttgggaggctgaaatgggaggatcgcttgagcccaggaggttgaagcttgcagtaagccagggtctccagcctgggtgacagagcaagaccttgtctctgaaaaaaaaaaaaacaaggaaagaaagattagctgggcatgatggtgcacacctgcagtcccagctacttgggaggctgaggcagcagaattgcttgaacctgggaggcagaggttgcagtgagccaagatcacactactgtaccccaggctgggagacagagtgagactccatctcaaaaataaaaccaraaataaaaaaagaaagaaatatttttaaaaagtcatactgctaagaataataggttttcatttagttcatcaatagaattccaatgaccttaaatgacaacattgcaaatattttccacgtaggcacggaagacatatgcttgtgagacaaaggtgtctctgaaactatggatggtacaagaacttcacttgacattgaagagtactcggatactgaggtacagaaaaaccaagtactaactctggaagaatggcaagacaagtgggtgaacggcaagactgcttttcatcaggaacaaggacatcagtaagaaatatttggtatacaatagagaaatgttctatcaaaaagtgactttgagatagaaataataaaagtacacattatttgactaacttttag

SEQ ID NO: 4428 - DNA, 737 bp, Homo sapiens
agttctattaaggagttgagattttcaaatgaatgacaaatgataaatttacaaaggtaaactcagggttggatttgcccaagtcccttccaatatccatcaccttcaaaaatcaggatgcagtttttgtgactatttaatagcaatccaataggttgaaacctattgataagttcaaatgccttacccgatcaatctttaataattttcattcccctcttggcttctctcattagggaraaagtccagcttgcacccagtttttggttctttatttcagaaatcttcccccacccacccatatccaacctgacctcaccatcttggcccccctcaccacacaggtctcttgagaaatgaaaaatagtccctcttcacacacaaaacaagctggtgcaggtctggtttcaataaatcagattttctaaaataatttgagctcttcaagaaaacaaaatgcaaacggaccgtaaatgtgttttaactattaaaagaggtaggcggatgttcattctctttatctgaatgaaaaatttcccttcctgacattgagtcatgttcacttttcccaagagggaataaaatgttccctgtaaaagcacaaccttttctttcccattgctctggacgcatgccaacataacagaaacagccaaataaagggctgtgataagctcctcaggtaccaggggaatgttatcagaggaaatcatcttcctccctgtgacaagacgcat

SEQ ID NO: 4429 - DNA, 579 bp, Homo sapiens
acaccagggattcaacatgggtacyctggggagaagtcaggaggaaggagaacacagtgggggttttaaaaggaaaaggtatcttcttgtgaagctgtattgtcaagctgctggagagaaagcaaaaaaaaaaaaaaaaaaaaaaaaaaaaaaaattcctcccaatctcactgcccagagagaaccatttatatcttagtaatgcaagtattttcaagatgatttcattacacaattttttgcaataaacaattttaaacaccaatttttattgtgaacatttttccatgccagtaaatattctgtggataataactttatgatcactgaattgttttatagtgttctggtaaatgttgaggctattatttatcaaccagcattctagaatagaaaagccttgatttgcagcacttgtggattttgtgatataaatactcctaaactggccaccaacatgataccactgagcccaaagttgggaggaaactacaagagcctgtgctggtgctggcacatcacagagtttattttcactcctataagtagcccaaacttcatttccctttttctgttctt

SEQ ID NO: 4430 - DNA, 853 bp, Homo sapiens
agccagccctggccctctcgtacccattgtcccacttaaaactgataagtctatagatgccttcatgtgcccatttgacagatgaggctttcaggtgggtgatcacaaaaggctcacagccagttgagcccaggggaattcaagcccagctcctctgggaagccagacatttcccggcagctgctattcagaagtgtccatctgcagcagcagacacttggtacagaataatcaagcagaagagttgatgtggctgccaccagggaaggaggtgactcaagaagaaaaagcaaaaggctgctgggtatccatrccatctgtgctcgatgtcacgctgcacctgccctgcaaagcaccccaccaggggaacaccatacagcccctgtgtgggtagaagctagagtcaactactgactctagggagggaggttgaggaaggaggcgcatgaaagaacccaggaagtaattgagaagggcttgggagtcaacacggccaggagtatttcagtgtcaggacaaagcccttctttctagtgatggtgaccagtaagaagtgatagggaggactgataacagagtcactcctaatcacagtccaactccttgtccctcagctcttctctccacatagttgggactgtttcatagtaacttgtataccatccctgtcccaaaagcaattggtcccacaatgctgccatcatatgtccatttactgctgagaaatgtatccccccaccccccaggagtctgggactaagaatcagacaggtctgatgtcacatcaatcccatctctctgtgtttcgctcttgagtcatccgctcctctctttgcagacctcaactattgga

SEQ ID NO: 4431 - DNA, 853 bp, Homo sapiens
agccagccctggccctctcgtacccattgtcccacttaaaactgataagtctatagatgccttcatgtgcccatttgacagatgaggctttcaggtgggtgatcacaaaaggctcacagccagttgagcccaggggaattcaagcccagctcctctgggaagccagacatttcccggcagctgctattcagaagtgtccatctgcagcagcagacacttggtacagaataatcaagcagaagagttgatgtggctgccaccagggaaggaggtgactcaagaagaaaaagcaaaaggctgctgggtatccatgccatctgtgctcgatgtcacgctgcacctgccctgcaaagcaccccaccaggggaacrccatacagcccctgtgtgggtagaagctagagtcaactactgactctagggagggaggttgaggaaggaggcgcatgaaagaacccaggaagtaattgagaagggcttgggagtcaacacggccaggagtatttcagtgtcaggacaaagcccttctttctagtgatggtgaccagtaagaagtgatagggaggactgataacagagtcactcctaatcacagtccaactccttgtccctcagctcttctctccacatagttgggactgtttcatagtaacttgtataccatccctgtcccaaaagcaattggtcccacaatgctgccatcatatgtccatttactgctgagaaatgtatccccccaccccccaggagtctgggactaagaatcagacaggtctgatgtcacatcaatcccatctctctgtgtttcgctcttgagtcatccgctcctctctttgcagacctcaactattgga

SEQ ID NO: 4432 - DNA, 631 bp, Homo sapiens
ggaagggaacttaagtgtgtgtgtgtgtgtgtgtgtgtgtgcacccacgtgtgtgtgggggagtgatagagattctcctggtttctgtcctagttttttctaagcgtatggagacaggtctgctccgtacatctggggattggtattaccacatcatttcccccctaacagcagcaaagattctcaaagcttcatcagagcatgaacaatcagaaatgccttaattttgttagtcacaataaataatactttgattaattagcaagcacatgccttgggaatatgagaaagtaaatgatttctaccctagatctttcagrtagctgggagggaagagagtattaaaatacgcttttaactatgggttttggatggagaagaggagaatgccggagaggggaaagcagcagtggaattgttcttggagataggagaaactgaaactctttccacccagggtctttgcagaaagtggttcccactgcctggaatactttttcttctctttacatggtgagctctcactctagtctcaacttaaatgtctccccctttgacaggcccttgctaacatcctgtttcaagttccttctggatattgattaggatggtaagcttcatgaggttaagg

SEQ ID NO: 4433 - DNA, 629 bp, Homo sapiens
aaatatatatggtctataagagtcacattctagattcaaagacatagttgaaagtaaaatgatggaaaaagatgacatgcaaacagtaataagaaagctagagtgactgtactaaaatcagacaaaattggctgggtgcagtggctcacacctgtaatcccagcattttgggaggctgaggcagacagatcactcgaggtcaggagttcaagaccagcctggtcaacatggtgaaactctgtctctactaaaaattagctgggtatggtggcaaatgcctgtagtcccagctacttgggatgctgaggcaagagaacsgcttgaatccgggaggcagaggttgcagtgagccaaggtcacgccactgcactccagcctgggcaacagagtgagactccatcccaaaaataaaataagaataaataaaatcagacaaaatagactttaaaaacaaaccatgttattagagatactgagaagcattttacaatgacaaaagggaaaatttaacaggaagaaatagaaatcataaacagaagtcataaagaaataaaaatttataacagctaaaaacacagccctgaagtatatgaaataaaactgtcagaaatgaagagagaaacagacaa

SEQ ID NO: 4434 - DNA, 629 bp, Homo sapiens
aaatatatatggtctataagagtcacattctagattcaaagacatagttgaaagtaaaatgatggaaaaagatgacatgcaaacagtaataagaaagctagagtgactgtactaaaatcagacaaaattggctgggtgcagtggctcacacctgtaatcccagcattttgggaggctgaggcagacagatcactcgaggtcaggagttcaagaccagcctggtcaacatggtgaaactctgtctctactaaaaattagctgggtatggtggcaaatgcctgtagtcccagctacttgggatgctgaggcaagagaacggcttgaatccgggaggcagaggttgcagtgagccaaggtcacgccactgcactccagcctgggcaacagagtgagactccatcccaaaaataaaataaraataaataaaatcagacaaaatagactttaaaaacaaaccatgttattagagatactgagaagcattttacaatgacaaaagggaaaatttaacaggaagaaatagaaatcataaacagaagtcataaagaaataaaaatttataacagctaaaaacacagccctgaagtatatgaaataaaactgtcagaaatgaagagagaaacagacaa

SEQ ID NO: 4435 - DNA, 788 bp, Homo sapiens
aaaaaaaaaaaaaaaaagccaaccaagaatactgtgtccagaaaagtttctttcaaaaagaaggcaaaataaaagcattcccagataaacaaaaacagaattccttgttagcagaccagttttgtaagaactactagaggaagttcttcaggcaaaaaggaagtgctcccaggaagttcacatatatccaaaagcaaagagcaaggaggtaaataggagcaaagctgttctagagtaaggaaataccaccagttggtaactcaaatccataaaaaccaaaaaagtggatcaaatatatgatataaggaggttaataaaacagaaactagaaatatatacttgctctcctttcagcttctttaaagatatatcattatatagtatgatcattataatagcgcataataaagatgtaatatatgtaacaataccacaaaaagtggtaaaactgaataaactcatacaggaataacttctgtatctcaccaggattaatataaatatgaagtaaattttgagacgatacataaggtaagccctagagcaaacactaataacaaatagaatattgaagaatcataaaagaaatgaaratttatattagaaagtagtcactagatggaaaagaaagcagcaaaggagaaatagaggaacaagaaatagtacatagaaaagaccaaaagtaaaactgtggatataaatctaattatatcaataataatattaaatgtgaatggattaaacaatctaatcaaaggcaggaattatcagaccagatttgaaaaaca

SEQ ID NO: 4436 - DNA, 766 bp, Homo sapiens
cctgacatcaggagttcgagaccagcctggccaacatggtgaaaccccatccctactaacaatacaaaaattagctgggcatggtcgtacatgcctgtaattccagctacccaggaggctgaggcaggagaattgcttgaatccgggaggcggaggttgcagtgagccaagattgcgccactgtactctgggcgacagagcragactgtctcaaaaaagaagaaaaaaaaaagaaaatatattttcagaaactcctaaatataaatatgattttcatttctgtgaagagtatttttcaaattactgaatccccaaactctgcttaatcttaatgtttatacttgttttcttatatacttatatatttaaaaaatatgtaagtccaggctgggtgcagtggctcacacctgtaatcccagcactttgggaggccaaggcaggcagatcacttgaggccaagagttggacaccaggccaatatggcaaaaccctatctctactaaaaatagaaaaattagctaagtgtagtggcaggtacctgtaatcccagctactcaggaggctgaggcaggagaatcacttgaacctgggaggtagagattgcagtgagctgagatcgtgccactgaagtctatcctgggcaacagagtgagactccgtctcaaacgaactatatatgtatatatacgtccaaactttgccatcaatatctatatgtccatgatttgctgttaaggttttttgttttgtgtttttaaagacaagg

SEQ ID NO: 4437 - DNA, 766 bp, Homo sapiens
cctgacatcaggagttcgagaccagcctggccaacatggtgaaaccccatccctactaacaatacaaaaattagctgggcatggtcgtacatgcctgtaattccagctacccaggaggctgaggcaggagaattgcttgaatccgggaggcggaggttgcagtgagccaagattgcgccactgtactctgggcgacagagcaagactgtctcaaaaaagaaraaaaaaaaaagaaaatatattttcagaaactcctaaatataaatatgattttcatttctgtgaagagtatttttcaaattactgaatccccaaactctgcttaatcttaatgtttatacttgttttcttatatacttatatatttaaaaaatatgtaagtccaggctgggtgcagtggctcacacctgtaatcccagcactttgggaggccaaggcaggcagatcacttgaggccaagagttggacaccaggccaatatggcaaaaccctatctctactaaaaatagaaaaattagctaagtgtagtggcaggtacctgtaatcccagctactcaggaggctgaggcaggagaatcacttgaacctgggaggtagagattgcagtgagctgagatcgtgccactgaagtctatcctgggcaacagagtgagactccgtctcaaacgaactatatatgtatatatacgtccaaactttgccatcaatatctatatgtccatgatttgctgttaaggttttttgttttgtgtttttaaagacaagg

SEQ ID NO: 4438 - DNA, 2199 bp, Homo sapiens
cgtctgtacctctcctgagacgtcacacttggaccagcatggttctctagatgtagtccatggatggggtggtgcccagatgaattttagtcccctgtgacccagacactctgctacagccagagtaacttgaaactaaattttcatttagcaatcacattaggacttagtgaacaattgcttgttgtctgtttattcacctattgacgtttttcaagcacccactataagtttagtatgtctgttaaactatagcttagacatggccttctactcactacagtttctaaggaaggagaaccaaccttagaaaaataaaattctttttaacaaatagttggttgccctccattgtagctcccccaaaaagccttccacagactcattctcaaaagtaagtgtcgcatgtttaaaaaattggaccgggacctgaaactacatagcggcaaaggctcttcctccactggcatctatccaggatgaattagtaaaaatctttaaatctgttgtcagtctgacataaggattagttaatgtattttatgcaaaggcaaagccagcacagattctcattttaataagaaatatatgatatagaaagataaattttcatctttatatcattgatatagtacattatacagatgtacctaattaagagataatgatatgtaatatggtaggcattaataacaaagacaatgtggaagattgtaggacaaaccatcagtgaaatgattgtattaggatatagcttttgtaatagaagaaaacatgctgtaatgaaggcatgaaaaatacagttgtttacagtgacttttccaggtttggtcactgttcagtccagggtaggtgatgagaaagaacagaacgcagactccaggcaagaaggagagtagagtagataaaagaacctcctttcttgtttcctgtactccttcctgttgattacaggctgcctctgaccatacacccaaagaaaggggtaacaactttaacccttaacttaggtgaggactagtttgagaaacacctgatagtaaggaataatcaagggcatggaaagataaatggcctggagtcatcctttcctgacttttccaaatctctccatttttgtcattgtcagaagtagtttcatttggaccatggcagctacagggtgcaagtatttttcctttacctttaatgcatcttggaacaggtggagtaggtggaggttggagagcacagaacaaatgaaaaaaagaaaaacccacatctgacccaagaagactgaagatggactctctgactcctatttgcctccagactcctaggactaattcagttcagcaaacagtctaccaaaatacactgtgctagtcattataggatcccaaagacaagagatgtatcactcccacagtctagtggggaggaaatggcaccaacacccagataatgagaatcaagagtagaatgtgctaaatggcctaaggagcccataacccctggcccacggactggtactggtcatggcttgttaggaacccagccacacagcaggaggtgagcagcgggctagcgagcactgctgcctgagccaaaaaggttggagacctctggcctgagagaaacagagtgttgtagaagcttaaaaggcaaaagccttcacatttaatttggggacttggggtccccaaattactcaaactattgagtaaatagtctgtgaggtaaaccttaaaggatgaataggattttcataggtaaagatgagcaggaaaatgcatgctaggttgttactccagagggaagtcccaagtgatgttrtgcacacagaattcttcacctactgtacctaaagagctaagtagtaaagacatccatgttcttgctctctgggtctcgtagtatcatgaagataacccagattattctcagagctagagatcacctttgcttccttgacaagtcacgtgcaattttgacagccagctaccaggttaacaaatataaatgtgaacccaggatacagatagagtcaggtctttttcctcctcttaaaggcaattagtagttattgacctggggcttctgggtaaatgattgtctaaaacatccatttgtaaaggacatctttacaactccgtaagcactaactttcgggtagccaacttcagcagactagaaaaatcagcatattatgtatttaag

SEQ ID NO: 4439 - DNA, 607 bp, Homo sapiens
tgtggatggactggcagtggctatacagtgggcagacccagaggagctgtctgggggcccagggcaggcaggggtcattctggaaaaccaagcttctagtgctgcagggacagcctctgtgcccctccccggctcaggccccttcctcccctcttctggctcctcctgtgtggaatctctcaggttccagtggtmacctgagagataggagtctctgctcttctgtgtccctttgccccttcatcttgtgtccggtcagctttccagggtggctgtgttcagtggctgaggggtgagaaaccctacgcctcaaggacagaccccgcttttcccagaggccactagggagctcagtggagctgacaggtcctaccagtagcttgggcacacaagaccccatctgggtgatgtgtctccaaagagagtcatgttgacaggagtcagtctccctgagcccagagctggcacatagcagagccagggctgggtccccaaggttgtcagaggcaaagccttgagctccaaatcccgttcagattcagttcttcactgatgatgaggctccgggaggagagcctgatggccaggcaggcagcgtgcagggatc

SEQ ID NO: 4440 - DNA, 607 bp, Homo sapiens
tgtggatggactggcagtggctatacagtgggcagacccagaggagctgtctgggggcccagggcaggcaggggtcattctggaaaaccaagcttctagtgctgcagggacagcctctgtgcccctccccggctcaggccccttcctcccctcttctggctcctcctgtgtggaatctctcaggttccagtggtaacctgagagataggagtctctgctcttctgtgtccctttgccccttcatcttgtgtccggtcagctttccagggtggctgtgttcagtggctgaggggtgagaaaccctacgsctcaaggacagaccccgcttttcccagaggccactagggagctcagtggagctgacaggtcctaccagtagcttgggcacacaagaccccatctgggtgatgtgtctccaaagagagtcatgttgacaggagtcagtctccctgagcccagagctggcacatagcagagccagggctgggtccccaaggttgtcagaggcaaagccttgagctccaaatcccgttcagattcagttcttcactgatgatgaggctccgggaggagagcctgatggccaggcaggcagcgtgcagggatc

SEQ ID NO: 4441 - DNA, 788 bp, Homo sapiens
aggccagtcatctgggccctctccaagccccatcccatcagctggggtccaagaatgaagtaggtcaggggtttaggccaggggaggccagtgaagaaccttctctcctgtcacccctacctcagtattttctctccccagtccctccccactcccagtggcaagacctaaggggtggtggagcatggcaagagggtagattggaggccagacaggaagagtcctggtgctcactctcagagtctgcgccacaccagctgcaccgcaaggcgagcatgatgccaggggcgtgcgtggctcagtggcagccgcagctaggaaggactagaaagtggctagaccacgcagccaggatgctggcctggctactacatatttattcattagctagctgggctaggggcgtggctactgaggagaggatgggaggggtcggtgcccaggcagggccaccaggaagagcgcgagcgctccaaactcacccaggtgtgctctggtcccagggctgcactgatgccagcaacaatcgctgaggttaatcctgcaggggaggggtgacctattatyatccccacttacagtccaggaaacagaggctggggaccagaatgacacaccaaagccaccagcaagaaaggtcaaatagtgagggcaccttggaccccagtgcccatgactttcggggcaaggatgggaggaaggtgtaggatgtctcttgccccactgtgggcccggaactgccaccccatcccaagaccacagcctccctcctacccaggcccccctgc

SEQ ID NO: 4442 - DNA, 788 bp, Homo sapiens
aggccagtcatctgggccctctccaagccccatcccatcagctggggtccaagaatgaagtaggtcaggggtttaggccaggggaggccagtgaagaaccttctctcctgtcacccctacctcagtattttctctccccagtccctccccactcccagtggcaagacctaaggggtggtggagcatggcaagagggtagattggaggccagacaggaagagtcctggtgctcactctcagagtctgcgccacaccagctgcaccgcaaggcgagcatgatgccaggggcgtgcgtggctcagtggcagccgcagctaggaaggactagaaagtggctagaccacgcagccaggatgctggcctggctactacatatttattcattagctagctgggctaggggcgtggctactgaggagaggatgggaggggtcggtgcccaggcagggccaccaggaagagcgcgagcgctccaaactcacccaggtgtgctctggtcccagggctgcactgatgccagcaacaatcgctgaggttaatcctgcaggggaggggtgacctattattatccccacttacagtccaggaaacagaggctggggaccagaatgacacaccaaagccaccagcaagaaaggtcaaatagtgagggcaccttgraccccagtgcccatgactttcggggcaaggatgggaggaaggtgtaggatgtctcttgccccactgtgggcccggaactgccaccccatcccaagaccacagcctccctcctacccaggcccccctgc

SEQ ID NO: 4443 - DNA, 788 bp, Homo sapiens
aggccagtcatctgggccctctccaagccccatcccatcagctggggtccaagaatgaagtaggtcaggggtttaggccaggggaggccagtgaagaaccttctctcctgtcacccctacctcagtattttctctccccagtccctccccactcccagtggcaagacctaaggggtggtggagcatggcaagagggtagattggaggccagacaggaagagtcctggtgctcactctcagagtctgcgccacaccagctgcaccgcaaggcgagcatgatgccaggggcgtgcgtggctcagtggcagccgcagctaggaaggactagaaagtggctagaccacgcagccaggatgctggcctggctactacatatttattcattagctagctgggctaggggcgtggctactgaggagaggatgggaggggtcggtgcccaggcagggccaccaggaagagcgcgagcgctccaaactcacccaggtgtgctctggtcccagggctgcactgatgccagcaacaatcgctgaggttaatcctgcaggggaggggtgacctattattatccccacttacagtccaggaaacagaggctggggaccagaatgacacaccaaagccaccagcaagaaaggtcaaatagtgagggcaccttggaccccagygcccatgactttcggggcaaggatgggaggaaggtgtaggatgtctcttgccccactgtgggcccggaactgccaccccatcccaagaccacagcctccctcctacccaggcccccctgc

SEQ ID NO: 4444 - DNA, 741 bp, Homo sapiens
taatcagaaatgtaaaagaaaggcttggcatagcattctggaataatactgtgactccttttgcctttccatgtgatcttattctttttgtgtttatggaacgtagataagatgctgagtgctgcattctgcattttttgcctcaggcatttaacagaatgccagctttccatgtgcatggacctgcactcactcagtacctactacttggcaagccgaagtcacccactgtgtaccctttcccctaatgaagcttccattatcccactttaacacctgtattctcaatttactgtccctatcaaaagctctcaagaaatgacctgaaacctttacataaatctagtaaagcaaattatctcgttgaaggctttggctagtgaattaacagttgagacttctgtgctgtatgtgcctgtgtttgtttctaacatgatgaaaagacttcatgtctgtccttttcrtgggatgaggatggattaactcgggaggaaagattgtgacttattgatggaacaatgggctattcaaacactcaaaaaagagtggtttcttttatggaggggaggagggtcctaaaggcttggcactcttcctgatgagctgtcaaaaaggaatagaatgaaggtgatggtttgggtagagggtgaggtgaaaagaaatggaaagtggtgaaccttactccgttgatccccatgggcttagggaacagagatgcaggttctggattccaagtgttgt

SEQ ID NO: 4445 - DNA, 818 bp, Homo sapiens
catcatcacgctatgcagggagaaggattcctttcattagtgtctctagctttcaactcttgattattcaacattagtcacttgacagaatcggtaaaagaacagaggagtgaaaacacaaaatgtgttcatgaggcctggccggtgcacacagagcacacagcacgcctcttgcctggtggtcctcttcagagtgatgcttataccacatcacacatcgtgtgctataaggtgtgcagactcaaattatctcccttgagatggagtcttaaatatcaagttcaggctgaaatgtctcttttccagcaataagtacggaagtatcttaaaagcatgtttctgtttaaatttgayaggatgggtgaagtgaaagtggagaagaggcaagcattagaaacggcaacaaaggcctcccagctgcaccgccaagacccttcagtcgagagctttaatttaactgtgctccatctcatttggcccagggatggaggccaaacaaggtaactgctccctttcacaggctaggagatgactgcctcttacaattaaacaatcatagcacatttgactattcccttttattgacaaaacagcctgctgtgaaactcacaaatctcctaggcgatcattatagatccagctgatttcatttgactgatgcttgtgcagggtctccactcaggtctcaaacaatgagaaagttggaaagtatggcattttgggaccattttcgctttttcttggaaaagacgtttttcagaacaaattcaactaacccattcaggcaacaaacacatgctgtccataaccaggtttat

SEQ ID NO: 4446 - DNA, 396 bp, Homo sapiens
ggcccagggtcggggggctgtgggtggaagtaggaatcgccacaactgtctctgagcccctccctaaagggtgaagggtgtaaggggtgggttttgatggctgtgggcttagctgtggtcagtggactcaaaggccagttggccagttagcagtgaccagagagcagagggggcctgtgtgtgttttgccccagggtcttcaggctgcctggctgcctctatccgcccccctggtgtgtccagcacccccctggggtatccagcacctgtaacctgtagccccgcttctcagtccaggcctgttccagggcccccccggggtatcaagcacctgtrgcctgtagccccacttctcagtccaggcctgtgtaaaacctggccccgggttgggttttg

SEQ ID NO: 4447 - DNA, 396 bp, Homo sapiens
ggcccagggtcggggggctgtgggtggaagtaggaatcgccacaactgtctctgagcccctccctaaagggtgaagggtgtaaggggtgggttttgatggctgtgggcttagctgtggtcagtggactcaaaggccagttggccagttagcagtgaccagagagcagagggggcctgtgtgtgttttgccccagggtcttcaggctgcctggctgcctctatccgcccccctggtgtgtccagcacccccctggggtatccagcacctgtaacctgtagccccgcttctcagtccaggcctgttccagggcccccccggggtatcaagcacctgtagcctgtagccccacttctcagtccaggcctgtgtraaacctggccccgggttgggttttg

SEQ ID NO: 4448 - DNA, 823 bp, Homo sapiens
ttttagtagagatagggtttcactatgttggccaggctggtctcggactcctgacctcgtgagttgcccgcctctgcctcccaaagtgctgggattacagtcatgagccaccgcgcccggcccccatctgctttcttactctagggtccagcagacaggaaacatctggaatgccctcagctggagtcactgaaatgaactagggaaaaaacaaaggagattccaacgtgtgtgtgtgattccaacactatgtggcagggtgtgccatgaaggaactgtatcatgttttagacttaagacgaacaaccacacatagtgcgtttttggagaacttcatcaagctttacaatctttcttgttgtttctctccaatgacccccaaaatatcaaacattattttcttcccctgaagtttcattgttgagagagaagaaattacattttaaaattcgtattcttcactcagcattgcaatataaggacggtttgcaagcagacagggaaygggtgaaaacatattttgtgttttaatcttaagacatacatttttatactaaagtcacatactacatttcgatcacaagcacagaaattctgctcttttttgccccctcccaccctgggggaaaaatagattcaaatttttggagacttaattgccctaaactttcatctttatgatggaaatgacatttttcctggaagatggaacttggcccttcactgctccatgactttctcggactgagttgtgtccttgaggaagagggagtgggtaaactggaggagggtgggggtcctgagaaggagtgtgggcaactgg

SEQ ID NO: 4449 - DNA, 823 bp, Homo sapiens
ttttagtagagatagggtttcactatgttggccaggctggtctcggactcctgacctcgtgagttgcccgcctctgcctcccaaagtgctgggattacagtcatgagccaccgcgcccggcccccatctgctttcttactctagggtccagcagacaggaaacatctggaatgccctcagctggagtcactgaaatgaactagggaaaaaacaaaggagattccaacgtgtgtgtgtgattccaacactatgtggcagggtgtgccatgaaggaactgtatcatgttttagacttaagacgaacaaccacacatagtgcgtttttggagaacttcatcaagctttacaatctttcttgttgtttctctccaatgacccccaaaatatcaaacattattttcttcccctgaagtttcattgttgagagagaagaaattacattttaaaattcgtattcttcactcagcattgcaatataaggacggtttgcaagcagacagggaatgggtgaaaacatattttgtgttttaatcttaagacatacatttttatactaaagtcacatactacatttcgatcacaagcacagaaattctgytcttttttgccccctcccaccctgggggaaaaatagattcaaatttttggagacttaattgccctaaactttcatctttatgatggaaatgacatttttcctggaagatggaacttggcccttcactgctccatgactttctcggactgagttgtgtccttgaggaagagggagtgggtaaactggaggagggtgggggtcctgagaaggagtgtgggcaactgg

SEQ ID NO: 4450 - DNA, 764 bp, Homo sapiens
tgtgcactgtgacaggcacttctgagccagggcactcactgtggctcgcagggtgatgtgctgaagacagtcatttccccaaccagtctgtgtgtgtgagaagacaacaccaaattcctttccttagcaaaagccacagccagcgtttttagtgctgacattttattttcttgtcttccagctggttacatttttcaaaaacagttttgagtcctgtatggaaagcttcattggtgcacaccacaggatgtgttccatgaagccatcccaggaccaastggtcacaaagaagctaagagaaaatgctgccttggccctgcatataatgagccacacagggccggggcggggggcgggggcgcaggtagaggcgtgggggagaaggattcacacctgaggtgcaagaagagaaaggaaggccagaggaatctttcattgaagacagattgtttgaggacaagcagctcctgtgaagaggctgcccagatcctctggtattttaactgggcaatgaatcagcatgccccacctgcagagcctctgcaagtcctttgccacctgcctcaacttgcaagtcgctgtgtccatctgcagccgactgtcctttccatcatccatcatccgacacatgaatgcagctgctctgacagttttacaagccagacagaagccccctcaggaagggccctctctgatacctgcttcctaagtcagtttccttcagggcagatgaaaacagctgtggccattgttgggggtgatct

SEQ ID NO: 4451 - DNA, 764 bp, Homo sapiens
tgtgcactgtgacaggcacttctgagccagggcactcactgtggctcgcagggtgatgtgctgaagacagtcatttccccaaccagtctgtgtgtgtgagaagacaacaccaaattcctttccttagcaaaagccacagccagcgtttttagtgctgacattttattttcttgtcttccagctggttacatttttcaaaaacagttttgagtcctgtatggaaagcttcattggtgcacaccacaggatgtgttccatgaagccatcccaggaccaactggtcacaaagaagctaagagaaaatgctgccttggccctgcatataatgagccacacagggccggggcggggggcgggggsgcaggtagaggcgtgggggagaaggattcacacctgaggtgcaagaagagaaaggaaggccagaggaatctttcattgaagacagattgtttgaggacaagcagctcctgtgaagaggctgcccagatcctctggtattttaactgggcaatgaatcagcatgccccacctgcagagcctctgcaagtcctttgccacctgcctcaacttgcaagtcgctgtgtccatctgcagccgactgtcctttccatcatccatcatccgacacatgaatgcagctgctctgacagttttacaagccagacagaagccccctcaggaagggccctctctgatacctgcttcctaagtcagtttccttcagggcagatgaaaacagctgtggccattgttgggggtgatct

SEQ ID NO: 4452 - DNA, 766 bp, Homo sapiens
cagcagctcccctccgaggttgggctcttcaccaaccaaggccttttcttgcactgtctcctttaatccttataacaacactgcaaggtaggtaccattatcatccccattttacagacgaggaaactgaactgtagcatgggcgaagtggtgaaaggtgggtgtcagctttcagggacaggagagcctcccatggactgagctagcctgggaggtacaaataatgttactctatgttgggctggaaccccaccacacacacatgttgagtctgtggcccccaaggctgatgtttccttccgttttttttttttttttttttttttttttgagacagggtctygctctgttgcccaggctggagtgcagtggtgcaatcttggctcactgcaacctccacctcctgggttcaggtgattctcttgcctcagccttctaagtagctgggattacaggtgcctgccacgagacacccagctaatttttgtatttttagtagtaacggggtttcaccatgttggccaggctggtctcaaactcctgacctcaaatgatccgcccaacttggcctcccaaagtgctgggattacaaacgtgagccactgcgcccagccacctcctctcttttctaccacttcctgattctgtttcctccatctctcaccactttcacgtctttcaactctttttatctttttgttttataaaaaaataaatttgcccatgttcttggagagcctgctgtctcctaccccaattggtcaga

SEQ ID NO: 4453 - DNA, 716 bp, Homo sapiens
accctcccccactccctatccaaatgtagaatcaactgtaccttgccccccacccccaccccagggcagggcttgtctcagtcccctcggagtccactgattccggggccctcagtaaatgtttgtggaatgaatgaatgagtgaactaatgagtgtttggagggaggaaccaaacacttaggaggcctgagtcccaggcccaatccctggatcatccttgcctgtaccttgtcctcaccaggacgcctctctctgggcccagagaagagggtctcaaggtaggggctgggagcagagtggggaagggaggagtcacaggggaagggaaagtggacgcatgactgacagaggacagagctcggaccttgaaatcagaaggcctggttcaaatcccagctgcacggctcagttcaaatcccagctatgtgaccttgggtacgttcaaagacaaatgatgactgctatagaacagtccctgtggagtttacaaagccctattttacatgtatctttggtcctcagtaaccatcctgtaatgtgggtattatcatcaatatacccattttacagaagaggaaatataggctggaaaggtcaagggacttgcccaaggtcacacagcaagcaccccaccygctcacccacctcctgcctttgcttctacccctgcctgtgctgggaagagggagggctcagatctaagtcttccagcacg

SEQ ID NO: 4454 - DNA, 730 bp, Homo sapiens
cctgcccccgtcctgtgtctgtctcacagggaagttgtggattcattcactgcttattcagtaggtagtcaccaggtgccactgaatagcctgccagctcatgtgggcctgctgggctcctggcctgtggacagtgccaggctgtgccctgcatrtctgcccctgtggtcctcatctttctatacttctatcagttagccacgtgctttttatttgatgttattttgggggagatgttggggtcactgtcaagttttatagtgtagaggcccattcagtctttcttttaaaaacatttatttttaattcattgaacccaaagcacctactataagccaagcaccatgttaggtcctaggggtagagtgatacaacaggacagacaaaggctctttggggacagacattaaattagacaaatgattatccacatcataattacacttgtgctaagcactgggaaggagaggtgcagggaataggggcctctcaagggtgacgcatgtctgggatctgggggttgtgagttggtttcagtttaactcccaaaaggcagtgtgagttctaggacttgctcttaatcactgcccccatggaccacctgcccatggtatgtggttccccttccacagttatgagtacaggcagttcctttgcctggcataatgaggactggctggacaaagtctcatccttctgaaagtgtcccagagaccttcgtctcactcct

SEQ ID NO: 4455 - DNA, 800 bp, Homo sapiens
caagataggcatgcatcttccctctgagatagctcttttgtcagtgccaatcagatcactaaaggctatttttgactgaggcaggaacatggtttcggagcctaaaactcattttctgccctctcctagactcaaatctctcatttgttatcctagattttccatttcttcattaaaaatatccgtttctggtggctattgattacttccatggcagagtgacagacctgaaatctatttcatttggaatttgcacacaatgaaggactctggaaatgtcttcagctcaaattgcatcaggagggatttccaaagggagagggcaagagctgacgtcccacaaacctggtctaacttggcttcaagaggattagtaagtgtgcatcccaaggaggatacagtgtgaggttagctgaatagaaggggaggtgacagctgatttttgagaaggcattttgatgaagtttctaagcaaggaaaaaatacttgctgacagacagcagtcaatactgtgatagcagacaattttmtggggctttgactaggaaagcattttgtcttaagcaaagcatccatattgcaaatgccagacagttagcataggcagcacacagtcacgacatttgaaactttggatgttggagttcactgctcttctaattctttctaaacatactgcttctaatatttgtctttgaagattatatcataaaagacaagacaaattcattggtcactgttcccaaaacattagtttgccaaaactgaactatgtatcacaagaataaatagaatcggat

SEQ ID NO: 4456 - DNA, 800 bp, Homo sapiens
caagataggcatgcatcttccctctgagatagctcttttgtcagtgccaatcagatcactaaaggctatttttgactgaggcaggaacatggtttcggagcctaaaactcattttctgccctctcctagactcaaatctctcatttgttatcctagattttccatttcttcattaaaaatatccgtttctggtggctattgattacttccatggcagagtgacagacctgaaatctatttcatttggaatttgcacacaatgaaggactctggaaatgtcttcagctcaaattgcatcaggagggatttccaaagggagagggcaagagctgacgtcccacaaacctggtctaacttggcttcaagaggattagtaagtgtgcatcccaaggaggatacagtgtgaggttagctgaatagaaggggaggtgacagctgatttttgagaaggcattttgatgaagtttctaagcaaggaaaaaatacttgctgacagacagcagtcaatactgtgatagcagacaattttctggggctttgactaggaaagcattttgtcttaagcaaagcatccatattgcaaatgccagacagttagcataggcagcacacagtcacgacatttgaaactttggatgttggagttcactgctcttctaattctttctaaacatactgcttctaatatttgtctttgaagattatatcataaaagacaagacaaattcattggtcactgttcccamaacattagtttgccaaaactgaactatgtatcacaagaataaatagaatcggat

SEQ ID NO: 4457 - DNA, 663 bp, Homo sapiens
aaagcttccctctgccaaagaggttcaagcatgcagcaccctccagccctgagtgagcagaaaccggggagtgtctaagtgggtctaagggaggagaccacccctcctattgtcttatgcccgatttctgcctccaaagaaagaagaagtaaaaactaaaaggcagaaatgaaatccacaagcagacagctcggcgccacaccctgggcctggtagttaaagatcgacccctgacctaatcggttatgtcatctatagattacagacattgtatagaaaagcactgtgaaaatccctgtcctgttctgttctaattaccggtgcatgcagcccccagtcacgtaccccctgcttgctcattcgatcacgaccctytcaagcggacccccttagagttgtgagcccttaaaagggacaggaattgctcactcagggagctcggctcttgagacaggagtcttgctgatgctcccggctgaataaaccccttccttctttaacttggtgtctgaggggttttgtctgtggcttgtcctgctacatttcttggttccctgaccaggaagcaaagtgattaacggacagtcgaggcagccccttaggcagcttaggcctgccctgtggagcatccccgcgggggactctggccagcttgagcgacac

SEQ ID NO: 4458 - DNA, 663 bp, Homo sapiens
aaagcttccctctgccaaagaggttcaagcatgcagcaccctccagccctgagtgagcagaaaccggggagtgtctaagtgggtctaagggaggagaccacccctcctattgtcttatgcccgatttctgcctccaaagaaagaagaagtaaaaactaaaaggcagaaatgaaatccacaagcagacagctcggcgccacaccctgggcctggtagttaaagatcgacccctgacctaatcggttatgtcatctatagattacagacattgtatagaaaagcactgtgaaaatccctgtcctgttctgttctaattaccggtgcatgcagcccccagtcacgtaccccctgcttgctcattcgatcacgaccctctcaagcggacccccttagagttgtragcccttaaaagggacaggaattgctcactcagggagctcggctcttgagacaggagtcttgctgatgctcccggctgaataaaccccttccttctttaacttggtgtctgaggggttttgtctgtggcttgtcctgctacatttcttggttccctgaccaggaagcaaagtgattaacggacagtcgaggcagccccttaggcagcttaggcctgccctgtggagcatccccgcgggggactctggccagcttgagcgacac

SEQ ID NO: 4459 - DNA, 663 bp, Homo sapiens
aaagcttccctctgccaaagaggttcaagcatgcagcaccctccagccctgagtgagcagaaaccggggagtgtctaagtgggtctaagggaggagaccacccctcctattgtcttatgcccgatttctgcctccaaagaaagaagaagtaaaaactaaaaggcagaaatgaaatccacaagcagacagctcggcgccacaccctgggcctggtagttaaagatcgacccctgacctaatcggttatgtcatctatagattacagacattgtatagaaaagcactgtgaaaatccctgtcctgttctgttctaattaccggtgcatgcagcccccagtcacgtaccccctgcttgctcattcgatcacgaccctctcaagcggacccccttagagttgtgagcccttaaaagggacaggaattgctcactcagggagctcggctcttgagacaggagtcttgctgatgctcccggctgaataaaccccttccttctttaacttggtgtctgaggggttttgtctgtggcttgtcctgctacatttcttggttccctgaccaggaagcaaagtgattaacggacagtygaggcagccccttaggcagcttaggcctgccctgtggagcatccccgcgggggactctggccagcttgagcgacac

SEQ ID NO: 4460 - DNA, 663 bp, Homo sapiens
aaagcttccctctgccaaagaggttcaagcatgcagcaccctccagccctgagtgagcagaaaccggggagtgtctaagtgggtctaagggaggagaccacccctcctattgtcttatgcccgatttctgcctccaaagaaagaagaagtaaaaactaaaaggcagaaatgaaatccacaagcagacagctcggcgccacaccctgggcctggtagttaaagatcgacccctgacctaatcggttatgtcatctatagattacagacattgtatagaaaagcactgtgaaaatccctgtcctgttctgttctaattaccggtgcatgcagcccccagtcacgtaccccctgcttgctcattcgatcacgaccctctcaagcggacccccttagagttgtgagcccttaaaagggacaggaattgctcactcagggagctcggctcttgagacaggagtcttgctgatgctcccggctgaataaaccccttccttctttaacttggtgtctgaggggttttgtctgtggcttgtcctgctacatttcttggttccctgaccaggaagcaaagtgattaacggacagtcgaggcagccccttaggcagcttaggcctgccytgtggagcatccccgcgggggactctggccagcttgagcgacac

SEQ ID NO: 4461 - DNA, 794 bp, Homo sapiens
catgacctaagcactgagcccagtgatattctacagcaccctctgtggatagggctcaagcatgagagtcacatcacctaggtgtttgacccaggtatctgtcacaatcccctctgagggctgggtccaggcagggaagtaaaatcacttaggtgctaggccaaagtatatgtcacaacacttgtgggaaggtccagggctaagattcacaattccacatgtgtcccagcttcaggtaaaagagtcaacacctcctgtgagttgcatccaagtacatgagtcacaatctcaatgatggactagattcatgcatgagagtcccaattccacctgcaggctgtgtcctkatatcagagccaaagcctcacctgtgtgatgaaccctgatcctagagtcatcatctacctctggacaaaatgcacatacgagaatcagaattccagctttcaactgcatccagatgtacaattcagaagctcatcagtggtctctattcatgtgggagggtgacactttttactgtgggctggaagtgcatataagaatcacaatttcagctgtgttctgggtcctcttatcacactctctttacctccatagggctttgcattgtttgggcaagagtcacaatcccctttgagacattggtgctggtataaactcatgatcttacctcttttcctaagtccaggtatgagagtcaacacctctcatattggctgggtccaggtatgaaaatcatgactgtgcctcttagttgggttcagatatgagtcactctcccacctgtggct

SEQ ID NO: 4462 - DNA, 794 bp, Homo sapiens
catgacctaagcactgagcccagtgatattctacagcaccctctgtggatagggctcaagcatgagagtcacatcacctaggtgtttgacccaggtatctgtcacaatcccctctgagggctgggtccaggcagggaagtaaaatcacttaggtgctaggccaaagtatatgtcacaacacttgtgggaaggtccagggctaagattcacaattccacatgtgtcccagcttcaggtaaaagagtcaacacctcctgtgagttgcatccaagtacatgagtcacaatctcaatgatggactagattcatgcatgagagtcccaattccacctgcaggctgtgtcctgatatcagagccaaagcctcacctgtgtgatgaaccctgatcctagagtcatcatctacctctggacaaaatgcacatacgagaatcagaattccagctttcaactgcatccagatgtacaattcagaagctcatcagtggtctctattcatgtgggagggtgacactttttactgtgggctggaagtgcatataagaatcacaatttcagctgtgttctgggtcctcttatcacactctctttacctccatagggctttgcattgtttgggcragagtcacaatcccctttgagacattggtgctggtataaactcatgatcttacctcttttcctaagtccaggtatgagagtcaacacctctcatattggctgggtccaggtatgaaaatcatgactgtgcctcttagttgggttcagatatgagtcactctcccacctgtggct

SEQ ID NO: 4463 - DNA, 624 bp, Homo sapiens
ccccggccccaagcaaaacaaccctctttccctcctagacttcaaacgtaggaccctctctgccatctccccatgggactccaaagttcacattgtccacctttcagaggacaccctaatgtcggatgtygccacaacatctacctcttcagaggcccagaaattaaagctccatgccccttacagctcacagccaatcctctgggcctgatcaggaattgggggatgctctcatcagttccccccaatacccaggggaccagcagccccccagctctggctccaagctccccacctgtgcaaatagggtgccgagtgcaattgggagtcatatttattgcctccttatcatcctcgcctggaaggagtggggaaaggttcaatagcctgtggcctggacaggtgcaaactcccaggaggccacgggctgacttgattgaactggctgtgggagcactgcctcccttgtgagaatgaagataagtaagagaaaaatacagtggaagggcaacaacagggccagctactgtgtggcttctctgtcccgagggatatcctgagtctgaagctcacagatgagccaggaggctgcaaggtggattggcctggtctgcccccacagca

SEQ ID NO: 4464 - DNA, 624 bp, Homo sapiens
ccccggccccaagcaaaacaaccctctttccctcctagacttcaaacgtaggaccctctctgccatctccccatgggactccaaagttcacattgtccacctttcagaggacaccctaatgtcggatgtcgccacaacatctacctcttcagaggcccagaaattaaagctccatgccccttacagctcacagccaatcctctgggcctgatcaggaattgggggrtgctctcatcagttccccccaatacccaggggaccagcagccccccagctctggctccaagctccccacctgtgcaaatagggtgccgagtgcaattgggagtcatatttattgcctccttatcatcctcgcctggaaggagtggggaaaggttcaatagcctgtggcctggacaggtgcaaactcccaggaggccacgggctgacttgattgaactggctgtgggagcactgcctcccttgtgagaatgaagataagtaagagaaaaatacagtggaagggcaacaacagggccagctactgtgtggcttctctgtcccgagggatatcctgagtctgaagctcacagatgagccaggaggctgcaaggtggattggcctggtctgcccccacagca

SEQ ID NO: 4465 - DNA, 883 bp, Homo sapiens
ttgcccaaaatcagacagcggcacattcaggagccaggattgtggttccagaggtggcatgcttagctgccttgcagctgcccccacatgggccttgctcacctattcgtcacactgattctggtctgtgtgctgggaggaggtgggtaccacctggcacacaccatcgtgcagaatgtgccgaatcagcaataccagtttatttatgtaacctgagatctgctgactgatggaaaccaagcgctggcagatggatggaagataggatcaggtgttctcctctgagtcattgacctccccccagctaaggggtgctacagttgagagggtctgacagtccccagatgtcagagacctgggtccccatggctttctgttcaacacctagccttgcctgaaatacttcagagggtgatctcaggttttcaccagagagagggagatgtgttttagaggaggcctttgggtggcccccagacacttggagacactttgtcaacctcagcatcaggtgggctctggcccagaaccccctactcccacctgagctcagtttgtcattgtcattatacatggtgtgcagaggcccagaggagactcctgaaattttcagaagagcctggtgtggtggtgtacttgcagagtgcttgaaacaatgcctggaccaatcattgcttgccccggtgtttcaggctgtgtttctccagaagccaactctgagagaagggcaggsaaagggcccctggcggtcatcagcagcattaactgagcacttaccacgcgccagacctcttctgggtgctcctgtgctccccagagctccggttcgggagggtgattttcagcaggagcacggtacttgatatgtatttgttgaatgaat

SEQ ID NO: 4466 - DNA, 883 bp, Homo sapiens
ttgcccaaaatcagacagcggcacattcaggagccaggattgtggttccagaggtggcatgcttagctgccttgcagctgcccccacatgggccttgctcacctattcgtcacactgattctggtctgtgtgctgggaggaggtgggtaccacctggcacacaccatcgtgcagaatgtgccgaatcagcaataccagtttatttatgtaacctgagatctgctgactgatggaaaccaagcgctggcagatggatggaagataggatcaggtgttctcctctgagtcattgacctccccccagctaaggggtgctacagttgagagggtctgacagtccccagatgtcagagacctgggtccccatggctttctgttcaacacctagccttgcctgaaatacttcagagggtgatctcaggttttcaccagagagagggagatgtgttttagaggaggcctttgggtggcccccagacacttggagacactttgtcaacctcagcatcaggtgggctctggcccagaaccccctactcccacctgagctcagtttgtcattgtcattatacatggtgtgcagaggcccagaggagactcctgaaattttcagaagagcctggtgtggtggtgtacttgcagagtgcttgaaacaatgcctggaccaatcattgcttgccccggtgtttcaggctgtgtttctccagaagccaactctgagagaagggcagggaaagggcccctggcggtcatcagcagcattaactgagcacttaccacgcgccagacctcttctgggtgctcctgtgctccccagagctccggttcgggagggtgattttcagcaggagcrcggtacttgatatgtatttgttgaatgaat

SEQ ID NO: 4467 - DNA, 796 bp, Homo sapiens
cagtccctttggcctgaatggaccaagtatttctggcaactctagtccaggctgtggggccttgagggagctaagagacagcctaaagtgtccctttcctacttcagataggaccgtaaccaaataaggtcacccaggaaaggggtagccgtgcagggctgtcccaccatacgctgcagtttgcagggcacgctcacacttaggggccagcagcatttaccgaatacaaactactacmtggcagccctgggccatgggcttgaggagacacagtcctgccctcagccagctcactgtctgccccagctctccccactttacagatgagtaaactggggcacagaggagtgacatgcctgcttcaaggtcgctcagtgcctccaatagcagagctggcacccggccccaaggagcagagagatgttttttgtttgtttgtttgagacggagttttgctcttgttgcccaggctggagtgcaatggcgcgatctcggctcaccggaacctccgtctcctgggttcaagcgattctcctgcctcagcctcccaaagtgctgggattacaggcatgcgccaccacgcctggctaattttgtattttttttagaagagacagggtttctccatgttggtcaggctggcctcaaactcccgacctcaggtgatctgcccacctcagcctcccaaagtgctgggattacaggtgtgagccaccgcgctcggcctgagatgtttttaaaacagatattattggctgcgaatcaatgagaaaactgtgtgatggaagtctcagga

SEQ ID NO: 4468 - DNA, 834 bp, Homo sapiens
tgatcaaagaaaaccgaagcgcaaagaagggccaaggcttgcccaagtcacccagagggagtgtagcccaggagtcaggacacaggtgcaccggtgtccctgcaaaaccttcaccgtgcagctggggtggggacctggctgccctccaaggagcagctccctcctgcttcagcagaggccacttgtactacctgcaagctgtatttgggctgatgcgggaagggccccastgaggcagagagcggggagaccatgttaggacctgtctggtttctcccttttgctgcctctccatctttcccccagggctggaagagcacattcctgagtcagttttcccaggagtctggatggggcccaggcaagagagagcaccgtctccccattaccaacactctctctctatcccccacacacacctccttgctttcccttagagctcttcagagggtatggctgatgcaggacaggcctatccagctgcctggctcaaggagaagctggccagctttccagcctcatgttttctgggctctgtggccagggaggcccctctccaccatgctctgccacttggcaactctgggccaggcccaggtcctctctgggcttcaggtccctcatctgtgaaatatgacggcttcatagagcacttccagtgactttgccagccttaccttttgtaagccccacactgccctgcaagatggtactgtcattatctccattttacagaggggaaacaggttcagagagcatgagtggcttgccccaagtcacccacccagtaagtggtgggcttggtacttgaacccaggcagtctgaccaagctg

SEQ ID NO: 4469 - DNA, 834 bp, Homo sapiens
tgatcaaagaaaaccgaagcgcaaagaagggccaaggcttgcccaagtcacccagagggagtgtagcccaggagtcaggacacaggtgcaccggtgtccctgcaaaaccttcaccgtgcagctggggtggggacctggctgccctccaaggagcagctccctcctgcttcagcagaggccacttgtactacctgcaagctgtatttgggctgatgcgggaagggccccagtgaggcagagagcggggagaccatgttaggacctgtctggtttctcccttttgctgcctctccatctttcccccagggctggaagagcacattcctgagtcagytttcccaggagtctggatggggcccaggcaagagagagcaccgtctccccattaccaacactctctctctatcccccacacacacctccttgctttcccttagagctcttcagagggtatggctgatgcaggacaggcctatccagctgcctggctcaaggagaagctggccagctttccagcctcatgttttctgggctctgtggccagggaggcccctctccaccatgctctgccacttggcaactctgggccaggcccaggtcctctctgggcttcaggtccctcatctgtgaaatatgacggcttcatagagcacttccagtgactttgccagccttaccttttgtaagccccacactgccctgcaagatggtactgtcattatctccattttacagaggggaaacaggttcagagagcatgagtggcttgccccaagtcacccacccagtaagtggtgggcttggtacttgaacccaggcagtctgaccaagctg

SEQ ID NO: 4470 - DNA, 834 bp, Homo sapiens
tgatcaaagaaaaccgaagcgcaaagaagggccaaggcttgcccaagtcacccagagggagtgtagcccaggagtcaggacacaggtgcaccggtgtccctgcaaaaccttcaccgtgcagctggggtggggacctggctgccctccaaggagcagctccctcctgcttcagcagaggccacttgtactacctgcaagctgtatttgggctgatgcgggaagggccccagtgaggcagagagcggggagaccatgttaggacctgtctggtttctcccttttgctgcctctccatctttcccccagggctggaagagcacattcctgagtcagttttcccaggagtctggatggggcccaggcaagagagagcaccgtctmcccattaccaacactctctctctatcccccacacacacctccttgctttcccttagagctcttcagagggtatggctgatgcaggacaggcctatccagctgcctggctcaaggagaagctggccagctttccagcctcatgttttctgggctctgtggccagggaggcccctctccaccatgctctgccacttggcaactctgggccaggcccaggtcctctctgggcttcaggtccctcatctgtgaaatatgacggcttcatagagcacttccagtgactttgccagccttaccttttgtaagccccacactgccctgcaagatggtactgtcattatctccattttacagaggggaaacaggttcagagagcatgagtggcttgccccaagtcacccacccagtaagtggtgggcttggtacttgaacccaggcagtctgaccaagctg

SEQ ID NO: 4471 - DNA, 800 bp, Homo sapiens
tggccctgccagagaccctgactcctggtcctcaggggccatggctggttgtgatttgtaaggtgggacctggcacctacacagagggtgcatctggactgctgtgtgaggatgctcctttcctctgaagctagcccctgtggagggtttttggccctgtaggttgtctcagctcccgtgtgtagggggtcctggtccctgtgtacacgcaggagctctcatgccctgtgtggggctcctgcctctgcctaggaggggtcctgaccacagggtgctgacttgtgtggctgtcattctccagggtccaagggcctggaggtgctgagtcatagcctcggaagatgaagggccctagggtagagttccgccggaccctgtgaaagtcaatgtygatgagggactggcctgggcccccacaggcagggggccagcttcttccagtgggtggggactgctggaacaaggactggggcctttggggtggggggggggtcagggaggcagcctgggggtgcagcagagagtggcccccatacacccagaggatagcccagcctcaggaaacctagctccctgcttcccccacacctgaacaggtcacagcaccccccttctcttgtaccctgcatctgacctatccatctagtctcccagttggctgccccatggtgagatgaaggtggaagggtctccggcacacagttgcacacccacactgggacctctatcacctgcacacacttgggctggccacagtaacgggcacaccagccttgactgactcgggaccggcaatcaca

SEQ ID NO: 4472 - DNA, 801 bp, Homo sapiens
agcatgctgccgccttccaatatgtccaccgtatttccatcttcaataacggcaaarccttatttcaagcagcaagcagggaagcaactgcctaccataagaatatggtgggaaagatacggcaaggctcagaataatgataaccaactatagccccacactcataatgtccttgaacatgtaggacgacttctgatcccagagtcacagtgcagattctgaggagttgataagtgccactgaacagaatgagtacattttccccatcactaacggtactcaagcactacacttgaaaattgctctaatctcagtccagagactggcccagcaatatgaattttaacaaacctccaggtgatccttacgcatactcaggtttataaagcacagatatacaatattttgaaagttgggggatctacggtgatctccatatttgccactggattaaattactggatattaaaaatacatattcatttttacacatcagatgttacaaagatgtgtaaagttcatcattttctcttctccattcccactctttgaagggaagcaaatttaatagtgtgacaggaattcattcacaccaatctatgtttattcacacatatacaaatatatatactcctatatgtgttttttccttttcattccttccatttttgttgttgttgttatttaaaaaatgagatcacatcctaatacacaagattgctttgcaacctgtctttttcacttaatgtatcatggatatcccttcaggtcagcacatgcagttctaatttcttttcttta

SEQ ID NO: 4473 - DNA, 877 bp, Homo sapiens
gtgcattacagccgtttaaactatgttcttcccctggcaccataggccaggggcaccatgacataggctggggcaccatgacaatggcaaaattctggctgcagacagacccctgggcaaagtctccatacttccggagcccatcaaggttgtctgcagtcagaaaggacttacaaggcatataaacacatagaaggacaagaaacccaaatctgtaagatgctgacctggacatggttaagttccagggggtttgggaaggcctgtaaggaatatgggccgtgaggaagaggaccacaccaggtagttggaaatgctagaaatggggctggatgyggtggctcatgcctgtaatcccagtaccttaggagactcaggtgggaagatcacttcaggacaggagttcaagaccagcctgggcaacatagtgagacctcatccctacaaaatattagctgggtatggtggcatgcgcctgtattcccagctactctggagactgaggtgggaggattacttgagcgatccaggcattggaggctgcagtgagctgagattgcatcactatgctcgtctgaatgacagagcaagaccttgtcttagaaaagaaggaagaaggaaggaaggaaggaagggagggagggagggaagaaaaatggtagaaactgcttcagggcctctagggaggacccatgatgggtgagatttagatttaccctaaaaataactgttcctactgcttgaccaattgctcaaacttgtggtcattatgaaccttgctcacacacacacgcaaaaatcttatagtaacaaatttttaaaatctttaaaattcccataagccacgtaaaataatataccgtgagtttgtgactat

SEQ ID NO: 4474 - DNA, 744 bp, Homo sapiens
cagggagtcatttcacccttcmaggccttagtgtttttgtttaatgaagaaagtttataaagagagggcaatgcttaatacaagtgagtaaatggaatctcaggcacccaagaggacctatctgggtcccaatcttagtgtaggaggtgctgtggcagggaccctccatcaggactaacctcttcagtgacgatcgagacagcacctgtgcagcctggttcatggccctgacccaagcgttcatgtcctcctgggtgtcggcactgaagtagtaggtcctcatgcctgactgctcggcctgagagcccgctgtggagctgttatagatgagcgctcgcatccccgtgtgcacagcctgtagcatgaaggcagaatgcaggtcagagggaggttatcacacatttcctttataggagcaaaagcaaggaggcactatggcccttctagactaaaagcccaagcaccacccaacttgtttccacacctagaaaacatcataggctagatttatctttcttagtgcagccaggcccagtgacagctgtctgttccccaaagtaaaagccctgcagatgtaactgtttcctatttatcttactcctgctttgggagttgggagtgtgcacaaagtcaaggcttatgtgagaaacaggcttttcagaaaaccctcatttcatagaggcagactcttgggaatccctgttttggttttgctgaagcctgtgattcctgctttggctataa

SEQ ID NO: 4475 - DNA, 744 bp, Homo sapiens
cagggagtcatttcacccttcaaggccttagtgtttttgtttaatgaagaaagtttataaagagagggcaatgcttaatacaagtgagtaaatggaatctcaggcacccaagaggacctatctgggtcccaatcytagtgtaggaggtgctgtggcagggaccctccatcaggactaacctcttcagtgacgatcgagacagcacctgtgcagcctggttcatggccctgacccaagcgttcatgtcctcctgggtgtcggcactgaagtagtaggtcctcatgcctgactgctcggcctgagagcccgctgtggagctgttatagatgagcgctcgcatccccgtgtgcacagcctgtagcatgaaggcagaatgcaggtcagagggaggttatcacacatttcctttataggagcaaaagcaaggaggcactatggcccttctagactaaaagcccaagcaccacccaacttgtttccacacctagaaaacatcataggctagatttatctttcttagtgcagccaggcccagtgacagctgtctgttccccaaagtaaaagccctgcagatgtaactgtttcctatttatcttactcctgctttgggagttgggagtgtgcacaaagtcaaggcttatgtgagaaacaggcttttcagaaaaccctcatttcatagaggcagactcttgggaatccctgttttggttttgctgaagcctgtgattcctgctttggctataa

SEQ ID NO: 4476 - DNA, 744 bp, Homo sapiens
cagggagtcatttcacccttcaaggccttagtgtttttgtttaatgaagaaagtttataaagagagggcaatgcttaatacaagtgagtaaatggaatctcaggcacccaagaggacctatctgggtcccaatcttagtgtaggaggtgctgtggcagggaccctccatcagractaacctcttcagtgacgatcgagacagcacctgtgcagcctggttcatggccctgacccaagcgttcatgtcctcctgggtgtcggcactgaagtagtaggtcctcatgcctgactgctcggcctgagagcccgctgtggagctgttatagatgagcgctcgcatccccgtgtgcacagcctgtagcatgaaggcagaatgcaggtcagagggaggttatcacacatttcctttataggagcaaaagcaaggaggcactatggcccttctagactaaaagcccaagcaccacccaacttgtttccacacctagaaaacatcataggctagatttatctttcttagtgcagccaggcccagtgacagctgtctgttccccaaagtaaaagccctgcagatgtaactgtttcctatttatcttactcctgctttgggagttgggagtgtgcacaaagtcaaggcttatgtgagaaacaggcttttcagaaaaccctcatttcatagaggcagactcttgggaatccctgttttggttttgctgaagcctgtgattcctgctttggctataa

SEQ ID NO: 4477 - DNA, 644 bp, Homo sapiens
taaaatttgcaggaggcagtcaggttgccaagtctatttgcaggtatttctccacccaccacagtccgccctactycctaatcatgcactaatcctcatgggggctgtgggagctttaattaccaggcaaaaatgccaggcatttgcgataatagagattgcttaatgcaaactccagcatgagggggtggactgataggtgcgtgggggaggggccaggaagaacatggctatagtgtctgcgtgtgtgttcccggcagacctgttatgcacagaaagggatcaggaccctgctggtcaagggccagtggctaccaacgcctgtgggtggcctttcctgcccttcctttttacgccatctcccagactgcggcgcttccttccattctcctgctcaccttcccacaaaatacctatcttgtgtcctgttcctccaagaagtcactgaaggccttctccatacagatggggaaaccgaggcccagacaggaatcattagttaagagtcctcctgggcatttcttttccacaggggtctcttggagaccagaccaccagatggtcttggggctggatggaataaatctgatggggggtgggggtgattccaacctgcctccttttgcctcccctcttgcttcccc

SEQ ID NO: 4478 - DNA, 644 bp, Homo sapiens
taaaatttgcaggaggcagtcaggttgccaagtctatttgcaggtatttctccacccaccacagtccgccctacttcctaatcatgcactaatcctcatgggggctgtgggagctttaattaccaggcaaaaatgccaggcatttgcgataatagagattgcttaatgcaaactccagcatgagggggtggactgataggtgcgtgggggaggggccaggaagaacatggctatagtgtctgcgtgtgtgttcccggcagacctgttatgcacagaaagggatcaggaccctgctggtcaagggccagtggctaccaacgcctgtgggtggcctttcctgcccttcctttttacgccatctcccagactgcggcgcttccttccattctcctgctyaccttcccacaaaatacctatcttgtgtcctgttcctccaagaagtcactgaaggccttctccatacagatggggaaaccgaggcccagacaggaatcattagttaagagtcctcctgggcatttcttttccacaggggtctcttggagaccagaccaccagatggtcttggggctggatggaataaatctgatggggggtgggggtgattccaacctgcctccttttgcctcccctcttgcttcccc

SEQ ID NO: 4479 - DNA, 803 bp, Homo sapiens
taaggaaagcggcggcagcgccccagggcttcctcacccctagcttctcgccaggcgccctgggctatttatccgtagtagcctaaacgccccggagcccaggcgggcagctgggggagggggagtccgaggccaataggaacactgcggggcggggcttggggggggtccccggggtggccgcaggggcccgcagactggccagccagcccgcccctccacactggcgtgcgcgctaggtcccctaccgggcagggagggagggagcgaccggcagccctaggcggctgcacttggctctccggcacgccctttccaaacctctccaacacccgactgctgtatccgcgggaaacgctggctgcgcgcgctcacctctgarctgactttcaatactcctctgtcccctgatttgtgggggacccatgggtagagcggctgtagaaatcaggtcgtgagagatttggagagaggcaaggcattgggggcacagagctgaggagtgagaccgtgaaagagggaccgaaagaggctgagagacacgcagaaagcagaaagcttagagcgtcaggggcagagaaacgcacgagtgcaacaacaggcggagagaccccgagagttgaagtgggcgagcccgagacaaacgggtcgtagaggctctgatattccgccagtccccgacctgggagttgctcagcaggtcgtgggcccagtccttcttccctagacgcttagaaacccagctatggttgtacaggaatcggagattgctgctaaagcttcgcgccaatctctccaaactc

SEQ ID NO: 4480 - DNA, 600 bp, Homo sapiens
gccaccagtttttgcttgtaataaacagcctgaagagtcttccaaagtgtggataaggaatgaaccataaaaagaaaaatgttttttacaatcttttcctcatcccttgtcagtcttattgcctcatagcccactggactccacacttttccagaaagaagaaagaaccctggacacaggaagagtcacaaaactattctattaaataattgcttctggaattctttgctaataacatcaaattttcaactgaaattgactctatatattggaataagggcccaacagacacattccagactcagaaaactgagaagcgtttagattttcagcgagcaatcttgtttgcagttaatttccattgaatagcttatacatgttggtgtctggagatagtaggttataaagcagyatggccattttcttttctctctctctttttttgattgggtaagaaaagggaggtgatctattagcattcccctatgaactcttcttccccccccttttttccccacagtccaaatcttttaattccttctccatttatatcagggtttcccagactcagcactgttggcattttgggtggggtaattc

SEQ ID NO: 4481 - DNA, 637 bp, Homo sapiens
gcctcaggggggagtccttgtacagacaaattcaaaaggctcagtgggaattttaaattcttatcagatgcaacattttctaaatgagctctccttataccacaaaacttcacgttttcaaaatcaatctgactttgaggaatcctctagagatttactgttaacataaattttttttttcagatttgtaactctgtcacctctgttgaatgaattctgacttaatataaccataaaagygggggcccacagggaatgattgaataacctggcgtcttggaattcacactatttagcctgcaatgtcacatagcttgacctctgaatgaaacaggtactgagtaaacaagatatggattgcaactgagtgtgagtttttgcaaaagtggaaataataatcaacctctgacactctgacaccacagtgacggcaggcaggtgcactccgcgaccctggcgggcaggctgagaacacccggtgagtgtgtccatgtgttggccgcctctctgcaaggctgcctcaggcactcaccctcctgaggaatgatgcgaagggtgacactaagacctgcatccttgatgagcttcacgatgtcagcgtgaggcatgttgatgatagactggccattcactgcta

SEQ ID NO: 4482 - DNA, 637 bp, Homo sapiens
gcctcaggggggagtccttgtacagacaaattcaaaaggctcagtgggaattttaaattcttatcagatgcaacattttctaaatgagctctccttataccacaaaacttcacgttttcaaaatcaatctgactttgaggaatcctctagagatttactgttaacataaattttttttttcagatttgtaactctgtcacctctgttgaatgaattctgacttaatataaccataaaagtgggggcccacagggaatgattgaataacctggcgtcttggaattcacactatttagcctgcaatgtcacatagcttgacctctgaatgaaacaggtactgagtaaacaagatatggattgcaactgagtgtgagtttttgcaaaagtggaaataataatcaacctctgacactctgacaccacagtgacggcaggcaggtgcactccrcgaccctggcgggcaggctgagaacacccggtgagtgtgtccatgtgttggccgcctctctgcaaggctgcctcaggcactcaccctcctgaggaatgatgcgaagggtgacactaagacctgcatccttgatgagcttcacgatgtcagcgtgaggcatgttgatgatagactggccattcactgcta

SEQ ID NO: 4483 - DNA, 809 bp, Homo sapiens
agtctgaacacatcagtttggcattcaaaatcccctggcctcatctctcaccacacacatccctgcacccatgctattgcctcccctgaatcctcgtcattctctggatgtgccctgcccaycctgcctccctgcctttgctcaggccatgtcatctgccagcaatgcccgccccccatcccatttcccttttttcccagccttcaaggtccagctctaacggtacccgctccatgaaccctgcttggctccctccccaagacggaatcatcttgccctacagtcccctccatcacgcgctcagccctccccttggacacccacagagcacgtggatggagctctttctgtgtgccatgcactgagctaagcatcgcattatgtaacctccatcgcattatgtagcctcatgagacaggtgccatcattatcaccttcctgcagatgagaaaatgaagtccactgtgcagtgacccttcatcagcattaactctgtgaacccaaaagtatctgaaacaggtctcaatcaatttagagggtttattttgccaaggttaaggatgtggccatgacacagcctcaggaggtcctgacaacatgtgcccaagatggttggggtacaggttgcttttataccatttgggaggacataagacatcaatcaatacatgtaagatttacattggtttgatgtggaaggatggggcaactccaagcaggggcttccaggtaataggtagatttaaaaattttctgattggcaattggttgaaagaattatcaatagaaagaaattatcaatagaaagt

SEQ ID NO: 4484 - DNA, 809 bp, Homo sapiens
agtctgaacacatcagtttggcattcaaaatcccctggcctcatctctcaccacacacatccctgcacccatgctattgcctcccctgaatcctcgtcattctctggatgtgccctgcccaccctgcctccctgcctttgctcaggccatgtcatctgccagcaatgcccgccccccatcccatttcccttttttcccagccttcaaggtccagctctaacggtacccgctccatgaaccctgcttggctccctccccaagacggaatcatcttgccctacagtcccctccatcacgcgctcagccctccccttgracacccacagagcacgtggatggagctctttctgtgtgccatgcactgagctaagcatcgcattatgtaacctccatcgcattatgtagcctcatgagacaggtgccatcattatcaccttcctgcagatgagaaaatgaagtccactgtgcagtgacccttcatcagcattaactctgtgaacccaaaagtatctgaaacaggtctcaatcaatttagagggtttattttgccaaggttaaggatgtggccatgacacagcctcaggaggtcctgacaacatgtgcccaagatggttggggtacaggttgcttttataccatttgggaggacataagacatcaatcaatacatgtaagatttacattggtttgatgtggaaggatggggcaactccaagcaggggcttccaggtaataggtagatttaaaaattttctgattggcaattggttgaaagaattatcaatagaaagaaattatcaatagaaagt

SEQ ID NO: 4485 - DNA, 809 bp, Homo sapiens
agtctgaacacatcagtttggcattcaaaatcccctggcctcatctctcaccacacacatccctgcacccatgctattgcctcccctgaatcctcgtcattctctggatgtgccctgcccaccctgcctccctgcctttgctcaggccatgtcatctgccagcaatgcccgccccccatcccatttcccttttttcccagccttcaaggtccagctctaacggtacccgctccatgaaccctgcttggctccctccccaagacggaatcatcttgccctacagtcccctccatcacgcgctcagccctccccttggacacccacagagcacgtggatggagctctttctgtgtgccatgcactgagctaagcatcgcattatgtaacctccatcgcattatgtagcctcatgagacaggtgccatcattatcaccttccygcagatgagaaaatgaagtccactgtgcagtgacccttcatcagcattaactctgtgaacccaaaagtatctgaaacaggtctcaatcaatttagagggtttattttgccaaggttaaggatgtggccatgacacagcctcaggaggtcctgacaacatgtgcccaagatggttggggtacaggttgcttttataccatttgggaggacataagacatcaatcaatacatgtaagatttacattggtttgatgtggaaggatggggcaactccaagcaggggcttccaggtaataggtagatttaaaaattttctgattggcaattggttgaaagaattatcaatagaaagaaattatcaatagaaagt

SEQ ID NO: 4486 - DNA, 737 bp, Homo sapiens
cccttcccatcatggcctaaactactctttcaggtaaactttgcaatgcccctggccgagaggaagggtccattcagatgtttggtgggggatcttagaattttatttttggtttacaactcttactagtgttagtaaatccatcgtgagtgaggaggactttggagccttccttaaaatcagggggcattgcagataggtgtgtgtgtttggcagggctggggtgggtgtcgctggaagasgactgtggaagtgtttggcttgggcccagctcagccatgccctaggcttatctgtgggctccaggttccttccccagcctcttctgggcctatttaaggaggctttggggtggcgggcaatgttttttttttttttcatgatggctgcccccaagggtcttctgctggttgctctagtcttgctacttggtaagttctgggcataggactcccttgggagagggggtggtggagcaagggccttcctcctgccctctctgcccatgaccaagcctcccttggccagctgtgcacctggtaaggccgctccgggataaccaccaccccaggcctgggctgcaggtcttggcatcctgaagatacaagcaagaggagacttctttcctcatagcctgtgagtcactctgctgggtgccctctgacagccctacccccccaatgcctctgacccctggggtcccttgctccttcccccaatgagatctgaagccacca

SEQ ID NO: 4487 - DNA, 664 bp, Homo sapiens
ctgctctgtctatccaggtgaccttcccctgccctacgctgtggcccacaagcctgacttgagcsagctcatccacttaggaaatgcaacccctggccagagcacgtccacaatgaggactgcccccagcgacgccccaccctggacccctgtttagtggtagccaagccaggtaacactcagcccctctcaagcctgggagtcagaccaggtaacacgcaggccctcccactcagggtctgagtctacgtgggtcctggacattccgttccgacctgcaggggtgccgagagggttggggaggaaggtggaagctggttcttgttccggcccagcacctggccccctggccaccccacccaccctggaaacccccctcctggctcccttctttcagagtgggacaggcctttcagggctaggaacggagggcctggatttccatgtcaatggcgaggcaggcccgcctggtaagctgcttaacaagcctccagccccattggggtgttaactcaggccccattctccgggcccagtctcgcggttgccatggtgccctgcgtggccctttgggccgcggctaatcccttctctgggcctctcatcccggctgtcccacccccgggctggtcgctggtgacttggccatgcccaacaaggctgg

SEQ ID NO: 4488 - DNA, 824 bp, Homo sapiens
agcaattctccctcagcctcccgagtagctgggattacaggcatgtgccaccacgcctggctatttttgtatttttagtagagatggggtttcagcatcttggacaggctggtcttgaactcctgacctcgtgatccacccccgtctcggcctcctatagtgctgggattacaggcgtgagccactgcgactggccgaaaatgtctggcttttaagcttaactgtataaaccatttcaagttttctgatacaaaatttcggtttgggtttctagtttttgctatactcatttaatgggctcaaatactggttctgctgcttataagctgtgtgatgttaagcttctgtgtgtaaaatggggggaaaacagcacctgctcaatatggcttttttgcaggtcacgtgatagagcacaagcctcatactcagtgcctgctcagtaaagggtagccattatggttatagctgggaatgtgttctgactccattttcttcttccgtcatcacctctgttagctggcctcttatttctgtccactaaccacattctggaaaggcccagagactcaaatgttagccaacccaaggagccctttgcccagctgctccatctctcaagaggccctggagtccggctcaggactggccatgaccatgcsctagcagctcccttccccggtggcctccataggataaggtggggctggaggcagaataggaggaaggggagaggagtcaaataaacctgggagaagagacaggctgcccatctctctgccactcgatggctgggggcgggaagccttcggcacggcaggtcatcc

SEQ ID NO: 4489 - DNA, 1104 bp, Homo sapiens
tccagcctctgcccccaaggccgtttctgtttctgtccatctgctggcaacacagatacgggagcaggcgggagggagagctggaggctcgcgggccgcgcttcccatagcagccgcccgcacctgcccaggctcacgggcgttcccgctgccctcacctcccaggtgcagtgcgagctgaagcgaaaatggcgaagccggtgcccgaccccgtccgcgagccgggattacagggtctgcggttcctccttctcccgcaacggctcggagggcgccctgcagttccaccgcggctcccgcgcccagtccttcctgcaaacggagacctcggtcatctagccccacccctgcctgtcggacgcggcgggaggcccacggttcggggcttctgcggggctgagacgccggcttcctccttccagatgcccgagcaccgtgtcgggcaggtcagcgcggtcctgactccgtcaagctggttgtccactaaaccccatacctggaattggagtcgtgttgtcattgactcgatttaaactccagcatttagataatcttgtgcaaaatgtgtttcagccgtatagtggatccacttttttttttttttttttttttgagacggagtctcgctctgtcgcccaggctggastgcagtggcctgatctctgctccctgcaagctccgcctcccgggttcacgccattctcctgcctcagcctcccatagctgggactacaggcgcccgccaacacgcctggctaattttttgtatttttagtagagacagggtttcaccatgttagccaggatggtctcgatctcctgacctcgtgatgggcccgcctcggcctcccaaagtgctgggattaaggcgtgagccactgcgcccggcccaagagaataggggagccaaggaggaaatgtggaaacgcagttgtgtggcccagcacgagcctgggcgaccaccgggtgacatccgtcccacatcagggcggcctcccaggtcccataagggtagccccctcatctgcaggacagagggaagccagtcagggcccccctgacgttaggaccaggagaaatcaacaggagggcagcccgtcctct

SEQ ID NO: 4490 - DNA, 1104 bp, Homo sapiens
tccagcctctgcccccaaggccgtttctgtttctgtccatctgctggcaacacagatacgggagcaggcgggagggagagctggaggctcgcgggccgcgcttcccatagcagccgcccgcacctgcccaggctcacgggcgttcccgctgccctcacctcccaggtgcagtgcgagctgaagcgaaaatggcgaagccggtgcccgaccccgtccgcgagccgggattacagggtctgcggttcctccttctcccgcaacggctcggagggcgccctgcagttccaccgcggctcccgcgcccagtccttcctgcaaacggagacctcggtcatctagccccacccctgcctgtcggacgcggcgggaggcccacggttcggggcttctgcggggctgagacgccggcttcctccttccagatgcccgagcaccgtgtcgggcaggtcagcgcggtcctgactccgtcaagctggttgtccactaaaccccatacctggaattggagtcgtgttgtcattgactcgatttaaactccagcatttagataatcttgtgcaaaatgtgtttcagccgtatagtggatccacttttttttttttttttttttttgagacggagtctcgctctgtcgcccaggctggactgcagtggcctgatctctgctccctgcaagctccgcctcccgggttcacgccattctcctgcctcagcctcccatagctgggactacaggcgcccgccaacacgccyggctaattttttgtatttttagtagagacagggtttcaccatgttagccaggatggtctcgatctcctgacctcgtgatgggcccgcctcggcctcccaaagtgctgggattaaggcgtgagccactgcgcccggcccaagagaataggggagccaaggaggaaatgtggaaacgcagttgtgtggcccagcacgagcctgggcgaccaccgggtgacatccgtcccacatcagggcggcctcccaggtcccataagggtagccccctcatctgcaggacagagggaagccagtcagggcccccctgacgttaggaccaggagaaatcaacaggagggcagcccgtcctct

SEQ ID NO: 4491 - DNA, 1104 bp, Homo sapiens
tccagcctctgcccccaaggccgtttctgtttctgtccatctgctggcaacacagatacgggagcaggcgggagggagagctggaggctcgcgggccgcgcttcccatagcagccgcccgcacctgcccaggctcacgggcgttcccgctgccctcacctcccaggtgcagtgcgagctgaagcgaaaatggcgaagccggtgcccgaccccgtccgcgagccgggattacagggtctgcggttcctccttctcccgcaacggctcggagggcgccctgcagttccaccgcggctcccgcgcccagtccttcctgcaaacggagacctcggtcatctagccccacccctgcctgtcggacgcggcgggaggcccacggttcggggcttctgcggggctgagacgccggcttcctccttccagatgcccgagcaccgtgtcgggcaggtcagcgcggtcctgactccgtcaagctggttgtccactaaaccccatacctggaattggagtcgtgttgtcattgactcgatttaaactccagcatttagataatcttgtgcaaaatgtgtttcagccgtatagtggatccacttttttttttttttttttttttgagacggagtctcgctctgtcgcccaggctggactgcagtggcctgatctctgctccctgcaagctccgcctcccgggttcacgccattctcctgcctcagcctcccatagctgggactacaggcgcccgccaacacgcctggctaattttttgtatttttagtagagacrgggtttcaccatgttagccaggatggtctcgatctcctgacctcgtgatgggcccgcctcggcctcccaaagtgctgggattaaggcgtgagccactgcgcccggcccaagagaataggggagccaaggaggaaatgtggaaacgcagttgtgtggcccagcacgagcctgggcgaccaccgggtgacatccgtcccacatcagggcggcctcccaggtcccataagggtagccccctcatctgcaggacagagggaagccagtcagggcccccctgacgttaggaccaggagaaatcaacaggagggcagcccgtcctct

SEQ ID NO: 4492 - DNA, 791 bp, Homo sapiens
ccaggcctgcgggcccctggtgatggggttacgtggggtgcgggatacagctgagtgggaaccggaaacctattctctttttaacaaaaataatcttaggataagaattattttaacaacatataaaactgtttcaagccctcctccccagagctggcgctcagcagccctagcggctgctccttcaggcgaagggtggtttgcagatgtggggagggtgtctggggacgttgctgagccagctgcagaagggtggggatatcagggcacagtytccatgtgtgtgccaagccctggcccccacagcgctcgatggacctcagcaagctgcccagccctggcccaggtgccccgactgtgggactcagttgttctgagcacatttgactccacttttcccttaaaaatgaatgtcttgttcctgtgcattggtggcatcacagaccccagctggggcgcgatgtcaaaggtcgggacagctgtgccgggaggcagccacagggaagctcacacatcctgtcagtgtcaccttggtttgcaaaacccatatccccggtaaaatgaggccggacagaggggctgttaggacagcaaagcagcagtgtccagagacccctcaatccccaaaggtccgcaccctgtcctgcacaccctgggccacgccggccacacccctctgctgcaacaagctcatccctggacttctgggagaatgaacccgaggttggtttggggagacaggtgaggcggtcggatctacagaacaacccaccatttctgggggccgcaga

SEQ ID NO: 4493 - DNA, 658 bp, Homo sapiens
tttaaatccaaatctgtgggttctagtttaacaaggttggccttaatcctataggtagtaacagttcttatgtgtttcttaaatagagggtagatagcaccagagttgtacttgaggaaaatttatctggtagtgatgagtaagataaattctgtctctactaaaaaatacaaaaaattagccaggcatggtggcrggcgcctgtagtcccagctacttgggaggctgaggcaggagaatggcatgaacccagttggcagagcttgcagggacctgagattgcgccactgcactccagcctgggcaacaaagagagactcgcctcaaaaaaaaaaaaaaaagagagagagagaggggctatcttttttcatatacaacgtggtcctactccaaaatttttcttcatgaggaatcctgtgaatcagatagtatcaccaccctcatctacatacacacacacacacacacacacacacacacacacagcaaattagttaccaattcttggcatttcttcttataaacaaactacatcaggcagtaccttgcttatgttaattatgttagcatttaatgaattaatatatgaatgtttttccataaggcttggcacataacaattgctcaataatgtttattactgctgttaacatttgcc

SEQ ID NO: 4494 - DNA, 658 bp, Homo sapiens
tttaaatccaaatctgtgggttctagtttaacaaggttggccttaatcctataggtagtaacagttcttatgtgtttcttaaatagagggtagatagcaccagagttgtacttgaggaaaatttatctggtagtgatgagtaagataaattctgtctctactaaaaaatacaaaaaattagccaggcatggtggcaggcgcctgtagtcccagctacttgggaggctgaggcaggagaatggcatgaacccagttggcagagcttgcagggacctgagattgcgccactgcactmcagcctgggcaacaaagagagactcgcctcaaaaaaaaaaaaaaaagagagagagagaggggctatcttttttcatatacaacgtggtcctactccaaaatttttcttcatgaggaatcctgtgaatcagatagtatcaccaccctcatctacatacacacacacacacacacacacacacacacacacagcaaattagttaccaattcttggcatttcttcttataaacaaactacatcaggcagtaccttgcttatgttaattatgttagcatttaatgaattaatatatgaatgtttttccataaggcttggcacataacaattgctcaataatgtttattactgctgttaacatttgcc

SEQ ID NO: 4495 - DNA, 658 bp, Homo sapiens
tttaaatccaaatctgtgggttctagtttaacaaggttggccttaatcctataggtagtaacagttcttatgtgtttcttaaatagagggtagatagcaccagagttgtacttgaggaaaatttatctggtagtgatgagtaagataaattctgtctctactaaaaaatacaaaaaattagccaggcatggtggcaggcgcctgtagtcccagctacttgggaggctgaggcaggagaatggcatgaacccagttggcagagcttgcagggacctgagattgcgccactgcactccagcctgggcaacaaagagagactcgcctcaaaaaaaaaaaaaaaagagagagagagaggggctatcttttttyatatacaacgtggtcctactccaaaatttttcttcatgaggaatcctgtgaatcagatagtatcaccaccctcatctacatacacacacacacacacacacacacacacacacacagcaaattagttaccaattcttggcatttcttcttataaacaaactacatcaggcagtaccttgcttatgttaattatgttagcatttaatgaattaatatatgaatgtttttccataaggcttggcacataacaattgctcaataatgtttattactgctgttaacatttgcc

SEQ ID NO: 4496 - DNA, 658 bp, Homo sapiens
tttaaatccaaatctgtgggttctagtttaacaaggttggccttaatcctataggtagtaacagttcttatgtgtttcttaaatagagggtagatagcaccagagttgtacttgaggaaaatttatctggtagtgatgagtaagataaattctgtctctactaaaaaatacaaaaaattagccaggcatggtggcaggcgcctgtagtcccagctacttgggaggctgaggcaggagaatggcatgaacccagttggcagagcttgcagggacctgagattgcgccactgcactccagcctgggcaacaaagagagactcgcctcaaaaaaaaaaaaaaaagagagagagagaggggctatcttttttcatatacaacgtggtcctactccaaaatttttcttcatgaggaatcctgtgaatcagatagtatcaccaccctcatctacayacacacacacacacacacacacacacacacacacagcaaattagttaccaattcttggcatttcttcttataaacaaactacatcaggcagtaccttgcttatgttaattatgttagcatttaatgaattaatatatgaatgtttttccataaggcttggcacataacaattgctcaataatgtttattactgctgttaacatttgcc

SEQ ID NO: 4497 - DNA, 838 bp, Homo sapiens
cctcaggatggccgccaggatgtgtgagtaggagaccagcaccaggcagagtggtcccaccaggatgaacatgcaggctgcaaagatgaccacctggttgagccaggtatcagcacaggccagcctgaggacagacaggatttcacagaagaagtggttgatttcacgaggcccacaaaagggcagtcttaggatgaggctcacatggaccatagccaggagggagccacatgtccaggaagtgatggccagagtgatgcagactttccaggtcatgatgatgaaatatcggagagggtggcagatggccacgtaccgatcgtaggacatcagcaccaacaggaggcattcagtatgtgcaaaactcaaaaagagaaaggtctatgtcatgcagccagcaaaggagatgggcttggctggatgcaggaggttcaccagcatctggggcactgtgttgcaggcataggcgatgttgacgacrgccaggtgtgagaggaagaagtacatgggggtgtggagtctggagtccagtgagatgagccccaggatggtcccattccccagcagggtgaagacatagaacagggagaagagcccaaagaggagcatctgaatccttgggcccaggagaaatcccagtaggaggaactctgtgaccattgtctgatttttcaccatttcactactaaaaaacaaacaaagaaacaaacaaaaaacaagcagctgtgtgacacgcttttttttaaagtctattttatttattgttttataaatttttagtttgtggaaaattgttagtaaatgtctttaagaactcattcagttatacataagtaaa

SEQ ID NO: 4498 - DNA, 838 bp, Homo sapiens
cctcaggatggccgccaggatgtgtgagtaggagaccagcaccaggcagagtggtcccaccaggatgaacatgcaggctgcaaagatgaccacctggttgagccaggtatcagcacaggccagcctgaggacagacaggatttcacagaagaagtggttgatttcacgaggcccacaaaagggcagtcttaggatgaggctcacatggaccatagccaggagggagccacatgtccaggaagtgatggccagagtgatgcagactttccaggtcatgatgatgaaatatcggagagggtggcagatggccacgtaccgatcgtaggacatcagcaccaacaggaggcattcagtatgtgcaaaactcaaaaagagaaaggtctatgtcatgcagccagcaaaggagatgggcttggctggatgcaggaggttcaccagcatctggggcactgtgttgcaggcataggcgatgttgacgacggccaggtgtgagaggaagaagtacatgggggtgtggagtctggagtccagtgagatgagccccaggatggtcccattccccagcagggtgaagacatagaacagggagaagagcccaaagaggagcatctgaatccttgggcccaggagaaatcccagtaggaggaactctgtgaccattgtctgatttttcaccatttcactactaaaaaacaaacaaagaaacaaacaaaaaacaagcagctgtgtgacacgcttttttttaaagtctattttatttattgttttataaatttttagtttgkggaaaattgttagtaaatgtctttaagaactcattcagttatacataagtaaa

SEQ ID NO: 4499 - DNA, 687 bp, Homo sapiens
caacatgtgtaaaagtcattgtgggccaggcacggtggctcataccaggtgtggtgactcatagcactctgtcacccaggctggagtgcagtggcacaatctctgctcactgcaacctctgcctcctgggtacaagcgattctcctgcctcagctttctgagtagcaaggactacaggtgcacaccatcaygcctggctaatttttgtactattagtacagacggagtttcaccatgtcggccaggctggtctcaaactcctgacctcaaatgatccgcccacctcggcctcccaaagtgctggaattacagatgtgagccacaatgcccggccttattttctacaactttggtaactttagcatataccccaaatctgtaagacataatattataattcaaatgcaactcatggcttctctttgtactctttctctagcttttgaattatttattctaataccagttttaattctgacacaaaatcatgggagttctaatcaaaatccaaccttttatcataaaaactatgaagaaattatgagtagaatttaaaaaggaaaataggcctattaattagatttgtctttgtagcatttaactctataataaataatattttatgcctatgagtccccaacaaagcctccagcttctatttagatataaactgtaaaagtcactact

SEQ ID NO: 4500 - DNA, 687 bp, Homo sapiens
caacatgtgtaaaagtcattgtgggccaggcacggtggctcataccaggtgtggtgactcatagcactctgtcacccaggctggagtgcagtggcacaatctctgctcactgcaacctctgcctcctgggtacaagcgattctcctgcctcagctttctgagtagcaaggactacaggtgcacaccatcacgcctggctaatttttgtactattagtacagacggagtttcaccatgtcggccaggctggtctcaaactcctgacctcaaatgatccgcccacctcggcctcccaaagtgctggaattacagatgtgagccacaatgcccggccttattttctacaactttggtaactttagcatataccccaaatctgtaagacataatattataattcaaatgcaactcatggcttctctttgtactctttctctagcttttgaattatttattctaataccagttttaattctgacacaaaatcatgggagttctaatcaaaatccaamcttttatcataaaaactatgaagaaattatgagtagaatttaaaaaggaaaataggcctattaattagatttgtctttgtagcatttaactctataataaataatattttatgcctatgagtccccaacaaagcctccagcttctatttagatataaactgtaaaagtcactact

SEQ ID NO: 4501 - DNA, 687 bp, Homo sapiens
caacatgtgtaaaagtcattgtgggccaggcacggtggctcataccaggtgtggtgactcatagcactctgtcacccaggctggagtgcagtggcacaatctctgctcactgcaacctctgcctcctgggtacaagcgattctcctgcctcagctttctgagtagcaaggactacaggtgcacaccatcacgcctggctaatttttgtactattagtacagacggagtttcaccatgtcggccaggctggtctcaaactcctgacctcaaatgatccgcccacctcggcctcccaaagtgctggaattacagatgtgagccacaatgcccggccttattttctacaactttggtaactttagcatataccccaaatctgtaagacataatattataattcaaatgcaactcatggcttctctttgtactctttctctagcttttgaattatttattctaataccagttttaattctgacacaaaatcatgggagttctaatcaaaatccaaccttttatcataaaaactatgaagaaattatgagtagaatttaaaaaggaaaataggcctattaattagatttgtctttgtagcatttaactctataataaataatattttatgcctatgagtccccaacaaagcctccagcttctatttagatayaaactgtaaaagtcactact

SEQ ID NO: 4502 - DNA, 437 bp, Homo sapiens
gatcctccagtgggggggtcagccccccgcccggccagccgctccgtccgggagggaggtgggggggtcagcccccygcccggccagccgccccatccgggaggtgaggggcgcctctgcccggcggcccctactgggaagtgaagagcccctctgcccggccagccgccccgtccgggaggtgaggggcgcctctgcccggccgcccctactgggaagtgaggagcccctctgcccggccaccaccccgtctgggaggtgtgcccaacagctcactgagaacgggccaggatgacaatggcggctttgtggaatagaaaggcgggaaaggtggggaaaagattgagaaatcggatggttgccgtgtctgtgtagaaagaagtagacatgggagacttttcattttgttctgcactaagaaaaattcttctgccttg

SEQ ID NO: 4503 - DNA, 437 bp, Homo sapiens
gatcctccagtgggggggtcagccccccgcccggccagccgctccgtccgggagggaggtgggggggtcagccccctgcccggccagccgccccrtccgggaggtgaggggcgcctctgcccggcggcccctactgggaagtgaagagcccctctgcccggccagccgccccgtccgggaggtgaggggcgcctctgcccggccgcccctactgggaagtgaggagcccctctgcccggccaccaccccgtctgggaggtgtgcccaacagctcactgagaacgggccaggatgacaatggcggctttgtggaatagaaaggcgggaaaggtggggaaaagattgagaaatcggatggttgccgtgtctgtgtagaaagaagtagacatgggagacttttcattttgttctgcactaagaaaaattcttctgccttg

SEQ ID NO: 4504 - DNA, 815 bp, Homo sapiens
ggctcctcttaccatcagctcctctcaagcaaagagtttcagctcccctggcaggagtccaaggacagccccacatattccagccacttgtcagtaagaagctgggctggagtgagcagcgcacagtcgccacctcccaccacatagtgtgaagaccttacacagggtttcctggccccatcagaactgtaagaaaaccatgcaccttgttgtccatgagtaaaagactaatattttcttaataaagtagtttagcagaggtccctttcatgccacacaaagmccataataatgcacgtggaggatgggtaggatttcagtggataaggagctggtgaccagttgaaaggaagcttctggagtaaactcttggcgtctgggatcacgtgacagggattgatctgagaaaggagaggtgagggaaggaacagtggccttaggtggagggtggactcaagcccagaaccacgctggcccacccaggtgctgtaggaccacctactccttgagagcaagactcccacccgcattggggttttcgcctagaaacagttcagcttgtccagaatctcccagccttgaagaccccttagagtcctaccttctttgggtcctgcttccttccaaatagatagtatcttaagcactgtcctagacaagtttgtttctccctctgctcaaactctccttttgtctctattttttgagctgtccatccgcattctagttctcagtgactttctctaagtgaatccacactggtttctagtagctacttcttcattttggaaataatcaccaaccttttgttgagg

SEQ ID NO: 4505 - DNA, 815 bp, Homo sapiens
ggctcctcttaccatcagctcctctcaagcaaagagtttcagctcccctggcaggagtccaaggacagccccacatattccagccacttgtcagtaagaagctgggctggagtgagcagcgcacagtcgccacctcccaccacatagtgtgaagaccttacacagggtttcctggccccatcagaactgtaagaaaaccatgcaccttgttgtccatgagtaaaagactaatattttcttaataaagtagtttagcagaggtccctttcatgccacacaaagccyataataatgcacgtggaggatgggtaggatttcagtggataaggagctggtgaccagttgaaaggaagcttctggagtaaactcttggcgtctgggatcacgtgacagggattgatctgagaaaggagaggtgagggaaggaacagtggccttaggtggagggtggactcaagcccagaaccacgctggcccacccaggtgctgtaggaccacctactccttgagagcaagactcccacccgcattggggttttcgcctagaaacagttcagcttgtccagaatctcccagccttgaagaccccttagagtcctaccttctttgggtcctgcttccttccaaatagatagtatcttaagcactgtcctagacaagtttgtttctccctctgctcaaactctccttttgtctctattttttgagctgtccatccgcattctagttctcagtgactttctctaagtgaatccacactggtttctagtagctacttcttcattttggaaataatcaccaaccttttgttgagg

SEQ ID NO: 4506 - DNA, 815 bp, Homo sapiens
ggctcctcttaccatcagctcctctcaagcaaagagtttcagctcccctggcaggagtccaaggacagccccacatattccagccacttgtcagtaagaagctgggctggagtgagcagcgcacagtcgccacctcccaccacatagtgtgaagaccttacacagggtttcctggccccatcagaactgtaagaaaaccatgcaccttgttgtccatgagtaaaagactaatattttcttaataaagtagtttagcagaggtccctttcatgccacacaaagcccrtaataatgcacgtggaggatgggtaggatttcagtggataaggagctggtgaccagttgaaaggaagcttctggagtaaactcttggcgtctgggatcacgtgacagggattgatctgagaaaggagaggtgagggaaggaacagtggccttaggtggagggtggactcaagcccagaaccacgctggcccacccaggtgctgtaggaccacctactccttgagagcaagactcccacccgcattggggttttcgcctagaaacagttcagcttgtccagaatctcccagccttgaagaccccttagagtcctaccttctttgggtcctgcttccttccaaatagatagtatcttaagcactgtcctagacaagtttgtttctccctctgctcaaactctccttttgtctctattttttgagctgtccatccgcattctagttctcagtgactttctctaagtgaatccacactggtttctagtagctacttcttcattttggaaataatcaccaaccttttgttgagg

SEQ ID NO: 4507 - DNA, 815 bp, Homo sapiens
ggctcctcttaccatcagctcctctcaagcaaagagtttcagctcccctggcaggagtccaaggacagccccacatattccagccacttgtcagtaagaagctgggctggagtgagcagcgcacagtcgccacctcccaccacatagtgtgaagaccttacacagggtttcctggccccatcagaactgtaagaaaaccatgcaccttgttgtccatgagtaaaagactaatattttcttaataaagtagtttagcagaggtccctttcatgccacacaaagcccataataatgcacgtggaggatsggtaggatttcagtggataaggagctggtgaccagttgaaaggaagcttctggagtaaactcttggcgtctgggatcacgtgacagggattgatctgagaaaggagaggtgagggaaggaacagtggccttaggtggagggtggactcaagcccagaaccacgctggcccacccaggtgctgtaggaccacctactccttgagagcaagactcccacccgcattggggttttcgcctagaaacagttcagcttgtccagaatctcccagccttgaagaccccttagagtcctaccttctttgggtcctgcttccttccaaatagatagtatcttaagcactgtcctagacaagtttgtttctccctctgctcaaactctccttttgtctctattttttgagctgtccatccgcattctagttctcagtgactttctctaagtgaatccacactggtttctagtagctacttcttcattttggaaataatcaccaaccttttgttgagg

SEQ ID NO: 4508 - DNA, 754 bp, Homo sapiens
cttgagcctaggagtttgaaaagaacctgggaaaggtgtacagcaagactccatctacacacaaattttttttttaattagccaggcatggtggcccacacctacagtcccagctacttkgggggggctgaggcaggaggatcacttgaccctaggagtttgaggttaccacgagctatgatcacaccatggcactcctgcatgggtaacagagcaagaccctgtctctaaaattaaaaaacgagtggcagtggggcatgtgttctggtcccaccttggctctgagcagatcccccagctaagccaccaccctctatatgtcctgctcactctcagaacccctcctgccttcggtcctttcttgagccttcacccccacattgcctagcactccttccctcctagcgaattctccatccctttcctcctggcaaaccatttccaggtagcctctgagaccttcccacagcaggtaacttctctgaggctttagccttttctcagtaacctccccctaccatatctgcttcacctgaaacctgaccctccccatagaagcagacatccccccacccacagccctcccttgagatggaccccagtcctgagtccataggactcaggatgtcctgaggacattcttcagccctcaacccatctgcacaatattcctccctcctctgcccttatgcaggattttccttttggaacatacacacactggttgtctaaacaggcagaagcccttccattc

SEQ ID NO: 4509 - DNA, 847 bp, Homo sapiens
ttccttcactgctgttccttcattctgctgtgtaaattcgattacttcttctcccaccaggctaaaaggttcccatctggttgcatctcaaaccccagatgtttgctaaactgcactggaaataaggtgggctgcagagtggctctcgtcgtcaggaggcacaaacctgccagtcgtcattaggatgaacatgcttttgtctgagctttttcgttcacaaaagaaagcatcacactgaatgggttttgggatttcatgcagcgtccttaagcatgtggatgcttgtaggatttgtccccatgaaagcaagattcagggatggcacaggagcccaagggggtggcgttgtcattgatcagcaaggagaggcttggagaacattgaggaagaaagagttaacacatagamgcaacctgtgacctgggccctagtagggatgagagggaatcggattttttccagaagagaattgtctccagcaggtgagctcatcttcatcccacgacactaacctgaaatctatgggtcactttttctatttccaaatgaattttcaaaacatcaagtagaaaaccataaattgttcccacactgggaggtggttaggtcaaaatggatttttctgatatctggaaatatatatcattgtctcccaaattcaaaaccaacacgattttccagcgttaaggaaacaggggcacgttgctactgcagtagacttcagagagggctcaattcagtgatatgatcacaaaggaaaaagtgagaggtgtcagagataacaaataataagggatgatgcctttctacatgatgctcattagagctggatggagaagccgcccat

SEQ ID NO: 4510 - DNA, 844 bp, Homo sapiens
tttcctgaggaaggaactcagataaaacaaataaaagtgccaagctttaagactcaaaggatcaatttctatgtttatcaaaactatctatgggactattgggttggtttcactcccagaggcttgatgatgtacacagccaaagactcctgrtggctggttattatgtcatgacttctggcctgagataaccatttttgcttcagggtctccattagtaagtagaagccagttaccacggtcatccccaagactacttgaatatttggcaaaagtcacgttcccttctcagacagttgcccattgcacatacttctctgttgctctcagtttccctattaatcaccatatacatagcagccaggtaggtatctgagactttttgatgactctcattctctattaacaacaataaaagcttgggaaagccaagactacttctgcatatatccatcccaacactttgtcctcaggtttctttgtgctcagtccactaccggaaggaagaagcagcaggtcccatttaactccacattcaagttacattctccaatccagttttaccactgtttaagttaatatgtagattattacctcactcctgtatctatttctcaattggcttagaatctggaactgatgagaaagaatctctccaactgcaacacattccttttgtgattaatgttctttctccgattctctctcttgtcctttatgataccatcagtctattcttactccatttctaagcggagtaaagttcttttttgtcttagcccaaactctgttattagaatctctttttattctagatggttcaccaatgtatttttgttaaaca

SEQ ID NO: 4511 - DNA, 735 bp, Homo sapiens
aatgatctattcatttcagaaatcactgatttcttttggatttcatatgtattaacataaatgtatacttgccattcttttatattttaatgttctttaattctgtaaatatatcatctttgagatctctaactttatatatttttttatctcttttttcgtaacctgactttcagatgattttccttatacatctatttttacccagagaattatatcactgtcttgattaatagtggtgttaggtcaatttttggagggaagatttgcattgtggattttaattctgctaggagttattctagtttgttgtattttttctttgttttcttcagcctctttttcatctcagcctgtaccacctgattttttactttttaagtgagacataattcaaataccgtaaaatgtaaagctcttgagttcagtttgatgaattttgacaattataaacagcagtaaaacacwtattccaatacaaagtataaaacatttctattaccccaagtagtcccttgacaaataatttttcccactctgtggcttacatttcatgtcttaatataataacccctccttatccaaggggcatatgccctatgagcttcattagatgccttaaactgtgcataataccaaaccctgtatatactatgctttttcctatacataaatagttataataaagttaaatttatagatcaggtgcagtaagagattacaataactaatgat

SEQ ID NO: 4512 - DNA, 874 bp, Homo sapiens
aaatagaaatgagtattttttaaaagtcactttgtgctggaatatctaatccaaatttcttagaaacaagcaaactagattggtctcagaaatcaagagtccttgcagtgttattccagcacccaagctccagctggagggactggtaagtactaggaacctgttatgggacaggatggcccatgcccagtgcaatggagctctgcagccctcctgggactacacttccccagcacttcctggaaggaagacctggaagaagaggaagaccagagcacttccttgcccgtcccacactgcacaggcaggctggttttcccttggattaacataggagttatttcatgctacttaagcaaacagccagggactctgagtgcttgctctgtgccagcatgtttggtagttcaggaggagcagagtttaaatttaataagtggttaaatttgagaaacaatctcggctaatatgcaggctatgtatcccttaggaaatagtgaacaagataacagcaaagaagctgggcaggacagaggcaaagatgagactgtttcaggaagaatttgacacaaggacacaggctgattaacctaagggagaggtagaccaggtatgggaacgcagtatttgagtgcctatcttctcacgtaagaaaatatagtaactactttccccaagttttgattccttagccattttactttatagaatacattagctacttctgcttaaatgaagcacgggttttgttttgtttgtttgttttttttttttttttttkaaggagatgccagagaatgcaccaattttactgtatttttgaatgtgatgctaaaacacagagctggtgttggctgaagggtcttgattggat

SEQ ID NO: 4513 - DNA, 528 bp, Homo sapiens
ttgttttagatctattgcccagcttgttaaatatagttgataatagtatattgtacatttcaaaattactaacagtatatttcaaatgttctcactacaaaacaatgataggtatgagataacagatatgttaattgactggatttaattattccacattgtattcataagtcatagcatcactttggaccccataaatatatacaatcataaagggtcaatttataaaaatttgttttaaagtgattgacacacccatattaagaaatacaatgttgaaaaaccagggmtccatgtaccatagatcacctgattgattagtaaatgagacttctagtggatagatgcagcaattacgttagttatgaaacgatggctaatatctaggtttgcaaaaaagtaatcaaggaaaaaaacaaacactgttgattctacccttgaggtaagactgaccacaaatataggcagagtgaaaaatatccatctaaggtgaattttggcataccagaaaggaccactggctaacca

SEQ ID NO: 4514 - DNA, 528 bp, Homo sapiens
ttgttttagatctattgcccagcttgttaaatatagttgataatagtatattgtacatttcaaaattactaacagtatatttcaaatgttctcactacaaaacaatgataggtatgagataacagatatgttaattgactggatttaattattccacattgtattcataagtcatagcatcactttggaccccataaatatatacaatcataaagggtcaatttataaaaatttgttttaaagtgattgacacacccatattaagaaatacaatgttgaaaaaccagggatccatgtaccatagatcacctgattgattagtaaatgagacttctagtggatasatgcagcaattacgttagttatgaaacgatggctaatatctaggtttgcaaaaaagtaatcaaggaaaaaaacaaacactgttgattctacccttgaggtaagactgaccacaaatataggcagagtgaaaaatatccatctaaggtgaattttggcataccagaaaggaccactggctaacca

SEQ ID NO: 4515 - DNA, 822 bp, Homo sapiens
aaaataatccagtaatgtagagaatataatgtagaataaagatgtcaatgaaataagtttggccacatgttcattttcttgttgaagctgggtaataaatacaaagagtgtttgttatactgttttttattgtatatattttaaatgttgcataacagtttttaaaatgttaggtgattcagatcttaattttctgactgaaattgcattttaaaaattaaccataatttcaatgtttataagattagtatggttatatttcttacaatctgagtaataaatattctttttgaaaatttaaataaatrtcatttattagctctaacttttaccatttagagattataaatttacataatatgttccacataccatgtaatacctttcctatcaatgatgttcactcatggcaatgaatgggacagggagaaaaaagagggaaagaaagattaagttagtcagcctctcctctgttatgttgtaaattgtcatttctttttggattcatgtttcttaaaagaaacctggacattaaagctagaaatttaaggcagtcttgaccaaccacttaccttttctgtttgccttgaagggtacctgttcaactcctgatcagtgtttatggatcacacactgtttatcaagaatgctgttttaagagactttaccctgtctctccattatcattatcatcattccttcttattcatcctcttaggcttttttctgcttcattcccctacagcagtagttaggaacatgtgggtgatagagaagagtaggaaaccagagtggtgggtaaggggatatgggatgaattag

SEQ ID NO: 4516 - DNA, 831 bp, Homo sapiens
gcctggcacatgcatgtggatgagctggatcaatagataatatcaataatagccaaaatgtatgggtacttagtattaggcactgtctaaatgagtgatacgttttaatgcatctccaactatgactgaagtacgattaaaattcccattttggtagggcgctggggctcacacctgtaatccaagcactttgggaggccaaggcgggtggatcacctgaggtcgggagttcaagaccagtctggtcaacatggtgaaaccccgtctctactgaaaatacaaaaattagccgggcatggtggcacatgcctgtaatcccagctactagggagggtgagacaggagaattgcttgaacctgggaggtggaggttacagtgagctgaaatcacgccactgcactccagcctggacgacaagaacaaaactccatctcaaaaataaataaataaataaatraataaataaataagtaaaataagtaaataaataaatatcccattttaccgatagaaagagcgaggcccagaaagtttaggacacttgcccaaggtcacacagcaacagtctccagagcccacattacctgtctctcttgtcactctgtatggtcctgataaggaatgggtgtcccaggctggaccctgtccgagcccccttcgagtccccaccctgcccagcccaggggggtccagcttcgccaagtggggcggagcaggggagggaagggaagctgggcccagagcccagtactgcccgcactcaccagcacgcggtcccccaggcgcaggtccttttcgccccgcttcacagagccgctgtctgagaggtt

SEQ ID NO: 4517 - DNA, 837 bp, Homo sapiens
caattttacagatgaggatgtcgaggcagagagagatgcaatgtgcaaggtcacatagctagggagtggcagagctgggatttgaacccgggctgttaagctccagcatctgaactcttcaccgccaaggtagacagcagatgccggaaagcgattactgctccttggagtaaattccccctgctgggactttgggctctgagtgcagaattccaggcaccaccttcccagcctgcacggtgctgagggctggagtttgcaggtgcacacaggtgtgtgtggaggaggctcctcccaggcgcctccacctgcctcttctgcctttggagcccctctycatctccaccgcctccacctgtcctgaagccagaatcccatcattcccccgcaaggcactgcagacaagaatgcatcctgtgctcaacgcaggtctaagttccttaaatcctaagctgtttctctaacccaatagcctccttttctgactccaagcccttattcacgctatttctcctgcacgaaacccccttcaggcaacctggcagcaaacttctgcaagatgctctatgaagcttcctggtctgccccatcctccaggggaccccctctatgcccccagcttccccactaatgcactcatcaacccccggggctgcactttttggggacaccgaggctgctgtcctgtggaccagccagcccctagaagtgccaggccaggtaacagcagctgaatgaagggcttattgtttacatttacaaccgaaagggaagaggcttctgaagcacacacgtggtgctccccgcaccctcctcctcctctgcccacagccctag

SEQ ID NO: 4518 - DNA, 796 bp, Homo sapiens
aagccagacactcagaattcagatgacaatccatctcttttatctgaagtagcatgacgttcatctttacctgtgcaggaatgaagccatgtcagggyaaattggcaaggagagagaagggaagggagaggaaaaacacagagaaagacaactaagaacaaggtgaaccttcctactctgctaatttactccttggactcctctgttgtcatagccaatacatttatcttttcacttaagctaattgagttggtttccatcacttaactaaaggaatcctgactcaggcaatgtcccagcccctaaaagtcaggaacacatttctatcatggcttctttgggtttactttaatcaagaatgctttcccttgccaatatgttatgattttagcctgagataagtttttctatgaaatcaactgcccattctcactctacttgtgggcagagagagccttttctggcctcctccccttaccattatcaagtgggttatctgttcccacaagtgttgctttgggatggttcccccctctccacaggtcttaaatcctcaactgcgcctcctaagagatccccatccataggagatctgccccaccccattccggcctcattctctttcactttcgcccctgctcattaaactccagacaccatggtttcttttcttgacttcaaaaatgccaaacttttacctcaccccggggccttcaccatgctgttcctactgcctagaacttactttcttctgagatcctctctttctttcccttggctgacttttcatatgtca

SEQ ID NO: 4519 - DNA, 812 bp, Homo sapiens
taaagagcaaataaatggcatggaactagggaaggctcggtgttcctatcagtcccctgcagacagtggccaggactcacatacatcttctatatagagtgttacaggccactgttaaatcagattaactgggaaactcttggtacaatcaaatttattttcacagcatgcaaacggtgtccaccaaattcagaaaatgtattaggaacgttaagcagtaaagttggaggaacggcctaatgaaggtgctaaactctcagatcagaagagaagggagtgcttttaatattagaactatggtttccaagacaattttatgagcatttgcagattatttcttgcagcatagagtaattgcagaacaagggctttggagtcagcaaggcctggatttggatcaggccctgccgcttactatctatgtgcgagttacttaaccttttcaggctttgagcatttttttcttctgaaaatggtggataatatcagaacctaccatttagggttatagtgaatgagtgggcattaatgatcataatcaatgccaaacacagaacagcacctgacatctaatgagcacccaatacttgttagctattgttgttgtcttattgttattgctgttgttgttaatgtaggtaaaccccytggaatggttacctggcacatagcgagtataaatgactgctgttactctttggggtccagcgaaagtgatatattgaagtatttagcaaccctggcactggccaatcagagggaggctaggcattaaccttctggtggttggattttgtgggaagtgaagagga

SEQ ID NO: 4520 - DNA, 797 bp, Homo sapiens
caggcaaagtttctccttacttgacccttttgttctattcaggccttcaatggattggatgaggccaccccatattagggagggcaatttgcttttatgattcagatgttaatctcatccagaaacatcctggcagatatacccagaataatatctaggtaccccatggctcagtcagattgacacataaaattaaccattgcaccacctgtttaccctactatctaagcccagaggaagagggtcccacttcttcctaagtgaatttctctacctgtcctcagcctcattgttcaaccccaaagcattcttgagaattgcctaaacatagagaaaccagcaaagaggaaaattgtaatcttccaggtaacctataactcttgtgcagaaaaggctatggatattgtaaagggaaagcaagtttatagattgcaagcagatcakcaactatatggcttggtagaaaaagtaagacccagtgttagatcagtaggatggctatatgactgagccatagggtacccagatattattctgggtatatctgcaaggatgtttctggatgagatttaataatttattttacgttctaaaatagctagaagacaataacatgaatgtgtctagcattaaaaaaagacaaatatttaaggtgatgtctatccaaagtacactgattagatctttacactgatacgaatgtacgaaattgtcacatgcatcctgaaattatatacgtctattgtgcatcaacttaaaaatatttttaaaaatctaattaaatattaccataagga

SEQ ID NO: 4521 - DNA, 797 bp, Homo sapiens
caggcaaagtttctccttacttgacccttttgttctattcaggccttcaatggattggatgaggccaccccatattagggagggcaatttgcttttatgattcagatgttaatctcatccagaaacatcctggcagatatacccagaataatatctaggtaccccatggctcagtcagattgacacataaaattaaccattgcaccacctgtttaccctactatctaagcccagaggaagagggtcccacttcttcctaagtgaatttctctacctgtcctcagcctcattgttcaaccccaaagcattcttgagaattgcctaaacatagagaaaccagcaaagaggaaaattgtaatcttccaggtaacctataactcttgtgcagaaaaggctatggatattgtaaagggaaagcaagtttatagattgcaagcagatcagyaactatatggcttggtagaaaaagtaagacccagtgttagatcagtaggatggctatatgactgagccatagggtacccagatattattctgggtatatctgcaaggatgtttctggatgagatttaataatttattttacgttctaaaatagctagaagacaataacatgaatgtgtctagcattaaaaaaagacaaatatttaaggtgatgtctatccaaagtacactgattagatctttacactgatacgaatgtacgaaattgtcacatgcatcctgaaattatatacgtctattgtgcatcaacttaaaaatatttttaaaaatctaattaaatattaccataagga

SEQ ID NO: 4522 - DNA, 797 bp, Homo sapiens
caggcaaagtttctccttacttgacccttttgttctattcaggccttcaatggattggatgaggccaccccatattagggagggcaatttgcttttatgattcagatgttaatctcatccagaaacatcctggcagatatacccagaataatatctaggtaccccatggctcagtcagattgacacataaaattaaccattgcaccacctgtttaccctactatctaagcccagaggaagagggtcccacttcttcctaagtgaatttctctacctgtcctcagcctcattgttcaaccccaaagcattcttgagaattgcctaaacatagagaaaccagcaaagaggaaaattgtaatcttccaggtaacctataactcttgtgcagaaaaggctatggatattgtaaagggaaagcaagtttatagattgcaagcagatcagcaactatatggcttggtagaaaaagtaagacccagtgttagatcagtaggatggctatatgactgagccatagggtacccagatattattctgggtatatctgcaaggatgtttctggatgagatttaataatttattttacgttctaaaatagctagaagacaataacatgaatgtgtctagcattaaaaaaagacaaatatttaaggtgatgtctatccaaagtacactgattagatctttacactgatacgaatgtacgaaattgtcacatgcatcctgaaattatrtacgtctattgtgcatcaacttaaaaatatttttaaaaatctaattaaatattaccataagga

SEQ ID NO: 4523 - DNA, 797 bp, Homo sapiens
caggcaaagtttctccttacttgacccttttgttctattcaggccttcaatggattggatgaggccaccccatattagggagggcaatttgcttttatgattcagatgttaatctcatccagaaacatcctggcagatatacccagaataatatctaggtaccccatggctcagtcagattgacacataaaattaaccattgcaccacctgtttaccctactatctaagcccagaggaagagggtcccacttcttcctaagtgaatttctctacctgtcctcagcctcattgttcaaccccaaagcattcttgagaattgcctaaacatagagaaaccagcaaagaggaaaattgtaatcttccaggtaacctataactcttgtgcagaaaaggctatggatattgtaaagggaaagcaagtttatagattgcaagcagatcagcaactatatggcttggtagaaaaagtaagacccagtgttagatcagtaggatggctatatgactgagccatagggtacccagatattattctgggtatatctgcaaggatgtttctggatgagatttaataatttattttacgttctaaaatagctagaagacaataacatgaatgtgtctagcattaaaaaaagacaaatatttaaggtgatgtctatccaaagtacactgattagatctttacactgatacgaatgtacgaaattgtcacatgcatcctgaaattatataygtctattgtgcatcaacttaaaaatatttttaaaaatctaattaaatattaccataagga

SEQ ID NO: 4524 - DNA, 797 bp, Homo sapiens
caggcaaagtttctccttacttgacccttttgttctattcaggccttcaatggattggatgaggccaccccatattagggagggcaatttgcttttatgattcagatgttaatctcatccagaaacatcctggcagatatacccagaataatatctaggtaccccatggctcagtcagattgacacataaaattaaccattgcaccacctgtttaccctactatctaagcccagaggaagagggtcccacttcttcctaagtgaatttctctacctgtcctcagcctcattgttcaaccccaaagcattcttgagaattgcctaaacatagagaaaccagcaaagaggaaaattgtaatcttccaggtaacctataactcttgtgcagaaaaggctatggatattgtaaagggaaagcaagtttatagattgcaagcagatcagcaactatatggcttggtagaaaaagtaagacccagtgttagatcagtaggatggctatatgactgagccatagggtacccagatattattctgggtatatctgcaaggatgtttctggatgagatttaataatttattttacgttctaaaatagctagaagacaataacatgaatgtgtctagcattaaaaaaagacaaatatttaaggtgatgtctatccaaagtacactgattagatctttacactgatacgaatgtacgaaattgtcacatgcatcctgaaattatatacgtctattgtgcatcaacttaaaaatattttwaaaaatctaattaaatattaccataagga

SEQ ID NO: 4525 - DNA, 653 bp, Homo sapiens
tgggtactttataaaggaaagagatttaatggactcacagttccacatagctggggaggcctcacaatcatggcggaagatgatggaagagcgaagggacgtcttcaatgaggcaggcaagagattttgtgcagggaaactcccctttatraaaccatcagatctcatgaggcttattcaccatcacaagaacagcctgggaaaaacccacccccgtgattcaattacctcccaccaggttcttcccatgacatatggggatggatgatcacaattcaaggtgagatttgggtggggacacagagccaaacaataccagtgcccaacagcataagaagagctttttccaatgatgtatagttttcctccccaggtggcatggccttgttcagaattttggagtctatattgacatgcttttaatggggtttgctagagatggtatctttatcaagcatggattcctctagcaccgtgggatctgctgagccatatggccccagtagcagggccatttgttccacagcttggacctgctgctaagccccctcttgctctgggacccactcagaagtaactaccctccatatgcaggtacttgctgggtgtcagagagaaaattgctgccactagtaagcctgaaattggaaaaa

SEQ ID NO: 4526 - DNA, 816 bp, Homo sapiens
tcttggagcagaagaagcaggaccgcggggagctgaagctgctgcttttgggtgagtccagggtcggtgggcggtgggtggtgggcagtgggcggtggccagccggcaggggtgtcggggcaaggaggcggatcaggctaggtcagacaytggcatcgtggagccgtcgcctcctcccagggaatggggagcctggaacccattttccagatgagaaagactgaggttcagagaagccaagttccttgtccaacgtgcgaccagcggccaggtgcccaggcctgtccactgtgtggggcatatacaatagcagacgtggctctaccgggcccctgccgggcaggcccagcacgccctacctgtctgtgtcatggcgagggaatgatgagctcaggtgtgcaacccgttctggccagcccacccgtaagggaggggccggctccagcctctccttcaccaggacgctccctctcgcctttacctccctgccatggctggagagggcttgtctagggctcctttgggggctagaaaggatggattgattggttcattggttcattcattcattattcattcatttaagatttattgggtagctcccaggaacgaggcagccaaacaggggaagatatttctgtcttcctggatctcatttcctgtgaaggagccaagacatttagtctgtaaactcataagcagataaaataattctggcaacaagaattatctaggagaaaacaaaacagggtgatggcttccatgcggaggcttcagatgggggagtcgacgtcagtaacggttcaagattctgaa

SEQ ID NO: 4527 - DNA, 816 bp, Homo sapiens
tcttggagcagaagaagcaggaccgcggggagctgaagctgctgcttttgggtgagtccagggtcggtgggcggtgggtggtgggcagtgggcggtggccagccggcaggggtgtcggggcaaggaggcggatcaggctaggtcagacattggcatcgtggagccgtcgcctcctcccagggaatggggagcctggaacccattttccagatgagaaagactgaggytcagagaagccaagttccttgtccaacgtgcgaccagcggccaggtgcccaggcctgtccactgtgtggggcatatacaatagcagacgtggctctaccgggcccctgccgggcaggcccagcacgccctacctgtctgtgtcatggcgagggaatgatgagctcaggtgtgcaacccgttctggccagcccacccgtaagggaggggccggctccagcctctccttcaccaggacgctccctctcgcctttacctccctgccatggctggagagggcttgtctagggctcctttgggggctagaaaggatggattgattggttcattggttcattcattcattattcattcatttaagatttattgggtagctcccaggaacgaggcagccaaacaggggaagatatttctgtcttcctggatctcatttcctgtgaaggagccaagacatttagtctgtaaactcataagcagataaaataattctggcaacaagaattatctaggagaaaacaaaacagggtgatggcttccatgcggaggcttcagatgggggagtcgacgtcagtaacggttcaagattctgaa

SEQ ID NO: 4528 - DNA, 816 bp, Homo sapiens
tcttggagcagaagaagcaggaccgcggggagctgaagctgctgcttttgggtgagtccagggtcggtgggcggtgggtggtgggcagtgggcggtggccagccggcaggggtgtcggggcaaggaggcggatcaggctaggtcagacattggcatcgtggagccgtcgcctcctcccagggaatggggagcctggaacccattttccagatgagaaagactgaggttcagagaagccaagttccttgtccaacgygcgaccagcggccaggtgcccaggcctgtccactgtgtggggcatatacaatagcagacgtggctctaccgggcccctgccgggcaggcccagcacgccctacctgtctgtgtcatggcgagggaatgatgagctcaggtgtgcaacccgttctggccagcccacccgtaagggaggggccggctccagcctctccttcaccaggacgctccctctcgcctttacctccctgccatggctggagagggcttgtctagggctcctttgggggctagaaaggatggattgattggttcattggttcattcattcattattcattcatttaagatttattgggtagctcccaggaacgaggcagccaaacaggggaagatatttctgtcttcctggatctcatttcctgtgaaggagccaagacatttagtctgtaaactcataagcagataaaataattctggcaacaagaattatctaggagaaaacaaaacagggtgatggcttccatgcggaggcttcagatgggggagtcgacgtcagtaacggttcaagattctgaa

SEQ ID NO: 4529 - DNA, 816 bp, Homo sapiens
tcttggagcagaagaagcaggaccgcggggagctgaagctgctgcttttgggtgagtccagggtcggtgggcggtgggtggtgggcagtgggcggtggccagccggcaggggtgtcggggcaaggaggcggatcaggctaggtcagacattggcatcgtggagccgtcgcctcctcccagggaatggggagcctggaacccattttccagatgagaaagactgaggttcagagaagccaagttccttgtccaacgtgcgaccagcggccaggtgcccaggcctgtccactgtgtggggcatayacaatagcagacgtggctctaccgggcccctgccgggcaggcccagcacgccctacctgtctgtgtcatggcgagggaatgatgagctcaggtgtgcaacccgttctggccagcccacccgtaagggaggggccggctccagcctctccttcaccaggacgctccctctcgcctttacctccctgccatggctggagagggcttgtctagggctcctttgggggctagaaaggatggattgattggttcattggttcattcattcattattcattcatttaagatttattgggtagctcccaggaacgaggcagccaaacaggggaagatatttctgtcttcctggatctcatttcctgtgaaggagccaagacatttagtctgtaaactcataagcagataaaataattctggcaacaagaattatctaggagaaaacaaaacagggtgatggcttccatgcggaggcttcagatgggggagtcgacgtcagtaacggttcaagattctgaa

SEQ ID NO: 4530 - DNA, 816 bp, Homo sapiens
tcttggagcagaagaagcaggaccgcggggagctgaagctgctgcttttgggtgagtccagggtcggtgggcggtgggtggtgggcagtgggcggtggccagccggcaggggtgtcggggcaaggaggcggatcaggctaggtcagacattggcatcgtggagccgtcgcctcctcccagggaatggggagcctggaacccattttccagatgagaaagactgaggttcagagaagccaagttccttgtccaacgtgcgaccagcggccaggtgcccaggcctgtccactgtgtggggcatatacaatagcagacgtggctctaccgggcccctgccgggcaggcccagcacgccctacctgtctgtgtcatggcgagggaatgatgagctcaggtgtgcaacccgttctggccagcccrcccgtaagggaggggccggctccagcctctccttcaccaggacgctccctctcgcctttacctccctgccatggctggagagggcttgtctagggctcctttgggggctagaaaggatggattgattggttcattggttcattcattcattattcattcatttaagatttattgggtagctcccaggaacgaggcagccaaacaggggaagatatttctgtcttcctggatctcatttcctgtgaaggagccaagacatttagtctgtaaactcataagcagataaaataattctggcaacaagaattatctaggagaaaacaaaacagggtgatggcttccatgcggaggcttcagatgggggagtcgacgtcagtaacggttcaagattctgaa

SEQ ID NO: 4531 - DNA, 816 bp, Homo sapiens
tcttggagcagaagaagcaggaccgcggggagctgaagctgctgcttttgggtgagtccagggtcggtgggcggtgggtggtgggcagtgggcggtggccagccggcaggggtgtcggggcaaggaggcggatcaggctaggtcagacattggcatcgtggagccgtcgcctcctcccagggaatggggagcctggaacccattttccagatgagaaagactgaggttcagagaagccaagttccttgtccaacgtgcgaccagcggccaggtgcccaggcctgtccactgtgtggggcatatacaatagcagacgtggctctaccgggcccctgccgggcaggcccagcacgccctacctgtctgtgtcatggcgagggaatgatgagctcaggtgtgcaacccgttctggccagcccacccgyaagggaggggccggctccagcctctccttcaccaggacgctccctctcgcctttacctccctgccatggctggagagggcttgtctagggctcctttgggggctagaaaggatggattgattggttcattggttcattcattcattattcattcatttaagatttattgggtagctcccaggaacgaggcagccaaacaggggaagatatttctgtcttcctggatctcatttcctgtgaaggagccaagacatttagtctgtaaactcataagcagataaaataattctggcaacaagaattatctaggagaaaacaaaacagggtgatggcttccatgcggaggcttcagatgggggagtcgacgtcagtaacggttcaagattctgaa

SEQ ID NO: 4532 - DNA, 732 bp, Homo sapiens
attttagtgacatagaaggaccaataaaaaaagagattaagaaactaattttggagaacgaaaatctatatacaattacatttactttctattatattaaataaaataataggtgaacagacttcatcctagaatttcatttaatagtgatacttgaataactcaatttattcttagcctattcgattcttttcaagtctttcaaatttaagyaaaaaatgcacttacgtcatctgcaataccaaaaattttagatgtcaagtatttaagtatgacagttccaaataaccaaaaacatccttgaataacctaaacaaaagaaaacaaaaataactttgatgcttcatattccacagacataggctaggaagaaaaaaataaatgctttaatcatacatgaaatacatattactatctacaagagaaaatgctagaaaatgcatctcaatttaaaatcaagcatgttgctcaaaatcaagggacagtaactaaaaataaaaatataatcatacaatcttatcaaaattaatatattttatagaagatttacacaaccactgcagttaaattccctttaacagtttcttatacatgcactgtttctcagatgaaacatgagtaataaataaaactggaatttttaaactacatacccaggattaactttaacttgtttcataaaaagggcaatttggtacattaaaactgagccctaaaatactataaaactgt

SEQ ID NO: 4533 - DNA, 820 bp, Homo sapiens
ccctcttacaacttcaaaactaaagagtcactctctaggtgactccagatgggccctctggcttgtattctgacttcaaatgacacatccatttgatgggcttgaaggtggacatgaagaatctgcaggaattcttttcatactctttctaagagtctagttccttggatcaagggaaactctgcttgtacattttctaaagtttacatcttagagcctccaaaaatacatattttctccctcccattatcccttcattccatcttttttttttttttttttttttttttttttgagatggagtctcgctctgtcatccaggctggagtgcagtggtgcgatctaggctcactgcaagctccgcctcccaggttcacgccattctcctgcctcagcctccagattagctgggaatacaggcacccgtcaccaagcccggctaattttttgtattttttttttttttagtagagacggggtttcaccgtgttagccaggatagtcttgatctcctgacgtcatgatccacccacctcagcctcccaaagtgctggaattacaggcgtgagccaccgcgcctggccattcagtcttagagttatacttagaagaggcacaattggctgttggaaccagaaagggacttagatttgcacaaatctagatcaaaattcttagatcttaaatttaccaattgtgcaatttgaactagagacattagttttcctcatcatagaatgaggacgacaatatctaactttagagtttttattaaggttatacacggtcttcaccaaagactttacraaactttacaaaa

SEQ ID NO: 4534 - DNA, 569 bp, Homo sapiens
taaattaaaagcataatactctcagggaactcatctcacaatctaagcctcttgcttaattaaagtagcctgtgaatgcagtcatagcaagctacagccaatgtatagaaaacattcaccctacatggctatttaggcccaaacttaagcctaaaccagtcatgccaggcataacacctttcttatctgtctctcacctctgctttgctcttcctgagcaatgtggggcccatgcctttctgaggaacagaggaaggaggaaggtggggtggggaggaagaaatactcctacaactttacaaaaccttccttcacccctcaatgcaggaaggaaggtagagagagtggctgtatgtgctgtattaacaggcatgctcaggctkgtttgagtccttactttttttttattttgttttgttttgtttttatatatatatttttttttattatactttaagttctaagtcctttctaaccacctgactttgtgcggaaggtccaaacaccattaggcaaaccccagtaatgttacaagcacagtgacctatcccagagcaacttttttaaga

SEQ ID NO: 4535 - DNA, 628 bp, Homo sapiens
ttttttctgccttccgtctccttgggagtcacctgggttctggccctacatgtcccagcccggcccagagcttagagccgggagatgctcagtccatggtgccggctgctccctgggccaggagagcccttggtggctctgtcacctctcctgggtgaccctggcctctgccctggggacaacctcattcctctggattgccccatcttccctgggacccctgcaagccccattggccttacttgactccgaatctttgtatgaacatcatgtgtttctgcagggtgtggctgacatctagctggatgcagtggatgattctggaggacctcttgcccttctccttcatgacctgtagggcagggccaagaggaggaagcagcctcagaacagacaaaagactccctgccccaaacggcagtcatcccacagtcagcacttctggaaggaaggaaggaaggtttccttctgcagaaagctcctttttrccttgtttctgacaccagggagggtcagcagagcccagcgcacctgtggtgcctgagttaccatctatgcccaggatgtgcgtctgaccacagcccccactcccaacccaggctcaacgttccctccagctggagtcctg

SEQ ID NO: 4536 - DNA, 628 bp, Homo sapiens
ttttttctgccttccgtctccttgggagtcacctgggttctggccctacatgtcccagcccggcccagagcttagagccgggagatgctcagtccatggtgccggctgctccctgggccaggagagcccttggtggctctgtcacctctcctgggtgaccctggcctctgccctggggacaacctcattcctctggattgccccatcttccctgggacccctgcaagccccattggccttacttgactccgaatctttgtatgaacatcatgtgtttctgcagggtgtggctgacatctagctggatgcagtggatgattctggaggacctcttgcccttctccttcatgacctgtagggcagggccaagaggaggaagcagcctcagaacagacaaaagactccctgccccaaacggcagtcatcccacagtcagcacttctggaaggaaggaaggaaggtttccttctgcagaaagctcctttttaccttgtttctgacrccagggagggtcagcagagcccagcgcacctgtggtgcctgagttaccatctatgcccaggatgtgcgtctgaccacagcccccactcccaacccaggctcaacgttccctccagctggagtcctg

SEQ ID NO: 4537 - DNA, 628 bp, Homo sapiens
ttttttctgccttccgtctccttgggagtcacctgggttctggccctacatgtcccagcccggcccagagcttagagccgggagatgctcagtccatggtgccggctgctccctgggccaggagagcccttggtggctctgtcacctctcctgggtgaccctggcctctgccctggggacaacctcattcctctggattgccccatcttccctgggacccctgcaagccccattggccttacttgactccgaatctttgtatgaacatcatgtgtttctgcagggtgtggctgacatctagctggatgcagtggatgattctggaggacctcttgcccttctccttcatgacctgtagggcagggccaagaggaggaagcagcctcagaacagacaaaagactccctgccccaaacggcagtcatcccacagtcagcacttctggaaggaaggaaggaaggtttccttctgcagaaagctcctttttaccttgtttctgacaccagggagggtcagcagagcccagcgcacctgtggtgcctgagttaccatctatgcccaggatgtgcrtctgaccacagcccccactcccaacccaggctcaacgttccctccagctggagtcctg

SEQ ID NO: 4538 - DNA, 628 bp, Homo sapiens
ttttttctgccttccgtctccttgggagtcacctgggttctggccctacatgtcccagcccggcccagagcttagagccgggagatgctcagtccatggtgccggctgctccctgggccaggagagcccttggtggctctgtcacctctcctgggtgaccctggcctctgccctggggacaacctcattcctctggattgccccatcttccctgggacccctgcaagccccattggccttacttgactccgaatctttgtatgaacatcatgtgtttctgcagggtgtggctgacatctagctggatgcagtggatgattctggaggacctcttgcccttctccttcatgacctgtagggcagggccaagaggaggaagcagcctcagaacagacaaaagactccctgccccaaacggcagtcatcccacagtcagcacttctggaaggaaggaaggaaggtttccttctgcagaaagctcctttttaccttgtttctgacaccagggagggtcagcagagcccagcgcacctgtggtgcctgagttaccatctatgcccaggatgtgcgtctgaccacagcccccacycccaacccaggctcaacgttccctccagctggagtcctg

SEQ ID NO: 4539 - DNA, 2220 bp, Homo sapiens
aagtgggcaggggaggtgacatcacaaagctctcagactgagggtcctgctgggcagagaagactggctgccctgagaggctgacaaagtcacatgcagggtctctgagagtgtgaatggcactggcccggggcacgtgccatgtggatcccaagaaaatgcagtgacttctagagtggggaacacttaaccccctaacccccatccacccacccacctactgcatgcctacctggccctcagtaatacacatgatccttttttttttttttttttttttttgagacacagtcttgttctgtcgcccgggctagagttcagtggtgtgatctctgctgactgcaaccactgcctcccgggttcaagcaattctcctgcctcagcctccggagtagctgggattacaggtgctcgccaccatgtctggctaatttttgtatttttagtagagacggggtttcaccatgttggccaggctggtctcgaattcctgacctcatgatccacctgcctcggcctcccaaagtgctgggattacaggcatgagccaccgtgcccagccacattaggcatttttctaaggtatgaatttctatgatgaacatgtattacttttatattcatggtaaagcgataatgacttttataaataaccttggagcagaaatgctcagccccaaacccttcccagttagtgggccgccccatgggcctgtgactggagtttccccctgccctgtccttgcacggcctccttcctgatgtgacacttggatgcctgtgagagggcctgtgacagatgccagcagtggtggcgatgacaagcccaaagccacatttgttccattacttccagctcctcgttgcctttgcaatccctgcggtgagagctcctttctcttatctgcacaaggcaagagtcaaaagttcttgtcagtgtgattgcagaatatcagactggaaaacttcctgataatacctaaattcctttagcgcagagcagtccctggactcgggtcaggagagctatgtggcttcagcacattgtgtactgtgcagctggataataaaccagatgaaatttggcaaataaaaatgtaaggatgtcattctagtcccatctggtgtgataacccctctcccacaccaatttgtctgttcccttagcaaaaccatgcaggcggcagaggaagagtctctgcttgtgtgagccattgaggaattccaaaatagacacaaagatatgaggaatacaaagaaatgccaaataataaaaaatgaggatcaagctgaggtttctgagacacatttatggcttttgtaaacagtcatgcattcgttgaatggctctttgggatgcactggtgacattagctaattctgacatttaggaatttaaacttagtagctgtcctagcttatccttattaacaaagtttgctaaacattgcgtgctgtgcgccctgctttatgtttgaagatgatgcaaatggcaggctgtcatctcgattccatctctcatcgtaaaacccgagggacacgggcgcatgctcccaccatgttttcctctggcctcattctgcacccagcattccctgttctttccttaccttccccagtttagtttcaaaaacatatgggttcccaaagaaaacaggaagaaatgcagaaacgtgaaaataaagtttaacaagtgatgatagacctttgatagagcactctttcctccaygccaaacaaaccgctttttataaaccaaataatttaaagtatagcttcactcttacctaaacttaaaacaaactggagagagagaggtgtatttttaatagaaatgacacatcgaagcatttccaaaaatgccctttgatgctcctaagccactgaccaagttcctggatttcaccccctcaggtaaccaggtgagtttctccaaatccacggatgcttttgcctttgaagaggacagcagcagcgatgggctttctccggatcagactcgaagtgaagacccccaaaactcagcgggatccccgccagacgctaaagcctcagataccccttcgacaggttctctggggacaaaccaggtaaaaaacaaaacaaacaaacgaaaaaagtaaaacagcatctcagtgtattatcgtttcagtcttaacatcaacactgttaacagctggttttgcttagagaatgcagagatgtccctggctgccacag

SEQ ID NO: 4540 - DNA, 609 bp, Homo sapiens
cagatcccagcctgagacctgccatgtctcccagccctccagcacagagctcagcccaagtcccctctctctgcaggtcccctgaagaccttgccaaagtgtgagatcrccctggagaaactcaagaatgacatggcggtggtgagtgggatgctggggacccctgggggatcggggctccctcaagagctcctgggggcaccactggaggggccttcatggtcaggctgggtgggggctgggcctgatctgagaccctgcccaccaggcctcttccaggccaggtttgctgtgctgggcgggaacgtgggagaagtcaccctctgtctgtggcccccgtgggtgcctctgccacccggtccagagacagcagggactctggggaggacaaggctgtgggggtggggattatacccaggatcggccaacattgtctgcacaagggtggaggctaagagagaggcctcgggaatctggctgtgagtgaggactggccagaggtaggaaggccccctaaatggagaaccctcaggtcccgggcttctgaccgtgcccatcctaccgccagcccgctgcccctggtgccgctgaccaaacagcagtacctat

SEQ ID NO: 4541 - DNA, 2224 bp, Homo sapiens
tgttttcaatgggtcgctttrccctgggactgacagggaggctctgaccatttagccaccaaatgtaggtgtagttcttactcttaggttcacaggtgaaggttaagacatccttattctctctggggtttaagttgttgattgtgatgtagggcttggacagctttgctgtgtggataacagagagaagattgtcctgtgtggcacctttgattcctccacaggcatacttcaatcagagttggcatctcccacctctcagcccacccgagtccttgaaagccaatagctggtgcttctgtcacaagatagatgcatgatgatctaagggctcaaagactgtgaggccacctgctctgttttagggaggcacagactttctcaagtgtcaattgagcagcagtgttgggtcatggacagacatatcagtgggagtcacagccccttgtacccctcccagtccctccctaatcagttaacttgctggctcaccttgggttccttacctggaatgtgcaactactgggccccttccaaattccatcctcctttgcccccctagatgagatttctctgcagcttccatttcaaggacattctagagatgagtaataatgggacttcccattgtcctgaaaccctgaagatactgagcagtctggcctgggactggatgtttcagcagaaataacacaggagagaccagagtcaagcctggaggtcagttcagtcatcagccagtggaggcagaaagtggggcagtgttttgcaggtgtttcatgatgacttacttgaaccagtgacctctaaagatagagcagagtgcaaggaatgatctagaaggagtcaaggggacaggcaagagctggtggctttggagcagaaccatgttccctgtcctgggttctttaagtttcctctccttctgcagagggcaggtgaggaccatgtggatctttccagaaatacatatggacatttgcaaaagcagaactgactggtggaaagtgtgggaatgaactgctggaaatctggtcctcatggaccatgtgtgtttgatggatatgagacaaatttggagagaagttttgcaaatattttctttcattggacattctactctctgattccctgggttcgactactctagggacctcatgtaagtggattccagagtgaatatgagaagagactgctgtttgccaggagctgggagtggggagaatcagaagttgttcatgggtgtgcagtttcagttatgcaaggtggggaggttctggagatctgctgtagagcttgatgcctataattcacacagattgagtattatgcataagacttagaacaaaaagtgttttggatttctgacatttttttattctgaaatatttgtcatatgcttactggtttagcatcccaaatctgaaagattcaaaatctaaaatgcttcagtgagcatttcttttcagcatcagattagtaggcaaaagtgggaggtgataagccaaagatattcttgccctttttttttctctcaccacgtttctagcttgatgattagtttttggtcaattccatactggccatgctgcactcatatattttttaaagctttgggatgtgagaaaggctgattgctattttctgtcgtcagaactttccacgttttcatggttgcctctttttctcagtgtttctgttgtggcagtcattaataagagcctgtcaggtcagatttaggacagagttttataattctgcaaaaaaatgttactgggattctggtaggggttgcattgaatctgcaactaactttgggtagtattgtctttctaacaatattgattcttccaatccatgaaaatgaaatgtctttccatatattgatatcgtctttaatttctttcagcaatgttttgtagttttcaggatataatcatttgacctttttgattaaacttactccaaaatattttattccttttgatgttaatgtgaattgaaattatttccttaatttcctttcagattgttcattgttagtgtatagtctaaagaatgacctagaaagagtgaaggggacaggcaaaagctggtggttttggagcagaaacatattccctgtgctgggtttttgattttccctctccctttgcagagggcaggtggcttttccctgatagctagatagacttcactggaaaacatattgccaatgctccag

SEQ ID NO: 4542 - DNA, 2224 bp, Homo sapiens
tgttttcaatgggtcgctttaccctgggactgacagggaggctctgaccatttagccaccaaatgtaggtgtagttctyactcttaggttcacaggtgaaggttaagacatccttattctctctggggtttaagttgttgattgtgatgtagggcttggacagctttgctgtgtggataacagagagaagattgtcctgtgtggcacctttgattcctccacaggcatacttcaatcagagttggcatctcccacctctcagcccacccgagtccttgaaagccaatagctggtgcttctgtcacaagatagatgcatgatgatctaagggctcaaagactgtgaggccacctgctctgttttagggaggcacagactttctcaagtgtcaattgagcagcagtgttgggtcatggacagacatatcagtgggagtcacagccccttgtacccctcccagtccctccctaatcagttaacttgctggctcaccttgggttccttacctggaatgtgcaactactgggccccttccaaattccatcctcctttgcccccctagatgagatttctctgcagcttccatttcaaggacattctagagatgagtaataatgggacttcccattgtcctgaaaccctgaagatactgagcagtctggcctgggactggatgtttcagcagaaataacacaggagagaccagagtcaagcctggaggtcagttcagtcatcagccagtggaggcagaaagtggggcagtgttttgcaggtgtttcatgatgacttacttgaaccagtgacctctaaagatagagcagagtgcaaggaatgatctagaaggagtcaaggggacaggcaagagctggtggctttggagcagaaccatgttccctgtcctgggttctttaagtttcctctccttctgcagagggcaggtgaggaccatgtggatctttccagaaatacatatggacatttgcaaaagcagaactgactggtggaaagtgtgggaatgaactgctggaaatctggtcctcatggaccatgtgtgtttgatggatatgagacaaatttggagagaagttttgcaaatattttctttcattggacattctactctctgattccctgggttcgactactctagggacctcatgtaagtggattccagagtgaatatgagaagagactgctgtttgccaggagctgggagtggggagaatcagaagttgttcatgggtgtgcagtttcagttatgcaaggtggggaggttctggagatctgctgtagagcttgatgcctataattcacacagattgagtattatgcataagacttagaacaaaaagtgttttggatttctgacatttttttattctgaaatatttgtcatatgcttactggtttagcatcccaaatctgaaagattcaaaatctaaaatgcttcagtgagcatttcttttcagcatcagattagtaggcaaaagtgggaggtgataagccaaagatattcttgccctttttttttctctcaccacgtttctagcttgatgattagtttttggtcaattccatactggccatgctgcactcatatattttttaaagctttgggatgtgagaaaggctgattgctattttctgtcgtcagaactttccacgttttcatggttgcctctttttctcagtgtttctgttgtggcagtcattaataagagcctgtcaggtcagatttaggacagagttttataattctgcaaaaaaatgttactgggattctggtaggggttgcattgaatctgcaactaactttgggtagtattgtctttctaacaatattgattcttccaatccatgaaaatgaaatgtctttccatatattgatatcgtctttaatttctttcagcaatgttttgtagttttcaggatataatcatttgacctttttgattaaacttactccaaaatattttattccttttgatgttaatgtgaattgaaattatttccttaatttcctttcagattgttcattgttagtgtatagtctaaagaatgacctagaaagagtgaaggggacaggcaaaagctggtggttttggagcagaaacatattccctgtgctgggtttttgattttccctctccctttgcagagggcaggtggcttttccctgatagctagatagacttcactggaaaacatattgccaatgctccag

SEQ ID NO: 4543 - DNA, 2224 bp, Homo sapiens
tgttttcaatgggtcgctttaccctgggactgacagggaggctctgaccatttagccaccaaatgtaggtgtagttcttactcttaggttcacaggtgaaggttaagacatccttattctctctggggtttaagttgttgattgtgatgtagggcttggrcagctttgctgtgtggataacagagagaagattgtcctgtgtggcacctttgattcctccacaggcatacttcaatcagagttggcatctcccacctctcagcccacccgagtccttgaaagccaatagctggtgcttctgtcacaagatagatgcatgatgatctaagggctcaaagactgtgaggccacctgctctgttttagggaggcacagactttctcaagtgtcaattgagcagcagtgttgggtcatggacagacatatcagtgggagtcacagccccttgtacccctcccagtccctccctaatcagttaacttgctggctcaccttgggttccttacctggaatgtgcaactactgggccccttccaaattccatcctcctttgcccccctagatgagatttctctgcagcttccatttcaaggacattctagagatgagtaataatgggacttcccattgtcctgaaaccctgaagatactgagcagtctggcctgggactggatgtttcagcagaaataacacaggagagaccagagtcaagcctggaggtcagttcagtcatcagccagtggaggcagaaagtggggcagtgttttgcaggtgtttcatgatgacttacttgaaccagtgacctctaaagatagagcagagtgcaaggaatgatctagaaggagtcaaggggacaggcaagagctggtggctttggagcagaaccatgttccctgtcctgggttctttaagtttcctctccttctgcagagggcaggtgaggaccatgtggatctttccagaaatacatatggacatttgcaaaagcagaactgactggtggaaagtgtgggaatgaactgctggaaatctggtcctcatggaccatgtgtgtttgatggatatgagacaaatttggagagaagttttgcaaatattttctttcattggacattctactctctgattccctgggttcgactactctagggacctcatgtaagtggattccagagtgaatatgagaagagactgctgtttgccaggagctgggagtggggagaatcagaagttgttcatgggtgtgcagtttcagttatgcaaggtggggaggttctggagatctgctgtagagcttgatgcctataattcacacagattgagtattatgcataagacttagaacaaaaagtgttttggatttctgacatttttttattctgaaatatttgtcatatgcttactggtttagcatcccaaatctgaaagattcaaaatctaaaatgcttcagtgagcatttcttttcagcatcagattagtaggcaaaagtgggaggtgataagccaaagatattcttgccctttttttttctctcaccacgtttctagcttgatgattagtttttggtcaattccatactggccatgctgcactcatatattttttaaagctttgggatgtgagaaaggctgattgctattttctgtcgtcagaactttccacgttttcatggttgcctctttttctcagtgtttctgttgtggcagtcattaataagagcctgtcaggtcagatttaggacagagttttataattctgcaaaaaaatgttactgggattctggtaggggttgcattgaatctgcaactaactttgggtagtattgtctttctaacaatattgattcttccaatccatgaaaatgaaatgtctttccatatattgatatcgtctttaatttctttcagcaatgttttgtagttttcaggatataatcatttgacctttttgattaaacttactccaaaatattttattccttttgatgttaatgtgaattgaaattatttccttaatttcctttcagattgttcattgttagtgtatagtctaaagaatgacctagaaagagtgaaggggacaggcaaaagctggtggttttggagcagaaacatattccctgtgctgggtttttgattttccctctccctttgcagagggcaggtggcttttccctgatagctagatagacttcactggaaaacatattgccaatgctccag

SEQ ID NO: 4544 - DNA, 2224 bp, Homo sapiens
tgttttcaatgggtcgctttaccctgggactgacagggaggctctgaccatttagccaccaaatgtaggtgtagttcttactcttaggttcacaggtgaaggttaagacatccttattctctctggggtttaagttgttgattgtgatgtagggcttggacagctttgctgtgtggataacagagagaagattgtcctgtgtggcacctttgattcctccacaggcatacttcaatcagagttggcatctcccacctctcagcccacccgagtccttgaaagccaatagctggtgcttctgtcacaagatagatgcatgatgatctaagggctcaaagactgtgaggccacctgctctgttttagggaggcacagactttctcaagtgtcaattgagcagcagtgttgggtcatggacagacatatcagtgggagtcacagccccttgtacccctcccagtccctccctaatcagttaacttgctggctcaccttgggttccttacctggaatgtgcaactactgggccccttccaaattccatcctcctttgcccccctagatgagatttctctgcagcttccatttcaaggacattctagagatgagtaataatgggacttcccattgtcctgaaaccctgaagatactgagcagtctggcctgggactggatgtttcagcagaaataacacaggagagaccagagtcaagcctggaggtcagttcagtcatcagccagtggaggcagaaagtggggcagtgttttgcaggtgtttcatgatgacttacttgaaccagtgacctctaaagatagagcagagtgcaaggaatgatctagaaggagtcaaggggacaggcaagagctggtggctttggagcagaaccatgttccctgtcctgggttctttaagtttcctctccttctgcagagggcaggtgaggaccatgtggatctttccagaaatacatatggacatttgcaaaagcagaactgactggtggaaagtgtgggaatgaactgctggaaatctggtcctcatggaccatgtgtgtttgatggatatgagacaaatttggagagaagttttgcaaatattttctttcattggacattctactctctgattccctgggttcgactactctagggacctcatgtaagtggattccagagtgaatatgagaagagactgctgtttgccaggagctgggagtggggagaatcagaagttgttcatgggtgtgcagtttcagttatgcaaggtggggaggttctggagatctgctgtagagcttgatgcctataattcacacagattgagtattatgcataagacttagaacaaaaagtgttttggatttctgacatttttttattctgaaatatttgtcatatgcttactggtttagcatcccaaatctgaaagattcaaaatctaaaatgcttcagtgagcatttcttttcagcatcagattagtaggcaaaagtgggaggtgataagccaaagatattcttgccctttttttttctctcaccacgtttctagcttgatgattagtttttggtcaattccatactggccatgctgcactcatatattttttaaagctttgggatgtgagaaaggctgattgctattttctgtcgtcagaactttccacgttttcatggttgcctctttttctcagtgtttstgttgtggcagtcattaataagagcctgtcaggtcagatttaggacagagttttataattctgcaaaaaaatgttactgggattctggtaggggttgcattgaatctgcaactaactttgggtagtattgtctttctaacaatattgattcttccaatccatgaaaatgaaatgtctttccatatattgatatcgtctttaatttctttcagcaatgttttgtagttttcaggatataatcatttgacctttttgattaaacttactccaaaatattttattccttttgatgttaatgtgaattgaaattatttccttaatttcctttcagattgttcattgttagtgtatagtctaaagaatgacctagaaagagtgaaggggacaggcaaaagctggtggttttggagcagaaacatattccctgtgctgggtttttgattttccctctccctttgcagagggcaggtggcttttccctgatagctagatagacttcactggaaaacatattgccaatgctccag

SEQ ID NO: 4545 - DNA, 2224 bp, Homo sapiens
tgttttcaatgggtcgctttaccctgggactgacagggaggctctgaccatttagccaccaaatgtaggtgtagttcttactcttaggttcacaggtgaaggttaagacatccttattctctctggggtttaagttgttgattgtgatgtagggcttggacagctttgctgtgtggataacagagagaagattgtcctgtgtggcacctttgattcctccacaggcatacttcaatcagagttggcatctcccacctctcagcccacccgagtccttgaaagccaatagctggtgcttctgtcacaagatagatgcatgatgatctaagggctcaaagactgtgaggccacctgctctgttttagggaggcacagactttctcaagtgtcaattgagcagcagtgttgggtcatggacagacatatcagtgggagtcacagccccttgtacccctcccagtccctccctaatcagttaacttgctggctcaccttgggttccttacctggaatgtgcaactactgggccccttccaaattccatcctcctttgcccccctagatgagatttctctgcagcttccatttcaaggacattctagagatgagtaataatgggacttcccattgtcctgaaaccctgaagatactgagcagtctggcctgggactggatgtttcagcagaaataacacaggagagaccagagtcaagcctggaggtcagttcagtcatcagccagtggaggcagaaagtggggcagtgttttgcaggtgtttcatgatgacttacttgaaccagtgacctctaaagatagagcagagtgcaaggaatgatctagaaggagtcaaggggacaggcaagagctggtggctttggagcagaaccatgttccctgtcctgggttctttaagtttcctctccttctgcagagggcaggtgaggaccatgtggatctttccagaaatacatatggacatttgcaaaagcagaactgactggtggaaagtgtgggaatgaactgctggaaatctggtcctcatggaccatgtgtgtttgatggatatgagacaaatttggagagaagttttgcaaatattttctttcattggacattctactctctgattccctgggttcgactactctagggacctcatgtaagtggattccagagtgaatatgagaagagactgctgtttgccaggagctgggagtggggagaatcagaagttgttcatgggtgtgcagtttcagttatgcaaggtggggaggttctggagatctgctgtagagcttgatgcctataattcacacagattgagtattatgcataagacttagaacaaaaagtgttttggatttctgacatttttttattctgaaatatttgtcatatgcttactggtttagcatcccaaatctgaaagattcaaaatctaaaatgcttcagtgagcatttcttttcagcatcagattagtaggcaaaagtgggaggtgataagccaaagatattcttgccctttttttttctctcaccacgtttctagcttgatgattagtttttggtcaattccatactggccatgctgcactcatatattttttaaagctttgggatgtgagaaaggctgattgctattttctgtcgtcagaactttccacgttttcatggttgcctctttttctcagtgtttctgttgtggcagtcattaataagagcctgtcaggtcagatttaggacagagttttataattctgcaaaaaaatgttactgkgattctggtaggggttgcattgaatctgcaactaactttgggtagtattgtctttctaacaatattgattcttccaatccatgaaaatgaaatgtctttccatatattgatatcgtctttaatttctttcagcaatgttttgtagttttcaggatataatcatttgacctttttgattaaacttactccaaaatattttattccttttgatgttaatgtgaattgaaattatttccttaatttcctttcagattgttcattgttagtgtatagtctaaagaatgacctagaaagagtgaaggggacaggcaaaagctggtggttttggagcagaaacatattccctgtgctgggtttttgattttccctctccctttgcagagggcaggtggcttttccctgatagctagatagacttcactggaaaacatattgccaatgctccag

SEQ ID NO: 4546 - DNA, 2224 bp, Homo sapiens
tgttttcaatgggtcgctttaccctgggactgacagggaggctctgaccatttagccaccaaatgtaggtgtagttcttactcttaggttcacaggtgaaggttaagacatccttattctctctggggtttaagttgttgattgtgatgtagggcttggacagctttgctgtgtggataacagagagaagattgtcctgtgtggcacctttgattcctccacaggcatacttcaatcagagttggcatctcccacctctcagcccacccgagtccttgaaagccaatagctggtgcttctgtcacaagatagatgcatgatgatctaagggctcaaagactgtgaggccacctgctctgttttagggaggcacagactttctcaagtgtcaattgagcagcagtgttgggtcatggacagacatatcagtgggagtcacagccccttgtacccctcccagtccctccctaatcagttaacttgctggctcaccttgggttccttacctggaatgtgcaactactgggccccttccaaattccatcctcctttgcccccctagatgagatttctctgcagcttccatttcaaggacattctagagatgagtaataatgggacttcccattgtcctgaaaccctgaagatactgagcagtctggcctgggactggatgtttcagcagaaataacacaggagagaccagagtcaagcctggaggtcagttcagtcatcagccagtggaggcagaaagtggggcagtgttttgcaggtgtttcatgatgacttacttgaaccagtgacctctaaagatagagcagagtgcaaggaatgatctagaaggagtcaaggggacaggcaagagctggtggctttggagcagaaccatgttccctgtcctgggttctttaagtttcctctccttctgcagagggcaggtgaggaccatgtggatctttccagaaatacatatggacatttgcaaaagcagaactgactggtggaaagtgtgggaatgaactgctggaaatctggtcctcatggaccatgtgtgtttgatggatatgagacaaatttggagagaagttttgcaaatattttctttcattggacattctactctctgattccctgggttcgactactctagggacctcatgtaagtggattccagagtgaatatgagaagagactgctgtttgccaggagctgggagtggggagaatcagaagttgttcatgggtgtgcagtttcagttatgcaaggtggggaggttctggagatctgctgtagagcttgatgcctataattcacacagattgagtattatgcataagacttagaacaaaaagtgttttggatttctgacatttttttattctgaaatatttgtcatatgcttactggtttagcatcccaaatctgaaagattcaaaatctaaaatgcttcagtgagcatttcttttcagcatcagattagtaggcaaaagtgggaggtgataagccaaagatattcttgccctttttttttctctcaccacgtttctagcttgatgattagtttttggtcaattccatactggccatgctgcactcatatattttttaaagctttgggatgtgagaaaggctgattgctattttctgtcgtcagaactttccacgttttcatggttgcctctttttctcagtgtttctgttgtggcagtcattaataagagcctgtcaggtcagatttaggacagagttttataattctgcaaaaaaatgttactgggattctggtaggggttgcattgaatctgcaactaactttgggtagtattgtctttctaacaatattgattcttccaatccatgaaaatgaaatgtctttccatatattgatatcgtctttaatttctttcagcaatgttttgtagttttcaggatataatcatttgacctttttgattaaacttactccaaaatattttattcsttttgatgttaatgtgaattgaaattatttccttaatttcctttcagattgttcattgttagtgtatagtctaaagaatgacctagaaagagtgaaggggacaggcaaaagctggtggttttggagcagaaacatattccctgtgctgggtttttgattttccctctccctttgcagagggcaggtggcttttccctgatagctagatagacttcactggaaaacatattgccaatgctccag

SEQ ID NO: 4547 - DNA, 633 bp, Homo sapiens
tgctgatcactgactgaatgccaactgtttgccaggcacacagtaggcgctgcctccgcatggccttgtgatgtggtttggatctgtgtcctggccagtctcatgttgaaatgtagccccagggctggaggtggggcctggtgggaagtggctgggtcacagggtggtttctcatgggtggtttagaccatccccttggcgctgtcctcaggatagtgagcaggctttcctgagatggtgttgttaaaagtgtgcggcactccccatctgttctctccctcctgcacctgccatgtgasgtcttggctcccctttgccttccgccatgactggatacttcctgaggcctccccaggagcagaggccaccatgcttcctgtacagcctacagaaccctgagccaattcaacctcttttctttatgaattacccagcctcaggtatttctgtatagcagtgtgacaacagcctaacacacctgtctaatgaacccgggtctaattaacagcccatgtcctcccacccaggggaggcccttgcacaggggaggctgggtcccactggtaccgggccctgtgagagtctcaggtacagaacagagtcccaggagcgtcaagcaggagctgtggcttg

SEQ ID NO: 4548 - DNA, 880 bp, Homo sapiens
ccattcgctgtgcactgaactcggtgggtcggacccatccagcgtgcactgaactcggtgggttggacccattcactgtgcactgaactcggtgggtcggacccatccagcgtgcactgaactcggtgggtcggacccatccagcatgcactgaactcggtgggttggacccatccagcgtgcactgaactcggtgggtcggacccattcactgtgcactgaactcggtgggtcagacccatccagtgtgcactgaactcggtgggtcggacccattcactgtgcactgaactcggtgggtcggacccattcactgtgcactgaactcggtgggtcggacccatccagcgtgcactgaactcggtgggtcggacccatccagcgtgcactgaactcggtgggtcagaccctttcactgtgcactgaactcggtgggtcagacccatccagcatgcactgaactcggtgggtcggacccatccagcgtgcactgaactcggtgggttggacccatccagcatgcactgaactcggtgggtcagaccctttcactgtgcactgaactcggtgggtcagacccattcactgtgcactgaactcggtgggtcggacccatccagtgtgcactgaactcggtgggtcggacccattcactgtgcactgaactcggtgggtcagacccatccagcgtgcactgaactcggtgrgtcggacccatccagcgtgcactgaactcggtgggtcggacccatccagcgtgcactgaactcggtgggttggaccctttcactgtgcactgaacttggtgggtcagacccatccagtgtgcactgaactcggtgggtcggacccatccactgtgcactgaactcggtgggtc

SEQ ID NO: 4549 - DNA, 880 bp, Homo sapiens
ccattcgctgtgcactgaactcggtgggtcggacccatccagcgtgcactgaactcggtgggttggacccattcactgtgcactgaactcggtgggtcggacccatccagcgtgcactgaactcggtgggtcggacccatccagcatgcactgaactcggtgggttggacccatccagcgtgcactgaactcggtgggtcggacccattcactgtgcactgaactcggtgggtcagacccatccagtgtgcactgaactcggtgggtcggacccattcactgtgcactgaactcggtgggtcggacccattcactgtgcactgaactcggtgggtcggacccatccagcgtgcactgaactcggtgggtcggacccatccagcgtgcactgaactcggtgggtcagaccctttcactgtgcactgaactcggtgggtcagacccatccagcatgcactgaactcggtgggtcggacccatccagcgtgcactgaactcggtgggttggacccatccagcatgcactgaactcggtgggtcagaccctttcactgtgcactgaactcggtgggtcagacccattcactgtgcactgaactcggtgggtcggacccatccagtgtgcactgaactcggtgggtcggacccattcactgtgcactgaactcggtgggtcagacccatccagcgtgcactgaactcggtgggtcggacccatccagcgtgcactgaactcggtgggtcggacccatccagcgtgcactgaactcggtgggtkggaccctttcactgtgcactgaacttggtgggtcagacccatccagtgtgcactgaactcggtgggtcggacccatccactgtgcactgaactcggtgggtc

SEQ ID NO: 4550 - DNA, 786 bp, Homo sapiens
ctcttcagggcggagatctttcttctttcgctaattaaactctccctccaacttcacccttgtcatccatgcttcttaatcttcttggtcttggggcaaagaatgctgggtgtacctcaatgagagatggctatattgtggtgcattggagagaatgtaacacttattttacgctgtctttttttttttttttttgagatgcwgtttcgctctggtcacccaggctggagtgcaatggcacggtctcggcttactgcaacctctgcctcccgggttcaagcaattttcctgtttcagcctctcaagtagctgggattacaggcacctgccaccatgcccagctaatttttgtatttttagtagagatggggttttaccatgttggccaggctggtctcaaactcttgacctcaggtgatctgcccaccttggcctcctaaactgctggggttacaggcatgagccaatgtgcctggccttatcctggactctctatagcaaaaaatggaaacaccaaccttgtacttcccaacgggatgccagaaacaagtgtcctcctagccacttatttcctcctcactctacacccgatcaattaccaaatttgtctctttgatctcctaattatccctcaaatttatttgcttttctccatctccattgtttctggtgcaaggcaccaccctcttctgcaggtaagactgcagcagcctcaactgcttgcatcacctcctctcttgctctttccagtccattccctgctctaagacaaggctttgctgtaat

SEQ ID NO: 4551 - DNA, 786 bp, Homo sapiens
ctcttcagggcggagatctttcttctttcgctaattaaactctccctccaacttcacccttgtcatccatgcttcttaatcttcttggtcttggggcaaagaatgctgggtgtacctcaatgagagatggctatattgtggtgcattggagagaatgtaacacttattttacgctgtctttttttttttttttttgagatgctgtttcgctctggtcacccaggctggagtgcaatggcacggtctcggcttactgcaacctcygcctcccgggttcaagcaattttcctgtttcagcctctcaagtagctgggattacaggcacctgccaccatgcccagctaatttttgtatttttagtagagatggggttttaccatgttggccaggctggtctcaaactcttgacctcaggtgatctgcccaccttggcctcctaaactgctggggttacaggcatgagccaatgtgcctggccttatcctggactctctatagcaaaaaatggaaacaccaaccttgtacttcccaacgggatgccagaaacaagtgtcctcctagccacttatttcctcctcactctacacccgatcaattaccaaatttgtctctttgatctcctaattatccctcaaatttatttgcttttctccatctccattgtttctggtgcaaggcaccaccctcttctgcaggtaagactgcagcagcctcaactgcttgcatcacctcctctcttgctctttccagtccattccctgctctaagacaaggctttgctgtaat

SEQ ID NO: 4552 - DNA, 1237 bp, Homo sapiens
ttggtccctcaagaagcccctgaaggtcagagggaggggaggaaaataccttcttgatgcaccagaaatcaccttataaacctcatcctccgtggagcacagtggctcacacctgtaatctcagcactttgggaggctgaggagagaggatcatttgaggctaggggtttgagaccaagctgggccaaatagtgagaccttgtctctacaaaaaaattttaaaaatgtgctgggcatggtggtgcgtgcctgtagtcccagcttgagcccaggaagttgtggcttcagtgagctgtgatcaccccactgcactctagcctgggccaaagcacgagaccctgtctcttaaaaaaaaattgtctttattaaaatgattctcagtatccttcatgctactgcagctgatttccaaagctgcctcatcttccgcgctctcaactcttaataaacccatccaaagcgcagctcttctcttcyagcaactccttatttttatgttcatatccaagtaaatcttagccttgtccagaagcaaaagccccatgaccacgacttcaattctgcctctcttttctggccactgcctctgtgtcaccaaaccccagggacaaattggcaaagacaaaggtggctctgagaggaaaagggagggagaaagggtgtgaaaccccacacatcatagtcttgttcctgttgaaaatgcaggaatataaagcccagtaccagagcttcccattattcaggcctaggctcctggttcctgggctgtctagtgggtgagggcccagggcctggaggtgtttcaggatcctcaggcctgatttggtggacaggaccatgttcaggggaaaatgtggggatagggctgcatgcttgctctcaggagactgggctcttttttctgagtgtccctgagaaaccatccttaggtattggtactactcacagggttgtgcctagcttcctggctttggaacttcattcacttcctcccacccttcccagcccttccattccccctcccaaaaggctgacacccactcctcctagaaccctaccataactcaccatcctacaagagcttccttctgtttgggatagaacttcggtggcctgcatgctagccatgaagccttacgatggccttttcctaaccataacaaccacttatttccacttcatttactttacatttccctctcctcataagatttcagcaaaccatatacttataagt

SEQ ID NO: 4553 - DNA, 1091 bp, Homo sapiens
tgcgtccctttacagaatgacaggcccttacttccgagggcggggactaatgtgtaaggcttaacagatccaattccagaaattatctgtgtttttttcaatcaccctcttgtgcccccccaccccccattaaatttcatcttttatctttttttgggccttcgtaatgaaaagtggttttaaaggttgaccagttttactacttagtgcctaacaggctgagtgattataccgttgaaggaggtcacagcgggaaggacatggagagagatggggggtctgaggcctggggagtgaggtctggttccctctcctccccttggagccagagggcaccttcgtgactaagaagggagaggatctggccttgtgcagctctgcccactgagaggtaacacctgttctccagctgggtggcagctccctgaatcaggccagtttgtactttttcacctaactcacatgatttccacttcagtcgcactaccgctggctgccccattgtggacagcttcattaacctccgttgctcctaaaggcagtcttttgatggaaatgagtggcggaaaaggctgagagcaaccaggccaggctcagcccacttacttactatagttagcctctctgttatgcctcacttaccccaaggactctctgaggagtggccattagtcctacagctcctgagtgcatattgtggccagtcccacaaatgtgaagttctcttctttcctccgtgagtcgttgggtcaaatagaactcttgttaatagctcaccaagtcagttaaagattgggaaggtgggcattgtgaatttgggattaaataatgtccaggtggttagaatggacttaaagagaaatagagaggaaaaggatctagtggtcatagtgaatcccaagttgaaatgagtcaacrggaagggacagtgatgaacaggaagggacagtgggaaaaccctgacagaaatgctttagctacatcctgtaccttcccacttttattagaagatgcttgatttttgttctaagaagggaaatatgtattctaggttcaacaagttataaattccttaagggcagacatctttt

SEQ ID NO: 4554 - DNA, 803 bp, Homo sapiens
gttttccttctctcacactttgggaatgctcagtttttcacctgtttcatgaaatttgtagtagtgtgctgcttctttcaaaggatctgggaatccttcaggttttcctggtatgttcctttgttggttcttggagcaacagatcacagtgtgagtctccacacacagttcagttcatccaggtgagaactgcacattagccctatctcctatctgccatcttgcccaccaagtccagtgccatgacattttaaaacaatttctttggtaattgacattttaaaataattttttggtaattgtgagcacatgcaaacaataatatataaactctattttgatgaaatagaacagttactgttgatgcattttacaaattattttgtaacacttgtatattacacattgcaataactcctttggaaccatacaatatttttaaattttaaatttttgtgggtacatcatargtatatatatttatggggtacatgagatactttgatacaggcatgcaatgtgtaatgatcacatcacagagaaggaggtatccatccactcaagcatttatgctttgtgttacaaacaatccaattagactctttttagttattttaaaatgtacaattaagttattattgactatggtaaccctgatgtgctacctaatagtaggtcttactattctattttttgtacttattaaccatccccacttccccctgcaacccctcactacccttcccagcctctggaaaccatccttccaccctatgtccatgagttcaattgttttgattttt

SEQ ID NO: 4555 - DNA, 915 bp, Homo sapiens
agaaagcatgttcaattcaagaagaaaacccccttaacaaagagagacaaaagactccagacagaggtctcaaactcaaatattccaaggctcagacaggtcataaagatgaagggagcagccaagtgttaggtagtaagtagggaagggtgggggctgtggaaaactggaaatgatagatttgaatgaggacccgtgagagaagagatccagctagaaatagagagagagaatcagagaaatctcagaattactctaaatatgggtcctaggactaaaaactcccatacccagcatggtccccaagcacatatatagcactgcacaggggagcaagtccatctgaggagcggagcagcaaaatgagctttttagctgttagaaatattgagccagcygggtgcagtggctcatgcctgtaatcccagcactttgggaggctgaggcgggccgattgcttgatgtcaggggttcaagaccagcctgggcaacatggcaaaaccctgtctctactaaaaatacaaaaattagccaggtgtggtggcacgtgcctgtaatcccagctactcaggaggctgagacatgagaatcccttgaacctgggaggtggaggttgcagtgagccgagatcatgccactgcactccaacctgggtgacagagtgagattctgtctcaagaaaagagagagagagagagagagagagagagagagagagagagaaatattgagccaattaattaagctcatgtggacttctctcattcattttctggttattaagcaagtcttttgttctatctcaattttcattgtaaatccaaacttgttttatccacagcagataatgtatgatctggcctgaacaagttgtattcaaatatctttagcaagtccttaaaatcatacgtgaat

SEQ ID NO: 4556 - DNA, 824 bp, Homo sapiens
ttatgttgataacacaaattcataaatagctccttcagagtagaatagaagcctctgctcatcattgactggttcatgaggaggagggtggtggggaagaagaggcagataaatccctaagattcttggtccctggtggtggactgttccttgcagacccggagcctggcatttcatcaagaagcataacatagccagtgctttggggttttgtgacccatctgcctttcataccacctcttattgccccttgtcacaagaaatagaaaatggaacatgattaaatgtcactatccttataggtaccatgcaaggaaaatcaactgaggtgtcaggtcatccatgcttttgtgtcagctctacctctaattagccagtcatgttgggcaagtcatttgtctcatctctggggtatcttgttgttcttaacctaaaaaaaggaaacatctacctagcgcaatttccaggcttctggtttgagtcacaggaagggaaaaagcactcaaatttgaatgccactatgtgccaggctttttatagacatgattttatgtaatctgtatgcaacccatgmgataagtgtttagtcactttttttataaatgagaaagcaaagttcagagtccagtcacctgactcgacccctcccactccagaccacacgctcctacctctcatccaaccaccaatggcaagaatgctttgccatgcctatgtcctgaatggtattgcctaggttttcttctagggtttttatggttttaggtctaacatttaagtctttaatccatcttgaattaatttctgtataaggtgtaaggaag

SEQ ID NO: 4557 - DNA, 824 bp, Homo sapiens
ttatgttgataacacaaattcataaatagctccttcagagtagaatagaagcctctgctcatcattgactggttcatgaggaggagggtggtggggaagaagaggcagataaatccctaagattcttggtccctggtggtggactgttccttgcagacccggagcctggcatttcatcaagaagcataacatagccagtgctttggggttttgtgacccatctgcctttcataccacctcttattgccccttgtcacaagaaatagaaaatggaacatgattaaatgtcactatccttataggtaccatgcaaggaaaatcaactgaggtgtcaggtcatccatgcttttgtgtcagctctacctctaattagccagtcatgttgggcaagtcatttgtctcatctctggggtatcttgttgttcttaacctaaaaaaaggaaacatctacctagcgcaatttccaggcttctggtttgagtcacaggaagggaaaaagcactcaaatttgaatgccactatgtgccaggctttttatagacatgattttatgtaatctgtatgcaacccatgasataagtgtttagtcactttttttataaatgagaaagcaaagttcagagtccagtcacctgactcgacccctcccactccagaccacacgctcctacctctcatccaaccaccaatggcaagaatgctttgccatgcctatgtcctgaatggtattgcctaggttttcttctagggtttttatggttttaggtctaacatttaagtctttaatccatcttgaattaatttctgtataaggtgtaaggaag

SEQ ID NO: 4558 - DNA, 825 bp, Homo sapiens
acaacgttaatgttgaagatgtgggttagtgaaattgagacctggcgcttcctgaggctggcagcccggttgagcctgaggaccagacttgaggcagttggcagtccgcgcctcgttgccctctgtctgccctgggtaagtgagaggctccttgggaggccagtggagatggctgtgggaggacagattgagtagctgtccttggagctgctcctccctcccttcgtggagaaatagaaacagctttcytccggccctcacctgttgccagggctccacgctggtgggggcgagctgcgttttgctgagttgcaccgtgggagagcgttggtgaccacttgcctgctgtgggccagctccccgtggccaaggaccagcgtgggcagggccttcgggcacgggttgctggtacgagcacaccgagaatcccctccgccatagggcctgccctgtgagctgcccaccagattccacggagtgcttcacactcctgtctggtgtgggtcccgcagcccttgtgggtgggcccatgtcattagcctcattttagagaagagtcttgatgggtcggagagcggtggcttacccacaggtaagctgtaaatctggaactcaactggggcattggttttgctagtccaccacagttgtccttggtggtggcagcctgaggggtaggggaaggtggcggctgtccctccctaacacccccttcctccacctggttttctgtgctgggcctagctttgtggagttttctgaggtgagaggaggtttttaccagaatgttctttgccagtgagcacagctgacctgagggcagga

SEQ ID NO: 4559 - DNA, 825 bp, Homo sapiens
acaacgttaatgttgaagatgtgggttagtgaaattgagacctggcgcttcctgaggctggcagcccggttgagcctgaggaccagacttgaggcagttggcagtccgcgcctcgttgccctctgtctgccctgggtaagtgagaggctccttgggaggccagtggagatggctgtgggaggacagattgagtagctgtccttggagctgctcctccctcccttcgtggagaaatagaaacagctttcctccggccctcacctgttgccagggctccacgctggtgggggcgagctgcgttttgctgagttgcaccgtgggagagcgttggtgaccacttgcctgctgtgggccagctccccgtggccaaggaccagcgtgggcagggccttcgggcacgggttgctggtacgagcacaccgagaatcccctccgccatagggcctgccctgtgagctgcccaccagattccacggagtgcttcacactcctgtctggtgtgggtcccgcagcccttgtgggtgggcccatgtcattagcctcattttagagaagagtcttgatgggtcggagagcggtggcttacccacaggtaagctgtaaatctggaactcaactggggcattggttttgctagtccaccacagttgtccttggtggtggcagcctgaggggtaggggaaggtggcggctgtccctccctaacacccccttcctccacctggttttctgtgctgggcctagctttgtggagttttctgaggtgagaggaggtttttaccagaatgytctttgccagtgagcacagctgacctgagggcagga

SEQ ID NO: 4560 - DNA, 648 bp, Homo sapiens
tcctaaaatgtagatgtagctaaatgataaccagacattgttccctgtcttaccttttttaatctcttgctgctctggagtcataaagccagagggcacaagatttatgacttccccaattgcttctatagataacatcactattgtagaacttaagattggtcttttgaggtgtttgtcagactttttcattctgggcaccaacggactccatccagacccaggattcatgactcaaccggtcctatggccccacccagaggcagactcagtgcttaagaactgttttcaacattttttttttttttgagacagtctygctctgtcaccaggctggagtacagtggtgtagtctcagcacactgcatcctcactgcaccaaccctccatgtatgtatgtatatttttatatattatatcttatatatatattatattatatttatatataatatatattatatataaatataatataatatatattatatataaatataatataatatatattatatataaatataatatatattatatataaatataatatatattatatataaatataatataatatatattatatataaatataatatatattatatataaatatatataatatatattatatataaatataat

SEQ ID NO: 4561 - DNA, 648 bp, Homo sapiens
tcctaaaatgtagatgtagctaaatgataaccagacattgttccctgtcttaccttttttaatctcttgctgctctggagtcataaagccagagggcacaagatttatgacttccccaattgcttctatagataacatcactattgtagaacttaagattggtcttttgaggtgtttgtcagactttttcattctgggcaccaacggactccatccagacccaggattcatgactcaaccggtcctatggccccacccagaggcagactcagtgcttaagaactgttttcaacattttttttttttttgagacagtcttgctctgtcaccaggctggagtacagtggtgtagtctcagcacactgcatcctcactgcaccaaccctccatgtatgtatgtatatttttatatattatatcttatatatatattatattawatttatatataatatatattatatataaatataatataatatatattatatataaatataatataatatatattatatataaatataatatatattatatataaatataatatatattatatataaatataatataatatatattatatataaatataatatatattatatataaatatatataatatatattatatataaatataat

SEQ ID NO: 4562 - DNA, 648 bp, Homo sapiens
tcctaaaatgtagatgtagctaaatgataaccagacattgttccctgtcttaccttttttaatctcttgctgctctggagtcataaagccagagggcacaagatttatgacttccccaattgcttctatagataacatcactattgtagaacttaagattggtcttttgaggtgtttgtcagactttttcattctgggcaccaacggactccatccagacccaggattcatgactcaaccggtcctatggccccacccagaggcagactcagtgcttaagaactgttttcaacattttttttttttttgagacagtcttgctctgtcaccaggctggagtacagtggtgtagtctcagcacactgcatcctcactgcaccaaccctccatgtatgtatgtatatttttatatattatatcttatatatatattatattatatwtatatataatatatattatatataaatataatataatatatattatatataaatataatataatatatattatatataaatataatatatattatatataaatataatatatattatatataaatataatataatatatattatatataaatataatatatattatatataaatatatataatatatattatatataaatataat

SEQ ID NO: 4563 - DNA, 768 bp, Homo sapiens
ggatccgcgacagccggcgaggggcgccagggagcccaaggcacgcgccaaccctctgcggccgcgccgcgccctgcgttgccagacgcccgttgccatggcgccagggaggggacaagagcccaggaccctagcgcgcgccgcaatctgtgcggtcacgcccggcccgcgttgagagagcgcttggcagccagcgggtggacgcgcccctcagcggagggcacaragcctggccgcaggcacgcaggacactcagaacggagcgatggggacgtcgcgggccgcaacacggactttgcctgggtgtcagctcgggtccacagcgcggccgaggcgcaccttgcgccacacactgctcttttactggagaaagcgggacggccgccacggacggcgcaacccctgcgtgcgccgcggatcgacgcctgagggcgccagcagggtccgaccctcctgctccgtccccgcccctgtcctcgggcccggccagcgccgcggcctctggctccgcctccacacgggcccgcaagcaggcaccgcccccgactctgcccccagccccggctcgggcccggcccccgcgagcacggcgcgcgcctccggctcctgtggccgcgcgctggcctggaggctgacctggaggctcatctggaggccgagctgacccggcaggccttgcgcgggcaacatggcggcgcccggcgagcggggccgcttccacggcgggaacctcttcttcctgccggggggcgcgcgctccgagatgat

SEQ ID NO: 4564 - DNA, 803 bp, Homo sapiens
tcctgcctcagccttctgagtagctaggactataggcatacatctccacacctggctaattttttattttttttattttttgtagagacaggtctgctatcttgcccaggctgttcttgaactcctggcctccagtgattctyctacctcagccttccaaagtactggtattacaggcataaactattgttcctggccatctaataggcatttttaaattggtttagcttgataggaagttttgaaatgctgatgaagcctgtcaggttcttccccctttggagattatgtccgcttttggcctacaagttgggaatggaaaggttgtatgttcctctctctttggagtagcatgagtttaattcaatatgttactttataatctcagctctctgaggacctgaaaaatgttattctcttgaagaccttttcacttgttctggttgtagaggtggtagtaacattctcttgtggctttcaatgtcctaaactaaagtggagcattgagtggtcaatgctactcacctgaccactgctgagaaactgttcatggaaaaagacattagacagtgaagttggaccattgcccagctacgtgaatcaccaaaagaactgatcatctttaaaaaagatgtattttaaaggtaccttggaaatatgtaggtcagcttcttcaacattcactctatggtttctggctagtgatcaggttgttggatacatttcctaaaagagcccaaatccaggaatgcttagttgtataaaaatgtacatatccaagaaaaatatggttctgtgggcat

SEQ ID NO: 4565 - DNA, 803 bp, Homo sapiens
tcctgcctcagccttctgagtagctaggactataggcatacatctccacacctggctaattttttattttttttattttttgtagagacaggtctgctatcttgcccaggctgttcttgaactcctggcctccagtgattcttctacctcagccttccaaagtactggtattacaggcataaactattgttcctggccatctaataggcatttttaaattggtttagcttgataggaagttttgaaatgctgatgaagcctgtcaggttcttccccctttggagattatgtccgcttttggcctacaagttgggaatgraaaggttgtatgttcctctctctttggagtagcatgagtttaattcaatatgttactttataatctcagctctctgaggacctgaaaaatgttattctcttgaagaccttttcacttgttctggttgtagaggtggtagtaacattctcttgtggctttcaatgtcctaaactaaagtggagcattgagtggtcaatgctactcacctgaccactgctgagaaactgttcatggaaaaagacattagacagtgaagttggaccattgcccagctacgtgaatcaccaaaagaactgatcatctttaaaaaagatgtattttaaaggtaccttggaaatatgtaggtcagcttcttcaacattcactctatggtttctggctagtgatcaggttgttggatacatttcctaaaagagcccaaatccaggaatgcttagttgtataaaaatgtacatatccaagaaaaatatggttctgtgggcat

SEQ ID NO: 4566 - DNA, 803 bp, Homo sapiens
tcctgcctcagccttctgagtagctaggactataggcatacatctccacacctggctaattttttattttttttattttttgtagagacaggtctgctatcttgcccaggctgttcttgaactcctggcctccagtgattcttctacctcagccttccaaagtactggtattacaggcataaactattgttcctggccatctaataggcatttttaaattggtttagcttgataggaagttttgaaatgctgatgaagcctgtcaggttcttccccctttggagattatgtccgcttttggcctacaagttgggaatggaaaggttgtatgttcctctctctttggagtagcatgartttaattcaatatgttactttataatctcagctctctgaggacctgaaaaatgttattctcttgaagaccttttcacttgttctggttgtagaggtggtagtaacattctcttgtggctttcaatgtcctaaactaaagtggagcattgagtggtcaatgctactcacctgaccactgctgagaaactgttcatggaaaaagacattagacagtgaagttggaccattgcccagctacgtgaatcaccaaaagaactgatcatctttaaaaaagatgtattttaaaggtaccttggaaatatgtaggtcagcttcttcaacattcactctatggtttctggctagtgatcaggttgttggatacatttcctaaaagagcccaaatccaggaatgcttagttgtataaaaatgtacatatccaagaaaaatatggttctgtgggcat

SEQ ID NO: 4567 - DNA, 776 bp, Homo sapiens
cagaattcaaatgaagcaaaacaaaggcaccaggggctcttatgagacagagtgactcaaaatagagggaatgtggggacttggggcataagattgatcatgaatcaccaaatagaaaaaccttgggatggctttcaagaaaaatcctccttgaagttttaactttcacctacaaacaagttttctcactgctctgtacagcagggtaaggacagcagcctcacagcatcagtctgaggatagaatgggttaatgcagccaggcacagtggctcatgcctgtaatcccagcactttaggaggccgaagcaggcggatcatgaggtcaagagatcaagacaccctggccaacayggtgaaaccccgtttatactaaaatacaaaaatactagctgagtgtggtggtgcatgcctgtaggcccagctacttgggaggctgaggcaggaaaattgcttgaacctgggagacggaggttgcagtgagccaagatcacaccactgcactccagcctgggtgaaaaaaaaaaaaaaaaaaaagaatgggttaatgcctgagaactctttggcacagtgcccagcacaaattcagcagtcactcagtgttggctatcatctttggtgatgttggtcccaaacccagacctctgctcttgtcctcggctcatacacccacctgtatagcccatatgcactttaaacatgagtccaaaatggaatccaaaatattagatgccctcgttgccaccaccaggtttgctttcctctcaagccactgag

SEQ ID NO: 4568 - DNA, 776 bp, Homo sapiens
cagaattcaaatgaagcaaaacaaaggcaccaggggctcttatgagacagagtgactcaaaatagagggaatgtggggacttggggcataagattgatcatgaatcaccaaatagaaaaaccttgggatggctttcaagaaaaatcctccttgaagttttaactttcacctacaaacaagttttctcactgctctgtacagcagggtaaggacagcagcctcacagcatcagtctgaggatagaatgggttaatgcagccaggcacagtggctcatgcctgtaatcccagcactttaggaggccgaagcaggcggatcatgaggtcaagagatcaagacaccctggccaacacggtgaaaccccgtttatactaaaatacaaaaatactagctgagtgtggtggtgcatgcctgtaggcccagctacttgggaggctgaggcaggaaaattgcttgaacctgggagacggaggttgcagtgagccaagatcacaccactgcactccagcctgggtgaaaaaaaaaaaaaaaaaaaagaatgggttaatgcctgagaactctttggcacagtgyccagcacaaattcagcagtcactcagtgttggctatcatctttggtgatgttggtcccaaacccagacctctgctcttgtcctcggctcatacacccacctgtatagcccatatgcactttaaacatgagtccaaaatggaatccaaaatattagatgccctcgttgccaccaccaggtttgctttcctctcaagccactgag

SEQ ID NO: 4569 - DNA, 776 bp, Homo sapiens
cagaattcaaatgaagcaaaacaaaggcaccaggggctcttatgagacagagtgactcaaaatagagggaatgtggggacttggggcataagattgatcatgaatcaccaaatagaaaaaccttgggatggctttcaagaaaaatcctccttgaagttttaactttcacctacaaacaagttttctcactgctctgtacagcagggtaaggacagcagcctcacagcatcagtctgaggatagaatgggttaatgcagccaggcacagtggctcatgcctgtaatcccagcactttaggaggccgaagcaggcggatcatgaggtcaagagatcaagacaccctggccaacacggtgaaaccccgtttatactaaaatacaaaaatactagctgagtgtggtggtgcatgcctgtaggcccagctacttgggaggctgaggcaggaaaattgcttgaacctgggagacggaggttgcagtgagccaagatcrcaccactgcactccagcctgggtgaaaaaaaaaaaaaaaaaaaagaatgggttaatgcctgagaactctttggcacagtgcccagcacaaattcagcagtcactcagtgttggctatcatctttggtgatgttggtcccaaacccagacctctgctcttgtcctcggctcatacacccacctgtatagcccatatgcactttaaacatgagtccaaaatggaatccaaaatattagatgccctcgttgccaccaccaggtttgctttcctctcaagccactgag

SEQ ID NO: 4570 - DNA, 1252 bp, Homo sapiens
tttcttgggttcccatttactttggatatgtcagttttggaccttaaaggtgtggacggcataaagtggtaagttttgaaatgatttttggagtttatattagagaaaggtacttttcaggaagctggtcatcttatgctaaatggcattttctccctgcccccacctctgtccaaaattaatgaattatttcattatttctttttttttttttttttttttttgagatggagtctcgctgtgtcacccaggctggagtgaagtggggcaatctcagctcactgcaacctctgcctcccagggtcaagcaattctcctgtctcagcctcccgagtaactgggattacaggcacgtgccgccatgctcacctargttttttgtatttttagtagagacagggtttcatcatgttggccaagctggtcttgaactcctgacctcaggcaatctgcccgcctcagcctcccaaagtgctgaaattacaggtgtaagccacagcacccggccttgttatttctttattaatgaccaaggcgtctctgattcaacaccgaaagtttgagttagatcatagaaatctttgtttaaatatgtatatacatacttacgtatgtgttatatatgtagacctatgtatatatacatattctataacctatctattctatatctattatgtacagatatgtaaaaaatatagctttaattgggaaaatttgcactggatgaagcactttaaaattcttctcccatgccccagtactgtcaagtttttgcctagagcaacgtactgactttttgagttctgctggatcctgcctagagaaaccgcttgtcatttcaaagttgcatttatatttccatacactttttgaatatttcgttttggaaagagtaactccacctgcttcttttttccacatgtgtacatcaaaggtgaagctgggatgtgtcctctttcctcttaaccccctagctcaggacctggtaaatacagcaaacggggagtgagtttctcaaatgcctggctgtgtctgccctgtggctgccccgagatggggtggtggaatagcaagaggagccttgccagcctgcaggactcaggtgctgctgagccctccagttaccacgactacagcgctttccagcaggtgaggagttttgataaatgtgtggtacacatttctgcaaacaaagccatttattttaggccaaagcatttgtagcaaaatgtagataatatatctagaa

SEQ ID NO: 4571 - DNA, 835 bp, Homo sapiens
caagaatggattaatgggttgggaatgctgggttttggccttcattctggtgctgtggtcctgtttcctcatttgtaaaatgaagggggttgtaaagatatattctctaaaacccctaatgctatggctgtggcattaagtcaaactattatttcttactgctttgtaccggacatcactttcacattagtaaaacttttcatcagtgtagtttctcccaagcttgattattgagaaagatagtgccttgtttttaacatcctgtatcctagttccaccgcagtgtttggtacacagtagatgtttaaaagaagcttattaaatcaaatggtggccaggctcatggggctcacgcctttaatcccagcactttgggaggctgaggtgggcagattacttgaggtcaggagttggagaccagcctggccaacatggtgaaaccccatctctagtaaaaaaamatacagaaattagctgggtgtggtggcacgcacctgtagtcccagctatttaggaggttgaggtaggagaattgcttgcctgggaagtggaggttgcagtgagccaaggtcgcaccactgcactccatcctgggcgaaagagcaagactccataccaaaaaaaaaaaaaaaaatcaaatggggctgggtgtggtggctcatggccataatcccagcactttggtaggctgaggtgggcagatcacttgaggacaagagttcgagaccagcgtgggcaacatagcgaaaccccatctctaaaaaaaccccacaaaaaccaaaacaaatgaaaataaaataaatcaaatgggatagaaattatagtccttgctttt

SEQ ID NO: 4572 - DNA, 792 bp, Homo sapiens
ctggttgtccartgggttgttattattctttggcaacgtttagatattgattttggttaaaggttgaccttgataattcagatttaaggtagtagatttatacccaactcttctttatttcttgtggttttctcagccaccaggcatctctctgacttcagttgctatcctcttactcctgcatggttccctggcctctgcctgccctctgcatgagcctgtttcctgagggctggtttgttttttggttgattagttggttggctgttttttttctcagccaactggtcttttcaatccacacactctcctttgatatctcacccatttttataattttttgtttgtttgttccaggtactgtccctaggctgatgactgtcacatttttagtggggccaaaactttcctccaagattcagatgtgtgtcaccaactagagagcaggcttggaatttaaaaataaagttttcagtaagttgagatgttttgcttcgcatagacaaattatcactttgacagaaatattttgcttactcaaacctttgtattgctagaaaaagagatttttaaaaaatcccagtaaagtcaagaagaaagaaaaaaaggaaggaaggagggaaggaaggaaggaaggaaggaaggaaggaaggaaggaaagaaggaaggaagcgtttagtaggatgacccgctaaaacaccatttcaatgccctttccaatgagaaaagttgatgctgaaattgtaatatttggttacagaggaagccacagatccaaattcaaacttaatg

SEQ ID NO: 4573 - DNA, 792 bp, Homo sapiens
ctggttgtccaatgggttgttattattctttggcaacgtttagatattgattttggttaaaggttgaccttgataattcagatttaaggtagtagatttatacccaactcttctttatttcttgtggttttctcagccaccaggcmtctctctgacttcagttgctatcctcttactcctgcatggttccctggcctctgcctgccctctgcatgagcctgtttcctgagggctggtttgttttttggttgattagttggttggctgttttttttctcagccaactggtcttttcaatccacacactctcctttgatatctcacccatttttataattttttgtttgtttgttccaggtactgtccctaggctgatgactgtcacatttttagtggggccaaaactttcctccaagattcagatgtgtgtcaccaactagagagcaggcttggaatttaaaaataaagttttcagtaagttgagatgttttgcttcgcatagacaaattatcactttgacagaaatattttgcttactcaaacctttgtattgctagaaaaagagatttttaaaaaatcccagtaaagtcaagaagaaagaaaaaaaggaaggaaggagggaaggaaggaaggaaggaaggaaggaaggaaggaaggaaagaaggaaggaagcgtttagtaggatgacccgctaaaacaccatttcaatgccctttccaatgagaaaagttgatgctgaaattgtaatatttggttacagaggaagccacagatccaaattcaaacttaatg

SEQ ID NO: 4574 - DNA, 792 bp, Homo sapiens
ctggttgtccaatgggttgttattattctttggcaacgtttagatattgattttggttaaaggttgaccttgataattcagatttaaggtagtagatttatacccaactcttctttatttcttgtggttttctcagccaccaggcatctctctgacttcagttgcyatcctcttactcctgcatggttccctggcctctgcctgccctctgcatgagcctgtttcctgagggctggtttgttttttggttgattagttggttggctgttttttttctcagccaactggtcttttcaatccacacactctcctttgatatctcacccatttttataattttttgtttgtttgttccaggtactgtccctaggctgatgactgtcacatttttagtggggccaaaactttcctccaagattcagatgtgtgtcaccaactagagagcaggcttggaatttaaaaataaagttttcagtaagttgagatgttttgcttcgcatagacaaattatcactttgacagaaatattttgcttactcaaacctttgtattgctagaaaaagagatttttaaaaaatcccagtaaagtcaagaagaaagaaaaaaaggaaggaaggagggaaggaaggaaggaaggaaggaaggaaggaaggaaggaaagaaggaaggaagcgtttagtaggatgacccgctaaaacaccatttcaatgccctttccaatgagaaaagttgatgctgaaattgtaatatttggttacagaggaagccacagatccaaattcaaacttaatg

SEQ ID NO: 4575 - DNA, 792 bp, Homo sapiens
ctggttgtccaatgggttgttattattctttggcaacgtttagatattgattttggttaaaggttgaccttgataattcagatttaaggtagtagatttatacccaactcttctttatttcttgtggttttctcagccaccaggcatctctctgacttcagttgctatcctcttactcctgcatggttccctggcctctgcctgccytctgcatgagcctgtttcctgagggctggtttgttttttggttgattagttggttggctgttttttttctcagccaactggtcttttcaatccacacactctcctttgatatctcacccatttttataattttttgtttgtttgttccaggtactgtccctaggctgatgactgtcacatttttagtggggccaaaactttcctccaagattcagatgtgtgtcaccaactagagagcaggcttggaatttaaaaataaagttttcagtaagttgagatgttttgcttcgcatagacaaattatcactttgacagaaatattttgcttactcaaacctttgtattgctagaaaaagagatttttaaaaaatcccagtaaagtcaagaagaaagaaaaaaaggaaggaaggagggaaggaaggaaggaaggaaggaaggaaggaaggaaggaaagaaggaaggaagcgtttagtaggatgacccgctaaaacaccatttcaatgccctttccaatgagaaaagttgatgctgaaattgtaatatttggttacagaggaagccacagatccaaattcaaacttaatg

SEQ ID NO: 4576 - DNA, 792 bp, Homo sapiens
ctggttgtccaatgggttgttattattctttggcaacgtttagatattgattttggttaaaggttgaccttgataattcagatttaaggtagtagatttatacccaactcttctttatttcttgtggttttctcagccaccaggcatctctctgacttcagttgctatcctcttactcctgcatggttccctggcctctgcctgccctctgcatgagcctgtttcctgagggctggtttgttttttggttgattagttggttggctgtttyttttctcagccaactggtcttttcaatccacacactctcctttgatatctcacccatttttataattttttgtttgtttgttccaggtactgtccctaggctgatgactgtcacatttttagtggggccaaaactttcctccaagattcagatgtgtgtcaccaactagagagcaggcttggaatttaaaaataaagttttcagtaagttgagatgttttgcttcgcatagacaaattatcactttgacagaaatattttgcttactcaaacctttgtattgctagaaaaagagatttttaaaaaatcccagtaaagtcaagaagaaagaaaaaaaggaaggaaggagggaaggaaggaaggaaggaaggaaggaaggaaggaaggaaagaaggaaggaagcgtttagtaggatgacccgctaaaacaccatttcaatgccctttccaatgagaaaagttgatgctgaaattgtaatatttggttacagaggaagccacagatccaaattcaaacttaatg

SEQ ID NO: 4577 - DNA, 664 bp, Homo sapiens
cgaatctggatgtagagggcaggctggtggaggtgcctgtgggccgtacccacttgtctctcagcaaggctagtgaagaaggtagcttcttcccctcctctctcctctccatccctccaaacctggagggcagcagggagtgtgaccactgccttcagcttggagactcggtgctgagggctctgttaatccacctcggggcctcagggtcacagctgaaatgtggcttaggaggttatttcatgtcccaccagcttaagcaagtggctgtcacagcccctccacccacgtaggtgttatgcggcatgccctcttcccctgtccccacctcatgggttgatgattttcctgtgcactttctggatctttctgatccatgctaagggggaggccagaagggagctgttaggccagcacagatttgtgctgtaagcaaaattcacrtctcgtacagtgtacatctgatgctgggggaggacaggaggagctaggctctcaagagacacacttctgcatgagatgtgtgttcccagggtgctcccaggagaggtccaataagggtggaggtgtatgggccagactcatcaatgtgggtccacatgcacacacacacgcgcacacccccaccctgaatcgtgcagagggcacaggatactgacccgcc

SEQ ID NO: 4578 - DNA, 664 bp, Homo sapiens
cgaatctggatgtagagggcaggctggtggaggtgcctgtgggccgtacccacttgtctctcagcaaggctagtgaagaaggtagcttcttcccctcctctctcctctccatccctccaaacctggagggcagcagggagtgtgaccactgccttcagcttggagactcggtgctgagggctctgttaatccacctcggggcctcagggtcacagctgaaatgtggcttaggaggttatttcatgtcccaccagcttaagcaagtggctgtcacagcccctccacccacgtaggtgttatgcggcatgccctcttcccctgtccccacctcatgggttgatgattttcctgtgcactttctggatctttctgatccatgctaagggggaggccagaagggagctgttaggccagcacagatttgtgctgtaagcaaaattcacgtctcstacagtgtacatctgatgctgggggaggacaggaggagctaggctctcaagagacacacttctgcatgagatgtgtgttcccagggtgctcccaggagaggtccaataagggtggaggtgtatgggccagactcatcaatgtgggtccacatgcacacacacacgcgcacacccccaccctgaatcgtgcagagggcacaggatactgacccgcc

SEQ ID NO: 4579 - DNA, 664 bp, Homo sapiens
cgaatctggatgtagagggcaggctggtggaggtgcctgtgggccgtacccacttgtctctcagcaaggctagtgaagaaggtagcttcttcccctcctctctcctctccatccctccaaacctggagggcagcagggagtgtgaccactgccttcagcttggagactcggtgctgagggctctgttaatccacctcggggcctcagggtcacagctgaaatgtggcttaggaggttatttcatgtcccaccagcttaagcaagtggctgtcacagcccctccacccacgtaggtgttatgcggcatgccctcttcccctgtccccacctcatgggttgatgattttcctgtgcactttctggatctttctgatccatgctaagggggaggccagaagggagctgttaggccagcacagatttgtgctgtaagcaaaattcacgtctcgtacagtgtacatctgatgctgggggaggacaggrggagctaggctctcaagagacacacttctgcatgagatgtgtgttcccagggtgctcccaggagaggtccaataagggtggaggtgtatgggccagactcatcaatgtgggtccacatgcacacacacacgcgcacacccccaccctgaatcgtgcagagggcacaggatactgacccgcc

SEQ ID NO: 4580 - DNA, 1465 bp, Homo sapiens
tttttctttttattaattagtcatgcctttagtattgrgttgttttcggcaaagctgcaactaacagttgtgtagattgtcggtgcatgaattggttgcatggtgggtgatcgtgggtgtgagtgagctgagaaagctcagtttcctttgctcgtcatggcctcttcttttgagcctctcacagcacaacatgataacaacatgacaggaatatgagataaggagtttgtggaacaaagacacaagctacaagtcacattggattttcaggctaagaacctttattatgcagacaacaaatattccataatgtggcctatactaggtaagtacaaatacaggtgaagcatctttgtatggtacacacttcaatttgatcactctgtctaccctgtgtacaaatggaatgcactggacttttatttgtcttactgatattggcccattattattcagtctcctgttgtagcaattgtcactatcttcctcttaaagcttccatttgcttgtgctgaccatttcctatcttctctccaattgctaaagctcttatattctttgttgagcaggtgatcaacttaggtgacaaattcacacttctcaccagctcccttaaaactactgacagcaactgatgtctatggagtgacttactgtatctgtcaagagctctgctaggcacttaacatacattatgtcatttaatcaaaacaatgccttactttaactattattattgttcctgttgcatagacaaaagcccgagactcagtaatactctgtgacttgcccaaggtcacagagctaggcagggatggacctgggttcaatgacaggctgtatgacttcaagtcttatactttttgatttgagacactgccttagaacactttgtcatatcagaaagggagttcagctcaaaccctcttttgtgttagcaatattgaaatttacttatgatttaatatagttatttgggggggtattattttgtgtatgtggcttttttttacttgtatatttcatttaatttttttattatgaactcactgtttactattgttctatttttcccatcatgatcaacaatagaagtatgaaaactagatgcatagttagattttttaccatgaacagcagaactcaattcaaactgcttaagaaatacagatctttagcacttcacattttagtaagtccacaggatgatggttgctgggagtggttgatgttggactcgttgataccaaatttgaaatattccaggaggtaagggtctggcatccttgatgatggcttcctctcccagctgggagcaagatggctgagaaagccctaggcatcgtacctagacacacgatacccagagaggaggggtcttctcctctcgtgtctccttgggagtgggagagcattttccaggtgcattccagccaaattttcatcttttttcactggctacaat

SEQ ID NO: 4581 - DNA, 1465 bp, Homo sapiens
tttttctttttattaattagtcatgcctttagtattgagttgttttcggcaaagctgcaactaacagttgtgtagattgtcggtgcatgarttggttgcatggtgggtgatcgtgggtgtgagtgagctgagaaagctcagtttcctttgctcgtcatggcctcttcttttgagcctctcacagcacaacatgataacaacatgacaggaatatgagataaggagtttgtggaacaaagacacaagctacaagtcacattggattttcaggctaagaacctttattatgcagacaacaaatattccataatgtggcctatactaggtaagtacaaatacaggtgaagcatctttgtatggtacacacttcaatttgatcactctgtctaccctgtgtacaaatggaatgcactggacttttatttgtcttactgatattggcccattattattcagtctcctgttgtagcaattgtcactatcttcctcttaaagcttccatttgcttgtgctgaccatttcctatcttctctccaattgctaaagctcttatattctttgttgagcaggtgatcaacttaggtgacaaattcacacttctcaccagctcccttaaaactactgacagcaactgatgtctatggagtgacttactgtatctgtcaagagctctgctaggcacttaacatacattatgtcatttaatcaaaacaatgccttactttaactattattattgttcctgttgcatagacaaaagcccgagactcagtaatactctgtgacttgcccaaggtcacagagctaggcagggatggacctgggttcaatgacaggctgtatgacttcaagtcttatactttttgatttgagacactgccttagaacactttgtcatatcagaaagggagttcagctcaaaccctcttttgtgttagcaatattgaaatttacttatgatttaatatagttatttgggggggtattattttgtgtatgtggcttttttttacttgtatatttcatttaatttttttattatgaactcactgtttactattgttctatttttcccatcatgatcaacaatagaagtatgaaaactagatgcatagttagattttttaccatgaacagcagaactcaattcaaactgcttaagaaatacagatctttagcacttcacattttagtaagtccacaggatgatggttgctgggagtggttgatgttggactcgttgataccaaatttgaaatattccaggaggtaagggtctggcatccttgatgatggcttcctctcccagctgggagcaagatggctgagaaagccctaggcatcgtacctagacacacgatacccagagaggaggggtcttctcctctcgtgtctccttgggagtgggagagcattttccaggtgcattccagccaaattttcatcttttttcactggctacaat

SEQ ID NO: 4582 - DNA, 1465 bp, Homo sapiens
tttttctttttattaattagtcatgcctttagtattgagttgttttcggcaaagctgcaactaacagttgtgtagattgtcggtgcatgaattggttgcatggtgggtgatcrtgggtgtgagtgagctgagaaagctcagtttcctttgctcgtcatggcctcttcttttgagcctctcacagcacaacatgataacaacatgacaggaatatgagataaggagtttgtggaacaaagacacaagctacaagtcacattggattttcaggctaagaacctttattatgcagacaacaaatattccataatgtggcctatactaggtaagtacaaatacaggtgaagcatctttgtatggtacacacttcaatttgatcactctgtctaccctgtgtacaaatggaatgcactggacttttatttgtcttactgatattggcccattattattcagtctcctgttgtagcaattgtcactatcttcctcttaaagcttccatttgcttgtgctgaccatttcctatcttctctccaattgctaaagctcttatattctttgttgagcaggtgatcaacttaggtgacaaattcacacttctcaccagctcccttaaaactactgacagcaactgatgtctatggagtgacttactgtatctgtcaagagctctgctaggcacttaacatacattatgtcatttaatcaaaacaatgccttactttaactattattattgttcctgttgcatagacaaaagcccgagactcagtaatactctgtgacttgcccaaggtcacagagctaggcagggatggacctgggttcaatgacaggctgtatgacttcaagtcttatactttttgatttgagacactgccttagaacactttgtcatatcagaaagggagttcagctcaaaccctcttttgtgttagcaatattgaaatttacttatgatttaatatagttatttgggggggtattattttgtgtatgtggcttttttttacttgtatatttcatttaatttttttattatgaactcactgtttactattgttctatttttcccatcatgatcaacaatagaagtatgaaaactagatgcatagttagattttttaccatgaacagcagaactcaattcaaactgcttaagaaatacagatctttagcacttcacattttagtaagtccacaggatgatggttgctgggagtggttgatgttggactcgttgataccaaatttgaaatattccaggaggtaagggtctggcatccttgatgatggcttcctctcccagctgggagcaagatggctgagaaagccctaggcatcgtacctagacacacgatacccagagaggaggggtcttctcctctcgtgtctccttgggagtgggagagcattttccaggtgcattccagccaaattttcatcttttttcactggctacaat

SEQ ID NO: 4583 - DNA, 1465 bp, Homo sapiens
tttttctttttattaattagtcatgcctttagtattgagttgttttcggcaaagctgcaactaacagttgtgtagattgtcggtgcatgaattggttgcatggtgggtgatcgtgggtgtgagtgagctgagaaagctcagtttcctttgctcgtcatggcctcttcttttgagcctctcacagcacaacatgataacaacatgacaggaatatgagataaggagtttgtggaacaaagacacaagctacaagtcacattggattttcaggctaagaacctttattatgcagacaacaaatattccataatgtggcctatactaggtaagtacaaatacaggtgaagcatctttgtatggtacacacttcaatttgatcactctgtctaccctgtgtacaaatggaatgcactggacttttatttgtcttactgatattggcccattattattcagtctcctgttgtagcaattgtcactatcttcctcttaaagcttccatttgcttgtgctgaccatttcctatcttctctccaattgctaaagctcttatattctttgttgagcaggtgatcaacttaggtgacaaattcacacttctcaccagctcccttaaaactactgacagcaactgatgtctatggagtgacttactgtatctgtcaagagctctgctaggcacttaacatacattatgtcatttaatcaaaacaatgccttactttaactattattattgttcctgttgcatagacaaaagcccgagactcagtaatactctgtgacttgcccaaggtcacagagctaggcagggatggacctgggttcaatgacaggctgtatgacttcaagtcttatactttttgatttgagacactgccttagaacactttgtcatatcagaaagggagttcagctcaaaccctcttttgtgttagcaatattgaaatttacttatgatttaatatagttatttgggggggtattattttgtgtatgtggcttttttttacttgtatatttcatttaatttttttattatgaactcactgtttactatygttctatttttcccatcatgatcaacaatagaagtatgaaaactagatgcatagttagattttttaccatgaacagcagaactcaattcaaactgcttaagaaatacagatctttagcacttcacattttagtaagtccacaggatgatggttgctgggagtggttgatgttggactcgttgataccaaatttgaaatattccaggaggtaagggtctggcatccttgatgatggcttcctctcccagctgggagcaagatggctgagaaagccctaggcatcgtacctagacacacgatacccagagaggaggggtcttctcctctcgtgtctccttgggagtgggagagcattttccaggtgcattccagccaaattttcatcttttttcactggctacaat

SEQ ID NO: 4584 - DNA, 1465 bp, Homo sapiens
tttttctttttattaattagtcatgcctttagtattgagttgttttcggcaaagctgcaactaacagttgtgtagattgtcggtgcatgaattggttgcatggtgggtgatcgtgggtgtgagtgagctgagaaagctcagtttcctttgctcgtcatggcctcttcttttgagcctctcacagcacaacatgataacaacatgacaggaatatgagataaggagtttgtggaacaaagacacaagctacaagtcacattggattttcaggctaagaacctttattatgcagacaacaaatattccataatgtggcctatactaggtaagtacaaatacaggtgaagcatctttgtatggtacacacttcaatttgatcactctgtctaccctgtgtacaaatggaatgcactggacttttatttgtcttactgatattggcccattattattcagtctcctgttgtagcaattgtcactatcttcctcttaaagcttccatttgcttgtgctgaccatttcctatcttctctccaattgctaaagctcttatattctttgttgagcaggtgatcaacttaggtgacaaattcacacttctcaccagctcccttaaaactactgacagcaactgatgtctatggagtgacttactgtatctgtcaagagctctgctaggcacttaacatacattatgtcatttaatcaaaacaatgccttactttaactattattattgttcctgttgcatagacaaaagcccgagactcagtaatactctgtgacttgcccaaggtcacagagctaggcagggatggacctgggttcaatgacaggctgtatgacttcaagtcttatactttttgatttgagacactgccttagaacactttgtcatatcagaaagggagttcagctcaaaccctcttttgtgttagcaatattgaaatttacttatgatttaatatagttatttgggggggtattattttgtgtatgtggcttttttttacttgtatatttcatttaatttttttattatgaactcactgtttactattgttctatttttcccatcatgatcaacaatagaagtatgaaaactagatgcatagttagattttttaccatgaacagcagaactcaattcaaactgcttaagaaatacagatctttagcacttcacattttagtaagtccacaggrtgatggttgctgggagtggttgatgttggactcgttgataccaaatttgaaatattccaggaggtaagggtctggcatccttgatgatggcttcctctcccagctgggagcaagatggctgagaaagccctaggcatcgtacctagacacacgatacccagagaggaggggtcttctcctctcgtgtctccttgggagtgggagagcattttccaggtgcattccagccaaattttcatcttttttcactggctacaat

SEQ ID NO: 4585 - DNA, 1465 bp, Homo sapiens
tttttctttttattaattagtcatgcctttagtattgagttgttttcggcaaagctgcaactaacagttgtgtagattgtcggtgcatgaattggttgcatggtgggtgatcgtgggtgtgagtgagctgagaaagctcagtttcctttgctcgtcatggcctcttcttttgagcctctcacagcacaacatgataacaacatgacaggaatatgagataaggagtttgtggaacaaagacacaagctacaagtcacattggattttcaggctaagaacctttattatgcagacaacaaatattccataatgtggcctatactaggtaagtacaaatacaggtgaagcatctttgtatggtacacacttcaatttgatcactctgtctaccctgtgtacaaatggaatgcactggacttttatttgtcttactgatattggcccattattattcagtctcctgttgtagcaattgtcactatcttcctcttaaagcttccatttgcttgtgctgaccatttcctatcttctctccaattgctaaagctcttatattctttgttgagcaggtgatcaacttaggtgacaaattcacacttctcaccagctcccttaaaactactgacagcaactgatgtctatggagtgacttactgtatctgtcaagagctctgctaggcacttaacatacattatgtcatttaatcaaaacaatgccttactttaactattattattgttcctgttgcatagacaaaagcccgagactcagtaatactctgtgacttgcccaaggtcacagagctaggcagggatggacctgggttcaatgacaggctgtatgacttcaagtcttatactttttgatttgagacactgccttagaacactttgtcatatcagaaagggagttcagctcaaaccctcttttgtgttagcaatattgaaatttacttatgatttaatatagttatttgggggggtattattttgtgtatgtggcttttttttacttgtatatttcatttaatttttttattatgaactcactgtttactattgttctatttttcccatcatgatcaacaatagaagtatgaaaactagatgcatagttagattttttaccatgaacagcagaactcaattcaaactgcttaagaaatacagatctttagcacttcacattttagtaagtccacaggatgatggttgctgggagtggttgatgttggactcgttgataccaaatttgaaatattccaggaggtaagggtctggcatccttgatgatggcttcctctcccagctgggagcaagatggctgagaaagccctaggcatcgtacctagacacacgatacscagagaggaggggtcttctcctctcgtgtctccttgggagtgggagagcattttccaggtgcattccagccaaattttcatcttttttcactggctacaat

SEQ ID NO: 4586 - DNA, 1465 bp, Homo sapiens
tttttctttttattaattagtcatgcctttagtattgagttgttttcggcaaagctgcaactaacagttgtgtagattgtcggtgcatgaattggttgcatggtgggtgatcgtgggtgtgagtgagctgagaaagctcagtttcctttgctcgtcatggcctcttcttttgagcctctcacagcacaacatgataacaacatgacaggaatatgagataaggagtttgtggaacaaagacacaagctacaagtcacattggattttcaggctaagaacctttattatgcagacaacaaatattccataatgtggcctatactaggtaagtacaaatacaggtgaagcatctttgtatggtacacacttcaatttgatcactctgtctaccctgtgtacaaatggaatgcactggacttttatttgtcttactgatattggcccattattattcagtctcctgttgtagcaattgtcactatcttcctcttaaagcttccatttgcttgtgctgaccatttcctatcttctctccaattgctaaagctcttatattctttgttgagcaggtgatcaacttaggtgacaaattcacacttctcaccagctcccttaaaactactgacagcaactgatgtctatggagtgacttactgtatctgtcaagagctctgctaggcacttaacatacattatgtcatttaatcaaaacaatgccttactttaactattattattgttcctgttgcatagacaaaagcccgagactcagtaatactctgtgacttgcccaaggtcacagagctaggcagggatggacctgggttcaatgacaggctgtatgacttcaagtcttatactttttgatttgagacactgccttagaacactttgtcatatcagaaagggagttcagctcaaaccctcttttgtgttagcaatattgaaatttacttatgatttaatatagttatttgggggggtattattttgtgtatgtggcttttttttacttgtatatttcatttaatttttttattatgaactcactgtttactattgttctatttttcccatcatgatcaacaatagaagtatgaaaactagatgcatagttagattttttaccatgaacagcagaactcaattcaaactgcttaagaaatacagatctttagcacttcacattttagtaagtccacaggatgatggttgctgggagtggttgatgttggactcgttgataccaaatttgaaatattccaggaggtaagggtctggcatccttgatgatggcttcctctcccagctgggagcaagatggctgagaaagccctaggcatcgtacctagacacacgatacccagagaggaggggtcttctcctctcgtgtctccttgggagtgggagagcattttccaggtgcattccagccaaattttcwtcttttttcactggctacaat

SEQ ID NO: 4587 - DNA, 808 bp, Homo sapiens
atggcaaaactttgtcaaaactatttttaaaaattagctgggcatggtgatgcatgcctgtaatcccagccmcttgggtggctgaggcatgagaatcacttgaacctacgagacaggttgcacagtgagccgagatcatgcactcaagcctgggtaacagtgatatgcacccccccaaagtttttctttttttctttttttttttttttttttttagagataaggtcttgctatgttgctcaagctaaacttgaactcctgggattacaggcgtgagccactatgcctggcctcaaaattaaaaaaaaataagcaatttagatgctgacctgaagtgcttctgtcaccttgttacaggaggccgcaaatgctaactaagcaagttgcagatggtcccacatgacgtttctgaatgaaacaggacacttcttactattggaaccatttttctctgttttgaacagttggataagggaagtcttgacgtgctgcctatgtgtccgctgcccttcatcaaagttgagctactgagaaattggagttgaaggaacagtggctaatggcatgtgctgggatgcaagtaagacattatgcttggccataaggagttctggtattttatgtatacctctcccacaagctttagagatgacttcgtggtctaggaggaacaggtgtgtaaagaagtgacagtgtggtgtgtgtgaataaaagtgggtagatagggtcaagccattgcatgagcccgtacaaggtgcaagcagagttattaactagaatttggcaagggagctgacccggaaggatc

SEQ ID NO: 4588 - DNA, 808 bp, Homo sapiens
atggcaaaactttgtcaaaactatttttaaaaattagctgggcatggtgatgcatgcctgtaatcccagccacttgggtggctgaggcatgagaatcacttgaacctacgagacaggttgcacagtgagccgagatcatgcactcaagcctgggtaacagtgatatgcacccccccaaagtttttcttttttyctttttttttttttttttttttagagataaggtcttgctatgttgctcaagctaaacttgaactcctgggattacaggcgtgagccactatgcctggcctcaaaattaaaaaaaaataagcaatttagatgctgacctgaagtgcttctgtcaccttgttacaggaggccgcaaatgctaactaagcaagttgcagatggtcccacatgacgtttctgaatgaaacaggacacttcttactattggaaccatttttctctgttttgaacagttggataagggaagtcttgacgtgctgcctatgtgtccgctgcccttcatcaaagttgagctactgagaaattggagttgaaggaacagtggctaatggcatgtgctgggatgcaagtaagacattatgcttggccataaggagttctggtattttatgtatacctctcccacaagctttagagatgacttcgtggtctaggaggaacaggtgtgtaaagaagtgacagtgtggtgtgtgtgaataaaagtgggtagatagggtcaagccattgcatgagcccgtacaaggtgcaagcagagttattaactagaatttggcaagggagctgacccggaaggatc

SEQ ID NO: 4589 - DNA, 827 bp, Homo sapiens
ggatccttaatgctgaacaaattttaaggtggagcccattgactgacatggttgagttcaggaagcaatgagctgaaaatggtggaaaagactgtcctattaaaaaaaaaaaggatggaaaatttaagcaaaaatgtttctatcagataatgtggatttcatattgtcctttttattatttatcttctgctaaactcatgtgttattctaacactttgagtagctccatttgctaaatatttggttattatctcactattttgaaactctgtcttgttaattatgtcattcattttagataatcaaaagagaacttacagtttcaaggcccatccatactttgacctgccttccaaccctaactaacttcatctcctttctttgtcacttaaactatattttcaaggtcacattttgccttcccccaaacccatcctaaactcccaaactcaagtcttgcagttttccacttttccagtcggagctgagcattgctggagaaaatcatttatcatgcttgccgaatgcaatagatagaacagtgtgtatatgtatttaatttgcatctgtcaatatactacaggattaatgtccttggggattcaagacacatgaaaattgtataggtaatgttgttttggcttaraaaaaataaactctacattcttaaaaaatgtcccatgttacatttttctcaactaggattctgattaaattttactcctattattcaaattgaaaatctttctcaacaccctagagagtaggtattctacgttgctaatcagaagactgatattcttaaagctcagctgaacatgtgttag

SEQ ID NO: 4590 - DNA, 803 bp, Homo sapiens
cgaggtcgggagatggaaaccatcctggctaacacggtgaaaccctgtctctactaaaaatmcaaaaaattagccgggcatggtggccagcacctgtagtcccagctatccgggaggctgaggcaggagaattgcttgaacctgcaaggcagagcttgcagtgagccgatattgtgccactgcactccagcctgggcaacaaagcaagactctgtctcaaaacaaaaacaaaaaaaaacaaaaaaaagcaaaagcaagcaaaccctttctaattaaccacatcaagtttctgtttactgaaatcatcattaaaagtctaagactcccagattatccatcagcactagagctcttatccgcatgtagtcttctcatccttagatctttgccttccactttgttcaaccccacccatctgacaaccagagaaagccgagccttagctaataattcaacttcatttggaaggtgtaagtctagggcagtgagcgtaagaaaaaggggaagaaggtaaggaaagatatgaaacagattttatgtgcgctgctgggctggctgctgctccatcatgagctgagaaaaaagcaagccggttgctaagccagtatgttcactcacttcataggatttctctggaatggctgcaagtgggtacttgcagatgtagtccatgaaagaaagaaagaaaagtaaatttatcttccaagcaatatcctatttctattttcctgttgtataaggtttagcccacagtgtattagttttcatgctttttaaagatttcccccttgggaaaatggatc

SEQ ID NO: 4591 - DNA, 803 bp, Homo sapiens
cgaggtcgggagatggaaaccatcctggctaacacggtgaaaccctgtctctactaaaaatacaaaaaattagccgggcatggtggccagcacctgtagtcccagctatccgggaggctgaggcaggagaattgcttgaacctgcaaggcagagcttgcagtgagccgatattgtgccactgcactccagcctgggcaacaaagcaagactctgtctcaaaacaaaaacaaaaaaaaacaaaaaaaagcaaaagcaagcaaaccctttctaattaaccacatcaagtttctgtttactgaaatcatcattaaaagtctaagactcccagattatccatcagcactagagctcttatccgcatgtagtcttctcatccttagatctktgccttccactttgttcaaccccacccatctgacaaccagagaaagccgagccttagctaataattcaacttcatttggaaggtgtaagtctagggcagtgagcgtaagaaaaaggggaagaaggtaaggaaagatatgaaacagattttatgtgcgctgctgggctggctgctgctccatcatgagctgagaaaaaagcaagccggttgctaagccagtatgttcactcacttcataggatttctctggaatggctgcaagtgggtacttgcagatgtagtccatgaaagaaagaaagaaaagtaaatttatcttccaagcaatatcctatttctattttcctgttgtataaggtttagcccacagtgtattagttttcatgctttttaaagatttcccccttgggaaaatggatc

SEQ ID NO: 4592 - DNA, 803 bp, Homo sapiens
cgaggtcgggagatggaaaccatcctggctaacacggtgaaaccctgtctctactaaaaatacaaaaaattagccgggcatggtggccagcacctgtagtcccagctatccgggaggctgaggcaggagaattgcttgaacctgcaaggcagagcttgcagtgagccgatattgtgccactgcactccagcctgggcaacaaagcaagactctgtctcaaaacaaaaacaaaaaaaaacaaaaaaaagcaaaagcaagcaaaccctttctaattaaccacatcaagtttctgtttactgaaatcatcattaaaagtctaagactcccagattatccatcagcactagagctcttatccgcatgtagtcttctcatccttagatctttgccttccactttgttcaaccccacccatctgacaaccagagaaagccgagccttagctaataattcaacttcatttggaaggtgtaagtctagggcagtgagcgtaagaaaaaggggaagaaggtaaggaaagatatgaaacagattttatgtgcgctgctgggctggctgctgctccatcatgagctgagaaaaaagcaasccggttgctaagccagtatgttcactcacttcataggatttctctggaatggctgcaagtgggtacttgcagatgtagtccatgaaagaaagaaagaaaagtaaatttatcttccaagcaatatcctatttctattttcctgttgtataaggtttagcccacagtgtattagttttcatgctttttaaagatttcccccttgggaaaatggatc

SEQ ID NO: 4593 - DNA, 820 bp, Homo sapiens
tccgcctcctgagttcaagcgattctcctgccttggcctccctagtaggtgggattacaggcgtgcmcaaccatgccctgttaatgtttgtatttttagtagagacgggatttcaccatgttggccaggctggtctcgaactcctgacctcaggtgatccacccgcctcagcctcccaaagtgttggaattacaagtgtgagccatcatggccagccactactgcctatttctgcatctcctgttccagacaaacggaagaaacaaggccatttattgagcgccggtgatatgctgagcgctcaacctgcatcctcaaagatcgtcgatccaacagcctgctaggagtggatcaatcgagtcacagagggggctcgacccccactcactgtagagaggggaaagctgaggttcagaggtgaaacgatactcccggggtcacacggcaaggacatgtaggggcaggttttgggacgaggctattcctgcatccacggtatagaaagaaggcggggcgcaaaggtcagccggtgctagggaccagacagcggcccatagggaggagtggacttgggtccaggatgcgcctgatggggcggggctatctttattgggtgggcagtgcaggaccaggctgccccatcaggtggaagcggggcgaagtgcacctgtgcagagggtttgggggcgtggctagaggctgagatgcgccgggtgggctggggctggggctggggctgggcggagcgggcggctcagcactgcagcggaagagctttcttgctacacgcagttgaggctaagctaccagcaggatgaaa

SEQ ID NO: 4594 - DNA, 809 bp, Homo sapiens
aatgytgtacatactgattcttgttatagaaaaactagacctctgaggctgggtgcagtggctcaagcctgtaatcccagcactttgggaggccaaggcgggcggatcacaaggtaaggagattgataccatactggctaacactgtgaaaccccatctgtactaaaaatacaaaaaattagccaggcgaggtggcggacacttgtagtcccagctactcgggaggctgaggcaggagaatggcgtgaaccctggaggcggagcttgcagtgagctgagatcgcgccattgcactccagcctgggagagagagtgagattaggtctcaaaaaaagaaaaaaaagagaaactagacctctaagcaagaagtattagtaagtgtaaaaagagagataaaaaggtgattgattggagaggaatatgtttttatgacttcagaaactattttgaggataaccaaaactgaatttttgtttttcacatatttcatagcttgattatactaatggtgacaagaagtttccctataatttgaagaatcttgaaacttctcaaatatgatgagcaagttaaagaccctagatctttgtctttaaattagatgaatgtaatttaatagtttctctactgctgaagtgcatgagatcgcctggggtcctgccatctcacttcttaccaggaagccaacagtgtttaaaaatctaaaatttaagagtgttacacaagagcccgaagcaagtaaacgtcagtttggtagagatttcaatgaagactagaaagaattgaagactcaaaggccaagcgccatt

SEQ ID NO: 4595 - DNA, 809 bp, Homo sapiens
aatgctgtacatactgattcttgttatagaaaaactagacctctgaggctgggtgcagtggctcaagcctgtaatcccagcactttgggaggccaaggcrggcggatcacaaggtaaggagattgataccatactggctaacactgtgaaaccccatctgtactaaaaatacaaaaaattagccaggcgaggtggcggacacttgtagtcccagctactcgggaggctgaggcaggagaatggcgtgaaccctggaggcggagcttgcagtgagctgagatcgcgccattgcactccagcctgggagagagagtgagattaggtctcaaaaaaagaaaaaaaagagaaactagacctctaagcaagaagtattagtaagtgtaaaaagagagataaaaaggtgattgattggagaggaatatgtttttatgacttcagaaactattttgaggataaccaaaactgaatttttgtttttcacatatttcatagcttgattatactaatggtgacaagaagtttccctataatttgaagaatcttgaaacttctcaaatatgatgagcaagttaaagaccctagatctttgtctttaaattagatgaatgtaatttaatagtttctctactgctgaagtgcatgagatcgcctggggtcctgccatctcacttcttaccaggaagccaacagtgtttaaaaatctaaaatttaagagtgttacacaagagcccgaagcaagtaaacgtcagtttggtagagatttcaatgaagactagaaagaattgaagactcaaaggccaagcgccatt

SEQ ID NO: 4596 - DNA, 809 bp, Homo sapiens
aatgctgtacatactgattcttgttatagaaaaactagacctctgaggctgggtgcagtggctcaagcctgtaatcccagcactttgggaggccaaggcgggcggatcacaaggtaaggagatygataccatactggctaacactgtgaaaccccatctgtactaaaaatacaaaaaattagccaggcgaggtggcggacacttgtagtcccagctactcgggaggctgaggcaggagaatggcgtgaaccctggaggcggagcttgcagtgagctgagatcgcgccattgcactccagcctgggagagagagtgagattaggtctcaaaaaaagaaaaaaaagagaaactagacctctaagcaagaagtattagtaagtgtaaaaagagagataaaaaggtgattgattggagaggaatatgtttttatgacttcagaaactattttgaggataaccaaaactgaatttttgtttttcacatatttcatagcttgattatactaatggtgacaagaagtttccctataatttgaagaatcttgaaacttctcaaatatgatgagcaagttaaagaccctagatctttgtctttaaattagatgaatgtaatttaatagtttctctactgctgaagtgcatgagatcgcctggggtcctgccatctcacttcttaccaggaagccaacagtgtttaaaaatctaaaatttaagagtgttacacaagagcccgaagcaagtaaacgtcagtttggtagagatttcaatgaagactagaaagaattgaagactcaaaggccaagcgccatt

SEQ ID NO: 4597 - DNA, 809 bp, Homo sapiens
aatgctgtacatactgattcttgttatagaaaaactagacctctgaggctgggtgcagtggctcaagcctgtaatcccagcactttgggaggccaaggcgggcggatcacaaggtaaggagattgataccatactggctaacactgtgaaaccccatctgtactaaaaatacaaaaaattagccaggcgaggtggcggacacttgtagtcccagctactcgggaggctgaggcaggagaatggcgtgaaccctggaggcggagcttgcagtgagctgagatcgcgccattgcactccagcctgggagagagagtgagattaggtctcaaaaaaagaaaaaaaagagaaactagacctctragcaagaagtattagtaagtgtaaaaagagagataaaaaggtgattgattggagaggaatatgtttttatgacttcagaaactattttgaggataaccaaaactgaatttttgtttttcacatatttcatagcttgattatactaatggtgacaagaagtttccctataatttgaagaatcttgaaacttctcaaatatgatgagcaagttaaagaccctagatctttgtctttaaattagatgaatgtaatttaatagtttctctactgctgaagtgcatgagatcgcctggggtcctgccatctcacttcttaccaggaagccaacagtgtttaaaaatctaaaatttaagagtgttacacaagagcccgaagcaagtaaacgtcagtttggtagagatttcaatgaagactagaaagaattgaagactcaaaggccaagcgccatt

SEQ ID NO: 4598 - DNA, 809 bp, Homo sapiens
aatgctgtacatactgattcttgttatagaaaaactagacctctgaggctgggtgcagtggctcaagcctgtaatcccagcactttgggaggccaaggcgggcggatcacaaggtaaggagattgataccatactggctaacactgtgaaaccccatctgtactaaaaatacaaaaaattagccaggcgaggtggcggacacttgtagtcccagctactcgggaggctgaggcaggagaatggcgtgaaccctggaggcggagcttgcagtgagctgagatcgcgccattgcactccagcctgggagagagagtgagattaggtctcaaaaaaagaaaaaaaagagaaactagacctctaagcaagaagtattagtaagtgtaaaaagagrgataaaaaggtgattgattggagaggaatatgtttttatgacttcagaaactattttgaggataaccaaaactgaatttttgtttttcacatatttcatagcttgattatactaatggtgacaagaagtttccctataatttgaagaatcttgaaacttctcaaatatgatgagcaagttaaagaccctagatctttgtctttaaattagatgaatgtaatttaatagtttctctactgctgaagtgcatgagatcgcctggggtcctgccatctcacttcttaccaggaagccaacagtgtttaaaaatctaaaatttaagagtgttacacaagagcccgaagcaagtaaacgtcagtttggtagagatttcaatgaagactagaaagaattgaagactcaaaggccaagcgccatt

SEQ ID NO: 4599 - DNA, 626 bp, Homo sapiens
ggaatgaagagacagaccaattcagaaaatatttggttctcctagtcagaaaactgttatctttgattattctcctatgctttccatatcagatcaatcttacagtcatgccattttgataatctaattttattttatatgtctccaattttctgattcctacaactatgttgtggtctagcttaggttctgcaataaccagttacatgatcaattttcagtgccacatcacaagagatctcagtaatatattcttatcatatcaccccctgtttaaaatgtttcaatttttaaccatcctcatatagaataatgtaaaaactttctaacacgggttaagggtctcaataaaattcaaggactctaattaccttaagccatatcttttaactcctctcacctccaactgtatgctccagccatattgaattgtctcaagtccctctctccctcacaaattgggccttgttctcacttgcttccagccctttccgtgtgctagcccttcttcctgaacactgtccaacagccactcacagatrctccacatccctcccctcacatgcaaactagttatctcttgctcagccttcacttcttggtgcagttgtcacttccatttctga

SEQ ID NO: 4600 - DNA, 897 bp, Homo sapiens
ttgtccgggctggtcttgaactcctgacctcaagcaatcctcctaccttggcttcccaaaatgctgggattaaagacatgagccactgcgcccagcccaccctctttttaatggttgtaaattattgctttatagaggaaccatactttcacaatttctcattgctggacacaatattttggacttttctgttacaaataatgtgatgaaaatccacaaaaatacatacatacacacaaacataaatcaatttccttggagttgctggtataaagaatgcacttttaaaatgtttgctagatccaaatcgctctwgggaaaagtttaccagtttcccattcctgttccttaaccttttcatttagccatgttgggtacttaaaagttagagatctttgttagttagacaggtgataaatcatcttgttttaattcatgtttcttggattactagtgaagtccaacacttcatatgttagccaggtcttttattaactattcagatgtttgaaaactttaacagctgatcctaatattatgtatatatatagtataatgcatacatgtatacatatatagtatgtatatgtacatatctatattgtatatatgtatgtatatattgtaaatatgtatattatgtatgtatattgtatatatttgttatatatatttgttatgggaaaattttaatatgtagttaagtctgttaatcttttccttgtttctctttagaaaagcatttagaaaagctttcctactccaaagttatttaaacatttacacatattttagtatacatttaattctaaaccattctatattttatagatgtttgttttgagatatggatccaactttacactttttttttaatctttatcttctgtttacaag

SEQ ID NO: 4601 - DNA, 795 bp, Homo sapiens
tctttaggttctattccttcatcctatctagtccattttagtataagtcattaatgaattctagctctttggtgaaggaatcataggggccaatgattcataactgaatcaatacaaacagcccagtctctaactaaacatttaatgattactcagtgttttttaggcaactgcacttttttccctgtgagcacgtttcacacttccaggacaagattagatagagttctttcccttatcagtccaggttctgcctgggtcttagccttttatctctgttctcttaattgagctttggttatgttcattgctgttattactgttgttgttatcatttcctagcagtctggtgggttgagttgacagyctttagtgctgcctccagatttcagcttagtacttttcaaatttggatttttgttctagatatctttggaatgccatcaaagcagagattttctgatcttttcctgatagattctgaattagtgggtcatagttgggtttgagaatctgtatattttaaaagtgatttccaccctagttataaccctacccacaagtgtgcaggctcatacttgccctatgtcttgaacctaatgtgttaggattatataattaatgaaatttcctctagccctacaatggccccagccaatccctaaccctcaaacataaagtcactgtcttccacaaattactctattctccaagagaacaatgatctggagccaccgaggtgagcattgttcatgaatggaagcccagagagagcatttactccttgtttctaat

SEQ ID NO: 4602 - DNA, 795 bp, Homo sapiens
tctttaggttctattccttcatcctatctagtccattttagtataagtcattaatgaattctagctctttggtgaaggaatcataggggccaatgattcataactgaatcaatacaaacagcccagtctctaactaaacatttaatgattactcagtgttttttaggcaactgcacttttttccctgtgagcacgtttcacacttccaggacaagattagatagagttctttcccttatcagtccaggttctgcctgggtcttagccttttatctctgttctcttaattgagctttggttatgttcattgctgttattactgttgttgttatcatttcctagcagtctggtgggttgagttgacagcctttagtgctgcctccagatttcagcttagtacttttcaaatttggatttttgttctagatatctttggaatgccatcaaagcagagattttctgatcttktcctgatagattctgaattagtgggtcatagttgggtttgagaatctgtatattttaaaagtgatttccaccctagttataaccctacccacaagtgtgcaggctcatacttgccctatgtcttgaacctaatgtgttaggattatataattaatgaaatttcctctagccctacaatggccccagccaatccctaaccctcaaacataaagtcactgtcttccacaaattactctattctccaagagaacaatgatctggagccaccgaggtgagcattgttcatgaatggaagcccagagagagcatttactccttgtttctaat

SEQ ID NO: 4603 - DNA, 795 bp, Homo sapiens
tctttaggttctattccttcatcctatctagtccattttagtataagtcattaatgaattctagctctttggtgaaggaatcataggggccaatgattcataactgaatcaatacaaacagcccagtctctaactaaacatttaatgattactcagtgttttttaggcaactgcacttttttccctgtgagcacgtttcacacttccaggacaagattagatagagttctttcccttatcagtccaggttctgcctgggtcttagccttttatctctgttctcttaattgagctttggttatgttcattgctgttattactgttgttgttatcatttcctagcagtctggtgggttgagttgacagcctttagtgctgcctccagatttcagcttagtacttttcaaatttggatttttgttctagatatctttggaatgccatcaaagcagagattttctgatcttttcctgatagattctgaattagtgggtcatagttgggtttgagaatctgtatattttaaaagtgatttccaccctagttataaccctacccacaagtgtgcaggctcatacttgccctatgtcttgaacctaatgtgttaggattatataattaatgaaatttcctctagccctacaatggccccagccaatccctaaccctcaaacataaagtcactgtcttccacaaattactctattctccaagagaacaatgatctggagccaccgaggtgagcattgttcatgaatggaagcccagagagarcatttactccttgtttctaat

SEQ ID NO: 4604 - DNA, 750 bp, Homo sapiens
tgagtataattacggaataatgacaattccaagttcccatttcaattcatggtctcttctctgattygtggtgtagggggcagcccatctcttttgtgaataaaggttaatttttccaattacacgtaagtagctaatattatttttttttagcagtcttacagtgtaagttacaaccaaaagtgaagtgcctgaattatatttacattttaacaaatggttttaaagggaaaatccatgtgaaaaagaaacaaaagtcaggaaaaaaaacacacagaagtttccataccaatcctgatagcaataacaatccctttgctgtcatgagagttcaccctcatcctgatttcatagtaatcctgttcacgcctttctttaaagctttactcccatgcatacatctctaaaacaatataggttatctcaaacttcatatagattttgaatcttttgatacaaatggaatcgtgctatgtgtattcttatgagaccttattttagctcaaatgtatgtttgctaagttgttataggtgtctctagagcgttcatgtttattattcatagaattccacacattaaattaatccttctttgtttgtggtcattttatttgttttcaggttttaaaaattataaacaatgctgttgtaagccttcttgcacatgtatgttggcacaatgagcatatatctttcaaaattatatgcctaagagtggaattactggtgtatgtatatgatatcccaccc

SEQ ID NO: 4605 - DNA, 750 bp, Homo sapiens
tgagtataattacggaataatgacaattccaagttcccatttcaattcatggtctcttctctgattcgtggtgtagggggcagcccatctcttttgtgaataaaggttaatttttccaattacacgtaagtagctaatattatttttttttagcagtcttacagtgtaagttacaaccaaaagtgaagtgcctgaattatatttacattttaacaaatggttttaaagggaaaatycatgtgaaaaagaaacaaaagtcaggaaaaaaaacacacagaagtttccataccaatcctgatagcaataacaatccctttgctgtcatgagagttcaccctcatcctgatttcatagtaatcctgttcacgcctttctttaaagctttactcccatgcatacatctctaaaacaatataggttatctcaaacttcatatagattttgaatcttttgatacaaatggaatcgtgctatgtgtattcttatgagaccttattttagctcaaatgtatgtttgctaagttgttataggtgtctctagagcgttcatgtttattattcatagaattccacacattaaattaatccttctttgtttgtggtcattttatttgttttcaggttttaaaaattataaacaatgctgttgtaagccttcttgcacatgtatgttggcacaatgagcatatatctttcaaaattatatgcctaagagtggaattactggtgtatgtatatgatatcccaccc

SEQ ID NO: 4606 - DNA, 750 bp, Homo sapiens
tgagtataattacggaataatgacaattccaagttcccatttcaattcatggtctcttctctgattcgtggtgtagggggcagcccatctcttttgtgaataaaggttaatttttccaattacacgtaagtagctaatattatttttttttagcagtcttacagtgtaagttacaaccaaaagtgaagtgcctgaattatatttacattttaacaaatggttttaaagggaaaatccatgtgaaaaagaaacaaaagtcaggaaaaaaaacacacagaagtttccataccaatcctgatagcaataacaatccctttgctgtcrtgagagttcaccctcatcctgatttcatagtaatcctgttcacgcctttctttaaagctttactcccatgcatacatctctaaaacaatataggttatctcaaacttcatatagattttgaatcttttgatacaaatggaatcgtgctatgtgtattcttatgagaccttattttagctcaaatgtatgtttgctaagttgttataggtgtctctagagcgttcatgtttattattcatagaattccacacattaaattaatccttctttgtttgtggtcattttatttgttttcaggttttaaaaattataaacaatgctgttgtaagccttcttgcacatgtatgttggcacaatgagcatatatctttcaaaattatatgcctaagagtggaattactggtgtatgtatatgatatcccaccc

SEQ ID NO: 4607 - DNA, 750 bp, Homo sapiens
tgagtataattacggaataatgacaattccaagttcccatttcaattcatggtctcttctctgattcgtggtgtagggggcagcccatctcttttgtgaataaaggttaatttttccaattacacgtaagtagctaatattatttttttttagcagtcttacagtgtaagttacaaccaaaagtgaagtgcctgaattatatttacattttaacaaatggttttaaagggaaaatccatgtgaaaaagaaacaaaagtcaggaaaaaaaacacacagaagtttccataccaatcctgatagcaataacaatccctttgctgtcatgagagttcaccctcatcctgatttcatagtaatcctgttcacrcctttctttaaagctttactcccatgcatacatctctaaaacaatataggttatctcaaacttcatatagattttgaatcttttgatacaaatggaatcgtgctatgtgtattcttatgagaccttattttagctcaaatgtatgtttgctaagttgttataggtgtctctagagcgttcatgtttattattcatagaattccacacattaaattaatccttctttgtttgtggtcattttatttgttttcaggttttaaaaattataaacaatgctgttgtaagccttcttgcacatgtatgttggcacaatgagcatatatctttcaaaattatatgcctaagagtggaattactggtgtatgtatatgatatcccaccc

SEQ ID NO: 4608 - DNA, 669 bp, Homo sapiens
caatatccaggcccggtgtccccttccctggatcaatctttttctgggaatgaaagagttgcagtgtttccctcccagatctcccctgtgactcactccctctaaatagatatcttgctctatgagttattattctcatatcctttctttgaagctgtgataagatattacaaactattaagagaacatggaggctaggcgtggtggctcacgcctgtaatcccagcactttgggaagccaagataggcagatcacctgaggtcaggagttcgagaccagcctggctaacatggtgaaaaccccatctctaaaaatacacaaattagctgggtgtggtggcagctgcctgtaatcccagctactcgggatgctgaggcaagagaattgcttgaaccaggaggtggaggttgcagtgagccgaaatcacgccattgcactccagcctggcaacaagagataaactctgtctcaaaaaaaaaaaaaaagaaagaaasagagagagagaacatgcaggttaggttctctttttggattctgaggacctgctgtgctggggcagaggcaggtggggagagaagggcaggtggaggggcaggtgctgagtggtgtgcaaccttgctccgtgctcaataaagttcctgctgtggtcatttcttgtgtatttgtct

SEQ ID NO: 4609 - DNA, 669 bp, Homo sapiens
caatatccaggcccggtgtccccttccctggatcaatctttttctgggaatgaaagagttgcagtgtttccctcccagatctcccctgtgactcactccctctaaatagatatcttgctctatgagttattattctcatatcctttctttgaagctgtgataagatattacaaactattaagagaacatggaggctaggcgtggtggctcacgcctgtaatcccagcactttgggaagccaagataggcagatcacctgaggtcaggagttcgagaccagcctggctaacatggtgaaaaccccatctctaaaaatacacaaattagctgggtgtggtggcagctgcctgtaatcccagctactcgggatgctgaggcaagagaattgcttgaaccaggaggtggaggttgcagtgagccgaaatcacgccattgcactccagcctggcaacaagagataaactctgtctcaaaaaaaaaaaaaaagaaagaaagagagagagagaacatgcaggttaggttctctttttggattctgaggacctgctgtgctggggcagaggcaggtggggagagaaggrcaggtggaggggcaggtgctgagtggtgtgcaaccttgctccgtgctcaataaagttcctgctgtggtcatttcttgtgtatttgtct

SEQ ID NO: 4610 - DNA, 669 bp, Homo sapiens
caatatccaggcccggtgtccccttccctggatcaatctttttctgggaatgaaagagttgcagtgtttccctcccagatctcccctgtgactcactccctctaaatagatatcttgctctatgagttattattctcatatcctttctttgaagctgtgataagatattacaaactattaagagaacatggaggctaggcgtggtggctcacgcctgtaatcccagcactttgggaagccaagataggcagatcacctgaggtcaggagttcgagaccagcctggctaacatggtgaaaaccccatctctaaaaatacacaaattagctgggtgtggtggcagctgcctgtaatcccagctactcgggatgctgaggcaagagaattgcttgaaccaggaggtggaggttgcagtgagccgaaatcacgccattgcactccagcctggcaacaagagataaactctgtctcaaaaaaaaaaaaaaagaaagaaagagagagagagaacatgcaggttaggttctctttttggattctgaggacctgctgtgctggggcagaggcaggtggggagagaagggcaggtggaggggcaggtgctgagtggtgtgcamccttgctccgtgctcaataaagttcctgctgtggtcatttcttgtgtatttgtct

SEQ ID NO: 4611 - DNA, 1356 bp, Homo sapiens
agccataaaaaatgatgagttcatgtcctttgtagtgacatggatgaaattggaaatcatcattctcagtaaactatcgcaagaacaaaaaaccaaacaccgcatattctcactcataggtgggaattgaacaatgagatcacatggacacaggaaggggaatatcacactctggggactgttgtggggtggggggaggggggagggatagcattgggagatatacctaatgctagatgacgarttagtgggtgcagcgcaccagcatggcacatgtatacatatgtaactaacctgcacaatgtgcacatgtaccctaaaacttacagtataataataaaaaataaaaaataaaaataaaaaaagatacatacctcatttttatgtatttgtgagaactcttgcttatgaatattgcaatagctacagtttgtaacatacataaaaggaggaatttactgtgtgatattccaaatcaccaaagtaggaccagaactaggactagtactcattagacttgcaattggttctttaaaaaatggagacataagtagctaggttatatattaatgcactaatattactagttaatactttcattcattttgacatttcaaagtattctaaaccaaaaacgtccccttttttggtaaatgtatgaactcttggacgttgattgccatcaaacagaagaatctcaggtgaaatggcatgctggatcttctttaacatgttcaagtgaagagggaaaataagaccacagcaggtccaacacggctgagggaggacggatccaatggtagtttgtttgttataccaggaggcagtccaatgtcctaagtttaaaggaactcttgtatgcaggtttggtgcaggaaggggtcatgatcagtataagaacccagccaagagggcaggtattcaagacaaacctagttccagtgaggaattcaaaaccaagacatgaactcaggcagagagactggaccaacatgatggaagtgagaaaggtatgatttggtaagcacatgagggaacaagaaacaccaccaagcacactaggtgttcatggtcaacagaaatgaagctaattccaggattcagtaaccaatgggatttttgactctgctcagattgaagaggctcagaaactggactggacttagccttcaaactctcataggtagctgcaaaaataaatatttcattccaaaagatgatatcatcaggacatgagatacacacattcccaaacagccatcacacatgtgtgaatgtgcacacacatattggtacatatgttatttgaaaacttccaaaatcactttacgttttcattcccactattcaaactga

SEQ ID NO: 4612 - DNA, 1356 bp, Homo sapiens
agccataaaaaatgatgagttcatgtcctttgtagtgacatggatgaaattggaaatcatcattctcagtaaactatcgcaagaacaaaaaaccaaacaccgcatattctcactcataggtgggaattgaacaatgagatcacatggacacaggaaggggaatatcacactctggggactgttgtggggtggggggaggggggagggatagcattgggagatatacctaatgctagatgacgaattagtgggtgcagcgcaccagcatggcacatgtatacatatgtaactaacctgcacaatgtgcacatgtaccctaaaacttamagtataataataaaaaataaaaaataaaaataaaaaaagatacatacctcatttttatgtatttgtgagaactcttgcttatgaatattgcaatagctacagtttgtaacatacataaaaggaggaatttactgtgtgatattccaaatcaccaaagtaggaccagaactaggactagtactcattagacttgcaattggttctttaaaaaatggagacataagtagctaggttatatattaatgcactaatattactagttaatactttcattcattttgacatttcaaagtattctaaaccaaaaacgtccccttttttggtaaatgtatgaactcttggacgttgattgccatcaaacagaagaatctcaggtgaaatggcatgctggatcttctttaacatgttcaagtgaagagggaaaataagaccacagcaggtccaacacggctgagggaggacggatccaatggtagtttgtttgttataccaggaggcagtccaatgtcctaagtttaaaggaactcttgtatgcaggtttggtgcaggaaggggtcatgatcagtataagaacccagccaagagggcaggtattcaagacaaacctagttccagtgaggaattcaaaaccaagacatgaactcaggcagagagactggaccaacatgatggaagtgagaaaggtatgatttggtaagcacatgagggaacaagaaacaccaccaagcacactaggtgttcatggtcaacagaaatgaagctaattccaggattcagtaaccaatgggatttttgactctgctcagattgaagaggctcagaaactggactggacttagccttcaaactctcataggtagctgcaaaaataaatatttcattccaaaagatgatatcatcaggacatgagatacacacattcccaaacagccatcacacatgtgtgaatgtgcacacacatattggtacatatgttatttgaaaacttccaaaatcactttacgttttcattcccactattcaaactga

SEQ ID NO: 4613 - DNA, 1356 bp, Homo sapiens
agccataaaaaatgatgagttcatgtcctttgtagtgacatggatgaaattggaaatcatcattctcagtaaactatcgcaagaacaaaaaaccaaacaccgcatattctcactcataggtgggaattgaacaatgagatcacatggacacaggaaggggaatatcacactctggggactgttgtggggtggggggaggggggagggatagcattgggagatatacctaatgctagatgacgaattagtgggtgcagcgcaccagcatggcacatgtatacatatgtaactaacctgcacaatgtgcacatgtaccctaaaacttacagtataataataaaaaataaaaaataaaaataaaaaaagatacatacctcatttttatgtatttgtgagaactcttgcttatgaatattgcaatagctacagtttgtaacatacataaaaggaggaatttactgtgtgatattccaaatcaccaaagtaggaccagaactaggactagtactcattagacttgcaattggttctttaaaaaatggagacataagtagctaggttatatrttaatgcactaatattactagttaatactttcattcattttgacatttcaaagtattctaaaccaaaaacgtccccttttttggtaaatgtatgaactcttggacgttgattgccatcaaacagaagaatctcaggtgaaatggcatgctggatcttctttaacatgttcaagtgaagagggaaaataagaccacagcaggtccaacacggctgagggaggacggatccaatggtagtttgtttgttataccaggaggcagtccaatgtcctaagtttaaaggaactcttgtatgcaggtttggtgcaggaaggggtcatgatcagtataagaacccagccaagagggcaggtattcaagacaaacctagttccagtgaggaattcaaaaccaagacatgaactcaggcagagagactggaccaacatgatggaagtgagaaaggtatgatttggtaagcacatgagggaacaagaaacaccaccaagcacactaggtgttcatggtcaacagaaatgaagctaattccaggattcagtaaccaatgggatttttgactctgctcagattgaagaggctcagaaactggactggacttagccttcaaactctcataggtagctgcaaaaataaatatttcattccaaaagatgatatcatcaggacatgagatacacacattcccaaacagccatcacacatgtgtgaatgtgcacacacatattggtacatatgttatttgaaaacttccaaaatcactttacgttttcattcccactattcaaactga

SEQ ID NO: 4614 - DNA, 1356 bp, Homo sapiens
agccataaaaaatgatgagttcatgtcctttgtagtgacatggatgaaattggaaatcatcattctcagtaaactatcgcaagaacaaaaaaccaaacaccgcatattctcactcataggtgggaattgaacaatgagatcacatggacacaggaaggggaatatcacactctggggactgttgtggggtggggggaggggggagggatagcattgggagatatacctaatgctagatgacgaattagtgggtgcagcgcaccagcatggcacatgtatacatatgtaactaacctgcacaatgtgcacatgtaccctaaaacttacagtataataataaaaaataaaaaataaaaataaaaaaagatacatacctcatttttatgtatttgtgagaactcttgcttatgaatattgcaatagctacagtttgtaacatacataaaaggaggaatttactgtgtgatattccaaatcaccaaagtaggaccagaactaggactagtactcattagacttgcaattggttctttaaaaaatggagacataagtagctaggttatatattartgcactaatattactagttaatactttcattcattttgacatttcaaagtattctaaaccaaaaacgtccccttttttggtaaatgtatgaactcttggacgttgattgccatcaaacagaagaatctcaggtgaaatggcatgctggatcttctttaacatgttcaagtgaagagggaaaataagaccacagcaggtccaacacggctgagggaggacggatccaatggtagtttgtttgttataccaggaggcagtccaatgtcctaagtttaaaggaactcttgtatgcaggtttggtgcaggaaggggtcatgatcagtataagaacccagccaagagggcaggtattcaagacaaacctagttccagtgaggaattcaaaaccaagacatgaactcaggcagagagactggaccaacatgatggaagtgagaaaggtatgatttggtaagcacatgagggaacaagaaacaccaccaagcacactaggtgttcatggtcaacagaaatgaagctaattccaggattcagtaaccaatgggatttttgactctgctcagattgaagaggctcagaaactggactggacttagccttcaaactctcataggtagctgcaaaaataaatatttcattccaaaagatgatatcatcaggacatgagatacacacattcccaaacagccatcacacatgtgtgaatgtgcacacacatattggtacatatgttatttgaaaacttccaaaatcactttacgttttcattcccactattcaaactga

SEQ ID NO: 4615 - DNA, 1356 bp, Homo sapiens
agccataaaaaatgatgagttcatgtcctttgtagtgacatggatgaaattggaaatcatcattctcagtaaactatcgcaagaacaaaaaaccaaacaccgcatattctcactcataggtgggaattgaacaatgagatcacatggacacaggaaggggaatatcacactctggggactgttgtggggtggggggaggggggagggatagcattgggagatatacctaatgctagatgacgaattagtgggtgcagcgcaccagcatggcacatgtatacatatgtaactaacctgcacaatgtgcacatgtaccctaaaacttacagtataataataaaaaataaaaaataaaaataaaaaaagatacatacctcatttttatgtatttgtgagaactcttgcttatgaatattgcaatagctacagtttgtaacatacataaaaggaggaatttactgtgtgatattccaaatcaccaaagtaggaccagaactaggactagtactcattagacttgcaattggttctttaaaaaatggagacataagtagctaggttatatattaatgcactaatattactagttaatactttcattcattttgacatttcaaagtattctaaaccaaaaacgtccccttttttggtaratgtatgaactcttggacgttgattgccatcaaacagaagaatctcaggtgaaatggcatgctggatcttctttaacatgttcaagtgaagagggaaaataagaccacagcaggtccaacacggctgagggaggacggatccaatggtagtttgtttgttataccaggaggcagtccaatgtcctaagtttaaaggaactcttgtatgcaggtttggtgcaggaaggggtcatgatcagtataagaacccagccaagagggcaggtattcaagacaaacctagttccagtgaggaattcaaaaccaagacatgaactcaggcagagagactggaccaacatgatggaagtgagaaaggtatgatttggtaagcacatgagggaacaagaaacaccaccaagcacactaggtgttcatggtcaacagaaatgaagctaattccaggattcagtaaccaatgggatttttgactctgctcagattgaagaggctcagaaactggactggacttagccttcaaactctcataggtagctgcaaaaataaatatttcattccaaaagatgatatcatcaggacatgagatacacacattcccaaacagccatcacacatgtgtgaatgtgcacacacatattggtacatatgttatttgaaaacttccaaaatcactttacgttttcattcccactattcaaactga

SEQ ID NO: 4616 - DNA, 796 bp, Homo sapiens
atccatcaatcccacttctcggtatctacctagaggaaaagagttattatagaaaaaagatacttgtgcacacatgtttacagcagcacaatttgcaattgcaaaaatatggaactaacccaaatgcccatcaatcaatgagtggataaagaaaatgtgctgtgtgtgtgtatgtgtatgtacatacacatacaccatggaatactactcagccataaaaaggaattaaataatggcattcacagcaacctggatggaagtggagattatcaatctaaggggagtaacctaggaaaggaaaaccaaacatagtatgttctcactcatttgtgagaactaacctatgaggacacaaaggcatagaagatacattggactttggggactgggggaaaatgtgggggatggtgagggataaaagactgcacattgggtacagtttacactacttgggtgatgggtacaccaaaatcccagaaatcaccactaaataacttaaagaatgcctgggattttttatattttgttcaacatgaacttattaatattatttatattagaaaaatgcatgttagtgctgtttcagtyagactcagaaaagctgatgtaatccaatcaaaaacttaaatccattctatcagtagatgtatcattaaggtttaaattcaatgagcagggaatgaagtcaagtttcagcaaatttactgtagaaaatgatgataagaagtgtgcaaagtggaatgctacaaacacacaagcagttggcgggggcgggggagggggcacagagacggga

SEQ ID NO: 4617 - DNA, 816 bp, Homo sapiens
tctattccaattgcataggwtccaggttcatcaaaacttagatcttctcgtcattatatacttctaagttcctactgtgtgaataaggggtgcaaaaatctaaaaaactcccgaagacaaggatatgaggcacacctctttgtaggtctggcgtaagggaaagaggaagaaaggattacattctactcgtttttatctctccctgtttggtcttaatcgggtgccagccccttaacggagggttgatccctgttcctcatccctatgcctgccttgtcaaggccattaaccgtggattgaggttttacatagtggaacgcaggtactgttttgtgggattagcatttttaggacggtgtttgtggtcactctccctgtttcttcctcatggggtcccttaacaggttttatggtatagagaaggaactaaagaagtccccaagtcacccagaaggaagatcagacgttagaggttgctttacacatagggtgccctgtcctgataaacatccgtcagcgcttggccagggctacctctaaatccacgctgctggcagcctccgcgcagcagggatgaacttctgcacgcttgggagttctggcgtgcgcagtggaaggagggggcgagggctgggggaggagatcggaaggggaaaggtaatccccggcgttttcagcatcctctttttagaaagactgagtctctcccaggacagctgctgcggtcacaccacaaacttaaaagccgccctcctgtttggagcgtgcctttcctcgccaccctctcctccccaaagctccagctggtgccttgct

SEQ ID NO: 4618 - DNA, 704 bp, Homo sapiens
agctcccccrgaagcagccgcctcttctccacctgcagctggcactcacctttaactttttcacagcacactgctctcctggttttatcacttcattcactcttgacacagacacagacagcaaaggacaggctggcagcctggcagtggctgtccctcctgctgcctggtgcacatgggcagctggggtgaatgcagaggggccggacagcttccaagtcagctctggggagcacacatcttggtttgctgtgccccagaagtcatctcctcctccaggagcccttggaccctgcaaaggggttggaactggatgttagggagaaagacatcgcagataagccacacttagggcaaaaagcttggtcagggccagacacattggagagtcctaggaagacatcacaggtggaggtgtgcagagaagatgcaaatataacaggagggatgatagctgaaaggagaaaaacagagttgaaattcaataatttgtgtgcccctgtcctaatttctcacaatcccacctatcaccaggactattgttgtctacagtttgtctataaattaattcacttaaaaaaaccttaagcacagcagggtgactacagtcaacaataattcattgcacatttataaataactaaaaaagtataaatgggagtgtttgtaacacaaagaaatgataaatgctggaggggatggat

SEQ ID NO: 4619 - DNA, 704 bp, Homo sapiens
agctcccccggaagcagccgcctcttctccacctgcagctggcactcacctttaactttttcacagcacactgctctcctggttttatcacttcattcactcttgacacagacacagacagcaaaggacaggctggcagcctggcagtggctgtccctcctgctgcctggtgyacatgggcagctggggtgaatgcagaggggccggacagcttccaagtcagctctggggagcacacatcttggtttgctgtgccccagaagtcatctcctcctccaggagcccttggaccctgcaaaggggttggaactggatgttagggagaaagacatcgcagataagccacacttagggcaaaaagcttggtcagggccagacacattggagagtcctaggaagacatcacaggtggaggtgtgcagagaagatgcaaatataacaggagggatgatagctgaaaggagaaaaacagagttgaaattcaataatttgtgtgcccctgtcctaatttctcacaatcccacctatcaccaggactattgttgtctacagtttgtctataaattaattcacttaaaaaaaccttaagcacagcagggtgactacagtcaacaataattcattgcacatttataaataactaaaaaagtataaatgggagtgtttgtaacacaaagaaatgataaatgctggaggggatggat

SEQ ID NO: 4620 - DNA, 704 bp, Homo sapiens
agctcccccggaagcagccgcctcttctccacctgcagctggcactcacctttaactttttcacagcacactgctctcctggttttatcacttcattcactcttgacacagacacagacagcaaaggacaggctggcagcctggcagtggctgtccctcctgctgcctggtgcacatgggcagctggggtgaatgcagaggggccggacagcttccaagtcagctctggggagcacacatcttggtttgctgtgccccagaagtcatctcctcctccaggagcccttggacccygcaaaggggttggaactggatgttagggagaaagacatcgcagataagccacacttagggcaaaaagcttggtcagggccagacacattggagagtcctaggaagacatcacaggtggaggtgtgcagagaagatgcaaatataacaggagggatgatagctgaaaggagaaaaacagagttgaaattcaataatttgtgtgcccctgtcctaatttctcacaatcccacctatcaccaggactattgttgtctacagtttgtctataaattaattcacttaaaaaaaccttaagcacagcagggtgactacagtcaacaataattcattgcacatttataaataactaaaaaagtataaatgggagtgtttgtaacacaaagaaatgataaatgctggaggggatggat

SEQ ID NO: 4621 - DNA, 704 bp, Homo sapiens
agctcccccggaagcagccgcctcttctccacctgcagctggcactcacctttaactttttcacagcacactgctctcctggttttatcacttcattcactcttgacacagacacagacagcaaaggacaggctggcagcctggcagtggctgtccctcctgctgcctggtgcacatgggcagctggggtgaatgcagaggggccggacagcttccaagtcagctctggggagcacacatcttggtttgctgtgccccagaagtcatctcctcctccaggagcccttggaccctgcaaaggggttggaactggatgttagggagaaagacatcgcagataagccacacttagggcaaaaagcttggtcagggccagacacattggagagtcctaggaagacatcacaggtggaggtgtgcagagaagatgcaaatataacaggagggatgatagctgaaaggagaaaaacagagttgaaattcaataatttgtgtgcccctgtcctaatttctcacaatcccacctatcaccaggactattgttgtctacagtttgtctataaattaattcacttaaaaaaaccttaagcacagcagggtgactacagtcaacaataattcattgcacatttawaaataactaaaaaagtataaatgggagtgtttgtaacacaaagaaatgataaatgctggaggggatggat

SEQ ID NO: 4622 - DNA, 1316 bp, Homo sapiens
gagtgacaggcacatctgcttctgaggagttagagatgccccactgtaacagacatggcagcacgtacccgagggcctggtagtgggactctgttacaggtgtgggggtcacagtttcaaaaggcatggccccaggccttagagttccatggaatgggagagacacttgaatcgaagagacagtttaagcctggcacagtggctcacggctgtcatcccagcactttgggaggctgaggtgggatggttgcttgaacccaggagttcaagactgcaatgagctgtgattgcgccactgcgctccagcctgcgtgacagagcaagaccctgtctctttaaaaaaaaaaaaaaaacagtttgagtgagcaggtgagcgcaggtgtatgtccagaggcccccgggattgccgcagtacggaagtggacacaacaggcaggatcccacctcccacctccagaggcgcagcccctggcgtcctggaggcaacagagttcattctcgtgggctctcagggctgggcacaccccaggccctagtcctgccctgcaccatagctgccactagctacatttggctatttatggttaaataacattaaaactatatccctctgccacacaaaccacatttaagatgctccatggccacatatggctcctctgtcctcacagaaagtcctgttaggcagtcctatctcagccttgaagcttcactgttagagttggggacagggtaccttggcccttgggagatcccgtcccccacctccaacagtgaagtggactgtcattacccctggctgcctgacattctggaaatttcctggatcatatcaagaatgcatatcaatccttaaacttccgatggctggttcctccctcatcctctcamccaccatattccctttcaacgtggctccaggacctcccaggccaatgccttgttcccgtttgctgcaaagtcgccttgtcccccgtcttagcatgcaccattggaacatacatttctaggagtcttgtatttgagggcaagcctctggaaagcagggctgtgtcccttcagccccacgtccctggtgaccgtgcagtgcccgcacgtgtgtgcttatacaccaccaagctaagcctctcggatctttggctcccggctccatgaagctgatcctacttttcccgtgtgtgaggctgatcctccctctcccagaccaggctcattttccaacctaggactgggctcttcagtggccatggccatcggggcaggtggctgttccctcgctaccattactcccaccaggttattgtccgttttaagaa

SEQ ID NO: 4623 - DNA, 782 bp, Homo sapiens
caccccatctgtacaaaacatttaaaaaacatagattgggtgtggaggtgtttggtacttgggaggctgaggtgggaggatcattgagtccaggaggcagaggttgcagccatccaagattgtgccactacactccagcctgggggatagagaccctgtctcaaaaaataaaacaaaaacctggttcacagattcttgggggtgtggtacctccagtttaagaaatgaggcagccttgaactgtgctgtttggagccataggagtcagtttgttctttctgtcccaatcactgtttgaggtggcagacttctaactcatgggtatcctggaatggatttgaattttgttctgtggggcctgaagaaaagggaacttggattgttctgtgtagggaggagtctgggcttgtgcrtggggagtggagccggctctgggaaagaggatgccaggcccagggggggcctccacaggaggcagcatcctcccatgcccatccacagtgggcacaaatgctcactatgaaggaaggacttgcgatggcctcgccagacggcggcaagccctcacggcacctgctggcgctcatgctcagccttttggggcaccgtggcaggagatccaagcgcagcaggggctggacagggcctcctcctagctggctctgttccaccctgagttctggggggcttttccagtgttggggctgtgggcagctgtgacatgttttacagtgaaagagcttgttaactcatccatcttcatactttggtcaccagggttt

SEQ ID NO: 4624 - DNA, 782 bp, Homo sapiens
caccccatctgtacaaaacatttaaaaaacatagattgggtgtggaggtgtttggtacttgggaggctgaggtgggaggatcattgagtccaggaggcagaggttgcagccatccaagattgtgccactacactccagcctgggggatagagaccctgtctcaaaaaataaaacaaaaacctggttcacagattcttgggggtgtggtacctccagtttaagaaatgaggcagccttgaactgtgctgtttggagccataggagtcagtttgttctttctgtcccaatcactgtttgaggtggcagacttctaactcatgggtatcctggaatggatttgaattttgttctgtggggcctgaagaaaagggaacttggattgttctgtgtagggaggagtctgggcttgtgcgtggggagtggagccggctctgggaaagaggatgccaggcccrgggggggcctccacaggaggcagcatcctcccatgcccatccacagtgggcacaaatgctcactatgaaggaaggacttgcgatggcctcgccagacggcggcaagccctcacggcacctgctggcgctcatgctcagccttttggggcaccgtggcaggagatccaagcgcagcaggggctggacagggcctcctcctagctggctctgttccaccctgagttctggggggcttttccagtgttggggctgtgggcagctgtgacatgttttacagtgaaagagcttgttaactcatccatcttcatactttggtcaccagggttt

SEQ ID NO: 4625 - DNA, 782 bp, Homo sapiens
caccccatctgtacaaaacatttaaaaaacatagattgggtgtggaggtgtttggtacttgggaggctgaggtgggaggatcattgagtccaggaggcagaggttgcagccatccaagattgtgccactacactccagcctgggggatagagaccctgtctcaaaaaataaaacaaaaacctggttcacagattcttgggggtgtggtacctccagtttaagaaatgaggcagccttgaactgtgctgtttggagccataggagtcagtttgttctttctgtcccaatcactgtttgaggtggcagacttctaactcatgggtatcctggaatggatttgaattttgttctgtggggcctgaagaaaagggaacttggattgttctgtgtagggaggagtctgggcttgtgcgtggggagtggagccggctctgggaaagaggatgccaggcccagggggggcctccacaggaggcagcatcctcccatgcccatccacagtgggcacaaatgctcactatgaaggaaggacttgcgatggcctcgccagacggcggcaagccctcacggcacctgctggcgctcatgctcagccttttggggcaccgtggcaggagatccaagcgcagcaggggctggacagggcctcctcctagctggctctgttccaccctgagttctggggggcttttccagtgttggggctgtgggcagctgtgacatgttttacagtgaaagagcttgttaactcatccakcttcatactttggtcaccagggttt

SEQ ID NO: 4626 - DNA, 826 bp, Homo sapiens
ggtgatccacccgcctcagcctcccaaagtgctgggattacaggcatgaaccaacacgcttggccagaagaaagcttcaaaaagaaaaggggaaaaaaaatcagtgagaacctaggcaatgaaaccttctcccagggcagctgtgttcctgactttgtaaacttctgacttctgtaccatgggcctgagttaggggagtggggggaggcggggggaggcgggggtagcctgggagagcaggggctataggcagaatgtctatcttatgaataggagaaggggagctctgttgcttctgaagcatcctgagggtgtgggagtggacctcactctagggtgggtgctcagaaaagctatgttgaagagaatttgcatgagtcagagttacgccagtaaggaagatgttattcaagatgataggggaagctaaccccgactctgctgacaccatgggctggagggcttctaagcataagcactggggtgccctagtgcaaaagtcctggaggatgttggggtaaggttgcttggtgggatgtgccaagtacattgagttgttccagagtttgcaaatgtttttttctgtgattgggtcatctgtggttgctgggctcaagcgatcctcctgcctcatcgcctcagcctcctgaatagctgggactacaggtacgcaccccccatgcctggcagtgtttcttcaagttaatggtagaagagaagggaggtcggggtgagagtcaagaagcccatctaaagtccagtcaagctgagtctaggtcaacmgtgtccttgcccctgaattccacaacttctgtttcctcttgga

SEQ ID NO: 4627 - DNA, 1505 bp, Homo sapiens
caataaattcatcaatgtgaaaatacttttaaagataatttccctaatggacttggaaaaaatgcacaaaaggtcaggcgcagtagctcacacctgtaatcccagcactttgggaggcctaggcgggcagaccgctagagctcaggagtttcagaacagcctgggcaacacagcaaaaccccctctccacaaaaaatacaaagaattagctgggcatggtggcrtgcacctgtggtcccagcaactcagaaggctggggtgggaggactgcttgagcctgggaggcagaagttgcagtgagccgagattgcgccacagcactctaacctgggtgacagagtgagaccttgtctcaaaaaaataaacaaataaataaaaagcacaatatacagtagccatctagtcagccttaattttaaaaaactttttcctctaaaatcatgtagcagtacaaaggtacaacaatttctgtcttcatttgcttatgaatttgtttcaaaaccacatcacaatcaggtaagaacttgatgtgtctacttaggaagtcatatggtagtggttattttccctgtgattagaaataaccgctagtaaactttctgttttttcagaatatttgatattgatgtttctgaataatcttatttaaaaaattcatgaactactagtttaaaataattagaacacaaaaggatcctcagccagaaaattatattgagtataatagtctgtatcactgaaactctacagcttaacctgcttatggttaacatatagtaaatgtgtattaaatgaaagaatactatttcaatgataatacagaccataatttaggatcttaaaataaattatacataatgtggcaaaacacaatagacgggggaaaatctggttaattagattctagtataagcataagcatgtactagaattttttttttttttttgacagggtcttgctatcacccaggctggagggcactggtgtgatcatggctcgctgcagcctcaacctcctaggctcaaacagtcctcccaccttagccccctgagtagctggccaccatgcctggaccggctttttttcttcttaaaaatttttttgtagatgaggtctcgctacattgccagagctggtcttgaactcctgaccttaataagtgatcctctcactctgtccttccaaaatgctgggattacaggtgtgagccactgcaaatggccttccattctttccttttcttttcttttttctttttttttttttttttttttgagacagagtcttgctccatcacccaggctagagtgcagtggcatgatcacagctcactgtagcttctacctcctggctcaagtgatcctcccacctctcagtctctccagtagctgggattacaagtgcgtaccaccatgctcaggtaatttttctattttttgtagacagggtctcactacgttgctcaggctggtcttgaactccttggctcaagtgattctcccgc

SEQ ID NO: 4628 - DNA, 1505 bp, Homo sapiens
caataaattcatcaatgtgaaaatacttttaaagataatttccctaatggacttggaaaaaatgcacaaaaggtcaggcgcagtagctcacacctgtaatcccagcactttgggaggcctaggcgggcagaccgctagagctcaggagtttcagaacagcctgggcaacacagcaaaaccccctctccacaaaaaatacaaagaattagctgggcatggtggcakgcacctgtggtcccagcaactcagaaggctggggtgggaggactgcttgagcctgggaggcagaagttgcagtgagccgagattgcgccacagcactctaacctgggtgacagagtgagaccttgtctcaaaaaaataaacaaataaataaaaagcacaatatacagtagccatctagtcagccttaattttaaaaaactttttcctctaaaatcatgtagcagtacaaaggtacaacaatttctgtcttcatttgcttatgaatttgtttcaaaaccacatcacaatcaggtaagaacttgatgtgtctacttaggaagtcatatggtagtggttattttccctgtgattagaaataaccgctagtaaactttctgttttttcagaatatttgatattgatgtttctgaataatcttatttaaaaaattcatgaactactagtttaaaataattagaacacaaaaggatcctcagccagaaaattatattgagtataatagtctgtatcactgaaactctacagcttaacctgcttatggttaacatatagtaaatgtgtattaaatgaaagaatactatttcaatgataatacagaccataatttaggatcttaaaataaattatacataatgtggcaaaacacaatagacgggggaaaatctggttaattagattctagtataagcataagcatgtactagaattttttttttttttttgacagggtcttgctatcacccaggctggagggcactggtgtgatcatggctcgctgcagcctcaacctcctaggctcaaacagtcctcccaccttagccccctgagtagctggccaccatgcctggaccggctttttttcttcttaaaaatttttttgtagatgaggtctcgctacattgccagagctggtcttgaactcctgaccttaataagtgatcctctcactctgtccttccaaaatgctgggattacaggtgtgagccactgcaaatggccttccattctttccttttcttttcttttttctttttttttttttttttttttgagacagagtcttgctccatcacccaggctagagtgcagtggcatgatcacagctcactgtagcttctacctcctggctcaagtgatcctcccacctctcagtctctccagtagctgggattacaagtgcgtaccaccatgctcaggtaatttttctattttttgtagacagggtctcactacgttgctcaggctggtcttgaactccttggctcaagtgattctcccgc

SEQ ID NO: 4629 - DNA, 512 bp, Homo sapiens
gatcctgcaaaacatcattcatgcctcatttgctcattcatgcctctggaaacagagagttggtttccctaatccctgtttttccaaccctatccaatcatgttctaagcataagagtactacaatgtcaatcccaagataatggtagttgcaagaccygcttcagagctgcatgaaggagctggcatggtgagctggttacagagaatacagactttgctgaaagggtctatctgaaatttggctgacaggtggcaaatgaacttctaagagaagcaagacggtgatgaaaaattaattagatgctaacatgtttgattttccttcctcctcccctccctcctccctccttccctccctcccttctaccttccttccttccttcctcccttcttacctgactttctttcttcctttaaaatttcttttttcttctgtccctccctccctccctttgttccatttctgataggagacgtacctttagccaccaataaattttcaagaaaaaa

SEQ ID NO: 4630 - DNA, 772 bp, Homo sapiens
tacaatggagtgtgctattattattcttttgtagatatggagaaagactgacagaggttaagtgactggcccaagataacacagctaggcggtaactgaattagattttaacaccagtcctcacattcaaaatccatcttcttttcactgaagcacaatccttcttgtaacagcaaacagtaaactcagccttggcagcataatgatccgtaaagaaagacaaagaaactttcataactgaaaaatagatgtttagttttttcatatttaaaagagcatatccaggtgagggtaagagtagctgaggaatctagttttatgttacccattaactcatatattcacccttcatccatccatccaatcagcaaattaaaagtctattctctgcagagcgttgttacaggtgctgagaattcacatgataactccctcaagcatcatcatcaccaatcatcatcawcagcaacaacaattttatcccaattactttggttatgtacatgtaatgtgtggctaggtggtgtgtcataagactaagactacaaaacatggcccagatagtgtattcatcaccaatatggcgcacactcaccaaggcaggcagacactagaaggcagagtaaaggagatacagtcatctgaacaaaagtgaagaaatgcacaattaatacatgaagtctacaaggacaaatgtactttgcgagggtatgctgagaagaaggaactgtgatatttaaattagtaaaattgtaaggaagtgccatgaagt

SEQ ID NO: 4631 - DNA, 772 bp, Homo sapiens
tacaatggagtgtgctattattattcttttgtagatatggagaaagactgacagaggttaagtgactggcccaagataacacagctaggcggtaactgaattagattttaacaccagtcctcacattcaaaatccatcttcttttcactgaagcacaatccttcttgtaacagcaaacagtaaactcagccttggcagcataatgatccgtaaagaaagacaaagaaactttcataactgaaaaatagatgtttagttttttcatatttaaaagagcatatccaggtgagggtaagagtagctgaggaatctagttttatgttacccattaactcatatattcacccttcatccatccatccaatcagcaaattaaaagtctattctctgcagagcgttgttacaggtgctgagaattcacatgataactccctcaagcatcatcatcaccaatcatcatcaacagcaacaacaattttatcccaattactttggttatgtacatgtaatgtgtggctaggtggtgtgtcataagactaagactacaaaacatggcccagatagtgtattcatcaccaatatggcgcacactcaccaaggcaggcagacactagaaggcagagtaaagkagatacagtcatctgaacaaaagtgaagaaatgcacaattaatacatgaagtctacaaggacaaatgtactttgcgagggtatgctgagaagaaggaactgtgatatttaaattagtaaaattgtaaggaagtgccatgaagt

SEQ ID NO: 4632 - DNA, 819 bp, Homo sapiens
ccccagcccataggagcagccatgctgtgggacaccctgagtggggtctgtgttacctgttgtgcctaccatgcccttccccgccttggatgcacaggtgccccaccttagctgcccgagatgctgtttatccttgatagtcaccttttaagccttatacaggtctatcaagttgagtcaccattaccacttggtgtgtgctgtgccttgtgtaacactgcagttccgggagtcctccaacctggaatgcatgctttgcggggatctatgatgccctcgaattgtatgttacatgtgaacytgtgagcattttctaggggctctgcacctttgtgttctcagctctgagccccatgcttgctgcaaccagcaggtgttcagagtgaatgaatttgcttatcttggcataaatcatgtaactgttgatgataccccaggaaggtgagcctttggttataaatccttttaacattttccagtctaaaagttttgtggtcttattacaggatgtagaaaacagtgggcctcagttattcttttgctgttgtgccggagtataccacggttgtttttgaaagataactttgaccatacccttaggaacttcctcagctcactttcaaatggagggcactggctttctaaccattgtgtctcccagcccagtgacagctgaagctgtctgcttccgatatcacaggcagcacagaagagccgccctccaggtgctgctgggaaatgctgcctggaactctttgccatttactttctatcaaaagctgagggaaatggtacatatggggctttcctaaaaatatg

SEQ ID NO: 4633 - DNA, 791 bp, Homo sapiens
agaaaatcttacgagtcagcaagttaacacttaatttgattatttttgatgttaccagccccagaaatagcattctgaaacagattacaggctttcttctttctatttgttgatacatcaactaccacaactcacctttcattttgttgctaaattttcagaataaagtgtgtgtgtgtgttaaaattctcctgctaaaataatctttctatgttcttacatatttaggtttggaatatggttcatgatggcagaattgtccaggtcaatatagtaaaatactctgaccaagacagtaggacccagactcaagctggggaagagataaataagctcagttaaaaagaaaaagagggccaggaatggtggctcacacctgtaatcccagcactttgggaggccaaggcgggcagatcacctgaggtcgggagttcaagaccaggctgaccaacatggagaaaccctgtctctactaaaaaatacaaaatcagctgggtgtggtggtgcatgcctgtaatcccagctactcgggaggctgaggcaggagaatcrcatgaacccgggaagtggaggttgcggtgagccaagatcatgccactactgcactccagcctgggcaacaagagcaagactgtctcaaaaaaaaaaaaaaaaaaaaaaaaagaaagaaagaaaaagaaaaagaggttgggcataatgtctcaagcctgtaatcttatcactttgggaggtcaaggcaggaagatggcttgagtccaggagttcaagactagcctgggcaacacactgag

SEQ ID NO: 4634 - DNA, 755 bp, Homo sapiens
agagtgactcaaaatagagggaatgtggggacttggggcataagattgatcatgaatcaccaaatagaaaaaccttcggatggctttcaagaagaatcctccttgaagttttaactttcacctacaagcaagttttctcactgctctgtacagcagggtaaggacagcagcctcacagcatcagtctgaagatagaatgggttaatgcagccaggcacagtggctcatgcctgtaatcccagcactttaggaggccgaagcaggcggatcatgaggtcaagagatcaagacaccctggccaacatggtgaaaccccgtctatactaaaatacaaaaatactagctgagtgtggtggtgcatgcctgtaggcccagctacttgggaggctgaggcaggagaattgcttgaacctgggagacggaggttgcagtgagccaagatcrcaccactgcactccagcctgggtgacagagtgagactttgtctccgcaaaaaaaaaaaaaaaaaaaaaaaagaatgggttaatgcctgagaactctttggcacagtgtccagcacaaattcagcagtcactcagtgttggctatcatctttggtgatgttggtcccaaacccagacctctgctcttgtcctcggctcatacacccacctgtatagcccatatgcactttaaacatgagtccaaaatggaatccaaaatattagatgccctcgttgccaccaccaggtttgctttcctctcaagccactgag

SEQ ID NO: 4635 - DNA, 755 bp, Homo sapiens
agagtgactcaaaatagagggaatgtggggacttggggcataagattgatcatgaatcaccaaatagaaaaaccttcggatggctttcaagaagaatcctccttgaagttttaactttcacctacaagcaagttttctcactgctctgtacagcagggtaaggacagcagcctcacagcatcagtctgaagatagaatgggttaatgcagccaggcacagtggctcatgcctgtaatcccagcactttaggaggccgaagcaggcggatcatgaggtcaagagatcaagacaccctggccaacatggtgaaaccccgtctatactaaaatacaaaaatactagctgagtgtggtggtgcatgcctgtaggcccagctacttgggaggctgaggcaggagaattgcttgaacctgggagacggaggttgcagtgagccaagatcgcaccactgcactccagcctgggtgacagagtgagactttgtctccgcaaaaaaaaaaaaaaaaaaaaaaaagaatgggttaatgcctgagaactctttggcacagtgyccagcacaaattcagcagtcactcagtgttggctatcatctttggtgatgttggtcccaaacccagacctctgctcttgtcctcggctcatacacccacctgtatagcccatatgcactttaaacatgagtccaaaatggaatccaaaatattagatgccctcgttgccaccaccaggtttgctttcctctcaagccactgag

SEQ ID NO: 4636 - DNA, 665 bp, Homo sapiens
gataagaaggagaaacstggacacagagacagacacatagacaggatgtcacagggagacaaaggaaaggctgggctgatgatctacaagacaaagatgaccaggaaaccaccagaagctgggacagggacacagtagattctcccctacagccagcagaaggaaccagccccgtggacatcggtgttttaaaaccactctgctgagctgggcatggtagctcacacctgtaatcccagcactttgggaggccgaggtgggtggatcacctgaggtcaggagatctagaccagactggcctacatggtgaaatgctgtctccaccaaaaatacaaaaattagccaggcgtggtggtgggagcctgtaatactagctacttgggaggctgaggcaggagaattgcttgaacccaggaggcagaggttgcactgagctgagatcatgccgctgcattccagcctggcgacagagcaagactccatcccccacacacaaaaaaattaattaattaattaaaaaaaaccactccaagcatgtcgttttgtctaaactagcataaaaaccaaaaaccctagtgttcctccacccattggagctgtatcacagggaccacgactttcagacctctccccatgccctcttccactaacacagggaaattcca

SEQ ID NO: 4637 - DNA, 665 bp, Homo sapiens
gataagaaggagaaacgtggacacagagacagacacatagacaggatgtcacagggagacaaaggaaaggctgggctgatgatctacaagacaaagatgaccaggaaaccaccagaagctgggacagggacacagtagattctcccctacagccagcagaaggaaccagccccgtggacatcggtgttttaaaaccactctgctgagctgggcatggtagctcacacctgtaatcccagcactttgggaggccgaggtgggtggatcacctgaggtcaggagatctagaccagactggccwacatggtgaaatgctgtctccaccaaaaatacaaaaattagccaggcgtggtggtgggagcctgtaatactagctacttgggaggctgaggcaggagaattgcttgaacccaggaggcagaggttgcactgagctgagatcatgccgctgcattccagcctggcgacagagcaagactccatcccccacacacaaaaaaattaattaattaattaaaaaaaaccactccaagcatgtcgttttgtctaaactagcataaaaaccaaaaaccctagtgttcctccacccattggagctgtatcacagggaccacgactttcagacctctccccatgccctcttccactaacacagggaaattcca

SEQ ID NO: 4638 - DNA, 665 bp, Homo sapiens
gataagaaggagaaacgtggacacagagacagacacatagacaggatgtcacagggagacaaaggaaaggctgggctgatgatctacaagacaaagatgaccaggaaaccaccagaagctgggacagggacacagtagattctcccctacagccagcagaaggaaccagccccgtggacatcggtgttttaaaaccactctgctgagctgggcatggtagctcacacctgtaatcccagcactttgggaggccgaggtgggtggatcacctgaggtcaggagatctagaccagactggcctacatggtgaaatgctgtctccacyaaaaatacaaaaattagccaggcgtggtggtgggagcctgtaatactagctacttgggaggctgaggcaggagaattgcttgaacccaggaggcagaggttgcactgagctgagatcatgccgctgcattccagcctggcgacagagcaagactccatcccccacacacaaaaaaattaattaattaattaaaaaaaaccactccaagcatgtcgttttgtctaaactagcataaaaaccaaaaaccctagtgttcctccacccattggagctgtatcacagggaccacgactttcagacctctccccatgccctcttccactaacacagggaaattcca

SEQ ID NO: 4639 - DNA, 665 bp, Homo sapiens
gataagaaggagaaacgtggacacagagacagacacatagacaggatgtcacagggagacaaaggaaaggctgggctgatgatctacaagacaaagatgaccaggaaaccaccagaagctgggacagggacacagtagattctcccctacagccagcagaaggaaccagccccgtggacatcggtgttttaaaaccactctgctgagctgggcatggtagctcacacctgtaatcccagcactttgggaggccgaggtgggtggatcacctgaggtcaggagatctagaccagactggcctacatggtgaaatgctgtctccaccaaaaatacaaaaattagccaggcrtggtggtgggagcctgtaatactagctacttgggaggctgaggcaggagaattgcttgaacccaggaggcagaggttgcactgagctgagatcatgccgctgcattccagcctggcgacagagcaagactccatcccccacacacaaaaaaattaattaattaattaaaaaaaaccactccaagcatgtcgttttgtctaaactagcataaaaaccaaaaaccctagtgttcctccacccattggagctgtatcacagggaccacgactttcagacctctccccatgccctcttccactaacacagggaaattcca

SEQ ID NO: 4640 - DNA, 665 bp, Homo sapiens
gataagaaggagaaacgtggacacagagacagacacatagacaggatgtcacagggagacaaaggaaaggctgggctgatgatctacaagacaaagatgaccaggaaaccaccagaagctgggacagggacacagtagattctcccctacagccagcagaaggaaccagccccgtggacatcggtgttttaaaaccactctgctgagctgggcatggtagctcacacctgtaatcccagcactttgggaggccgaggtgggtggatcacctgaggtcaggagatctagaccagactggcctacatggtgaaatgctgtctccaccaaaaatacaaaaattagccaggcgtggtggtgggagcctgtaatactagctacttgggaggctgaggcaggagaattgcttgaasccaggaggcagaggttgcactgagctgagatcatgccgctgcattccagcctggcgacagagcaagactccatcccccacacacaaaaaaattaattaattaattaaaaaaaaccactccaagcatgtcgttttgtctaaactagcataaaaaccaaaaaccctagtgttcctccacccattggagctgtatcacagggaccacgactttcagacctctccccatgccctcttccactaacacagggaaattcca

SEQ ID NO: 4641 - DNA, 665 bp, Homo sapiens
gataagaaggagaaacgtggacacagagacagacacatagacaggatgtcacagggagacaaaggaaaggctgggctgatgatctacaagacaaagatgaccaggaaaccaccagaagctgggacagggacacagtagattctcccctacagccagcagaaggaaccagccccgtggacatcggtgttttaaaaccactctgctgagctgggcatggtagctcacacctgtaatcccagcactttgggaggccgaggtgggtggatcacctgaggtcaggagatctagaccagactggcctacatggtgaaatgctgtctccaccaaaaatacaaaaattagccaggcgtggtggtgggagcctgtaatactagctacttgggaggctgaggcaggagaattgcttgaacccaggaggcagaggttgcactgagctgagatcatgccgctgcattccagcctggcgacagagcaagactccatcccccacacacaaaaaaattaattaattaattwaaaaaaaccactccaagcatgtcgttttgtctaaactagcataaaaaccaaaaaccctagtgttcctccacccattggagctgtatcacagggaccacgactttcagacctctccccatgccctcttccactaacacagggaaattcca

SEQ ID NO: 4642 - DNA, 791 bp, Homo sapiens
aggagttcgagaccagcctgaccaacatggtgaaaccccgtctctactaaaaatacaatgtcagagacagaggttctattttctgaagcctgaatctgaggccagaagtacccagcattgtaacgagggctatgggagttagaagccaggaactatgggcgaaaaccaatatatatggataataatacacacacacacacacacacacataataatatcacactcaagcaccaggaagatgtctaaagagaggatgcatgggactagtgcaagtgtgtcaagatttctacaaacactgaaaatgtctttggtggctgataaggcaggctctcagaggcttctgactaagctgcttacctatatcctcgaagctaactggacctttgtttcttacaagtgatacatctctgagcttgacagttgcatgcaaaccagtgaactggtccacrgggtattagaatcacaaataaatactctgtccacacatcacaaaactgaaaagcttaattggcactatcataaaaatcacaggctttgattgtaacaccctggcagtgtatttgtgaaaagctgagtacaatagcaacttttaattaggcaacctgtttttgtatgacaccaaagcattttacaaatccattcatttcaagaaaagccaggtaattaatagaattatagattcttagtgttgaaaggaaactatatagcctcaaaatgttgggacattcctctaattccaatgacccttagcacttgttcatttcaggcagcattgccagccatcactccat

SEQ ID NO: 4643 - DNA, 791 bp, Homo sapiens
aggagttcgagaccagcctgaccaacatggtgaaaccccgtctctactaaaaatacaatgtcagagacagaggttctattttctgaagcctgaatctgaggccagaagtacccagcattgtaacgagggctatgggagttagaagccaggaactatgggcgaaaaccaatatatatggataataatacacacacacacacacacacacataataatatcacactcaagcaccaggaagatgtctaaagagaggatgcatgggactagtgcaagtgtgtcaagatttctacaaacactgaaaatgtctttggtggctgataaggcaggctctcagaggcttctgactaagctgcttacctatatcctcgaagctaactggacctttgtttcttacaagtgatacatctctgagcttgacagttgcatgcaaaccagtgaactggtccacagggtattagaatcacaaataaatactctgtccacacatcacaaaactgaaaagcttaattggcactatcataaaaatcacaggctttgattgtaacaccctggcagtgtatttgtgaaaagctgagtacaatagcaacttttaattaggcaacctgtttttgtatgacaccaaagcattttacaaatccattcatttcaagaaaagccaggtaattaatagaattatagattcttagtgttgaaaggaaactatatagcctcaaaatgtkgggacattcctctaattccaatgacccttagcacttgttcatttcaggcagcattgccagccatcactccat

SEQ ID NO: 4644 - DNA, 791 bp, Homo sapiens
aggagttcgagaccagcctgaccaacatggtgaaaccccgtctctactaaaaatacaatgtcagagacagaggttctattttctgaagcctgaatctgaggccagaagtacccagcattgtaacgagggctatgggagttagaagccaggaactatgggcgaaaaccaatatatatggataataatacacacacacacacacacacacataataatatcacactcaagcaccaggaagatgtctaaagagaggatgcatgggactagtgcaagtgtgtcaagatttctacaaacactgaaaatgtctttggtggctgataaggcaggctctcagaggcttctgactaagctgcttacctatatcctcgaagctaactggacctttgtttcttacaagtgatacatctctgagcttgacagttgcatgcaaaccagtgaactggtccacagggtattagaatcacaaataaatactctgtccacacatcacaaaactgaaaagcttaattggcactatcataaaaatcacaggctttgattgtaacaccctggcagtgtatttgtgaaaagctgagtacaatagcaacttttaattaggcaacctgtttttgtatgacaccaaagcattttacaaatccattcatttcaagaaaagccaggtaattaatagaattatagattcttagtgttgaaaggaaactatatagcctcaaaatgttgggacattcctctaattccaatgacccttagcacttgttcayttcaggcagcattgccagccatcactccat

SEQ ID NO: 4645 - DNA, 791 bp, Homo sapiens
aggagttcgagaccagcctgaccaacatggtgaaaccccgtctctactaaaaatacaatgtcagagacagaggttctattttctgaagcctgaatctgaggccagaagtacccagcattgtaacgagggctatgggagttagaagccaggaactatgggcgaaaaccaatatatatggataataatacacacacacacacacacacacataataatatcacactcaagcaccaggaagatgtctaaagagaggatgcatgggactagtgcaagtgtgtcaagatttctacaaacactgaaaatgtctttggtggctgataaggcaggctctcagaggcttctgactaagctgcttacctatatcctcgaagctaactggacctttgtttcttacaagtgatacatctctgagcttgacagttgcatgcaaaccagtgaactggtccacagggtattagaatcacaaataaatactctgtccacacatcacaaaactgaaaagcttaattggcactatcataaaaatcacaggctttgattgtaacaccctggcagtgtatttgtgaaaagctgagtacaatagcaacttttaattaggcaacctgtttttgtatgacaccaaagcattttacaaatccattcatttcaagaaaagccaggtaattaatagaattatagattcttagtgttgaaaggaaactatatagcctcaaaatgttgggacattcctctaattccaatgacccttagcacttgttcatttcagscagcattgccagccatcactccat

SEQ ID NO: 4646 - DNA, 1394 bp, Homo sapiens
attccagcctccagaactgtgagaaaagaattttctgttgtttcagtcccccacactatggcattttgttacggcagcctgagctaatactcctactttgtcctgcatttacttggtcttccagttagttttttagactttgggaatcagagcagtcagttgtcagattttagcttacagttgtcctacctgtgcaactgaaatttcttccattttaaaccagagcagagttttagagtcaaaagaaaccagatcttttagtgcagaagctttcacactgyattagaagtgaggaagttggttttgtgagttgcagccagcagttctcttatgaagtgcattgcctgcagttttgtgaaagttgtattcccagcttgtgtgtgtatatttgcgtgtactagattgagatataaagtatatttttgactgtaggtatggtaaaaaaaaaaaaaaatttaagtccattgtattgctcaaactaatcctttactctctcttagaacacccatggtaaatgatcatgttagagtttgagggtgaaggagcatcaggattatgaaccagaggggtcagacttcagatctagaaatcaaaacaccaaagggacacaaatagggaagaagagagtatggtcatctcttgtctttcagcaagcaacactgggatccccaaagagactcctctacagggccaagcttgtgtgatttatcacacctgtccctgtactccccaagtgccttgtacataacctcacctgctatacatgctatgttgtattataattattttctaaatgtatgtaactgggccaagtccatagttgtcccaattggcccatgttgatggatggatcatgatttttggcctcatttgactgtcatgcatgttgaattacatgttaatgtcatgtcagtcaccccaggctcagtcaagggtgagtgtcatgcctctgtcatgaatacacagtgaagcagtcccttttattccatggagccagtagcagcaaaatcccatcatgtctcaagatgtcagtagaacgggtggaattttgattctttgtatggtcttctagatttgttaagaggtgaggaagggctgggtgcagtggctcacgcctgttatcccagcactttgggaggccgagatgggcggatcacaaggtcaggagatcgagaccatcctggctaactcggtaaaacactgtgtctactgaaaatacaaaaaaaaattagccaggtgtggtggcaggtgccagtagtcccagctacttgggaggctgaggcaggagaatggcgagaacccgggaggcggagcttgcagtgagccgagatagcaccactgcactccagcctgggagacagagcgagactctgtctcaaaaaaaaaaaaaaaaa

SEQ ID NO: 4647 - DNA, 763 bp, Homo sapiens
tgtacatcccagccctctggcttagtaggcaagcagggtgttttattaatcatgggttaggaagatgtacattgcaggctgtgatggattctgctggcttgcactataattgtactcttgataagagctaattcctttacctccacagagcccacaacagaggagactcctcctccacttacagagctattaaaatccagcttttaagtcctcaggatcaagagttttgcaaagaggaaacataatctctcattgcagactcatgctagtagatgcytggagtgatggtgggagagaggtgggcgcagagtttccttgtggcccctgtggagctagctgcgatcaaggtgccaggagtttctgcctacagctcttccagcagcaaggtttgacccggggcttacgctatcacccacagctgaggtcaagggcagtgttggaaaactggtaactaactaactctttctgtagaataatgaatgctcatcatagtaacgagctgcccttattggaccacacagatcagccccaaccctaccctaaaaatgccctcacttgcttagtgtaggagagaaaaaggcagtgaggtagtagcgtgtgacaagaatcagaagcgactgacttttaggttaatccgatccaggagatcctccacagacttgggctggggtggtcgtcctttccgacgcctcctggtggggcgtttgggtttctcctcgtcttcactgagcacgtccacgtagatgaacttgaacgtgccgac

SEQ ID NO: 4648 - DNA, 1398 bp, Homo sapiens
ccccatctgtcccataaaggtacctctgagcacacagaaggcagaaatctttcttcagatggagaaaacacagaaaccaggtgtgtggagcaggagccaggtggggagagggagggtgtgcaacaggaattctagagggaagctgaggtcagaggggtgaagtgatgctaacccagggattaacacgagaccctccctctgcctcgagggctggctggttcttgttctgtttttcactacagaggagaccagtgatcgaggtagccaagatactgtccagtctgtaccatagtagcccagcattcaacagtgaggaggaaagaaagcctcctagagaaatggaagagcccagttagctgctctgaggccagggagagagataccttgagcttgagtgagtctgtgtcatagggactgggggtgaagtcggtgtgcaccctggcacgcccgcagaacgggcctcggtaaggcggctcttcgtcatccccatcttccgacttgacgctttcccggttgctggttgaggaatcagtggtgctcactgtttgaccgcctgtacaggaaacataggaagaacacgggtagatccagatttcccacccagcaaagcagaaaggtrttgaaggtatggcagattaggaaatgaaggcccagagaaaggaagccttgagccacaaccctctgtcaggaccagggcagggcccagttatgaattctccgagtgctatccctcagctcctcagtggacaggggactcacagcaagttaccctcatgacctgggaatccatgtggcacggaggatcccgcgtggaggacactgcagggccaggcaccagactctgctcttaacattcgtgacctctcagtggtaatgcacactctctctaaccattttacagatgaggaaacaaattcagagcagtcatgtcatttgcccaaaagggtaagaaagagcttaaagtggtaggtttaaacttgatctcggggcacggtggctcacgcctataatcccagcactttaggaggccgaggtgggcagatcgcttgagtccaggagttccaccagcctgggctacatggcaaaaccccgtctctacaacaaaattagccgggtgtggtggcatgaccctgtagtacagctatgcggaaggctgaggcaggaggatcccttgagccagggaggtgaaggttgcagtgagctgagatcacaacactgcactccagcctgggagacagtgagactccatctcaaaaataaaaataaaaataaaataaagttgatcttttccttcataccattcagccaactccaactaccattggcccgaatttatcagtcacatataaaattcccctcccttccccactccctttattttgctggtcatcttcatgt

SEQ ID NO: 4649 - DNA, 645 bp, Homo sapiens
aataccatgtgttctcacttataagtgggagctaatgatgaaaacacatgtatacatagaaaggaacaacacacactgaggcctgttggagggtgaagggtaggaggagagagaggatcaggaaaaataacaatgggtactaggcttaatatctgggtgatgaaatgatctgtacagcaaacccccatgacacaagtttacccatgtaacaaacatgcacatgtacccctgaactaaaaagttaaaaaaatttgctgagcacggtggcacacgcctgtaatcccagcactttgggaggccaaggcgggtggatcacgaggtcaggagatcgagaccatcctggctaacatggtgaaaccccatctctactaaaaatacaaaaaattagcygggcgtggtggcgggcgcttgtagtcccagctacttgggaggctgaggcaggagaatggcgtgaacacggggggtggagtttgcaatgaggggagatcgcgccactgcactctagcctgggcgagagagcgagactccatttccaaaaaaaaaaaggttaaaaatttttaaaaaaagaaagtctatagggcccagacttacccaacatctttatactttattgcactgtggccctattagactttcctgtgagtt

SEQ ID NO: 4650 - DNA, 756 bp, Homo sapiens
agtactttcccaaactgaccacccaccaaataacttaggtcttccattaacagtagatcctccaaccccattcctgcccctagttctccccacccaattcttattcaaagtctgaaatgggtgttgagaatctgcatgtctatacaacctcccgggtgtttcagatgcagaatttagagccttggttagttttacagcaactggagagaagatttgaatatttatttgtccaagaagcacttattggatacctatggtgagccaggaactgtgtatggccttgagaatacaagataaagtttgccttttttttttttttttttttttgagagtctcgctctgtcccccaggctggagtagagtggcactttctcagctcactgcaacctccgcttcctgggttcaagtgattcttctgcctcagcttcccaagtagctgggattacaggcgtgtgtcaccamgcccagctaattttttaattttttaattttttagtagagacagggtttcactatatgttggccaggctggtcttgaactcctgacttcaggtgatccgcctgcctcagcctcccaaactgctgggattacaggcctgagccaccgcacccagcccagaattaccttttaaaaatgcgtattgagtcgtactgctcctccacgtaaaattctcgtctgcaaaattctgcaagagttgacccaccatgccctgcctgttctgaccctgctgcttacttccccagtctcacctttta

SEQ ID NO: 4651 - DNA, 564 bp, Homo sapiens
aacatggtaaggccctccccccactcccctgacccccgtctctactaaaaataccaaaaaaaaaaaaaaaaaaaattagccaggtgtggtggcgggcgcctgtaattccagctactctggaggctgaggcaggaaaatcgattgaacacccgggaggcagaggttgctgtgagccaagatcgcaccactgcactccagcctggktgacagagcaagactccatctcggggaaagaaaaagagagaaaatacctactcaagcgtgaagtcattctaccaaacaaaatgatggcattagaggccaaatgagttatttgtgaaaagggagaaattgaagatgcaaatagtaaaagtagactgtattgggccttttcctagaggaataggtaaaatttgaaaattcaggcaggaaagttagcttagaaaacagggagagcacatttgtaacttcagaagaggggcatccatggacaaaaatcgaagaatcacattgtacttcaatatgaggagaggctgggcacagtggctcgtgactgtaatcccagcactttgagacgtgggagga

SEQ ID NO: 4652 - DNA, 564 bp, Homo sapiens
aacatggtaaggccctccccccactcccctgacccccgtctctactaaaaataccaaaaaaaaaaaaaaaaaaaattagccaggtgtggtggcgggcgcctgtaattccagctactctggaggctgaggcaggaaaatcgattgaacacccgggaggcagaggttgctgtgagccaagatcgcaccactgcactccagcctgggtgacagagcaagactccatctcggggaaagaaaaagagagaaaatacctactcaagcgtgaagtcattctaccaaacaaaatgatggcattagaggccaaatgagttatttgtgaaaagggagaaattgaagatgcaaatagtaaaagtagactgtattgggccttttcctagaggaataggtaaaatttgaaaattcaggcaggaaagttagcttagaaaacagggagagcacatttgtaacttcagaagaggggcatccatggacaaaaatcgaagaatcacattgtacttcaatatgaggagaggctgggcacagtggctcgtgactgtaatcccagcactttgagasgtgggagga

SEQ ID NO: 4653 - DNA, 1487 bp, Homo sapiens
acacacacccccactgccagacagacacctgtggccatttgactgagtttgctggaagtgaaatgaggatttctgaagagtatagcctggtgtgagctgtgagaatctcacagtaccggggagagcctgtatgaagatagaattgagaccaggtgacctggcaaaagggctccacccaccctgagtaaacttcaaggccaacccacatctcagacctggtagaccagtaggctggtctctctctctctctctctctctctctctctttttttttttttttcctatttctccatgggaacttccatgaaaatgtgctgactgcctctgaccctactaaaaacaatgggaaattccaagttttcacttttgcctcttgaagttgcaaggcaacttaccttgcaacatcgggaaaggctggttcattatactagccttagagatataagtactaggtcctaaactggaccctaacccgagctttgctcacatagaggggaaggccttggagagaatgaaatgagacccttacgggggaagcgcaccccctcccttaaaagactcgagttcagacatttagtttgggagctctcagctcccgttctctccctcctgggttgctcaaccctccctcaggtacccagcctggatccaggtctgcccacaaggccctggaaggtgttagctgataatcaaggcagtsatttaaccatctatctgcctaagtgtatacaactcctcccagggacctctgcaggctaagagaaggttctttttgagaaaaaaaaaaaaaatgttgcaaattcaaaggaaaaatgctctgatgcagggtttccccatcttggtacaactgacactctagagtggaccattctttgttgagggggctggccctgtaggatggttggcagcgtccttggcctctacccactagattcccagagcacccctctccccacaaagctgtcacaactaaaaatgtttccagacattgccaaacgtcctctgcagggcaaaattgcccctggttgagaccactgatctaatggcagaagttggtacagagctgagagcgggaggacccatttctgaagccccatcagataaccacctgggcagctgcccggccaggtttgcctgcaagactctgatcacagagcattctggagacctcgaggtgaggcagcagagggaacaaaatggcccttctacctcggaagcaaaggccaaggcaaagtcaggtttccagagctctcaatccttggcaggggcaggggaaggagacgtcgaaggcaaagccggactcaaacgtttcagagaaaccaagggccacttccaaagtccttgcctttgaatggagatggcttgtctcactgctgttttcttttctagtccttctttattcaccgtggttaactcctcctctcccaaggtgtccgtttgtccctcctaaggaaaagcctcctagtgtttgtcagtctaagaggaaa

SEQ ID NO: 4654 - DNA, 1487 bp, Homo sapiens
acacacacccccactgccagacagacacctgtggccatttgactgagtttgctggaagtgaaatgaggatttctgaagagtatagcctggtgtgagctgtgagaatctcacagtaccggggagagcctgtatgaagatagaattgagaccaggtgacctggcaaaagggctccacccaccctgagtaaacttcaaggccaacccacatctcagacctggtagaccagtaggctggtctctctctctctctctctctctctctctctttttttttttttttcctatttctccatgggaacttccatgaaaatgtgctgactgcctctgaccctactaaaaacaatgggaaattccaagttttcacttttgcctcttgaagttgcaaggcaacttaccttgcaacatcgggaaaggctggttcattatactagccttagagatataagtactaggtcctaaactggaccctaacccgagctttgctcacatagaggggaaggccttggagagaatgaaatgagacccttacgggggaagcgcaccccctcccttaaaagactcgagttcagacatttagtttgggagctctcagctcccgttctctccctcctgggttgctcaaccctccctcaggtacccagcctggatccaggtctgcccacaaggccctggaaggtgttagctgataatcaaggcagtcatttaaccatctatctgcctaagtgtatacaactcctcccagggacctctgcaggctaagagaaggttctttttgagaaaaaaaaaaaaaatgttgcaaattcaaaggaaaaatgctctgatgcagggtttccccatcttggtacaactgacactctagagtggaccattctttgttgagggggctggccctgtaggatggttggcagcgtccttggcctctacccactagattcccagagcacccctctccccacaaagctgtcacaactaaaaatgtttccagacattgccaaacgtcctctgcagggcaaaattgcccctggttgagaccactgatctaatggcagaagttggtacagagctgagagcgggaggacccatttctgaagccccatcagataaccacctgggcagctgcccggccaggtttgcctgcaagactctgatcacagagcattctggagacctcgaggtgaggcagcagagggaacaaaatggcccttctacctcggaagcaaaggccaaggcaaagtcaggtttccagagctctcaatccttggcaggggcaggggaaggagacgtcgaaggcaaagccggactcaaacgtttcagakaaaccaagggccacttccaaagtccttgcctttgaatggagatggcttgtctcactgctgttttcttttctagtccttctttattcaccgtggttaactcctcctctcccaaggtgtccgtttgtccctcctaaggaaaagcctcctagtgtttgtcagtctaagaggaaa

SEQ ID NO: 4655 - DNA, 631 bp, Homo sapiens
cttgttgattcattttagaaaagagattaccataaaatatgtggtaaattggagattctcaataacgactactttaaatattttctaaataagtattcacacgactcttttccattgaagctgttagtacctgttcattagtacctgtataaatgttctaacacaagcagctgtacaaccaatgctaaatgaaataaaaactgacacatttcagagaagtcttgtgttcttctcacctacttttgaagattgaagattattctgttttcttcttattatatcaaaagaggtatatttcctttcttttttctttctttccttttttttttttttttttttttgcagagaaaactccaagtattttttgcaaggaaaagttgatgatactgatgatgatggtgatggtgatggtggtactgattagagtgctgatggtagtagtcctggtgagtgttggtgatcatakctaatcatcactgagatactactgtatttcaagtgctgagataggagcttaaactgtgttctcacaacacaacaaaatgcaaattatttactttttttgcagattaacaaaatgaagatgaaacacagtaaattactttttcaaattacttgactggtaaggcta

SEQ ID NO: 4656 - DNA, 794 bp, Homo sapiens
ctaaattaatgtttaaactcttgatgaaataaaaatgaaagttgattaggacttaagacttgagtatcttagcaagaactatcaagcatgtgccatagaataggtatcctggtgcttactgagagagagagagagagagagagagagagagagagagagagaggagagagagaggagagggagcgatttggattatttaggagagaaaacaagtagaagaaaagaaaaactgagaaaaatatcattcaatttaaatttccattgattttggaagaaacactagttaggcaaatgattcttccctcctctaattcctatttaatgtagtaacatacatatttgactatttcctcccagtgcctcttacaccaatgtcatcccattcctttcgctccaggtatttgagttttctcactgtgtatcagtaatactgtaaaggatgaaggtttattcctgtctagtattttatatgwtttattaaaaacttcatggttcactgaggggttggttaatcatacatcgtaagtcttaccacctatcagttcttttccaactctaaaaccctatgagtcatgtgtcaacaccagaaatgagctgctgtgaaatgatggtgatatttcagttgttctctgaaatacaaaaaacacgtggacaaggcttcacagctgtgagatgagaagcatggtacttgtccagcttatgtcatgcaaactcgcttttatggcatcaagtcggtgaactttgcctaaaactgcagcatgatgttgtcaaaacagtgacctgaagactcatca

SEQ ID NO: 4657 - DNA, 662 bp, Homo sapiens
gggctgtgcatttgggcggtaaaaacaccaccaaagcagcatcctgttacacttgactttgttttcagtccctctgatctcaactgccacttgagttcatcatttcctacagtcagcacgctcattcaaaataacaaaaaccaaacccaacactggaagatgctataaaatctcatcatctgtggaatttgagaattcatgtaaagaatcttagcctggggacaggagagagtcccaccaaaaacacagcaggygcataaggcctcaaaatggtcttcatctagctcagcaaaacacacaacgtttacataagttttgtgactttaagagcagagctgtaatatctgggtctgtaaaatgaggaattgagactcatggtctcaaaagtttctctgacttctagtgtcctgtgcctctgtggtctcatctcctgtcattcctcacaggcagccttccagagagggtggacacaatgccttcgactggcagagggtccctgaagaagtgacaagcaaaccccaaaaaggagatcatgaagtggacgactcaaattttggatgttgatgtgtcctgccctcccctctctgctcattcctcctcactctgcatcctcctaggcaccaattctcattgggctgccttggttctctaatgcagggaaa

SEQ ID NO: 4658 - DNA, 662 bp, Homo sapiens
gggctgtgcatttgggcggtaaaaacaccaccaaagcagcatcctgttacacttgactttgttttcagtccctctgatctcaactgccacttgagttcatcatttcctacagtcagcacgctcattcaaaataacaaaaaccaaacccaacactggaagatgctataaaatctcatcatctgtggaatttgagaattcatgtaaagaatcttagcctggggacaggagagagtcccaccaaaaacacagcaggtrcataaggcctcaaaatggtcttcatctagctcagcaaaacacacaacgtttacataagttttgtgactttaagagcagagctgtaatatctgggtctgtaaaatgaggaattgagactcatggtctcaaaagtttctctgacttctagtgtcctgtgcctctgtggtctcatctcctgtcattcctcacaggcagccttccagagagggtggacacaatgccttcgactggcagagggtccctgaagaagtgacaagcaaaccccaaaaaggagatcatgaagtggacgactcaaattttggatgttgatgtgtcctgccctcccctctctgctcattcctcctcactctgcatcctcctaggcaccaattctcattgggctgccttggttctctaatgcagggaaa

SEQ ID NO: 4659 - DNA, 662 bp, Homo sapiens
gggctgtgcatttgggcggtaaaaacaccaccaaagcagcatcctgttacacttgactttgttttcagtccctctgatctcaactgccacttgagttcatcatttcctacagtcagcacgctcattcaaaataacaaaaaccaaacccaacactggaagatgctataaaatctcatcatctgtggaatttgagaattcatgtaaagaatcttagcctggggacaggagagagtcccaccaaaaacacagcaggtgcataaggcctcaaaatggtcttcatctagctcagcaaaacacacaacgtttacataagttttgtgacyttaagagcagagctgtaatatctgggtctgtaaaatgaggaattgagactcatggtctcaaaagtttctctgacttctagtgtcctgtgcctctgtggtctcatctcctgtcattcctcacaggcagccttccagagagggtggacacaatgccttcgactggcagagggtccctgaagaagtgacaagcaaaccccaaaaaggagatcatgaagtggacgactcaaattttggatgttgatgtgtcctgccctcccctctctgctcattcctcctcactctgcatcctcctaggcaccaattctcattgggctgccttggttctctaatgcagggaaa

SEQ ID NO: 4660 - DNA, 739 bp, Homo sapiens
cacatgaacctgggctccagcccaccccgcctcagtgcctggcactgccatccgtttggtcctgatgcccaggcaccatgctcgagtcctccctgcttccacagccgttgctggacgagcgcccgcccacccaccctccctggtggaatccaggcctccctgccctctccctgccctctccccgcctccagctccgccacctcaagcccattctcacacggccagagcttttccaaagctccatcagcagctccacctccgtggcttcgctgggcgctcagaaccagctctacccctggtgmtggcctggggggcaccctgtcttcacacccacaccacgggctcccactatcctgccttcctggaaggctcgtccccaaccttctctgcagccacaaagtccctattcatgtctcagtgcagacaccactgctccagccttccgtggtcacctggtctaacacagcccccggtccctgcctgtcacactctgactctcaggagctcctgaccccacccggcagggtgctggaaggtgatggcctctcctcctccctcgaggctatgtgaggtccaggctgccctccctgtacctacagcaggtccccagaaaagagcagcagacactcggcccggcctcagcctctgtcctccgctgcagaagcagagtccagtgtggcgcctggcctcctgccgcctggtcagggccccgtccaccccccgggcgcatggtggcact

SEQ ID NO: 4661 - DNA, 760 bp, Homo sapiens
accctgctgtggccccgcttctccagcccctccgcagggttcctcccactgaactgcctgcccttctgcccagaacaagtccagctaagatggctcctcctctaggaaggcttccttggttcaggaaagagtggagggccagccttttgctgccacagccctaagagcttaccctaagccccggcactgcctccccattcccggccctccatggctctggccttaggggacctgggggcctgagcttggccacatgggcatcctcagccttgatccaggggcagactgctgggaygtgggcggggtgggaagaggagtggccaggagtgggggactcaagaaggcccctcacctggataccatggggaatgctgtaaactatgaggatggtcccgcagtcctcgtggccggggagcgacatctggaaccgtaatacctccatctttccctggggctgggtccccgtcttctctccatagatggttttgcaggagggacactgcagacttccatcctgacagaggcagacgcaacccactgagctggcagtctgagaacacccaagaccgtcacctccaccgtcagatggtaaagggccccgggaatgggctggccaccatcccagggagttgctggcagcctcctgcccggaaactggcttccaacagcttccctggaaagctttgttttgcaccagcaactcatgccattttcgttaagggacatgctatcaggagacaggtggcgagtgggaaaactc

SEQ ID NO: 4662 - DNA, 775 bp, Homo sapiens
ggggcttccgctcgttccaggcttctgcctgctccgtggagtgtgcagcaccagccacatctccccccagcctggggcggggccccaggttctctctgggacctggcctgcatctggggcaggggcaactttgctgccagctcccctgtggccctggtgctcaggcaggcccagagcttcctcttacacagccagcggccatgcctgagggggtgcctccgggagtggatggcgccccgggcctagctattggtagtgtcaggcgtggcggctacctgatgtggagcggaccccgggaatgcggccccgggaggccccgtgcagagactccgcccaaggcacacaaacctggtgcccttggcgggttggggttgggcacagtgaccatgtgactggctgggtccccaaagtgggcacctctccaacttcccagcctgggcccccgaggcatgaccccagctccatgccctgggcccagctccgcctcggggcctctctctgcccgaccacactgstctccggctagagggtgactcggccaggctccttcgtggcagcccccagggcagtgagctccagtgactgtctgcctcctccccaaaccttcttgcaatagcactgggtgagagcagggatgtgggcccagggtccagagcaacggaggctctgggcctggaggggggtggggaggggtgggtcccctggcctcctgagggtggcggcggtgcagtctgctgcctctggggatgcagggcacaggggacatggggcacag

SEQ ID NO: 4663 - DNA, 737 bp, Homo sapiens
caggaccagcctgatgagatggtgaaacctcgtctctactaaaagtacaaaaatttgccaggtgcagtggcatgtgccagtaatcccagctactcgggaggctgtgtcaggagaatcacttgaacctggacagcagaggttgcagtgagctgagatcatgccactgaactccagcctgggacacagagtgagactccatctggacatcctcaaatgcctcaaagacacctaggtgattgtgagagattcccagtgatctggggctgatggcccaataataagccaggctggagacttaggctgattctacatagaaaatggaagtgccctagtggagctcctgaacctggatcacctgttctgattttctagctcttgaaagaaagaacaaaaatactctactccagtatcacattttacaggtaaatgtagttgtggtcatggctctggatactttggggccttgatctcttactcctaagatgcttatttacactgacagattctgccctcagattctatttccttctggagcctctcacataactgtagcaggtcaatgaacaagatgtgaaaaatctcaaagagccacactcccaaatggaggctatgtctatgtttacatttcacaacgcagaaaatatcttttgtttgtttctgtacattctcaatcaaaagtccrgccctgttttgtaaatccaaggcagaggccagaccttattggcagattctaggca

SEQ ID NO: 4664 - DNA, 813 bp, Homo sapiens
aagacccatgttagacttttaacttccagaactgtaagacagaaaatttgcatggttttaaatcaatgatttgtgatcatttgatgcagcatcagtggaaagcttacacatgccctacaagaccctagagacagtggacactgcccatctctgtggcttcattctgtgccactctctgtccaccccttccccttttttcttctggttttcctaatgcttgtgatcccccaggtccccagaagtgctgttacctctcctttgaatgtctctctttccctggctcactcttgtgtcaaaggcatgtgaacaagggcaactccatattgaataggggctgcgtaaaaggaggctaagacctactgggctgcattcccagatagtaaggaattctaagccacaggatgagacaggaggtcagcacaagatacaggtcataaagaccttgctcataaaacaggttgcagtaaagaagccaagatccaccaataccaagatggcaatgggaatgacctctggttgtcctcaytgctacactcccaccagtgccatgacagtttacaaatacaaggcaacgtcaggaagttaccctacatggtctaaaaagggaaggcataaataatcctccccttgtttagcatatcatcaagaaataatcataaaaacaggcaaccagcagcccttgttgctgctctgcctatgaggtagccattcctttattccttcactttcctaagaaactttctttcactttactctgtggatttgccctaaattacttcttgcttgagatccaagaaccctgtcttagagtct

SEQ ID NO: 4665 - DNA, 827 bp, Homo sapiens
tatgtttattatctcacagtttctgcgggttgggactccaggggtgacttagccagatcctctggctcaaggtctgtcatgagggtgtaatggagctgtcagctggggctgtggtctcatatgatggctcaacttggcggttggacgatctactggcagtcccacttacggggttgtggctggattcagttccttggatgctgtcagccagaagccactctcagttccttgatacgtggacctcttcacagagccgcttacaatgtggcaactgctccctcaaagcaagagagggtgccaaaaatggaagcctcagcctgcagccatacccacagcattttcctgcttctccatggtgtctccaccaggtccctgtgaggccattaaagtgacgatagttaacgatctgacatggtgttcccaatggcatcattttatgcctccccaaaattaataatcttatgttggtaaatagaatacagagagtgggagaccacatcaaaattgttattgctgggtagaaaattaaatgtgttttcttttttccatgttgcttattggtatcttcctcaataarcattttatcacaaaataagtggggtggacagttgcaggagcagataaaaaaaattttttaacagaaaagcagagcaaacaactccagttggacttgaccttcgttctggccaggctcatgtacagagctttggctgtttgggaacacgacattcgtttatcactctcggtctaaagatcaagagaacattaacaatgtttgctagctactgtgtagtttggagctaaaaatagactctggcttggcatgg

SEQ ID NO: 4666 - DNA, 823 bp, Homo sapiens
ttgggcaaattaattaacctctctgagcctcagcgtcttcttctgtaatgtaagaataataacatttacctcataggagtttgtgagaattaaatgagataagccatgtaaattgctccagatgattcctggttgttaccctaagtgctcagtacacacttgaatctgcttctgtgtcttcatagatgagatccaagagaaggtttacttgtcccttcaatttttgttctgttctcttgtggtgtattgttatatgtcatcattaagagaatattcattgtaatagtatttggttattttccttttttaaaaatgccaacattgagatatagaaggaaaagcagaagtattgggattgcaagaacctgggttccaatgctgactcttcaactcactagctgtgtgacatcgggaaagtcacttaacatctctgatcctcaactgtaaactgtgaacaacaatactatctatatggttgtatttaattgtggattacttaaaatagatggaagtttgcctaaatagggccagcctagcattttagtaaagactgaatatgtgttaatttccccattccccccctttctgatagcgcagttgcaaacaaacttatggaaaacatgataggarctgatacagttctcggaacagacccatctgccttggacctgtcctcagcattcctggcttgtgccccatagcgcccagttagccagttctcaccctttcttcaccacctctcccagctcctgtttccccatggccttgacatgctcattatcgcagttccacttgatcccacgctctccagtcatttctctct

SEQ ID NO: 4667 - DNA, 823 bp, Homo sapiens
ttgggcaaattaattaacctctctgagcctcagcgtcttcttctgtaatgtaagaataataacatttacctcataggagtttgtgagaattaaatgagataagccatgtaaattgctccagatgattcctggttgttaccctaagtgctcagtacacacttgaatctgcttctgtgtcttcatagatgagatccaagagaaggtttacttgtcccttcaatttttgttctgttctcttgtggtgtattgttatatgtcatcattaagagaatattcattgtaatagtatttggttattttccttttttaaaaatgccaacattgagatatagaaggaaaagcagaagtattgggattgcaagaacctgggttccaatgctgactcttcaactcactagctgtgtgacatcgggaaagtcacttaacatctctgatcctcaactgtaaactgtgaacaacaatactatctatatggttgtatttaattgtggattacttaaaatagatggaagtttgcctaaatagggccagcctagcattttagtaaagactgaatatgtgttaatttccccattccccccctttctgatagcgcagttgcaaacaaacttatggaaaacatgataggagctgatacagttctcggaacagacccatctgccttggacctgtcctcagcattcctggcttgygccccatagcgcccagttagccagttctcaccctttcttcaccacctctcccagctcctgtttccccatggccttgacatgctcattatcgcagttccacttgatcccacgctctccagtcatttctctct

SEQ ID NO: 4668 - DNA, 823 bp, Homo sapiens
ttgggcaaattaattaacctctctgagcctcagcgtcttcttctgtaatgtaagaataataacatttacctcataggagtttgtgagaattaaatgagataagccatgtaaattgctccagatgattcctggttgttaccctaagtgctcagtacacacttgaatctgcttctgtgtcttcatagatgagatccaagagaaggtttacttgtcccttcaatttttgttctgttctcttgtggtgtattgttatatgtcatcattaagagaatattcattgtaatagtatttggttattttccttttttaaaaatgccaacattgagatatagaaggaaaagcagaagtattgggattgcaagaacctgggttccaatgctgactcttcaactcactagctgtgtgacatcgggaaagtcacttaacatctctgatcctcaactgtaaactgtgaacaacaatactatctatatggttgtatttaattgtggattacttaaaatagatggaagtttgcctaaatagggccagcctagcattttagtaaagactgaatatgtgttaatttccccattccccccctttctgatagcgcagttgcaaacaaacttatggaaaacatgataggagctgatacagttctcggaacagacccatctgccttggacctgtcctcagcattcctggcttgtgccccatagckcccagttagccagttctcaccctttcttcaccacctctcccagctcctgtttccccatggccttgacatgctcattatcgcagttccacttgatcccacgctctccagtcatttctctct

SEQ ID NO: 4669 - DNA, 823 bp, Homo sapiens
ttgggcaaattaattaacctctctgagcctcagcgtcttcttctgtaatgtaagaataataacatttacctcataggagtttgtgagaattaaatgagataagccatgtaaattgctccagatgattcctggttgttaccctaagtgctcagtacacacttgaatctgcttctgtgtcttcatagatgagatccaagagaaggtttacttgtcccttcaatttttgttctgttctcttgtggtgtattgttatatgtcatcattaagagaatattcattgtaatagtatttggttattttccttttttaaaaatgccaacattgagatatagaaggaaaagcagaagtattgggattgcaagaacctgggttccaatgctgactcttcaactcactagctgtgtgacatcgggaaagtcacttaacatctctgatcctcaactgtaaactgtgaacaacaatactatctatatggttgtatttaattgtggattacttaaaatagatggaagtttgcctaaatagggccagcctagcattttagtaaagactgaatatgtgttaatttccccattccccccctttctgatagcgcagttgcaaacaaacttatggaaaacatgataggagctgatacagttctcggaacagacccatctgccttggacctgtcctcagcattcctggcttgtgccccatagcgcccagttrgccagttctcaccctttcttcaccacctctcccagctcctgtttccccatggccttgacatgctcattatcgcagttccacttgatcccacgctctccagtcatttctctct

SEQ ID NO: 4670 - DNA, 823 bp, Homo sapiens
ttgggcaaattaattaacctctctgagcctcagcgtcttcttctgtaatgtaagaataataacatttacctcataggagtttgtgagaattaaatgagataagccatgtaaattgctccagatgattcctggttgttaccctaagtgctcagtacacacttgaatctgcttctgtgtcttcatagatgagatccaagagaaggtttacttgtcccttcaatttttgttctgttctcttgtggtgtattgttatatgtcatcattaagagaatattcattgtaatagtatttggttattttccttttttaaaaatgccaacattgagatatagaaggaaaagcagaagtattgggattgcaagaacctgggttccaatgctgactcttcaactcactagctgtgtgacatcgggaaagtcacttaacatctctgatcctcaactgtaaactgtgaacaacaatactatctatatggttgtatttaattgtggattacttaaaatagatggaagtttgcctaaatagggccagcctagcattttagtaaagactgaatatgtgttaatttccccattccccccctttctgatagcgcagttgcaaacaaacttatggaaaacatgataggagctgatacagttctcggaacagacccatctgccttggacctgtcctcagcattcctggcttgtgccccatagcgcccagttagccagttctcaccctttcttcaccacctctcccagctcctgtttccccatggccttgacatgctcattatcgcagttccacttgatcccacgstctccagtcatttctctct

SEQ ID NO: 4671 - DNA, 769 bp, Homo sapiens
tttcccataacaccagagagattgccaggctggggaggaaagactgttttgcaggcagccctcggagtgaaacatggagttcttctgactgaaggtaatgaaaagaatggcgtaacaaatacgaactgcaatgctaacaaatgcctgagtgtggaaggtcaggtatgggagtcattggatactaggggttctttttctttttctttcttttttttttaaattttattattattatgctttaagttttagggtacatgtgcacaacgtgtaggtttgttacttatgtatacatgtgccatgttggtatgctgcacccattaactcatcatttagcattaggtatatctcctaatgctatccctccccsctccctccaccccacaacaggccccagtgtgtgatgttccccttactgtgtccatgtgttctcgtttttcaattcccacctatgagtgagaacatgcggtgtttgtttttttctccttgcgatagtttgctgagaacgatggtttccagtttcatccatgtccctacaaaggacatgaactcatcattttttatggctgcatagtattccatggtgtatatgtgccacattttcttaatccagtctatccttgttggacatgtaggttggttccaagtctttgcttttttttattttattttttttgaaactgagttttgctcttgtcgcccaggctggaatgcaatggtgcaatctcagctcaccacaacctctgcctcccaggttcaagcaattttcctg

SEQ ID NO: 4672 - DNA, 934 bp, Homo sapiens
cttatcaggaatcagattagttcttaaatttaaaatatactattaactagaataaaagggagagttatagttttaaaattttatggtaataaatacatgaaaaattaactttttaaaaggttacctattcagagactcttgctataacttttgttcattaagtctatcagaatactaatgctaataatagctaatgtttgttaagcagttgtatgccagacactatactaagccccatgtgttagtagataacaagttagtgagataacaagttccatgtgttatctcactgaatctgcactgctaccttatgaggtagcttctattattattcacagacaaggaaactgaaagtcagggagattaaattttcccaagcacacacagctattgaagtgtcagagtcaggactggaactcagtctgatttcaaagcctgcttttaaagccacttggctgaactttctcaatataattttttttttcaggcatgaatagcaattcacaatgcatattataaaatctatgagtctattaccgaaacgtgtgctgtaatttatagaggtacctttaatcttaatggcactttatcaactcaatcatgacaaatttgayttgggcaccaattgccatctacttcactaatttataaatttctgctctgtaagtatttattaaggtattaaataatgctttggtattttctttctaggaactaaaggaagacaaattctaggaaacaaggattaaatctggtcctggtggttgtatgggataaacatggatttctttctagtttgtcttatatcagttttattataatattattcttcaggactttaaaaacaatcttactttaaaagtgtgaactatattcaatacctgtcctatgagatttaaaatatatagttctcaagcaaatataagtggaattc

SEQ ID NO: 4673 - DNA, 1180 bp, Homo sapiens
ttaagttatcctctatgcctgacacatttgtgcccaccttaggctcttccagttcccctttaggtctacaataggatagaaggaagaaaagactaacacttactgagttccaggtattagactatgtacatgcaagggagatgactattttccttaggctcagatgagaatgctaaatctcagacaggttaaacaactcactcaggccacacacttgctacaagatggggccaggatacaaatgcacatctatttggccccagaggccagaagtgctctgcacaattctacactttcacaatccaatgaatctggccccttcaccttgggcatgaatttataaaagattggccgtgactggagaatgtggcaggctgttgtcacagttataggcagtgggtccatggccatgggacatgatagagctacctggctcttgaaatggattcaggatcccattggcagcaccttcttctcaagtgtgttttcgtaatgtctccccaactttgacctcaatgaattggagagatagagatttctggatctctatgacttgttgcttaaaaggaatagggtacatgaatatccccattttttcagactacattgttctctacctctgtaatcctcaattcctaacactcaacaaatgctagaggactgatgacactccatgtgcaggacactgctctgggaacactgaaacaatcaacaacacactgcacctgccatccaggagctccaaggctrgggttaacactgaggccaactgacccaaagctgtgaccacactttcctgctgcaggcccagcccatcctggttatgaaaaccactcatttttgtccacagacaccaggggataaacaccagcccccacttctgaggctgctcaccaagctgaacttgctgcctgtcagcctaggattggtttattagatttctgtgtgtacatttccctctaccttcatttcttcatctctatcattgaaaactatcccttttgtatccccttccttcttagttgatttcgttcttaaaatttggtgggataaagtgattttcactgcaggattaaattatcagtcctcagtggcatttgattattagcaatgtactcctaaaaattaaagaattactgttctaacgggaaattttcaggtgtaaagtctgttcactgat

SEQ ID NO: 4674 - DNA, 749 bp, Homo sapiens
cttggcaggcgagaccaaccaacccccacttcttcagctgggccttctgctgctgggaccagaagcactgacggcagcggcgaaggctggatggagaaccaggcctgccacctctgggtccagcctgactgcacccttggctatgcccgtcctctcttggaatgtggctttcctacgacctgaaaccgtggaaggagaaggagagggaagggctggrgggaggcagaagcctgaccgtcagatctgccaagaacagtcatcgtttatttccacgagtatttcttggcattaggcagatattgaagaacaggctgtgcaagatttataaacgcggggacagctggagggacgtaagaggggccggatttaccaacagcggtggcacgcagcacacccgccttgcctggagagtgcaggggccacggcctgaggaatgggggctcccgcgggcagacgcaaaactcagaaaatgccatttattttatcattttaataccggaaatgccagaccaatcaacagggaggacagaccagacacaaatgcctgtgctcacaacacggatgggaggatcatcacggctcagggcacacatgcatttccttagaaacaggcagacaaagagagcataaataccacacaacagccaggctcagggggctgcgggccacagagggctgcgcttcaaaggcagtcagaggcattaaatacgggacctacacaatacactccacttcaccatacataattt

SEQ ID NO: 4675 - DNA, 749 bp, Homo sapiens
cttggcaggcgagaccaaccaacccccacttcttcagctgggccttctgctgctgggaccagaagcactgacggcagcggcgaaggctggatggagaaccaggcctgccacctctgggtccagcctgactgcacccttggctatgcccgtcctctcttggaatgtggctttcctacgacctgaaaccgtggaaggagaaggagagggaagggctggggggaggcagaagcctgaccgtcagatctgccaagaacagtcatcgtttatttccacgagtatttcttggcattaggcagatattgaagaacagrctgtgcaagatttataaacgcggggacagctggagggacgtaagaggggccggatttaccaacagcggtggcacgcagcacacccgccttgcctggagagtgcaggggccacggcctgaggaatgggggctcccgcgggcagacgcaaaactcagaaaatgccatttattttatcattttaataccggaaatgccagaccaatcaacagggaggacagaccagacacaaatgcctgtgctcacaacacggatgggaggatcatcacggctcagggcacacatgcatttccttagaaacaggcagacaaagagagcataaataccacacaacagccaggctcagggggctgcgggccacagagggctgcgcttcaaaggcagtcagaggcattaaatacgggacctacacaatacactccacttcaccatacataattt

SEQ ID NO: 4676 - DNA, 2286 bp, Homo sapiens
ccaaactgtggtgtttaatgagtgcaacaactgcattctgaaattgcatcattggcatctcagttccagaagttaatctcatgtagttaagtttaaaacaataacctactgaccacacaaaatttattttctaattttcagcaggccaaaggaagaacaatttggtttccatagcaaatattccaacttcataaggaagtacaaagtgttttgagaagaaatgccctccatggacagagaaatacttttgaagtgcaataaagaacttacattatcactaggtagcttgaattatcgaagagaagttaccacctaacgtcagcatgaagttacagtgtttaccgccattaccytcccataaatgttttcgttgctctgcacagcagatataagctcagatatgcttattttgagtaatctaaaataaacgtgagatagataaaaaacaactatttttccttgtctttttttttttttttttttttttgagacacagtctcactgtgttgcccaagctggagagcagtggagcgatctcggctcaccgcaagctctgcttcccaggttcataccattctcctgcctcagcctcccgagtagctgggactacaggtgcctgccaccacgcctggctaattttttcctatttttagtagagacagggtttcaccatgttagccgggatggtcttgatctcctgacctcatgatcctcccaccttggcctcccaaagtgctgggattacaggcgtgagccaccacacccggccctacttttccttttctatacctgcactccacacacttctgtgaccagggattgaagcgatgtcaaggaatactctgacaccagctgaatgacaccagccgagtgtcccacaattcaattcaattctgatactaactggagttagcacagacctcaggttaagggttcagtcccacaagactgccccccatttcagataccaaatacaagtgccaagttgtcacctatatgtctgactgaccagctgtaaaccagggttcctacgaccccatccttggatttcataatttgctgggatggctcacagacctcagggaaacacatttcccagcttactatgtaataaagaatacaataaaggatacagaagacagccagatgaagagatatgcagggcgaggtgtatgggaggggaagtgcgcttccttgccctctccgggtgggctaccctccacatgttcagcagccctggagctccccaaaccccagagttctgggattcttacaagactttgttacttgaacatcactgatcattaactcaatctccagcctccaggtcttcccagaggatgggggtaggactgaaattcccaagcttctaatctgttctttctagtgaccattctcctcccaggagcttcattagaacaaaagactcccatcacccaggaaattccaagaagttaggagctctgtgctgggaatcagggccagagatcaaatatatatttttattttgtctatatatatattatatgtgtatatatatatacatttcctatatatatatttagaaaaattatatatttttttcttgttcctttacaaacatattctttaccatgccagaggactgattttgacggaaaactcccaggaactcacagctttggtactcttccaaggtcctaataaactaaggtaactattgaaactcaagcactcggaacactgggcaatgtaaacgctctctgctcagcaggcttccctcacacgcaaacaccggttctgagaaatccttactacacctccctgaggggaccacacagacttggaccacatctaaacaagccacaagcttgcttcagttctctttggaatgggtgggattcattggaatacattaatatgcagggaacaggccagaagaaaattaggacggatattcagaaatagctctttgtgtacataaataactgaagagcgatgttggcagctatttaaggatccaagaaattggaagacactaaacaataatatttgcatccattttattttgtaatgtcaacaggatatgtccatgcctgcagaggccacaaatagcaccaaatcactgatgggagaggcccacagtgacctctcaccctgctctttccagctgtgttctgtcagcttctcttccctcatccattcatggggatgacagtgtccaccttgggggaagtgcaagcatatggacaaatacagaccaagtccttgttgtggtggttggcactcagtgctttgcgttgttat

SEQ ID NO: 4677 - DNA, 2286 bp, Homo sapiens
ccaaactgtggtgtttaatgagtgcaacaactgcattctgaaattgcatcattggcatctcagttccagaagttaatctcatgtagttaagtttaaaacaataacctactgaccacacaaaatttattttctaattttcagcaggccaaaggaagaacaatttggtttccatagcaaatattccaacttcataaggaagtacaaagtgttttgagaagaaatgccctccatggacagagaaatacttttgaagtgcaataaagaacttacattatcactaggtagcttgaattatcgaagagaagttaccacctaacgtcagcatgaagttacagtgtttaccgccattaccctcccataaatgttttcgttgctctgcacagcagatataagctcagatatgcttattttgagtaatctaaaataaacgtgagatagataaaaaacaactatttttccttgtctttttttttttttttttttttttgagacacagtctcactgtgttgcccaagctggagagcagtggagcgatctcggctcaccgcaagctctgcttcccaggttcataccattctcctgcctcagcctcccgagtagctgggactacaggtgcctgccaccacgcctggctaattttttcctatttttagtagagacagggtttcaccatgttagccgggatggtcttgatctcctgacctcatgatcctcccaccttggcctcccaaagtgctgggattacaggcgtgagccaccacacccggccctacttttccttttctatacctgcactccacacacttctgtgaccagggattgaagcgatgtcaaggaatactctgacaccagctgaatgacaccagccgagtgtcccacaattcaattcaattctgatactaactggagttagcacagacctcaggttaagggttcagtcccacaagactgccccccatttcagataccaaatacaagtgccaagttgtcacctatatgtctgactgaccagctgtaaaccagggttcctacgaccccatccttggatttcataatttgctgggatggctcacagacctcagggaaacacatttcccagcttactatgtaataaagaatacaataaaggatacagaagacagccagatgaagagatatgcagggcgaggtgtatgggaggggaagtgcgcttccttgccctctccgggtgggctaccctccacatgttcagcagccctggagctccccaaaccccagagttctgggattcttacaagactttgttacttgaacatcactgatcattaactcaatctccagcctccaggtcttcccagaggatgggggtaggactgaaattcccaagcttctaatctgttctttctagtgaccattctcctcccaggagcttcaytagaacaaaagactcccatcacccaggaaattccaagaagttaggagctctgtgctgggaatcagggccagagatcaaatatatatttttattttgtctatatatatattatatgtgtatatatatatacatttcctatatatatatttagaaaaattatatatttttttcttgttcctttacaaacatattctttaccatgccagaggactgattttgacggaaaactcccaggaactcacagctttggtactcttccaaggtcctaataaactaaggtaactattgaaactcaagcactcggaacactgggcaatgtaaacgctctctgctcagcaggcttccctcacacgcaaacaccggttctgagaaatccttactacacctccctgaggggaccacacagacttggaccacatctaaacaagccacaagcttgcttcagttctctttggaatgggtgggattcattggaatacattaatatgcagggaacaggccagaagaaaattaggacggatattcagaaatagctctttgtgtacataaataactgaagagcgatgttggcagctatttaaggatccaagaaattggaagacactaaacaataatatttgcatccattttattttgtaatgtcaacaggatatgtccatgcctgcagaggccacaaatagcaccaaatcactgatgggagaggcccacagtgacctctcaccctgctctttccagctgtgttctgtcagcttctcttccctcatccattcatggggatgacagtgtccaccttgggggaagtgcaagcatatggacaaatacagaccaagtccttgttgtggtggttggcactcagtgctttgcgttgttat

SEQ ID NO: 4678 - DNA, 603 bp, Homo sapiens
acaccacccagaartagctcagtctcccctagtactctgaagtgtgatggaaactagtgacaaataggaaggtctacatcaaagaagtatccagcctttagttcttctcatctagatgagtaaatatagaaaacaactttctactaaagaaagagcaaaagccaccacagcaggaactccttgtccagtgtgtttggaaaaaccaatgctggcctgggcattgaatgccagagctctggctctgtttctgacaataaccaggtttgtgaccttgaataagttgctcccctcctggaactctgtaaaatgtatagcttggggagagaatgtggaacaagatggcagaatagaagaatccgccaattgtctcccctacaaggacaccaagttaacaaccatctacacagaagaaacaccttcataagaaccaaaaatcactcatagtatctggttttaaatctgtatcacagaaaaggacaccaatgagatagaaaaagcagtcctcaatcaccaatgccactctcgccaacccctgacagtggcggcatggtactgagagtgtctctggttgctggaggagaaaggacaccacaattgtgaggc

SEQ ID NO: 4679 - DNA, 603 bp, Homo sapiens
acaccacccagaaatagctcagtctcccctagtactctgaagtgtgatggaaactagtgacaaataggaaggtctacatcaaagaagtatccagcctttagttcttctcatctagatgagtaaatatagaaaacaactttctactaaagaaagagcaaaagccaccacagcaggaactccttgtccagtgtgtttggaaaaaccaatgctggcctgggcattgaatgccagagctctggctctgtttctgacaataaccagstttgtgaccttgaataagttgctcccctcctggaactctgtaaaatgtatagcttggggagagaatgtggaacaagatggcagaatagaagaatccgccaattgtctcccctacaaggacaccaagttaacaaccatctacacagaagaaacaccttcataagaaccaaaaatcactcatagtatctggttttaaatctgtatcacagaaaaggacaccaatgagatagaaaaagcagtcctcaatcaccaatgccactctcgccaacccctgacagtggcggcatggtactgagagtgtctctggttgctggaggagaaaggacaccacaattgtgaggc

SEQ ID NO: 4680 - DNA, 758 bp, Homo sapiens
gcctggccaacatgatgaaactctgtctctaccaaaaatacgaaaattagccggctatggtggcacatgcctgtaatcccagctacttgggaggctgaggcaggagaattgcttgaacccaggaggcagaggttgcagtgagctgagatcatgccactgcactccagcctgggtgacagagtgagactgtctcaaacataaaataaaataaaataaaataacataaaataacataaaatgtcatgaaatggctgaggaatagatgggtttttatgaaaagttcttactcttcatagtttaaaaaagtctgtattttaatagttgcttgtataaaagttacatgatagtaattgtggctcctagacctaaatatggaaagaacccatcattctgtacttggtacaagtataggagatggagacagatgtaactgtaagggaactaaaggggtaagagtaagtttgaaaagcagattcagtagtatgtgatgtgccaaagayagttttggaactgagacccggagtcacagcaattctcattagtcaattctttaaaaaaaaaaaaaaaatccttcttcacaatgttctccttaaagctttacaaagtgctttcatgcatcagctcacgtgtgtctcactaaagcctgtaatgcaggcagagggggtattatgatctctatctggcaaataaagaaactgagtttcagagaggctcaaaggcccaagacactataaagggagaggcaaaacacgaaccta

SEQ ID NO: 4681 - DNA, 678 bp, Homo sapiens
gtttttgctttttggtttttttttattttttattttttgtaatttcaacttttattttagattcagggggtacatgtgtagttttgttacctgggtatatcgcatgatgctgaggtttggtgtacaattgatcccattaccccgatagtgagcatagtacccaacagttagtttttcaacccagtcccactcactcctcgtagtagtacccagtgtctattgttgccatctgtctgtccacgagtaccttgtttagctcccacttacataagtgagaacatggagtctttctgttcctgcattamttctcttaggataatggcctccagctgtatccatgttgccgcaaagaacatgatttcatcatttttgtggctgtgtagcattccatggtgtatatgtaccacatctcctttatctaatccactgatggacattatgaacacctaggttgattccatgtctttgctattgtgaatagtgctgcagtgaacataccagtgcatgtgtctttttggtagagagatttttttctcctgtgtatatacccagtaatgggattatcagatcaaattgtagttctatattctttgagaaatctccaaactgctttccacagtgccagcccacattttcaagacttatacgtgtcaggtgttagggcaccattgaggaagg

SEQ ID NO: 4682 - DNA, 678 bp, Homo sapiens
gtttttgctttttggtttttttttattttttattttttgtaatttcaacttttattttagattcagggggtacatgtgtagttttgttacctgggtatatcgcatgatgctgaggtttggtgtacaattgatcccattaccccgatagtgagcatagtacccaacagttagtttttcaacccagtcccactcactcctcgtagtagtacccagtgtctattgttgccatctgtctgtccacgagtaccttgtttagctcccacttacataagtgagaacatggagtctttctgttcctgcattacttctcttaggataatggcctccagctgtatccatgttgcygcaaagaacatgatttcatcatttttgtggctgtgtagcattccatggtgtatatgtaccacatctcctttatctaatccactgatggacattatgaacacctaggttgattccatgtctttgctattgtgaatagtgctgcagtgaacataccagtgcatgtgtctttttggtagagagatttttttctcctgtgtatatacccagtaatgggattatcagatcaaattgtagttctatattctttgagaaatctccaaactgctttccacagtgccagcccacattttcaagacttatacgtgtcaggtgttagggcaccattgaggaagg

SEQ ID NO: 4683 - DNA, 678 bp, Homo sapiens
gtttttgctttttggtttttttttattttttattttttgtaatttcaacttttattttagattcagggggtacatgtgtagttttgttacctgggtatatcgcatgatgctgaggtttggtgtacaattgatcccattaccccgatagtgagcatagtacccaacagttagtttttcaacccagtcccactcactcctcgtagtagtacccagtgtctattgttgccatctgtctgtccacgagtaccttgtttagctcccacttacataagtgagaacatggagtctttctgttcctgcattacttctcttaggataatggcctccagctgtatccatgttgccgcaaagaacatgatttcatcatttttgtggctgtgtagcattccatggtgtatatgtaccacatctcctttatctaatccactgatggacattatgaacacctaggttgattccatgtctttgctattgtgaatagtgctgcagtgaacataccagtgcatgtgtctttttggtagaragatttttttctcctgtgtatatacccagtaatgggattatcagatcaaattgtagttctatattctttgagaaatctccaaactgctttccacagtgccagcccacattttcaagacttatacgtgtcaggtgttagggcaccattgaggaagg

SEQ ID NO: 4684 - DNA, 794 bp, Homo sapiens
tcccctctcagcctcccaagtagctgggactacaggcttcagccactgcaactgtcagttccgactttccctgcctcagccttgttccctcttacctcacaaagaaaagacggctgccagcaactctagaaaaaagtaagtacagttcattgagtggcaaaatgatttcttcatccagaatttacaggccaaatgttagaagtgttctggttggctgacttgggtcacatgtttatccctggcccaatcactgggacaaagggaatcatgtagtatgattggttaatggctgtcccctgagaaccatatgaagtacaagatgagtaattattcaaatgaagttgtgggctttctttccagaggaatgaagaaaaacatgcaggatagatcaacttctgatatgaccatcaaagtcaggaaaggttttgcacagtgattayaacaaaagtgttaaatgaatgtctaaagaagtccaccatgatcacgcctccacctccttgcctattttttttctttttctttctttctttctatttatttatttatttatttatttatttatttatttatttattgagacagagtctcactctgtcatccaggctggagtgcagtggcacgaactcagctcactgcagcctccgactcccaggttcaagtgattctcctgcctcagcctcccgagtagctggtattacaggcgcctgccatgaagcccagctaatttttgtatttttagtagagacggggtttcaccaggttggccaggctggtctcgaactcctgacctcagg

SEQ ID NO: 4685 - DNA, 807 bp, Homo sapiens
ctgaggtcttagagtggcaaggttctcttcgattttgatattaatgtggaatgactttgtagagcagagaaagattctgggccttacagaaagacatttaagaagaaatcctaagggccgggtgtggtggctcatgcctgtaatcccagctctatgggargccgagggggtggatcacgaggtcaggagttcaagaccagcctgaccaacatggtgaagccccatctctactaaaaaaaaaaaaaaatagaacagttagccagccgtggtggcattcacttgtaatcccagctacccgggaggctgaggagaagtgcttgaacccaggaggcggaggtgagctgagattgtgccactgcactctagcctgggtgacagagtgagactctgtcaaaaaaaaaaaaaaaaaaaaaaaaaaaaagaagaagaagtcctagagaatcaagatttctgatgtccatgatgcatctctgtcaccagcaaaagatgaggagagatgggggctgggcctgaaaacttcatttggagatgcctcatctcatgtcccagacagaggccttctctcaaagcaccacttctgcagcgtgggcactgcagaacctttgaagtcacagattcttccaggccttagacatcattctgtccttgctaaggcacctgagcatgtgattcagcctctctgcttttgcttttctttcattctcttctactcagcattttgtagcaagttaaagcttgattttcagtgccattgtgttttttttaagggcagaaattttgatttcccagtccctctgaacttctttc

SEQ ID NO: 4686 - DNA, 807 bp, Homo sapiens
ctgaggtcttagagtggcaaggttctcttcgattttgatattaatgtggaatgactttgtagagcagagaaagattctgggccttacagaaagacatttaagaagaaatcctaagggccgggtgtggtggctcatgcctgtaatcccagctctatgggaagccgagggggtggatcacgaggtcaggagttcaagaccagcctgaccaacatggtgaagccccatctctactaaaaaaaaaaaaaaatagaacagttakccagccgtggtggcattcacttgtaatcccagctacccgggaggctgaggagaagtgcttgaacccaggaggcggaggtgagctgagattgtgccactgcactctagcctgggtgacagagtgagactctgtcaaaaaaaaaaaaaaaaaaaaaaaaaaaaagaagaagaagtcctagagaatcaagatttctgatgtccatgatgcatctctgtcaccagcaaaagatgaggagagatgggggctgggcctgaaaacttcatttggagatgcctcatctcatgtcccagacagaggccttctctcaaagcaccacttctgcagcgtgggcactgcagaacctttgaagtcacagattcttccaggccttagacatcattctgtccttgctaaggcacctgagcatgtgattcagcctctctgcttttgcttttctttcattctcttctactcagcattttgtagcaagttaaagcttgattttcagtgccattgtgttttttttaagggcagaaattttgatttcccagtccctctgaacttctttc

SEQ ID NO: 4687 - DNA, 775 bp, Homo sapiens
catacagctgcatgtttcaagaaaatgatgtacagagtggtcagcattccggttcacactcagagcggtgctcccagcagagggtcattttacagagcaggagactacatccaaaatgagttcaactcctgaaactatcaagctttttccttctccttttcagggcttagagtcctggctgggctgcaactttggcagctgtggcaaagacacttaccttgacctacccagcagccagggcactggaccctggagttaattcgaaagtattccttagcctttggttccctgtagggcaaccctatcacctcctctggtggggggggggcacctcctctaaggactccaccttacaacctattctgcccttgaaaatctcaaccatattttgccctttccctagccttctcttgccccagcccacctcttcccaagtctctccaacctccaatttccaaagccctgtcaactgggctttcaacacttgtccagtatgagcagtggtggactcagcagccatggaggatgtggatctgatttagattctctcattagcagcctcctcttgtcctcatccctaggagcttggatagctgtattattwttttttttttttacaaagctggggacagataggcccagctgccatttacagcagcccctccactggcacaggggcagcagtgggacagggctcacattgggctgtgccatcccctgacccacttcttccatgtcggcacagattagcttgggcagccatgtgggggatgga

SEQ ID NO: 4688 - DNA, 767 bp, Homo sapiens
aaaaaaaaagaaaagaaatgcaggttctcagacctcgcccaaatctgctgagtaggaaactctagaggcagggtccagccatctgtgctgtaaggagccccccaggttcttctgaggcacactcaggtttgagaagccctgctttatccaacccagcaaacactaacaagatgctactttagtcccgactcaagaaaatttggaacctgaccatctttgttgtccctaacccagcctgcctgtgatggatgtaaacaggccacccttctctctcatctccagggactacctcagtggtcccatcactttttccctgtctttccccacagcaataagggagtgaacaagagtgttctgtgasctggacagaacaggaatgtcaacgtttcctccagggggttcgcctagggcctgtttgcacctgcaggtctgaccctgtggagctaaaccccctacaagcttcataactaatgttcccaaagcagggagcatctggccacgaccccagagagaagggatgaggacagaggtaaaaacaatctcaggacccagcctcggatgttatgtttcttcgctcctcctgcagtaatagagcattatttccctgctggcagatgcagaatcacaagctgattgtgcactgggctggagtgcatatgccacccatttgtcttgcagtctggctgggcgctctgccctgctcatgggaagccttctctcattgctgaatgccaagcaggctggataatcacccctcaacggggaga

SEQ ID NO: 4689 - DNA, 767 bp, Homo sapiens
aaaaaaaaagaaaagaaatgcaggttctcagacctcgcccaaatctgctgagtaggaaactctagaggcagggtccagccatctgtgctgtaaggagccccccaggttcttctgaggcacactcaggtttgagaagccctgctttatccaacccagcaaacactaacaagatgctactttagtcccgactcaagaaaatttggaacctgaccatctttgttgtccctaacccagcctgcctgtgatggatgtaaacaggccacccttctctctcatctccagggactacctcagtggtcccatcactttttccctgtctttccccacagcaataagggagtgaacaagagtgttctgtgagctggacagaacaggaatgtcaacgtttcctccagggggttcgcctagggcctgtttgcacctgcaggtctgaccctgtggarctaaaccccctacaagcttcataactaatgttcccaaagcagggagcatctggccacgaccccagagagaagggatgaggacagaggtaaaaacaatctcaggacccagcctcggatgttatgtttcttcgctcctcctgcagtaatagagcattatttccctgctggcagatgcagaatcacaagctgattgtgcactgggctggagtgcatatgccacccatttgtcttgcagtctggctgggcgctctgccctgctcatgggaagccttctctcattgctgaatgccaagcaggctggataatcacccctcaacggggaga

SEQ ID NO: 4690 - DNA, 767 bp, Homo sapiens
aaaaaaaaagaaaagaaatgcaggttctcagacctcgcccaaatctgctgagtaggaaactctagaggcagggtccagccatctgtgctgtaaggagccccccaggttcttctgaggcacactcaggtttgagaagccctgctttatccaacccagcaaacactaacaagatgctactttagtcccgactcaagaaaatttggaacctgaccatctttgttgtccctaacccagcctgcctgtgatggatgtaaacaggccacccttctctctcatctccagggactacctcagtggtcccatcactttttccctgtctttccccacagcaataagggagtgaacaagagtgttctgtgagctggacagaacaggaatgtcaacgtttcctccagggggttcgcctagggcctgtttgcacctgcaggtctgaccctgtggagctaaaccccctacaagcttcataactaatgttcccaaagcagggagcatctggccaygaccccagagagaagggatgaggacagaggtaaaaacaatctcaggacccagcctcggatgttatgtttcttcgctcctcctgcagtaatagagcattatttccctgctggcagatgcagaatcacaagctgattgtgcactgggctggagtgcatatgccacccatttgtcttgcagtctggctgggcgctctgccctgctcatgggaagccttctctcattgctgaatgccaagcaggctggataatcacccctcaacggggaga

SEQ ID NO: 4691 - DNA, 767 bp, Homo sapiens
aaaaaaaaagaaaagaaatgcaggttctcagacctcgcccaaatctgctgagtaggaaactctagaggcagggtccagccatctgtgctgtaaggagccccccaggttcttctgaggcacactcaggtttgagaagccctgctttatccaacccagcaaacactaacaagatgctactttagtcccgactcaagaaaatttggaacctgaccatctttgttgtccctaacccagcctgcctgtgatggatgtaaacaggccacccttctctctcatctccagggactacctcagtggtcccatcactttttccctgtctttccccacagcaataagggagtgaacaagagtgttctgtgagctggacagaacaggaatgtcaacgtttcctccagggggttcgcctagggcctgtttgcacctgcaggtctgaccctgtggagctaaaccccctacaagcttcataactaatgttcccaaagcagggagcatctggccacgaccccagagagaagggatgaggacagaggtaaaaacaatctcaggacccagcctcggatgttatgtttcttcgctcctcctgcagtaatagagcattatttccctgctggcagatgcagaatcacaagctgattgtgcactgggctggagtgcatatgccacccatttgtcttgcagtctggctgggcgctctgccctgctcatgggaagccttctctcattgctgaatgccaagcaggctggataatcacccctcaayggggaga

SEQ ID NO: 4692 - DNA, 678 bp, Homo sapiens
aattcgcaaatgttatttctattgttttctactctattcttttctaatgattcaggagcactggtaaatacaaagagaaatgttattttgtaggctactgcaaatttcttcttscttaccatttaatataacttggaaactaagtacatttccaaaacttcagtcctgctttactgcccttataagcttgatttttggactttaagaatccttggtattatattaccaatcactccatcttacaacgacatcattttagagataagaggtatatttaagaatgcctctttcagtacttttttccctcaagaagaaactggggctacgagagtttaatgctggttagcggcagagctgagacccaaacccaggctttaccccttttggctatgagccatggcaccaagctctgggtacttcactcaagattactgtggtgatgagtcatatattcaatttcttgaagttttttcttggttgtatgtatgaatgtacaaaagttatgagccatatcagtataattttcttgttacttgaatgcaatttctgacttatctccagaggtgaagagcctaatgatccctccacgccctatgtgattcctgccctccagcaaaaccaacctaagccttcaatcatcactgcataattctcccatttctgctaaagagataactc

SEQ ID NO: 4693 - DNA, 473 bp, Homo sapiens
gggttttttcatgttcaataaaattacaagagtcacatttgtcaatctacaaaattattttttaaagagctcttttttggccaggcacagtggctcatgcctgtaatcccaacactttcagagaccaaggcacggggattacttgagcccaggagttcatgaccagcctgggcaacacagtgagacccagtctctacaaaaacaaaacaaaaaattagctgggaatggttgtgcatgcctgtggtcccagcactcaggagtttgaggtgggaggatcacttgagcccacgaggttgatcacgccactgcattccggtctgggaaacagggtgagactctctttaaaaagctaattttttactctattgatagagaccaacttyaggtttaaaacagctcttcaacttactacattaaggcagctaataatcaacatcaaaaatcagacaccaccaaaagagttacaatggagg

SEQ ID NO: 4694 - DNA, 591 bp, Homo sapiens
catttttaggacatttcatttaaaactttcttgattgttggactcagtatgtccatttactctatcagaaacagaaatgcaatttgtcaggggaaattttaagaagagggcaagccaccgttggtttgttactctaggaaagtaaaatcacattttggggatgatatcatactgaatagtatayacaaactgaatgcttttgagtcagaaataaccactcataaataattgtaagaccaaaatatcagtcttttctgattaggtaattattcattagtttagaatacctctatccatttttttaaaaaatatactcagttcttgactcatagtatagcatgtaaccacacccaatgatttgatcacttaaagaacaacatgtcttttggaaccataataaacatcatttctccaaaatttccagtctgattgattgttgagatttagtcatatatggtaaacatgattacctgcaggcacatgcagatatcaataagtagaattagttgacttgaaaagttgaataatatgctagaaaaaaaaatcatctgggttagaagaatcaagacatttttagagttgggagagaag

SEQ ID NO: 4695 - DNA, 550 bp, Homo sapiens
aatactggccttagactcgattccacagcaaaggttgcagccacccagcatctgagctgctgggcaccagggcaagtgatggccagtgacaggaaggagctatgcacgcatatagcctctgttgtgtgcactctttaaaagaagagataaggagaaaaaaatatttmaatgatatcatttaagtttcacaataaaccattgactgaaataagacatatgaattctcttttcttccaatcggtccaaattttcacatgttccttagcttctttctgcattgatgtgatgctaagatgtaaagacttttagttgttgttgcttctctgacactgctcctcgatataagcgcaaaacttcaccttttgatcatggggtctttaaaaaaaggcccagcaatctcccctaaagctggagacaaaactgggtttcctggacttactgagatgtgatgtgtcagtttacaacataaggcctttctaatgaattttaaagaaaaattttgctcatgtgaaattttcactttatgtgctgaccttagagcttgaacatt

SEQ ID NO: 4696 - DNA, 695 bp, Homo sapiens
acccattatttttagtgaaagggacaaagggacccacctccttctctttttgctgcccatgtgccacacacatgtaaatgacatgtgtacctattgttgcttgtccttgatgatgagtacacttgtacattgatatatttattagtgttttgcttttcactaatccagcatagttgtgaccccacccctgagacctaaaggaaggagacacctcatagggggtctcaggaatctctgatgaaccttaggactaattataattctttcatttattataacttcatgccaggtattttatctgcctcacctctaatcctctcaataaccttgcatgtttttattcatcccrtattacaaatgagaaagctaaggtttgggtgcttaagaaattttccccaagttttttttgtggtggagccagcttggagctagggcaatagacttcagagtctcagctccatcctctccatggttcagaaagttctctagttctgtaagagacagccaacatcccccaagggcttgtgctcattggaatggctctcgggtccactcctccctttgtatccccaggtcacctcactagagcagacctccatcagtcagtgtttacccaccttccagagcctccttcctggactcttgcccccggattccccacccatagcactctcacactgccatcgcccaactca

SEQ ID NO: 4697 - DNA, 569 bp, Homo sapiens
cccaatttattcgtctctgctcgcccatttttaattaagcatcgcgtagctgcttttcgcatgttcatttcgtttggttgtttgttgtggtgtttttttggggggggggawtttttttttttcctacacttaatcttaaatcacacgtagaccaagtaacaaacacgtgtgaagttattcccgggagcttcctgctgcgcacgcggcgcgcaccaggagaaaagctttgcgggaccgccagctccgctaggttcctggctgcatgcggtgcccgggaggcccggactttcaagaagccaagattgttagagaaggatgcgggcggctccaaacacgggcacattccgggaaaggagtgtgcaagtgcacacaaacgcgttcgtgtacctgggacagtgtggattggtgggtgtgcgaggacccctgtttgtgagatggaggcgggtgcgggatttacacgtgctcccgtacacgttccccggggtctgggagatgcgagccgctcacaccccaggagtgcgcagatccatctttgccgagggatctctttaaatattcagtgagaaata

SEQ ID NO: 4698 - DNA, 709 bp, Homo sapiens
ctcttagtgtgtacatttttctgttgacagagtatttctctggagattgctcccagtaatgtgagatgaataattactttctggcttttctctccatacgcaggccctccaatgggcaatcagggagggataccttctccccatctgaaaaggacatttatagggtaaagggtgtcagatacaatacttaccattgcaatgagagtggacctaacaattctaaccctgaaaggagctatccgccactgcctggcttgcttgaggccattataagctaaatatggttaataaaaaaagagtaagtaaggcatccttgccttggaagaggggagacagcccagggctgcagagartgaacacgttattactagacaggaggaatggatggttcctgttgccttcactgtctgtcacatgatgagaatagacatttaggccacttgctttgtggacatttgggatatgagttgagacagattcagctattaagcttctctccccctcctcttttttttctctctctctctctgtctctctggcctgccctccccatatctcaggtacacatgggcactcacatgtggaatagcacccctgcacgacggggtcggcggctctctgtggatggccccatgacatttctaggaggcaatcccgtcaagttcccagaaatgttccagaaggatttggcggcaagatcaggaagtgg

SEQ ID NO: 4699 - DNA, 772 bp, Homo sapiens
cagtgagccgagatcatgccactgcaccactccagccttggtgacagagccagactccatctcaaaaacaacaacaataacaacaacaacaaactcaggttcatctccataaagccatactcaggtcctccagtgcaaaatggagttctttgctcttctgataattggagaatttgtcaccactgtcattcatttttggtgcttcatcatatattgcttcttctctgtctcattcattcactctttcaaagttcattaaatacttctgcatgtaaggctctcttcctcaactatttatacattgaatgtttctggaggttgagttcaatgacagtgcttttgtgtttaccgtagcacaatatttcttaggctccttggaggtacttgtgcagttttttgaatgattaataaataagtaaatgaatcaactcttraggtagcagaaaatgaacaagaggccatggtgataatactggattgcttatctgagcttccttcttcttcttctcttcttcctaaggcccaaagtggcagatattctgggcctgtagccaggtttgtgggtcatagcatttcacatatatctgagtatgagcgtgttgggggaaagaaggcacccctccttcctaatctcaaatccaacccacacttggcacttcggcttgaagattagttatcattctaattcattccaacacagctctttagatcttggtggcatgaaaaagtcaatgcacagaggcaggcctttgactcttggtgtcagaaagtg

SEQ ID NO: 4700 - DNA, 772 bp, Homo sapiens
cagtgagccgagatcatgccactgcaccactccagccttggtgacagagccagactccatctcaaaaacaacaacaataacaacaacaacaaactcaggttcatctccataaagccatactcaggtcctccagtgcaaaatggagttctttgctcttctgataattggagaatttgtcaccactgtcattcatttttggtgcttcatcatatattgcttcttctctgtctcattcattcactctttcaaagttcattaaatacttctgcatgtaaggctctcttcctcaactatttatacattgaatgtttctggaggttgagttcaatgacagtgcttttgtgtttaccgtagcacaatatttcttaggctccttggaggtacttgtgcagttttttgaatgattaataaataagtaaatgaatcaactcttgwggtagcagaaaatgaacaagaggccatggtgataatactggattgcttatctgagcttccttcttcttcttctcttcttcctaaggcccaaagtggcagatattctgggcctgtagccaggtttgtgggtcatagcatttcacatatatctgagtatgagcgtgttgggggaaagaaggcacccctccttcctaatctcaaatccaacccacacttggcacttcggcttgaagattagttatcattctaattcattccaacacagctctttagatcttggtggcatgaaaaagtcaatgcacagaggcaggcctttgactcttggtgtcagaaagtg

SEQ ID NO: 4701 - DNA, 772 bp, Homo sapiens
cagtgagccgagatcatgccactgcaccactccagccttggtgacagagccagactccatctcaaaaacaacaacaataacaacaacaacaaactcaggttcatctccataaagccatactcaggtcctccagtgcaaaatggagttctttgctcttctgataattggagaatttgtcaccactgtcattcatttttggtgcttcatcatatattgcttcttctctgtctcattcattcactctttcaaagttcattaaatacttctgcatgtaaggctctcttcctcaactatttatacattgaatgtttctggaggttgagttcaatgacagtgcttttgtgtttaccgtagcacaatatttcttaggctccttggaggtacttgtgcagttttttgaatgattaataaataagtaaatgaatcaactcttgaggtagcagaaaatgaacaagaggccatgktgataatactggattgcttatctgagcttccttcttcttcttctcttcttcctaaggcccaaagtggcagatattctgggcctgtagccaggtttgtgggtcatagcatttcacatatatctgagtatgagcgtgttgggggaaagaaggcacccctccttcctaatctcaaatccaacccacacttggcacttcggcttgaagattagttatcattctaattcattccaacacagctctttagatcttggtggcatgaaaaagtcaatgcacagaggcaggcctttgactcttggtgtcagaaagtg

SEQ ID NO: 4702 - DNA, 3076 bp, Homo sapiens
tggaggacttcccagaggaggtggcatgaacctcttaccacacaataacagagtgggggagagggtcttctggtaaaggtatggtatgtacaagagccctgaaaatttaaaaggaatttttagagatcaaaggacagcacctgtcccatagtgacctctcagctaatattagctcctaggaagataactgggacaaaggaggggagcaggagaccagcccagagaggtggacggggccaaaccrtaacatttgatggatttcagattttgaaaaactaaacaaagcctcctgttggaagggcacaagactgttaaaggcatctaaattcagggagagggaaggatttgtgtgggactatggcagagttgtgaactcagggagttagtgagagcagcaggagtagggaagtatctttacgtcccaaattggaacatgggctgttctggagaggtccacttaagatgctgtcacagcatcattggatctagcaccttgtactcaaaagaagcatggtcagttgtttacattgacagcatctggggcttgttagaaatgcagaatctcatctcatctaagatctactgactagaaatctgcctttttgatagatcctcaagtagcttccatcagcccattgcagattaagaagcacttccccagtacaggggcaagagagcagactttatcaagggccctgttttattcccattcaagaagtgaggcccaatggaaggcttttacattgagggaaagtggcaactgagagcacaagtctgcagttgcttgaataagcagaaagggagcctaagatgccaagattggatgccacatgttctggtgcaatgaacagaagaaatagtatgtaggcagagactgctgttaggccaccacaatgaggatatggcttctccagggacttcctgagcaatcatctgtggtgcacacatccctggcagcctcagaagatgctgaagaacctataccatagagcaaggaagaggcacttagcagacgactcccagacaaaaagggtgatggtagaaatcattgttcctcactgcttccccctacttagcgagcagtcccttcaggtgagagttagctagttaaatggctttaagacttaatgaatgaggaatattagggaaatatttcagactaagctaacatggacaatgcatgagcaaaattaaattattccattcagattactgcattccttgatgacagcattgttttttattacacctgagtacttctagagttgataatatttagaaagctttttcggcctgaagaagtaaacactttaacactgtaagcttctggatacccttggcttttgtcaaaaaaaacacagttggatgggtagacaatacacagtacatgaagaatgctgtcctaggcactgtggggagatgcaaaagaagtcaatgacaggagaaggaaacaggccattaaagcaaaatggacaaccgcttatggtgactcaaaatttctatggggcatcactaagaaacttgtaagatgaatgattcatgttgtcaaagagagtttggttaaaaaaaatcagactcaacagtgacttgcttcagttagagtctatctgcatctcaaaggacttttaagaatctaactaaccatcttcttatgacagcagggtcacctcggagtacagcagcggggtaagagagcagccaccgtaagaataaatcagactgcataatgctgcatggggtatggaacgagggtggatttgagccaaaccactgagggaagtttatcagatctttgagtaagtagaaaacaggctgcagtttaatgaaccacactgagaagcactttccctggtgatgcagtttctcttccatgacctaaaatcatccaaacctcctcaagctctaaaactggcagaaatttgaacaaaggcttgattgtctggactgcttattgctactattctaaaataaagattttaaaccttaggatagctggccggaatgcatcgtaagctgtgtgaacccaaggtgctcgaaggattaacgatccctgaggaaatatgtttgtgcgcagccctggatcctggggccttggcacctgctccatggtgcctctgtgcctggcagtggatcaaatgcttgccctggcacatgccctcagcatttcagtttgtgaaggaaagggaggcagggtgcctgtctctgtttttcatgcaggcaggactaagttggatacaagagatccagcatcataattgtttataaaagcatacaatagaagtagaagtgacttgagccaggtattctcacttctgtctccaagcctgcattatagtgatacatttctagtggcacttctatgcctccagcttataccacttctttgatcttgcccatgaagcacatcagagcgtgtgccctggagtcagcttctgcctgtcattagcagtgagaccttgagaaaactagtaatctgtctgagcctcagtttcctgacttgtaaaatggtgataatttcaggctcacaggctattgtgaggattaaatgacatcacatatgtggggtgcctagcatggttttctgacccataatatatgctcgataaatgttagtaaccttatctacgtcccccatatgatccacaggcttttgtgataagatggagaccaggaggaggagagaggcatctgagtttgcaagcttggcaactaggtgaatggagatgcttttaactgagaagggaagtacaaaaggaggaggaggcttggggacaagatggtgtttggtttggcacagactgagactgagaagatgggatgtccacagacactcaaaaagctgacttgacaacctggggcagtgggcagtgttaattgaagccatgaatgagggtgtgtagagtatggagaaagggccaaggaaaagccccaggggacaccagcattgaagggccagtgggggaaaagtgaagcaaattagttggagaagtaggagcagaactagctgatggcagcaccatggacacttgggaatttcttttttattttattttgttttattgatatataatagttg

SEQ ID NO: 4703 - DNA, 1427 bp, Homo sapiens
tgtcaaccttgatctgagtggtggttacacaggtgttcattttatgataatacattgagctgtacatattttgggggggtgcttttctgtgctttgcaagtttgtgctttgcaatttttgtgcatattttgtgctttgcaattttggaaaattgtttttaaaacacctaccatatacacatatctgacatactctttgttccttggttgtcatatttaagaaagatgatgaaactaacttgcctctacccaaaagtaaccataaggttccttcctgattttcctcccaggtaagaatggcacacagattccagagtgactctccctccagcaccgcggccacatgaagccacagggaccaggagggccagcagaagccaaaatccagcagcctctgtgtcctcctaatgactttgaccttccttctagaagacacagaaagccaatgaaacatgccaaacaggggtggaaactcaagtcagagtagcactttgaaaagaactttccacttttgttggggactccaaagacagggactccaaacattttaaatgttctcatttctttatttttaaataggacaaatgacatgctctttatttttaaagaataaataaagaacaaatgacaccaatgtggggtagcagggagttggaaaaccaggcacatagtaggctctcaaaaaatatttcttgtctgaaacaaagaagagaccccattgctttctaaatcattctttattcagagtattccctaccaggaagagtgttcttctgtatctgttaggctcggtggcctgggatccttaagagaagttggagagagaaatctatgagtgcctgtgaaaccaggtgcaagagcagaaaaatcagggtcaccttgtttagtaaaagtcgggggaggctttgggttgatccgccaagtgccaagtgttcttgtgtacctgcctggcytcttgactgctttgatgtgtgtttttctctctgcaggcacacaaaattccctctgctctcttttcagcttttctaaccttacttggaaacagctgctctaattttaatacccatctgctcccgggaataggacaaaaatcagtggctctgcagataactctaaagtctttgggtatccaacttcatttatctggagataagccttctatatacagcaggcttcatatagacagctacactaggaacaaaactaaaaaggaaaatgaggaaaaattcaagcaaaagagcaggtggccctagatatccagtaccaattgttttaaaatcaacaagagccaaagacccacaaattgcacgtgtgttcagattgtctcattgcaagattaaaaagaggatctttgattggctagcaaatctgctcaaaggccagggttgttttatttttttttctccatgaggaagctgagaggacctt

SEQ ID NO: 4704 - DNA, 1427 bp, Homo sapiens
tgtcaaccttgatctgagtggtggttacacaggtgttcattttatgataatacattgagctgtacatattttgggggggtgcttttctgtgctttgcaagtttgtgctttgcaatttttgtgcatattttgtgctttgcaattttggaaaattgtttttaaaacacctaccatatacacatatctgacatactctttgttccttggttgtcatatttaagaaagatgatgaaactaacttgcctctacccaaaagtaaccataaggttccttcctgattttcctcccaggtaagaatggcacacagattccagagtgactctccctccagcaccgcggccacatgaagccacagggaccaggagggccagcagaagccaaaatccagcagcctctgtgtcctcctaatgactttgaccttccttctagaagacacagaaagccaatgaaacatgccaaacaggggtggaaactcaagtcagagtagcactttgaaaagaactttccacttttgttggggactccaaagacagggactccaaacattttaaatgttctcatttctttatttttaaataggacaaatgacatgctctttatttttaaagaataaataaagaacaaatgacaccaatgtggggtagcagggagttggaaaaccaggcacatagtaggctctcaaaaaatatttcttgtctgaaacaaagaagagaccccattgctttctaaatcattctttattcagagtattccctaccaggaagagtgttcttctgtatctgttaggctcggtggcctgggatccttaagagaagttggagagagaaatctatgagtgcctgtgaaaccaggtgcaagagcagaaaaatcagggtcaccttgtttagtaaaagtcgggggaggctttgggttgatccgccaagtgccaagtgttcttgtgtacctgcctggcttcttgactgctttgatgtgtgtttttctctctgcaggcacacaaaattccctctgctctcttttcagcttttctaaccttacttggaaacagctgctctaattttaatacccatctgctcccgggaataggacaaaaatcagtggctctgcagataactctaaagtcttygggtatccaacttcatttatctggagataagccttctatatacagcaggcttcatatagacagctacactaggaacaaaactaaaaaggaaaatgaggaaaaattcaagcaaaagagcaggtggccctagatatccagtaccaattgttttaaaatcaacaagagccaaagacccacaaattgcacgtgtgttcagattgtctcattgcaagattaaaaagaggatctttgattggctagcaaatctgctcaaaggccagggttgttttatttttttttctccatgaggaagctgagaggacctt

SEQ ID NO: 4705 - DNA, 808 bp, Homo sapiens
agggcagaaacccaccaccaccttaattctgcagctctgtggacactatatataagctatacagggaagcagaagaaacctgtataattgtatctaatgaagcagtatggcaaaggtactgtagctttgaagacactctacagtactgatcattcaaattatctcttttaaatgcaaatatttagcatttccaattaaggcataacattagaaggctagaagaacccactgggaaaactgtcagaaaagtatatccataatggcttttcaagctaacaatttttgaacacagagcatcctctgaactgttttagaatgttgatgaaatcaatcccatttaacaatgcttgccatgttgaactatgtgaattgttagtgtataaagattatagacaccatamcagcctgggcaacatggcgaaaccccatctctacaaaaaaaaaatgcaaaaactagctgggcatggtggcacacacctgcagtcccagctacttgaggggctgaggagggaggattgcttgaacctaggaggcggaggttgcagtgagccaagatagcaccactgcactccagcctgggtgatggagcaagaccctgtctcaaaaacaaagatcatagacacgtgacttaccttgcatatgcaaatgccataggcatccatacaacagaaacttcgatggaaaatttcaccattcaagattttaattgaactgatggccaggcccttctccggtggaaaaaaaattagataaaattaaaaatgctttcatttggaggtaagctttaaaaaggggtggaagaaaaggg

SEQ ID NO: 4706 - DNA, 808 bp, Homo sapiens
agggcagaaacccaccaccaccttaattctgcagctctgtggacactatatataagctatacagggaagcagaagaaacctgtataattgtatctaatgaagcagtatggcaaaggtactgtagctttgaagacactctacagtactgatcattcaaattatctcttttaaatgcaaatatttagcatttccaattaaggcataacattagaaggctagaagaacccactgggaaaactgtcagaaaagtatatccataatggcttttcaagctaacaatttttgaacacagagcatcctctgaactgttttagaatgttgatgaaatcaatcccatttaacaatgcttgccatgttgaactatgtgaattgttagtgtataaagattatagacaccataacagcctgggcaacatggcgaaaccccatctctacaaaaaaaaaatgcaaaaactagctgggcatggtggcacacacctgcagtcccagctacttgaggggctgaggagggaggattgcttgaacctaggaggcggaggttgcagtgagccaagatagcaccactgcactccagcctgggtgayggagcaagaccctgtctcaaaaacaaagatcatagacacgtgacttaccttgcatatgcaaatgccataggcatccatacaacagaaacttcgatggaaaatttcaccattcaagattttaattgaactgatggccaggcccttctccggtggaaaaaaaattagataaaattaaaaatgctttcatttggaggtaagctttaaaaaggggtggaagaaaaggg

SEQ ID NO: 4707 - DNA, 808 bp, Homo sapiens
agggcagaaacccaccaccaccttaattctgcagctctgtggacactatatataagctatacagggaagcagaagaaacctgtataattgtatctaatgaagcagtatggcaaaggtactgtagctttgaagacactctacagtactgatcattcaaattatctcttttaaatgcaaatatttagcatttccaattaaggcataacattagaaggctagaagaacccactgggaaaactgtcagaaaagtatatccataatggcttttcaagctaacaatttttgaacacagagcatcctctgaactgttttagaatgttgatgaaatcaatcccatttaacaatgcttgccatgttgaactatgtgaattgttagtgtataaagattatagacaccataacagcctgggcaacatggcgaaaccccatctctacaaaaaaaaaatgcaaaaactagctgggcatggtggcacacacctgcagtcccagctacttgaggggctgaggagggaggattgcttgaacctaggaggcggaggttgcagtgagccaagatagcaccactgcactccagcctgggtgatggagcaagaccctgtctcaaaaacaaagatcatagacacgtgacttaccttgcatatgcaaatgccataggcatccatacaacagaaacttcgatggaaaatttcaccattcragattttaattgaactgatggccaggcccttctccggtggaaaaaaaattagataaaattaaaaatgctttcatttggaggtaagctttaaaaaggggtggaagaaaaggg

SEQ ID NO: 4708 - DNA, 808 bp, Homo sapiens
agggcagaaacccaccaccaccttaattctgcagctctgtggacactatatataagctatacagggaagcagaagaaacctgtataattgtatctaatgaagcagtatggcaaaggtactgtagctttgaagacactctacagtactgatcattcaaattatctcttttaaatgcaaatatttagcatttccaattaaggcataacattagaaggctagaagaacccactgggaaaactgtcagaaaagtatatccataatggcttttcaagctaacaatttttgaacacagagcatcctctgaactgttttagaatgttgatgaaatcaatcccatttaacaatgcttgccatgttgaactatgtgaattgttagtgtataaagattatagacaccataacagcctgggcaacatggcgaaaccccatctctacaaaaaaaaaatgcaaaaactagctgggcatggtggcacacacctgcagtcccagctacttgaggggctgaggagggaggattgcttgaacctaggaggcggaggttgcagtgagccaagatagcaccactgcactccagcctgggtgatggagcaagaccctgtctcaaaaacaaagatcatagacacgtgacttaccttgcatatgcaaatgccataggcatccatacaacagaaacttcgatggaaaatttcaccattcaagattttaattgaactgatggccaggcccttctccrgtggaaaaaaaattagataaaattaaaaatgctttcatttggaggtaagctttaaaaaggggtggaagaaaaggg

SEQ ID NO: 4709 - DNA, 655 bp, Homo sapiens
tggtattctataaggggagctctgtcatttcttagggtcaaggacactgaaatggcttaatttggaccagattctcctagagcattaactatttcctaagagtatcttaagacagcttggagcggtattgactttttaggtgtaatggacctaaacgacccatttaactttgaacctttaatataatagattcaagatcagaatcctctttgactttatagaccatcagtggagctsaatggtgacctaccttaaatgttcctgttaggtccaatgaacaggtgagggaatgagagaaagaaaaatatggaaaagtgacagtaagaaagacaaaggaaaaaaagagaaataataggaataaatgagtagcacttaataaagtgcaaggatgtattcttattctggatcttattctgataaatcagtaaagacctaattataagaagtgagaaaagcacaataatatgcaaaaacacagaggtttgaggggtagggcactgggtgatggtgaaggatgatttcctggagttgtcatattagttgcatcttaaaaaaaagtataaagaagggcagaagagcctccaggctggtggtgggcatgggcaaaggtgaaaagccatgagagcaggagggggtgagatcctcattctgtgtg

SEQ ID NO: 4710 - DNA, 836 bp, Homo sapiens
tattagctgggtgtggtggcacatgcctgtaatctcagctactcaggaggccgagacagggaaatcacttgaacccaggaggtggaggttgcagtgagttgagatcacgccattgcattccagcctggacaataagagcgaaactatgtttcaaaaaaaaaatttggagttccgcagagctttgagtcttggctcttgccacctacttagttaacctgtctgagcctctgctccctcatctgtaaaacaggggtcacagcacctactttctagtgtggtgaggattagatgaagccagggcacgtaaaaagtgttcggcacttaggtgttcaataaggtgggagtaaggaagagaagcttagatgggcgatactgaggacagtctggtgtctgtcatcacttgctatgtctcctttctctatcccctaagttttactttcccttcctagaaaatgctgggatgggccccacctctctggactctttccactcyatattctgttctgtcacttcgcaaagctggttgctcgtgctctagctaaggtgctaacagttgatgtgtagctaatgggataatgactgacaatggattcacggggcttcccatctaagaattttacccagtgacacctcgagaagccaaaggaacattctctgcagagtctggcacagagaaggggatacgagagggtgatttgggttgaagggcgcttccttggccctcctatgtctgctaagtgtcctcagacccagccccagtttattaaatggataggcactggatacaactgcaaagaggaaagacaggaattaaagcccttagaacgtttctgggg

SEQ ID NO: 4711 - DNA, 617 bp, Homo sapiens
cttcccctacttgtcacgcttatctatactcaaaatgtctcaggttcactaagtatgctaataatgacgtttaccaccgaagaactattaaatgcctgatctaataacattatatgactagcatgtatcttggctttcatagtaaaaatacctctatatgggcttcacctatgacttcccaaagcccacgcagaagctcctattgccggctcagtagtacttgcagcggtactcctaaaactaggcggctacagtatcatagggcttacccttatcctcagctccctracagaatacatagcctaccctttcctcatattatccttatgagggatagtcatgacaaactcaatttgtctaccacaaaccgatttaaaatcactaatcgcttactcctctgtaagccatacagcacttgttattgtggctatcctcattcaaacctcttgaagctttacaggcgcagtcaccctcataaatgcccatggactcacttcatccttactattctgcctagcaaattggaactatgaacgagtccatagccgaattatactacttctccaaggccttcaaacattgcttccactaatagcctcctgatgacttctagcaaa

SEQ ID NO: 4712 - DNA, 617 bp, Homo sapiens
cttcccctacttgtcacgcttatctatactcaaaatgtctcaggttcactaagtatgctaataatgacgtttaccaccgaagaactattaaatgcctgatctaataacattatatgactagcatgtatcttggctttcatagtaaaaatacctctatatgggcttcacctatgacttcccaaagcccacgcagaagctcctattgccggctcagtagtacttgcagcggtactcctaaaactaggcggctacagtatcatagggcttacccttatcctcagctccctaacagaatacatagcctaccctttcctcatrttatccttatgagggatagtcatgacaaactcaatttgtctaccacaaaccgatttaaaatcactaatcgcttactcctctgtaagccatacagcacttgttattgtggctatcctcattcaaacctcttgaagctttacaggcgcagtcaccctcataaatgcccatggactcacttcatccttactattctgcctagcaaattggaactatgaacgagtccatagccgaattatactacttctccaaggccttcaaacattgcttccactaatagcctcctgatgacttctagcaaa

SEQ ID NO: 4713 - DNA, 617 bp, Homo sapiens
cttcccctacttgtcacgcttatctatactcaaaatgtctcaggttcactaagtatgctaataatgacgtttaccaccgaagaactattaaatgcctgatctaataacattatatgactagcatgtatcttggctttcatagtaaaaatacctctatatgggcttcacctatgacttcccaaagcccacgcagaagctcctattgccggctcagtagtacttgcagcggtactcctaaaactaggcggctacagtatcatagggcttacccttatcctcagctccctaacagaatacatagcctaccctttcctcatattatccttatgagggatagtcatgacaarctcaatttgtctaccacaaaccgatttaaaatcactaatcgcttactcctctgtaagccatacagcacttgttattgtggctatcctcattcaaacctcttgaagctttacaggcgcagtcaccctcataaatgcccatggactcacttcatccttactattctgcctagcaaattggaactatgaacgagtccatagccgaattatactacttctccaaggccttcaaacattgcttccactaatagcctcctgatgacttctagcaaa

SEQ ID NO: 4714 - DNA, 781 bp, Homo sapiens
tcccctcactgctgccccaacctggacccccaagtcttcccagcctcctcatcaaaacctatctttcgtgcacctccttccttcagagtgatgccagggcaatgttcaactatctgctctgagaaatgttccaaagagaggacgtaggtgtgggaagaccctgggaccacktgtcggagccggttctgatctcttgctctgctactaccctgtgtaattttgggagtggaagtgaggcagggaggtacaaagtggggcaaagaagtggagggttcttctgccagctacctgggaggaagggcaaacctcatgacacacagcattgaggggagactggcagtggatgctgaagacctggaagatgcgcaggacaaaggcaaagggggcagagaagaaaaatagaagagaaacaaaatgggccttggggcagatcccagaactggtgggaggggtggatctaagggcttgaggtgggaggtgagccttgaagagggaaggactctagctccttgaggggaaagggccagaggagatggtggctgacaaaccacaatgtctgggttcagaaatgcatcagccatggcctcaagtttcccagccaaaaagagtgagcagccctactgagaatagggagctcgagcagagagatggagtgaggcaaatgaggcccaaactggcaaccgctgagccatggagatagaacaggggtgaagagcgtaagccctggagcctgccaggatctgggctcaaaccctaccctctgtccctctctagccatgaa

SEQ ID NO: 4715 - DNA, 820 bp, Homo sapiens
cctggtcaagacgtgtcagtgccagtaccccagatattctagtgtagatcggaaggggatgaaggcagcttggggagggagctgcacaggccaggattgtttcaggaccccagggcctctacaggaaacacaggttttccacacgtcagtttcccctcrtgacatagggactctgggggagtttgctgtgcctctttaatgaacatcttaattgttccaagttccctcatgataatagaaggatgagaatgattacctttagttactagattaaaaatctgatacccagattggtatcagagtgggtaagacatgattttcaataatgttagcggtcgaaggaacttagagaaaagccaacacctcaactcttccttttcagatagagaaaccgaggcccagacagggaaggggaggtcacccagtaggatagttttggctcaagtcttctgatcttcaaactagtgcttttgacacagagtagggcattgagattgtatgtggcctttctccagcacaccaacatccatctggggtaactttcactgtccgggtatgggtgttgggggcagagcctgggacaatcccagaagctcttccttttgcctttggccaaatatctgggatttttttgtacctaatttccctccctaattgtgttggcaaagggtgatgacccaatgtgtcagcatatgccaaataaacaaacggcaggagatggggctggctgccagctgcagggttgggagtgtctgctggcaaagaaggccaccccaaggtgaaagaggaaggggtgtcaggtccagtcagtctcccaggg

SEQ ID NO: 4716 - DNA, 765 bp, Homo sapiens
tgagcatgtgcagccatggcgcatggccatgccrgtctatggtactggtctcaccctcagacaggcagagttggggacatgggtgtgactagggagggaatcacaggtgctgcactgctctctccccagagtcaaccccttctgggcactgtgattgatgggatgctgctgctgaaaacacctgaagagcttcaagctgaaaggaatttccacactgtcccctacatggtcggaattaacaagcaggagtttggctggttgattccaatggtgagaaggcacatgtctgttggagggactcaaccacccccatcagccctcctgtctctggtcccaggaatgcttccctctccgagctgcactctgagtcctgggcagctgttcccttcagcaggagttaacatttccacggaaatcttctccaggagggcacagttttcaccggggtatcagggccctgggattccctctccccagactctcttattgtcttcctattgaagaatcctgaagtgtctgtgctgggagggccagtagagaaaataactctgcagatgggaaaacggagggggcctagaagggggaaggagtggaggagtccggagaagcagtcgggggcttcctggcttcccacctcgggctgggtgtgcgtaattcccctgaaaatcactcatgctcttcatcacctcattgaaaatatccaaagaaagtggcttcttcttgagttaccattgacttctagggaacagcagacatcagcgtcta

SEQ ID NO: 4717 - DNA, 765 bp, Homo sapiens
tgagcatgtgcagccatggcgcatggccatgccggtctayggtactggtctcaccctcagacaggcagagttggggacatgggtgtgactagggagggaatcacaggtgctgcactgctctctccccagagtcaaccccttctgggcactgtgattgatgggatgctgctgctgaaaacacctgaagagcttcaagctgaaaggaatttccacactgtcccctacatggtcggaattaacaagcaggagtttggctggttgattccaatggtgagaaggcacatgtctgttggagggactcaaccacccccatcagccctcctgtctctggtcccaggaatgcttccctctccgagctgcactctgagtcctgggcagctgttcccttcagcaggagttaacatttccacggaaatcttctccaggagggcacagttttcaccggggtatcagggccctgggattccctctccccagactctcttattgtcttcctattgaagaatcctgaagtgtctgtgctgggagggccagtagagaaaataactctgcagatgggaaaacggagggggcctagaagggggaaggagtggaggagtccggagaagcagtcgggggcttcctggcttcccacctcgggctgggtgtgcgtaattcccctgaaaatcactcatgctcttcatcacctcattgaaaatatccaaagaaagtggcttcttcttgagttaccattgacttctagggaacagcagacatcagcgtcta

SEQ ID NO: 4718 - DNA, 765 bp, Homo sapiens
tgagcatgtgcagccatggcgcatggccatgccggtctatggtactggtctcaccctcagacaggcagagttggggacatgggtgtgactagggagggaatcacaggtgctgcactgctctctccccagagtcaaccccttctgggcactgtgattgatgggatgctgctgctgaaaacacctgaagagcttcaagctgaaaggaatttccacactgtcccctacatggtcggaattaacaagcaggagtttggctggttgattccaatggtgagaaggcacatgtctgttggagggactcaaccacccccatcagccctcctgtctctggtcccaggaatgcttccctctccgagctgcactctgagtcctgggcagctgttcccttcagcaggrgttaacatttccacggaaatcttctccaggagggcacagttttcaccggggtatcagggccctgggattccctctccccagactctcttattgtcttcctattgaagaatcctgaagtgtctgtgctgggagggccagtagagaaaataactctgcagatgggaaaacggagggggcctagaagggggaaggagtggaggagtccggagaagcagtcgggggcttcctggcttcccacctcgggctgggtgtgcgtaattcccctgaaaatcactcatgctcttcatcacctcattgaaaatatccaaagaaagtggcttcttcttgagttaccattgacttctagggaacagcagacatcagcgtcta

SEQ ID NO: 4719 - DNA, 807 bp, Homo sapiens
tttaytttattttattttattttattttattttattttattttattttattttatttcatagagatgggatcttgctttgttgcccaggctggtctcaaactcctagcctcaagcaattctaccacctcagtctcccaaagtgctgggattgtaggagtgagccaccatcccagcccaattaacatttgtaaaatcctctcttaaatccacagtatggataaaatgacaaatcattattgaaggacattaaagaatgtgtaaataaatgaaaagctgtcctgtgtttctgatggaatagtcaacattatcaagatgttccaaaatgacttctggagtcaatgcaattccaaagtctcaacagagcttttcataaaaccagttgggtctaaagtggatatggaagaacaaagggccaagaatattcaagatactccttaaccacaacagtatggtattgacagggatagacatattgacaaacggaactgaggagagggcagaaagggacccatacactaggtgaagcttgattatgacagccttgccccagcaggtctgtgggaaaagaatgggctatttagtaaatggtactgggacaattggtaacccatatgggtataaagagaacttgcataaacgcctggtgttaaaagattcaaagttttaaaattttctttagcagaaaactttgtacaatatctttatgacctcagaaatgagaataattttttaaacaagatccaaaaaatactataaaggaaactattgacaaatttgactaaattaaaattaagaattctgttcat

SEQ ID NO: 4720 - DNA, 807 bp, Homo sapiens
tttactttattttaytttattttattttattttattttattttattttattttatttcatagagatgggatcttgctttgttgcccaggctggtctcaaactcctagcctcaagcaattctaccacctcagtctcccaaagtgctgggattgtaggagtgagccaccatcccagcccaattaacatttgtaaaatcctctcttaaatccacagtatggataaaatgacaaatcattattgaaggacattaaagaatgtgtaaataaatgaaaagctgtcctgtgtttctgatggaatagtcaacattatcaagatgttccaaaatgacttctggagtcaatgcaattccaaagtctcaacagagcttttcataaaaccagttgggtctaaagtggatatggaagaacaaagggccaagaatattcaagatactccttaaccacaacagtatggtattgacagggatagacatattgacaaacggaactgaggagagggcagaaagggacccatacactaggtgaagcttgattatgacagccttgccccagcaggtctgtgggaaaagaatgggctatttagtaaatggtactgggacaattggtaacccatatgggtataaagagaacttgcataaacgcctggtgttaaaagattcaaagttttaaaattttctttagcagaaaactttgtacaatatctttatgacctcagaaatgagaataattttttaaacaagatccaaaaaatactataaaggaaactattgacaaatttgactaaattaaaattaagaattctgttcat

SEQ ID NO: 4721 - DNA, 649 bp, Homo sapiens
cacctcccgtcctggaaatctcggcccccacacccagacacttcctcccaccccacaagcctcaggccacagccctggcttggagaagggctagatgccttggagaggggccggcctctgaggtaacgggctgtgggagcctcctggccccatgtgcccatctgtcagatgggggtgggaacgtggtccagtgccaggcacagggagcagtgcagtggcccgcacaggcaggagttctgccgggtggcgctcacagcaggcaggcccagggaggcccatcctctgagccctcccagttacctgtgcattgagaggcctgcatgtctgcagcggaggagcgggacatgacactgaggtccccagggcaagactgggaccctgaagcggcttctgcccagaaacagccccaaggaactgactcgcggccccaggaaagcctccagagagaacagagccgggccccacccagcctgctggctgaagctgcagcctgcaccttcccagccggctcgccgccctcccagggtgaagagacagaggctcagagaaggacccccacctgccacaacctcccagcctcccaaagcatcaaccacaaagacctccaggcccccagctcccctcatgaagcagcccccttcaccrtctg

SEQ ID NO: 4722 - DNA, 664 bp, Homo sapiens
tcctgctttggcctcccaaagtgctgggattataagtgtgagcaagcatgcccggcctccatctccattcttacattcacagtggtccaagtgcttctaggatgttttttccttcactccttgatcttgaagggcttccaagcatctcagtaggcmaatacaggggaggagatgaatcctcagttcatcaccctctgagctgtccttcccctctaaaacagggagcctcgtaccatgccaggctgtgtggggattaaacgaggtaattccctcagaggggcccgggttccctcctgcctcctctctgggctcaacttcctttctcaggacgaaggcaagaaaggaggcaaagctggggccccagcagggaggaaaatgtggggaaatgttctacatagtgattgtgttgttgtttacatgactgtatgtgtttgtgaaaactcatcaaactatacacttaaaaccagtgaattttgttgtctgtaaattatacttcaaaagctaaaattataaaagaaaatatgcaaatagaaaacaattagtcacaggcaagcatagaagataaaaaagtaaaactctctctgaccttcattcctactccccagaagcaacaaggcattcattcattcattcattcattcatcagttggtcactcgactattt

SEQ ID NO: 4723 - DNA, 798 bp, Homo sapiens
aggctgacaagccacacagtcttgtcttgtttctgccaattcctccagcttcatctcactctgcattccaggccacacccacctctctctctctcctaccacagggcctttgcacctgctaggccacctgcctgcaaagcctctcagctccttaacctggctaaactccccctcatccttcagagttcatcctataagaagcaccccttcctcaagggagccttccttagttgctctgactgggcaggtctgagctacagctttcagagaccctgttcttgctccttcagagcactgatcttcatttgtaaagaaatgtggggtgtttttttttcttggctgggrgcttcccactggactgtgagctccacagaacagagatggtttggacactgagacaagaattggtgtgcaaatgatggtttaagccagtgatcccaagggagatgaggaagggtgtggggaaaacaggacagggaagggaaggaagccaggcagggtacaacctcaggacaagactcatggtcccacacaggagctctggagtgtgagttacatggcagggttatcttggtctgaggcaagaaagctgggctttcatgctcgctgtcagtcattgactaagaactgtcctagcagaaaggtgaagggagagacccctggggtctctgcacatggcagaagagtggctccagaagcccagagatagtcctttgaggaagagtctcaagtgcaggcagatgaaggacagcacatggaagctggcagagtggtgcagagcaatagacaaaaggatcc

SEQ ID NO: 4724 - DNA, 1158 bp, Homo sapiens
tttataataactactttgaagtctttgtctgctaagttcaacatctgggccttctctaaggctgtttctgttgcctgcttttatgggtcatatttccctgtttcttttaatgtctcacaactttttactgaaaactggacattttagatcacatatcatagcaattctgaatgctgattctctggggcttgttgtttccttcgtcatttgtttaatagctaagcttaagtagttcttcaaagtctattgcagtgtgcagcttctaatgtccctgcttagatttttttcccttattcttatctttttttttttttttttcctgacagagtctcactctttctcgcccaggctggagtgcaatggcacgatcttggctcattgcaacttctgcttcccatgttcaagtgattcttccagctcagcctcccgagtagctgggattacagccactcgccatcatgcccagctaatttttgtgcttttgtagagatggtgtttcaccatgttggccaggctggtctcgaactcctgacttcaggggatctgccgcccccgccctgccacttcgcctcccaaagtgctgggattacaggcatgagccaccaaacctggcccccttatttttatcttttagcctggctagataggggttttctctaggtcagcataagccatttactagtcaaaggttatgcctcagtgtccttagtctgttaggtttttttaccctttactgtcggaaatgatatgtgtgatgtggaggctcttatcacagttcagggagcttactacttttctcccgtgttcacctaggaactagcagcctggtggttctctctctgattgcttcttggaggatgcagccttgggtatgcrcatagtcttccagactttcagggatgactatgattttatttttaagcttggctgtcttggagtcactcctgcgccagaataacatattgttcagtcagttgttaatcagaagttgtgcttatgccctttttaccaataaaatttccaccctatgttgatgggcctgtgggtgacttgagaaatgctatgaaatctgccccacatcctgctctgatttttcccaagtgagtgcagcctagcacagcctttctgattggacttgactgtatgcatagaagggct

SEQ ID NO: 4725 - DNA, 859 bp, Homo sapiens
acagacagattaaaagggtgaccccaggatgatcccagaagctagtgcatgaagratttctgatttctgatcctgtttcttggcatgtgacttctaggccagttgtttcctctctgggtattttttgaaatgcacttttatgtcttgatgctgaacagaaacaaggagaagcagtaaaatgttggagtgattttaaacccatgaaggaaacaaacctgctcctatctgcatggaaacccacaaaagtctaataaaattaaaccccacatctttcaaggttgagaagagaaagaaaatcatttgagaagggcatctgaacctcattgccctcgaagggttaccttccttttagaaaatttttgataatttgctgctgccatttccctgtaggctgcgaggaataacagccagagataggaccttcctccatattgccaaccttggatgaccagggtgggattttgtgaaggaaactggtagttccctgacaccatttatatgtatcttaagtaacgatcacttgaatatctcaccgctagattaattctaagtaggttttctctgcagtgttgaagggacaccttatttataaagggaaatagatttaccttggaagtcaaatacagcttaaaacaaaattaaccagacacaataatgacatcttaggatgaaaattctttccaaaattatgccatgtctgctaatgccaaaatagaaccatttcttattaaccattgcttagaactttcatgcttctttccaatcatgtgggtactagagatatgattattatgtagtcaaggccttggaaccaggcataattagcccttttctactgtctgccccccatctctcaaac

SEQ ID NO: 4726 - DNA, 859 bp, Homo sapiens
ctggggcttagtggagtgagaaatactagcatcctgtcttttttagggtgaaaccatagcctcaaactaggatgtagagagagatggagccctgtcttggctgctcatatactgggtagagtttccataataaggaagaagattaatgggcaaatcgcagctcaaatgccacagactcttgctattatgattgaaattttaaagattttcttgaattaatgtttcttatttgctgtatggcccttacaacactttccagacactttaaatgatggatattttaaataattttctctaattcgattgttgttttgctggggaaagagtccaccaaacttgttattccattctcccagaagtcccacctcttaattcctctttatatattcaccataatatctctttgcacctaatatagaagtgaaaagcacaagctccagtgtaaccagcctgaattcaagtctctagtctgccacttgttagctgtgttacttagcacatgttattaaactaatagtagctacctcaggggattgtggtgagagtaaatgagctaatccattgaaaatgcctagcatggtatttgtctcagagttaggcatcccctaaaggatggctgtcatgttcatcttggtaaccctgcatgatgacagattgccacaagggggcaccaagaaccatgtataatgatgaaggactagagggattcagttaggtcgctctagcagttacatttgtaggctcacgtttacatttgtaagccarccagaggtaggtattttcccagaaaacaaaagaaagaggttgaaggcatgttataaacattgccataccatttcctacagaagatggaaattca

SEQ ID NO: 4727 - DNA, 1693 bp, Homo sapiens
tgactacaaacaattgcctatatttctctagaaacatgttaagaattttgattatgtgaaacattttaacaaataaatccctgttctttgtgaatccaatgatatagaacagagcatgtatttgtgtgtctacagatttttggcataggttattttgctgaaagaagcaagatttaagggcaaataactaacattctgttaacatattttgagtcttccaatgggcatgaagacacctgtttctatggcaaccagtacaggtcatgtgaggggtgatggaataattagagaggaaagctgttagtttagaatgacaatttttccttttgcaaatttacttccttaaatagtataattctattaatttgatctcttgtctctctaaaagcaacagattcctggaaactctttaaacttgagttacatgctaacaggactgattttagcataaattgaaggactggagaagctatgctcttaaatatactgtctcttctttgggagaattacagtatgctgctgggtaattttaaaggtcttcaagtggtctttccagtatcacgtctgtcagattgagagggaacaggagagaaaacataattcacttggcttatagggacttctggggacacagaatagcttgtggctcctgctcatgaaacaaaacgaagctgaaagaatgagaaatagtgtccagagaagattacagtttcgtgaggagttagatatcagtgttccagaacaccatctgtgaattccctaggctggggttagtggagcagtgaagtgggaaatggtagctatctagaaagttgggtctggggagagtccactgatcttacttcctccctgttaaggatcccagataagaaagacacactacctccttcctcttattgttcatgtatggctcagtccaatactgctccagaatgttggggtaagtactacttatcagttaaaataaatcactttaaggacctttctgatgttccttcgcttactgattgagagaaaaacaaagaaacaaagaaacaaacaaacaacactgtagcgaataactgaaaacattctgaaggcaatcaaactttttttttttttttgacggagtctcattctgttgcccaggctggagtgcagtggcgcgatcttggctcactgccacctytgcctcctgggttcaagtgattctactgcctcagcctcctgagtagctgggattacaggctcgtgccaccactcctggctaatttttgtatttttagtagagacggctttcaccatgttggtcaggctggtctcgatctcctgaccttgtgatccacctgcctcgacctcccaaagtgctgagattataggtgtgagccactgcacctggctggcaatcaaacattttttaaatcataagagatagatattgtgtcctgtccaagactgtattcagtagtgtccctttatccttagtggatacattccaagacattcagtggattcctgaaactacaggtagtagtgaaccctatgttattttcatatgtgtatgtatgtatatacatatatatatatatcatcaatgataaagtttgaagtgtggcagcaaaactagcatgaatttctttttccttcttcacaattccacaggtagaagattcatttttacagtagatcttagcaacctcagcatacaattttt

SEQ ID NO: 4728 - DNA, 1693 bp, Homo sapiens
tgactacaaacaattgcctatatttctctagaaacatgttaagaattttgattatgtgaaacattttaacaaataaatccctgttctttgtgaatccaatgatatagaacagagcatgtatttgtgtgtctacagatttttggcataggttattttgctgaaagaagcaagatttaagggcaaataactaacattctgttaacatattttgagtcttccaatgggcatgaagacacctgtttctatggcaaccagtacaggtcatgtgaggggtgatggaataattagagaggaaagctgttagtttagaatgacaatttttccttttgcaaatttacttccttaaatagtataattctattaatttgatctcttgtctctctaaaagcaacagattcctggaaactctttaaacttgagttacatgctaacaggactgattttagcataaattgaaggactggagaagctatgctcttaaatatactgtctcttctttgggagaattacagtatgctgctgggtaattttaaaggtcttcaagtggtctttccagtatcacgtctgtcagattgagagggaacaggagagaaaacataattcacttggcttatagggacttctggggacacagaatagcttgtggctcctgctcatgaaacaaaacgaagctgaaagaatgagaaatagtgtccagagaagattacagtttcgtgaggagttagatatcagtgttccagaacaccatctgtgaattccctaggctggggttagtggagcagtgaagtgggaaatggtagctatctagaaagttgggtctggggagagtccactgatcttacttcctccctgttaaggatcccagataagaaagacacactacctccttcctcttattgttcatgtatggctcagtccaatactgctccagaatgttggggtaagtactacttatcagttaaaataaatcactttaaggacctttctgatgttccttcgcttactgattgagagaaaaacaaagaaacaaagaaacaaacaaacaacactgtagcgaataactgaaaacattctgaaggcaatcaaactttttttttttttttgacggagtctcattctgttgcccaggctggagtgcagtggcgcgatcttggctcactgccacctctgcctcctgggttcaagtgattctactgcctcagcctcctgagtagctgggattacaggctcgtgccaccactcctggctaatttttgtatttttagtagagacggctttcaccatgttggtcaggctggtctcgatctcctgaccttgtgatccacctgcctcgacctcccaaagtgctgagattataggtgtgagccactgcacctggctggcaatcaaacattttttaaatcataaragatagatattgtgtcctgtccaagactgtattcagtagtgtccctttatccttagtggatacattccaagacattcagtggattcctgaaactacaggtagtagtgaaccctatgttattttcatatgtgtatgtatgtatatacatatatatatatatcatcaatgataaagtttgaagtgtggcagcaaaactagcatgaatttctttttccttcttcacaattccacaggtagaagattcatttttacagtagatcttagcaacctcagcatacaattttt

SEQ ID NO: 4729 - DNA, 1693 bp, Homo sapiens
tgactacaaacaattgcctatatttctctagaaacatgttaagaattttgattatgtgaaacattttaacaaataaatccctgttctttgtgaatccaatgatatagaacagagcatgtatttgtgtgtctacagatttttggcataggttattttgctgaaagaagcaagatttaagggcaaataactaacattctgttaacatattttgagtcttccaatgggcatgaagacacctgtttctatggcaaccagtacaggtcatgtgaggggtgatggaataattagagaggaaagctgttagtttagaatgacaatttttccttttgcaaatttacttccttaaatagtataattctattaatttgatctcttgtctctctaaaagcaacagattcctggaaactctttaaacttgagttacatgctaacaggactgattttagcataaattgaaggactggagaagctatgctcttaaatatactgtctcttctttgggagaattacagtatgctgctgggtaattttaaaggtcttcaagtggtctttccagtatcacgtctgtcagattgagagggaacaggagagaaaacataattcacttggcttatagggacttctggggacacagaatagcttgtggctcctgctcatgaaacaaaacgaagctgaaagaatgagaaatagtgtccagagaagattacagtttcgtgaggagttagatatcagtgttccagaacaccatctgtgaattccctaggctggggttagtggagcagtgaagtgggaaatggtagctatctagaaagttgggtctggggagagtccactgatcttacttcctccctgttaaggatcccagataagaaagacacactacctccttcctcttattgttcatgtatggctcagtccaatactgctccagaatgttggggtaagtactacttatcagttaaaataaatcactttaaggacctttctgatgttccttcgcttactgattgagagaaaaacaaagaaacaaagaaacaaacaaacaacactgtagcgaataactgaaaacattctgaaggcaatcaaactttttttttttttttgacggagtctcattctgttgcccaggctggagtgcagtggcgcgatcttggctcactgccacctctgcctcctgggttcaagtgattctactgcctcagcctcctgagtagctgggattacaggctcgtgccaccactcctggctaatttttgtatttttagtagagacggctttcaccatgttggtcaggctggtctcgatctcctgaccttgtgatccacctgcctcgacctcccaaagtgctgagattataggtgtgagccactgcacctggctggcaatcaaacattttttaaatcataagagatagatattgtgtcctgtccaagactgtwttcagtagtgtccctttatccttagtggatacattccaagacattcagtggattcctgaaactacaggtagtagtgaaccctatgttattttcatatgtgtatgtatgtatatacatatatatatatatcatcaatgataaagtttgaagtgtggcagcaaaactagcatgaatttctttttccttcttcacaattccacaggtagaagattcatttttacagtagatcttagcaacctcagcatacaattttt

SEQ ID NO: 4730 - DNA, 1693 bp, Homo sapiens
tgactacaaacaattgcctatatttctctagaaacatgttaagaattttgattatgtgaaacattttaacaaataaatccctgttctttgtgaatccaatgatatagaacagagcatgtatttgtgtgtctacagatttttggcataggttattttgctgaaagaagcaagatttaagggcaaataactaacattctgttaacatattttgagtcttccaatgggcatgaagacacctgtttctatggcaaccagtacaggtcatgtgaggggtgatggaataattagagaggaaagctgttagtttagaatgacaatttttccttttgcaaatttacttccttaaatagtataattctattaatttgatctcttgtctctctaaaagcaacagattcctggaaactctttaaacttgagttacatgctaacaggactgattttagcataaattgaaggactggagaagctatgctcttaaatatactgtctcttctttgggagaattacagtatgctgctgggtaattttaaaggtcttcaagtggtctttccagtatcacgtctgtcagattgagagggaacaggagagaaaacataattcacttggcttatagggacttctggggacacagaatagcttgtggctcctgctcatgaaacaaaacgaagctgaaagaatgagaaatagtgtccagagaagattacagtttcgtgaggagttagatatcagtgttccagaacaccatctgtgaattccctaggctggggttagtggagcagtgaagtgggaaatggtagctatctagaaagttgggtctggggagagtccactgatcttacttcctccctgttaaggatcccagataagaaagacacactacctccttcctcttattgttcatgtatggctcagtccaatactgctccagaatgttggggtaagtactacttatcagttaaaataaatcactttaaggacctttctgatgttccttcgcttactgattgagagaaaaacaaagaaacaaagaaacaaacaaacaacactgtagcgaataactgaaaacattctgaaggcaatcaaactttttttttttttttgacggagtctcattctgttgcccaggctggagtgcagtggcgcgatcttggctcactgccacctctgcctcctgggttcaagtgattctactgcctcagcctcctgagtagctgggattacaggctcgtgccaccactcctggctaatttttgtatttttagtagagacggctttcaccatgttggtcaggctggtctcgatctcctgaccttgtgatccacctgcctcgacctcccaaagtgctgagattataggtgtgagccactgcacctggctggcaatcaaacattttttaaatcataagagatagatattgtgtcctgtccaagactgtattcartagtgtccctttatccttagtggatacattccaagacattcagtggattcctgaaactacaggtagtagtgaaccctatgttattttcatatgtgtatgtatgtatatacatatatatatatatcatcaatgataaagtttgaagtgtggcagcaaaactagcatgaatttctttttccttcttcacaattccacaggtagaagattcatttttacagtagatcttagcaacctcagcatacaattttt

SEQ ID NO: 4731 - DNA, 645 bp, Homo sapiens
ttaagcatatatttttatcttcccaacacaaaaatgggattaatagaataacaaccatgccaaaatattaatattctaaaaccacattaatcttttgaatagatatatttcaacatttaactgagttaacccattcagttacttgagtatatatactacaaatagtttttattgtagaatactgaatgaggctatgttcatcaagtttatacgtttaagtgtctgtgaacacgtttgtgagtcagggctgaaaggaatgtgctgttattattttgtgtttggtatttatcagtttttctcatcctttatttcacaaccaccatctcaacccccaaccccaccctaagaagtctttwcaggcatttttttccctaattgccacccaaatgagaatttaataacacagatatactgtgtatctgtttatgtgccatagatatatctgtgcttcatacataaaaagagtaagatcatgtcacctcccaacaacaaattttgcctccctggggcaatatttttctcattgaaaatgcatggattataactacttcgattgttttccaagggtcagactaatcttccatgaagtattattgcaggagtatggtaactatgtactagagaaggcttagaacaacttgcaga

SEQ ID NO: 4732 - DNA, 2121 bp, Homo sapiens
tcttaccctatctggaacttgggaagaccctcaagtttataatgtataggcttccaaaataattatcctactagggaatgtcacaggctgtatgcatcactctgttctactaccaataaatattttatcataaatcttttgggcataaaatacaagaaacagaatggctttgtcggaaatctggattagttggagagtcttgcaagtaatttagtaaataagtctcttagagccatctatccaagtataccaagtattagaatatgtatctatttgattagttgcattagttgcaattgaagtaatcatctgattaagtttatagctattcactggcattcttgaagacccatcccatccaccttctacacagtcagtgtagtgaacctagaggagatctcataagaatcaccagaaattagtgtcaccgttaaggacttgaatccttaacggtgacactaatttctgcagttctttcagaaaatgactgtcctattggatatattctcttgagttgtgttgcatagtttcagtatctttgaattcactcttccatcacattatcctttcatctgtaggaagggaggaaacggcaaaatagatatgaggtggatttgagactcctattgagcccccattgaagtcgaagttggttaagccacaaatcctgacttcaatctttgaatttcagtggctttcttgttatccaaatcttagtgatagcttagagtcaattttctattattctggaaatgttcctgttctccaatgccaattaccttggcaaatagccgtacaatcctttgggaaattttaggcagcagacattctgaatgtatttgtaatggtattgcaatgcccttcctaaagagttagggtgggtctttgaattaagacagggcttaatctgggtttgagtttcatcaaactgagaaaacaattacaagccctcccagctaatcaaactagtatattatatcctgtgcatctatattaatcaattcatccttttctaaaattgtgttcctttctccttggtacaagcaccctcagaattcattcccatacatgtttatcactttgcttatacaaatgatgaagttccatattttttttttggtgtaagactgcttctccctcatttggcattttgttgtccctactccagggcatattggcatgggactagagccataagcaaaggcattcaaccatgtggttagtatgcctccactggaagtactcagtgctattgcattcaggtcctacacaccaccattcctgccgtgagagcctgacctcccacttttacagtgggatcccactaagacatgcatctgagaaagccccacaatcaggagagaggtttgaatgctctataacaacgtgactagtgttcaccacattttacaggtagagaaatgcaagaaaatgagaagttcttattaattgtatctttatcctaatcgtgttttttaaaataaattctyataaaactcatctcttctgttaagactcacaccaaaaatatgactataaaaatatattgtttataattgatataaaataaattgaatggttctagcatattcatattttatatgaagtatgtagggattttcttccagccactcaaccttcagtagcaatgaaatctgtagctaaaaaaatccatagaacagaaacctacttattgtttatggcagcaatacatatttcagaaggaattgtatggccgtagtatttagaattttcacattactttaaaaatagaaatgtacttattataaataattatatattaacataattattaatgaatattatatactataaatattatataattataattctaaatataatagaattataaaatataatacataaatataaacatacttattacattacttattttagtatactattagaaatataataaaaaataaaaaataattccttatagtcatataagctgttaccagattgataataaaaattgactagatcatacaaaaaattagctaagcatagtggcatgcagctgtaatcctagctactcaggaggctgaggtgggaggatcacttgagcctgagagacggaggttgcagtaagcc

SEQ ID NO: 4733 - DNA, 2121 bp, Homo sapiens
tcttaccctatctggaacttgggaagaccctcaagtttataatgtataggcttccaaaataattatcctactagggaatgtcacaggctgtatgcatcactctgttctactaccaataaatattttatcataaatcttttgggcataaaatacaagaaacagaatggctttgtcggaaatctggattagttggagagtcttgcaagtaatttagtaaataagtctcttagagccatctatccaagtataccaagtattagaatatgtatctatttgattagttgcattagttgcaattgaagtaatcatctgattaagtttatagctattcactggcattcttgaagacccatcccatccaccttctacacagtcagtgtagtgaacctagaggagatctcataagaatcaccagaaattagtgtcaccgttaaggacttgaatccttaacggtgacactaatttctgcagttctttcagaaaatgactgtcctattggatatattctcttgagttgtgttgcatagtttcagtatctttgaattcactcttccatcacattatcctttcatctgtaggaagggaggaaacggcaaaatagatatgaggtggatttgagactcctattgagcccccattgaagtcgaagttggttaagccacaaatcctgacttcaatctttgaatttcagtggctttcttgttatccaaatcttagtgatagcttagagtcaattttctattattctggaaatgttcctgttctccaatgccaattaccttggcaaatagccgtacaatcctttgggaaattttaggcagcagacattctgaatgtatttgtaatggtattgcaatgcccttcctaaagagttagggtgggtctttgaattaagacagggcttaatctgggtttgagtttcatcaaactgagaaaacaattacaagccctcccagctaatcaaactagtatattatatcctgtgcatctatattaatcaattcatccttttctaaaattgtgttcctttctccttggtacaagcaccctcagaattcattcccatacatgtttatcactttgcttatacaaatgatgaagttccatattttttttttggtgtaagactgcttctccctcatttggcattttgttgtccctactccagggcatattggcatgggactagagccataagcaaaggcattcaaccatgtggttagtatgcctccactggaagtactcagtgctattgcattcaggtcctacacaccaccattcctgccgtgagagcctgacctcccacttttacagtgggatcccactaagacatgcatctgagaaagccccacaatcaggagagaggtttgaatgctctataacaacgtgactagtgttcaccacattttacaggtagagaaatgcaagaaaatgagaagttcttattaattgtatctttatcctaatcgtgttttttaaaataaattctcataaaactcatctcttctgttaagactcacaccaaaaatatgactataaaaatatattgtttataattgatataaaataaattgaatggttctagcatattcatattttatatgaagtatgtagggattttcttccagccactcaaccttcagtagcaatgaaatctgtagctaaaaaaatccatagaacagaaacctacttattgtttatggcagcaatacatatttcagaaggaattgtatggcygtagtatttagaattttcacattactttaaaaatagaaatgtacttattataaataattatatattaacataattattaatgaatattatatactataaatattatataattataattctaaatataatagaattataaaatataatacataaatataaacatacttattacattacttattttagtatactattagaaatataataaaaaataaaaaataattccttatagtcatataagctgttaccagattgataataaaaattgactagatcatacaaaaaattagctaagcatagtggcatgcagctgtaatcctagctactcaggaggctgaggtgggaggatcacttgagcctgagagacggaggttgcagtaagcc

SEQ ID NO: 4734 - DNA, 722 bp, Homo sapiens
agcaatagcacctacctcactgggttgttggagaattaactgtgataatgcatgtgaaaggcttagcccagactctggcccacagcctgtgcctagtaaatataggccaaagacttcctctttggaccatttcccagtgtactggagatgccagcctgggagtagagttctggggatggccaaccccagagacagggagtatgaaggtgtccctgggcaaacgagtagcggggctgactcaggacccccagccatattcctttacaaaaggatttcttcagatgcagaatttcccactcaaccaataactctgaaccttctggggttgcagtctcttgataagtgtcccgccggacgtcctggttagaatgtggaaggggcgagtgtgcagtgtgggaactgcagtgagggaaaggaggaaagccccatgcagtaccatggacagaggcttgctgctgtccgttgtcctgatcaccttcggggcagcctctcagcttggaggaggtcagaggggtgtgtggcttctcagggactagagggaacgtctgaaactgtgtgtgtgtgtgtgtgtgtgtgtgtgtgtgtgtgtgtgtstgtctgtctgtctgtctgtgtgtgtctgtgtgtctgtgtgtgtctgtgttaggggactcacatcagacagtgattgaccacaatactgcgatctagtctggcttctccctcaatcttgcaggtgctga

SEQ ID NO: 4735 - DNA, 763 bp, Homo sapiens
ccttccagagtcgcaccaatacccactttttgtaatttgatagataaggcccaaagccagtgtgaggtttagttttgccaaaacccaaatgtaccaagcaggagtaggtgttgccatgtagatacacgtgggctgtgcccagacatgtatggtctctaaactctgttctccttgtgtctaagtgattcacccttcactctctttaacaggaaaaaaaataccatacktacatttttttattacctaatataccacatcactttgagatacctacttcaagatagtttttataaaaccctcagttattttaatttgcatacagaaacaagtttagtttagcagctaggtaataaatcatttaacttgatagttgctgctcagatagaatagaaatatttatctaactttattagccaggttttcacatgaaaatttattcacatgaatatttttcttttttcatctgcataaaaatgtctaatgtataagtgtatattaatcccttcaacatacggtggatgaaaactatcaacaatctttttctagtcataaatatttactcatggcctatatgtctagtcatatttacgactagaggatgattttatttctacttaaacatagctaaaataaccaattttattatttaatagtaatcctaattaaggatacaaactgaaatccccaatctaattaataactgtcggttgaatggtattttaattttgctaaatatgttgaagagcttcgcaaaaaattactt

SEQ ID NO: 4736 - DNA, 763 bp, Homo sapiens
ccttccagagtcgcaccaatacccactttttgtaatttgatagataaggcccaaagccagtgtgaggtttagttttgccaaaacccaaatgtaccaagcaggagtaggtgttgccatgtagatacacgtgggctgtgcccagacatgtatggtctctaaactctgttctccttgtgtctaagtgattcacccttcactctctttaacaggaaaaaaaataccatacgtacatttttttattacctaatataccacatcactttgagatacctacttcaagatagtttttataaawccctcagttattttaatttgcatacagaaacaagtttagtttagcagctaggtaataaatcatttaacttgatagttgctgctcagatagaatagaaatatttatctaactttattagccaggttttcacatgaaaatttattcacatgaatatttttcttttttcatctgcataaaaatgtctaatgtataagtgtatattaatcccttcaacatacggtggatgaaaactatcaacaatctttttctagtcataaatatttactcatggcctatatgtctagtcatatttacgactagaggatgattttatttctacttaaacatagctaaaataaccaattttattatttaatagtaatcctaattaaggatacaaactgaaatccccaatctaattaataactgtcggttgaatggtattttaattttgctaaatatgttgaagagcttcgcaaaaaattactt

SEQ ID NO: 4737 - DNA, 479 bp, Homo sapiens
ggttgataaggtcattttagccaaggtaaatattctcaggatcaattttccccttccttagcctttcagagtatagaccatttaattgagattttattctttttcttaccactttcatttaaacattttaaatgttgtttatattattcagaggcacatatctttctgatagtttaacttgaaagttcaattaagttatcaatagttttctttttgtaagacttttatccttgtgcsttggcgacaatttccttcatgatttcactggcaaattgatattgccattttaaatgaagcttaatgtaagagtagaatgttataaggaggcttgatttttttaaaataaagtgggatcatatttccaatggcttgtgctcccacaatgtaatttgggaaacttctcactattgtgggaattttcctttcaaacttctagaatagaaggaaaatgtgtcatagtctttcccctctctgattag

SEQ ID NO: 4738 - DNA, 479 bp, Homo sapiens
ggttgataaggtcattttagccaaggtaaatattctcaggatcaattttccccttccttagcctttcagagtatagaccatttaattgagattttattctttttcttaccactttcatttaaacattttaaatgttgtttatattattcagaggcacatatctttctgatagtttaacttgaaagttcaattaagttatcaatagttttctttttgtaagacttttatccttgtgccttggcracaatttccttcatgatttcactggcaaattgatattgccattttaaatgaagcttaatgtaagagtagaatgttataaggaggcttgatttttttaaaataaagtgggatcatatttccaatggcttgtgctcccacaatgtaatttgggaaacttctcactattgtgggaattttcctttcaaacttctagaatagaaggaaaatgtgtcatagtctttcccctctctgattag

SEQ ID NO: 4739 - DNA, 479 bp, Homo sapiens
ggttgataaggtcattttagccaaggtaaatattctcaggatcaattttccccttccttagcctttcagagtatagaccatttaattgagattttattctttttcttaccactttcatttaaacattttaaatgttgtttatattattcagaggcacatatctttctgatagtttaacttgaaagttcaattaagttatcaatagttttctttttgtaagacttttatccttgtgccttggcgacaatttccttcatgatttcactggcaaattgatattgccattttaaatgaagcttaatgtaagagtagaatgttataaggaggcttgatttttttaaaataaagtgggatcatatttccaatggcttgtgctcccacaatgtaatttgggaaasttctcactattgtgggaattttcctttcaaacttctagaatagaaggaaaatgtgtcatagtctttcccctctctgattag

SEQ ID NO: 4740 - DNA, 839 bp, Homo sapiens
caaaggaaaaatatatatatatatacatagattttctaagatatgttaagggcgcacactcattgttagcagcctaaacccgtagacaggctctcttataatcctagcacaactctgtgtccatctgtatacatgagtgttttcatacacagccaaacatatcaaccacatgtcatatcaaccacttgatcttaagccctgcagatcacaaatcatcaatgtatcttcatcataagcacaagcccacagatgtggaacagtaaagttcacattctctttatatagtacaaatactcttcattaatatagcaggcccataaagatagtggcaattgggcaatatatgctttacttgtaggccattgatagatctctttaaatgaatagtattttctaccaaacaccaaagacagaaacaaaactcgtcaggctgagttgagcycataccttgaattgctcctctgtgttcttccttatcaatggagatcctcgtaagttgagagattctgtcaggaggtatttcatgtgggaatcccctgggctactgggtcacagcagtaactcagcgatctcagctactggagagtatagtggcaatggcaagagtgatgctacccacctggggccattcagttggtggccaaatattattcatacatgtgaattgtgccctggcccagctctttgaacatgaaccattatggagtgtgtttgtgtatttgcaggttgactgtttttgtggggttaggttgcttggctgccagtagccttactgatatctctctgaaacattcaagtcatattatcaaataatcatattgctcttacaggttaaaacg

SEQ ID NO: 4741 - DNA, 839 bp, Homo sapiens
caaaggaaaaatatatatatatatacatagattttctaagatatgttaagggcgcacactcattgttagcagcctaaacccgtagacaggctctcttataatcctagcacaactctgtgtccatctgtatacatgagtgttttcatacacagccaaacatatcaaccacatgtcatatcaaccacttgatcttaagccctgcagatcacaaatcatcaatgtatcttcatcataagcacaagcccacagatgtggaacagtaaagttcacattctctttatatagtacaaatactcttcattaatatagcaggcccataaagatagtggcaattgggcaatatatgctttacttgtaggccattgatagatctctttaaatgaatagtattttctaccaaacaccaaagacagaaacaaaactcgtcaggctgagttgagctcataccttgaattgctcctctgtgttcttccttatcaatggagatcctcgtaagttgagagattcygtcaggaggtatttcatgtgggaatcccctgggctactgggtcacagcagtaactcagcgatctcagctactggagagtatagtggcaatggcaagagtgatgctacccacctggggccattcagttggtggccaaatattattcatacatgtgaattgtgccctggcccagctctttgaacatgaaccattatggagtgtgtttgtgtatttgcaggttgactgtttttgtggggttaggttgcttggctgccagtagccttactgatatctctctgaaacattcaagtcatattatcaaataatcatattgctcttacaggttaaaacg

SEQ ID NO: 4742 - DNA, 819 bp, Homo sapiens
tgtctttttggtctgagatggcaccactgaaggcactgattcctgtcctggtgtcttcctttcaaacctgtaattggtcaggttataccctgatgaggtgctgtatctgacagcccttttctaccttcaatctgaccctatgccagaattctgcctcacatttctctgtaacaaacaatgattctggttgtttggccctggcctgatggtaagatggtttgaccctcctaggaagatgatgcaaaccaacatttcttaatttgtgatccatggagtattgtgtgtgtgtgtgtgtgtgtgtgtgtgtgtgtgtgtgtgtaaatcgccaagttggagacactggccagaaataaaatgtggaatcagtctgccctggcaaagttgtcaagcttccccacaatactcaatagsccttcctaaaaaagcaagtccatcagtagctgggagagggagagagagagaggtgggaagaaaacaaaaggcagggagagaaaaggatggagatgagaagttccatgaggtttcttcaaaatcaaatgctgtttaaagtctgtgttgcttaactaaaaagtcctaatggaagtaaaaaaaaaacaaaaaacaaacaaacaaacaaaaacaaaaaaaagagtctttttacttaagcttctatttaattttacctctattttctttctatttattctaacagtatgttgttactttcaagaaagttactttgaagacttctcatttctgtttgtaaaaatccatttctgggtacaagttaaacacagaaatcctgacctaagcttgggcaccaagtgtggatagggatcc

SEQ ID NO: 4743 - DNA, 819 bp, Homo sapiens
tgtctttttggtctgagatggcaccactgaaggcactgattcctgtcctggtgtcttcctttcaaacctgtaattggtcaggttataccctgatgaggtgctgtatctgacagcccttttctaccttcaatctgaccctatgccagaattctgcctcacatttctctgtaacaaacaatgattctggttgtttggccctggcctgatggtaagatggtttgaccctcctaggaagatgatgcaaaccaacatttcttaatttgtgatccatggagtattgtgtgtgtgtgtgtgtgtgtgtgtgtgtgtgtgtgtgtgtaaatcgccaagttggagacactggccagaaataaaatgtggaatcagtctgccctggcaaagttgtcaagcttccccacaatactcaataggccttcctaaaaaagcaagtccatcagtagctgggagagggagagagagagaggtgggaaraaaacaaaaggcagggagagaaaaggatggagatgagaagttccatgaggtttcttcaaaatcaaatgctgtttaaagtctgtgttgcttaactaaaaagtcctaatggaagtaaaaaaaaaacaaaaaacaaacaaacaaacaaaaacaaaaaaaagagtctttttacttaagcttctatttaattttacctctattttctttctatttattctaacagtatgttgttactttcaagaaagttactttgaagacttctcatttctgtttgtaaaaatccatttctgggtacaagttaaacacagaaatcctgacctaagcttgggcaccaagtgtggatagggatcc

SEQ ID NO: 4744 - DNA, 819 bp, Homo sapiens
tgtctttttggtctgagatggcaccactgaaggcactgattcctgtcctggtgtcttcctttcaaacctgtaattggtcaggttataccctgatgaggtgctgtatctgacagcccttttctaccttcaatctgaccctatgccagaattctgcctcacatttctctgtaacaaacaatgattctggttgtttggccctggcctgatggtaagatggtttgaccctcctaggaagatgatgcaaaccaacatttcttaatttgtgatccatggagtattgtgtgtgtgtgtgtgtgtgtgtgtgtgtgtgtgtgtgtgtaaatcgccaagttggagacactggccagaaataaaatgtggaatcagtctgccctggcaaagttgtcaagcttccccacaatactcaataggccttcctaaaaaagcaagtccatcagtagctgggagagggagagagagagaggtgggaagaaaacaaaaggcagggagagaaaaggatggagatgagaagttccatgaggtttcttcaaaatcaaatgctgtttaaagtctgtgttgcttaactaaaaagtcctaatggaagtaaaaaaaaaacaaaaaacaaacaaacaaacaaaaacaaaaaaaagagtctttttacttaagcttctatttaattttacctctattttctttctatttattctaacagtatgttgttactttcaagaaagttactttgaagacttctcatttctgyttgtaaaaatccatttctgggtacaagttaaacacagaaatcctgacctaagcttgggcaccaagtgtggatagggatcc

SEQ ID NO: 4745 - DNA, 779 bp, Homo sapiens
atataaagtattaatcctgggtgtgtctgtgagagtgttgcaaaaagagattaacatttgagttggtgggctggggaaggcagatctacccttaatctggtgggcacaatctaatcagctgccagcgaatataaagcaggcagaaaaacttgaaatggagagactggctgagcctcccagcctacagcttttctcccgtggtggatgctccctgcccttgaatatcagactccaagttcttcagttttgggattcagactagctctccttgctcctcagtttgcagacagcctgttgtggtacctttgcaatagtgtaagttaatacwtaataaataaataaataaatatcccattaatttttttttcttccttagccatggtaactcatatggtgtgagttcagagagggggcaatgtagcaggagtgagggctagagtaatacaacttacttcttcctataggagtttattcaagctggtctagattaatgatagagtgctactgcacacacttacttttatggtttggtaaaattatatatatataaaattatatataatatatatatctcccattaattctgtccctctaagagaaccctgactaataaaccttccaaagttaagcacaggtagtttcatctgatccctcctaacagtaagaaagagacataatgcctaatgggcctctgtggattttacagacaacatatactatagttgcatatagtattctgacccatttacctggtaactcaaatggctgctgatttggtt

SEQ ID NO: 4746 - DNA, 696 bp, Homo sapiens
taccacagggcctttgcacctgctaggccacctgcctgcaaagcctctcagctccttaacctggctaaactccccctcatccttcagagttcatcctataagaagcaccccttcctcaagggagccttccttagttgctctgactgggcaggtctgagctacagctttcagagaccctgttcttgctccttcagagcactgatcttcatttgtaaagaaatgtggggtgtttttttttcttggctgggrgcttcccactggactgtgagctccacagaacagagatggtttggacactgagacaagaattggtgtgcaaatgatggtttaagccagtgatcccaagggagatgaggaagggtgtggggaaaacaggacagggaagggaaggaagccaggcagggtacaacctcaggacaagactcatggtcccacacaggagctctggagtgtgagttacatggcagggttatcttggtctgaggcaagaaagctgggctttcatgctcgctgtcagtcattgactaagaactgtcctagcagaaaggtgaagggagagacccctggggtctctgcacatggcagaagagtggctccagaagcccagagatagtcctttgaggaagagtctcaagtgcaggcagatgaaggacagcacatggaagctggcagagtggtgcagagcaatagacaaaa

SEQ ID NO: 4747 - DNA, 633 bp, Homo sapiens
ggtccttgtttccccttcgccttccaccacaattgtaagtttcctgaggcctccccagccacacagaactgtgagttgattaaaccttttttctttataaattacccagtctcacatagttctttaaaggagtgtgaaaactaactgatccaccaggttaccagtggtgtgcatgctaggggctgccaaacctccctgactccctcatatgcccctgttggagaacacaaactactaacagatatttctaataactacttgaggtgtacactctaggcagattcaaactctctcactaaaacccatctatgaaagcaacacaagcctgaccrcccagatttttctggagctccattcccagagatttcctgcaaagtcctgggactttgaaacaacattgtcagtgggaagctgggaagtctcagggcctgggtaatcccaaatagctaaaggatggaagccatggctgggcagtatttttatggttaccagctcccttgaaaagtgaggtgaaggataagcagccttaggtccagccaaggctggcagcaaccttgagagagcaaacccagacagatgtccagagctggacagagataatggtgagaagacagtgagtgaggagggggcagt

SEQ ID NO: 4748 - DNA, 545 bp, Homo sapiens
aaagaaaggaaggaaggaaggtagaaggaaggaggaaggaaggaaagaaggaaggaaggagagagaaagaagaagaaagaaggaaggaaggcagaaagggaggaaggaaggaagagaaagaaagagagagagagggagggagggagagagggagggagggagggagggaattagtcctttgataacctgctttgtattgtgattttcttggatgcaggcctggcttggtgctggtcaggcttcccagagctggagtcttgccttttcacaaaatatggaagtggcaacaagaacttcctgtcagtctctgtgacgacctgcccaagtcactgatggctgccttgcctggcttttatcttagatgtacacrtgaccacttctcctggattccatgttggtgctcttcccatggactcactgactgagctgctgtctctcaatgttcgtggttcttttctgagcttgtgtgtgagcatgtctcttgagccagctggaagctcaatgcaggcagggcaggggaagcagacaagctcatttaggaagct

SEQ ID NO: 4749 - DNA, 768 bp, Homo sapiens
agtttcaaaaagaaccttaatggmaggttggcattggattcattcctgtggtgctcctgttgcaactttaagtgtctcatttcaagtgcttttgcaacaggaatttttttgggggtaatcaaaggtagtatgttcaataaatagtctgaagatagaaatagcccaaatgtcccttcatagataaatgaataaaccaattgtggcatatacatactatagattattcagccataaaaaggaatgaactactgctacatgctaaaatatgaatgaaccttgaaaaattatgctaaggcaaagaaacaagatgcaaacagtcacatattttatgattcaatttatacgaatacataaatccaaggagatagaacacagactgatggttgccaggggtagggagaagtaggaatgaggagacactatttaataggtaagcagttttcctttggagtgatggaaatattttatgttttagaactaaatagaagtgttttagaactaaatagaaatagtgcttgaacaacaacgtgaatgaactaaacaccactgaattctttactttaaaatggttaattttacactaggtggatttcacttcaatacatttttgtacaacaattaagtggtaaatattttactgtccacccataatgagatgtcatttagtactgactaagaacatggatgaacttcatgtgctgtagtctccatcaaccctcacctaatgccaccttgtatccagacttgggaggagggatgtacacccta

SEQ ID NO: 4750 - DNA, 768 bp, Homo sapiens
agtttcaaaaagaaccttaatggcaggttggcattggattcattcctgtggtgctcctgttgcaactttaagtgtctcatttcaagtgcttttgcaacaggaatttttttgggggtaatcaaaggtagtatgttcaataaatagtctgaagatagaaatagcccaaatgtcccttcatagataaatgaataaaccaattgtggcatatacatactatagattattcagccataaaaaggaatgaactactgctacatgctaaaatatgaatgaaccttgaaaaattatgctaaggcaaagaaacaagatgcaaacagtcacatattttatgattcaatttatacgaatacataaatccaaggagatagaacacagactgatggttgccaggggtagggagaagtaggaatgaggagacactayttaataggtaagcagttttcctttggagtgatggaaatattttatgttttagaactaaatagaagtgttttagaactaaatagaaatagtgcttgaacaacaacgtgaatgaactaaacaccactgaattctttactttaaaatggttaattttacactaggtggatttcacttcaatacatttttgtacaacaattaagtggtaaatattttactgtccacccataatgagatgtcatttagtactgactaagaacatggatgaacttcatgtgctgtagtctccatcaaccctcacctaatgccaccttgtatccagacttgggaggagggatgtacacccta

SEQ ID NO: 4751 - DNA, 922 bp, Homo sapiens
aactcaatagtacgatctcattaaaactctttttgcaatatagcatttcaatagctagatgattataggagaaaaataattcctttggttacattttagaaagaaggtagacatgaaattacaagcacttggttcaaatctcagctctgccacttattgtgtgactttgatcaaaatatcaatctctctgagcctctgtatcttcatcaagagaatgctgataatagtgcttgcaatttaatgaattaaattataatggctatgctgtcagggcaagtgctcgagaaatgtttttccttaactccacttgcctcttttccctgataaaaaaaatttattcataatcattcattgctgtgaatgtccatataaaatcactaaccaagaatgtttttcctgtgttgagtgtcttcattaagttgtacatactttgggacttacttcacagtgtttgagacatacagacatatatataacatatatattacatatacattacacatacatatacatatattacatatgtgtgtwatatatacgtttgtctcatatcttaatgccaattctaaaaagttttgctttttgaactgttgaaaaacaatgatacaattctatccctgtagaatcttcaaaagacatgagaacaaatgtggtttccttttaaacagtttattcactattgagtactttcacaaaaacaagaagcaactacggtatacccaatattgtatgcaataaaacattccaaaataactcagagaattgttcctgctgtctgaggagcttacaatgtgagtaggaaaggggaataacaacaatagcagcaatcatgaaatcttgtgaaacaaaatcttatttttttcctgtggacttaccacatacacagttgtattaaattgatgttgtatatgaaatttaatgt

SEQ ID NO: 4752 - DNA, 761 bp, Homo sapiens
gggagtgcagtgaggggcccttcacaccccgatcctcctccatggcccctctgaccactccagcgagaaacaggcccagacagaaaacgactttactgagaacatttaatttaatgtaaaaatgcccctttaggaaaacaagaaggcccaggcagccggtcagcacaggctgggagagaatgcakcgaacatggggcctgtcggaacttcccagacgtggtgggaaccacaccagcacagagtcaacagcaggcaggggaaggcctgcggggccccagggccagaggctaggacgggcaagccagaccggatttgggaaacgtgttatcatttccaaggactatcccaagtacgtggggtaggagaaccttggaggccaaacaggctgcctggatttgtccttccggacgccgcccccaccccgccgcccattatttattgctgtcactttgttgacgttccagagccaggcctggctgctgcggctcccagacccggtcccaggcatgttgggacacgggccggctgtgctctgtggaatgttcccaggcagcaggtccacttcctgggctgcagccctgggttctgctgataccccttctgtagcagacttctcctgccctgtcctccagcatggcctgccggcgtgggacaggcctgccccacatctcaaactcggggggcaaaaaatgtccttctgtggagggggcccctgaaggagaactccagcctgcttggttgactgaggttcttcttccctg

SEQ ID NO: 4753 - DNA, 761 bp, Homo sapiens
gggagtgcagtgaggggcccttcacaccccgatcctcctccatggcccctctgaccactccagcgagaaacaggcccagacagaaaacgactttactgagaacatttaatttaatgtaaaaatgcccctttaggaaaacaagaaggcccaggcagccggtcagcacaggctgggagagaatgcagcgaacatggggcctgtcggaacttcccagacgtggtgkgaaccacaccagcacagagtcaacagcaggcaggggaaggcctgcggggccccagggccagaggctaggacgggcaagccagaccggatttgggaaacgtgttatcatttccaaggactatcccaagtacgtggggtaggagaaccttggaggccaaacaggctgcctggatttgtccttccggacgccgcccccaccccgccgcccattatttattgctgtcactttgttgacgttccagagccaggcctggctgctgcggctcccagacccggtcccaggcatgttgggacacgggccggctgtgctctgtggaatgttcccaggcagcaggtccacttcctgggctgcagccctgggttctgctgataccccttctgtagcagacttctcctgccctgtcctccagcatggcctgccggcgtgggacaggcctgccccacatctcaaactcggggggcaaaaaatgtccttctgtggagggggcccctgaaggagaactccagcctgcttggttgactgaggttcttcttccctg

SEQ ID NO: 4754 - DNA, 801 bp, Homo sapiens
aatggtatttcccagattatattccagggttttttaaaataggttttaggtttcacagttaagtctttaatccatcccgagttgatttttttttgagatggagtttcattcttgttgctcaggctggagtgcaatggcatgagcttggctcactgcaacctctccctcctgggttcaagcaattctcctgcctcagcctcctgagtagctgggattacaggcatgcaccattatgcctggctaacttttgtattattagtagagacgggggtttttccatgttggtcatgctggtctcgaactcctgacctcaggtgatctgcccgccttggcctctcaaagtgctgggattacaggagtgagccaccaygcccggccctgagttgatttttatatatgatgtaaggaaggggtccagtttcaatcttctgcatataactagccagttataggatggaattttagagctgtctagatgaccactgcgtgggtggcagtgaggatggggttactggtggtaggtggagcacagtggtacaaacttgaatttgtggtgacttggtatggtataccagtggacaagaattaattggtattttctatgtggaaagtctttacttcaattttttaaattgaataatttagttttattaacaagaatagaatgaaaacagttcaatttctttaataggtgtagggatattggtactttgtgtcttttaagaaattttttcttttcatctaagttcataaatttatggcataatgttcatatttccttaatatcttttaaatgtctta

SEQ ID NO: 4755 - DNA, 744 bp, Homo sapiens
ggatccacctggactaggagtgactgggctgggtaagcagtggagctggccagagtagccaggcagggaggaggagccctggggcatgccagtactgagaaggccctgagctcaagaaggtccctttattctggaggatgaaagggctacaaaaattacaaaggccttaagtccctgggaaaagcagttaggctcccaaaacagctgctttcaagacccagaactctgaaggaggctgtgagcagctttccctgagctgatctgtcttcctaccatctgggacctgctagtgatatctgtactccaactgccctgcccccaggggtcaaccaacccactcctatctgaggacccactcctatctgaggaccagacagagaggccagaggttcaagggcacctggactaaggaagtggagaggagagagacagatctgggctccagagccccaggtacaatgtgagggctgacacgtggtcaggagcacccccagtgccctgtgaaatgggaacggctacagcccctactctttttcttttttttttgagacggagtttcgctcttgttgcccaggctggagtgcaatggtgcgatcttggctcaccgsaacctccgcctcctgggttcaagcgattctcctgcctcagcctcctaagtagctgggattacaggcacatgccaccacacccggctaattttgtatatttagtagagacagggtttctccatattggtcaggctgg

SEQ ID NO: 4756 - DNA, 744 bp, Homo sapiens
ggatccacctggactaggagtgactgggctgggtaagcagtggagctggccagagtagccaggcagggaggaggagccctggggcatgccagtactgagaaggccctgagctcaagaaggtccctttattctggaggatgaaagggctacaaaaattacaaaggccttaagtccctgggaaaagcagttaggctcccaaaacagctgctttcaagacccagaactctgaaggaggctgtgagcagctttccctgagctgatctgtcttcctaccatctgggacctgctagtgatatctgtactccaactgccctgcccccaggggtcaaccaacccactcctatctgaggacccactcctatctgaggaccagacagagaggccagaggttcaagggcacctggactaaggaagtggagaggagagagacagatctgggctccagagccccaggtacaatgtgagggctgacacgtggtcaggagcacccccagtgccctgtgaaatgggaacggctacagcccctactctttttcttttttttttgagacggagtttcgctcttgttgcccaggctggagtgcaatggtgcgatcttggctcaccgcaacctccgcctyctgggttcaagcgattctcctgcctcagcctcctaagtagctgggattacaggcacatgccaccacacccggctaattttgtatatttagtagagacagggtttctccatattggtcaggctgg

SEQ ID NO: 4757 - DNA, 672 bp, Homo sapiens
tgcggcccagaaggagaggggaggccggtgggcagacggagggacagatgggtgggcagatgaatggacaagaagatgcatagatagactcacaggtaattggacagatggacaaacaggtgggggctgaagacagacacgaagatggatcgacagacaggccagatagctagacaaagaggacagtaagagaaagatggtcagatagacaatgggacagagatgggcttacagatgggcggacagacagacaggtctgaacagcgggctgccagatggacagatgggtgaatggacagatggctggcagctgtggcgagctgctgccctcaccaagtgcacactacggagtggccaaactcatgcctcaacttctagttttcagctcctgcttgttcctggcaggaggccaggcagcaaagcgtctgaggggagttttcyttgcctagagaagtcagctgctgtgttaactccctcactgctggtaggtccaaaggccccacctaccgcccgccagagcccatggtcacactgtcgcaatgtgcaggagaacttggtgcgtgctgcactgcggttgccaggtaggggcagggctccctggaacctccacaccattccccaggttctcagcagctctgggaaagcagagctggggccgcttaactctgccct

SEQ ID NO: 4758 - DNA, 821 bp, Homo sapiens
aggcatgagataagaagtattggatcttatataatctactttagatcatttaccttttatttggaaacaatcatagaatgtctcatttggagkggtaattacacaaggtttaatgctgattaggtagagggaatagttctctatatggtattctttctgctacagcctaagtgaccattagactctcttctcaagggatttctggagtcagttttgaaagaattaagatgttatattttaaaaatatattacacgtctagcaagtggatgagtgtgttgtgcgtggtctgtgtgtctgtgtgtgtgtgcattgtctgattaatgaatgaatcctggcccctcactacctagttaatttactaaacctctctatgcctcagtttctttcccatgaaataaagatagtgacacttacctggcaggattatcaaaagaagtaaatattatttttttaaaaaactactttgtgcagtgcctagcatatggtatgcacccaaataatgttagttctctttcctcttttctattgacagtcacctagcaaagaatagcactttaggggacactgggcagggggacacagaaagctggacgttagggcaccacctcagcctgaagggacagctcagttagaaactggaggtcatgggcacaataatgtgtgtgcaatgtgcttcaggcacaggaaacaagcagtgcccacaggtcagtgaatacggtcagagctttggtccatatgaccatttcactcctctttgcagagaactgggctttgcaaggggcccatggtagccaataggaggtgacaatccatccactaa

SEQ ID NO: 4759 - DNA, 772 bp, Homo sapiens
ccttgggcagaagacagccagcttctcactgtrtgctcacatgacctcttctttgtgagcagacagagataggtaggcgtctctatactttcctctacttataaggccaccaatccaatcagattagggaccttctctcatgagcttatttacagttaattgcctgctaaagacccacgtccaaacagtcacactgcggggttaaggcttcaacatctgacttttagagggaaagaattcagttcatacctctcagtaattctaagtgaataagatagcacttcaaaacctatcagctagtgggaatgtagtcatgatactagtcctgagtctcctttgtgtgctaaaatactaagaattattttcttttcagtttcttttttaggatactaatgtccaggaaaggatacttttgaactcttaagataggaagtatcttgggtcatcactgtcattgcacaaaataagcttaaatcccactctaacattttaataaaagattcctctgtttcctactagttacatgtttgtagtcctatccttggggccttctttgaggcagcattagttcttactaggctctacaccaaatggcagatgtgatatagatgataaaattctcaggccaagtctttctggatttgcctgaaagaagagatataaagaggtattatctacatccaggtgacaaaaaatgccacttgttggatttccccagaggctgcacatatcttgtgcttgaaattcctaagcacttcattaaatatttggc

SEQ ID NO: 4760 - DNA, 772 bp, Homo sapiens
ccttgggcagaagacagccagcttctcactgtatgctcacatgacctcttctttgtgagcagacmgagataggtaggcgtctctatactttcctctacttataaggccaccaatccaatcagattagggaccttctctcatgagcttatttacagttaattgcctgctaaagacccacgtccaaacagtcacactgcggggttaaggcttcaacatctgacttttagagggaaagaattcagttcatacctctcagtaattctaagtgaataagatagcacttcaaaacctatcagctagtgggaatgtagtcatgatactagtcctgagtctcctttgtgtgctaaaatactaagaattattttcttttcagtttcttttttaggatactaatgtccaggaaaggatacttttgaactcttaagataggaagtatcttgggtcatcactgtcattgcacaaaataagcttaaatcccactctaacattttaataaaagattcctctgtttcctactagttacatgtttgtagtcctatccttggggccttctttgaggcagcattagttcttactaggctctacaccaaatggcagatgtgatatagatgataaaattctcaggccaagtctttctggatttgcctgaaagaagagatataaagaggtattatctacatccaggtgacaaaaaatgccacttgttggatttccccagaggctgcacatatcttgtgcttgaaattcctaagcacttcattaaatatttggc

SEQ ID NO: 4761 - DNA, 772 bp, Homo sapiens
ccttgggcagaagacagccagcttctcactgtatgctcacatgacctcttctttgtgagcagacagagataggtaggcgtctctatactttcctctacttataaggccaccaatccaatcagattagggaccttctctcatgagcttatttacagttaattgcctgctaaagacccacgtccaaacagtcacactgcggggttaaggcttcaacatctgacttttagagggaaagaattcagttcatacctctcagtaattctaagtgaataagatagcacttcaaaacctatcagctagtgggaatgtagtcatgatactagtcctgagtctcctttgtgtgctaaaatactaagaattattttcttttcagtttcttttttaggatactaatgtccaggaaaggatacttttgaactcttaagataggaagtatcttgggtcatcactgtcattgcacaaaataagcttaaatcccactctaacattttaataaaagattcctctgtttcctactagttacatgtttgtagtcctatccttggggccttctttgaggcrgcattagttcttactaggctctacaccaaatggcagatgtgatatagatgataaaattctcaggccaagtctttctggatttgcctgaaagaagagatataaagaggtattatctacatccaggtgacaaaaaatgccacttgttggatttccccagaggctgcacatatcttgtgcttgaaattcctaagcacttcattaaatatttggc

SEQ ID NO: 4762 - DNA, 771 bp, Homo sapiens
ccactgagaccctctttaaagagaaggaaaaaaaggtattctggaagatcttgtgcagttgcaacaatgtttcagcatatatatgtgaattcatatatgacacctgaacggaatcatgaagtaacagctgagattatatggtggcaaaaatgacctgcttttcctgaagctttgggaggcctaggattcttgctttaggcatcacctttgttaagccttaaagggggctacaacttgtgcaaaatggtgtctctggtaacacttcagaaataattggcaaaagtgtaataggaatacacaaatctttattttgaaataatcttgtattttaatgtggaattagaagcagcacatcaaactggtgagttcacagaaacttacctgagatgatgctgggttccattgctgttgtgctaagtcacgtatttttgtagctgctgttagctgtgtctagcgttttgtaacctaaggagggtcttatagaagttggtatgttaactaaatcttggactgggaaacagcaccatttgtatcctctgcaaacagatttacgcttttgaggctcaaaccaactagtgttctcatgggctgttgcctaaggacagataaacatggaaaacaggctatgtccagggacagatgattggtggttaaraattacagtaaaggaaaattacacctggattttcttctgtaaagtttcaaggaacttggatttgaactgtgaatctactgttttggcaaaaaatctcaaagaaaaggatgtttgtt

SEQ ID NO: 4763 - DNA, 1823 bp, Homo sapiens
tacaagattccttcattagataagaatgatattagatgatttataacgttccttcaaacttttaggctgttttttgcatgagggaaaatccatctttagattatacctgtcatttcttcgtgccatatagtgcttcttgcaccaagagactatgtcatttatttagccttttgatgttcaatcatgtgattaacatagttattcaattctaggagacagagatggaatttgacttagatattctgagaaaaattcctcaagttatattcagaaaaaaataaaaataatcatttacaaagatagttaagtaatccccttaaagaaggagcgtcaatgattggaaaggccaaatagcaagatgtgtcagtcatgatatgaatttaattgtcatgaagcgaaaaagaaaatacattatagcaaatactccaggaccaataacagatttttttttcactgttggaaaccttaggtttatgaaaggacctgtgtatgaaccaatagcccacttttaaaattaaaggcacaaaggcatatttttagaataatatgttttgataagacatttctgagaattgaatatatccatattaacaacttcattagttggggaagaagtgtttattttaatctttgcaagatctagaaaatatctagtgttgtagcgtatactgagtacttaaatattattgaattatagcagagaaatatacaatagaaaaaattaagctctccctttgaaggacaatatggatgaaagctgtggcagttgttttctcttaagctctttgcaacctactctctctctaaagggttggctcaatctcacttaaagtattctgtatttagaggtataggtactgaacttaccataaagcaatttaccaccttgaattgtttctcatatatcttccgataccccacaccaccccatcccagaagcttctatggtgttgagaccctgtccgtcttgattaattacagtttgtagcttttcacaatggtattttgcatattcagttgtgactgatatctgtgaaaatgaaaatcagtctctgtttataaagaacaaatgttcttcatcatagatattataatcttaaagaaaactataactttaaaccttaaaaacttttctttcttaattttttttttggtatcttgtaagtgcagaggcctcaattgcaaggagaaaaaagagagatggaggggatcctacccttcctgtaagttggtacctacaagatgtaccaaccagttgcactgttccaaattaggactctctttagttcctaactcaagtaaacaatctattaacactacaataaacagacaagttatttacaacattatgagacaaacagaaaattgaaagctattgcaggtttgcatctctggaaagtagaccctgagacaaagattgacatgcaggacatttactggggagtgctcccgggatcaacacctgcgggtggtggatgggaggcagcaggattggacgcatggagaagttggactaaaatgcagttgccacatgtcctctgctgakggaccccactggaagcactgaggcccagatgtctcctcagtggagtgccaagttagggtatggacctttaaccacgcatcaagcagtcactgaatgtgggctgccccagggaaaggcacatgaccttgagggaaaaggctcagaagctgaggactgtcagccagtagcacagccagccagtgaggcatcagcccttcagtcatgaaggaattgctaggcaatgaagcacagcctctatcaccaatggtgtgtgtgtgtgtgtgtgtgtgtgtgtgtg

SEQ ID NO: 4764 - DNA, 1823 bp, Homo sapiens
tacaagattccttcattagataagaatgatattagatgatttataacgttccttcaaacttttaggctgttttttgcatgagggaaaatccatctttagattatacctgtcatttcttcgtgccatatagtgcttcttgcaccaagagactatgtcatttatttagccttttgatgttcaatcatgtgattaacatagttattcaattctaggagacagagatggaatttgacttagatattctgagaaaaattcctcaagttatattcagaaaaaaataaaaataatcatttacaaagatagttaagtaatccccttaaagaaggagcgtcaatgattggaaaggccaaatagcaagatgtgtcagtcatgatatgaatttaattgtcatgaagcgaaaaagaaaatacattatagcaaatactccaggaccaataacagatttttttttcactgttggaaaccttaggtttatgaaaggacctgtgtatgaaccaatagcccacttttaaaattaaaggcacaaaggcatatttttagaataatatgttttgataagacatttctgagaattgaatatatccatattaacaacttcattagttggggaagaagtgtttattttaatctttgcaagatctagaaaatatctagtgttgtagcgtatactgagtacttaaatattattgaattatagcagagaaatatacaatagaaaaaattaagctctccctttgaaggacaatatggatgaaagctgtggcagttgttttctcttaagctctttgcaacctactctctctctaaagggttggctcaatctcacttaaagtattctgtatttagaggtataggtactgaacttaccataaagcaatttaccaccttgaattgtttctcatatatcttccgataccccacaccaccccatcccagaagcttctatggtgttgagaccctgtccgtcttgattaattacagtttgtagcttttcacaatggtattttgcatattcagttgtgactgatatctgtgaaaatgaaaatcagtctctgtttataaagaacaaatgttcttcatcatagatattataatcttaaagaaaactataactttaaaccttaaaaacttttctttcttaattttttttttggtatcttgtaagtgcagaggcctcaattgcaaggagaaaaaagagagatggaggggatcctacccttcctgtaagttggtacctacaagatgtaccaaccagttgcactgttccaaattaggactctctttagttcctaactcaagtaaacaatctattaacactacaataaacagacaagttatttacaacattatgagacaaacagaaaattgaaagctattgcaggtttgcatctctggaaagtagaccctgagacaaagattgacatgcaggacatttactggggagtgctcccgggatcaacacctgcgggtggtggatgggaggcagcaggattggacgcatggagaagttggactaaaatgcagttgccacatgtcctctgctgagggaccccactggaagcactgaggcccagatgtctcctcagtggagtgccaagttagggtatggacctttaaccacgcatcaagcagtcactgaatgtgggctgccccagggaaaggcrcatgaccttgagggaaaaggctcagaagctgaggactgtcagccagtagcacagccagccagtgaggcatcagcccttcagtcatgaaggaattgctaggcaatgaagcacagcctctatcaccaatggtgtgtgtgtgtgtgtgtgtgtgtgtgtgtg

SEQ ID NO: 4765 - DNA, 828 bp, Homo sapiens
gattataaataccataacagcaaataatccttccccagagccaaacacagtgcctggcatatagtagccgttcaaaaatatttgtggaatatatgaatgaatgaatgaatgaatgattgatttaattgcccagaaagagtaggtggagagaggaaaggagataaacagaagctcatcaatattttctaagtagagcatgctaaggaaaaacagaggtagagattatcttcattttacggaaattcctgagaagtaatctccattaaaaaaataagagataagtgtcatgtcacaaacttcaaagttacagttaagatagctatcgtgtgttaaatgtggtaaatcatagcctcaaagaaatatttcctaacccccttgtctctcctgccctcttaacctacttaatttattttcatactactaatagattctttcatatagctgaatcaatccattcatatatgcatacatttgggtgtactgtttttacaaactgtattattattataataaggttgttaaagtttgcttgtggtctctctctttcccataagaatgttagtttcaggagtccaaggactttgggtattttttttttttttttttttttgagggtagagtctcactctgtcacccaggctggtgtgcaatggtgcratcttggctcactgcaacatccgcctcccgggctcaagcgattctcctgcctcagcctccagagcaggtgggattacaggtgcccaccaccacccccagctaatttttgtatttttagtagagatggggttttaccatgttgtgcaggctggtctcgaactcctgtcctca

SEQ ID NO: 4766 - DNA, 620 bp, Homo sapiens
tttttgttgtgctgctggattcggtttgccagtattttattgaggatttttgcattgatgttcatcagggatattggtctaaaattcccttttttttgttgtgtctctgccaggctttggtatcaggatgatgccagcctcataaaatgagttagggaggattccctctttttctattgattggaatagtttcagaaggaatggtaacagctcctccttgtacctctggtagaattcggctatgaatccatctggtcctggaccttttttggttggtaggctattaattactgcctcaatttcagagcctgttgttggtctatttagggattcaacttcttcctggttcagtcttggatgggtgtatgtgtccaggaatttatccattccttctagattttctagtttattttcattatttcctgtatctattatttatttcattttcttgttcattacttttatttattttattttgtagagatgggggtctcagtattccacctaggctgctctcaaactcctggcctcaagtgatcttcctgctgctacctcccaaaatgctaggattacaagckctacttaattttcttcaagatagaagcatgtccatgcatcaa

SEQ ID NO: 4767 - DNA, 816 bp, Homo sapiens
ctatctctatgagggtattaattaaatgatttccttaaaaatgttgtttcatttagccttttccctaacaaactaattcaaaacttaaaggggttaaaacaacaatttattgttcctcattattctatgggttgattgggtttttttttgctggtcttgtccgtgctcactcaagtgggtgcgattggtaggcaggttggcccagggtgaggggtggcaaggatgtctttcatccaggttacttctcagcaagatggcctcaggtgcaatcgaacttatatttttcaggaaggaagaaaattattcagtttttagtgttattacagttagtattgttaacataagtgaaatcagttaatgggacagtaagtttgaatgtcttatgtgtggcgcttcttatactttatgtaaattrcagagaagcttccttttaccatcaagggcctttgcacccattttacaaaatatttataagaatccatatgttttaaaattaagaaggagtcaggagacctggattctgaagatttgctgaataaatgcatctgccatgaactgatgatgttactctgagtcatttgattcgattgtcctagatattttcatctgtgagacaaatgtttttaattcagttacctgtagcctctctttcacctccagagttctattgcttttataatgatgctactatttcaaattactctagaagttaaattcagtgcttcagaggataagtatatgggtaaaaaaattaatgcccttcagtaaaaacaaactggctgaacatcttcacatgagttgtttctggcctcacct

SEQ ID NO: 4768 - DNA, 469 bp, Homo sapiens
taggtgagccagttaatatattgttttctattggcracagtgattgtttaagaatgcacatgcgactgaatacccaactatgaatttcctaagaaaaagatatccactcttttttcagtggatgccaaggaagaactgcatacccttacaaggtgctagcgaccatctcaagtttatgaggagagccagccctacaacaaaaccaacatccaagatggagagcagacagctggacagaaactatctgcattgaaatccacacatctgctttgccacttgattgatggatgacattggcaaaaatgtttgtcttgtttcttctgaaatctgtagataaattcatgatccaaagacattaggattgacttgtgctgtcagcgtaaaactaatagttgtttttagtgtgaaaattctctgaaggaatatgactgctgtttggttggcaagaatatttgacaaattatttctt

SEQ ID NO: 4769 - DNA, 805 bp, Homo sapiens
agaaccacgcgctgctgtccaacagctcagcgctgcgacctggcagcccactctgcgctgcgtgcccccagtccccgggacagcgatgccgagagtcatgcgggcaagaaggagagtgatggggaggagagccgcctgccccagcccaagcgggaagggccttgttggcggggagagtgactcggaggaaatgtttgagaagacgtcgggcttcgggagcgggaagccatcggaggccagcgagccatgccccacggagctcctgaaggcccgggaggactctgagtacctagtgaccctaaaacacgaggcccagcggctagagcggacggtggagcgcctcatcacggacaccgacagcttcctccatgatgcggggctgcggggtggtgcgctccttaccggggcctggcctccagggcgaagaggagcrgggtgagggggaccagcaggagccccagctgctggggaccatcaacgccaagatgaaggctttcaagaaagagctgcaggccttcctggagcaggtgaaccgcattggggatggcctatcccccttgccccacctcacagagtcctctagcttcctctccactgtgacttccgtgtcccgggactcccccatcgggaacctggggaaggagctgggcccagacttgcaggtaagggggctcgtggcttcgcctccctgctccgccttgctcttcctccttctcgctggcattgctgcactcgggctcacgctgctcacggctgcttggttatgatttcaaacctgcattgtactaaagcctccggggcaacc

SEQ ID NO: 4770 - DNA, 913 bp, Homo sapiens
tacctctgtccaaacctctgggtctcaggatacccttgtgtgccaggcacaggggtgacactatgaggttaagggcgtggactctcaagccagattgctgggttcaaatcccagctcctcgagctactagttgtgcggcctgacctttcygtaccttattttcctatctataaaatgtcaataataatagtacacatcaaatgagttaatatgtatgtgagattaaaagaaactggggccagaagatctagcagccgaattcacctcctagggaatcacaaaagtatatagtgggggaccctgcagcttgctggcatggttgggcacaagatgaaggtaggaaaaactcattgagatgacagggactcctctatatggagaccctattcctgtagccctgaggtgcctgggtgatgggtaaagtcctgttggggaggaggcctgcagggtttgaggctgcagcctgcacatgaactgggcggcagtgagcaccgatttggggcagtggtggtcccaggaagggagcagctgtcacagtggtcctctctttggctgattttgcatttgaatcacaagcaggataaagctggaggcagaaggaagcttccgaggtaaacttgcaggcagtgggaggcttgggcagaggcaaagaggaagctagtcctaagcgtgtgttgtatctgctgggctggcgcttgcctcatttggagctgagagcctttttaagagaggacaggcttggttttgagatggaacgccatatttcatatacttaccagtagccttttaaaaacaatttgaagcttccctgggtcagagactgatgtgattttcaatgggctgacatcaaagcagctcccctgagcataacgggatgtcaggtccccacaattatcttaggaagggttggttg

SEQ ID NO: 4771 - DNA, 913 bp, Homo sapiens
tacctctgtccaaacctctgggtctcaggatacccttgtgtgccaggcacaggggtgacactatgaggttaagggcgtggactctcaagccagattgctgggttcaaatcccagctcctcgagctactagttgtgcggcctgacctttctgtaccttattttcctatctataaaatgtcaataataatagtacacatyaaatgagttaatatgtatgtgagattaaaagaaactggggccagaagatctagcagccgaattcacctcctagggaatcacaaaagtatatagtgggggaccctgcagcttgctggcatggttgggcacaagatgaaggtaggaaaaactcattgagatgacagggactcctctatatggagaccctattcctgtagccctgaggtgcctgggtgatgggtaaagtcctgttggggaggaggcctgcagggtttgaggctgcagcctgcacatgaactgggcggcagtgagcaccgatttggggcagtggtggtcccaggaagggagcagctgtcacagtggtcctctctttggctgattttgcatttgaatcacaagcaggataaagctggaggcagaaggaagcttccgaggtaaacttgcaggcagtgggaggcttgggcagaggcaaagaggaagctagtcctaagcgtgtgttgtatctgctgggctggcgcttgcctcatttggagctgagagcctttttaagagaggacaggcttggttttgagatggaacgccatatttcatatacttaccagtagccttttaaaaacaatttgaagcttccctgggtcagagactgatgtgattttcaatgggctgacatcaaagcagctcccctgagcataacgggatgtcaggtccccacaattatcttaggaagggttggttg

SEQ ID NO: 4772 - DNA, 913 bp, Homo sapiens
tacctctgtccaaacctctgggtctcaggatacccttgtgtgccaggcacaggggtgacactatgaggttaagggcgtggactctcaagccagattgctgggttcaaatcccagctcctcgagctactagttgtgcggcctgacctttctgtaccttattttcctatctataaaatgtcaataataatagtacacatcaaatgagttaatatgtatgtgagattaaaagaaactggggccagaagatctagcagccgaattcacctcctagggaatcacaaaagtatatagtgggggaccctgcagcttgctggcatggttgggcacaagatgaaggtaggaaaaactcattgagaygacagggactcctctatatggagaccctattcctgtagccctgaggtgcctgggtgatgggtaaagtcctgttggggaggaggcctgcagggtttgaggctgcagcctgcacatgaactgggcggcagtgagcaccgatttggggcagtggtggtcccaggaagggagcagctgtcacagtggtcctctctttggctgattttgcatttgaatcacaagcaggataaagctggaggcagaaggaagcttccgaggtaaacttgcaggcagtgggaggcttgggcagaggcaaagaggaagctagtcctaagcgtgtgttgtatctgctgggctggcgcttgcctcatttggagctgagagcctttttaagagaggacaggcttggttttgagatggaacgccatatttcatatacttaccagtagccttttaaaaacaatttgaagcttccctgggtcagagactgatgtgattttcaatgggctgacatcaaagcagctcccctgagcataacgggatgtcaggtccccacaattatcttaggaagggttggttg

SEQ ID NO: 4773 - DNA, 718 bp, Homo sapiens
caaaacccactgttactactattaccaattcgtgaaagaagggatattttaacatgaaaaaggactattcctaggagtggaatattcttggaataaaggacaattttcccaagaaaggaaggttggctaccttgcacgcacgcgcgcgcgcacgcgcacacacatacacacacacacacacamacacacacacacacctgaattatccttgtttttatttttcatcttgtgtgggtctgatgaaaactgtctcataaataggcctgctagataagttggcttaggggacaaatgactctggggctcaccaagtgtggggtgtgaagagaggacagtggagggcttagatggaagaaatggctgagagatggtctgccctactccagaggctggtagagtgagggaatcttctaaaagcaggccaggccgattcttttaatgcaacacattttagattcaggaaagaacgggagcaagggggaataataacagactctctgaaggtcaattactctgctttccagtggacttttcttccatttccccctcttccttcatatagccctcactgtttgctgagccaatgaccactgccccctccataaaggtggactgaattttcccttcacaaagaagctctgtccaactcaaaggcctagacataacttcatcaggctcaagcagagttcagctgggaagcccaagtctagaactccca

SEQ ID NO: 4774 - DNA, 718 bp, Homo sapiens
caaaacccactgttactactattaccaattcgtgaaagaagggatattttaacatgaaaaaggactattcctaggagtggaatattcttggaataaaggacaattttcccaagaaaggaaggttggctaccttgcacgcacgcgcgcgcgcacgcgcacacacatacacacacacacacacaaacacacacacacacctgaattatccttgtttttatttttcatcttgtgtgggtctgatgaaaactgtctcataaataggcctgctagataagttggcttaggggacaaatgactctggggctcaccaagtgtggggtgtgaagagaggacagtggagggcttagatggaagaaatggctgagagatggtctgccctactccagaggctggtagagtgrgggaatcttctaaaagcaggccaggccgattcttttaatgcaacacattttagattcaggaaagaacgggagcaagggggaataataacagactctctgaaggtcaattactctgctttccagtggacttttcttccatttccccctcttccttcatatagccctcactgtttgctgagccaatgaccactgccccctccataaaggtggactgaattttcccttcacaaagaagctctgtccaactcaaaggcctagacataacttcatcaggctcaagcagagttcagctgggaagcccaagtctagaactccca

SEQ ID NO: 4775 - DNA, 631 bp, Homo sapiens
agttggggatctcctgttcatctatgacctctttggtctctgccagtctggagccgttcctcaaakctgtctttgattttcatgaatcgtttgaagatggcagaccagctgatctgcagaatgcccctcgatttgggttggccaggacccgcgtcctggcgaaggggttccggttactgaccttcgatgggaacagcacagaagtgataccgcgctggctccactctgtcctctggtggcacgcaattccagtgttccccgcactgatgactttcttgtactgaatatttacattaattacattctttatagttataatgtaatattacatatgagaccatggggttcatctgattaggtctgcccaatttagcctgccctgcttgctttgggtcacttgcttttgttattttttttctgtgaagctgaaggccgcgccactgagcgctgtaacttaaccttgccggcttccttacagataacatgtatgtcactactgtcatgatcgttcaaattgtttttcaggaacttggggcagctcctgcctagttcaaaccagttgagaccgtgagctttcaagtaggcttgtgcaaacaaaagaagtggccttttgacatcagaggccccaagc

SEQ ID NO: 4776 - DNA, 781 bp, Homo sapiens
aggcacaagaattgcctgaacccaggaggcagaggttgaattggccactgcactccagcctgggcaacagagcgagactccatctcaaaaaaaaacaaggccgggcacggtggctcacgcctgtaatcccagcactttgggaggctgaggcaggtggatcacaaggtcaggagtttgagacyagcctgaccaacatggtgaaaccccgtctctactaaaaatacaaaaattagctgggcacggtggcgcgcgcctgtaatcccagttactcaggaggctgaggtaggggattcgcttgaacccaggaggcggaggctgcagtgagccgagatcgcgccattgcactctagcctcggtgacagagcgacactccatctcaaacaaaaacaaaaacaaacaaacaacaacaacaaaaaaggctaagcaaagattttgctgcttagaccacaagggctgccatagtctcacaaacaggatggactatggattcagtatgctaggatggtctagggtgcttgttacaaatgtcccagcccagatcaatgaaatatgaatttctatggatgacactgcatttttagcaagctccataggaaaaattggggaacatctaagtttaagaggtatgtatacatgtatgggggaggtgatagcatacctgtatataatgagaagtaggaacacacacacgcttggggaaacacactaaatgcatcccagaaagcctcacttatagatcattaagcttgaagcctcagccttatggggatcatcattactg

SEQ ID NO: 4777 - DNA, 781 bp, Homo sapiens
aggcacaagaattgcctgaacccaggaggcagaggttgaattggccactgcactccagcctgggcaacagagcgagactccatctcaaaaaaaaacaaggccgggcacggtggctcacgcctgtaatcccagcactttgggaggctgaggcaggtggatcacaaggtcaggagtttgagaccagcctgaccaacatggtgaaaccccgtctctactaaaaatacaaaaattagctgggcacggtggcgcgcgcctgtaatcccagttactcaggaggctgaggtaggggattcgcttgaacccaggaggcggaggctgcagtgagccgagatcgcgccattgcactctagcctcggtgacagagcgacactccatctcaaacaaaaacaaaaacaaacaaacaacaacaacaaaaaaggctaagcaaagattttgctgcttagaccacaagggctgccatagtctcacaaacaggatggactatggattcagtatgctaggatggtctagggtgcttgttacaaatgtcccagcccagatcaatgaaatatgaatttctatggatgacactgcatttttagcaagctccataggaaaaattggggaacatctaagtttaagaggtatgtatacatgtatgggggaggtgatagcatacctgtatataatgagaagtaggaacacacacaygcttggggaaacacactaaatgcatcccagaaagcctcacttatagatcattaagcttgaagcctcagccttatggggatcatcattactg

SEQ ID NO: 4778 - DNA, 564 bp, Homo sapiens
ccaataaggacagccagcacttactgagccccagccaggtaactgacactgttccaagtactctgcttgtataaccagctttaaccttgcaacagccctctgaggtaaatactcctagtgacctcactttacggatgcagaacctgaggcaaggagttagggagtaaatgaagctggctaaaggcacttgcactggccaggcacagtggctcatgcctgtaatcccagcacttccagatggatcacttgaggttaggggttcgagaccagcctggccaacatggtgaatccccagctctactaaaaatacaaaaattagccgggtgtgatggcacacgcctgtaatcccagctactcaggaggctgaggcaggagaattgcttgaacctgggagatggaggttgcagcaagccgagatcrcaccactgcactccagcccactcggtcaatgtcactgccatcaagggacagtctaaccaaggtccagatggcacaagtggagccataaaaccaggacagcttgaggttcagcttcctgagcccacaggtgcaaggaccttatct

SEQ ID NO: 4779 - DNA, 768 bp, Homo sapiens
tccggcgtgtcggagggtgtaggggcgcccggggctccactcctggagactccacggacggatctgctgagtccaccctgaaacaaaccgggagggccgtgaggagaccgcmgcgtttctcttccgacgcgggtagggcgtgcttgtcccattcccaggaacccaactcatctgaaacaacagggcacaaccgccggcctcgggttgctcagccgccaccccagaaatccccgttggaggtacctcctctgagccactgcaaatgagcgggaatcctctaccggccacaagcccagagcccccagcgtgccagttcctcgggatgttcagcggcttccactgggggagaagggagggtcaaaatcagcaacgctcctccgggagtgggaatctaaaaccaaatcacctccccgagggaatctccaaactacctactcgccccaggctccgaccctcagcatatccacctgccgcgggacccccaaaccagcccctctcctagtaaacattaattcaagtacttcctccggaaatccccaaatagccacttgcctgggaaaccccagctctggtccttccccgtctaacccccttttctaagacggtcggccgtcactccctgaacttccacagcacctgcttcggtggaaacccggttctgcagtccctgctgggggaacccctgcctcaaagcccaagatgcccaagcgctgttcccagaccctggcatagacacctcccgcggggctcctccccagcccggcagcc

SEQ ID NO: 4780 - DNA, 768 bp, Homo sapiens
tccggcgtgtcggagggtgtaggggcgcccggggctccactcctggagactccacggacggatctgctgagtccaccctgaaacaaaccgggagggccgtgaggagaccgcagcgtttctcttccgacgcgggtagggcgtgcttgtcccattcccaggaacccaactcatctgaaacaacagggcacaaccgccggcctcgggttgctcagccgccaccccagaaatccccgttggaggtacctcctctgagccactgcaaatgagcgggaatcctctaccggccacaagcccagagcccccagcgtgccagttcctcgggatgttcagcggcttccactgggggagaagggagggtcaaaatcagcaacgytcctccgggagtgggaatctaaaaccaaatcacctccccgagggaatctccaaactacctactcgccccaggctccgaccctcagcatatccacctgccgcgggacccccaaaccagcccctctcctagtaaacattaattcaagtacttcctccggaaatccccaaatagccacttgcctgggaaaccccagctctggtccttccccgtctaacccccttttctaagacggtcggccgtcactccctgaacttccacagcacctgcttcggtggaaacccggttctgcagtccctgctgggggaacccctgcctcaaagcccaagatgcccaagcgctgttcccagaccctggcatagacacctcccgcggggctcctccccagcccggcagcc

SEQ ID NO: 4781 - DNA, 741 bp, Homo sapiens
gagggaactcgtcaataacccgcccgtttcttcctttcttggtttagaagctcttgactccgagacacataggaggcttgaataataatgttcttccccgggtagatagtgatgaagttacaaaagcatttaaactgattatttcccaaaaatgatgttaattttcaggcttttctctccccccacacctccagcttgatgtagcggctttagcagtgaactcaaataagtctttgctttggaatacttttgttcctattcccgttaatgaggaattagaaatggcctctattctaagcagtgctgggagaggckttattttttcggtagttttagaggaaattctgaagcacaacactgtcttcatttaaagtgattctgcttgtctgcgcccaagagccgtttctgcctccttgtcgcgcttcggaattaaaattctaaatgatgccaaaggaagataaaatgttaaagacagcttctcagcctccctgccccttctctattctaaaatcattttttgaagtaatttacagtggccaagaattaagtcagaaaaaaaggccaggattcaaaaataaacagggctctttaaaatgcattaaatgtgtatttcctcctgacatttcacttctccgtctttttattatgtggagagacttgagttagccaaggactgggtttccttaatccacaattacagccccatgccgagatatcccaggggccaaccttacagcacct

SEQ ID NO: 4782 - DNA, 842 bp, Homo sapiens
aggcagaaagcagatggctcctacagacaaagtcatctaagagtcctttaataaagggtgacttatgcagcatgcccacaaatgttggggaagttcccttacatagtaacagggccactctatkagcactgactactctaaggaaagttaaaggctctaggtattacctccctctgctggcaatctggaaggccatagagaggtaaaaactacatttattttgtatgtatcctgagaaagaggaaatagcagtagaggaaattgaggtagggaagtgataaactctctgccaaaatgttgctccttatttttttttctgtctctcttgattaacttactttttcattattgccaaaagaagagtaaggtaggcagaggttagaatcaaacaattcaaatctaaagaagggagaaaacaatattaaagaatatggaggcacattttttaatgaacgaagattcctggcatatctatttttgtcaattaacaaaacattcccagttgaaaataaggcttattgcacaaactacagacagatgagctttcagtcaatcccaggtaagatctgaagaatgaaatatttgtgagcacttaaaaaaggtgaataacacaaaagaaataatttcacccaatgcaaataaagtcagactaccatactttctttgttgagcatagagctggtaaaagctgcaggtgtagaactcagttctggacatatggaactcagttactggacataaacaaacaaaactatcagaactgaaggattgaaattaactgcaaaatgtatgatctgttcaagtattggtggcctctcaaaattttctgtctggtcttactg

SEQ ID NO: 4783 - DNA, 1188 bp, Homo sapiens
ggggaggcagggttagttggagaccgcagttttagatgaaggtggccagggtgggcttagctaagaagccactgagatggcgccccctgccttcctattcctgcctggtgctcctcagctcacccctagggggcactgcccttcactttggggctttgagtcaaaacagactttttttttttttttttttttttttttgagacagggcctcactgtgttgcccaggctggagtgcagtggcacgatctcgactcactgcaacctccgcctcaggagttcaagcgatcctctcacctcggcttcccccatagttgggattacaggcacctgcccccaagcccagctgattttgggatttttagtagagatggggtttccccatgttggccaggctggtcttgaattcccggcctcaagtgatccgcccgcctcagcctcccaaagtgctggaattacagacgtgagccacagcgcccggcccaaaacaggctttctgaagccacctgcaccccgatcctggcagccccctaggtggttagcccataacgtggttaaatgcagtcttccacctcttggctctctttctacctggataaatggcgcttgtgattgggtaatcagctcctggacacgcccactgtacactccctyctagccctgggatcccagtctccctttcactttcctttctcagatcatccaaccctgagcctaccccctctcttgcaccaaattcctcttgatgccatcgagccaggcagtgaagcaggcagtgacacgatgttgatctttctatggccagctctccattttccttctcaggaaagggagggcatgggggaggtgcatggagctacagtccaacaactagagaaaggaatatttcctcacaaggccgaaaagtgggaggaagataggaagggaaggtaggaagtactcacagatctgccttgggggcattgctctgtgcctcagtttacccacatggtaagtctgggctagcaccatatgaggttttttattttacttttatattccataaagcaagctgtgttccaaactgtgtccagtaagaacatttcgtaatcctcaagattttaatagttatgctctcaatgaatatttaataaaatgaatacatttcccttcttagaaggtcaaaatacattatgatcttacatgctttga

SEQ ID NO: 4784 - DNA, 2176 bp, Homo sapiens
tgtgcttttttaaaaaaagaatgaagcagatctagaaaagttaataaagatatcatttttgtatatgaagaactcatttcaaatgtatggaataatgtgattctatttgtatagagaagatagttatgttaaatatgtaattagatatgtaaaatgcctaatataaacataaacacatctctgtatatttatgtatgtatgtgtatacacagagtgatacatttgtaaaggcatagaaaatacctggctgagttctcaaccggctgtttgctgctgagaaatcggagccaggagctcagctggatackttggaagacccccgtgtttcacttcatatccttctctactgcttgtgtttcttcttattaacttgcccttgtcctgtattttttaaaaagattgttaatatgtgctaatattgagcacaaatttattgtattggctgggcaaataatcaatacttccctgttaccttgaaaagaagcaacctaaataacatagtttttcataagttttcaggtgtttgggggaacatgaaatagtgtatttatagctcttctctgtaatattaaggttgaaacctttttatacctgctaagttatataaatggttctattttaatgttttatagacaaagtgggtttctagactgcaatttatattattagcttaaaatttttgcttttaatctttcaactcaagaatttatataaatactttttctataaaatcaaaaagattggcaaaaaaattctaaactttcttccagttctaaagttcaatttgtcttgctgatttcagcaaaaatcttaactatttaattagataacagtattaaaaaatgtttgcttttggataagacattcattcactacagtattcaaaatctaacacaatggtaagtaaccatgtggctagctaaattattattataatcctgttgcacaggtttttaatattatcacctttgccaatttgaaagtcatatgatggacttttgcatctttgtgctcttaaggtaattatgaagctaaatgactttatcagatattcaaacctgatacaaaatgtatattacagaatcacccccttgccctgtcttttatgtaggtaatgattatactgatgatagtgatgatgattatattatctgtaatccttgcatagagatatacatggtctgaacatcaacaaacttatattcaaccctaggcatttactagccgttatgagctacttgacattgggcaatttagttaatgtctgtgagtatctattttctcaactgcaagatggagttaatagtatctgcctttcagaatatctgaagaattgaacaagctaatatgtaaatcacagagcacaacttctgacaaatgctagaaggtcatgttaattccttttgaattatttttctggataatataaatcagggcaaaatattggttaaactacggctgtttttgataattcagtgaaaaaggcctttctaaaaagtacatgatgcaggggttttaacttcatgggtatcatcatgaacattaattcgcctagctctaaaacaatggtagtgaacatatttgaaccactatccccaaaaagaaagagttttttgctaattcagataacaagaaaaggacagaagaccaggagcttcttaacagatagtgcggtcagctttccatgtgagtctgtgcccaggacaggagcagtgcagggctgggtgtgacgagctgggaagagatgaggtccttatgggttccacctggaagcctcatcctgggctccatcctgtggtccctcgatgcactcctcacagtcaaacacctttctggtttggcagctggtctaagggttttgagcttatgggaaacacacagaattccactgtggacggggaagcttgagatgccaattagatatctcagtcgagatgtcaagtgggtcattgaatctatgaggctgaggttcagaggtgagtctcagtctagaaatacgctttgggagtcatccatgtagagatgatatttaatcccatgggaccagatgatatcaacaaagaatgaacagacagaaaagtcaaggtctaaggtctgaggcctgcaacactctgtggtcagagccaaagggaaaaggggaaaagcaggccgggacagcgcatccccagggtggaag

SEQ ID NO: 4785 - DNA, 574 bp, Homo sapiens
acgccccctcgctaaggcagctcccaggctggcatcggccacctcctagtcggcaatctcaacacaggcctgtgggtgaagagggtgctggtctgaacacagcccgcgctcagcagcgaggtgctccccagcgtctggggatggggcaggaaagccaggcgagatcccacaccacacctggtgtgtgttaattaagggagtttccggagcttttggtttgagcgcctctcacctccatttaaagcacatctgtgcacctaattaaaacacgcatttgcagtggagaggagggtgtgttcagtgccgacacctaagagttttgaggaccccgaagagaccrtgaatactggacccttgaccccatttccaagttagcgattcccatgtggactcaataaggattgcctagtatgctgcctcccttcctttttagcacaggctgaaaagcaggtctgtcaccgtcaccccgacagccccctgcttcaccaagtattttcctgggagtctcaggagctcttcacatgtccccgtgccggctgattgctacagcaacctgcggattgtggaagtgaga

SEQ ID NO: 4786 - DNA, 790 bp, Homo sapiens
ctttgaaacgaagtaacgtagatatattagtaatataaaaaccaatgtgttcagtgctctttttattttggaaagttatgggccatttaagcttttacatattttttttctttaaaagtcgttgactcagtaattgagcatctagatgttctggaatctgtgcaggctctggaaccaccaagctaagtaaaatacagcctgtgacatggaagagctcaccatttgctgggaaagactgactcaaaaacagatgtaacagagacaacagtaattaatgaactagtattcatgatcttctaccttctcccatggctgttgggagagagatctttgcttgttgagtcagcatccagaaactagctaagggagaaaaagctagagatactaaattgatatacgcagaacagagctgagagagggatgggagcagatctgctgtgttgcagggaacaccattcacatggtattctatggaaatagcatctttggaagctccactccaaagactatagtgggaatggtgtccgtcatgtgtgtaagtcagtggccttgataagaaggcagaaataaataaacacgcaaggcagatgtcagaggtagctttagaaagttaggatttgggagagagagaatgaatkagttagtttagggaacaactgttgactgagaaggatattgaaagagtcaatcattgggatataattttttttattatactttaagttttagagtacatatgcacaatgtgcaggtttgatatataggtatacatgtgccatgttggcttgct

SEQ ID NO: 4787 - DNA, 829 bp, Homo sapiens
tcaagtagtagtatcaaaattaaagtgactttttctaattatttttcttactactgaaggttgtatgctgtatagaatcttttaatcaattctatatagacaatatacatattaaatctcaatctcaatggattgttgctatttgttcttctgggatttacctgtacttggtaatttgtagatggacttcttatcagtccattatttagaaactattcttattataatcaccttgattttatataatttagatgatagctctttctcttcaaccttccacccaacacacayacacacacacacacacacacacacatgcacatacacactcaatacttataaattatatttaaccctctttatgggaatatatgtatcacattaatgtaaatcagaagacttcaactggtagcccatagaccagatttggcttatgcatattttatttagctagcatagcgttggctttgccattatacactaaataattatgatgaattgccaatgcttacaaattgggaaattcaaattaaaatcttaatttctggcttttttaaagtaaaaaaagagatttgtatcttaaaagtagatattatctgggtgcaatggctcacactcgaaatcccagcactttgggaggtcaagacaggaggatcgcttgaggtcatgagttagagaccagactggtcaacagagtgagacttggtctctacaaaaataaaagaaaaaattagcctggtgctggactcaaactcctgggctcaagcaatctttcctcctcagcctccaagtaggtgggactagaggtaggtactactgtgcctggctg

SEQ ID NO: 4788 - DNA, 829 bp, Homo sapiens
tcaagtagtagtatcaaaattaaagtgactttttctaattatttttcttactactgaaggttgtatgctgtatagaatcttttaatcaattctatatagacaatatacatattaaatctcaatctcaatggattgttgctatttgttcttctgggatttacctgtacttggtaatttgtagatggacttcttatcagtccattatttagaaactattcttattataatcaccttgattttatataatttagatgatagctctttctcttcaaccttccacccaacacacatacayacacacacacacacacacacatgcacatacacactcaatacttataaattatatttaaccctctttatgggaatatatgtatcacattaatgtaaatcagaagacttcaactggtagcccatagaccagatttggcttatgcatattttatttagctagcatagcgttggctttgccattatacactaaataattatgatgaattgccaatgcttacaaattgggaaattcaaattaaaatcttaatttctggcttttttaaagtaaaaaaagagatttgtatcttaaaagtagatattatctgggtgcaatggctcacactcgaaatcccagcactttgggaggtcaagacaggaggatcgcttgaggtcatgagttagagaccagactggtcaacagagtgagacttggtctctacaaaaataaaagaaaaaattagcctggtgctggactcaaactcctgggctcaagcaatctttcctcctcagcctccaagtaggtgggactagaggtaggtactactgtgcctggctg

SEQ ID NO: 4789 - DNA, 1557 bp, Homo sapiens
accataataacagaacrgcatgggcttacctctgtgagtgaaagccctttccaaagtcagtgatctggtctccaaatttctgccaatgccttgctgtgggccctcagatgagtcacgtggccatcaagggccccaatgtcctcatctcaaaaatggcagggagttctgaggggcttaggatgaaataatacctaagcccttttccaattctgaaattctttgacttggtatttccattttgtaattttcaccatgcatgctgcagctattcctcttcggggcgcaagtatttccctcctccaagtgatacacatgtgactgaggtgctagggacatctgaatgactcaccagaatgccagtgcgggaggactggtcatgccgagctgttccccatgtgaaaccagggcctgagcactcttggggtcctgctgtggttgtcatgcagtcactgtgctaatggttttgcttttgcattgcaacccattgccatatcctcctctgagcatctcctcactctaccctcttctgatttggttaaataacttcatggatctgagttttgcacagttgagagcagagttttcaagaagcacactgcactgtgaacgcagcttatggtcatcaccctggatgaaggctcacaggattcctggtaccgagcacattggcagtgcgggtctatgagcactgggctttggataatccctctgagcctctaagagcattttctcacctgcaatatggggataatgataataggtagctatgtgtaaggctgggagattcagtggtgttgtggaaagcagtacagctgccaacatttacagagttcttgataaatggtaattgtgtctacttgtcttccttattggtggatgaaagaatctgaggctgagatatagcctcagaacttgtatgggtctgggaagcagcagaagtggatgagtaaaaacagacccagccacacccaacccatagtaacacccatttctgcaaccagaactggccctgatctccccactgtggggagggaaaggaaggaagggaaaagcaaggccagaggacgaagaaagagagaccagtcatagaatgtccagggctggaagtggccaaggctcacagctagtattggtgaagccagagttagaacaccagtctcccagctccaagttgagttctaaataggaaccatacttcctattacaggggttttccttcttctgtggtcattgtatacccaggtcactatcccagcctactctttcttggcaagtctgcacgggactgggctccagtgtcaatgtgtgactctcctctaccacatccctgatgtgagctgtccaacttcaagtcaacctcatacagaaatgaggaactcatcgtctacctatgcagcccattctcttcccatctctcgttattaaggacgtctttgtattagcctgaagtctgtgcagtgcctcccgtaccacagagagccccagacacagccacacacctttgattcattgagtccaggaatggcctttgcagagctacaaaggagaaatagtgag

SEQ ID NO: 4790 - DNA, 539 bp, Homo sapiens
ggttcatttgcccctgtccttggccgccttcatatcccagagtcagaagaagcagagattcctcaaatgggttttgttttgttttgttttgtttttgtttttgtttttactattttgagacggagtttcgctcttgttgcccaggctggagtgcagtggcgcgatctcagctcactgcaacttctgcctcctgggttcaagcgattcttctgcctcaacctcctgagtagctgrgattacaggcatgtgtcaccacgcccgggtaattttgtatttttagtagagaccgggtttcttcatgttggtcaggctggtcttgaactcccgacctcaggtgatccacctgcctcagcctcccaaagtgctgggattacaggcgtgagccactgcacccagccatggggtctttctttcttttttttttttttttaagacagagtctcagaaagaccccctcaagtggggtcttgaaacttcctccactgtccacctacgcccagtggcctggtagaagttccttagatgggcacggagactgc

SEQ ID NO: 4791 - DNA, 1533 bp, Homo sapiens
ccagagagaacaaatatggtgataattaagcatcaaatttgcctggagttgggggaaggggaagctattctttttaatttgtaggaagaggctacacatgacggagcacctgtagtcccagctatttgtgaggctgaggtgggaggattgcttgagtctagtagttgaagcccaacctggacaatagagcaagaccccatccctaaaacaattttttgtaaggagaaagctaagctaacattgttagcaatacatgtttcctattgctgagattgcatgggaatttatgaagggccacagaaggacaataatgaataatgaatggttgcattaattgaaaatgcagactcctttccatatatagccacttattttattttttgaaggaaaatttgtattgttttaattatttttatatacagaaaacttaacagtgtacatttaacccagtttggtggcaagttctttagcctttgccttttcaagcttggcgatgtgaaccacagacttgggacccaggacactgcctccccagtgacggtggatctcatcatatttgtcgttgtaattggtcctgatagcttccaccagcttagccaaagctcttttgtcttctgagttaacctgtgtgaaggcggcagtggtgcaggtcttcctgtggactgactacacgccccagtcttgccttccccttgataatgcagtaagggaccccccttttatgacacagtgcaggcagggagacaaccagcttgatgggatccacgttgtgtgcaatcaccaccagctgagctttcttgttctctaccaaagtggtgatggtgttaactcctgctcaaaggacagatggtctcttagtggggctgtcccctttgccagcagctttcttcttggcctgggacaaaagcctctgcttcttcacttgctttgtctctggtctgtacttatgagccagtttaagcagctgagtagctgtttggcggtccagggcctgggtaaactgsttaattgcaggaggcactttcagcctatagccacttattttaaagatctcacctgaaaagctgaaggcagagaaaaccagtcaggggcagggggtgaggtgagtgctgtgaggctaatatgagtccatttcaagacgtctgctgagctggagttcaagataggtgaggatagtttagggtatactggaaagaagggcatttggtcatggaacttggcttggctactttctaactgcaggaatagggaaagtgacaaaaatttttttttttttggaggcaaagtcttactctgttgctcagattggagtgcagctggagtgcggcagaacactcatagctcattgcagccacgacctcctgggcccaagcgatcctcctgcctcagcctcctgagtagctgggaccacaggcgtgcaccaccatgcccagctaattttttgattttttttgtagagacaaggtctccctgtgttgcccaagctggtcttgaactcctgggctcaagcaatccttcgcctcagcccccaaa

SEQ ID NO: 4792 - DNA, 761 bp, Homo sapiens
  misc_feature (1)...(761): n = A,T,C or G
ttnnnnnnnnnnnnnnnnnnnnnnnnnnnnnnnnnnnnnnnnnnnnnnnnnnnnnnnnnnnnnnnnnnnnnnnnnnnnnnnnnnnnnnnnnnnnnnnnnnnnactgccaggcgtttgtatcaggatgatgctggcctcctaaaatgagttagggaggattccttctttttctattgattggaatagtttcagaaggaatggtaccatctcctccttgtacctctggcagaattccgctgtgaatccatctggtccaggcctttttttggttggtaagctattgattattgccacaatttcagagcctgttattgttctattcagagattcaacttcttcctggtttagtcttgggagggtgtacgtaacaaggaatttatccatttcctctatattttgtagtttatttgcgtagaggtgtttatagtattctctgatggtagtttgtatttcttttgttgttgttgttgttgtttatactctttaattgaattgataagggacatagatctatttaaaaacaaaaccaaacagctatttctgtctagattaagaggtggccccaggtgagggattcgcattttgagtggccacttgtggtgygacctcgatgatcctgggtttgtctatgattctggctgtgcagttgcccttctccacaatcccaataatccatgcttggtggccttcaccatatttgggggactttatctctgcacagaaccgagctgtttgctcacgtggcagtttgtatttctgtg

SEQ ID NO: 4793 - DNA, 756 bp, Homo sapiens
atcccagcctagggtgttttcaagggtctctcctccttggcaggctctgaattccaattttgtcctccttgcccagtgagtcttccgtaagcttggctcagcttcttagctgctcacagcatctttggtatcaacaagtgggtcaaaaggaaaggtcgaatcaagggtcaggtttacatctctgggtttcctttctctctgggattttggcccactaactccctgctgccttgccrgctatataagtccttcacataaacaaatgttcatacacatacacacagtccagatggtgtaatttttccagttggaggattggtctgaaacaaacgagtcatcatgaacagaagtaggaatcctctctctttgttttgtagtccatatggatttatctcattcatttgagtagtataaatataccgtaattaatttatcctttcccctattgctagacattaaaaattatttctaaatattcttataactaaatatatatatatttctatttctaaatattcttataactaaatatatatatatctatttctaaatattcttataactaaagacaatgctggccatacaaccccttgtttgacaacttctcttctccttgggacaatctttggagccactcagtgtttggcccacatgaggtgtcaggccaatatatttgttcttcttctgggctcctctagcatttatcctctccttccagcactgttttggttcttgcctcatttacctcactattag

SEQ ID NO: 4794 - DNA, 756 bp, Homo sapiens
atcccagcctagggtgttttcaagggtctctcctccttggcaggctctgaattccaattttgtcctccttgcccagtgagtcttccgtaagcttggctcagcttcttagctgctcacagcatctttggtatcaacaagtgggtcaaaaggaaaggtcgaatcaagggtcaggtttacatctctgggtttcctttctctctgggattttggcccactaactccctgctgccttgccggctatataagtccttcacataaacaaatgttcatacacatacacacagtccagatggtgtaatttttccagttggaggattggtctgaaacaaacgagtcatcatgaacagaagtaggaatcctctctctttgttttgtagtccatatggatttatctcattcatttgagtagtataaatataccgtaattaatttatcctttcccctattgctagacattaaaaattatttctaaatattcttataactaaatatatatatatwtctatttctaaatattcttataactaaatatatatatatctatttctaaatattcttataactaaagacaatgctggccatacaaccccttgtttgacaacttctcttctccttgggacaatctttggagccactcagtgtttggcccacatgaggtgtcaggccaatatatttgttcttcttctgggctcctctagcatttatcctctccttccagcactgttttggttcttgcctcatttacctcactattag

SEQ ID NO: 4795 - DNA, 756 bp, Homo sapiens
atcccagcctagggtgttttcaagggtctctcctccttggcaggctctgaattccaattttgtcctccttgcccagtgagtcttccgtaagcttggctcagcttcttagctgctcacagcatctttggtatcaacaagtgggtcaaaaggaaaggtcgaatcaagggtcaggtttacatctctgggtttcctttctctctgggattttggcccactaactccctgctgccttgccggctatataagtccttcacataaacaaatgttcatacacatacacacagtccagatggtgtaatttttccagttggaggattggtctgaaacaaacgagtcatcatgaacagaagtaggaatcctctctctttgttttgtagtccatatggatttatctcattcatttgagtagtataaatataccgtaattaatttatcctttcccctattgctagacattaaaaattatttctaaatattcttataactaaatatatatatatttctatttctaaatattcttayaactaaatatatatatatctatttctaaatattcttataactaaagacaatgctggccatacaaccccttgtttgacaacttctcttctccttgggacaatctttggagccactcagtgtttggcccacatgaggtgtcaggccaatatatttgttcttcttctgggctcctctagcatttatcctctccttccagcactgttttggttcttgcctcatttacctcactattag

SEQ ID NO: 4796 - DNA, 521 bp, Homo sapiens
ttggggcccctcccttcctaggctgcacaggaatctggggaggcttatcttgctcagaagatagtgagcaagagtctccaattgcctggacatccaggttgcctctcatctcttatggccaaacccacagcaatcccttgaagtctgatggctcttcactgagtgacagattcactgtcaggctgggggytgaggaggcagggccttgggctcagcctgcttatgtgtaggtgtaccatgctgccttcccctccaaatttcatctcctccttgggatatggctacaaaatggtaatgtggttttactctctccctccccatagctccaaaataatttagtcaagagaaaaatctctccttcttctcactcatcgaccacttaggctctatagtggttcaatggtattcccctgaaagtatgtccacttggaccctcaaaatgtgactttatttggaataatattttttttcagatggaactaaggtaaggatctcaatatgagatcgtcttggattagggt

SEQ ID NO: 4797 - DNA, 780 bp, Homo sapiens
ggagaaaatgtctatttctacccaataacacaaatgaattgtgggtgatacaggagaaacctacaaaatacaggtctacaatccctcattcaaaatcctcaaagacagaaatatttcagcattcagaattgtttggggattctccaaacataatatactrcagatttcagatatagataccaccaccagtagggtctgggctggctgttcattatcaaacagaataatttttacagcgaaacatatggatttcatcaaaaaatgctttaaaaatgaaaaaagatggtaaatagccttataagggttcagatcagatttttccaccaagtaaatttgccataattgtacaggaaaaaaaaatgcttttcaggccctttttggtttaagaatcaagaataagggactgtcatttttaccataaatgttggctcatcacttttggaatggaatgatcaataattgcttctgtagcatttctccagcacaagaacatcctatgtcaaaagatctattggaggaagtgatgtgaacggttgatgtgcaagtaagtactgtaatgcctcattcagagtctcctagccaagcactcccaaagccagagagaatgaggctgggcagacagcttttctcctgatctatgatcaatatctcaggcagagagcagcactgcccctaagttaagataccgtcatcactcaagtgtgtttgagcgaagctcattgaaaagaaatgagggatggcagcagcttgctgccttctgcttccacactaattgcccca

SEQ ID NO: 4798 - DNA, 780 bp, Homo sapiens
ggagaaaatgtctatttctacccaataacacaaatgaattgtgggtgatacaggagaaacctacaaaatacaggtctacaatccctcattcaaaatcctcaaagacagaaatatttcagcattcagaattgtttggggattctccaaacataatatactacagatttcagatatagataccaccaccagtagggtctgggctggctgttcattatcaaacagaataatttttacagcgaaacatatggatttcatcaaaaaatgctttaaaaatgaaaaaagatggtaaatagccttataagggttcagatcagatttttccaccaagtaaatttgccataattgtacaggaaaaaaraatgcttttcaggccctttttggtttaagaatcaagaataagggactgtcatttttaccataaatgttggctcatcacttttggaatggaatgatcaataattgcttctgtagcatttctccagcacaagaacatcctatgtcaaaagatctattggaggaagtgatgtgaacggttgatgtgcaagtaagtactgtaatgcctcattcagagtctcctagccaagcactcccaaagccagagagaatgaggctgggcagacagcttttctcctgatctatgatcaatatctcaggcagagagcagcactgcccctaagttaagataccgtcatcactcaagtgtgtttgagcgaagctcattgaaaagaaatgagggatggcagcagcttgctgccttctgcttccacactaattgcccca

SEQ ID NO: 4799 - DNA, 1875 bp, Homo sapiens
gtaaacccaaccaatctagttataaaggtaattttgttatctgtttttagattatcaaacagcatgtatttgttttatactgtaaattaatgattagaatatctagaaacagaagcatgcatagtcacaaattatccaaactacataaggctttataaaaatctgtaagacacatttaataagtaacgtagaattcatctatttcccgactatgccctttggtttcaatgacacttttcagaatactgagtgacactgcacatggaatttcagaaatgttctgagttaatcaaaatgtactcaatttgtagcacaacaattttatttcccaggggtcatcaccaccactccatatctaagaacctgataaaaaatcctggagatttgtaaaatgagttctcaaggaactttggagtaagaaagatgtagctaaagatcaacacataaaaaggtctgcttcttgaagttggaatgaaacacaggaaatattcattatctaagaatgggtaaaagaataaaagctacttaaggtgaattcactcacaatagcaaccagaatttcatagtacgtgatgaaaacaaaggtttgatagaactaaaaaactacatttttgtataactttccaacaaaattgtagttcagcatataccatattttacttaatgcttgattttttgcaacatgaccacaaagaggatgacttagcctcacttttgaaagcctcagcatgtgcaattttgagcagttccattcacttccatcagacwttacttctatgaaatcctgaatatttcacaagatttacatttttattttgcagatcaattgacattgtgttaacagtgcattgttgaatattccagaccacgaatcatactggaacctaaataaagacactgatatgattggtggtttttattttgcagatcaattgacattgtgttaacagtgcattgttgaatattccagaccacgaatcatactggaacctaaataaagacactgatatgattggtgggaatcaacacgaaatggagaatatttgaacagggaataatttcatgactgttcggtctattagataatatctttcaagtccctcatgtcaacgagcaacagcagcaaggctgtaagtaatgaactctggacttatcgaggacaccctatactttaggcttgagtcctaactccagcttgcactctggtcttgaacaagtcactttgtcctccaagcccaagaaaaccagatttttgtgggatccaaggggttctgtataaatgctttaatggacatgttctgaggacgtgtgctcatacatttccttcaattcaagagtccaaacctcgaatctaaggtctttcacatggttcctaaagttgctcccagcactcacattctctggtttctgattgaattctcagtggggaataaaagtagaagattagattaaatgcggggtgcagcggggggtgggcggtgcagggggaagtctttgaactgttacctgtcgtcagtgttgaaacgtaggtaggtaatccatctattctaacacacaatctactctccagaaactccttgaaacttattttacagaaatacagaggctgggtgcagtggctcccaaagtcccagcactttgggaggctgaggcaggtggatcacctgaggttgggagtttgagagcagcccgaccaacagggagaaatcctgtctctactaaaaatacaaaattagctgggtgtggcggcacatgcctgtaatcccagctacttgggaggctgaggcaggagaatcgcttgaacccgggaggtggaggttgctgtgagccgagatggcgccattgtactacagcctgggcaacaagagcaatact

SEQ ID NO: 4800 - DNA, 627 bp, Homo sapiens
atacttcgtaacagatggtaagagacatgtgaatgattgaagctgtatagaagaacaatgagcaggctgggcacggtggctcacgcctgtaatcccagcactttgggaggtggaggagggcagatcacttgaagccaggagttctagaccagcctggccaacatggtaaaaccctgtctctactaaaactacaaaaattagctaggcgtggtggcacacacctgtaatcccagctactcaggagactgaggcacgagaattgcttttacctgggagacagcgggtgcagtgagccgagatcatgccagtgcactccagcttgggcaacaaagtgagaccatctcaaaaaaaaaaaaaaaaaaggtggggtggggggtatcgtttaccaattcaagtatgtgccagtatttagattaaaactgaacataaagtaactgacaataggaattactttctattgaactgccatgagattaaaatcagattttcaaaaattacactgaagtgaaagtaaattaacagtctcagaagacatctgsaggttctaatggctatgtaaggatggacatttttgttacttgcttccccagcatttatttctccctttttagtagtagctcccatttt

SEQ ID NO: 4801 - DNA, 821 bp, Homo sapiens
gcttaagaccaggagttggagaccagcctggacaatatagcaaaacactatctcctcaaaaattaaaataataaaatttctgttagtctgtgctatggtctaaatgtttatgtcccccaaaaactcatatgttaaaatactaacccgctaggcggggcctttgggggtgattaggttacaaaggcagagccttcatgaatgagatcagtgcccrtaattatgcagccgggcacagtggctcatgcctgtaatcctccctttgggaggccaagtcgggaggatcacctgaggtcaggagttcaagaccagcctggtcaacatggtgaaaccccgtctctactgaaaatacaaaaattagctgggtgtggtggtgcatgcctatagtcccagcttgggactgcccaggaggcagaggttgcagtgagcagagatcacgccaccgcactccagcctgggtgataaagcgagactccgtttcaaaaaaaagaaaaagaaagaggcctgggagagctcctttgctcctccggccacgtgaggttacagagaacagacagctgtttatgaagcaggccctccccagacatccaacctgcaggatcttcaccttgtacttcccagcctccagaactgtgagaaacacatttctgtcattttcaagccttctattacagcagcctgcatgggctgagatagtctatgagtataaagccatatcccactgtttttcattttcattggttcattaattaaatgaactaaatttctttcggttatgtaaactgcctgatcatgtcttttgctcactttcccgctgggttgtt

SEQ ID NO: 4802 - DNA, 821 bp, Homo sapiens
gcttaagaccaggagttggagaccagcctggacaatatagcaaaacactatctcctcaaaaattaaaataataaaatttctgttagtctgtgctatggtctaaatgtttatgtcccccaaaaactcatatgttaaaatactaacccgctaggcggggcctttgggggtgattaggttacaaaggcagagccttcatgaatgagatcagtgcccgtaattatgcagccgggcacagtggctcatgcctgtaatcctccctttgggaggccaagtcgggaggatcacctgaggtcaggagttcaagaccagcctggtcaacayggtgaaaccccgtctctactgaaaatacaaaaattagctgggtgtggtggtgcatgcctatagtcccagcttgggactgcccaggaggcagaggttgcagtgagcagagatcacgccaccgcactccagcctgggtgataaagcgagactccgtttcaaaaaaaagaaaaagaaagaggcctgggagagctcctttgctcctccggccacgtgaggttacagagaacagacagctgtttatgaagcaggccctccccagacatccaacctgcaggatcttcaccttgtacttcccagcctccagaactgtgagaaacacatttctgtcattttcaagccttctattacagcagcctgcatgggctgagatagtctatgagtataaagccatatcccactgtttttcattttcattggttcattaattaaatgaactaaatttctttcggttatgtaaactgcctgatcatgtcttttgctcactttcccgctgggttgtt

SEQ ID NO: 4803 - DNA, 585 bp, Homo sapiens
ggagccaggtgcacggcacaggtaagtgggaaccctcaagagccctcagaggatggagattttagggcagtgttgctcaccctgtggccctccatccaagaatgaacaagggacccttattaacatgcaggttcctctggcctacccatacctcagcaaagtaatttccataaacattccaacagtatacctgagctatcatgatttgggtatttgtaatgtgtcatttataaagcgaggtctagaaatttagataacctttataaagtgcaaaaagtagatttgaggcaatggagtttaacaaactttgtttcaaatgacttaaaaaaaaaactcttwacagatgggatctcactgtgttgccaggctgcagtgcaatggctattcaaaggtgtgatcaagtgcactacagccttgaactcctgggctcatgtgatcctcctgcctcagccttccgagcagctgggactacaggtgtacaccaccacacccaggcccaaatgacctttaaaattagaattgatatgaccactcaaataaaatgcatctacatattctcagattaaagcctatacattttaatag

SEQ ID NO: 4804 - DNA, 809 bp, Homo sapiens
cacagagttagaatttatcacttcaatcaatttgtattaaacagaaatatgctgatttgcttcctgatgcatccaaaagggaaacctgtgctacacagttgatatagaagataactgaaaataatttctaaaaggatagtatcagtttcactgacaggaaattatcctctggaaagaaaacaggaacagttatgttactttcatctcatagaagtgagctcatgcaatcgtggtctttgcacaacattcccaaccagagagtaactgtgaggactaggcatcatattcaggtaattctaaggtgcaagttttaaggactttgcctatggtgtgtgcatggtatcagggaaggggatcaggtttccctgtgggtcactgagggaccattatagggaattgtgtgtttagtttagaggtaagaaacagttcagaatggcaaaagcacagagtgagtgcctttggaaaagcaggaggaaatgaggctgcaaagctggacaggaaccagataaagaggcctttaatatgtttggtgaaggagtttgaacttgattctgaaagcaggaggagcacttttaagaatttcaggctgggttagccaagccacctgtaatcccagctacacaggaggctgcggcaggaggatcacttgaggccaggtatttggggctgcagtgagctatgatcatgccactacactccagcctgggcaacagagcaagacygtatctctacaaaaaataaaaattaaacttaaatttgaaaaaaaggaaaaaagaaaatcagaaagaatttcaagctggggaatgaca

SEQ ID NO: 4805 - DNA, 1545 bp, Homo sapiens
cgcccagctactttttgtattttttgtagagacagggttttaccatgttgcccagactggtctcaaactcctgggctcaagcaatccacctgcctcggcctcccaaagtgctagccattgcacaggtgtgagccattgcacccggccaagactctcaagaaaatacaacacatcagggagactgttatgatggctctcaggagggtaatacaaagaaaatgaagtctgtaccttaccgggagtctccatgaaccaaactgatcaaaatcgaataattcaaagctcaggcaataaagatagttcaatagtattagagtccaattggtcatatactttgttcagagcacaatggtgattaaggacyagagcttgctataaaataacttgatttacagaggcatttgtttttgtagttcacctggtaacacatgtcatagtaccttggagacccactagaagaaacattaagagtagaaaaccttgtgataggcttgctgtattagtccattctcacagttataaagaaatacttgacactgggtaatttataaggaaaagggatgtaactgactcacagttccacatggctggggaggccccaggaaacttacaatcatggtagaagttgagggagaaggaggaaacttacattcatggtggaaggtgaaggagaagcaagtaccttcttcacaaggtggcaggagagagagagagagagagagccaagggggaagagcctcttataaaaccatcagatcttgtgagaactcactcactatcacaagaacagcatgggggaaactgcccccaggatccaattacctcctagcaggttcttccctccacatctgaggattacaattcaagatgagatttgggtgaggacacagaaccaaaccatatcacttgccatcaccattcaggatgcttgcaaatcaactgttacctgcacccgtaaatacatatcttctttttcccctgagaattttccttagtgtatttggtggcagtgtctagagaaacagcattgtcagccacattttaaattaagttatatgtactagtaaattcacgggaaagataagaacaatatttggttttgttcagcaccatacacaagcctccaagatgggcaaagaggagatctaaaactgcatgatgttccattaagcgtttttgtttaatacaatgttctcatcctccttttggagagtggcttctacccatctgaactccttggaggttcaattggctacataatccaagatgtcccttaatgtataaattagcctcagattccatacaactgtcaccccaatatcaccaaaagtgagcacccagggactccattggaaccttttctctgcagaaaccaacttatcttcatcgactttgaggttgatagtaatttcagttattgactgttttggcttttaactgtgggaggtattagggaactctcaaggaaaaaatttggaaagcagcagtgagctaggccaaatagcaagttacgggccagtgaggagaaagaacagagtaagcgaa

SEQ ID NO: 4806 - DNA, 798 bp, Homo sapiens
atggaaatatttctggatcatccagtgttctgccggaacatctttcaatagaggcagcataatctactcaggaaacatggagaggccgggatctccaggcacttgggtctgtgggcctgggggctgagggagaggctgaggaaaagcactccccagcttttgacttgcacagatgggtggtagagaggaagggtagcttggagagagggtttgtcactggggctgtctcttggaaggagtctggcagctggaaatgcaggtcctaggtgcaggggcaaggtctgggtagaattcgggttgggagcgctctgtatggagggctgtggattccacatcctrgggtgggtgggcgggcaccaaaggaagagggaggcagaaggggaaggaagtgctccttggccccccaccatgtgcagacaagtggaggaggcagtggggtcttaggagcggggctgcccacctgctaaaggatgagagaggttcaagaggagggggttcagggaattgggatggcagggggcatcaggcccagcagccaagagggggctttgcagggtcgctggggagttggtggaagctagactgaccaggtgaggggccagtgagaggcaagggagtggagggaagctggtgcgcatggcacacatgctgtggtggggcagacatcagctgcggagggtgtgcagtcttagatgtgagtgcagtgtttacgtgtgcgcttgtgtagatgtgtgtgtggccctgcctcgagcacagaggattttaggtggcttgagtttgctcagggaccgaggatga

SEQ ID NO: 4807 - DNA, 909 bp, Homo sapiens
agcatctttgggggcaccaygcagccagctacaggatgtgaatggccctcacgtacaaggctggccacgcagtgcacagcacacccgggaggcgcccgtctgggtcacgcggaggagcagcactgtaggcttcacttacgcctccccagggcatatagcccagaggcacagcccaggcaggccctggtcctgctgcctccctcactggaccctccaccctgtcgtgtgggagctcttccctgcatgtctaagtgccagtctcagcctggcagtcctcccccaccgcccgcgttaagggacctggagcggctgactccaagaccacgtgcacagagaagccaaccctgtgctgacactgagggcctgtcttagcttcccagagactgaccttgggactctgtgaaggttgccacacagtgagaaagaccccgagtcacgtgttgagcatgtggtctctgtttcagacacacagtgccatttgcagaaagacaagagctgcaaactcagagcctgcagggcctggcaggcaatgccaacaaggacagcagtggaggaaaaaaagataattgcacccacccttggcctggctttcatttctctccttttgatggaaacgtggagaccaagaatacatctccactaaaaagaaacagcagtgggaatgcagccacacgtggtgtccagccctggccttgccatgggcacagggcgtctgggaggccctgcaaggagggacagaccctcctcaactcccttgacctcaatttggtagaagttgggtctggtgcagctgaacatcctatcaagaaaatccagacatcagactttttatgtgaactttcctgatgttaaaatgtggcttaaaatttctggaatgagaggatgaactgagaaggctccaggaatcca

SEQ ID NO: 4808 - DNA, 909 bp, Homo sapiens
agcatctttgggggcaccacgcagccagctacaggatgtgaatggccctcacgtacaaggctggccaygcagtgcacagcacacccgggaggcgcccgtctgggtcacgcggaggagcagcactgtaggcttcacttacgcctccccagggcatatagcccagaggcacagcccaggcaggccctggtcctgctgcctccctcactggaccctccaccctgtcgtgtgggagctcttccctgcatgtctaagtgccagtctcagcctggcagtcctcccccaccgcccgcgttaagggacctggagcggctgactccaagaccacgtgcacagagaagccaaccctgtgctgacactgagggcctgtcttagcttcccagagactgaccttgggactctgtgaaggttgccacacagtgagaaagaccccgagtcacgtgttgagcatgtggtctctgtttcagacacacagtgccatttgcagaaagacaagagctgcaaactcagagcctgcagggcctggcaggcaatgccaacaaggacagcagtggaggaaaaaaagataattgcacccacccttggcctggctttcatttctctccttttgatggaaacgtggagaccaagaatacatctccactaaaaagaaacagcagtgggaatgcagccacacgtggtgtccagccctggccttgccatgggcacagggcgtctgggaggccctgcaaggagggacagaccctcctcaactcccttgacctcaatttggtagaagttgggtctggtgcagctgaacatcctatcaagaaaatccagacatcagactttttatgtgaactttcctgatgttaaaatgtggcttaaaatttctggaatgagaggatgaactgagaaggctccaggaatcca

SEQ ID NO: 4809 - DNA, 909 bp, Homo sapiens
agcatctttgggggcaccacgcagccagctacaggatgtgaatggccctcacgtacaaggctggccacgcagtgcacagcacacccgggaggcgcccgtctgggtcacgcggaggagcagcactgtaggcttcacttasgcctccccagggcatatagcccagaggcacagcccaggcaggccctggtcctgctgcctccctcactggaccctccaccctgtcgtgtgggagctcttccctgcatgtctaagtgccagtctcagcctggcagtcctcccccaccgcccgcgttaagggacctggagcggctgactccaagaccacgtgcacagagaagccaaccctgtgctgacactgagggcctgtcttagcttcccagagactgaccttgggactctgtgaaggttgccacacagtgagaaagaccccgagtcacgtgttgagcatgtggtctctgtttcagacacacagtgccatttgcagaaagacaagagctgcaaactcagagcctgcagggcctggcaggcaatgccaacaaggacagcagtggaggaaaaaaagataattgcacccacccttggcctggctttcatttctctccttttgatggaaacgtggagaccaagaatacatctccactaaaaagaaacagcagtgggaatgcagccacacgtggtgtccagccctggccttgccatgggcacagggcgtctgggaggccctgcaaggagggacagaccctcctcaactcccttgacctcaatttggtagaagttgggtctggtgcagctgaacatcctatcaagaaaatccagacatcagactttttatgtgaactttcctgatgttaaaatgtggcttaaaatttctggaatgagaggatgaactgagaaggctccaggaatcca

SEQ ID NO: 4810 - DNA, 806 bp, Homo sapiens
cggaagcccggaaatggtaagaatgccggtccgacatcccgagagagggggaggggctggttggaaccggaaggaaatgtctttggcaagactcagctccagtcagtcagctccacaatttgtgccccgagttctccttacccagctcggcctcagtcctgttcagccataagatggcggctacacagaagcctggccccctgggcgtcctctcttccgtgcgcaatgactgtgtcctggcctggagccctctgtgggcagctctgcatcygcagcgctgtgtctctcccagattgtacagggatcatgagagggtcgtcaagggagaatcctgacttggggttcaggttcatgaatgggaagagctttggtccgtggggttcacagtttctcttttctcctattaaaaatgtatggggccaggagtggtggttcatgcctgtaatcccagcactttgggaggccgaggcgggcggatcacttgaggtaaagagttattagaacaagtaagttcctcttcaaagactcaacttctttgtcataagttgtaaatcaaatttatccctgctttccccttctccttttgttgcaaattgctcgtttaccctatttggaaaaagctggggtctaagccaaccgggatcagcttagattattgggtctgacccaagccaatagaggaaggacacaaaaacaggaactgtgttagggttaataaccccttcctggctgggtgcggtggctcatgcctgtaatcccagcaatttgggaggctgaagcgggctgatcacgtggtcaatgtaagg

SEQ ID NO: 4811 - DNA, 806 bp, Homo sapiens
cggaagcccggaaatggtaagaatgccggtccgacatcccgagagagggggaggggctggttggaaccggaaggaaatgtctttggcaagactcagctccagtcagtcagctccacaatttgtgccccgagttctccttacccagctcggcctcagtcctgttcagccataagatggcggctacacagaagcctggccccctgggcgtcctctcttccgtgcgcaatgactgtgtcctggcctggagccctctgtgggcagctctgcatctgcagsgctgtgtctctcccagattgtacagggatcatgagagggtcgtcaagggagaatcctgacttggggttcaggttcatgaatgggaagagctttggtccgtggggttcacagtttctcttttctcctattaaaaatgtatggggccaggagtggtggttcatgcctgtaatcccagcactttgggaggccgaggcgggcggatcacttgaggtaaagagttattagaacaagtaagttcctcttcaaagactcaacttctttgtcataagttgtaaatcaaatttatccctgctttccccttctccttttgttgcaaattgctcgtttaccctatttggaaaaagctggggtctaagccaaccgggatcagcttagattattgggtctgacccaagccaatagaggaaggacacaaaaacaggaactgtgttagggttaataaccccttcctggctgggtgcggtggctcatgcctgtaatcccagcaatttgggaggctgaagcgggctgatcacgtggtcaatgtaagg

SEQ ID NO: 4812 - DNA, 806 bp, Homo sapiens
cggaagcccggaaatggtaagaatgccggtccgacatcccgagagagggggaggggctggttggaaccggaaggaaatgtctttggcaagactcagctccagtcagtcagctccacaatttgtgccccgagttctccttacccagctcggcctcagtcctgttcagccataagatggcggctacacagaagcctggccccctgggcgtcctctcttccgtgcgcaatgactgtgtcctggcctggagccctctgtgggcagctctgcatctgcagcgctgtgtctctcccagattgtacagggatcatgagagggtcgtcaagggagaatcctgacttggggttcaggttcatgaatgggaagagctttggtccgtggggttcacagtttctcttttctcctattaaaaatgtatggggccaggagtggtggttcatgcctgtaatcccagcactttgggaggccgaggcgggcggatcacttgaggtaaagagttattagaacaagtaagttcctcttcaaagactcaacttctttgtcrtaagttgtaaatcaaatttatccctgctttccccttctccttttgttgcaaattgctcgtttaccctatttggaaaaagctggggtctaagccaaccgggatcagcttagattattgggtctgacccaagccaatagaggaaggacacaaaaacaggaactgtgttagggttaataaccccttcctggctgggtgcggtggctcatgcctgtaatcccagcaatttgggaggctgaagcgggctgatcacgtggtcaatgtaagg

SEQ ID NO: 4813 - DNA, 544 bp, Homo sapiens
cgggatcagatcactggggtcttctgtggccgagctccctctggtcctcgaacgctgcccagcgacctctcgccctgtttgcgccagctctgccagggtcgctccgcgccgcctccctggggctcaggtttcttttcagatgagacaccttgtgcattggaggtggcggcagcttctgcagctgggttcgggggcgtcactggcccttccctcttgctaggagataaacgctgcgcaaagccaatcaccaggctgagggggcggaggctgcttggagagtaacgtccccggctctgcctgctctgtgccgggagaggaagctcacagtgctacgcgcctgcgagctcgcgcacatacacatatacatacatacacacatacatacatatgyacacacacgtacacgcagaatcacacacactctcctgggacatcaaagcatcagctctctggacctgggagctccaagatagtctatccgcatctaggtgagagggcacctcgcctggggacagattacaaaagcgtcccgccagaggaatgc

SEQ ID NO: 4814 - DNA, 819 bp, Homo sapiens
agtgatttttcctcaataaataggttttagattgttacacacacgtagaagtggaacaaagggaactaccagaaaatatattggttgcccctaataaaatttatttagacagtttacttctcataaaaaatagagattgaattttgtacaagatcctgccaagggacgatgcacagggaaatcatttttttctttctccttttccctccttctcttttctaacgaagcacaaagagcgttcacaggccagggaatcggctcctgactccagccgccctgcgcgcccagacrgagccagagaactctgtagctgcgaggaaagtcggcttgctgggagaattaaaaaaaaaaaacaaaaaaaacaaaaaacaaaacaaaaaaaacttgatgactgataatgtaaattacaagcacagcaactatcaaatcagtgtctttactcctgctttgccgtccagttccagatcaagacttagaaatgtgtgtctagaccgggaggtggggtgggatggggcccccgggcagctggtgccttccagaggaatttgtgctgattgtatttgtaattctgattgtctctctaatcgtatttctgcgtgcattgtgaatcctttgtagacacagaaacagacagaataaaaatatataccgggtgttgtgggaagaattgggtagtatgcccagagccctaattgcttttccacttacaaaaacctcggaggtttattaaatgtaactttcggctgcttgagttgtttgtaaactgctctcttttctttgcagacagtgggctgaaatatggcgcgttattattcacat

SEQ ID NO: 4815 - DNA, 568 bp, Homo sapiens
agctgtgyctgaagctaggtatctcaggactttggagttaaataacacaatacattcccttttttgctttctctggtttctattagatttctgtcatctctgcaaagagttctactattcacacagagttggcagaggggcagagctgggcactgccatgcttcacctggcctggctgagaaggtccacaggccaggcaacttagtctaggaaggaatggatgcaatgtgcctggcttccatccacaccacaatgcccagggcattctttgccagtaacactggctcagagtacagaaagatcatgaacttggccgggtgcggtagctcacatctgtaatcccagcactttgggaggctgaggtgggtggatcacaaggtcaggagactgagaccatcctggctaacacggtgaaaccccgtctctactaaaaaatacaaaaaaattagccgggcgttgtgacgggtgcctgtagtcccagctactcgggaggctgaggcaggagaatggcgtgaacccgggaggcggagcttgcagatcgcgccactgcactccatcctgggtgaca

SEQ ID NO: 4816 - DNA, 568 bp, Homo sapiens
agctgtgcctgaagctaggtatctcaggactttggagttaaataacacaatacattcccttttttgctttctctggtttctattagatttctgtcatctctgcaaagagttctactattcacacagagttggcagaggggcagagctgggcactgccatgcttcacctggcctggctgagaaggtccacaggccaggcaacttagtstaggaaggaatggatgcaatgtgcctggcttccatccacaccacaatgcccagggcattctttgccagtaacactggctcagagtacagaaagatcatgaacttggccgggtgcggtagctcacatctgtaatcccagcactttgggaggctgaggtgggtggatcacaaggtcaggagactgagaccatcctggctaacacggtgaaaccccgtctctactaaaaaatacaaaaaaattagccgggcgttgtgacgggtgcctgtagtcccagctactcgggaggctgaggcaggagaatggcgtgaacccgggaggcggagcttgcagatcgcgccactgcactccatcctgggtgaca

SEQ ID NO: 4817 - DNA, 568 bp, Homo sapiens
agctgtgcctgaagctaggtatctcaggactttggagttaaataacacaatacattcccttttttgctttctctggtttctattagatttctgtcatctctgcaaagagttctactattcacacagagttggcagaggggcagagctgggcactgccatgcttcacctggcctggctgagaaggtccacaggccaggcaacttagtctaggaaggaatggatgcaatgtgcctggcttccatccacaccacaatgcccagggcattctttgccagtaacactggctcagagtacagaaagatcatsaacttggccgggtgcggtagctcacatctgtaatcccagcactttgggaggctgaggtgggtggatcacaaggtcaggagactgagaccatcctggctaacacggtgaaaccccgtctctactaaaaaatacaaaaaaattagccgggcgttgtgacgggtgcctgtagtcccagctactcgggaggctgaggcaggagaatggcgtgaacccgggaggcggagcttgcagatcgcgccactgcactccatcctgggtgaca

SEQ ID NO: 4818 - DNA, 881 bp, Homo sapiens
cacacacacacacacacacacacacacacagaaggcaggttgccactccagatggtgaaccacacggaaaagaaacccacaggttggcagacgctttgagctccagtgctggggagaatgtatgaatttccagttggcccaaaaagtgtgtgtgtgtgtgtgtgtgtgtgtgtgtaaragagaaagaggaagaaaaagacagtatcttaatatcttattaacagttgtaacctcagcatcttatgagtgggcaccaaatgaatgttcactgaatgaataaatgaactcacaaaagaacaaagaaagaaagatctcattggaattcccagcagggttcacagctaggccctctactttccaaattttgcttgtcccaacaaagagaaacttgtgattgaagaaacatttaaggtcctcaaggtgcttttggattcttgaccttatttgatactcaaataaccgtcacaacagtggcatcatgaccatcatgattatttccctgttttacagatgacactcagagacttcccacaactgacagggctcccagggccctaggtagggccaggattattggatatgagccacctgagccttggcccactgctccatctcctccaccaggaaccgtctccatgggcttcccttattcccagctggtaactggagaagcgcgacaagagccaattcccttcccctgggaatgcataacccactgggtagcaaacaaggcctctgtctcctactcctgtttcattttaattagtataatcatcatcatgaagaagccagctctctctggcatgtgcattctgcagcccttggatagctctactcgaaagtcctgggggaagaaggtgacactaaggtagaaaggatcc

SEQ ID NO: 4819 - DNA, 800 bp, Homo sapiens
atttaaatatgatttcgtccaaatggtcaggtgggtaaaaaagtcctaaaaacttaaactgctttgattcccaaagttgtccaatcagagccaggtccaggaaataatgccacaccaccccaggtctttttgtaaccaaaatttagactcggatcaatctcatggcagaactatcaattaagttaatatctgtggaaagatgagattgtagtgtaagccttagatttctccatggttgatagccttccttgtgatctgggtatarattattctttggagggacacagactaaaaaatgtctttcaagaagaatgggtgcatggatctacaccattaaacaagaagttctattttctttttaagttttgagaatatgatactaaataaaaaatacattctagtaatattgactatattgatatttacattgttttatgttatgaaatgccttcatatatatatcctcaatttctgttatttaatctaacccataattgagaattagactacatattttaagtagatatagcctacacttgcataacaaatactaatgaatgatttagcatttacatcttgactattagtagcatttaacagcactcttgcctcattgtcagtgggttaatttatatttaatacctttggttttaacctgtgcatataatctccaggggaacaattggaatcatacaaaataatattaccaaaatgtaagaagataaattatcatgtgtatttttccaggcataagactcaatcaaatgtgaaagcttggtttcttcgaaatacaaaaattc

SEQ ID NO: 4820 - DNA, 788 bp, Homo sapiens
cagcactttaggaggccgaggcaagtggatgacttgagcctaggagttccagaccagtaacaaggcaaaaccctgtctctaccaaaaattatctgggtaaggtggtgcatgactgtagtctcagctccttgggaggctgagatggggaggatctctcaagcctgggaagctgtggctgcagtgagctgtgatcgtgccactgcacttcagccaggccacagaacgtgtccctgtctcaaaaagagagagagagacagaaaaaaagtttgaggcttggcagtagagccctgaatgaggyagtggccagtccagcagtgaatacacactaagaacgggctgtgaccatgtggaagggctcttgttctcaaccccttgtgctggcctcagaaaggagagtcttttttttttttttttttttttttttttgagacagagtctcgctctgttgcccaggctggagtgcagtggcaccatctcagctaactgcaacctctgcctccaggttcaagcaattctccggcctcagcctcctgagtagctgggattataggcacccgccaccatgcccggctaatgtttgtatttttagtagagtcggggtttcaccatgttggccaggctggtctcaaactcttgacctcaagtgatccacctgccttggcttcccaaagttctgggattacaggcatgagccactgcacccagccaggaaggagattaaattctgccttcccaggaaatactctgtctgtgtatttgttcattcagacaacaaatattccttgagc

SEQ ID NO: 4821 - DNA, 631 bp, Homo sapiens
agtttctgccttttatatgactcggagtccatctgccaatctggactcagcagaaaggcaagctcctggccttggaagacccagactcaagaaatggagctgctattgttgaytctaaagaggatgacactagcaaagacatgttcttcagctcgtccaatcgctggaacattccagtgatgagactgcaactcatgaaggtctggtgagttcttcagggaagcgatactcagagtacctcagggaccagccgtctttatcaaagtgctctccaaaacatgtcattgcctcagagtgtgtcctcgatggagtacttgtgcttaaattcatccaactcaaaggtgttcttgggctgctcacattccttcatctccgcttaaggagcaggggtggccacctttttctcctccttccgctcagcctggggcttctgcttctcttcccgtgaacctttctctttccgtggagtgtcctttttaggctggctctctgcaaatattttagcatcaaagtgggccatgttctcacacagtttcatttccacccaagacagcctggaactggggctggtaaatgtaggtgaggaaccagcagttgataatgggaatggcctggtagaaagaaggctcta

SEQ ID NO: 4822 - DNA, 759 bp, Homo sapiens
tagtggccgtttgggaggttaacaatgaattatgattccttactccacctgacagtgttgaaatcctcattcctttcccatctctagcctgttctgtgacatttcaggctttcatgcttgctcaaagattgtagtggtaatgtcagaagcttcctcctacagcagctgtgaggcctcaggtaatttacaacctctatgaggctcagtcttcatatgtgtaaatgggaataataataagtcataccgccttgagtgttgcaagggttcaaatgagataatacggccgggcgcagtggctcacgcctgttatcccaccactttgggagttgawgcgggcagatcacttgaggtcaggagttccagacgagcctggccaacatggcaaaaccctgtctctgctgaaaatgcaaaaattagctgggtgtggtggcacatgcctgtaatcccagctactcaggaggctgaggcagaagaattgcttgaatccaggaggcagaggttgcgaagagccgagatctcaccactgcactccagcctgggtgacagagtgagactccacctcaaaaaaaaaaaagttatttatttgtgctttaaaattttttgttctttctctcttcttttgtttctaacaaaaatgcccttcagaagaaagtcaaatactactgctgcgattgctgttattgttattattactgaagaacaagctggattcagtggcatgcacctgtagtcccaggtatttgggaggctaaagcagga

SEQ ID NO: 4823 - DNA, 759 bp, Homo sapiens
tagtggccgtttgggaggttaacaatgaattatgattccttactccacctgacagtgttgaaatcctcattcctttcccatctctagcctgttctgtgacatttcaggctttcatgcttgctcaaagattgtagtggtaatgtcagaagcttcctcctacagcagctgtgaggcctcaggtaatttacaacctctatgaggctcagtcttcatatgtgtaaatgggaataataataagtcataccgccttgagtgttgcaagggttcaaatgagataatacggccgggcgcagtggctcacgcctgttatcccaccactttgggagttgatgcgggcagatcacttgaggtcaggagttccagacgagcctggccaacatggcaaaaccctgtctctgctgaaaatgcaaaaattagctgggtgtggyggcacatgcctgtaatcccagctactcaggaggctgaggcagaagaattgcttgaatccaggaggcagaggttgcgaagagccgagatctcaccactgcactccagcctgggtgacagagtgagactccacctcaaaaaaaaaaaagttatttatttgtgctttaaaattttttgttctttctctcttcttttgtttctaacaaaaatgcccttcagaagaaagtcaaatactactgctgcgattgctgttattgttattattactgaagaacaagctggattcagtggcatgcacctgtagtcccaggtatttgggaggctaaagcagga

SEQ ID NO: 4824 - DNA, 536 bp, Homo sapiens
ctgggctggaagtcgggagacatgggtgggaggatgactctgatagtaaagtgtgtgaacttaatcaactkgctttcaaacacagagtctcatttctctcttttgtgaaacaagaaagttggatttgatggtccccaagggcccacactgggctaaaaataaccaaaaccaggaaaactttctgacagagaaggcagagagaaaaaaaaaatgccaaagtcacatggaagaacttggcagtgaaaaatgaactgaagacgcttttagaaacctctgtgggctggttccctttgcaggtcttctaagtcccctggatgttgaggtctgacttctgccagaccagaagagtatgacctgggcagggtctccagcagcttctccagctcacctgtcctcctgcccactagcctgggcagtgcctttcccctgtcactctctagtccaactttggccaactggtgaccctgggccagagaaagatcctgaatgacttgggacctcttgaatgtttttatcactacccttattgctgttaa

SEQ ID NO: 4825 - DNA, 536 bp, Homo sapiens
ctgggctggaagtcgggagacatgggtgggaggatgactctgatagtaaagtgtgtgaacttaatcaacttgctttcaaacacagagtctcatttctctcttttgtgaaacaagaaagttggatttgatggtccccaagggcccacactgggctaaaaataaccaaaaccaggamaactttctgacagagaaggcagagagaaaaaaaaaatgccaaagtcacatggaagaacttggcagtgaaaaatgaactgaagacgcttttagaaacctctgtgggctggttccctttgcaggtcttctaagtcccctggatgttgaggtctgacttctgccagaccagaagagtatgacctgggcagggtctccagcagcttctccagctcacctgtcctcctgcccactagcctgggcagtgcctttcccctgtcactctctagtccaactttggccaactggtgaccctgggccagagaaagatcctgaatgacttgggacctcttgaatgtttttatcactacccttattgctgttaa

SEQ ID NO: 4826 - DNA, 785 bp, Homo sapiens
ctcccactctagacttacaatcctctcctctttcaatgctccagagaagcaatcttgggaggagaaatgttttgactcatctttgattttgaaagaggtttagagctctggtctcctttcatgtctcaggttattttttggtcttccccatccccgattttcccaaacccctaaataacaaacccagttccttggtttctctcctttaaaaagataatgtttcaatttacaaccagctctgaataattaatgatggtaatgatgtgagaatattttgcatttatggctgctttagattttcaagtcccttttacatccattttcttgcagatcccaatatcaacactaagaagtaaggagagagacaggatggaaaatacwttgaacatttatttatcctttgatttacttatccattcagcaagtatttaataagtgatgatgtgggccagatattatactcggagcaaagtctacaacatgaaaaagaaagacaaggtctccatgcattttgttggaaggaccaggcattaattacctaaatgaatgaataagaacatttcagataatgataacttgctgtgaagaacataaaacaagataatgtctttgcagagaatctactgttgttacttcagatagagttgtcagagaaagctgtacaggggtagggacatttgagctgaaatctaaatgaccttacagaggccatagtgtggtctggggagagcctgtcaaattcaaagacgctaagatgagaagaccgtggagagggaagagtagca

SEQ ID NO: 4827 - DNA, 785 bp, Homo sapiens
ctcccactctagacttacaatcctctcctctttcaatgctccagagaagcaatcttgggaggagaaatgttttgactcatctttgattttgaaagaggtttagagctctggtctcctttcatgtctcaggttattttttggtcttccccatccccgattttcccaaacccctaaataacaaacccagttccttggtttctctcctttaaaaagataatgtttcaatttacaaccagctctgaataattaatgatggtaatgatgtgagaatattttgcatttatggctgctttagattttcaagtcccttttacatccattttcttgcagatcccaatatcaacactaagaagtaaggagagagacaggatggaaaatactwtgaacatttatttatcctttgatttacttatccattcagcaagtatttaataagtgatgatgtgggccagatattatactcggagcaaagtctacaacatgaaaaagaaagacaaggtctccatgcattttgttggaaggaccaggcattaattacctaaatgaatgaataagaacatttcagataatgataacttgctgtgaagaacataaaacaagataatgtctttgcagagaatctactgttgttacttcagatagagttgtcagagaaagctgtacaggggtagggacatttgagctgaaatctaaatgaccttacagaggccatagtgtggtctggggagagcctgtcaaattcaaagacgctaagatgagaagaccgtggagagggaagagtagca

SEQ ID NO: 4828 - DNA, 785 bp, Homo sapiens
ctcccactctagacttacaatcctctcctctttcaatgctccagagaagcaatcttgggaggagaaatgttttgactcatctttgattttgaaagaggtttagagctctggtctcctttcatgtctcaggttattttttggtcttccccatccccgattttcccaaacccctaaataacaaacccagttccttggtttctctcctttaaaaagataatgtttcaatttacaaccagctctgaataattaatgatggtaatgatgtgagaatattttgcatttatggctgctttagattttcaagtcccttttacatccattttcttgcagatcccaatatcaacactaagaagtaaggagagagacaggatggaaaatacttwgaacatttatttatcctttgatttacttatccattcagcaagtatttaataagtgatgatgtgggccagatattatactcggagcaaagtctacaacatgaaaaagaaagacaaggtctccatgcattttgttggaaggaccaggcattaattacctaaatgaatgaataagaacatttcagataatgataacttgctgtgaagaacataaaacaagataatgtctttgcagagaatctactgttgttacttcagatagagttgtcagagaaagctgtacaggggtagggacatttgagctgaaatctaaatgaccttacagaggccatagtgtggtctggggagagcctgtcaaattcaaagacgctaagatgagaagaccgtggagagggaagagtagca

SEQ ID NO: 4829 - DNA, 785 bp, Homo sapiens
ctcccactctagacttacaatcctctcctctttcaatgctccagagaagcaatcttgggaggagaaatgttttgactcatctttgattttgaaagaggtttagagctctggtctcctttcatgtctcaggttattttttggtcttccccatccccgattttcccaaacccctaaataacaaacccagttccttggtttctctcctttaaaaagataatgtttcaatttacaaccagctctgaataattaatgatggtaatgatgtgagaatattttgcatttatggctgctttagattttcaagtcccttttacatccattttcttgcagatcccaatatcaacactaagaagtaaggagagagacaggatggaaaatactttkaacatttatttatcctttgatttacttatccattcagcaagtatttaataagtgatgatgtgggccagatattatactcggagcaaagtctacaacatgaaaaagaaagacaaggtctccatgcattttgttggaaggaccaggcattaattacctaaatgaatgaataagaacatttcagataatgataacttgctgtgaagaacataaaacaagataatgtctttgcagagaatctactgttgttacttcagatagagttgtcagagaaagctgtacaggggtagggacatttgagctgaaatctaaatgaccttacagaggccatagtgtggtctggggagagcctgtcaaattcaaagacgctaagatgagaagaccgtggagagggaagagtagca

SEQ ID NO: 4830 - DNA, 580 bp, Homo sapiens
tggaccaaccaaagcccaagggcatcccaagactgccaggaagaggatctgacctgggttaaacagccactaatggcccattttgctgcctgccttgtttctacttaggtaacctcctttaacccgaagacacccctgcagggtagctcttatgaaacccattctacagattaggaaaataacactcagaggtgacacagaatgaagtgatagtgatggagcttgaatttgaactcagttttctctaacatcagaaattgtgagcttttccttttcaacgatgcatttctaaaactcagagacctgcagagaggcatgtattaaatactcatgcatccatttcccagaattaaagtccacttttgttccaccgcaggaagccaaggtatagctcaaaggaaccccaactctgccccatttgagggtggcaaacaccaggcctgtttgtccccagaagagggcaagtgtcctgtccaaggactgccatcaccctcaggctgagagacggtagcaggaagagttcaggccttccctcgggaaggtacctcccagctgcaacgctcctttccatatccrgtgt

SEQ ID NO: 4831 - DNA, 1367 bp, Homo sapiens
attactccattaatcattaagcactccattcagtcatttcttccttcaatagttcaactgtctttacaaataatacctatctttagggaaaaaaaaatctgaaagtaaatacaatctttattttcttgtttatcacatcatatgcatcacraaacatctttgcaggaaaaataattacaatagagatttgccaagtgaaaaaaaatcactctgaagctcccctaattccattgcccagagggttaccaccattaacttttggggctgtaagatcttccagactcactccgtgcattcatacacatggaactctgttttactgtcaagcacattgctttctaactggtttctttctttcttttttttttttttttgagatggaatctcactccgttactaggtcagagtgcagtggtgagatctcggctcactgcaacttctgcctccctggttcaagcaattctcctgcctcagcctcctgagtagctgggattaacaggcatgcaccaccgcacctggctaatttttgtatttttagtagagatggtgtttcaccatgttggccagaatggtcatgatctcttgaccttgggttctacccacctcagcctcccaaagtgctgagattacaggtgtgagccgctgcacccgggcaactggtttccttttactgccactttcactaaccgtggtatttctccatgggcagcattcttggcatttgggtgtgtaggactgtccctcacatagtgacctcttactcatgaattgccagtgtcacattcagattcttatggcaaccagaagctcccctgctcccagcatttctggactcagcctgggctggggaggttagctcagaccaaatatctcctttctgccagttgctctgctaggcccaggtcatgctgagcagagcaagatgtagctgaaaaccaaataagtcacgtgttccagcttgctggggttttgtgaagaaagcagccacccctccagtcatatagtttgcaggttgggatttgcattttgatttccaaagacccttgaacaacttagcactgcccaccgcccttcagagcttatttccacttcctgcctgcctataggttccaagctcattataactagcctaaattgcttttcgaatgggaaaacacagtaaacttattttatacaaaatttatttatgagatattaacatgcccagtacttgggcaagcactgtgtgagaggtaatagatatggaagaaaaatattcaaatctgcttacaaaacaaggacaatccattttcatttcaaactgcttaatatattcaagggttagagaataaggacaagaaagcctatatatgttttagaggatgatt

SEQ ID NO: 4832 - DNA, 887 bp, Homo sapiens
cagaataacttgttattataatttttctgtaaatgctccattatcttctaaaagacttaaataataagaaaaagaatctttagtttttacacatgtaattaccacatttgctgctcatcaatcctttatgttgatctaggtttccaccttctatcattttaccgcctgaagaacttccttccgcatttttttgtggtacacatctgctggtgatgaactctaccttttaatgtctgggaaagtcttttgcttattttttttcaacaagaatctcattgaaagtccagtgtacttactgtttccatttttttctggttgctttttaacattttctcttttacactgaatttaagcaacttgcagcaacacggtgtcattttcttcatgtttcctgtgcttggggttcactggactttggatctgttggtttccagtttttgtcacatatgacaaacttatttcttcaaatattatttatgtccctccttctttttcagacactccaacaccaagagcctcttgaggtggctcacagttcactgatgctctattgacttttttttcagttttatttttctgtatgtttcattttgcccaatttattgttgtgccttcaagttcattcatcttttctcctgcaatatctaatctgccaataaccccatccagtgtattttccattttatggtatgacctgcatttgaaagtatcastctggctgctggatggagaataaactataggaagattagtttagagcaattagtgtcagcatccattgctgggaagcaaggttttccaaaatttagcagcttgaaacaataatatacatttattatgtcttccagttactatgggtcaggaattttggagtggcttagcttaac

SEQ ID NO: 4833 - DNA, 887 bp, Homo sapiens
cagaataacttgttattataatttttctgtaaatgctccattatcttctaaaagacttaaataataagaaaaagaatctttagtttttacacatgtaattaccacatttgctgctcatcaatcctttatgttgatctaggtttccaccttctatcattttaccgcctgaagaacttccttccgcatttttttgtggtacacatctgctggtgatgaactctaccttttaatgtctgggaaagtcttttgcttattttttttcaacaagaatctcattgaaagtccagtgtacttactgtttccatttttttctggttgctttttaacattttctcttttacactgaatttaagcaacttgcagcaacacggtgtcattttcttcatgtttcctgtgcttggggttcactggactttggatctgttggtttccagtttttgtcacatatgacaaacttatttcttcaaatattatttatgtccctccttctttttcagacactccaacaccaagagcctcttgaggtggctcacagttcactgatgctctattgacttttttttcagttttatttttctgtatgtttcattttgcccaatttattgttgtgccttcaagttcattcatcttttctcctgcaatatctaatctgccaataaccccatccagtgtattttccattttatggtatgacctgcatttgaaagtatcagtctggctgctggatggagaataaactataggaagattagtttagmgcaattagtgtcagcatccattgctgggaagcaaggttttccaaaatttagcagcttgaaacaataatatacatttattatgtcttccagttactatgggtcaggaattttggagtggcttagcttaac

SEQ ID NO: 4834 - DNA, 887 bp, Homo sapiens
cagaataacttgttattataatttttctgtaaatgctccattatcttctaaaagacttaaataataagaaaaagaatctttagtttttacacatgtaattaccacatttgctgctcatcaatcctttatgttgatctaggtttccaccttctatcattttaccgcctgaagaacttccttccgcatttttttgtggtacacatctgctggtgatgaactctaccttttaatgtctgggaaagtcttttgcttattttttttcaacaagaatctcattgaaagtccagtgtacttactgtttccatttttttctggttgctttttaacattttctcttttacactgaatttaagcaacttgcagcaacacggtgtcattttcttcatgtttcctgtgcttggggttcactggactttggatctgttggtttccagtttttgtcacatatgacaaacttatttcttcaaatattatttatgtccctccttctttttcagacactccaacaccaagagcctcttgaggtggctcacagttcactgatgctctattgacttttttttcagttttatttttctgtatgtttcattttgcccaatttattgttgtgccttcaagttcattcatcttttctcctgcaatatctaatctgccaataaccccatccagtgtattttccattttatggtatgacctgcatttgaaagtatcagtctggctgctggatggagaataaactataggaagattagtttagagcaattagtgtcagcatccattgctgggaagcaaggttttccaaaatttagcagcttgaaacaataatatacatttattatgtcttccagttactaygggtcaggaattttggagtggcttagcttaac

SEQ ID NO: 4835 - DNA, 509 bp, Homo sapiens
agaggttcaggatgtttttggatctgacatagcccaaaccagggcagaggctgtagcaaggggaggaagctgggaaagcctgagggtcagagggkagtggaggtggacaggatctatggctacggtttttcagccgctcagccgtgctgggccctcgatggcccgtgggagtgggagcgtttcctaagctccactgaagataagagcccaacccaacccctccccccacccctgccccttccttagtctctggagctggaacaatcaggcttggccatggcggctggtgctgataaccatttcttggcagaagtgcccgccaaagctgtggccctagtcctcaccaccacagagagccagcaaggccttcaggaagtctccggaggtgtcaccctggcagaggcagagagcagagtgagtgaaaacagtccttccagtctcaatgccccctcctcccggctgcccatctgtctggacatctccctcggcttctctccatgaccaacata

SEQ ID NO: 4836 - DNA, 658 bp, Homo sapiens
attaaatgagagtgaagacaggtttcccagcagaaatggtacatgctccactccctggtctgaggggacctcacaggcacccaggaggtttctagaaaagagagaacctggatgagaacagcttaggtccccccagaggcagctgaacatagccactcatgtctctgagagtagggttcattgccggggcaggagtgggggtccctctgcccgccatttcaagaaccttcccttggaggctccaggtggctcctggtgtggcagtggggcatggagtgtggggcacagctcggtgtggtggccaggagttagctttgtccttgagcactggctccacagcagaaacagcaatgatcattagtttattgagctcttactgcgtgstatgcactgtgcccatctcagttcatcagcactgtaatcccagggagtgagtgcccttactgttgtcattttacagatgggaaaactgaggctcaggaaacttaagtcacttcccaggcctatacaagaaacaagtggtgggactcaaactcagatttctgactctccaacttgtgctcttagctaccatgttttattgactcctctgggcaagtcttttaacgtcttttggcctccatttcctcacctgtaagtgggaataataccttcttgg

SEQ ID NO: 4837 - DNA, 675 bp, Homo sapiens
tatcttaatttagtaactagacatttttactatattgacttaagtcagaaatcaataactttttaaaccgatttttataaagtagtttttataaatgaattttgccatttagatgactatattataaaattcattttataaaatcattttttgccatttatttggatgactatatgatgaacattattaacagaattcttaattttgagccatccttgccttcctgaaaatatgaactttgttttttatggtggcaatgatatgctaactttacaaataatttgggaaacatttcttttttttttttttcatgtgttctggtatagtttaaatagcatggaatttttatcccttggagatctgaaataatttatttgtgaaactgtcagacttggtgaaatttgaggaaatagctctttgaaagttaaaataacctaccatcatggattatttaattaatatagtccaattatttaatatagtccaattatttaatattgtacagattgttatttaaatttttatagagctacttcctcaaacttccttgatcccaggagttgaaggccagtccgggcaacatggagaaaccttctctctaccaaaaatataaaaaaattarccaggtgtggtggtgtgcacctccttccagctactcaggaggctgaagtggga

SEQ ID NO: 4838 - DNA, 549 bp, Homo sapiens
catggtggcatgctcgtctgcttgcaaagactggtctgcctcggccagcatgggcctcacgggccrcaccatgcgcagttcacaggtccccatgctcaggagggcctggcttgatttaaagctctgctgccactgtcttgaaattctgaataattttatctttgaactgttttgtaagtgaaatctgatgggacactggagcgtgtgcatgagcagagaagcacgctgttcctctctgccctgtctgcatgcagcatgtgcgaagacactgaataaataggggcgctgggggtcccagaggccctgctttcccttcaaaccggaactcgctctgggtgtgctaagaagggcaacagcatcctaagaagcaggaacgaccaacaagtcctgtcatgttctttcttacttgcgttactgccccgtgttagccaagaacttatgaaggaaagggaaagatagggcaacccttagttccttttctttttcgaggcagggtcttgctctgtcaccaggctggagtgcagtggcacgagcacagctcactggaac

SEQ ID NO: 4839 - DNA, 838 bp, Homo sapiens
atagatcaatgcctcccctctctgctctattttatatgtctctgggacacccagctgaaatcctccaagctgctagaacaaggccaagcttgaaaaaatgattagaagggaaataagtttatcttacttaagtatccacttgcactagtgtttagcttctctctctcctcaagatgtgatgagacaattgttaggagggtactggccactaccacctcctcatgtttgtataaagtcattcagaacactttgctttctcctttgagcttcatgaaaaacacaagtgaaaggtgaacaaactgaggcccagtgaggagcaattgacgtaaacagctcctcttaaacggaagagcaggacccaggtctgccagaaaagaacctaataatttacgctagctagctcctgcctgagagtgctgcatactctcacataatggtgccagcatggtgcagaaggtcaacttctgactccctctggcctgacaagattgtccggagaactgacgratccagattcactctcacttgccaagcatcttactgagaaggtaaaaggatcaagcaggtgatttcatggagctgggtagaagctacatgagcacaggccctgtgctcctgctgcccaagtcttgggtaggaccacacacatcttgcaacaaatgggcagagatcagagtaaccctgaagtagataaagatgctgaatataaacaaagatgattaaagaggctatggattcaggacactgaattttgctgcagtgagaggaaccctggagtcagctttctaacagcctggccatgtttagtttatcaaacctgggcagagcaaaagcctcg

SEQ ID NO: 4840 - DNA, 667 bp, Homo sapiens
aggacaaagttagggatttctttccttccttcctctattcttattttcttaccttcctctctctcttcctttcttcttctttgatccaactggtaaacatctgttatatgattggtactgccccaggcactaggaaaacagaatgagatccgtagtcccaaataatattaattcataaggaataagagggagaaaaaaattccattaaatttctcataggaaagaaagaggaaaaactgaggggaaaaaactcctgatgaatggataggacagaaagtgaaattctgctgggcctagatatggctgaggattcacatgaagagagaaattcttttgatgtagcagagtgaaagaagaaaggcgggatggagcgatcaagatggtgaaacacttcactccaaaatgtgattcttcaccaaaggcaccaaacgttcaattaggaatctcgtgaaaaccagtaaaggarctgagttctgtgtacagggtgtcacatagcacaatagaaactgtaggcaaagggcccacagagaccatagaagaaccacagaggaagatgagggcaaggccacagggactcctaggaaaagctttgcacatcacaagccatgtaactgtgatccaggctgggtttggacagacttacaggagccaggaagcttctaggctg

SEQ ID NO: 4841 - DNA, 805 bp, Homo sapiens
ttgtcctggctcatccaggtgggccccatataagcacgagggtccttataaaagggaggcaagaggagatgtgacattgtcacatctcccaggcagacaggagatgtgaccatgcaagcaggggctggagtaatgtgctttgaagatggaggaaggagccactagccaagtgcagacagcctctagaggctggaaagacaaggaaattgattctcccacagcctccagaaggaacacagcctggataacaccttgacttcagccctgtaaggcacattttggacttttgacctccagcactgcaggagaatcagttcatattggttttgtttgtttgtttgttttgagatggagtctcgctctgtcacccagactggagtgcagtggtacgatcttggctcactggaacctccacctcctgggttcaagcaattctgtctcagcctcccaagtacctgggactacaggtgcccgccaccatgcccagataatttttgtatttttagtagagacggggtttcaccatattggtcaggttggtctcacactcctgacctcaggtgatccacctgcctcggcctcccaaagtgctgggattacaggcatgagccactgtgcccggccattcacgttgttttaagccgctgggtttctggtaatgtgttacggcagcataggaaactatcataccccaacatccactgcagggggaaggttgcagatgctgactccagcagccagtgggaacaagcacagaaccactttctaagttaagaacccccagsccccctccaccagatggcta

SEQ ID NO: 4842 - DNA, 513 bp, Homo sapiens
tccacctggataacacaggatactctattttaatatccactgattagtcaccttaattcccttttgccatataaggtcacagaatcacaggttctggggattaagacagggatgttttttgtaggggtaggggaaggaggtggtcatttctctgcttaccacagcaattcattcagctattctaacttgatgtaaatggtacttaaaaaccatgcattttcctttgctttaattttgtgctaattgagaaatcttctgtatttacagatgtaacactgawgatgacctaagaatttgtttatgatgggcatcattgaatgttagggctgttgcccacactccttctactttgcactcctgttcaatttgggcttttgagtggatctatatacctgtacagacaactgattctggtctttagacttctcacatcacttatgataaatccatctaatggaattaaggcttttattaaacctcccatcagtttggtttgtctgaattgatttcccc

SEQ ID NO: 4843 - DNA, 812 bp, Homo sapiens
tattatgcctcctgatttatttttctcctagcatttatcattatttaaygtaccatatgttttgctaagctacttattaatttgtctgttttcctacactaaaacgtaattttcagggcaggaatttcatctattttgtttacttaaaaataaccccagcatctcaaacagggtctgacatctaagagatgctcaataaatattcattacatgaactatatacaccgactatatacaagatacagaccaccctcttttgcataatgattactagaaaatttatttcagcttcctatgtggtgtatcatggcttgttgagatgttaaatggaacaatagtagttttccagttgatttattttttgtttatgaaattttaaaatgctcctttaacatgataaattgcctcttgcagacatccatcatcattaatatgttgagtgtgtgtgtgtgtgtgtgtgtgtgtgagagagaggctcatgtcctgattcataaaaatctgtttctgtgtttttaacaaaagctattagtacctaccagtataatatgtttgtattattaacatgaaggtgttggccacaaaccacttttctttgggaatcttggaatgaattcaatgaacagaaaaagcaggactaacctgatcttcattcttactggcagcatctgggatgaaaatatagaaaccaaagttaaggaaatgtaaaatatttaataaacaaaacaaataatccatttaatgcagcatcttgattgctttaatgacaatatgttgtaaaaccgcaaatggtttttgaacacattaagatttat

SEQ ID NO: 4844 - DNA, 812 bp, Homo sapiens
tattatgcctcctgatttatttttctcctagcatttatcattatttaacgtaccatatgttttgctaagctacttattaatttgtctgttttcctacactaaaacgtaattttcagggcaggaatttcatctattttgtttacttaaaaatawccccagcatctcaaacagggtctgacatctaagagatgctcaataaatattcattacatgaactatatacaccgactatatacaagatacagaccaccctcttttgcataatgattactagaaaatttatttcagcttcctatgtggtgtatcatggcttgttgagatgttaaatggaacaatagtagttttccagttgatttattttttgtttatgaaattttaaaatgctcctttaacatgataaattgcctcttgcagacatccatcatcattaatatgttgagtgtgtgtgtgtgtgtgtgtgtgtgtgagagagaggctcatgtcctgattcataaaaatctgtttctgtgtttttaacaaaagctattagtacctaccagtataatatgtttgtattattaacatgaaggtgttggccacaaaccacttttctttgggaatcttggaatgaattcaatgaacagaaaaagcaggactaacctgatcttcattcttactggcagcatctgggatgaaaatatagaaaccaaagttaaggaaatgtaaaatatttaataaacaaaacaaataatccatttaatgcagcatcttgattgctttaatgacaatatgttgtaaaaccgcaaatggtttttgaacacattaagatttat

SEQ ID NO: 4845 - DNA, 812 bp, Homo sapiens
tattatgcctcctgatttatttttctcctagcatttatcattatttaacgtaccatatgttttgctaagctacttattaatttgtctgttttcctacactaaaacgtaattttcagggcaggaatttcatctattttgtttacttaaaaataaccccagcatctcaaacagggtctgacatctaagagatgctcaataaatattcattacatgaactatatacaccgactatatacaagatacagaccaccctcttttgcataatgattactagaaaatttatttcagcttcctatgtggtgtatcatggcttgttgagatgttaaatggaacaatagtagttttccagttgatttattttttgtttatgaaattttaaaatgctcctttaacatgataaattgcctcttgcagacatccatcatcattaatatgttgagtgtgtgtgtgygtgtgtgtgtgtgtgagagagaggctcatgtcctgattcataaaaatctgtttctgtgtttttaacaaaagctattagtacctaccagtataatatgtttgtattattaacatgaaggtgttggccacaaaccacttttctttgggaatcttggaatgaattcaatgaacagaaaaagcaggactaacctgatcttcattcttactggcagcatctgggatgaaaatatagaaaccaaagttaaggaaatgtaaaatatttaataaacaaaacaaataatccatttaatgcagcatcttgattgctttaatgacaatatgttgtaaaaccgcaaatggtttttgaacacattaagatttat

SEQ ID NO: 4846 - DNA, 627 bp, Homo sapiens
tcctattcacaaggactaaagaactgccattatcagtgccactttttcttctgttttgtttctttaggaagatttatgtagttaaataaaaatggaatatgaattactaccaatcataactagtatttccagaaaagactataatagtctataatataatataatagactataatagtctaaaaatataaaatctgtaccacataatttgttttaattcttaaaattattatacacatattgaccatctccccaaaaaaatttaagttctttttgggctatacattttaggaaggcatattgttgagtgaaaaaaaaaaaggagttgattccaaaatagtttttgttccatgtgattctgtttctgtaaaacaacaactacaacttacatttatatttyaccaacatgtttctatctatctataagacattacatcagaaggttaacaatgtcttactgggaggaggtagatcatgctttgtgtggttttttaatgtagctttgtattctaacttaaacaatgaaatgttactgtagactgaatgtgtctctctaattcatatgctgacgttctaactcccaatgtgatggtattaaaaggcgggcctttgggtggtaattagatca

SEQ ID NO: 4847 - DNA, 672 bp, Homo sapiens
aggtactggggatatagtcattaataggatagacagctctcagcaccttgaaagtggttatagtcccgtgtcccagagaaaaagtctggggagtaggatcacctgctgatatggtttggatttatgtcgctgcccaaatctcgtcgaattgtaactaccagtgttggaggaggggtttgatgggaggtggtttgatcatgggggtagatttcccccttgcttttctcatgatagtaagttctcatgagatctggctatttaaargtgtgtagcacctcccccttcaccttcttcctccttctccaaccatgtaagacgtgcctgcttcccctccactttctgccatgattgtaagtttccagaggcctccgtagccatgcttctcatacagcctatggaactgtgagtcagttgaacctcttttctttataaattacccagtctcagatacttctttacagaaatgcaagaatggactaatacacctgtcaaacaggaaagcaggcccacaatgccttgcatgctgcatttcttcctgatttggcagatatttgcaaaagtgtgtgttttcccctatacaggtgaatgtgttaaaataattttacatcagtaaaagcccctcttcatcagcctccttgtttttttcctcccctcccctttccactgtcacag

SEQ ID NO: 4848 - DNA, 684 bp, Homo sapiens
gatgcgaaatgctgccttgcatttagttgtcaggcctccccagtttctggtttctgcagtgtttttattgttatcctgtacattttaaaatgactgccaacatttaaaaatcagaagagtctgcctattccagaattcctgcttctcttacagttcataatgtcagtatgatttttttctctttctgtgttgtagagtctgtgtaaagaccaagtttagccacatgtggctgtcaagtacyagaaatgggactgtgactgaggaactaaatttttaatcttacgggacaacatagctctaaagtgtaatgggcaacgtaatgacgttcttgaaagttttattcttgtgacttcaactttgaaaaactgtaaagaacacaaatatttgaatatttaaaaaatcttttaaaatatgtctcttacgagtatgtccttgaaacagcaggagagtgaagtgctaaaaaacttcaggtgaggtatagggatagatggataaattttaagatgccctgtggtatatgtaatgtaaaggcaaggaaagagctaatgttccttcttcagagtgtccttgggaacttggttgagaataagaaaattttttaaaaacagttttacaactctggcattgacttttttttttctttttttttaaggagacagggtctcgctctggagtgtagtgcac

SEQ ID NO: 4849 - DNA, 684 bp, Homo sapiens
gatgcgaaatgctgccttgcatttagttgtcaggcctccccagtttctggtttctgcagtgtttttattgttatcctgtacattttaaaatgactgccaacatttaaaaatcagaagagtctgcctattccagaattcctgcttctcttacagttcataatgtcagtatgatttttttctctttctgtgttgtagagtctgtgtaaagaccaagtttagccacatgtggctgtcaagtaccagaaatgggactgtgactgaggaactaaatttttaatcttacgggacaacatagctctaaagtgtaatgggcaacgtaatgacgttcttgaaagttttattcttgtgacttcaactttgaaaaactgtaaagaacacaaatatttgaatatttaaaaaatcttttaaaatatgtctcttacgagtatgtccttsaaacagcaggagagtgaagtgctaaaaaacttcaggtgaggtatagggatagatggataaattttaagatgccctgtggtatatgtaatgtaaaggcaaggaaagagctaatgttccttcttcagagtgtccttgggaacttggttgagaataagaaaattttttaaaaacagttttacaactctggcattgacttttttttttctttttttttaaggagacagggtctcgctctggagtgtagtgcac

SEQ ID NO: 4850 - DNA, 731 bp, Homo sapiens
  misc_feature (1)...(731): n = A,T,C or G
ccnnnnnnnnnnnnnnnnnnnnnnnnnnnnnnnnnnnnnnnnnnnnnnnnnnnnnnnnnnnnnnnnnnnnnnnnnnnnnnnnnnnnnnnnnnnnnnnnnnnnttctagtccgctgagccctcactctgacctgggacgaggagcctgtagtgaagatctcaggccagaggtggcccagagcctggtagggtggggcgagccgtgyccaggactcgtcacaggtcttgggtccccgtgatgaggatgagagcccccgggatcttcacctcgaccctcaggcctttgatccagggtgcataggacacccagacccctcagaggagttccagacctcaacccccacccctcctgaggttgtccgcctgggagcctcaggaggcacgagaaagggtttggtctcagccctgcacttgctcggcgatcgctactgatctctgggcttcaacttccacctgtagaatggactcaccctgggagctgtctcctacacacacacacacacacacacacacacacacacacacacacatcgtgcaggcatagagtactaaagggagcacacactgcatccccacacgcggccagctgttattcttgccgtccccctcggcctccctgagagcagggattgtcttgtctcggagctctgctccccaacccggccccaagaatggatgtaactcaggcaactggagggtcccttccttcgcccaactgggaagtccttccta

SEQ ID NO: 4851 - DNA, 731 bp, Homo sapiens
  misc_feature (1)...(731): n = A,T,C or G
ccnnnnnnnnnnnnnnnnnnnnnnnnnnnnnnnnnnnnnnnnnnnnnnnnnnnnnnnnnnnnnnnnnnnnnnnnnnnnnnnnnnnnnnnnnnnnnnnnnnnnttctagtccgctgagccctcactctgacctgggacgaggagcctgtagtgaagatctcaggccagaggtggcccagagcctggtagggtggggcgagccgtgtccaggactcgtcacaggtcttgggtccccgtgatgaggatgagagcccccgggatcttcacctcgaccctcaggcctttgatccagggtgcataggacacccagacccctcagaggagttccagacctcaacccccacccctcctgaggttgtccgcctgggagcctcaggrggcacgagaaagggtttggtctcagccctgcacttgctcggcgatcgctactgatctctgggcttcaacttccacctgtagaatggactcaccctgggagctgtctcctacacacacacacacacacacacacacacacacacacacacacatcgtgcaggcatagagtactaaagggagcacacactgcatccccacacgcggccagctgttattcttgccgtccccctcggcctccctgagagcagggattgtcttgtctcggagctctgctccccaacccggccccaagaatggatgtaactcaggcaactggagggtcccttccttcgcccaactgggaagtccttccta

SEQ ID NO: 4852 - DNA, 667 bp, Homo sapiens
tccagtcctcacaaccctgccagcctgagcagggctgayggctgcattcattgagggttcagtgtgcgccaagcagcaggccaggcacttgcccacattgtctcatttgagtgctcacaacccctggaggtggcctcctcccagatatcagtggaagtgcccagagaggaaggcagcaggtggacacagccacagtgaaccgcacaccgaggcagccgacaccgctggagccctctttgtggctgccccacctgcccgttctccagcttccggagacgttgccccaggttgtctgctgtagcaacagcggcagcactgggctcagtaaggcctgaggactttttcccaggggccttgctcaaacatcagcccaggggttatcagaagctgtgccttgccctggactctggggtggaaagtcaggcattttcaatgcagccctgagccccaggcaggctgggtgcaggtggggtcttccagaagtgggaagctggaagccccccacttccagcctaatcagtgtggcgaggggaagccccggtcccggtgtgtggtggggaggaaggccggctgcttcaggctcctgcctcttctggtccagcccaggtgggcttcctggaggagggcactggcagactctgacctggacagcagcagtgaatgctct

SEQ ID NO: 4853 - DNA, 667 bp, Homo sapiens
tccagtcctcacaaccctgccagcctgagcagggctgatggctgcattcattgagggttcagtgtgcgccaagcagcaggccaggcacttgcccacattgtctcatttgagtgctcacaacccctggaggtggcctcctcccagatatcagtggaagtgcccagagaggaaggcagcaggtggacacagccacagtgaaccgcacaccgaggcagccgacaccgctggagccctctttgtggctgccccacctgcccgttctccagcttccggagacgttgccccaggtygtctgctgtagcaacagcggcagcactgggctcagtaaggcctgaggactttttcccaggggccttgctcaaacatcagcccaggggttatcagaagctgtgccttgccctggactctggggtggaaagtcaggcattttcaatgcagccctgagccccaggcaggctgggtgcaggtggggtcttccagaagtgggaagctggaagccccccacttccagcctaatcagtgtggcgaggggaagccccggtcccggtgtgtggtggggaggaaggccggctgcttcaggctcctgcctcttctggtccagcccaggtgggcttcctggaggagggcactggcagactctgacctggacagcagcagtgaatgctct

SEQ ID NO: 4854 - DNA, 732 bp, Homo sapiens
gggtgacagtgaacaggttccaactgtgttgaatgagtgggtgacaaagagattcccacagtggtgagtgagttattgacagtgaactggttctcaatgtggtgaacaagtggcagacagtgaacaggtttccactggagtgacagtggttgacagtgaataggtttctactgtggtgaacgagtgggtgacagtgatcagggtttttttgtaatgaataactcggtgacagtgaataggttcccactgtaatgaatgagtggctgacaggcaacaggttcccactgttgtgaatgagtggctgactgtaaagaggttcccactttgatgaatgagtgggtgacagtgaacatgtaaccactgtggtgaatgagtgggcgacagtgaacaagtttccaccatgatgaatgggtgggtgatagtgaacactttcccactttggtgagtgactgggtgacagtaaacaggttctcacagtgatgaataagtgggtgacagtgaacaggtttctcctgtaattaatgaatgggtgatagtgaacaggttctcaatatgargaatgagtgggtgacagtgaagaggctcccactgtggtgaatgtgtgttttatagttaagaggttcccactgtgataaatgagtgggtggcaatgaacaggttcctcatgtaatgaatgcgtgggtgacagtgaacaggttcccactgtgatgaatgaatgagtgacagtgaaca

SEQ ID NO: 4855 - DNA, 814 bp, Homo sapiens
gtgatgatttattacgtgacagtgaacaagttcccactgtggttaatgagtggctgacagtgaacagtttcctactgtgatgagtgagtgaatgacagttaacgggttttcactgtgactagtgagtgggtgacagtgaacagtttcccactgtggtggtagagtagctgatagtaaacaggttcccacagtgatgaatgagtggctgacagtgaacagatttccactgtggtgagtgattgagtgacagtgaacaggtttctactgtggtaaatgagtgcatgagagtgatcaggtttctcctgtaatgaaagagtgggtgacagtgaacatgtacccattgtgatgaatgggtggctaacagtgaacatgttcacattgtgatgagtgagtgggtgacgggacaagtttctactccggtgaatgtgtgtgtgatagtgaacagtgataaattagtgcgtgacagtgagcaggttcccactgtggttaatggttgggtgagagtgaacaggtttccactgtgatgattgagtgggtgacagtaaacaggttcccactgtgatgactgagtgggtgacagtgaaccgcttcctaatgtggtgagtgacagggtgacagggaacaggtttccactatggtaaatgagtrgctgacagtgaacaggtttccactgtggtgaatgagtgggtgagagttaacaggtttctactgtcgtgaaccagtggtggatggtgatcacgttcctcctgtaatgaatgagtgaatgacagtgaacagttacctactgtgattaatcagtgtctgacagtgaaca

SEQ ID NO: 4856 - DNA, 814 bp, Homo sapiens
gtgatgatttattacgtgacagtgaacaagttcccactgtggttaatgagtggctgacagtgaacagtttcctactgtgatgagtgagtgaatgacagttaacgggttttcactgtgactagtgagtgggtgacagtgaacagtttcccactgtggtggtagagtagctgatagtaaacaggttcccacagtgatgaatgagtggctgacagtgaacagatttccactgtggtgagtgattgagtgacagtgaacaggtttctactgtggtaaatgagtgcatgagagtgatcaggtttctcctgtaatgaaagagtgggtgacagtgaacatgtacccattgtgatgaatgggtggctaacagtgaacatgttcacattgtgatgagtgagtgggtgacgggacaagtttctactccggtgaatgtgtgtgtgatagtgaacagtgataaattagtgcgtgacagtgagcaggttcccactgtggttaatggttgggtgagagtgaacaggtttccactgtgatgattgagtgggtgacagtaaacaggttcccactgtgatgactgagtgggtgacagtgaaccgcttcctaatgtggtgagtgacagggtgacagggaacaggtttccactatggtaaatgagtggctgacagtgaacaggtttccactgtggtgaatgagtgggtgagagttaacaggtttctacygtcgtgaaccagtggtggatggtgatcacgttcctcctgtaatgaatgagtgaatgacagtgaacagttacctactgtgattaatcagtgtctgacagtgaaca

SEQ ID NO: 4857 - DNA, 814 bp, Homo sapiens
gtgatgatttattacgtgacagtgaacaagttcccactgtggttaatgagtggctgacagtgaacagtttcctactgtgatgagtgagtgaatgacagttaacgggttttcactgtgactagtgagtgggtgacagtgaacagtttcccactgtggtggtagagtagctgatagtaaacaggttcccacagtgatgaatgagtggctgacagtgaacagatttccactgtggtgagtgattgagtgacagtgaacaggtttctactgtggtaaatgagtgcatgagagtgatcaggtttctcctgtaatgaaagagtgggtgacagtgaacatgtacccattgtgatgaatgggtggctaacagtgaacatgttcacattgtgatgagtgagtgggtgacgggacaagtttctactccggtgaatgtgtgtgtgatagtgaacagtgataaattagtgcgtgacagtgagcaggttcccactgtggttaatggttgggtgagagtgaacaggtttccactgtgatgattgagtgggtgacagtaaacaggttcccactgtgatgactgagtgggtgacagtgaaccgcttcctaatgtggtgagtgacagggtgacagggaacaggtttccactatggtaaatgagtggctgacagtgaacaggtttccactgtggtgaatgagtgggtgagagttaacaggtttctactgtcgtgaaccagtggtggayggtgatcacgttcctcctgtaatgaatgagtgaatgacagtgaacagttacctactgtgattaatcagtgtctgacagtgaaca

SEQ ID NO: 4858 - DNA, 826 bp, Homo sapiens
cattgaggtgctccatctgcagggcatagtgggcttccacctccctcaggctgtcctccaagctggcagaaggcctttattctaagcaaattaacaaagaacatgaatctaagattcatgggtacctactttaattctgtctttttttatggtgaatagtgctgcagtaaacatgtgagtgccagtgtctttttggtaaaataattttttctttgggtatatacccagtaattcgattaatgggccaaatagctattctatttttagctatttgagaaatcttcaaactgtgttctacaggggctgaattaatttgcatttccaccaacagtgtatatagattcccttttctccacaacctcaacatgtttttatttttgttgcattaacttctaaggtgttagttataattttttttctagagccctgtgtctagaagagtactttctgcatgttcttctagagttttaatagcttgaagtytcacagttaagtctttaaactatattgagatatattgtttatatggtgggaggaagagttttttttcttcttctgcatatgactaacgagttttcccagtatcatttattagatagggagttattttctttttatttctgttgactttgtcaaaagtaggttgtaggagtgtagctttatttcagggctctctcttctgttccacatggtttggctctgtgtccccacccaaatctcaccttgaattgtaataatccccacatgtcattggagggtctgggtgggaggtgattaaatcatgggggtgggtttttcccatgctgttctctgggtcgtgaataag

SEQ ID NO: 4859 - DNA, 840 bp, Homo sapiens
agaacttcggagggaaaaaaatcagttcaatggtagtcaggagttgggatgagggagtaggactggaccacaagtgtcaggaacttttgagggtgaggaaaatgctgtatatctcatctgtaatggttctaagactgtatatacacttgtgaaaactcataactgtataccaaagaaaggtgaatcttactatatgtaaatcacaccccaataaacctgactttttaaaaatgcaggctgcaaaaacattattttaggattcataacgtggtatgcaaaagaaatgaatgttttcaaggatttacacctcaaaggaggaagcaccagcctttgtgaggtttggctctagcccagcaaggatctggagatgaaacccatttactcctttttttaccacacttcatcctgatagctttaaaaggccctgtgatgctgggcacagtggcttgcgcctgtaatcccaacactttmggaggccaaggcaggaggatctcttaagcccaggagttgaagataagcctgggcaacacagtagtattaccaggggaggatcttgactacaagtcgtccaggttcttggaatattgaacaaagaggtggacaaaacacacaaagcaacaaaagaaggaacaaaagcacagatttattgaagcaaaagtacattccagaaagcgggatgaggctcaagcaagtgccctgtgtagaaaatctggggtttaagtaccctttagaggtttcctatttggttacaccctatgtaaataaagacttggcctgccaccagtcagaggctgaagtgaatgctcctttgtctccagaccctattctctggcctcagtg

SEQ ID NO: 4860 - DNA, 595 bp, Homo sapiens
aggcgcactcactcaccctttgcgctccccagtccccaggggatgcaccttcctcgtcccaaccccgtgcactgctgcacccccagccagccccgtgctctcctccgctgatccggccgcctacccgaggcagtctcggaaccccggaccccagccatgcgcgcagggaactgccgggccgagcgagctcaccgaagtagtcccgcgccgtgcgcgcctcgagcgcccgctccagctcccgggtgagcgcctccagccgccgctcggccgcgcttgggccgccctcccggccagggggcagcgggagtgcaggcagcgggaagggrgccggccccgcaggctccggggagcgagcgggcgcggggcaggcgccgggcgggaggaagtcagcgtaggcgccggccgagccccgggagccgaggctggaaacgctggagcgggcgctgcccaccgaaggcggcccgggaccgggacgcgggtccgagcgaccggagcgcgggctgccgtggcgctggtcgtagcccaggctgatgccgctggatcgggcgctgccgccaccgccgccgccgtcggaccccgccaggctggcccgtgg

SEQ ID NO: 4861 - DNA, 818 bp, Homo sapiens
taccaacatgtgatgtctcccccggacacccagctttaaaatttctctcttttgtactctgtccctttatttctcaagccagccgacgcttaggaaaakagaaaagaacctacgtgattatcggggcaggtcccccaataaaggggtctgtgctgaggagtagtgaaagagggaggcctctttgcagttaagaggaaggcttctgtctcctgccaatccctgggaatggaatgtctcggtgtaaagctgaccattcccattcattctattctgataggagaaaaccaccctgcagctggaggtgagatatgctggcagcaatactgctctgttactctttgctacactgggatgtctgggtaaagagaaacataaatctagcctatgtgcacatccaggcacagtacctttccttgaacttattcatgatacagattcctttgctcacatatttccctgctgaccttctccccacctgttgccctgctacacttccctcgctaagatagtaaaaataataatcaataaatactgagggaactcagagtctggcgccggtgcatgtcctccttatgctgagcaccaatcccctgggcccactgttctttctctatactttgtctctgtgtgttatttcttttctcagtctctcgtcccacctgatgagaaatacccacgggtgtggaggggctggcccccttcaccactaggtctaattttttgtatttttagtagagacaaggtttcaccaggttgcccaggctggtctcaaacccctgggctcaaacaatcctcctgccttgacctcccaaagtgct

SEQ ID NO: 4862 - DNA, 818 bp, Homo sapiens
taccaacatgtgatgtctcccccggacacccagctttaaaatttctctcttttgtactctgtccctttatttctcaagccagccgacgcttaggaaaatagaaaagaacctacgtgattatcggggcaggtcccccaataaaggggtctgtgctgaggagtagtgaaagagggaggcctctttgcagttaagaggaaggcttctgtctcctgccwatccctgggaatggaatgtctcggtgtaaagctgaccattcccattcattctattctgataggagaaaaccaccctgcagctggaggtgagatatgctggcagcaatactgctctgttactctttgctacactgggatgtctgggtaaagagaaacataaatctagcctatgtgcacatccaggcacagtacctttccttgaacttattcatgatacagattcctttgctcacatatttccctgctgaccttctccccacctgttgccctgctacacttccctcgctaagatagtaaaaataataatcaataaatactgagggaactcagagtctggcgccggtgcatgtcctccttatgctgagcaccaatcccctgggcccactgttctttctctatactttgtctctgtgtgttatttcttttctcagtctctcgtcccacctgatgagaaatacccacgggtgtggaggggctggcccccttcaccactaggtctaattttttgtatttttagtagagacaaggtttcaccaggttgcccaggctggtctcaaacccctgggctcaaacaatcctcctgccttgacctcccaaagtgct

SEQ ID NO: 4863 - DNA, 671 bp, Homo sapiens
ttggtctttgacctcccaaagtgcagagattacaggcatgcaccactaatgccgggccaaatacttgtaatttaaattatcgctgggctgggcacggtggctcacgcctgtaacccagcactttgggaggccgaggggggaagttcacctgaggtcaggagttccagaccagcctggccaacatgctgaaaccctgtctcaactaaaaatacaaaaatcagccggacattgtggcagacgcctgtaatcccagctaatcgggaggctaagacaggagaatcgcttgaacccgggaggcagaggttgcagtgagccgagatcgcaccattgygctccaacctgggcaacaagagcgaaactccatctcaaaaaataataataaaataaattatagttggaaaaaaggggtttcctaaagacccaagggaaatggcctctttgttcctgaagccacagagaggatttttctgctccccacaactagttttccttgtgaaaattcataattgctaccagcttgttctcctctctgtcactatacatctgtccttgaagccttatttgaacaaagagttctggtatcactcggatgcctagaaactgttgccgttctgtgaaaccgaccaccagaggaaacccatgcttctcattggctgccttactaagatggt

SEQ ID NO: 4864 - DNA, 604 bp, Homo sapiens
ttgtacaaataagttctgttttttttttttctgaaagctatggtcaagttttggaaataatttttactgttaagtggctagagacagctttgatcagaaattctgactttggcagatgcactaactttttattactattattattatttttaaattatactttaagttctagggtacctgtgcacaacgtgcaggtttgttacatatgtatacatatgccatgttggtgtgctgcactcattaactcatcatttagcattaggtatatctcctaatgytatccctcccccctacccccaccccacaacagtccccggtgtgtgatgttccccttcctgtgtccatgtgttctcattgttcaattcccacctataagtgagaacatgtggtgtttggttttttgttcttgggatagtttgctgagaatgatggtttccagcttcatccatgtccttacaaaggacatgaactcatccttttttatggctgtatagtattccatggtgtatatgtgccacattttcttaatccagtatatcattgatggatatttgggttggttccaagtctttgctattgggaatagtgccacaataaacataaa

SEQ ID NO: 4865 - DNA, 785 bp, Homo sapiens
ggagtacagtggcgcgatctcggctcactgcaacccccacctcccaggttcaagtgattttcctgcctcagcctcctgatagctgggactacaggcacgtgccaccacaccctgctaattttttgtatttttagtaaagacagggtttcaccatgttagccaggatggtcttgatctcctgacctcgtgatctgcctgccttggcctcccaaagtgttgggattacaggcatgagccaccatgcccggcttttttttttttttttttttttttgagacagagtctcactctgtcacccaggctggagtgcagtggtgcaatcttggctcactgcaacctctggctcctgggttcaaacgattctcatgcctcagcctcccgagtagctgggactataggcatgcaccaccatgcctggctaactttttggtatttttagtagggatggggtttcactatgttggccaggctggtcttgaactcctgacctcaagtgatccgcccacctcagcctcccaaagtgctgagattacaggcgtgagccaccgcgcctggcctgatgtacacttttgtagtacaaaagtgaccattgatgcaaactcttttataaacctaagatgtcatttctagataccattcttaatttctttcctcagaacttagagatctggttggctttcttacctgtgtgctagataccaacctttcctaataagtttccaggcttactttgatattcattctattattagcatcttygggagtaccatccaccctcatataca

SEQ ID NO: 4866 - DNA, 812 bp, Homo sapiens
acccccatgacccatatacccccaagcagaccccagtcccaacagtgggggtcacatttcaaaatgagattgagtggagccaaacaaacgatatccaaaccgtagcagtaacaaacaacaatcaacacctgtgactcagtcaccaacagttgttgctaatgctttgaaacatcatttaagttcatcaccattttgaagacacaatacttatttaaatccatcagtagatcttatttaatgtattaataaagaagcatctaactatatcacatatttttaaaaagtatttgataactattcttcagtataattggtttctttggtatcctatgtatttagttttatgcttttaaaaacagcattgtgagaaagagtcaagggttctacaagacttctaaaagacaccatgtttctaaatcaaagattggcactcccggcagtagktttcttgaattgtcagttatagatacatcaatcacaacagaaacatggtggatgataatggccaatgcttaagaaatttaatttaggcatgggcttctaatacgggttcaaccctcctgggctaagacgcttcagtgaaagggtggagataaagagaacctactgtcagcaagctttcagaactgcaaggcaaaccattgcataaccacaggcttgattcactagttggccacctttattcagcttgttgagattacaatattcttgacttcaaggatgattacaggttactaggccttcaggttcaaaattgccctctgcagcttttgtgaactcccctgactccctatgtattgcccattgagttc

SEQ ID NO: 4867 - DNA, 811 bp, Homo sapiens
tgtaaagaaggaaaagcatgtgcctcagtgtgacttagtaatgcacagatgtggaaaggacacacaccaattagcgtgacaataaaatgactgacaacagcatacaccaaaattcaggtctaaaatacggttaaacctacagtccctcatattgattagcctataaaagacacttgaaatgtgggataaaagatttctgctaataatagcacacacagcttatattgccaaagcttactagaatcttataacatagatattcttatcatctcctatttgtagacaatgayactgaggcacaaacatgttaagtgcctttctaaaagtcacatatggagagaagattaaaggagcctaccctcagctcctgtgatcttgatctcaacgctcttctgcctcttttttaaatcacagaaagatcaagtttgaaaagacctgttttaggatcttcacgttttagaggagggaactgcgatcaaaggaagttggacacacagttgacatagcaactcaggttaatgccagaattgggagtttgaatccagtcgttttttatccagcagaaggggcagtgactataaaaccatgttattgtttctaagagttttagtccattatctgccctacaggtacactttctctttggaaatgaccttccttattctgtggtaagctcttcctcttcccttttttcttcctactcacttcagtcccttcaccatccctccccaggtcctcttctctgctccatctttcctcttttcctttcttctccctctctccacttccctgttacttctgcttctttctt

SEQ ID NO: 4868 - DNA, 811 bp, Homo sapiens
tgtaaagaaggaaaagcatgtgcctcagtgtgacttagtaatgcacagatgtggaaaggacacacaccaattagcgtgacaataaaatgactgacaacagcatacaccaaaattcaggtctaaaatacggttaaacctacagtccctcatattgattagcctataaaagacacttgaaatgtgggataaaagatttctgctaataatagcacacacagcttatattgccaaagcttactagaatcttataacatagatattcttatcatctcctatttgtagacaatgacactgaggcrcaaacatgttaagtgcctttctaaaagtcacatatggagagaagattaaaggagcctaccctcagctcctgtgatcttgatctcaacgctcttctgcctcttttttaaatcacagaaagatcaagtttgaaaagacctgttttaggatcttcacgttttagaggagggaactgcgatcaaaggaagttggacacacagttgacatagcaactcaggttaatgccagaattgggagtttgaatccagtcgttttttatccagcagaaggggcagtgactataaaaccatgttattgtttctaagagttttagtccattatctgccctacaggtacactttctctttggaaatgaccttccttattctgtggtaagctcttcctcttcccttttttcttcctactcacttcagtcccttcaccatccctccccaggtcctcttctctgctccatctttcctcttttcctttcttctccctctctccacttccctgttacttctgcttctttctt

SEQ ID NO: 4869 - DNA, 811 bp, Homo sapiens
tgtaaagaaggaaaagcatgtgcctcagtgtgacttagtaatgcacagatgtggaaaggacacacaccaattagcgtgacaataaaatgactgacaacagcatacaccaaaattcaggtctaaaatacggttaaacctacagtccctcatattgattagcctataaaagacacttgaaatgtgggataaaagatttctgctaataatagcacacacagcttatattgccaaagcttactagaatcttataacatagatattcttatcatctcctatttgtagacaatgacactgaggcacaaacatgttaagtgcctttctaaaagtcacatatggagagaagattaaaggagcctaccctcagctcctrtgatcttgatctcaacgctcttctgcctcttttttaaatcacagaaagatcaagtttgaaaagacctgttttaggatcttcacgttttagaggagggaactgcgatcaaaggaagttggacacacagttgacatagcaactcaggttaatgccagaattgggagtttgaatccagtcgttttttatccagcagaaggggcagtgactataaaaccatgttattgtttctaagagttttagtccattatctgccctacaggtacactttctctttggaaatgaccttccttattctgtggtaagctcttcctcttcccttttttcttcctactcacttcagtcccttcaccatccctccccaggtcctcttctctgctccatctttcctcttttcctttcttctccctctctccacttccctgttacttctgcttctttctt

SEQ ID NO: 4870 - DNA, 649 bp, Homo sapiens
tttcatgactgcagaaattcaaaatagcttcctggtgcacctgcttccagtgtttctcttcatcatgccctattcctttcctcgccaactcacttgaattcctgggaaaatgagattctgtggaactatcaagaagagaaagacaacatttgctttttgtgtgcacctgaacctggcatattttagcagtcctaccttttctctctccccttcttttctctctcttcccatctcctccccttaccttcctttcccttcccatccctcccctctttcgttccctcttggtacatttgcctatgattccagtgagttgttatgaaatttaattaaatttctcaccttgaacttstgcgtatttattggacaggcaaaaaaaaagagagagagaaaaaagactgttaatgtacctcctttagttgaagttgcttgtttcagttagaggacatacattatttcatggtttgaaaagtgacaggaacccctactggctgttcagaaggagccatctgtggacaggcgtccatattccagagcaagactgtagttcgaggggctggccatgcttcacattcacaggtgaccaaggcagggcaagggagcccatctgtgctggaactcactggcatccttaaaagttcattatggt

SEQ ID NO: 4871 - DNA, 806 bp, Homo sapiens
gatcctttgaagtttgctgccatataatatcctacggaagaaaggaaaaaaaaatttaaacccttggggagattcttcaaacaatgctttaaatattcagaatcaacagttaatggtgttagacttacctcaagaagttcatcatgattagaaaatatactattaagtcagaaaagcactctaatagtttctatctctaataaatgtcaccaggcagtcattgtctgaattacttaatttctgcctcactctggctcacattaatattttatttctagaaaagtaygtgaccagaacaaagtgcccaaatcagttcttgtcagccaacttcatccatgactttggaagcgacgctgctaagacaaagtggttctttaggagagacaatgtcatgctgccgaggctttcattttaggacagggttttgcagtgaattaatagcctctggaaatggtgcagagctacaataacagctttctcgttttgattataaggcagaatggtttctggttttctgtaatatttgcattgtgaatgggattccgttttttctcatttagatgcagtgatcaggtgagaggaatctgagcctgttccatcaaagccctatattgtgaccagaatacaaattacttgattctggttcttttaaaaatgtagcttattttaaaactgcgagagtcttaaggcaatgtaaaaatgagaatctgagatggtgctcaagctgaagtcactaagtgttgctctgggttccacgcatggcagccagctgcatacctctccaccaaaatgctttcatcacacta

SEQ ID NO: 4872 - DNA, 640 bp, Homo sapiens
ataggcagtggtgaatggcctggccagcttgtcagaagcttgtcagaagaaatattggaatgtagggacaggttttctgggatagaagcatacagatgaatatatcgaagtgggtgcaaagagtgcagatctttaatatagcatgtttattctcaccagagagcatcttctacagtagaggcattaaaaacagacagatacatgccaatgagtaaatgaacaacgtggtcttagtggcagagatggacactataaatggacccaacactgtgggcaaccacttaccaagactgatttaactgtgcctgctgctactgaatgtccaatctgactgcaccagggatcaatattcagtyattgatatggtcccatccatcaaggagaccaaccatctacttggtggcaaattgacttcattgagtcccttccacttaggaagggctaatgattcattctgaaaggaatagatagacacatagtctgcatatagatttgcatcccatgtcctaagacccttagccccatgatctgagagcttttggggcatttgatctgttggcataagatctacataacatcatattagagcaggggcccactttatagcaaaggagatgagagaatgggtttcttaatcatg

SEQ ID NO: 4873 - DNA, 663 bp, Homo sapiens
taaacacgaattctcaaagtgaataggatggcatgtgctaactaattaagtactgtttctagatatttgtgagggagcctaaatctagcctgctaaggaattagagtgtctcactggatatgtggtagccatcccctttcaatgtaacttgtcaaatgaagctacccaatcccaggcctactatgttcccacatgatgttatcagacaaaaatattaataaggcagtaaaggtaaaatataaagctacagaagaatagatacatagaaataatacagaaacgttataaaaatttaaattttatggttttaatastttaattgtagatgattttaatgtatactacaattaatctaaactttgatatttatccttttattcttcagatgacgtgttagatttttataaaatatattaaaagtgaaattaggctgtgttttgtttgatttgtcagtttcatgagataagcctaatttctttttttaaaattttattattattatactttaagttctagggtacatgtgcacaacgtgcagttttgttacatatgtatacatgtgccatgtttgtgtgctgcacccattaactcgtcatttagcattaggtatatctcctaatgctatcctttcccactccccccacccccaacagtcctcagtgt

SEQ ID NO: 4874 - DNA, 554 bp, Homo sapiens
tgcaatgatattctctgcctctccttgaaaaaaaaaaaaaaaaaaaagactatgcattaggtcacaaataaaacataggttgattccccaaagcagaggtaatacaggccatattcaaatttagaaattaataacaaaagatgaaaaaaatgcttcaattgccttggacattgcaaaacacccttctaaataacatcttggttcaactgttaattaaaacttaagttctacttcatttaaagcacactacatataaaaacttacggccaggcgcggtggctcatacctgtaatcccagcactttgggaggctgaggcaggcagatcacctctggtcaggagttcgagaccagcctggccaacatggtgaaaccccatctccactaaaaatacaaaaattagccaggtgtggtggtgcatgcctgtagtcccagctactcaggaggctgaggaaggacaatcacttgaacctggaggtagaggttgcagtgagctgagatcgtgccactgyactccagcctgggggacagagtgagactctgtcacaaaaagaaa

SEQ ID NO: 4875 - DNA, 554 bp, Homo sapiens
tgcaatgatattctctgcctctccttgaaaaaaaaaaaaaaaaaaaagactatgcattaggtcacaaataaaacataggttgattccccaaagcagaggtaatacaggccatattcaaatttagaaattaataacaaaagatgaaaaaaatgcttcaattgccttggacattgcaaaacacccttctaaataacatcttggttcaactgttaattaaaacttaagttctacttcatttaaagcacactacatataaaaacttacggccaggcgcggtggctcatacctgtaatcccagcactttgggaggctgaggcaggcagatcacctctggtcaggagttcgagaccagcctggccaacatggtgaaaccccatctccactaaaaatacaaaaattagccaggtgtggtggtgcatgcctgtagtcccagctactcaggaggctgaggaaggacaatcacttgaacctggaggtagaggttgcagtgagctgagatcgtgccactgtactccagcctgggggacagagygagactctgtcacaaaaagaaa

SEQ ID NO: 4876 - DNA, 554 bp, Homo sapiens
tgcaatgatattctctgcctctccttgaaaaaaaaaaaaaaaaaaaagactatgcattaggtcacaaataaaacataggttgattccccaaagcagaggtaatacaggccatattcaaatttagaaattaataacaaaagatgaaaaaaatgcttcaattgccttggacattgcaaaacacccttctaaataacatcttggttcaactgttaattaaaacttaagttctacttcatttaaagcacactacatataaaaacttacggccaggcgcggtggctcatacctgtaatcccagcactttgggaggctgaggcaggcagatcacctctggtcaggagttcgagaccagcctggccaacatggtgaaaccccatctccactaaaaatacaaaaattagccaggtgtggtggtgcatgcctgtagtcccagctactcaggaggctgaggaaggacaatcacttgaacctggaggtagaggttgcagtgagctgagatcgtgccactgtactccagcctgggggacagagtragactctgtcacaaaaagaaa

SEQ ID NO: 4877 - DNA, 632 bp, Homo sapiens
ttttctttaggtttttctgtctaaacattttattttacctagtgtgaaggggtgagggagggcagattgtttcctttcttcctcctctccccttccccctcccctctcccttattctctgtttataatttaaaaggatgctcactttcattttctcatttgcttccttcacagcaccctgtgaagctgatattgttatccccctttgacagaaggggamactgcagtttcagtgaatttcagtgacttagtcaagtcactcagttaacagtgctgagagtgaagccctagtgttctgcctttagatctctttttcccagtaccatactgcttttctggtggaggttgtagtatataggatgatgtcagaaaggagaggctgggaagcctgaaacgatcacatcgacaattgaattgtctgttttttctaataaaatagaaaatgttaactaaatatattgccatgcaattcttcaagcatataggactttgggtccttttttgtgtctcagactttaagatgatgtctcctggggagtcatttactatatgcaaggagaatagctgaaaagtcagggtaggccagcagtatttcatgctttgtacttgggcaatatgggtttttctgttgga

SEQ ID NO: 4878 - DNA, 1463 bp, Homo sapiens
ggtgccttcttttcctgaatcaagccctttcctcctcagtgccaaagcagaagtggctgggtgggtgaagatctgagtgctggcccggggccacaagccatgggccactacccatattgctgtgagatcctgacctttctcttttctggactcacaagataaagagagtgaatgaggaggaaaatcaaatattgtggcagggaggggctgacaaacacrggcatggccaacagaagtctcccaccaaagtgaggagctgagagaaggatttggggagggaatgtcagaagtctcactcccaggcaaaggattcaacaaaggaaaatccgactctggcttgaatatggtccaggtgtggggttagtagtccatgttactgtctgacatgggagagcattccactgtgatggaaatggggtgggttggggtacaggaggaaccatagaggtagaagagaaaggaggtgagaaggaacatagtctggcagttgaccagagtgtatctggctgtatggtgtagtccccataacagggcacctatgtctgtacattgcacaaaaacaaccatccagtgtgttcttaaaagtcctgtgaaggtacattgtaatttgaactatattttgaagatatcagaggatcctatcatttagaagaatctcatgggaattactttttaaaaagaaaataatcattttagggaatagaaagtctctcaacgattggttttgaatctctgggttttaaatccatttactccaagtaggattcagtatttcactctttcactggcagtggattgttttttctcctacatatatggcttgaaagctcttaacaaaggatagtaattaattatttcccagctatttttacctttgacgtattaaaagttggaggaaactatttcatttaacagaatttaaacaaaatgaaaaagttattttccttaaggtattctgctgtgctttttcaaggaaaagcctcctccaaaggcacttttggagacagttaccaaaggaaaatcccacccaccaacagagacactcagcctctaagtttggcttttggaaaatgaacactattcttttttttccaaacaggacgctgtgagatcagtcatgtacactatgaaaataattggtgtgcattagtacaccttgtgccagatttcatgcttgttgaaaggtgattggattcaaaccagcacatttaaaggtcaactggttgttcttaaactgtgcagaattttaactctttcattataatggattttaaccaaatggccattttaggaaggagagagactgcatactgtgttttaactttctgacctttttgttcttaaattttttgtaaagttctcagggatttcctatggatggaaagggtctgagaaatcagttctcagctggcatttggaaaagggtggaagtagaaactgagttctttttaaactgctaaatt

SEQ ID NO: 4879 - DNA, 1463 bp, Homo sapiens
ggtgccttcttttcctgaatcaagccctttcctcctcagtgccaaagcagaagtggctgggtgggtgaagatctgagtgctggcccggggccacaagccatgggccactacccatattgctgtgagatcctgacctttctcttttctggactcacaagataaagagagtgaatgaggaggaaaatcaaatattgtggcagggaggggctgacaaacacaggcatggccaacagaagtctcccaccaaagtgaggagctgagagaaggatttggggagggaatgtcagaagtctcactcccaggcaaaggattcaacaaaggaaaatccgactctggcttgaatatsgtccaggtgtggggttagtagtccatgttactgtctgacatgggagagcattccactgtgatggaaatggggtgggttggggtacaggaggaaccatagaggtagaagagaaaggaggtgagaaggaacatagtctggcagttgaccagagtgtatctggctgtatggtgtagtccccataacagggcacctatgtctgtacattgcacaaaaacaaccatccagtgtgttcttaaaagtcctgtgaaggtacattgtaatttgaactatattttgaagatatcagaggatcctatcatttagaagaatctcatgggaattactttttaaaaagaaaataatcattttagggaatagaaagtctctcaacgattggttttgaatctctgggttttaaatccatttactccaagtaggattcagtatttcactctttcactggcagtggattgttttttctcctacatatatggcttgaaagctcttaacaaaggatagtaattaattatttcccagctatttttacctttgacgtattaaaagttggaggaaactatttcatttaacagaatttaaacaaaatgaaaaagttattttccttaaggtattctgctgtgctttttcaaggaaaagcctcctccaaaggcacttttggagacagttaccaaaggaaaatcccacccaccaacagagacactcagcctctaagtttggcttttggaaaatgaacactattcttttttttccaaacaggacgctgtgagatcagtcatgtacactatgaaaataattggtgtgcattagtacaccttgtgccagatttcatgcttgttgaaaggtgattggattcaaaccagcacatttaaaggtcaactggttgttcttaaactgtgcagaattttaactctttcattataatggattttaaccaaatggccattttaggaaggagagagactgcatactgtgttttaactttctgacctttttgttcttaaattttttgtaaagttctcagggatttcctatggatggaaagggtctgagaaatcagttctcagctggcatttggaaaagggtggaagtagaaactgagttctttttaaactgctaaatt

SEQ ID NO: 4880 - DNA, 818 bp, Homo sapiens
agattgcgttagaagtaattgcaaatgactgttcatatgtgttattgcttaacctcctcttttatgtttccactccaataaaaggacctgaagtactttctctcttttatatctcattttcccaggcatactgtgaaacgaaggctgcaatgtactacatgttggagtgatttagttgattagttagttcttcaatgcaagtgcttctcacagtcatcgtcaaatgcttaggatcaccagggattctgtggttatttgagctgccaggaaagaataaagtaaacgtggaacacacagggacattcccccctgcctttccttggttttaggtttttggcttactcttcttcatttgggcaatatcarcccaacttgggtaagaaagaaacagcttggagttttgaaaagagcctggattttgcagccaagcaaataccaaatttcagctctgctgactactagctgtgtgacatcaggctagttattaatttctttgagtctctatgtcctcttcctaagtaagaaagggataagaacagaacttgttatgtagtggaaggaagatactgtttgtaaaatacataactcatagtagactattaaaaaaaatctgcttcttccaccccacctcatcctttaagtaaaaaaataattatttattatttgttaaattgacataatataaagttaggtttagcacttgaatcatcaggtctaggtgttttattattattaaacaccctggctaattagcaattttttaacctcaatgaacataagagtcaatcccacatattgtagaaatctttctaagtaga

SEQ ID NO: 4881 - DNA, 631 bp, Homo sapiens
agaagatcctgaacagacaggccttgctgggataccactccctttcccacactgctccccatcaccccaccctcagcttattgccattagatcataccctttttgttcaatcacatttccacatggctgtccattcctcttcaaactttccataaaacacagtttttcctgggtctttgggtctccgtttctaaaggctcccatgtcttagaaaactgttaaataattttgttatgcttttctcttgctaacctgtcttttgttaaaggagtgttggccatgactctcataatatatgaagaaaaggtattattaccttttcactcctacaggcccatagtctaggaatgggaaaaaaatattcttaatctttatgttttgcataatttggtaagtgcttaacctttaggaaaatgcatttaacattctaatgagcaattgggagctaacctcatgtaatgtaagaactgtgtgtgatgagcacacacctgtgctcatgtgcagacatgcggtttagcagtctcctggaaggcaggtaagtgggctagcatagccaggactaaaagcactggcctaaacartatccagtgtggtcctcatggagtgcatagatgtgtttcaggactgaatt

SEQ ID NO: 4882 - DNA, 677 bp, Homo sapiens
aaagctatttctaggttggaaacaatgtcatgatttaatttccctgtcatattaagcaacagctttgtgaatatacatatttgtgatctgtattgtcacaaatgtctttttgcacaccttttattgacctattgttgaaaatagccaagtcaactctatgctaggaacaggtgaaatttacccacagacttccagtctttattttatgcagtttcaccttttccaagtattgctatgagcctatattgagctgtttctttcctcattctctcccaccttttccttcagattatagaatggtctaatgtcagtttttcatggttaattctgtctgagatgtttgcatttgtagtcatatttctaattgtggaatgaacgactttttctgttgaaaaaaaaattgaggctctcttgtttcctaagttacatcagtcctgctacactgagatggaagaggattccacagattcttcaaccttgatctacactttataaaatagggctagcaaaaattggtggactcaaggaagccttagtgatctgaatttcagaaataacaagagttctgtgtaggtgaatgtggcagtttgccckcctgggggcaggtgcctagtatcagtataggcggataatatggagagacattgaagggataggataaaggcattcaagaatta

SEQ ID NO: 4883 - DNA, 876 bp, Homo sapiens
gctgccagaggagaaagaatccctggagaagagtcaggccagcccccaccccccactgcaccctgcattctcccacaaacacgttacagatgaggaaactgagtctggtgtctcagggtagcaagcccctgcacgcagctctccccacaggcttcccagtcgggatgggatgctaagaaaggaaggaagagactggagttccagggagcaggcagggaaaacccagctcaaggccaggcctgggttagccactggtctgagggaggacagtcctggctagaaggagccgaggcagggaggtgaccgtggacaggagttgtttgagctgaggatactcttggcagcttagatgcattcacttcaaacactttgctgtggggcacaccatgaggcagaatctagggcactgctcagaaaacaaatgtcaggatcagaaagcaaagcagagaagaaccaaagtaagattaaagttaaaatggtcagatcttggctgagcctgctgtaatgcccaccacgtgttccccaccccatcccactctgtactaagggcttttcatgcctgatctcatatccttgcttaccccagtccctacagctgggattgttgcctagactttgcatatgaggaaattaaggctcagagaggtggagtaacttgcccaaggtcacatagcttagctaatcactggcagaggagtcacagcagacacwgtcagtgccctggccacctctctcagacctttaggaagctccagtggcatctatctgtatctgcatctctgtgcctggaggcttccccacctccagccatagaaggctagaagtgccagggaagttggtgtatagataccccagctccctcaccctggagtggga

SEQ ID NO: 4884 - DNA, 554 bp, Homo sapiens
attatggagataggtggcagtagtggtggcagcaggcatagttttcatggacagcaatggtcttggttccagaaatggggtctaggaagctgtgcaccctgtatttaacacaatactagagtcctcactggactactttttgtggcataatttggctttggtcctgctttctgcctaggttatttattactgcccttttaaaatttagctcwgttcttcagacctcttgtgattcgatttcctactcagtatgttttcagtaacttcctttactgatgctccactgactgagatatttgggatcttcgataacttcctttctataaccacagtaggtttttgttgtttacatttatgagtcctgatagataagaaagtggagcaggctaaggggtttggtagtaagtggtaggggtgaagattgagagcttacaattttggataaggtggtatgttggatttctgccagtttgctatcagatttcttccctgcctttccctgctctgccatttataagataccatttcccctgggttctctggacttctggctt

SEQ ID NO: 4885 - DNA, 647 bp, Homo sapiens
actcttgttgccaggctggagtgcaatggtgctatctcggctcactgcaacctctgcctcccgggttcaagcgattctcctgcctcaccctcccacgtacccgggattacaggtgtgcaccaccatgtctggctaattttttgtatttttagtagagatgggatttcactatgttggccaggctggtcttgaactcctgacttcaggtgatccacccgcgtcaggctcccgaagtgctgggattacaggtgtgagccaccatgcccagcctatatttagtattttgctactcaatctcattcacttttcagtcagcacacagttctttgtttttgtttatgtcattttatttagtttcaccaaagggctctgggttcctcagatgttgtgttgtgagragaagaccaggcccagagagcagaagaatccctggcctgggtcaggacttgctttctcgtctgaggcctccagctggtcctttaggttctctgagattcagcttctgcaactgcttacctcacagagttgctatggacatcaaaccaaataatgactataaaagcactcatgtaaattatgtgttattattagaaaagtttccattttataccaagacaaaggaacactgttattcatttgacatgttt

SEQ ID NO: 4886 - DNA, 544 bp, Homo sapiens
ttagaagcccatgcctaaattaaatttcttaagcattggccattatcatccaccatgtttctgttgtgattgatgtatctataactgacaattcaagaaamctactgccgggagtgccaatctttgatttagaaacatggtgtcttttagaagtcttgtagaacccttgactctttctcacaatgctgtttttaaaagcataaaactaaatacataggataccaaagaaaccaattatactgaagaatagttatcaaatactttttaaaaatatgtgatatagttagatgcttctttattaatacattaaataagatctactgatggatttaaataagtattgtgtcttcaaaatggtgatgaacttaaatgatgtttcaaagcattagcaacaactgttggtgactgagtcacaggtgttgattgttgtttgttactgctacggtttggatatcgtttgtttggctccactcaatctcattttgaaatgtgacccccactgttgggactggggtctgcttgggggtatatgggtcatgggggt

SEQ ID NO: 4887 - DNA, 807 bp, Homo sapiens
tttccatgaggaaatagttcttattcctgatgcaggtattctaaagagtatatctatatcatttaaaaaatcacaaatcaatgtttatacaactgactacttcttctgaaaacattgtttctaagtttaggcccccaaaactagtatcacaaaaaggattttaaaatgacattatagtttttcttgcattcatttgtatcttatatcctgaaaaatgaaaacattacttaaaattagttggagttttaaaaaaatgcttttttctggacatcataaaatattgtttgttttttttgagatggaatctcactctgtcacccaggctggygtgcagtggtgtgaccttggctcactgcaacctctgcctcccgggttcaagcgattctcctgcctcagcctcctgagtagctgggattacaggtgcgtgccaccacgcctgactaatttttgtatttttagtagagatgaggtttcaccatgttggtcaggctgttctcaaactcctgaccttgtgatccgcccgcctcggcctcccaaagtgctgggattacaggcatgagccaccgcacccagcctagatattgttacatatatacattcaaagttctaataacatcatgccccggagtatatggctaagaaaagctaatagttaaacacacaaacatacacatgcagagaagcaaaagttatcaagtttttggtttttgtttttttcctgttttgggacaggatctggctctgtcacccaggctgcagtgcagtggtgccatctcagctcaatgcaacatacacctcccaagtcaa

SEQ ID NO: 4888 - DNA, 738 bp, Homo sapiens
atataggataatgtaagtgtcctgagcatgtttaaggtaggttaggtgtattaaatgcattttcaacttacagtgagtttatccagacataaccgcttctgaattgaggagcatttgtacatttgtccaagcccataaaatgcacagcaccaagaatgaaccctaatgtaaactatgggttttgggtgttaatgatgtgtcaatgtaggtccttctgttgtaacaaatgtaccactctggtggggatgctggtaatgggagaagctatgcatgtgtgggggcaggaggtatatgggaattctctgtaccttcytctcaaaaaaagcattttatgtgataatagattatgattaatgaatgcttgttctacactaaattttcaaaaaactaattctgaccctcggcattggtacggcatccctcaggaggcaggacagtgatgtgtgctcatctcctacctgctacctacagcctgggtcacgtttcaccctgaactgggcttttcagggcttggccaggttccacctggaatttcacccttaaaaagtgaagggtggatgaagagggggttcactttttactccacatatatttataacttggaattttacaagaatacctccatgtatttcttctataaaagtaaaataaaataaaataaatagaactttgcaatattagttaagcctctgatttcaattataaaccagatgtctgcttgaacatttccactgtcgt

SEQ ID NO: 4889 - DNA, 738 bp, Homo sapiens
atataggataatgtaagtgtcctgagcatgtttaaggtaggttaggtgtattaaatgcattttcaacttacagtgagtttatccagacataaccgcttctgaattgaggagcatttgtacatttgtccaagcccataaaatgcacagcaccaagaatgaaccctaatgtaaactatgggttttgggtgttaatgatgtgtcaatgtaggtccttctgttgtaacaaatgtaccactctggtggggatgctggtaatgggagaagctatgcatgtgtgggggcaggaggtatatgggaattctctgtaccttcttctcaaaaaaagcattttatgtgataatagattatgattaatgaatgcttgttctacactaaattttcaaaaaactaattctgaccctcggcattggtacggcatccctcaggaggcaggacagtgatgtgtgctcatctcctacctgctacctacagcctgggtcacgtttcaccctgaactgggcttttcagggcttggccaggttccacctggaatttcacccttaaaaagtgaagggtggatgaagagggggttcactttttactccacatatatttataacttggaattttacaagaatacctccatgtatttcttctataaaagtaaaataaaataaaataaatagaactttgcaatattagttaagcctctgatttcaattataaaccagrtgtctgcttgaacatttccactgtcgt

SEQ ID NO: 4890 - DNA, 596 bp, Homo sapiens
agctatgcctgaagtccataactgcgcaccatttcagctcagagggtgggccggtaaagtgccttgtttgctcaagccggcttgtttcagtttttttgttttgttttgtttgtttgttttttggagacggagtcttgctgtgtcgcccaggctggagtacagaggtgcagtctcggctcactgtagcctcttcttccagggttcaagcgattctcctgccccagcctcccaaatagctgagattacaggcgcccrccaccacacccagctagttttttgtatttttagtagagacggggtttcaccaagttggccaggctcgtctcaaattcctgacctcaggtgatacgcctgcctcggcctcccaaagtgctgggattacaggcgtcagccaccacgtccggctgattcattttttaaggtgacagaacactgatccagtgggtctctcccatccgaggaggaggagtaacaccttcccagggcccctgccttgcggcctgtcctctctggggccttgaacctctaaccctgacgtgtgtggggagccgcagggtgagtttcaagccccaccttccacgtggggtgtggcccgg

SEQ ID NO: 4891 - DNA, 596 bp, Homo sapiens
agctatgcctgaagtccataactgcgcaccatttcagctcagagggtgggccggtaaagtgccttgtttgctcaagccggcttgtttcagtttttttgttttgttttgtttgtttgttttttggagacggagtcttgctgtgtcgcccaggctggagtacagaggtgcagtctcggctcactgtagcctcttcttccagggttcaagcgattctcctgccccagcctcccaaatagctgagattacaggcgcccgccaccacacccagctagttttttgtatttttagtagagacggggtttcaccaagttggccaggctcgtctcaaattcctgacctcaggtgatacgcctgcctcggcctcccaaagtgctgggattacaggcgtcagccaccacgtccggctgattcattttttaagstgacagaacactgatccagtgggtctctcccatccgaggaggaggagtaacaccttcccagggcccctgccttgcggcctgtcctctctggggccttgaacctctaaccctgacgtgtgtggggagccgcagggtgagtttcaagccccaccttccacgtggggtgtggcccgg

SEQ ID NO: 4892 - DNA, 1513 bp, Homo sapiens
cctcccctcccacctgggctcccccagccaagccacagaatgctccttcctcatctcccaaagtcacggggacagctcagatcaaggactgcagctcccacactgccagcccctccccctctctgagcctcagtttcctcctgtgtaagtgaggtgcccagtgcacactgccctctaggcttcaggtgatggcaacattgagctttcaaagcactcacgcataaacctcattcagaccacgggccacygtaggtcaaaggtgcgtccgagtgtttactaaggaacggcaggactggactgagttttatacgcagcaggaggaaggaggcacctgccgctcagggacaaaactcatccgcatttgtcaatcccaagcagcgtccaaccccagagccaggacactggcaagagtggagggaagcgtccacaaagtgacccccgggtggccgggctggtcgaggctctggaatacaactgatcctctgggtgattcggcccctcggggacacggggcaacgtctggggcttctgtggttgtcacgactaggggagctcctggtgtggagtgggcggaggccagggacactgctcagcacccagcagtgcccaggacggccccaccccagggaatgatcagctctgaggcccaccgtgccgagggtccaggatccaaagagcaggcagtgatgtttttacccctttccaagttctggataattttcccaaacctgaggatgaaacgagagaaggcacataagctgcctagcaaggtgactgcacatggtgaggggtctcacgtgtcgtctgcacgcggtgagggtctcacgtgtcgtctgcacgcggtgagggtcacacgtgtcgtctgcacgcggtgagggtcacacgtgtcgtctgcacgcggtgaggggtcacgcgtcgtctgcacgcggtgaggggtcatgcgtgttggctgttcccctttcctttggcaaatgtggactgagtgctgctgtgccttatgctcgtgtcggggataccacagctccagggtgtccctgacatgatgttcccggccctgcgctctccagagctgagactcaccccatggagcagtggccactgggcctgtcccctccagactgctccgcgcaatacaaagtggcagtgggtagcttccaaacccaggccatgaaaaggaggtggcccagggaggcaggtgcagctggcagcccaggtgggccccagcctcctggtcttagagcagactcccagatgtcatggagcaggggcaccatccctggtctgcccgagttccttcctgactgaggctttctcatcgacaagcattggggtgggtgcctagtctgagtcctgcaaggcttgcccttggaggacttcctggaagaggaggccagaggacaaaagggttgtgaagccccagagcagaaaggactcagccccaaaattccaaggaggcctgtgggtcacaggactgtaagaggagtgtggactttatcctgtgggcaaagggctt

SEQ ID NO: 4893 - DNA, 1513 bp, Homo sapiens
cctcccctcccacctgggctcccccagccaagccacagaatgctccttcctcatctcccaaagtcacggggacagctcagatcaaggactgcagctcccacactgccagcccctccccctctctgagcctcagtttcctcctgtgtaagtgaggtgcccagtgcacactgccctctaggcttcaggtgatggcaacattgagctttcaaagcactcacgcataaacctcattcagaccacgggccactgtaggtcaaaggtgcgtccgagtgtttactaaggaacggcaggactggactgagttttatacgcagcaggaggaaggaggcacctgccgctcagggacaaaactcatccgcatttgtcaatcccaagcagcgtccaaccccagagccaggacactggcaagagtggagggaagcgtccacaaagtgacccccgggtggccgggctggtcgaggctctggaatacaactgatcctctgggtgattcggcccctcggggacacggggcaacgtctggggcttctgtggttgtcacgactaggggagctcctggtgtggagtgggcggaggccagggacactgctcagcacccagcagtgcccaggacggccccaccccagggaatgatcagctctgaggcccaccgtgccgagggtccaggatccaaagagcaggcagtgatgtttttacccctttccaagttctggataattttcccaaacctgaggatgaaacgagagaaggcacataagctgcctagcaaggtgactgcacatggtgaggggtctcacgtgtcgtctgcacgcggtgagggtctcacgtgtcgtctgcacgcggtgagggtcacacgtgtcgtctgcacgcggtgagggtcwcacgtgtcgtctgcacgcggtgaggggtcacgcgtcgtctgcacgcggtgaggggtcatgcgtgttggctgttcccctttcctttggcaaatgtggactgagtgctgctgtgccttatgctcgtgtcggggataccacagctccagggtgtccctgacatgatgttcccggccctgcgctctccagagctgagactcaccccatggagcagtggccactgggcctgtcccctccagactgctccgcgcaatacaaagtggcagtgggtagcttccaaacccaggccatgaaaaggaggtggcccagggaggcaggtgcagctggcagcccaggtgggccccagcctcctggtcttagagcagactcccagatgtcatggagcaggggcaccatccctggtctgcccgagttccttcctgactgaggctttctcatcgacaagcattggggtgggtgcctagtctgagtcctgcaaggcttgcccttggaggacttcctggaagaggaggccagaggacaaaagggttgtgaagccccagagcagaaaggactcagccccaaaattccaaggaggcctgtgggtcacaggactgtaagaggagtgtggactttatcctgtgggcaaagggctt

SEQ ID NO: 4894 - DNA, 1513 bp, Homo sapiens
cctcccctcccacctgggctcccccagccaagccacagaatgctccttcctcatctcccaaagtcacggggacagctcagatcaaggactgcagctcccacactgccagcccctccccctctctgagcctcagtttcctcctgtgtaagtgaggtgcccagtgcacactgccctctaggcttcaggtgatggcaacattgagctttcaaagcactcacgcataaacctcattcagaccacgggccactgtaggtcaaaggtgcgtccgagtgtttactaaggaacggcaggactggactgagttttatacgcagcaggaggaaggaggcacctgccgctcagggacaaaactcatccgcatttgtcaatcccaagcagcgtccaaccccagagccaggacactggcaagagtggagggaagcgtccacaaagtgacccccgggtggccgggctggtcgaggctctggaatacaactgatcctctgggtgattcggcccctcggggacacggggcaacgtctggggcttctgtggttgtcacgactaggggagctcctggtgtggagtgggcggaggccagggacactgctcagcacccagcagtgcccaggacggccccaccccagggaatgatcagctctgaggcccaccgtgccgagggtccaggatccaaagagcaggcagtgatgtttttacccctttccaagttctggataattttcccaaacctgaggatgaaacgagagaaggcacataagctgcctagcaaggtgactgcacatggtgaggggtctcacgtgtcgtctgcacgcggtgagggtctcacgtgtcgtctgcacgcggtgagggtcacacgtgtcgtctgcacgcggtgagggtcacacgtgtcgtctgcacgcggtgmggggtcacgcgtcgtctgcacgcggtgaggggtcatgcgtgttggctgttcccctttcctttggcaaatgtggactgagtgctgctgtgccttatgctcgtgtcggggataccacagctccagggtgtccctgacatgatgttcccggccctgcgctctccagagctgagactcaccccatggagcagtggccactgggcctgtcccctccagactgctccgcgcaatacaaagtggcagtgggtagcttccaaacccaggccatgaaaaggaggtggcccagggaggcaggtgcagctggcagcccaggtgggccccagcctcctggtcttagagcagactcccagatgtcatggagcaggggcaccatccctggtctgcccgagttccttcctgactgaggctttctcatcgacaagcattggggtgggtgcctagtctgagtcctgcaaggcttgcccttggaggacttcctggaagaggaggccagaggacaaaagggttgtgaagccccagagcagaaaggactcagccccaaaattccaaggaggcctgtgggtcacaggactgtaagaggagtgtggactttatcctgtgggcaaagggctt

SEQ ID NO: 4895 - DNA, 1513 bp, Homo sapiens
cctcccctcccacctgggctcccccagccaagccacagaatgctccttcctcatctcccaaagtcacggggacagctcagatcaaggactgcagctcccacactgccagcccctccccctctctgagcctcagtttcctcctgtgtaagtgaggtgcccagtgcacactgccctctaggcttcaggtgatggcaacattgagctttcaaagcactcacgcataaacctcattcagaccacgggccactgtaggtcaaaggtgcgtccgagtgtttactaaggaacggcaggactggactgagttttatacgcagcaggaggaaggaggcacctgccgctcagggacaaaactcatccgcatttgtcaatcccaagcagcgtccaaccccagagccaggacactggcaagagtggagggaagcgtccacaaagtgacccccgggtggccgggctggtcgaggctctggaatacaactgatcctctgggtgattcggcccctcggggacacggggcaacgtctggggcttctgtggttgtcacgactaggggagctcctggtgtggagtgggcggaggccagggacactgctcagcacccagcagtgcccaggacggccccaccccagggaatgatcagctctgaggcccaccgtgccgagggtccaggatccaaagagcaggcagtgatgtttttacccctttccaagttctggataattttcccaaacctgaggatgaaacgagagaaggcacataagctgcctagcaaggtgactgcacatggtgaggggtctcacgtgtcgtctgcacgcggtgagggtctcacgtgtcgtctgcacgcggtgagggtcacacgtgtcgtctgcacgcggtgagggtcacacgtgtcgtctgcacgcggtgaggggtcacgcgtcgtctgcacgcggtgaggggtcatrcgtgttggctgttcccctttcctttggcaaatgtggactgagtgctgctgtgccttatgctcgtgtcggggataccacagctccagggtgtccctgacatgatgttcccggccctgcgctctccagagctgagactcaccccatggagcagtggccactgggcctgtcccctccagactgctccgcgcaatacaaagtggcagtgggtagcttccaaacccaggccatgaaaaggaggtggcccagggaggcaggtgcagctggcagcccaggtgggccccagcctcctggtcttagagcagactcccagatgtcatggagcaggggcaccatccctggtctgcccgagttccttcctgactgaggctttctcatcgacaagcattggggtgggtgcctagtctgagtcctgcaaggcttgcccttggaggacttcctggaagaggaggccagaggacaaaagggttgtgaagccccagagcagaaaggactcagccccaaaattccaaggaggcctgtgggtcacaggactgtaagaggagtgtggactttatcctgtgggcaaagggctt

SEQ ID NO: 4896 - DNA, 1513 bp, Homo sapiens
cctcccctcccacctgggctcccccagccaagccacagaatgctccttcctcatctcccaaagtcacggggacagctcagatcaaggactgcagctcccacactgccagcccctccccctctctgagcctcagtttcctcctgtgtaagtgaggtgcccagtgcacactgccctctaggcttcaggtgatggcaacattgagctttcaaagcactcacgcataaacctcattcagaccacgggccactgtaggtcaaaggtgcgtccgagtgtttactaaggaacggcaggactggactgagttttatacgcagcaggaggaaggaggcacctgccgctcagggacaaaactcatccgcatttgtcaatcccaagcagcgtccaaccccagagccaggacactggcaagagtggagggaagcgtccacaaagtgacccccgggtggccgggctggtcgaggctctggaatacaactgatcctctgggtgattcggcccctcggggacacggggcaacgtctggggcttctgtggttgtcacgactaggggagctcctggtgtggagtgggcggaggccagggacactgctcagcacccagcagtgcccaggacggccccaccccagggaatgatcagctctgaggcccaccgtgccgagggtccaggatccaaagagcaggcagtgatgtttttacccctttccaagttctggataattttcccaaacctgaggatgaaacgagagaaggcacataagctgcctagcaaggtgactgcacatggtgaggggtctcacgtgtcgtctgcacgcggtgagggtctcacgtgtcgtctgcacgcggtgagggtcacacgtgtcgtctgcacgcggtgagggtcacacgtgtcgtctgcacgcggtgaggggtcacgcgtcgtctgcacgcggtgaggggtcatgcgtgttggctgttcccctttcctttggcaaatgtggactgagtgctgctgtgccttatgctcgtgtcggggataccacagctccagggtgtccctgacatgatgttcccggccctgcgctctccagagctgagactcwccccatggagcagtggccactgggcctgtcccctccagactgctccgcgcaatacaaagtggcagtgggtagcttccaaacccaggccatgaaaaggaggtggcccagggaggcaggtgcagctggcagcccaggtgggccccagcctcctggtcttagagcagactcccagatgtcatggagcaggggcaccatccctggtctgcccgagttccttcctgactgaggctttctcatcgacaagcattggggtgggtgcctagtctgagtcctgcaaggcttgcccttggaggacttcctggaagaggaggccagaggacaaaagggttgtgaagccccagagcagaaaggactcagccccaaaattccaaggaggcctgtgggtcacaggactgtaagaggagtgtggactttatcctgtgggcaaagggctt

SEQ ID NO: 4897 - DNA, 651 bp, Homo sapiens
gggaggccgaggagggaggatcacttgaggccaggagttccagagcagcctgggcaacataatgagatcccatctctactaaaaaattaacttgtggcctggaagcaaatactctcccccagcacccaagaagggcagggagtgaggcctgtcatgacacagaaggcctcaaaactcaaactgccaccagaaaaatatctctgctttttttttttttttttttttttttttttttttgagacggagtttcattcttgtcacccaggctggagtgcagtggtgtgatctctgctcactgcaacctctgcctcctgggttcaactgattcttctgcctcagctacttgagtagctgtgattacaggtrcccaccaccacacccagataatttttgtacttttagtagagatggtttcgccatgttggccaagctggtctcaaactcctgacctcaggtgatcctcctgcctcggcctcccaaagtgctgggattacaggcctgagccactgcgtccggccagatccttgcttttgaaagcacacatacagaacaccttcaggttttcatctgtttttcccagatagcaccagtgaaaaagataatgagtttccagaagaccacatagcgttggcttcctgtactcgcagtcag

SEQ ID NO: 4898 - DNA, 572 bp, Homo sapiens
aaattagctggtcgtggtggcgggtgcctgtaatccagctattcaggaggctgcggcaggagaatagcttgaacccaggagatagaggttgcagtgtaccgagatcgggccattgcactccagcctgggcgacagagcaagactccatctcaaaaaaccaaaaaaacaaacaaaaaaaacaaagtataaagtctctcaagtgatttatatttggtggtgtttgcttctctgttaaattttcttttggtggattaagctattggactctgctagttttgcattgctataaagaagtatctgaaaccgagtgatttataaagaaaaagaggtttaattggctccgattctgcaggatgtacaagtagcatggtgctagcatctgctcggcttctggtgaggcctcagggagcttttactcatggaggaaggtaaagtgggagcaggcatgtcacatrgcaagagggagcaagagagagaaggaggaggtgccaggctctttaaacaaccagagcttgcatgaattcagagcgaggactcactcattaccaggaagaaggagcctagccgttcat

SEQ ID NO: 4899 - DNA, 795 bp, Homo sapiens
cagctagtagactatttactaaggtcagtcagaatcaaacagaaggcttatgaccctcaacttttaatgggaggagtgtcaaagagtttatgaatatgtttgaaagttaccaccatgggttatacaaagtatcaatttctctgtcctgtgcttttctgaaattttctttttttttttgagatggagtcttgctctgtcgcccaggctggagtgcagtggcacaatctctgctcactgcaacctccacctccccggttcaagcaattcccctgcctcagcctcctgagtagctgggattacaggcacacaccaccacgcctgattaatttttttttttttttttggtatttttagtagagatggggtttcatcatattggccagactggtctcaaactcctgacctcaggcaatctgcccacttcggcctcccaaagtgctgggattacaggcataagccatcatgcccggcctctgaaattcttatgactacctttcttttatttccccatttaactctttatcctacttcaggagacaaaaatatgtatgctgatagggcaaataccattcgtcaaacaaaaattatctacttgtgtagtagatagggggccaatttctatgggactctttatgaagagtagataaaatttggaaatgtgcttgatgacttacttcctttctacttccttcccccacaaacccttaggctgcagctctgttaagctgggttattkcagaggaaaatgcaaatgatcagagttgtatgagctggtaaaaggggaaagcctctgtg

SEQ ID NO: 4900 - DNA, 584 bp, Homo sapiens
gggattacaggtgtgagccactgcacctggcctcaggtaagtattacaagtggttttggtgataagggaaacagggtctttaaaaaaaataatatgcatgcattattttttggtaataaaataatttccatcctgtaaaggcaaccattatagaagaaagaatactggtattgaacacagaccttctaaatctgatcccagctgcccacctaggagctctgtggtcttgggcacgtgacagtcttaaccactttaagatgttatttrcttggtagggtcagtgtaaggtttaaataaggtgctatttgctgacactgttaagtatgatatgacgtcaccccatggtcggcagtcttgatattatttcatctttatagtgtgtgtgtgtgtgtgtgtgtgtgtgtgtgtgtgtgtgtgtgtaagaaatagaaatgggcttggccaacatgaggaaaaaaagtggggagtgaacatagggaagttacttggaggaataaggtgggaacacagaagaaaagcttaacaatcaggtcctgggaaagactggaactggaatgctgttatgacttgggaaccagggaaca

SEQ ID NO: 4901 - DNA, 584 bp, Homo sapiens
gggattacaggtgtgagccactgcacctggcctcaggtaagtattacaagtggttttggtgataagggaaacagggtctttaaaaaaaataatatgcatgcattattttttggtaataaaataatttccatcctgtaaaggcaaccattatagaagaaagaatactggtattgaacacagaccttctaaatctgatcccagctgcccacctaggagctctgtggtcttgggcacgtgacagtcttaaccactttaagatgttatttacttggtagggtcagtgtaaggtttaaataaggtgctatttgctgacactgttaagtatgatatgaygtcaccccatggtcggcagtcttgatattatttcatctttatagtgtgtgtgtgtgtgtgtgtgtgtgtgtgtgtgtgtgtgtgtgtaagaaatagaaatgggcttggccaacatgaggaaaaaaagtggggagtgaacatagggaagttacttggaggaataaggtgggaacacagaagaaaagcttaacaatcaggtcctgggaaagactggaactggaatgctgttatgacttgggaaccagggaaca

SEQ ID NO: 4902 - DNA, 751 bp, Homo sapiens
tgaacgtcttaacaggtacccatacattgatggataggttgattgatgaggtctgctctagtctgaaggcaaaggttgagattactgccagtcttgctgctgtcagtgagtatccccaaccaacgttatccctttgtaagacatcagctgtcactgkagcccaggcagcagtagacaaaagcagctgataagcatcccccaatcctgataaggttttctagacacccagaaacttcccctcacatactgaagtactttctctagacagatgagaaagctgttttaaaggtccacagtctgacctgtagctcaaattatttgagcccagatttaaaccattttaggaatgcacgagacatttggacccacgggcttcccgggacaatagcctgaagcaaaattagcagtagcacagagtccaggtaaagggattctgctttattgtggggatggagtgagtctgttaagacactcgtttgtcaaataagaataatcacatttcctgcatagggttgctataagaatttcattttaaaaaaattaaaagagaaacatctatacaaatttcttttatatatatatatatatatatataattatattttaagttctagggtacatgtgcacaataaaacatgtagcaaataataagtgttccagaaatatgagccattatttaggcagaagcacaactttggccttgctgagaatagatctaccttttcagaatttcagaaaatttccatggagt

SEQ ID NO: 4903 - DNA, 655 bp, Homo sapiens
aaactaaatgagctcccaggacctaataaagctgtggtgatttgaacgataaaatgagtaatatagcatggatcttcttcagagtatgaaatatatattcataaaccaatacacatattaatagatgattatgaaaataaatattgggaagaygaacacatctccttacagaagtattccaaatatctgaggtgaatagtcctccaatcaagtaggtgaagtttaaacactcataagttgattgtggcctgaggttagacacatagaaaaaataaccactatttggtattctataatgagacttcagatataatgtcaaaacatcatctatgaatgaatacaattttacatgtttttgaatctaaatttgtacaaacacacacatacacacacagacacatgcacacacacacgtatgtttctgcaatacacactgataagggagtaaagacagccacagacttggaaaaaatacttccaagtcacatatttgttaaatgaattcttttaatttgttaaatgacttttataaacaatatgcaagtaaacttacaatgaatcaaaacaaagcaatgcatttaaaatgaaccaaatatcaggagaggcatctcaacaaaagttattggaaaattgttaaatatgaactttttgaggg

SEQ ID NO: 4904 - DNA, 655 bp, Homo sapiens
aaactaaatgagctcccaggacctaataaagctgtggtgatttgaacgataaaatgagtaatatagcatggatcttcttcagagtatgaaatatatattcataaaccaatacacatattaatagatgattatgaaaataaatattgggaagacgaacacatctccttacagaagtattccaaatatctgaggtgaatagtcctccaatcaagtaggtgaagtttaaacactcatragttgattgtggcctgaggttagacacatagaaaaaataaccactatttggtattctataatgagacttcagatataatgtcaaaacatcatctatgaatgaatacaattttacatgtttttgaatctaaatttgtacaaacacacacatacacacacagacacatgcacacacacacgtatgtttctgcaatacacactgataagggagtaaagacagccacagacttggaaaaaatacttccaagtcacatatttgttaaatgaattcttttaatttgttaaatgacttttataaacaatatgcaagtaaacttacaatgaatcaaaacaaagcaatgcatttaaaatgaaccaaatatcaggagaggcatctcaacaaaagttattggaaaattgttaaatatgaactttttgaggg

SEQ ID NO: 4905 - DNA, 655 bp, Homo sapiens
aaactaaatgagctcccaggacctaataaagctgtggtgatttgaacgataaaatgagtaatatagcatggatcttcttcagagtatgaaatatatattcataaaccaatacacatattaatagatgattatgaaaataaatattgggaagacgaacacatctccttacagaagtattccaaatatctgaggtgaatagtcctccaatcaagtaggtgaagtttaaacactcataagttgattgtggcctgagsttagacacatagaaaaaataaccactatttggtattctataatgagacttcagatataatgtcaaaacatcatctatgaatgaatacaattttacatgtttttgaatctaaatttgtacaaacacacacatacacacacagacacatgcacacacacacgtatgtttctgcaatacacactgataagggagtaaagacagccacagacttggaaaaaatacttccaagtcacatatttgttaaatgaattcttttaatttgttaaatgacttttataaacaatatgcaagtaaacttacaatgaatcaaaacaaagcaatgcatttaaaatgaaccaaatatcaggagaggcatctcaacaaaagttattggaaaattgttaaatatgaactttttgaggg

SEQ ID NO: 4906 - DNA, 655 bp, Homo sapiens
aaactaaatgagctcccaggacctaataaagctgtggtgatttgaacgataaaatgagtaatatagcatggatcttcttcagagtatgaaatatatattcataaaccaatacacatattaatagatgattatgaaaataaatattgggaagacgaacacatctccttacagaagtattccaaatatctgaggtgaatagtcctccaatcaagtaggtgaagtttaaacactcataagttgattgtggcctgaggttagacacatrgaaaaaataaccactatttggtattctataatgagacttcagatataatgtcaaaacatcatctatgaatgaatacaattttacatgtttttgaatctaaatttgtacaaacacacacatacacacacagacacatgcacacacacacgtatgtttctgcaatacacactgataagggagtaaagacagccacagacttggaaaaaatacttccaagtcacatatttgttaaatgaattcttttaatttgttaaatgacttttataaacaatatgcaagtaaacttacaatgaatcaaaacaaagcaatgcatttaaaatgaaccaaatatcaggagaggcatctcaacaaaagttattggaaaattgttaaatatgaactttttgaggg

SEQ ID NO: 4907 - DNA, 655 bp, Homo sapiens
aaactaaatgagctcccaggacctaataaagctgtggtgatttgaacgataaaatgagtaatatagcatggatcttcttcagagtatgaaatatatattcataaaccaatacacatattaatagatgattatgaaaataaatattgggaagacgaacacatctccttacagaagtattccaaatatctgaggtgaatagtcctccaatcaagtaggtgaagtttaaacactcataagttgattgtggcctgaggttagacacatagaaaaaataaccactatttggtattctataatgagacttcagatataatgycaaaacatcatctatgaatgaatacaattttacatgtttttgaatctaaatttgtacaaacacacacatacacacacagacacatgcacacacacacgtatgtttctgcaatacacactgataagggagtaaagacagccacagacttggaaaaaatacttccaagtcacatatttgttaaatgaattcttttaatttgttaaatgacttttataaacaatatgcaagtaaacttacaatgaatcaaaacaaagcaatgcatttaaaatgaaccaaatatcaggagaggcatctcaacaaaagttattggaaaattgttaaatatgaactttttgaggg

SEQ ID NO: 4908 - DNA, 756 bp, Homo sapiens
ggagatatacctaatgctagatgacacattagtgggtgcagcgcaccagcatggcacatgtatacatatgtaactaacctgcacaatgtgcacatgtaccctataacttagagtataataaaaaaaaaaaaaaaaaagaaaaaaaaaatttaacagatctctccacacacctgagagaggactatgttctttcccttcgtatatatcaagttctacttttttatttacaaacgtgtgatcacactctcttcagtatattgccatctgtctcacgatttgtatctttttccttgtctgtaaaaagggagaactattaataatactctatttctttagtctttggtgaggatcaaatgataaaacacatgcagagagtttaacccagcacctgctacatagtaatgtctttgttgatgttatttttattgttcccccttcagcttatgctacctgctttgggtgatcttggcctttcttggtggcaataaagggcagagaaactccataatgtttagtaatccaagtcagtttgcagaagcagtcaggagaatgggttcttccatcactcagtccaggtttcctaccaaatagaatgaatgagacaggtagtactgcaaattcatagtttacttacgttaatcataatgtcmaacatgtcaacagcatcctggagagccccccaagtttcctgtccacttgtccactgtacagccacctacccacgctttacgtactacccagctcttcctctaagtg

SEQ ID NO: 4909 - DNA, 756 bp, Homo sapiens
ggagatatacctaatgctagatgacacattagtgggtgcagcgcaccagcatggcacatgtatacatatgtaactaacctgcacaatgtgcacatgtaccctataacttagagtataataaaaaaaaaaaaaaaaaagaaaaaaaaaatttaacagatctctccacacacctgagagaggactatgttctttcccttcgtatatatcaagttctacttttttatttacaaacgtgtgatcacactctcttcagtatattgccatctgtctcacgatttgtatctttttccttgtctgtaaaaagggagaactattaataatactctatttctttagtctttggtgaggatcaaatgataaaacacatgcagagagtttaacccagcacctgctacatagtaatgtctttgttgatgttatttttattgttcccccttcagcttatgctacctgctttgggtgatcttggcctttcttggtggcaataaagggcagagaaactccataatgtttagtaatccaagtcagtttgcagaagcagtcaggagaatgggttcttccatcactcagtccaggtttcctaccaaatagaatgaatgagacaggtagtactgcaaattcatagtttacttacgttaatcataatgtcaaacatgtcaacagcatcctgkagagccccccaagtttcctgtccacttgtccactgtacagccacctacccacgctttacgtactacccagctcttcctctaagtg

SEQ ID NO: 4910 - DNA, 738 bp, Homo sapiens
ccacctataatyccagcactttgcgaggccaaggtgggcagatcacttgaggccaggagttcaacaccagcctagccaacatggtgaaaccttgtctctactaaaaatacaaaaattagccgggcatgatggtgtgcacctgtaatcccagctactcaggagagtgaagcatgagaatcacttgaacctggaaggtggaggttacagtgggctgagattgtgccactgcactccagcctgggtgacagagggagacgctgtctcaaaggaaaaaaaaaagttgcaacataattaaacccaaataatgagaagtttgaacaaatgattgtaattttatactgatattcttattttttaaatcaatttttctattcccagtttaactctctattatatattaatataatcaccgctaaaacttggttttccccccagtaatatacatagtttatcgtattaaacatacagaccattctgtaggcaattttgtaaaactttgaaaaacacaatgctttagtaacctgatgtatctgagaagaggaatcagacataatttttctcacccaatttgttattcctgactcttctctgctcctcaaagtggcaatacctcaacttctttaaagaatctaagatgatgagcacttggaaataaacaaccctagcttccatattatttggatcaacagccctttttaaaagtttgagcaattctcgccaaaggaggtggagagtgcc

SEQ ID NO: 4911 - DNA, 648 bp, Homo sapiens
taaaaatatgaaaaattagccgggcgtggtggcaggtgcctgtagtcccagctacttgggaggctgaggcaggagaatggcatgaacccggaaggcagagcttgcagtgagccgagatcacgccactgcactccagcctggatgacagagcgagactccatctcaaaaaaaaaaaaaaaaaaagatttgcttcatttgcttcattggaatcacctttttaagtgcaatcagagagtaagggtggggtatggttgatggaggtacagtcttagaggtctgcccctaaagaagaaagtctaacacgtcagcaataaaaagcacggagatggaaaaagaaccagccagaattagctgggtgaaaccatggtcacrggcatttttcctgtaatccaatacttacctctattgctctgacctcatcttttttttttttgttttgagagatagggtcttgctatgttgccctggctggtcttggactcctgacctcaacaaatcctcttcttctgcctcccaaagtgttaggattacaaccataagccacctcacctggccctcatccttcttaatacccatcagccaccaacttctggtcactatttggtcattcaaaccaactctgctacccagcctaggattactcataaa

SEQ ID NO: 4912 - DNA, 648 bp, Homo sapiens
taaaaatatgaaaaattagccgggcgtggtggcaggtgcctgtagtcccagctacttgggaggctgaggcaggagaatggcatgaacccggaaggcagagcttgcagtgagccgagatcacgccactgcactccagcctggatgacagagcgagactccatctcaaaaaaaaaaaaaaaaaaagatttgcttcatttgcttcattggaatcacctttttaagtgcaatcagagagtaagggtggggtatggttgatggaggtacagtcttagaggtctgcccctaaagaagaaagtctaacacgtcagcaataaaaagcacggagatggaaaaagaaccagccagaattagctgggtgaaaccatggtcacaggcatttttcctgtaatccaatacttacctctattgctctgacctcatcttttttttttttgttttgagagatagggtcttgctatgttgccctggctggtcttggactcctgacctcaasaaatcctcttcttctgcctcccaaagtgttaggattacaaccataagccacctcacctggccctcatccttcttaatacccatcagccaccaacttctggtcactatttggtcattcaaaccaactctgctacccagcctaggattactcataaa

SEQ ID NO: 4913 - DNA, 705 bp, Homo sapiens
agctcatggagcagctgggaggatcaaacaagaacaccgcctaacacaatcccatatacgtaatagataatcatcgttgctaattacatgacataaaataataatgctcagactgaattccaaatccccactsctcacttggggttctggttttcaaaaagatcagtcccagctgagaagtttaggggactgcagccttcgcctttgtatttaatgtatagggtgtctgggagcactaccagcatgtcagagtcttgaaatctggcccgtggaaggagccccagggaggtgaagcgaacagccagtctgtgggctgactccgggtccagcagcccctgcagagtcggcatcaggtgttcagcatagaaacgctcatctcccgtggccatcaggtaggaggcgaagagaagtcctcctccccccaggatgatcacagcatcctgggcccgcttctgcaaaaaagagcatattaggggggtcccccaggccaggctgcagcacccttcctgagcccttcacacccaggtacacagagggcataacggcaggtcacatgaaacagacgcccttagccttccgctgacactggtctctacagtcagaggctgtatctatacttctgcctacacaccttcttcaggccctaaaggctgtcctgggactccaggccagaaatttaaagagggacagtactgtcccctaggg

SEQ ID NO: 4914 - DNA, 772 bp, Homo sapiens
tcccgtgagcctgtgctgacgcctcacagtcctcactctcttatccctcagggaccatccttgctttgtgggatgacagcctcaccgcccaccgctggtgacaagggacagagatggctgcccatgtgtctgtgaagacgagaaagccgttgcacaacgggaggtgagaaacagccccgagaatgcggsaaataattttaaattataggaaaagcattaatataaacacttagaggctttgatgaaaggcagctctgtttcaaagtcagaaaaggaggctcagctgttgtttttgcttcaagaagctgatttagagacgagaacacggggaagggctgctccttcccacccctctctccgtacgccgcgctccgcactcatccatccgggccttcccttcccagatccctgaagcgcttctgtgcaccacatggacacgagatccacagagccatggcctgtcccccaggactctgagaagatgggatcagatggacccgtgagccgtggcacggtacagacggctcctctggggtgctgcacactgcacaggacacacacaggcacaatcactcctgatcttttccacaatctgcagtgccctgagaccatatggacaatcttgaggaaaccaagggtgcaggggaaagagctcacacagacagacgctgcccagcaggatggtgagagtggtccgcacggccctgtgagcatctgtgaccaggacagtgagtggtccacacagccatatgagcatccgtgaccaggacgg

SEQ ID NO: 4915 - DNA, 772 bp, Homo sapiens
tcccgtgagcctgtgctgacgcctcacagtcctcactctcttatccctcagggaccatccttgctttgtgggatgacagcctcaccgcccaccgctggtgacaagggacagagatggctgcccatgtgtctgtgaagacgagaaagccgttgcacaacgggaggtgagaaacagccccgagaatgcggcaaataattttaaattataggaaaagcattaatataaacacttagaggctttgatgaaaggcagctctgtttcaaagtcagaaaaggaggctcakctgttgtttttgcttcaagaagctgatttagagacgagaacacggggaagggctgctccttcccacccctctctccgtacgccgcgctccgcactcatccatccgggccttcccttcccagatccctgaagcgcttctgtgcaccacatggacacgagatccacagagccatggcctgtcccccaggactctgagaagatgggatcagatggacccgtgagccgtggcacggtacagacggctcctctggggtgctgcacactgcacaggacacacacaggcacaatcactcctgatcttttccacaatctgcagtgccctgagaccatatggacaatcttgaggaaaccaagggtgcaggggaaagagctcacacagacagacgctgcccagcaggatggtgagagtggtccgcacggccctgtgagcatctgtgaccaggacagtgagtggtccacacagccatatgagcatccgtgaccaggacgg

SEQ ID NO: 4916 - DNA, 615 bp, Homo sapiens
agggtcggccgcaccaagccacatggctgaggatgggggagggtggattccccacagggccccggaggagacgggcagggagggcatgcgtgttggttaagcagtcaacaaacacccacaacaaacattttattaagagcccttgctggtttcctcaatagattttccttcatagaattaaaagattggctgggcaccagtcttgggctcaygcctgtaatcccagctttgggaggctgacgctggcggatcacctgaggtcgggagttcgagaccagcctgacgaatacagacaatgaagaaaccccgtctttactaataatataaaaattagctgggcttggtggtgcatacctgtaatcccagctacatactgaggaacgagaatctcttgaactggggaggcagaggttgtggtgatatgagattgccctattgcactccaacttgggcaacaagagagaaactctgtctcaaaataaataaataaataaataaataaaaataaaagattaagcctggaaaaatagaattctcatgacaaaaatatgttatttggttgcatcagggtcgtgaaatccgaaatctaccattaaggtcaacaaagatatatag

SEQ ID NO: 4917 - DNA, 615 bp, Homo sapiens
agggtcggccgcaccaagccacatggctgaggatgggggagggtggattccccacagggccccggaggagacgggcagggagggcatgcgtgttggttaagcagtcaacaaacacccacaacaaacattttattaagagcccttgctggtttcctcaatagattttccttcatagaattaaaagattggctgggcaccagtcttgggctcatgcctgtaatcccagctttgggaggctgacgctggcggatcacctgaggtcgggagttcgagaccagcctgacgaatacagacaaygaagaaaccccgtctttactaataatataaaaattagctgggcttggtggtgcatacctgtaatcccagctacatactgaggaacgagaatctcttgaactggggaggcagaggttgtggtgatatgagattgccctattgcactccaacttgggcaacaagagagaaactctgtctcaaaataaataaataaataaataaataaaaataaaagattaagcctggaaaaatagaattctcatgacaaaaatatgttatttggttgcatcagggtcgtgaaatccgaaatctaccattaaggtcaacaaagatatatag

SEQ ID NO: 4918 - DNA, 615 bp, Homo sapiens
agggtcggccgcaccaagccacatggctgaggatgggggagggtggattccccacagggccccggaggagacgggcagggagggcatgcgtgttggttaagcagtcaacaaacacccacaacaaacattttattaagagcccttgctggtttcctcaatagattttccttcatagaattaaaagattggctgggcaccagtcttgggctcatgcctgtaatcccagctttgggaggctgacgctggcggatcacctgaggtcgggagttcgagaccagcctgacgaatacagacaatgaagaaaccccgtctttactaataatataaaaattagctgggyttggtggtgcatacctgtaatcccagctacatactgaggaacgagaatctcttgaactggggaggcagaggttgtggtgatatgagattgccctattgcactccaacttgggcaacaagagagaaactctgtctcaaaataaataaataaataaataaataaaaataaaagattaagcctggaaaaatagaattctcatgacaaaaatatgttatttggttgcatcagggtcgtgaaatccgaaatctaccattaaggtcaacaaagatatatag

SEQ ID NO: 4919 - DNA, 615 bp, Homo sapiens
agggtcggccgcaccaagccacatggctgaggatgggggagggtggattccccacagggccccggaggagacgggcagggagggcatgcgtgttggttaagcagtcaacaaacacccacaacaaacattttattaagagcccttgctggtttcctcaatagattttccttcatagaattaaaagattggctgggcaccagtcttgggctcatgcctgtaatcccagctttgggaggctgacgctggcggatcacctgaggtcgggagttcgagaccagcctgacgaatacagacaatgaagaaaccccgtctttactaataatataaaaattagctgggcttggtggtgcatacctgtaatcccagctacatactgaggaacgagaatctcttgaactggggaggcagaggtkgtggtgatatgagattgccctattgcactccaacttgggcaacaagagagaaactctgtctcaaaataaataaataaataaataaataaaaataaaagattaagcctggaaaaatagaattctcatgacaaaaatatgttatttggttgcatcagggtcgtgaaatccgaaatctaccattaaggtcaacaaagatatatag

SEQ ID NO: 4920 - DNA, 789 bp, Homo sapiens
caaaacccaacccggggccaggtttyacacaggcctggactgagaagtggggctacaggctacaggtgcttgataccccgggggggccctggaacaggcctggactgagaagcggggctacaggttacaggtgctggataccccaggggggtgctggacacaccaggggggcagatagaggcagccaggcagcctgaagaccctggggcaaaacacacacaggccccctctgctctctggtcactgctaactggccaactggcctttgagtccactgaccacagctaagcccacagccatcaaaacccaccccttacacccttcaccctttagggaggggctcagagacagttgtggcgattcctacttccacccacagccccccgaccctgggcctgtgccgagtgtgggtgggtgacatcatcttgcacccagagctccagactaaaggaaaccctggctcctgtctctggctcttccctccctctctttgttcccttgctcctttctttttgccaaaggagaagacagtgaggctgagggctgctcaacatgcacagtgagcaggagatacaagcacgtggagggacggtcacagcccgtgcaactggcaccttcacacacggaggcctgtgattcccagacacctggcgctggggcaaatcccattccacagccagaaacaggctcggcagggccaggtggatttctcaaagccttggttgcttttggcctgacgctagctggacaatgtctcagctcacaggttcctaaacgcacacccgccca

SEQ ID NO: 4921 - DNA, 789 bp, Homo sapiens
caaaacccaacccggggccaggttttacacaggcctggactgagaagtggggctacaggcyacaggtgcttgataccccgggggggccctggaacaggcctggactgagaagcggggctacaggttacaggtgctggataccccaggggggtgctggacacaccaggggggcagatagaggcagccaggcagcctgaagaccctggggcaaaacacacacaggccccctctgctctctggtcactgctaactggccaactggcctttgagtccactgaccacagctaagcccacagccatcaaaacccaccccttacacccttcaccctttagggaggggctcagagacagttgtggcgattcctacttccacccacagccccccgaccctgggcctgtgccgagtgtgggtgggtgacatcatcttgcacccagagctccagactaaaggaaaccctggctcctgtctctggctcttccctccctctctttgttcccttgctcctttctttttgccaaaggagaagacagtgaggctgagggctgctcaacatgcacagtgagcaggagatacaagcacgtggagggacggtcacagcccgtgcaactggcaccttcacacacggaggcctgtgattcccagacacctggcgctggggcaaatcccattccacagccagaaacaggctcggcagggccaggtggatttctcaaagccttggttgcttttggcctgacgctagctggacaatgtctcagctcacaggttcctaaacgcacacccgccca

SEQ ID NO: 4922 - DNA, 653 bp, Homo sapiens
tcccgtgagcctgtgctgacgcctcacagtcctcactctcttatccctcagggaccatccttgctttgtgggatgacagcctcaccgcccaccgctggtgacaagggacagagatggctgcccatgtgtctgtgaagacgagaaagccgttgcacaacgggaggtgagaaacagccccgagaatgcggcaaataattttaaattataggaaaagcattaatataaacacttagaggctttgatgaaaggcagctctgtttcaaagtcagaaaaggaggctcagctgttgtttttgcttcaagaagctgatttagagacgagaacacggggaagggctgctccttcccacccctctctccgtacgccgcgctccgcactcatccatccgggccttcccttcccagatccctgaagcgcttcygtgcaccacatggacacgagatccacagagccatggcctgtcccccaggactctgagaagatgggatcagatggacccgtgagccgtggcacggtacagacggctcctctggggtgctgcacactgcacaggacacacacaggcacaatcactcctgatcttttccacaatctgcagtgccctgagaccatatggacaatcttgaggaaaccaagggtgtcaggggaaagag

SEQ ID NO: 4923 - DNA, 740 bp, Homo sapiens
cttgagcccaggaggttgagactgcaatgagctatgattgcaccactgcactccagcctgggtgacagagtgaaagagtgagaccttgtcttaaaacaaaaacgaaacaaaacaaaagctagttaaatattgtaaggttttcttgccacaaaaacccaaaacaaaacttttttaaatataaaaagggaagtttttgcaggctgctcagtgcgtggctaagaagaatgacatgtattttattattaatcttttcttttttatttttwttttttgagatggagtctcactctgtcgcccaggctggagtgcagtggcgtgatcttggctcattgcaagatccacctcccaggttcacgccattctcctgcctccgccttccgagtagctgggactacaggcacctgccaccgcgcccagctaatttttttgtgtttttagtagagacggggtttcactgtgttagccaggatggtctcgttctcctgacctcgtgatccgcccgcctcggcctcccaaagtgctgggattacaggcttgagccaccgcacccggccagtcttttcttttttttcttgagaatgacacatattggaggcagcactcagcacccattgttgggtgcaaaccactgtcattcctccactttgttttaataggggtggctacacctggagccaaatgtttatatgggtcaaataaagcacacacccaaagaatgtgtgcttatcaacagatttatt

SEQ ID NO: 4924 - DNA, 740 bp, Homo sapiens
cttgagcccaggaggttgagactgcaatgagctatgattgcaccactgcactccagcctgggtgacagagtgaaagagtgagaccttgtcttaaaacaaaaacgaaacaaaacaaaagctagttaaatattgtaaggttttcttgccacaaaaacccaaaacaaaacttttttaaatataaaaagggaagtttttgcaggctgctcagtgcgtggctaagaagaatgacatgtattttattattaatcttttcttttttatttttattttttgagatggagtctcactctgtcgcccaggctggagtgcagtggcgtgatctyggctcattgcaagatccacctcccaggttcacgccattctcctgcctccgccttccgagtagctgggactacaggcacctgccaccgcgcccagctaatttttttgtgtttttagtagagacggggtttcactgtgttagccaggatggtctcgttctcctgacctcgtgatccgcccgcctcggcctcccaaagtgctgggattacaggcttgagccaccgcacccggccagtcttttcttttttttcttgagaatgacacatattggaggcagcactcagcacccattgttgggtgcaaaccactgtcattcctccactttgttttaataggggtggctacacctggagccaaatgtttatatgggtcaaataaagcacacacccaaagaatgtgtgcttatcaacagatttatt

SEQ ID NO: 4925 - DNA, 740 bp, Homo sapiens
cttgagcccaggaggttgagactgcaatgagctatgattgcaccactgcactccagcctgggtgacagagtgaaagagtgagaccttgtcttaaaacaaaaacgaaacaaaacaaaagctagttaaatattgtaaggttttcttgccacaaaaacccaaaacaaaacttttttaaatataaaaagggaagtttttgcaggctgctcagtgcgtggctaagaagaatgacatgtattttattattaatcttttcttttttatttttattttttgagatggagtctcactctgtcgcccaggctggagtgcagtggcgtgatcttggctcattgcaagatccrcctcccaggttcacgccattctcctgcctccgccttccgagtagctgggactacaggcacctgccaccgcgcccagctaatttttttgtgtttttagtagagacggggtttcactgtgttagccaggatggtctcgttctcctgacctcgtgatccgcccgcctcggcctcccaaagtgctgggattacaggcttgagccaccgcacccggccagtcttttcttttttttcttgagaatgacacatattggaggcagcactcagcacccattgttgggtgcaaaccactgtcattcctccactttgttttaataggggtggctacacctggagccaaatgtttatatgggtcaaataaagcacacacccaaagaatgtgtgcttatcaacagatttatt

SEQ ID NO: 4926 - DNA, 786 bp, Homo sapiens
ttaataatactgattaattattgacagattgacttattatttattatatatttatggtgatccaggcttggggaatgcagtgctgggttagacagacaataarcagttaaatatttggaacaccagaaggttgtcaatgccctacagccaaagagcaatgggattatacctgtaattgagcgaagttgcctttattggctcttggcagtgagagagaatgtatgctggggagctgcattatccagatgtccttagtttttacctagtgttcctttttcattctaggatctcatccaggataccatagttcattagtcctcacgtctccttagggtcttcttggctgtgaccgtttctcggactttccttgtctttgatgaccttgacagttttaaggagtgccgatcagctattttgtagaatatctcttagtgagatgttaggaagaaataatgatagggcttggagttgtgttgggtgatttgggggaggattcaaggaagtggttctttgctccagattggatgcttccaggaagcaggggtcattctgtatctgggtatctgtattagtttccaactgctgccattatgaaacatcataaacctagtagcttagaacagcaaaaaattatctcacagttctggaggaagtccaaaatcagattcattgggttaaaatgaaggtgccagcaggtctggttcttctcccctggaggctccaggggagaacctgtcttcttgccattcccagctctggatgccacatgcattccttggcttatgg

SEQ ID NO: 4927 - DNA, 801 bp, Homo sapiens
atcaggatgcttgatcgctgctgtgttttggacaatgctcatgtttttgtctatgttcaaacatgattatggagtggtcttgtttttgttttgatccatcgtggacacagaggggtcttgtctgatcttgttctgtgaagttgtttatgttcaacaggagaacaccccagcctagctgaaggtgtcaggcaagctcttggctgtcagggactgctttttctttgtcatgaagataaattctatgaacagtaggacagtttgagggggatgggtcatactgtggtggagtgttctcttattttacaggcacaatcaggaaaggccttggtggtgaagttgacatttgaaggatatgaaggaagaggctatgtgatcatctggggagaaagaatttcaggcagagagatcataaggtggaaagccctgagatgggagtatgtttggatgttgggtacagagtgtaaaaaagagaatgcagccaaagatgactccaaaagttttgacctgagcaactggaagagtggagttcgcatttattgwgatgggaaagactgcattttattgtagaaggagtttaatattttacaaccttttagttttaggaaagttttagatttacagaaacattgtgacagtaatacagagtttccatatatctcacactcaatttcccctattcttaatatatttaatatacatttgtcacagttagtgaaccaatatcgatggactattaataactgaagtccatacattatccagatgtccttagtttttaccgagtgttcctttttcattcta

SEQ ID NO: 4928 - DNA, 799 bp, Homo sapiens
ccccacagccagctaggcccgagccacatggcgggggcggcgggggcggctgttcgccgcatcccaggcttgctccatctcctcgtctgcaatgtggaggtgacagtcgtggtcctcggctagtgccacaggactgtacgggacagatcacccagccccgtgcctgcactgggggcggcggtgacgtgatggccgcggcggtgacctgatggccgcaggtgtgtccaccctctggttaggcctctcctctccctggggcgcaacaggtgtcctcgggtgggaggttcagctgctgggcctggggccccagctttcagctcctgtgcaggcgtggagcgggacggcacgccggggcgttcgttcacacgatgcccccagctcgtctctgcctgctctgtgatgcagcctcagctcctgtgggtcccgggtcacccacccgtgtgggccgcagtctttctgcaccacgtcctgctctcggccagcgctggcctgcgggccccggcagtgtggggtcacacacaggccgcaccggctgtttcacggagcccccctgctcaaaatcctggccttgggtctctgtgtggctcctggagggagcatgtatgaggtgtccaggttgtgaaagcsccatccggcagccctccctgtgacagtccttcaggcctcgtcaggcttggttcagcccgtgttagaggaggccagacagctcctcctcgatcaccacagggaacgagggttgggcagtttctcctctcccacccgggcgtgggtcagctgcaagggtctcatcccaggaact

SEQ ID NO: 4929 - DNA, 582 bp, Homo sapiens
tgcatttctaaacaatgctgacaacgcacactgaggcagcacctccggggaagtctccgtgctccgatgctgtggccrtgtacagcatatgcagtccccaaagggatatttcagcacagagtttcaatgtaaaatgacacacgctactgcaggctagagatcttattggggacacagggctatattcatctgcttcccagcaagaaaaccagaaagccagagataaacagaagtcaatcaaagcagaaagtgacatctagaaaaaaaacacctaattctgccaaacctgttttgctgaataaagataagagcgctgtggacaatatggctttggtataagaaattaaatgatggcaccattcccaaaagcaactaaagcagttgacatcgggcttgttcccaacagcctagaagggactaagaatggaagaacaatggacaattaagaaactgtttctacggactctgaattttgcaagactaattatgaaaataagccttgttacagagtttcagcatttgaaagtattactgtgctttacttcctactctgaaaggtaagacttccaaattaaaatataa

SEQ ID NO: 4930 - DNA, 730 bp, Homo sapiens
ttgcccctcaaccaacctgctgaggtcctgccctttagggattgatatggtaccagcaccaaagggtgatagcaggagtaaaattttattgttcaaaactgatgtaccaccttctaccacacttatctcttctatccacatttatctaccccaattatttaccactggctactgcagagaaaagaagtgggaacagtgaccaaatttgaagcaaatgatctcttttgctgaaagccagcctgtagtatcctacttattgctctgctacaccctcaaccctattcctaattcagtaaaagaatgttaagccacagagaagctagataaattatctcttatctctaaaattgcacaccaaaaaacatgggcggtggggaagattttggcatttgaaggtatgtgtgatatcagcctattatttagatttttaaaggctactaccggaataatttcaaacacgtggtttagctacacaatctgattgccactaatccaaattaagatgtggcatgtgcagtggttcacacttgtaataccagcrctttgagatgcaaaagtggatgaatcacgggagcccaagagtttgagatcagcctggatgacacagcaaaaccctatctctacaacagatacaaaaattagcctgacatggtggcatgtgcctgtagtcccagctactgaggaggatgaggtgggaggatcatttgagcgagagaggtcaaggctgcag

SEQ ID NO: 4931 - DNA, 1375 bp, Homo sapiens
cctgcagaggacagcgccatccggtgtgggcagctggacctgcttcaggactggctggctgatttccgaaaatctacctcctcgtccagcgcagccaaccccgaggagctggtggcatttgacgtcgtctgtggagatttcaactttgataactgctcctctggtgaggccgggctcctccccactcaggtctccagctctggggaggctgtgggctcagtcacagctagacagacttcgttaggcagctcaaagaattcctgctcctcgagagcatgtgggcggggtatttagcaagactgatttctctgccccctagaaatcctagaacaggaagagcccacgctctgcctagaaagctggagacagagatgccctaaaaacraacctctgacaaggaaggctgggggcctctgaagcagacaaaggacgagtccactagtaacacccatcaacggggcgccgcgctcttgcttcgagccagctgccattctatcgctgtttcacttaagtgtcttaacaaccctgagagggaagcattgcatgtctccacgtggtgtggtggaggaagctgagactcagagaggctggagaaccagcccaaggtcacatagccaggcagtgattgcactgggatctgaaccctgggaattgcaccttaaaccattagggtgaaagactacaagctcgtcatcagtgaaacagcaaacacttgctgtaaataactgatctgtggatccgatgaccacatggaccttgtggggaccttccttcctctgtccgaggaccgtggtcactgtcactgtcctcagagggaatgctgaagatcagggcgtgtgctgggggaggtgttctcaaggacacagaaaagcagcgacaaatgaagcacggggcacctgaatgggactgagatcccacccaggggcagtggcctaagggatgggggcctggcagcacatggggagtaactgatgggaagcaggggcacaggccgtgtgggacagcaaagccccctggtgcctcagcgtttcctccctccccgcacagacgacaagctggagcagcaacactccctgttcacccactacagggacccctgccgcctggggcctggtgaggagaagccgtgggccatcggtgagctggggctgggggaggaggatgggagctgggctccccacagacttccctcaaagatcaccaggacctaccccacaagaccccactgctggggaagggccccattcagctgcccctggctagcagaagcccgtgtccacccacagaggccaccccctagaggctgcctgggccctgcctgcagcgaccactgtcaccccctcgtcccccccaggtactctgctggacacgaacg

SEQ ID NO: 4932 - DNA, 1375 bp, Homo sapiens
cctgcagaggacagcgccatccggtgtgggcagctggacctgcttcaggactggctggctgatttccgaaaatctacctcctcgtccagcgcagccaaccccgaggagctggtggcatttgacgtcgtctgtggagatttcaactttgataactgctcctctggtgaggccgggctcctccccactcaggtctccagctctggggaggctgtgggctcagtcacagctagacagacttcgttaggcagctcaaagaattcctgctcctcgagagcatgtgggcggggtatttagcaagactgatttctctgccccctagaaatcctagaacaggaagagcccacgctctgcctagaaagctggagacagagatgccctaaaaacgaacctctgacaaggaaggctgggggcctctgaagcagacaaaggacgagtccactagtaacacccatcaacggggcgccgcgctcttgcttcgagccagctgccattctatcgctgtttcacttaagtgtcttaacaacccygagagggaagcattgcatgtctccacgtggtgtggtggaggaagctgagactcagagaggctggagaaccagcccaaggtcacatagccaggcagtgattgcactgggatctgaaccctgggaattgcaccttaaaccattagggtgaaagactacaagctcgtcatcagtgaaacagcaaacacttgctgtaaataactgatctgtggatccgatgaccacatggaccttgtggggaccttccttcctctgtccgaggaccgtggtcactgtcactgtcctcagagggaatgctgaagatcagggcgtgtgctgggggaggtgttctcaaggacacagaaaagcagcgacaaatgaagcacggggcacctgaatgggactgagatcccacccaggggcagtggcctaagggatgggggcctggcagcacatggggagtaactgatgggaagcaggggcacaggccgtgtgggacagcaaagccccctggtgcctcagcgtttcctccctccccgcacagacgacaagctggagcagcaacactccctgttcacccactacagggacccctgccgcctggggcctggtgaggagaagccgtgggccatcggtgagctggggctgggggaggaggatgggagctgggctccccacagacttccctcaaagatcaccaggacctaccccacaagaccccactgctggggaagggccccattcagctgcccctggctagcagaagcccgtgtccacccacagaggccaccccctagaggctgcctgggccctgcctgcagcgaccactgtcaccccctcgtcccccccaggtactctgctggacacgaacg

SEQ ID NO: 4933 - DNA, 1375 bp, Homo sapiens
cctgcagaggacagcgccatccggtgtgggcagctggacctgcttcaggactggctggctgatttccgaaaatctacctcctcgtccagcgcagccaaccccgaggagctggtggcatttgacgtcgtctgtggagatttcaactttgataactgctcctctggtgaggccgggctcctccccactcaggtctccagctctggggaggctgtgggctcagtcacagctagacagacttcgttaggcagctcaaagaattcctgctcctcgagagcatgtgggcggggtatttagcaagactgatttctctgccccctagaaatcctagaacaggaagagcccacgctctgcctagaaagctggagacagagatgccctaaaaacgaacctctgacaaggaaggctgggggcctctgaagcagacaaaggacgagtccactagtaacacccatcaacggggcgccgcgctcttgcttcgagccagctgccattctatcgctgtttcacttaagtgtcttaacaaccctgagagggaagcattgcatgtctccacgtggtgtggtggaggaagctgagactcagagaggctggagaaccagcccaaggtcacatagccaggcagtgattgcactgggatctgaaccctgggaattgcaccttaaaccattagggtgaaagactacaagctcgtcatcagtgaaacagcaaacacttgctgtaaataactgatctgtggatccgatgaccacatggaccttgtggggaccttccttcctctgtccgaggaccgtggtcactgtcactgtcctcagagggaatgctgaagatcagggcgtgtgctgggggaggtgttctcaaggacacagaaaagcagcgacaaatgaagcacggggcacctgamtgggactgagatcccacccaggggcagtggcctaagggatgggggcctggcagcacatggggagtaactgatgggaagcaggggcacaggccgtgtgggacagcaaagccccctggtgcctcagcgtttcctccctccccgcacagacgacaagctggagcagcaacactccctgttcacccactacagggacccctgccgcctggggcctggtgaggagaagccgtgggccatcggtgagctggggctgggggaggaggatgggagctgggctccccacagacttccctcaaagatcaccaggacctaccccacaagaccccactgctggggaagggccccattcagctgcccctggctagcagaagcccgtgtccacccacagaggccaccccctagaggctgcctgggccctgcctgcagcgaccactgtcaccccctcgtcccccccaggtactctgctggacacgaacg

SEQ ID NO: 4934 - DNA, 1375 bp, Homo sapiens
cctgcagaggacagcgccatccggtgtgggcagctggacctgcttcaggactggctggctgatttccgaaaatctacctcctcgtccagcgcagccaaccccgaggagctggtggcatttgacgtcgtctgtggagatttcaactttgataactgctcctctggtgaggccgggctcctccccactcaggtctccagctctggggaggctgtgggctcagtcacagctagacagacttcgttaggcagctcaaagaattcctgctcctcgagagcatgtgggcggggtatttagcaagactgatttctctgccccctagaaatcctagaacaggaagagcccacgctctgcctagaaagctggagacagagatgccctaaaaacgaacctctgacaaggaaggctgggggcctctgaagcagacaaaggacgagtccactagtaacacccatcaacggggcgccgcgctcttgcttcgagccagctgccattctatcgctgtttcacttaagtgtcttaacaaccctgagagggaagcattgcatgtctccacgtggtgtggtggaggaagctgagactcagagaggctggagaaccagcccaaggtcacatagccaggcagtgattgcactgggatctgaaccctgggaattgcaccttaaaccattagggtgaaagactacaagctcgtcatcagtgaaacagcaaacacttgctgtaaataactgatctgtggatccgatgaccacatggaccttgtggggaccttccttcctctgtccgaggaccgtggtcactgtcactgtcctcagagggaatgctgaagatcagggcgtgtgctgggggaggtgttctcaaggacacagaaaagcagcgacaaatgaagcacggggcacctgaatgggacygagatcccacccaggggcagtggcctaagggatgggggcctggcagcacatggggagtaactgatgggaagcaggggcacaggccgtgtgggacagcaaagccccctggtgcctcagcgtttcctccctccccgcacagacgacaagctggagcagcaacactccctgttcacccactacagggacccctgccgcctggggcctggtgaggagaagccgtgggccatcggtgagctggggctgggggaggaggatgggagctgggctccccacagacttccctcaaagatcaccaggacctaccccacaagaccccactgctggggaagggccccattcagctgcccctggctagcagaagcccgtgtccacccacagaggccaccccctagaggctgcctgggccctgcctgcagcgaccactgtcaccccctcgtcccccccaggtactctgctggacacgaacg

SEQ ID NO: 4935 - DNA, 828 bp, Homo sapiens
agggcctggaatttcccccgggccaggccacaggtcgacccccatgaaagagctgctgggtacggcgcctgctgaaggcagcctggcagcttgcagcaccaatcaggcaaatacagacaccagctgcaataacacagccgaccattttcaaagtagagacagttccatcccagccaaaattcattcttgagcccagtaagatgtccataaagaacacatctgagaggccaacagcagaaccaatttataattcacagcccgagactgcagtcacagcgatggttccttgcagctaatttgagccaattaattagattatagactaaatttgaaacatcatcctatgctgagaaaattctttttatgagatgatgatttaaaaatgactaccagtagctctcagatcattgatgctggaattaattatcaagggcaaaggacagtgatggattccatttctgagctgtaacaatgtcctgaatgtcattagtgtatttatcttaaggctgatgaaaaccttgtggaagcccatgtttgcaggccctgcctcgccgggtgccccttttgcatccgtccaggcactcacwgacctggcggcctttgcagggtctctcaccactgcacttgccatcccaggccctggccccagcctgccctctgcaatgggggctcccaggagggggtcctaagcctctggcccagtggtgctgaggccccaggggacaggctggcaggaagcagacgggcatactgcttgtctcagggcaacagtgccagaaagggattccagatgtcacatccccctgctccagcgccctgccctccctg

SEQ ID NO: 4936 - DNA, 828 bp, Homo sapiens
agggcctggaatttcccccgggccaggccacaggtcgacccccatgaaagagctgctgggtacggcgcctgctgaaggcagcctggcagcttgcagcaccaatcaggcaaatacagacaccagctgcaataacacagccgaccattttcaaagtagagacagttccatcccagccaaaattcattcttgagcccagtaagatgtccataaagaacacatctgagaggccaacagcagaaccaatttataattcacagcccgagactgcagtcacagcgatggttccttgcagctaatttgagccaattaattagattatagactaaatttgaaacatcatcctatgctgagaaaattctttttatgagatgatgatttaaaaatgactaccagtagctctcagatcattgatgctggaattaattatcaagggcaaaggacagtgatggattccatttctgagctgtaacaatgtcctgaatgtcattagtgtatttatcttaaggctgatgaaaaccttgtggaagcccatgtttgcaggccctgcctcgccgggtgccccttttgcatccgtccaggcactcacagacctggcggcctttgcagggtctctcaccactgcacttgccatcccaggccctggccccagcctgccctctgcaatgggggctcccaggagggggtcctaagcctctggcccagtggtgctgaggccccaggggacargctggcaggaagcagacgggcatactgcttgtctcagggcaacagtgccagaaagggattccagatgtcacatccccctgctccagcgccctgccctccctg

SEQ ID NO: 4937 - DNA, 660 bp, Homo sapiens
attcattcccatggcttcaattatgatctatatggtgataatttgataatttatgactctatcccttaaccagatccctctcataagctccgaaccacctcctagacatcttgtttggacatatcacacccaattcaaacttacctacttctcttcctgcctaaacttgctcctttactgtgtcacatctcaggggatagcacccccatccatcccctagttacccaaggcagacacctaagcatcatctttgacttttactagtttcctccacgccctcagctctcattcacaaagtcctcggaatatttaccttcttaataactctgtgatgagctacttaaaaaagatgggaaacttgatgaactattaatatttaaaraacaaacaaataaataaatataaaactatctctcagatctaccccctcttttccactcaccatgctggatcaccgcagcaccttcccgatccacatcccagcctcatcttctcctggccattctccaagcagcccctagaccttttcaaaatgcacatctccctaaaaaccttcattagctttagaataaaattatattctcagcctagaataccaagctcttcaggacccagccctggtcaatcactctaacccctcagtgtctgagattcagcatt

SEQ ID NO: 4938 - DNA, 834 bp, Homo sapiens
atctatcccaccattcattcaaccattcatttgcatactttttctgattcaaacccaatacatgtttgttatgaaaaattaaaacattccagaaatattcttttgaaaatttttacttattatttatttcagtagccttaggggtacaagtggtttttggttacatggatgaattgtatagtggtgaaatctgagcttttagtgcacccatcacccaagtagtctacattgtacccaatacatagctttttatccctccccacctcagtctccaatgtgtccgttataccactctgtatgcctttgtgtaccccccatagcttagctctcacttataagtgagaacatacagtatttggttttccattcttaagtttcatcagttagaataagtgacgtaacttccttgcaatccctatcaaaataccaacatcaattcatccaagttgcttcatccagcttcatccaagttgctgcagaaaacattttgttcttttttatggctaagtagtattccatggtgtatatgtaaccacattttcttttccttcttttttgagaaggagtcttgttctgtcacccaggttggagtgcagtggcgtgatcttggccccctgcaacctccacctcctgggttcaagcgattctcctgccgtagcctcccaagtagctgggactacaggcatgcsccaccacgcctggctaatttttgtatttttagtagagatggggtttcaccatattggtgaggctggtcttgaactcctgacctcgtgatccgcccacctcggcctaccaaagtgctggcattataggcgtgagccactgcaccca

SEQ ID NO: 4939 - DNA, 1504 bp, Homo sapiens
ctccaagatgatgctgacactgttggttcatggaacacactttgggtagcaaggatctatggtgtgcgtatgctttttttctgctcctgtgcctttctcctttgacttgacactttagagaagtggttttctactcaagctgcccattaaatccaactgtattaaaaaatactgggctgggcacggtggctcatgcctgtaatcccagcactttgggaggccgaggtgggcggatcacgaggtcaggagatagaggccatcctggttaacatggtgaaacctcgtctctactgaaaatacaaaaaattagccaagcatggtggcacatgcctgtagtctcagctactcaggaggctggggcaggagaatcacttgaacccgggaggtagaggttgcagtgagctgagatcgcaccactgcactccagcctgggctacagagcgagaatctgtctcaaaaaaaaaaaaaaaagaaagaaaagaaaagaaaaagaaaaatgctgatgtctgacctcacatccccggaattctggtttaattattctggtggaagactgaaacatgaatacttttaaaaagctctccaaataattctaatgcacagtcaggactgagaggtctggttttagtttatctggcttcaccatttgatgccactttcaggtctctgttggatccatgcttcacagcatgcaaacaagttkttacccatccaagtaagccagaactttgctgcagtactatgctgcagacctgacttgtccagcaaagaaattacagcagatggccactatctctccactgggggaccttaactcatcatgttcccacagaatcttttttcttccttaaattttgccattttttttccaatatatctatgtctcccttattttgcaactcaaggaaggggctgtgtcatatccatttttattttatcagtataatgcctggcataaactagcaatctgtacagatgcacagaataaatgaaatggattgttttagtgtgcttggtgggctttcagaacttaaaattcttaagtgaggcattaatatatggaatgtggatgatatgcatagctgcctccatttcccaaatataggcaagaaaaacctagttaaaaaaaaaaacagaccaaaataaacattagtttatgtcacacagaattgtcctactgaaaatttcagaataatgttactcatatcataatttctaacacttatttattgagcttactatcatattactggatactttaaaaaagtatatatatatatatgtatgtatatatgtgcatatatatgtatgtatagatgtatatatgtgcatatacacatatatgtgtgtgtaatatttaagcctcaaaatgaccatgaacagtacatgctattataactcccctttttctggaaagataattctggcatgaagaggttacatttggtttgaatcccatagtaagtggcagaactgggatttaaactaagcagtttgtgtccag

SEQ ID NO: 4940 - DNA, 794 bp, Homo sapiens
gggattacaggtgtgtgtcaccactcctggctaatttttgtatttttagcagagacagggttttgccatgttggccaggctggtcttgaactcccggcctcaggtgatctgcctgcctcatcctcccaaagtgctgggattataggcatgtgccactgcacccggctgagactatttttctaactcagtttgtacaggccctagcatggtgcgtgggtatgagagaaaaagagactggagctccaatggaggatgcctcagttctctctctctctctctctctctctctctctctctctctctctctctctstctctctgtgtgtgtgtgtgtgtgtgtgtgtgtgtgtgtgattgttggaggccaggcctggcttacttcctgagcctaattcaattggagtgtttccatagagagggggagataccatctagtccagtttagcatccacattcatttctctccatctccatatggagctgaacagatcactcaggtctaaccaagttccctgagagttttacaaccttgttactgctttggaaagaccattatactccagctttgtgtagaacagagagagacaagggctgtcttttgaatatattccactcttatctaacgacacagagttgtcgtaacctacctataataataacctttgtgatactggagctgccagcgtgtgaggagggacattctttcaggtgtcccttcatcttcatctctgattagtatattctgtttgtaaaggcaatgcttgagccagtagctttcaaacatttttgaatggg

SEQ ID NO: 4941 - DNA, 794 bp, Homo sapiens
gggattacaggtgtgtgtcaccactcctggctaatttttgtatttttagcagagacagggttttgccatgttggccaggctggtcttgaactcccggcctcaggtgatctgcctgcctcatcctcccaaagtgctgggattataggcatgtgccactgcacccggctgagactatttttctaactcagtttgtacaggccctagcatggtgcgtgggtatgagagaaaaagagactggagctccaatggaggatgcctcagttctctctctctctctctctctctctctctctctctctctctctctctctctstctctgtgtgtgtgtgtgtgtgtgtgtgtgtgtgtgtgattgttggaggccaggcctggcttacttcctgagcctaattcaattggagtgtttccatagagagggggagataccatctagtccagtttagcatccacattcatttctctccatctccatatggagctgaacagatcactcaggtctaaccaagttccctgagagttttacaaccttgttactgctttggaaagaccattatactccagctttgtgtagaacagagagagacaagggctgtcttttgaatatattccactcttatctaacgacacagagttgtcgtaacctacctataataataacctttgtgatactggagctgccagcgtgtgaggagggacattctttcaggtgtcccttcatcttcatctctgattagtatattctgtttgtaaaggcaatgcttgagccagtagctttcaaacatttttgaatggg

SEQ ID NO: 4942 - DNA, 794 bp, Homo sapiens
gggattacaggtgtgtgtcaccactcctggctaatttttgtatttttagcagagacagggttttgccatgttggccaggctggtcttgaactcccggcctcaggtgatctgcctgcctcatcctcccaaagtgctgggattataggcatgtgccactgcacccggctgagactatttttctaactcagtttgtacaggccctagcatggtgcgtgggtatgagagaaaaagagactggagctccaatggaggatgcctcagttctctctctctctctctctctctctctctctctctctctctctctctctctctstctgtgtgtgtgtgtgtgtgtgtgtgtgtgtgtgtgattgttggaggccaggcctggcttacttcctgagcctaattcaattggagtgtttccatagagagggggagataccatctagtccagtttagcatccacattcatttctctccatctccatatggagctgaacagatcactcaggtctaaccaagttccctgagagttttacaaccttgttactgctttggaaagaccattatactccagctttgtgtagaacagagagagacaagggctgtcttttgaatatattccactcttatctaacgacacagagttgtcgtaacctacctataataataacctttgtgatactggagctgccagcgtgtgaggagggacattctttcaggtgtcccttcatcttcatctctgattagtatattctgtttgtaaaggcaatgcttgagccagtagctttcaaacatttttgaatggg

SEQ ID NO: 4943 - DNA, 790 bp, Homo sapiens
tccatagaagggaactctagcactttaattggactgtaagaatcccagaagaaggaagcacattgtatacttttacatcttgacaacttctgggcaggatctagaacatgtaatagatggctactaaatacatgttgcattggaggctgctgctaacatatatgatatctttgggcaagtttggaaaatgcccaataaaggctaaaaattatacaaagattcccttccttgcatgtccatgcagcttctgtaccaggaagcatggctggatatgcaaacagtgggtcaggttttagccccacacaactccgtggccgggtgcccctgctagggcrtaatttatatgcatgaccttcttgcaaaccaagccatggttggtgtgggagacagtgactcaggacccacaggtgaggcttctccgtatgctgcagcctcttcctgactaacacagcttgcccaggtttgggtgtacaatgtacacacacaacagtagctccctgctatcatttggattcattaaaaattaaatcatctcataagcttacaaatgttgatttttatttatttttttcatgataaaactttcatatttccatggtgtatggaactataattttttatgtgtttctttacgtgtaaggtgagagtggcaagaacataaaatctttacctgttagttttagattttcttgggctggggaggggcagtagggctggaaccaatcactgatgggcacccaggccctggactgaaatttcctgtgaatgcttcagctaactctgttgcggt

SEQ ID NO: 4944 - DNA, 790 bp, Homo sapiens
tccatagaagggaactctagcactttaattggactgtaagaatcccagaagaaggaagcacattgtatacttttacatcttgacaacttctgggcaggatctagaacatgtaatagatggctactaaatacatgttgcattggaggctgctgctaacatatatgatatctttgggcaagtttggaaaatgcccaataaaggctaaaaattatacaaagattcccttccttgcatgtccatgcagcttctgtaccaggaagcatggctggatatgcaaacagtgggtcaggttttagccccacacaactccgtggccgggtgcccctgctagggcgtaatttatatgcatgaccttcttgcaaaccaagccatggttggtgtgggagacagtgactcaggacccacaggtgaggcttctccgtatgctgcagcctcttcctgactaacacagcttgcccaggtttgggtgtacaatgtacacacacaacagtagctccctgctatcatttggattcattaaaaattaaatcatctcataagcttacaaatgttgatttttatttatttttttcatgataaaactttcatatttccatggtgtatggaactataattttttatgtgtttctttacgtgtaaggtgagagtggcaagaacataaaatctttacctgttagtyttagattttcttgggctggggaggggcagtagggctggaaccaatcactgatgggcacccaggccctggactgaaatttcctgtgaatgcttcagctaactctgttgcggt

SEQ ID NO: 4945 - DNA, 796 bp, Homo sapiens
tttctatcctgttggctgcatttcagctaaatttgacagaaaggcatgtgtttggacactggcatctttgcatacaagctgtgggcactgggtctctgagatctgtcaaatggagattgcggtgctggtggcaatgatgatgcaatgatgaagatgatggtgatgaggaggataatggctacctcagtgccattacaaggagtaatgatttatgtgaaagggccttgtgctctagcacttcatccatttattcagtatttattgagctgctgcagggtacctggcagaattgtggaatccatggacattaccctataaaagccacagactttttcccacaagacccaggaagagacagggaagcacaaataaacaaataataatgtggtggctaagtacaaccaaagagatatttgtcgaagtaaaaaataaratatagggatgaattttgccagagtaagagtaagggagggttagtatctaagtattttgagggtgccttgggattttctggtgagtctttcatgcattaagtatgttctgaatactgtgctgggctctgggcttacagggtgaggtgtgatggaaacaatagctgccctcatgggctagtctgtctactaagacacaaaatcaacgttctccatcaggggaccatgacaaagttggaggcatgtgccatcacatatggggagtcccaggtaatttggtatgaatggatcataaagtggcggggtggcaggaaccaggggaaatgaggcagggaaggtttgcccagcaacttcacagagaacct

SEQ ID NO: 4946 - DNA, 661 bp, Homo sapiens
tctctcattcaaagatgctatgactttgaataggccaattaattatacaaaaccaattgtttcagtgtcacacatactaacaacctagcaacttccaaatttgtcaggagagctttgtgtagatgttgtcaagatgacagaagccaacagactgtgataggaataacttagcattaaacatcactatttcaaaaaatgagtaatctctacagacaactttttattaaatttacctaataaattcatgtttagtttatggagggtttattaagtgataatacaacactatgcatatatacagtgctaccatggaaatgataggatggtgctgatggcagaaataaggaaacaagaagggtcatagaaagatgtgcataactagtaatagctaaaatattatttttaaaagaaatttttcccttgaggttgagtataaagcagagttttaaaagaagttgagatagccaggcacagtggctcacacctgtaataccagcactttgggaggcccaagtgggcagatcacctgaatccaggaattcaagaacaacctgggcaacatggcaaaaaagtgtctctaaaaaaaatgcaaaaaaacaaaattarccagaagtggttgtgcatgactgtagtcccatctactcaggaggctgaggtggga

SEQ ID NO: 4947 - DNA, 2619 bp, Homo sapiens
catgttatagaaaggtggagggtgtgatttaagtcagtaataagactatcctcaaatgaaaacagcagccaacattgctctgggcatatcattcctgcagtcgtcgttcctttttgcagatgggaaagctaaggcagagaggccatgcagccgggtgtcaggattcaaatacaggcagcctggcatcagagccctctctgggagcttactatctaataggaaaatcagactaattcccatctagaaaaatgggaagctgtataaaacctagtactgaacaacttctgaagaagcttgatttggtcagcctgtgcgtaattaatgtttttcacctctgggcctggttctccttacctatcaaggttaggagtaagcagaatgagcgctctgaaccctttcattccaggcttcccagatttgacctcttcagcaaaacctgcccttccaggataacctagtggcactgaaaagcagagaggacttgtgtctttccagtaaatctgggaaaagtagagctgggcatggagggttgcagacagcagtggtgcctgacacctgtgggggaggctgcatgactgcttcagaaaggccaggagattggctgctttgtaacttcagcagtcacaactctaatttcgtgtgtgtgaggctgattgtttttatgcagtattcttttatgtctaagtacattaattgtatctagttttgcttgctctgtaactattaagatcagaattgacttgttgaattgatacatcttttttaaggttatgtctgtcttcagctctttgatgatccttggttatatgttcatctttaattttaaaatttcgggttaccacctctgtggatccatgcattttatgcagcccacttcctgtgtttattctggaagggatctacctactgtttgctgagatcagccggtagtaactgatgttctgggtcggggaactccccatttctgctgggtatcaccaactatgtgggaccccgccctgcctctgagacttaagcaccagctcttgtgtttaagagagtcaggtttcattgcctagcctatgtggctattcctaatgcagatccccaacactgcacaccagtccttcctacgtctgctaactccacacagcttcttcctgaggccattcctgtctgttaaccatcctttttggcctgtgaggttaaactcttgtgttctaatgtaatagtctggatgtttgggggtcttagggcaagaaggggtggctgcaagttgtgcttagtctactattttcaactagamctcttggaacttttttaaaactttttttttttaatttttgaataagtaacacattcacatcgtacaaaattcaaaaagtacaaagggtgtaggtttggagaaacggtgttttcttcactgaacagtagatactagagatcattgtaaaagagctactttattcttttttaaaatattggcttagtattctgttgtatgatgtaattacctactttacacattaaaatccaagtttaagtttcttctttaaaaagtgtcattatctgcctcacaaaaagaaggtgaagttgttcacctctgctaccaaggctccagcaaccatgtcttcattctctcttgcagctgaagacttacagtgagaaactggacaaagagcaagcagccctcgagaagatagaatccaaagctgatccaaggtaagaggtttcagcatgtgcttatttttgctttgatgaaagtgactttgctgatacttgttggcttaatttgtttaaacacagaacaaagcagccaaaggctattggtctggcccctgcaggtcagatcattttactgttcatccagaaagtggtgactctgccatgctgagatgtgcctgggctgccctgggttagtcacctttttcccaataccccttgtgtacagaagcagcatagttttttgtttttctatttttcaaaatggtcataccttcatagtacagaaaagggcatatggtgaaaaatcttcctcccactcctgtccccagccacccaattctcttccctagagttcactattgttacaagtttttaaacagctcgtgcctccttggtagaaaaggtgcagtcttttctgtcaagacacagctgctgctgtagttgtttgttctttcatgtagaattaattgtcattagagcattagaggagagaaagcacttaacatttgacctttttagcttcagactatttgggtggtaaagtctcctgggagctgcttatttgaatgagactatgaaatcaaaaagttgcaggcacagaatgagcagtgcttgtttgatgaacatttttagcaaaaagtacccacaggtaacttgactctataattagaaacctttgtttcatgaaatggagcaaagcactgtcagatagttgatatttttattgtcaaattagtgcttttaatgaccttaagcaacttgtttccttttcagaatggattttaaaaatagttttcaatactgtatatgccccgaatacagttgaataattggtatcattaaatatacctggtactattgaaactcattgatgtttctatagttgacattttaattgtggaatctgtaatgttt

SEQ ID NO: 4948 - DNA, 809 bp, Homo sapiens
tttacaatgaaaaaaagwaacaagattgtaaatatcaggagggcaactagcagtttctgctaccgagatcaacactctaattttatagattcaggaactgagccagtagaggtaaaatatatcccaagctttacagcccaattatagtggaactaagcttagatcctaggtcactgtggttttatggaaagagcatgagtttggaatgagacagatctgagttagagtttctgttttgccaactgctgactgtgtaatttttggaaaatttattaacctgtgtggccttgattttctcatatataaaatggggataatttctcttgaaggttatctgggataataaatgagttgatgtatgaaagcacctttcagaatatccagcagtttacaaggactaagttgcaggttacccccaacttcaagcttccagttacaattctataggatataatgtagatatatttaaacatacatagggactatggaaaaatacctggactatttctcatggtaaattcaaatctttttataaatctatatttctgtacaatttgagttgatattcaattatgattttttttcaattatgatttcaaagtactttaagagatgggcaaaagcagagattttaaggaaaagcttcaattatctagaaaattcaagttaactagaatctctcatgctctgagcatttgagttaattaactgaattatagcattattttaataacacattatatagtacccataggcttaagtgaattaattttcaaagtttggaaaaaattagattggctatttcaaaa

SEQ ID NO: 4949 - DNA, 809 bp, Homo sapiens
tttacaatgaaaaaaagaaacaagattgtaaatatcaggagggcaactagcagtttctgctaccgagatcaacactctaattttakagattcaggaactgagccagtagaggtaaaatatatcccaagctttacagcccaattatagtggaactaagcttagatcctaggtcactgtggttttatggaaagagcatgagtttggaatgagacagatctgagttagagtttctgttttgccaactgctgactgtgtaatttttggaaaatttattaacctgtgtggccttgattttctcatatataaaatggggataatttctcttgaaggttatctgggataataaatgagttgatgtatgaaagcacctttcagaatatccagcagtttacaaggactaagttgcaggttacccccaacttcaagcttccagttacaattctataggatataatgtagatatatttaaacatacatagggactatggaaaaatacctggactatttctcatggtaaattcaaatctttttataaatctatatttctgtacaatttgagttgatattcaattatgattttttttcaattatgatttcaaagtactttaagagatgggcaaaagcagagattttaaggaaaagcttcaattatctagaaaattcaagttaactagaatctctcatgctctgagcatttgagttaattaactgaattatagcattattttaataacacattatatagtacccataggcttaagtgaattaattttcaaagtttggaaaaaattagattggctatttcaaaa

SEQ ID NO: 4950 - DNA, 809 bp, Homo sapiens
tttacaatgaaaaaaagaaacaagattgtaaatatcaggagggcaactagcagtttctgctaccgagatcaacactctaattttatagattcaggaactgagccagtagaggtaaaatatatcccaagctttacagcccaattatagtggaactaagcttagatcctaggtcactgtggttttatggaaagagcatgagtttggaatgagacagatctgagttagagtttctgttttgccaactgctgactgtgtaatttttggaaaatttattaacctgtgtggccttgattttctcatatataaaatggggataatttctcttgaaggttatctgggataataaatgagttgatgtatgaaagcacctttcagaatatccagcagtttacaaggactaagttgcaggttacccccaacttcaagcttccagttacaattctataggatataatgtagatatatttaaacatacatagggactatggaaaaatacctggactatttctcatggtaaattcaaatmtttttataaatctatatttctgtacaatttgagttgatattcaattatgattttttttcaattatgatttcaaagtactttaagagatgggcaaaagcagagattttaaggaaaagcttcaattatctagaaaattcaagttaactagaatctctcatgctctgagcatttgagttaattaactgaattatagcattattttaataacacattatatagtacccataggcttaagtgaattaattttcaaagtttggaaaaaattagattggctatttcaaaa

SEQ ID NO: 4951 - DNA, 634 bp, Homo sapiens
tccctcttyggcttctcaaagttctggggttacaggtgtgggcccactgtacccagcttgaaacttgccagctgtaaatgcctttcgtgttgcagctgagtctcatggtttcttggagattctggctgcagttcccatgtgaaatgaggaagggagatccagaggtttgatctaccttttttagtaggtgggccaagtggttacatgatatctctttgtaattttaggggattcaaaccgatgacaagggtcatatcatcgtagacgaattccagaataccaacgtcaaaggcatctatgcagttggggatgtatgtggaaaagctcttcttactccaggtaaggtctcttcccttcttggtgagggagggtctgcgtgttacatgatccatctggctcttcactgtcaaatctgcagtctgcttaagcaaagttaaaaggatgagtgtctttatattgtcaaaatggtacaatgtgttgaaatagatattggttggatacctgacattatctgaataaaagacttaaaatgcttagcacagactgaagttttcatgtagacaatatgatcacctgttgcggaactctcttaggagcagacttgtgcttggtggcagtggaaggaagtggcatt

SEQ ID NO: 4952 - DNA, 634 bp, Homo sapiens
tccctcttcggcttctcaaagttctgggrttacaggtgtgggcccactgtacccagcttgaaacttgccagctgtaaatgcctttcgtgttgcagctgagtctcatggtttcttggagattctggctgcagttcccatgtgaaatgaggaagggagatccagaggtttgatctaccttttttagtaggtgggccaagtggttacatgatatctctttgtaattttaggggattcaaaccgatgacaagggtcatatcatcgtagacgaattccagaataccaacgtcaaaggcatctatgcagttggggatgtatgtggaaaagctcttcttactccaggtaaggtctcttcccttcttggtgagggagggtctgcgtgttacatgatccatctggctcttcactgtcaaatctgcagtctgcttaagcaaagttaaaaggatgagtgtctttatattgtcaaaatggtacaatgtgttgaaatagatattggttggatacctgacattatctgaataaaagacttaaaatgcttagcacagactgaagttttcatgtagacaatatgatcacctgttgcggaactctcttaggagcagacttgtgcttggtggcagtggaaggaagtggcatt

SEQ ID NO: 4953 - DNA, 634 bp, Homo sapiens
tccctcttcggcttctcaaagttctggggttacaggtgtgggcccactgtacccagcttgaaacttgccagctgtaaatgcctttcgtgttgcagctgagtctcatggtttcttggagattctggctgcagttcccatgtgaaatgaggaagggagatccagaggtttgatctaccttttttagtaggtgggccaagtggttacatgatatctctttgtaattttaggggattcaaaccgatgacaagggtcatatcatcgtagacgaattccagaataccaacgtcaaaggcatctatgcagttggggatgtatgtggaaaagctcttcttactccaggtaaggtctcttcccttcttggtgagggagggtctgcgtgttacatgatccatctggctcttcactgtcaaatctgcagtctgcttaagcaaagttaaaaggatgagtgtctttatattgtcaaaatggtacaatgtgttgaaatagatattggttggatacctgacattatctgaataaaagacttaaaatgcttagcacagactgaagttttcatgtagacaatatgatcaccygttgcggaactctcttaggagcagacttgtgcttggtggcagtggaaggaagtggcatt

SEQ ID NO: 4954 - DNA, 708 bp, Homo sapiens
tgtattaaaaaaataaagattcagctgggcacggtggctcacgcctgtaatctcagcactttgtgaggccgaggtgggcagatcacgaggtccagagatcgagaccttcctgaccaacatggtgaaaccccatctctgctaaaaatacaaaaattagctgggcgtggtggcacacgcctgtagtcccagctacttgggaggctgaggcaggagaattgcttcaacccgggaggcagaggttgcagcgagctgagatggcgccactgctctccagcctggcaacaagagcgagactctgtctaaaaaaaaaaaataataatataataataatgataataataataaagattctaggcrcagtggctcatgcctgtaattccagcactttagggttataaaatagaactaaagatgctgaaaactaatatagcttgttccataaatattgtattaaaaagctaatatcttcattaagtagattaactgccaggtaagtgagaacttgtgaatgtgtcttttgggagtggggccagacaggttgagcatcccttatctgaaatgcttgggaccagaagtgttttcagtttcagattttggaatatttgcatatatataatgagatattttgcagatgcgacccaagtcgaaacacggaattcatttgttttacatacaccttatacacatagttggaaggtaactttatac

SEQ ID NO: 4955 - DNA, 708 bp, Homo sapiens
tgtattaaaaaaataaagattcagctgggcacggtggctcacgcctgtaatctcagcactttgtgaggccgaggtgggcagatcacgaggtccagagatcgagaccttcctgaccaacatggtgaaaccccatctctgctaaaaatacaaaaattagctgggcgtggtggcacacgcctgtagtcccagctacttgggaggctgaggcaggagaattgcttcaacccgggaggcagaggttgcagcgagctgagatggcgccactgctctccagcctggcaacaagagcgagactctgtctaaaaaaaaaaaataataatataataataatgataataataataaagattctaggcgcagtggctcatgcctgtaatyccagcactttagggttataaaatagaactaaagatgctgaaaactaatatagcttgttccataaatattgtattaaaaagctaatatcttcattaagtagattaactgccaggtaagtgagaacttgtgaatgtgtcttttgggagtggggccagacaggttgagcatcccttatctgaaatgcttgggaccagaagtgttttcagtttcagattttggaatatttgcatatatataatgagatattttgcagatgcgacccaagtcgaaacacggaattcatttgttttacatacaccttatacacatagttggaaggtaactttatac

SEQ ID NO: 4956 - DNA, 799 bp, Homo sapiens
tgaaattgtcattggaatgtatgtcatagttacacattattatttgactccagtaggacaattcatgcactttatattaagagagattgcaataaatccttccatgttttaactgaaaccatcaaggtaatttaattggattaagagaaaaacataaatcagatgcagctcaaattaaaccaaataagaaagaggaagcaaaatatcaaactcaaattttctaagcagtgaaacttttgttccgttttctaagaattcatggtgtccatctctctctctctctctctstgtatatatgtatatttttgtgtatatatgaatatatttaaattgcacatttgtttatgaagtattcaaaaataatcatttttggaaaaatctagcaacttgggtatttttctatttttctttaaatattcattttttattgaaaggagaacttagagatgggtttatttataaagttataaaaataatttggacatatatatcataggagttaaattatatctcttggaataggaacttttactgaatgcaaagtatataatattttcacttcattagacaccacgaaccctagcaggggtcatagctacatcagaggtaccattttatttagaaaaattttaaaaactatggtttccaaagggaattagtgcttactttggaaagttacattaaacgtggagatgatgccttgtgtaagttctcgaactgagatgtctgtcgccgtagatcacacacttagtaacaaagtgtgacatggaaagatgagacgaaatggcattgacttatg

SEQ ID NO: 4957 - DNA, 801 bp, Homo sapiens
ttgagtggcacaatttttcttcaagtaactgacacagaaatcaaacccccagactccgccaattcagacaacgtaaaccaactgaactatctaaaaataattttggttgattacgtatttatatgtaatttgatgactattgtctcaaatgtacttcactaggacggtaccatggctgtggaaaagtttggccatctgtgaactttccttttttttttctgtttaatttttaatgaccaaaacgaagcatctaaaaccgcagcttctggaagaaccgcttgttcttgcctgtcttgtatctctcttcaaacttgaccttggcctctcatcgggccttgtgtttaagagtagggtctctgaagacatccttattgatgacagttttgtccaaggggatatccacagagtaccttgtgggcattagctgattgtggttataaactttcacaaaagacttgatctttgacctcttagagatcttcttcttgcccatggcagctgtcactttgtggggacagcggtcaattccagccaccagagcatggctgtaggggygatctaaggtaccatcatcaatgttcttcacgatgatggctttgcatccagaatagcatccagccagaacaagcaccaccgtcccaggtttcatgaacttgcccatttcagcagcaacccctcgggcctatagcaaaaaggaactttcctttttctttttaagagacagggtcacactctgtcacccagcctggagggcagtggcgcaatcacagctcactttagtctcaaactcctgggctcaag

SEQ ID NO: 4958 - DNA, 779 bp, Homo sapiens
catacatattagagctggaatttaaatacaggcaggaactgtgctgctctcaacctgtatggtctcagccaagagggttaagtagagaaaagatacactagatgttaggtcactgagatttttctgggtcttcctaagggccagcttgacttagctggcagagattggaaccaaacggcctacattgtcttttccattgtcttgtaacatctaattctcttgcttacattgttctctcctggccagccaatggctgggctcagcactcacctgttaggtttcttwcatttggttaagcaactggcagactcacctgagatctgtcttcccaccccaggtactatatcagtgaacagcaggcgcacgccattcaccgccagtggggagagcgagatcctggacctggaaggagacatgtacctgggagggctgccggagaaccgtgctggccttattctccccaccgagctgtggactgccatgctcaactatggctacgtgggctgcatccgcgacctattcattgatgggcgcagcaagaacattcgacagctggcagagatgcagaatgctgcgggtgtcaagtcctcctgttcacggatgagtgccaagcagtgtgacagctacccctgcaagaataatgctgtgtgcaaggacggctggaaccgcttcatctgcgactgcaccggcaccggatactggggaagaacctgcgaaaggggtgagtcggcctagaggatggcaagtgagggcctgagtggggctgatgtgttacagtt

SEQ ID NO: 4959 - DNA, 817 bp, Homo sapiens
gtggaggttgaataggaatttaaccatattttcttctagtacttttattattttatttttaaawatttagatccctgatccactgggagtttatctttatgtttggtgtgacatatggatttaattttatctttttctcaaaggccaccaactgttcagtcaattgattaaaacacttgtccctaccccagtggtgtgagatgccgcttctgccggacactgattttccacgtgttttggtcatttcaggaccctctagtcaattcctctcttcagtttgtctattcacgtatcaacactgcactgttttctttaaagaagctttatagtattgtttccattcattgtcacaagtttttattctaacctctgaaatggacatcaaaattctcttgtgaattaagtgggatcttaagtgaaagcacttggccttttgaaagcttttagaaaataacaatttcccttcccttattgaacctgactacttattttgattgcaccctgacttccaggaatatttaccggagagccattggtaagtaagtataaatattgggtttaacttccaaagtctgatatgggggaaaggaaaaagcttagacagctggccggcccatgtggcctgagctgcaatgccaggctctctttctccagtagcagaggcgggtgccatggggtgattccaggggcagaggctggtgccaaggggtaattcgaggctcccaggtctccagaggcctcggctcagaactagcttgctgtcctgaccaccagtcacagaaaccagccacatttaagggatggggagcaggggcat

SEQ ID NO: 4960 - DNA, 718 bp, Homo sapiens
aacttagcaaacacatgatcttgtatatagtagacatcattattgttttcccctctattcttcttttcaatttctgaatcataaggattgcctgagcctaggagatcaaggccagcctkggcaacatggcgaaatgccatctctacaaaaaaaaaaaaaaaaattatctaggtgtggtggcaagcaccagtggtcccagctactcagaaggctgaggtgggaggattgcttgagcccaggagatcaggatgcagtgagccatgatcctgccactgcaccactccagcctgggtgacagagtgagaccctgtctcaaaaaaaaaaaaaaaagcagcagactagagaagtcattaaaatgttatgaaaaaaatatactctatagttctataatcatctttaatataacgatatttacagaactctggttatcaaaacaagctcttattctcaaagaattcggtctagaagatgacttaaacaaaacattaatactaaatattggttgttatgcaatgcgtatttttctgaaccttaactgtacatgaagtggtgtgttaaactcagagaacacaaagagcaagaagaaaatgccccaccctgcccctagcttctgtaagctgggtgctctctctctctctctcacacctacacacatagcctatgagatgcttgctttttccattttcgatatctacctacttcctacatatttctttca

SEQ ID NO: 4961 - DNA, 718 bp, Homo sapiens
aacttagcaaacacatgatcttgtatatagtagacatcattattgttttcccctctattcttcttttcaatttctgaatcataaggattgcctgagcctaggagatcaaggccagccttggcaacatggcgaaatgccatctctacaaaaaaaaaaaaaaaaattatctaggtgtggtggcaagcaccagtggtcccagctactcagaaggctgaggtgggaggatygcttgagcccaggagatcaggatgcagtgagccatgatcctgccactgcaccactccagcctgggtgacagagtgagaccctgtctcaaaaaaaaaaaaaaaagcagcagactagagaagtcattaaaatgttatgaaaaaaatatactctatagttctataatcatctttaatataacgatatttacagaactctggttatcaaaacaagctcttattctcaaagaattcggtctagaagatgacttaaacaaaacattaatactaaatattggttgttatgcaatgcgtatttttctgaaccttaactgtacatgaagtggtgtgttaaactcagagaacacaaagagcaagaagaaaatgccccaccctgcccctagcttctgtaagctgggtgctctctctctctctctcacacctacacacatagcctatgagatgcttgctttttccattttcgatatctacctacttcctacatatttctttca

SEQ ID NO: 4962 - DNA, 809 bp, Homo sapiens
ggatccaagggtagttcaaaatttttgtctcaggtcctttgatgactatccaaattcaaattagaggaagggtattaggatggcaaggacagattcaaatgttagcagcagttacttagttttgggacaatctagagaaatgtgaagaagaaaataaattaaaaaaaaaactgatatgttaattatccagtaagaactatttagtaaaaggcataacccctattctggccagcctgtagagtgagcaaagaaagaaaacaaaaccatatgccatactgcgagaagccagatgttggaggcgggactggagaaaagagaatccagaggatacagcaactgcagaaataagggaatcaggaaagcccagaaggctgggaaataatttgggaatgacctaaaactgacagattgaggggatctcagatgtgggaactgatgatacgtacatttcaataactttctctcatgctaactcattgcatttwttttattttattttattttattttttttgagatgaagtctcgctctgtcactaggctggagtgcattggcgcgatctcggctcactgcaacctccaactcccgggttcaagcaattatcctgcctcagcctcctaagcagctgggactacaggtgtgcaccaccacacccagctaatttttgtatttttagtagagacggggtttcaccacgttgaccaggatggtctgagtctcttgacctcgtgatctgcccgcctcagcctcccaaagtgctgggattccaggtgtgcattttctagtagttgctggtgctacttattctg

SEQ ID NO: 4963 - DNA, 805 bp, Homo sapiens
aataaaatttctttattgtttcaggcttggcttagagaggcagaaaaggagacaagcccagagccagggagagcaaagagaagagtaattaacaagatgaataatggaaacttcctaggagcaccaggaatgataaattgaggtgcatacctggcttctcttcaaagacggggtgacggaaaaagcagaatttctgagcccaggtttggggagatgttgatactttggtatggaggaaagagcagggctcaggggagagctggattcttctcctggttttgctatttgaccatgggcatgtcacttccctgcctgcctctgagcctccattttctcctttataaaatcgagggatggttaagggagcgatgccctaaagtcccctcagtggctaaggctttgcatctttgtgatgttagaatctgtttttcactrtttcctctcctttcacaccagggataataagattatagtctttttgcggcactttaatttaacgaggctgttcaagcacatcccataaaaacatgggcggtgtgccaggagaacagtaatgtccccattttacagatgaaaaaactgaggcccaggcaagctaagtccccattgcttcagttacaactactagcagcccaaggtcacacctattatgaaacagataccaggctgaaccccggttctgcctctgagtcctgtgttcttcccaccttataatgcagtttcctagggcagatgatgagaaattgagccaagttcacaaatccagtcacctgggtctcactggcatctgtgccgagcagcacct

SEQ ID NO: 4964 - DNA, 805 bp, Homo sapiens
aataaaatttctttattgtttcaggcttggcttagagaggcagaaaaggagacaagcccagagccagggagagcaaagagaagagtaattaacaagatgaataatggaaacttcctaggagcaccaggaatgataaattgaggtgcatacctggcttctcttcaaagacggggtgacggaaaaagcagaatttctgagcccaggtttggggagatgttgatactttggtatggaggaaagagcagggctcaggggagagctggattcttctcctggttttgctatttgaccatgggcatgtcacttccctgcctgcctctgagcctccattttctcctttataaaatcgagggatggttaagggagcgatgccctaaagtcccctcagtggctaaggctttgcatctttgtgatgttagaatctgtttttcactatttcctctcctttcacaccagggataataagattatagtctttttgcggcactttaatttaacgaggctgttcaagcacatcccataaaaacatgggcggtgtgccaggagaacagtaatgtccccrttttacagatgaaaaaactgaggcccaggcaagctaagtccccattgcttcagttacaactactagcagcccaaggtcacacctattatgaaacagataccaggctgaaccccggttctgcctctgagtcctgtgttcttcccaccttataatgcagtttcctagggcagatgatgagaaattgagccaagttcacaaatccagtcacctgggtctcactggcatctgtgccgagcagcacct

SEQ ID NO: 4965 - DNA, 583 bp, Homo sapiens
aagctaagttccatgaatagatgagtggataaagaatgaaataatatcctttgcaggcacttggatagaactggaggtcatcattctaagtgaagtaactcaggaatgaaaaactatactgcatgttctcacttataagtgggagctaagttatgggtacacaaaggcatacagagtggtataatggacattggagactcagaaaggtggagagtgagagtggatgaagggtaaaaatcctatatattrgatacgatgtatactactctgatgatgggtgcactaaaatttcagacttcatcactgtgtaattcatctatgtaacccagaaccacttgtaacccaaaaagctattgaaatttttaaaaaataaatttaaaaaacacaaaatactttgtactgtattttttaatttgttatctctctcaatcactcagtaactgtaaactctgagagatgatatcttctttgtttacatttctctcataaagcaccttgtctcactataaataggatctttagacatacagaagactaacattgcagagacgaagcacaaattctccaagtcctccatcactgg

SEQ ID NO: 4966 - DNA, 819 bp, Homo sapiens
aattcttatagactggaagtggcacatattccaggcacatgcttttctttcctgcctgtagaaaccttgccaacattgctaaccgagggcacatcagtatgcttggccaagaatccatctttgacaaatgaggtgtagtaataagcatctgaccagtggtcttatgacactacatgacccaaacacttctggcagatggagtaatagaatgttgggggtttttttgttttgttttctttttctttcttttttttttttttttttgatacggagtccctctctgtcacccaagctggagtacagtggcatgatctctcagctcactgcaacttccacctcctgggttcaagcaattcttctgcctcaacttcccgagtagctgggattacaagcacacaccaccatgcctggctaatttttttgtatttttagtggagacggggtttcaccatgtttgccaggctggtcttgaaatcctaaacctcaggtgatttgcctgcttcggcytcccaaagtactgggattacaggcacgagccaccgtgcccacccagaatagtgttttgaaggcacagttgatgtaccaacttattgatgataccctgtgaggttgggatggcatcctgaaggaagtggtgtacaactaattgaatgaccattacatggtatcatccccagtaggtagaatacctgcgggctccatgtatgagtgaggctttagcacaactgcttttcattttcagcttgcatccacacatggagccagcatatccattaactaagctcaggcttttcccttgtttattagatgatgacaaga

SEQ ID NO: 4967 - DNA, 796 bp, Homo sapiens
tcctgcctcagcttcctgagtggctgggactacaggcaggcagctaatttaaaaaatgtgttcgtagagacaaggtcttgctatgttgcccaggctggttttcctgccacttcagaggaaggactcaggtttcctttttctcctacttttaagagtttttattaggaattatctgttgaatgttatctaaaacagtcaataaaatgtattaagtgccagctgcatgcaagaccctaagttagatacagtcagccctcttcatcagcaggtccacatcttcagattcaactagatcaggctgaatatttgaagaaaaaaaaaccaataaaaatacaaacagaaagtayaatataacaactgtcaacaatgtacaatatgtatacattttattagtgatgacttaaattacatggggccaggcatggtggctcacacttgtaatcccaacacattgggaggccaacctgggcagcatagtgagaccttgtctttattaaaaattaaaaaaaaaatagccaggtgtggtagtatgcacctgtagtctcagctactcaagaggctgaggtgggcggatcactggagcccaggaggttgaggctacagtgagctgtgatcgtgacaccgcactccatcctgagtaacagaggatgacactgcactccagcgtaagcaacagagggcaatcctgtcgctaagtaaataaagtataggggggatgcgtgttggttataagcaaatattacaccattatatgtaagggattgagcatccacagattctggtatggtgtgggggc

SEQ ID NO: 4968 - DNA, 860 bp, Homo sapiens
ggaaatcagccattggtaactgaagattacagattgttttttaaaaagcaaatcttgagttcagctcaaatgttacccttaaaactggattgtattattttgccacatcaaatcaagtgcctttttggcatcaaagaaagcagctcccaagctaattcataactcaagtgctgtcaatttaggtgattctaaagctttagctttttaaaagctaaaataataaaagacaattgtgcttatattgtttctaatgacaatttkcccaggtggttttctacacagttttttgtaaagaccaagacagtagttgaaaaccaaaaataaattctttttcttcaatccatgctttattacggttacagtagaggaggtggttaaaagtacaggctctgagctcagctgcctaaagttatattccagttctcttctctttaataagagaatatttttctaaaatatgtggacaatggcctgactttattgtgtagtttgatttgtaaacaataaatattcttacagaggacaagagactgtgctaatatctatagacaaaggtggtagtggtgattgagaaagtcacatatataaataaatatactatacaacactgatcctactctacaggaacttagaagcttttggtaattttatccccatcacaaaccattgagaatccaacatgctatagattgtactatgagttaagaaataaactcttcgggttgaactattgaggtttgggggttgtctgctatagcaattgtagatatttaccttcactaataaagttggattctgaaatttccagtaggactaagaatatgaggtttgaaactgctgtaaattccagttttgttgga

SEQ ID NO: 4969 - DNA, 860 bp, Homo sapiens
ggaaatcagccattggtaactgaagattacagattgttttttaaaaagcaaatcttgagttcagctcaaatgttacccttaaaactggattgtattattttgccacatcaaatcaagtgcctttttggcatcaaagaaagcagctcccaagctaattcataactcaagtgctgtcaatttaggtgattctaaagctttagctttttaaaagctaaaataataaaagacaattgtgcttatattgtttctaatgacaattttcccaggtggttttctacacagttttttgtaaagaccaagacagtagttgaaaaccaaaaataaattctttttcttcaatccatgctttattacggttacagtagaggaggtggttaaaagtacaggctctgagctcagctgcctaaagttatattccagttctcttctctttaataagagaatatttttctaaaatatgtggacaatggcctgactttattgtgtagtttgatttgtaaacaataaatattcttacagaggacaagagactgtgctaatatctatagacaaaggtggtagtggtgattgagaaagtcacatatataaataaatatactatacaacactgatcctactctacaggaacttagaagcttttggtaattttatccccatcacaaaccattgagaatccaacatgctatagattgtactatgagttaagaaataaactcttcgggttgaactattgaggtttgggggttgtctgctatagcaattgtagatatttaccttcactaataaagttggattctgaaatttccagtaggactaagaatatgagrtttgaaactgctgtaaattccagttttgttgga

SEQ ID NO: 4970 - DNA, 596 bp, Homo sapiens
cacctccccctccttagtttgtcagcaaacaggaacctctggggctgctcttgaaagggtgcccactgccatgaggaggcctgctgtgtggggacatcaaagctttgggtgatgtgctgctgatgagtttgcaggagaaaggagcaggccgcatccctcagaagggacttttctattactggtggaaygcaacagaattctctgtctttccaaagagacacaaggcagctagaccaagccaacatctttcccagtaggaaatgagaacagatcacccattccttaatttatttttctcttaaatttctggagggaagacattttttaaaaaaagaaaaaaaaatttaaaagaaaataaaaacttcttggagagtgaaattggaggctaccagaccatcctgtggggtgcgtttggctgccctggcccctggcctcccaggcctttggtctcaccgcctgtacttttgaggaatttgtctcaaccacattctctctttcccttcattatcagaaaaataaaggtcaaataaactggattatgaaaaatgaaaaccaaaacccacaaaaacaaaaaacctcatttatttcttgggctt

SEQ ID NO: 4971 - DNA, 833 bp, Homo sapiens
ttatttctaaagttttgaaaataaaaaaagaaatataaccacttggtgtctttgttttccaagaaagcagaaagaaaaaattatttcctaggcttccatctttaggttatttttctttagtgggctatgttcaatctcagcacaatctcattttcctcatagattcaactgtccatgcatatgtttatatgtttttttaaaacagagtatttaggccgggctcagtgcctcatgcctgtaatcccagcactttgggaggccgaggcaggtggatcatttgaggtcaggagttcgagaccagcctgaccaacatggagaaaccctgtctatactaaaaatacaaaaactagccgggcatggtggcgcatgcctgtaatcccagctactcgggargctgaggcaggagaatcgcctgaacccaggaggcagaggttgtggtgagccaagatcgtgccattgcactccagcctgggcaacaagagcaaaactccgtctcaaaaaaaaaaaaaaaaatagagtgtttatctttgtttatatgtttatttaaaatagagagtttatcttcacaacccaaaccttattgtatcttggatgacctatgaccgtatataaaaaactatgacttttacaacacatcaaaaagccaattaggcacattttaaaagaaagttctcagaatttgttgagctgaaaacagccaacttgactagaagtgagacaatcaaaaacaaaaccatacaagaaaatgctgcaattgcttgtagctttccttgcacacagtttcagaatcgtcttggataaatgaattgtgtatatgcacgcaatggaatact

SEQ ID NO: 4972 - DNA, 1945 bp, Homo sapiens
tcagatgactcttacacacattgaagggaaagtgggtagtcatcaagttcacgaaacagctatgtagggggatagacaagcctgtggaaggctgggacaattctttttggacctattacttgccttaccaatacttgccataaatgcttgctctgccatctccgtatctaattagtagtttattctgacttttgatgctcaatgtctctatggctattgtggcttcccctttgacacttgactgctctgtagaatgcagataggtgagacatactagtaactaaatgtcttcatattagttggcctgtagaaaggtagtaaggtcagcactggtggccctgtctttaagcatactggtccatgatcagtttgttaaatggataaacagatgtagttatagactggttggcagataacactctagctggctactaaaaaatacacaggcatcctccttttctaattgcttaggaaactgagctctctgactttctctgggatgttctcctcctccttgttattcctcctgctcctctttattctcactctctgtctctctctcgcttcctacccttaatgggtctcccataatttgtagcctgatcattattttaaaatgtactacatgttagtctatctcacactaggatttttgcctcacaaattggtcgcattttccttatagatgtcttggccaatctgccatttttcaagcaaaccctcttttcttaattccatgacctcaatctcagtttctactattaaaaatattttccaattaaataaaaatcttttcttcttcaaagctctttcagtttggtgagaaacccttttagtgtcagtgtgatagtattacctaagggatgcaagcaccattgattttttttcgttgactacttgccattggaataaggtcaaagggattcggtaactggtttcctgtgattagcaccagggttatttggaggtgtcatggatcaagtagaaaaatggaagtgatgcaaagactggaccaactcacaaggggtgaccagcctccaaaatatcagcagcagacatacagaaacagtcctaatggcgtccaggagggcatcattcctatgggctggtggttagagatgtcccataggaaagtattggaaataataagacattaatgacttattatgagtttatataaaaacctgactatactaatggcaaaaacagtggtcagatatccatgtttatggaaactaactaaaacagatgattcctttcctgaaagattgaatttctcctaattaatggggttatttccatgttggggtgcagataatctttcttcctagatcataaaatattatgagcagaaaggagcctactcctggaaaaagagtcagataccaacatagttaacatatcctaaaagttactcttcagagtttctttctttctacaattctaagctcagagctttygcatttaactttttccgcctcacaggtcattttcatcctctattactttccaagagtgaaatctcgtttcttccacttccttatttctgtctcatgaatcatttcctccttgcaagaaaaccatgccaaaaagccttcattatttccatgacattgcttcttcatgttctattgtagtttttattttaccttggggactgcaacacccaattcctgaactgctttgtgttttttatgtgtgagcaggcacatgttctttcagaaggaggagttaaagctttcttttcaaatcaacaaataacattggctagctcataaagcctcacaaactccagatgtgttttacctggaatctgattatgcacagacctattcagctttgactatcactaaataacaaataagtttaggcagaaacaggagttattcaacaaaatgtttcaggacttagactctggtttcagacagaccctggttcaaattct

SEQ ID NO: 4973 - DNA, 615 bp, Homo sapiens
gaaaatcctgatgtcctcattcaagttattggatcctgacttatttgatagaagatttccaatatattatattgtttctattgttgttgtcaagagaatttaactttttgcacttacagctgaagattttctgagtaatacaaggaaagaagcakgaactcatttagtggattaaccaaaaagaattctgacttcaatggcctcaaagtagaccttgaggcatctctgtgggactctagtacttcatgtaaccaattttaaaaccaccagtatagtagtatagattctagagctcaccggattataaactcaatgagggcaaaaccatagttggtacctgttttattctctaccatattcttgcacctagcacagtggctgggtgtaaatacacaaatactttgtatgtagagggaatgatggtgctattttttaatttacatattcttaacaaagtggcgtgtttcccttcttaaatatgaattgcttcaagagctgctgaaaggttaatttggaaaacaatgtgtatgatgtctagcactgttccctttgcccttcatccctccaaaattcagtaggtgtctgttgcatttactagaatacacatgaggtgga

SEQ ID NO: 4974 - DNA, 413 bp, Homo sapiens
caactgcctccggggccaagtggactcagaagaaagggtcatcaggaaagccaggcgtggggcctgatggcgacttctctagccctggtagtgagtagcggccatgcttctgtcccttgactttctgggcaccaagcaccctacgataattgccctgggacggtctgtcatgaacacctacagcttcaagcctcttaccagctcaagtttcacgcaagaagctgatttcaagcacccagccagcctcccccaccaccgccctacaagctctacctggcagacccaatacagccagctcctcatctcctttctgtggctcttcttcttcttctttctcttcytcttcttcttctccctctccctctccctctccctctccctctccctctccctctccctctccctctccctct

SEQ ID NO: 4975 - DNA, 852 bp, Homo sapiens
ggcccctaccaggagtagcccgcgaggcccgcggtcagccgcccgcggctcggagccactgtgatcgtgctgaggtttaaagaaagcaacgaaatataccccttccttaggttccgaggaaaggcgccggctggagcgcactagttttgggggaaagaatatgcggacgtcccggggtgcgcttcgccggcgtccgcgtccatagcccggcgctgccctagtcccggccagtccgctgtgtgccggggttggccctccagtgccggggcgcgtgaccttgccccattcctccaccttaactcattcctccctccaccaggccctgtttcgcctgcagcctcagcacctgacctgggtccggcgcagcgaggtgggacggcagtgcgctctggaatgtgccagcgcggtccccggggtacgcctcgcgggaggccggcgctctcggttccagatgctgccaccattctcggggaagttgggaggtatcaagtagcacggattttttttttcctaattagagtatttatctaatcccaaattgcaggcgaattttcttaacgctcagcccataaaaccccaggattaagaaaagaaagaggagagggggagagggaggagagtggagagggagagagactgggatgaaagtttcttgaaagcagcgcagaggattgaggcggccgtcgctaggcaaatgtccaggtgggagatgctgggccagaagccatgrccgttccagcatcggccgcggtgcgggaaggggaagtggggacaccactggaggaggtgaagccgtccagctcaaggccctcgagccgggaaggggcgagggagctgggtgtggagacaagg

SEQ ID NO: 4976 - DNA, 623 bp, Homo sapiens
agtgcactgaattctgtgcttccagtggtgccctattctctctttggagacagaggtcagcacaatgagcagaaaggacagacagrtttacttggtggcaacaaaacaaccattcttcttccctggacttggagacattctgagaagattaggaaatattcctgagaaggaatgccaatgggagtgattggacttcatttgttccttactctagaagactgcactaattgaaagaccgccttgtgccaagtgatgtgcttggtactcaggatacaatagctggagcacccagactccagaacctcccttgtaaagcttactctctgcaatggaggtggccggcaatcatgtctgcccctccagtctgggaattctaaagggagaagctcttgatcctccagcaacacagctttgggcaagacagttaacactctaagaagctggtagaacaactcaaggctttcttattccaacaggtcaaagaggcagaagcacaaagagatgacagtttcaagttgtggaaaagtgctggtaactccaggttgggtgcagaccctgagaccagtaaggggccagaaaagagaaaaggggcagcgtctttgcctctgggtggccacagcttt

SEQ ID NO: 4977 - DNA, 623 bp, Homo sapiens
agtgcactgaattctgtgcttccagtggtgccctattctctctttggagacagaggtcagcacaatgagcagaaaggacagacagatttacttggtggcaacaaaacaaccattcttcttccctggacttggagacattctgagaagattaggaaatattcctgagaaggaatgccaatgggagtgattggacttcatttgttccttactctagaagactgcactaattgaaagaccgccttgtgccaagtgatgtgcttggtactcaggatacaatagctggagcacccagactccagaacctsccttgtaaagcttactctctgcaatggaggtggccggcaatcatgtctgcccctccagtctgggaattctaaagggagaagctcttgatcctccagcaacacagctttgggcaagacagttaacactctaagaagctggtagaacaactcaaggctttcttattccaacaggtcaaagaggcagaagcacaaagagatgacagtttcaagttgtggaaaagtgctggtaactccaggttgggtgcagaccctgagaccagtaaggggccagaaaagagaaaaggggcagcgtctttgcctctgggtggccacagcttt

SEQ ID NO: 4978 - DNA, 654 bp, Homo sapiens
agagagaaataaggaaaagtaggggtgtcttcgctttgtgctgccccagaagcagacccagatacaagaatgggagtgcaagtttactatgaaggtggagaaaactctgatggcggtgggaatgggagagagaggagggaagtctgtcaggaaggaagtgaagccacttactgccctggacactaggagcttagtccctcttggagctcaggaagctggagtggaacacacacctctgagtcctcttgccctggggtgaagatgctggggtatttcctatacgactccaccattcggcatgggttggaggctgtcccactccatgcctctgtgtaggttgcaaggagaaacccactttctcaggtaaaagaatgcaggtgctgccctggggtgctttgaggtggtaagggatgggcagggtaggaaatcaacactgtctgctacagattttaagaaaggaaagctatgatcttcagtcctcctgatggcgtgtgagacacctaagcaaggaacatcggttctttrgaagttgcttcctgattgccacagtttatccttttcaatgagctgctcccaaagcctgggccacagatcctcaccacctggaggctgcaatgtcctttgcccagctaagcaccgccgtctcctgagcct

SEQ ID NO: 4979 - DNA, 587 bp, Homo sapiens
cactggattaacatgtgatccgaagatcatattttgcacctacccrgatagattcatcctcatgtctctttcctattctcttttttctcaaatctaatcttcctccagacttctgatcattttccactatccttgaatgtgtgtatattcttaccaggaattatttctcttaaaaacaaaaggtgaagtatcaattgtattgcctgaagaattctgcctgcctaattggagattgtcttctcactactatcttttagtgtaatcctgagtgaggctgtagtgcagaatggtcctttttattttttttggattgcactataaattaagccaaaccaatacatttgtgaacaaagcttatcctttttcctcgtccttcagccagataataggacacccacatgtgagtacagtttggttgagggagatgtagcagtattgcagtggtatatggcttgggagtctgggccagataataggacacccacatgtgaatatagtttggttgagggagatgtagcagtattgcagtggtgtatggcttgggagtctggatcacccgttcatgtagctcttgtcctgtacatgcc

SEQ ID NO: 4980 - DNA, 587 bp, Homo sapiens
cactggattaacatgtgatccgaagatcatattttgcacctacccggatagattcatcctcatgtctctttcctattctcttttttctcaaatctaatcttcctccagacttctgatcattttccactatccttgaatgtgtgtatattcttaccaggaattatttctcttaaaaacaaaaggtgaagtatcaattgtattgcctgaagaattctgcctgcctaattggagattgtcttctcactactatcttttagtgtaatcctgagtgaggctgtagtgcagaatggtcctttttattttttttggattgcactataaattaagccaaaccaatacatttgtgaacaaagcttatcctttttcctcgtccttcagccagataataggacacccacatgtgagtayagtttggttgagggagatgtagcagtattgcagtggtatatggcttgggagtctgggccagataataggacacccacatgtgaatatagtttggttgagggagatgtagcagtattgcagtggtgtatggcttgggagtctggatcacccgttcatgtagctcttgtcctgtacatgcc

SEQ ID NO: 4981 - DNA, 520 bp, Homo sapiens
  misc_feature (1)...(520): n = A,T,C or G
caggcctccatgacgctattcccagtggagtaaagggatcgccttcactggtctacctgacacaagggagggatgggtctgaagtgttcctgccacatcccattgtcccacatgatgtctggcacactaaaggtgcccaatgagcatttttaaatggatgagtgagctgtgagaaatttatgcttttaaaaataacctttaggataagatgtgtagtctagttaacagtaacatcccagtgccaatttcctggctttgaaatatactgtacaacaccgatgtaagatgtctccgttggggaagctgggtaaacggtatgtaggagtctttgtactattttwgtaacttcctgtgtatctataattattccaacctaagaagtcaaaaaaaataataacctcttatccagatcatgacaannnnnnnnnnnnnnnnnnnnnnnnnnnnnnnnnnnnnnnnnnnnnnnnnnnnnnnnnnnnnnnnnnnnnnnnnnnnnnnnnnnnnnnnnnnnnnnnnnnna

SEQ ID NO: 4982 - DNA, 791 bp, Homo sapiens
ttatttgcaaatacttggggcagggcgggagagagaaagagcgacaccaaaatctgttcagtgctttaaagttctcgtggtgttaactggccctgcccgttgccacccacaggaatttctcaaacagaatttgaagatgaagagctgagagtgaatctcaggcgaggccttccacccagaacctggaagattccttaaggatgttataggaaaaatgtatttctgatgtggtaccagcagcctcacccagagctgttgtgataggcatagctagagctcctttcttgcaaaaccaagaagcttgtggtttcctaaatcctgttctccccttcttcctccttgcagccatttcgttgcttgcttgctgcagacagttcgttggctgcccaacaaccagccrtcccacttcttccctgctaacagaacgtccatcagtagaaatccattcgcctcagggagggaggcatccactcctgtagcaggagtgtttgctctaaatcttcatgttgttccatctcttttgacagtgctgtgttagagatcagcacgtgagcctgttctggctaaagagatataggaagaagttggctggggaaatccccttctcagataaatgacagaaactcagagggataaagtccttatgtagtactcctgcttcttcattttaccttggaaagctgatatgaaggcaaaatacctaaggctacagcagccatctttagaccatgaggcaatgagaacaagaatagaagccactagctgagcatgtcctccttcggacaaggcag

SEQ ID NO: 4983 - DNA, 813 bp, Homo sapiens
cccatgatccaatcaccttccaccaggccccacctctaatactggggattaccattcaacatgaaatttgggcagggacaaatatacagactatatcaccttataaaggtaatgctttccttccttctttgcttagttttggtggctaatggctctgccccacaaatcccctgcctcccaagagaactctgccaagcccatcagaccctactccttcgggcactgcccaacatcccctcctcaaagccccctctgccctttacacaaccagcacccagggctcaggagcaacaggtgacaggaaacccctcaagtaatggcagaggcccaaaaaggaaaattctggagtggttaggaactttgtctcattctttagctgtgataggttagtatctggtttagcctaggcaataataataatacactttttcatcacttactgtgtgccaagcactcactagttttatcttacataactgacayaacaatgctatgaggcagctcagccatattctctctataataccgataaggaaagtaatttaaagattttttttctctctgtacaacaggcacttttattagtggctggaatgcagttatccacaagagtgcacaaacaaaatgggagaggaggatcaggtagggctggcagctggcaagggaaatgggagatacctggctggcgggttctctctgtttgagatcctgggacagtgctatcaagtaaagagaagaagccgggggccttggggtattgcaggtgggaatggaaaaccaggtcctctgagttcaacaggtttggcaaaagga

SEQ ID NO: 4984 - DNA, 793 bp, Homo sapiens
ttttctgtccctgaaaaaataaaatcactaaattaaaatagatacaaaaagctatctcctggttgagcatatctttagtgagagttcatgaaggtttataccatggttaaaaaaaaaaaaagattaactaaaagcctcaaaattgtgtgcttagtttattaacaaaagagttacagaaactaaaatctcaagctctaggctttaagctttcttgccaataacttctatgtttttgacttctctaacactggaaattaaaagaaaattattaatctaccttccttacattttctccacattttagctatgattttcatacagggtcatgaagagragtgaggatggaaatggggaggagggagcgctgtttgttaatggtttgtaaacagctcaggcattaaattacttggttagtgaagaaaattctaccaaggcaaccaggctgaccacagactggagggctgaggggtcatcactgagtcatctctgccctggggccccaggcactggagctgctgcttgcagaaagttctggggctctggaagagaaatttttccttcggctcataaatgggtaaaaagacgttaacaaacaagcagactccactttggaaatgatagcccttctattgcagagtaatttgaagctctctgaagctcactctaatgacttcataaatcaaagctgcagcttgtaaaggtaagatatttttctgtagactttgtaggcagtggtgagactcggagtttcataaacattatgcatagagatgccagtgtctacatcattcct

SEQ ID NO: 4985 - DNA, 1259 bp, Homo sapiens
cagtcctttccacaacattatatctttgattagttcttcccattttcaatcctcccatccacaacaactgtcactccataataagtagaaaacatatcaagagagacacagggagcaaatctggcagttagaatttcatcccaattcagagatctttgttcttggaagttctgtctatgaactttgcttttctcttccacgctacttgcaccttgcgaaataaggtgcctaacttgcagcagtgaaaactgcccagatgaatccagcctctttaggcaagctaatggcaaggataatgttcagcttgaaacaagttttccccatcttccagcatccacatagccagtctaggacaagaaaagaaaaaaaccttaaatactttttattagaaaggaaaggtacttgtttaactaactctactgtgattgaaagacaatgagaatggattttcagctactggcactatacataaatgaggaaaactcagaacattgaggaaactcagaacacgatacataaacgaggaatgcaatgcccaggagaataaagaaaagggcaatatggcataggaagttttgacatatctgttgaattttatatctctattccttaggctggggatccaggacaagccatttcagttctgatttgtatattctctttttaaacctttcacaaacacattggtttgtgatttttttttttttcagagtagcattggtagctttgatgtagaagtggaaaaagyatgtgaaggattaatgcagttcctgcccatcccccacccccaccccccacaatctgtgttataattaggactttagagagttaaagattttggcatacagtgcttgaagggatgaaactagtagcagagctcgaatggattggaagacaagaacattgagtgaaatgggagacaatgaaagacaaaagtgggttctcttcgggtttgagaaataggtatagcagaagtaagggggagagctgggagaactaaaattgttggtaaattgcttaggatatatgaaattttttgtgcgttgacaaggtatagattttgactatgagtgggtaggctgaattacactaagacaaattgaagaggtttaaaaaaaaacttgaaaaaaccctgtcttgttttcagatgggttttctatatacttgctaatattactttaagatgagggtagaatttttggtggagaataattttattagtcagggtccaaagcctttgaattttgtccaagtgtgat

SEQ ID NO: 4986 - DNA, 819 bp, Homo sapiens
tcgccgcccgctcccgccctgcgctgtcggttcccccgcgcctgggcggaccctaaccccacccggccctccgcaccgcagccccggctgcaccaggtcctctgcagactggccggacagcctggccttttccagctcaggttcctaatctgtaaaatgggcggggccgtgggaaggggaggaagaggcagaaaggcactggactccaggaaaggggtcggggaacgtgcaggggttttggcgccagacacaccacgttccggccaagtggctccttactggctgtgaacgtgggccagtcactgtctccaagccgcaatcttcggactcattccggaaggcagtgtagcctaatggtggagggttccgactctggagccagggtkgaagtcctccctcttcctgtgactttgagcgagtgacttcaccccttgggcctcagcttcttcatctccaaaataatggcaatcatactactgttttagacacagtaagtgttataaacgtgtttttgtttgtttgtttgagacaagagttttgctctgtcgcccaggctggagtgcagcggcgcgatctcggcccactgcagcctccgcctcccgggttcaagcaattctcctgcctcagccacctgagtagctgggattacagcgtgcaccaccacgccaggctaatttttgtattcttagtagagacggggttttgccatgttggccaggctggtctcgaactcctgacctcaggtgatccgcccgcctcggcctctcaaagtgctgcgattacaggcgtgagccactgcgcccggtagtaaacgtgttt

SEQ ID NO: 4987 - DNA, 759 bp, Homo sapiens
tcccacatcagcctcccatagcactggaatgacaggtgaaagccaccttgccaggtcataaatttatttctttagattacaaacttgaaatacaagtaatccaatacacagygtaaatccatgcatgaactttttccgattgacaacgagggcaagcagggttggattatggaggagatcagcctcagagggagcctgcagggacagacggcagcttgctgtgctctagagaactggcgatgaggacggccaaaatgagaggtccaaagaggccccacagcatagctaagggctgtcctaggggtctcctccattccagcctctgccctggccatagctccatagctcatcactttgggatgtagccttgtggttccatctgtctttttttttttttttttttgagacaaagtctcactttgttgcccaggctggagtgcaatggtgcaatcttggctcgctgcaacctctgcctcccaggttcaagcgattctcccacctcagtctcctgagtagctgggattacaggcgcccaagaccacaccaagaccacacccagctaaattttttttttgtatttctgttagatacggggtttcaccatgttggtcaggctggtcttgaactcctgaccttcaagtgatctgcttacctcggcctcccaaagtactgggattataggcatgagccaccgcacccggccatatcttgaactttctctatcaattaggaagtgggcttaggtttttcatgcctgtg

SEQ ID NO: 4988 - DNA, 851 bp, Homo sapiens
ttattatcacattcctctcgtaggacacactccaagagaattacatatttctagaaaaaaaccggcaatttgaagaaggtagggaacaatttaaaacagtcttcaatagaaattttagcacataagaacacagaaaatatataatttagttcatgcttggtaaaatgtaacatgatgttcataactacttggaataagctgaacaaaagataggtgaaaacaaattgaacggctgtaaatacgtgcaggagtcaggtgtcatcaagagaaatgactgggtgctcttcaactggcttatgatgtcattagagggtcctgttagacttactgatcttagaaaaacctgagacattagcaaaaattgtttaaaattagtcacagaaaagatgtcgcagtttaaaagactatattgaaagcaagtgtttgttacatgattacactaaactgttagctagcagcaagcagcttgttaaattagtgaaacacagtcaacacaagcttctgtaagaacgctccacatgtggcaaataaaaccycaccttttggggtgtataggtagggaggagacagaatataccatgacatcgcttctgttttcttgactcaaaactccgaccacagtgaagataaaatgtggtgccatgcagtacccccaaaaggtgggaagttcttatcgcagccacatgaaatgacagggaaggcctgaagccacagttctccatgtgcagagagacgacccacaggacaatagtgaggcactggctcaactcgggagtgttctgagaagtcctcagaggatctaactattagcagtgcccctgcttcaccaaccctaatcacgtatacactgt

SEQ ID NO: 4989 - DNA, 1576 bp, Homo sapiens
ttgaggcactggggcacaggacaggtgtgttttgaaataggggagtggggaagagaagcagatgacacaggccagtggtattccacaacactggatgccagaaacgcagcacacaaaataaaggagaaggaagaatgaagccctcacttgctctatgaattttctctgttgttcagtttgagtgaatctgaccagatcattgccttttagaagcatatgaccaatgatacaataaaggtatcggtaaacatattgaagacattaacaaatacctatgtttaagtatttccatattggtaaatgcagtctgtggggtgctgagtgatggggaactctgtgaagttcatatttggatagggttcctgaaaactttcctatttcctgggaaatcaggaattgttacctggacgcagtagactccaggagccctcagaatgrcagcacagaagactcttttgcagtcaaaagtgtctagatgaggggcaggggattccaggcatagggggaggctaaagagagggcttggagggtggaagagaaatctgtaggttgatcactgatctatagggaaatcttgcatacatcaccaagacgctgttctgtgttaacacgggaggatagtaatgtgttgtaagaaagcctagcaaatatattctactttccctaaaatcagcacaaatgacaggtcctttagtgcacttggaatctcactgaaggcctcaggaggaagcatgtgccttctgagcaggctttccatgcaagtgaaagtgtagttgctaaagatctgagccatcaagtctggtatgagttgacacagtgctgctgtgtgctgtgattttggcaaaggctctggatccttctgaatatcttgtttgcaggatagttcctgaacccatgcagtttacaccccgtgggagaggagctgccactcaccggctggttgcttgagtaagatagtttttatttctcttgaactttgaataatttttagctgaattaaccttgagggggtcatttctttaaaattcatgaatatgttcattaaaaacaatttccaaattcaataagacattaaaaaccatcaagattctacagatttgggggtttgaccagattctgcctttgaggaagtttgtttgtttatttatttgtttacttattttgagacaagttctggctctatcacccgggctgaagtgcagtggtgccatcttggctgactgcatcctccatctcctgggctccagtgatcctcctatctcagccttctgagtagctgggactacaggcatgcaccaccatgcctggctagttttgtatgttttgtagagatgggattttgccatgttgcccaggctggtcttgaattcatgagctcaagcgatccacctgcctcagtctcccaaagtgctgggattacaggcataagccaccgcgcttggtctaggaagttgattcttaggattttggaggatggagatggaaaagtatgtttaaattctgaggctcagagctgtaatttataatcatgattcccaagtggttaaaatttcagaatatccaaagctattatttt

SEQ ID NO: 4990 - DNA, 679 bp, Homo sapiens
gcttcatcttagatcgtaagacagcagctatagacatcaggactaagactccttcttcaggtccagcgggagagagtgggcatgtatttttttttttttttttttgagatggagttttgctctgttacccgggctggaatgcagtggcgtgatctcggctcactgcaacctccgcctcctgggttcaagcaattctcatgcctcagcctcctgagtagctgggatcacaggtgtctgccaccatgcctagctaatttttatattttttgtagagacagggtttcaccatgttggccaggctggtcttgaactcctggcctcaagwgatccgcccatctcagcctcccaaagtgctgggattacaggcatcagccaccctgcccggccgagagtgggcattctatagtgcatacagaaaagcaaggaaatcccttttccagaaattctcaaactatctgttaccttccattggccctaattagttacctatccatccctgaccgaagcattttggcaaaggaaataggagtactctgattggttcggattgatcgggtctcaccactggagctgggataagggtaggataagggaggagggtagatactagaaggggaacatgggtacaattacaaaggggtgaatggatgctgattgacaaacaactatgctcactatg

SEQ ID NO: 4991 - DNA, 614 bp, Homo sapiens
ttctctgaaagtcatgcccgaaagaaatgcttgataattttaataatgaaacaaatattcctttatgataaaatacattttaccattttatctacttacaatctgatagtataactacatgtaggaagcctttgagttggtggtggttgtgatgctgttgtttggctgtattgatgtgtttgtgctcatcttgtcacactgtatcacttatccaggaacagatatttcacacactgtttcctctctcaagggtgaactaggcacatacctggggcttagctgtttcttattcacagaaggcctgtagggttaagagtaatacaatcaaaagtgcagcttgctcatgtagcaatatgaagtctctatgccaacagaaacctgaggccaagaaaccattcttaacctttgaacatatttctactatatgttaaatcccttggtattggtttcctcatttgtgaaatagaggaatagaatgagatgractataagggttacttcagctacaaaaattctaacatacaacataatgagcaagagagctgcctccacatttacatactaattaggaattttttagcttaaataagttaacttccttttgaaattataca

SEQ ID NO: 4992 - DNA, 811 bp, Homo sapiens
aataactgattcattgaaccagtattgacagagcacccagttcatgccagggactatgtgaggcacctgagaaacaaagatgacaaagaacaagggcctgttcttcagtggctcacagcacagtgaagaacaggcaggcaggtctaatgacccattaataactacagaactatgytggttgcccacgcaggttgatatggtttggctctgtccccacccaaatctcatcttgaattgttgctcccataattcccatgagtcatgggagggactgtgggaggtaattgaatcacaggggtgggtctttttcatgcagttctcatgatagtgattaagtctcatgaaatctgatggttttataaatgggaattgccctacacaagctctcttacttgccaccttgtaagacgtgactttgctctctgccgtgattgtgaggcctccacagtcacatgggactatgagttaaacctctttcccttataaattatccagtcttgggtatgactttataagcagcatgataacagactaatacacgggacatactggagggaagaataagtcatgaattctctctgctcaggagtcagagaagatgttacagaagccatatgctaaaaaatgcttcactctagtttggtagtccagagtggtataaggggctgcagagggagggtgcagcatgagcaaagccccaagtgtactgggagaattggagaataagtttattttattatgcatttattgggggaaggctggatataggagccactgagccagttaaagctagaggtggagtaagtcacag

SEQ ID NO: 4993 - DNA, 836 bp, Homo sapiens
cacttctgatatcagatctgataaaagaaaatcttaagcacatttacattttcagcagtttagttgagcattcagcagtttgtgaatggggtagcatcagaccacaaggggctagcactctgcccacaggggcaagaggggaaacttttataaagtatttgcagaagcaacacaaatgaaaccaattttgattggttagagtggaaagtttctagttagaggttagttggtgatttctgattggtgcagtttctagtttcagtttactgtttacattgggctttggtttgttcacacacraatttaaagtgacagagctagtcagtcagactcaatcagaatttttttttaacattgcctgtaaattggggtttccatgactcacctccttgggtttgatcagtttgctggagagtggttcacagaactcagggaaacacttttctgatatttacccatttattaaaaaggatatgccagaggataaatatgcacagtttgatggaagaggtgcatagggcgaggtgtgggagaaggggcatggagcttccatgtctcctttgagcatgccgttctccaggaacgtccatgggttcagccatctggaagctcccagaactgttttgttgttgttgttgtttgtttgtggaaactttattacataggcatggttgattaaatcattggctgttggttaatcgattcaactgtaagcccctctcccctcccaacaagttgggagtgggactgaaatttccggccctctaatcacatggttggttcccctggccaccagaccccatcttgaggctatctaggaacccccagctactaat

SEQ ID NO: 4994 - DNA, 836 bp, Homo sapiens
cacttctgatatcagatctgataaaagaaaatcttaagcacatttacattttcagcagtttagttgagcattcagcagtttgtgaatggggtagcatcagaccacaaggggctagcactctgcccacaggggcaagaggggaaacttttataaagtatttgcagaagcaacacaaatgaaaccaattttgattggttagagtggaaagtttctagttagaggttagttggtgatttctgattggtgcagtttctagtttcagtttactgtttacattgggctttggtttgttcacacacgaatttaaagtgacagagctagtcagtcagactcaatyagaatttttttttaacattgcctgtaaattggggtttccatgactcacctccttgggtttgatcagtttgctggagagtggttcacagaactcagggaaacacttttctgatatttacccatttattaaaaaggatatgccagaggataaatatgcacagtttgatggaagaggtgcatagggcgaggtgtgggagaaggggcatggagcttccatgtctcctttgagcatgccgttctccaggaacgtccatgggttcagccatctggaagctcccagaactgttttgttgttgttgttgtttgtttgtggaaactttattacataggcatggttgattaaatcattggctgttggttaatcgattcaactgtaagcccctctcccctcccaacaagttgggagtgggactgaaatttccggccctctaatcacatggttggttcccctggccaccagaccccatcttgaggctatctaggaacccccagctactaat

SEQ ID NO: 4995 - DNA, 836 bp, Homo sapiens
cacttctgatatcagatctgataaaagaaaatcttaagcacatttacattttcagcagtttagttgagcattcagcagtttgtgaatggggtagcatcagaccacaaggggctagcactctgcccacaggggcaagaggggaaacttttataaagtatttgcagaagcaacacaaatgaaaccaattttgattggttagagtggaaagtttctagttagaggttagttggtgatttctgattggtgcagtttctagtttcagtttactgtttacattgggctttggtttgttcacacacgaatttaaagtgacagagctagtcagtcagactcaatcagaatttttttttaacattgcctgtaaattggggtttccatgactcmcctccttgggtttgatcagtttgctggagagtggttcacagaactcagggaaacacttttctgatatttacccatttattaaaaaggatatgccagaggataaatatgcacagtttgatggaagaggtgcatagggcgaggtgtgggagaaggggcatggagcttccatgtctcctttgagcatgccgttctccaggaacgtccatgggttcagccatctggaagctcccagaactgttttgttgttgttgttgtttgtttgtggaaactttattacataggcatggttgattaaatcattggctgttggttaatcgattcaactgtaagcccctctcccctcccaacaagttgggagtgggactgaaatttccggccctctaatcacatggttggttcccctggccaccagaccccatcttgaggctatctaggaacccccagctactaat

SEQ ID NO: 4996 - DNA, 836 bp, Homo sapiens
cacttctgatatcagatctgataaaagaaaatcttaagcacatttacattttcagcagtttagttgagcattcagcagtttgtgaatggggtagcatcagaccacaaggggctagcactctgcccacaggggcaagaggggaaacttttataaagtatttgcagaagcaacacaaatgaaaccaattttgattggttagagtggaaagtttctagttagaggttagttggtgatttctgattggtgcagtttctagtttcagtttactgtttacattgggctttggtttgttcacacacgaatttaaagtgacagagctagtcagtcagactcaatcagaatttttttttaacattgcctgtaaattggggtttccatgactcacctccttgggtttgatcagtttgctggagagtggttcacagaactcagggaaacactttwctgatatttacccatttattaaaaaggatatgccagaggataaatatgcacagtttgatggaagaggtgcatagggcgaggtgtgggagaaggggcatggagcttccatgtctcctttgagcatgccgttctccaggaacgtccatgggttcagccatctggaagctcccagaactgttttgttgttgttgttgtttgtttgtggaaactttattacataggcatggttgattaaatcattggctgttggttaatcgattcaactgtaagcccctctcccctcccaacaagttgggagtgggactgaaatttccggccctctaatcacatggttggttcccctggccaccagaccccatcttgaggctatctaggaacccccagctactaat

SEQ ID NO: 4997 - DNA, 836 bp, Homo sapiens
cacttctgatatcagatctgataaaagaaaatcttaagcacatttacattttcagcagtttagttgagcattcagcagtttgtgaatggggtagcatcagaccacaaggggctagcactctgcccacaggggcaagaggggaaacttttataaagtatttgcagaagcaacacaaatgaaaccaattttgattggttagagtggaaagtttctagttagaggttagttggtgatttctgattggtgcagtttctagtttcagtttactgtttacattgggctttggtttgttcacacacgaatttaaagtgacagagctagtcagtcagactcaatcagaatttttttttaacattgcctgtaaattggggtttccatgactcacctccttgggtttgatcagtttgctggagagtggttcacagaactcagggaaacacttttctgatrtttacccatttattaaaaaggatatgccagaggataaatatgcacagtttgatggaagaggtgcatagggcgaggtgtgggagaaggggcatggagcttccatgtctcctttgagcatgccgttctccaggaacgtccatgggttcagccatctggaagctcccagaactgttttgttgttgttgttgtttgtttgtggaaactttattacataggcatggttgattaaatcattggctgttggttaatcgattcaactgtaagcccctctcccctcccaacaagttgggagtgggactgaaatttccggccctctaatcacatggttggttcccctggccaccagaccccatcttgaggctatctaggaacccccagctactaat

SEQ ID NO: 4998 - DNA, 731 bp, Homo sapiens
tggatcctgaccttggaaattttagtagmgataaatcttcagaaactttcttcagttttttattgatttcttaaaaatggccagttcaaaaaacaaatcttcattgttttagtatagactaataatatgtacatttatgaaattaatttgtatctagacaattatatatagttgccattgaatttgcatttgtctaccttgaatgttccagcagcttgcctactttgtttttgaagttctttctttgttaaaagggaagcaaaacattcttgcatttcctcacatattttattagggttttttttctaagttacttatttcccattgtggtatttattatattcttccatctaatattcttggttttatttcaagttttcttatctgactgaatgaatgtttcagtcatatttttttcatatataaagcaagacatttaaaagtatgaattttcctgaggatggcttgtctaagtttcatatcttgttgcaagaagccatttctcacatcatttcaaaagtctataattttaattttattttccttttttgacccaacatatacttggttttgtttcttttgagtttttaaatagtttggtgtaaaatttcatattaatttttatgaatttttatcattgtggtcagaaaataaaactttataatttttgagtcatggaatttattttcagcttcttaactcttttctaatgtgaacggctgtgttatttg

SEQ ID NO: 4999 - DNA, 669 bp, Homo sapiens
acttccaagatggcttcttccctgccagggctgctccctggcctgagatgacttaaagtttagctcacctgggagcgtcgcctgagcacctgcatgtgatctcatcatgasgattgggcttcacatggaaggcactgggttctaacagggagttgccagatgatatttgattccaaatgagaaggttcttgatctatatggtgcaagaactgtctcattactgatacttcatctctatggttcaaagaaaaatcaagcagtcctagacagcaaaagagaatgccctatttataccactcccaagtaggtggtggtgagggagggattgttaaattcgatttaggcacatgcctgtaatctctgtgttgttgttgtttttcatttttttctctcctcttccagcatgaatagaagtcttcgagttgtaaacctaggcagcatattcattttcttgattttctcaattatatttaagccataactgtgtatttattacctgccttgagaaatggagagtgtgcctggtgtgaggcagtgggagagaaaacaacactggcatttttagaatgaggagtgaccaatgccatgaatgctgattgtagctatgcaggtcttctgatggcttattcttggggactaagggtaccacacagaaataggctgccaaac

SEQ ID NO: 5000 - DNA, 669 bp, Homo sapiens
acttccaagatggcttcttccctgccagggctgctccctggcctgagatgacttaaagtttagctcacctgggagcgtcgcctgagcacctgcatgtgatctcatcatgacgattgggcttcacatggaaggcactgggttctaacaggsagttgccagatgatatttgattccaaatgagaaggttcttgatctatatggtgcaagaactgtctcattactgatacttcatctctatggttcaaagaaaaatcaagcagtcctagacagcaaaagagaatgccctatttataccactcccaagtaggtggtggtgagggagggattgttaaattcgatttaggcacatgcctgtaatctctgtgttgttgttgtttttcatttttttctctcctcttccagcatgaatagaagtcttcgagttgtaaacctaggcagcatattcattttcttgattttctcaattatatttaagccataactgtgtatttattacctgccttgagaaatggagagtgtgcctggtgtgaggcagtgggagagaaaacaacactggcatttttagaatgaggagtgaccaatgccatgaatgctgattgtagctatgcaggtcttctgatggcttattcttggggactaagggtaccacacagaaataggctgccaaac

SEQ ID NO: 5001 - DNA, 825 bp, Homo sapiens
gaatcttaagtgcccaagagtgctgtcccagggggcttttaatcactggaagtagcaggatttcttgggaacatgcccagagatctgaaaatgggcaaaggttgtccaagtttaagaaataagaaaatattaggttagcgatagtctggaagcatttttctttccttcattttctcatggtgttggggatttgtccctttttctctcacagcgtgcgtctgacatgctccaggttggtcctggaagccagtgcctgggtgtactctgtgtgcctgaagccggctcccagagtgagaccccaggcacatggggagacctgctttctggcccccrctctaccagtgcctcccttacgggtctcgggcaagtcctaatttgtgaggttgacctccaggccccagcctgccactctgcatgtgagtagcagacttgatgctgggaaggtcactgggcaaatccatctccaggggagggaggattttggtggctggctgcggtctgagtggacagcaggcagtcagcaccaatcgctcacctagtttctctttgttccaatgttgcattttatgttctgtcaagaggagcatgtgtgtgtgtgtgtgtgtgtgtgtgtgtgtgttgtaattatcagacctgtgagttgatttggttaagttttatttgtcaaacaaaaatagtttcaacaaactgtgttgatttttgtgcaatttccttccttctgtttaagcaaatttgattttttaaagcaaaaccgtgaaaagcccagtgcttaatcacattcctcaaaaatctatatatgctaaatgcagtgtggcatcatggatt

SEQ ID NO: 5002 - DNA, 825 bp, Homo sapiens
gaatcttaagtgcccaagagtgctgtcccagggggcttttaatcactggaagtagcaggatttcttgggaacatgcccagagatctgaaaatgggcaaaggttgtccaagtttaagaaataagaaaatattaggttagcgatagtctggaagcatttttctttccttcattttctcatggtgttggggatttgtccctttttctctcacagcgtgcgtctgacatgctccaggttggtcctggaagccagtgcctgggtgtactctgtgtgcctgaagccggctcccagagtgagaccccaggcacatggggagacctgctttctggcccccgctctaccagtgcctcccttacgggtctcgggcaagtcctartttgtgaggttgacctccaggccccagcctgccactctgcatgtgagtagcagacttgatgctgggaaggtcactgggcaaatccatctccaggggagggaggattttggtggctggctgcggtctgagtggacagcaggcagtcagcaccaatcgctcacctagtttctctttgttccaatgttgcattttatgttctgtcaagaggagcatgtgtgtgtgtgtgtgtgtgtgtgtgtgtgtgttgtaattatcagacctgtgagttgatttggttaagttttatttgtcaaacaaaaatagtttcaacaaactgtgttgatttttgtgcaatttccttccttctgtttaagcaaatttgattttttaaagcaaaaccgtgaaaagcccagtgcttaatcacattcctcaaaaatctatatatgctaaatgcagtgtggcatcatggatt

SEQ ID NO: 5003 - DNA, 827 bp, Homo sapiens
gccctgaatttctgatctgaccttgagtgcctggaatgggcaccctgcctcagcctggccccctgtatgtgacataagagggaatggcaacagctctcttggggaacctcagtgaggattggagggcaagtccagaaaggagagccgtgtttagatgtgtgggggtgtaacctactcatcctggctgtgtgatcccaggcagtctcttgacccctctagtgcttcaggtcacttgtctgtgaaatgcagctacagtagctctgccttactggattttcagggtgattggcgacgttgtggccatgagtgctcggctcagtgcctgccctccatgcatgtgaagacgcaataaaaatgtaaacgtgaacttactgcagatggtcaccacttctgttaatcaacaaatcacatgatgtgtggaatccctaactcactccagcactagaatctgaggaatgctgcaaacatcaaatttcagatctggcttctaatgaagtgatgccgattttcttgtatcacgggtggtttagcacagactgctatagacattaaatgctagttccagacacccactagcrgcgttctgggagaggcctgcgagttgttgggcactggaacacacttttctgtggttcacaccggaaacttgtaggttctgaaagtggagggggaaatggggctgcagttgggagccatcacccgctgggggctcacagtgagtgcagcctcggtcatgggctctgctgacgcacctggggaaggagacggcaggtgtgcagaggcaccgtttagctgccacaggagctgccaggaaaggcacagtgatc

SEQ ID NO: 5004 - DNA, 622 bp, Homo sapiens
tggggcatgctccattgtcctattggacttcactcacagaaaacaaattcaaagatataaacagtttcaggactgcgactgcagagcccagaacctcctgtgtgggggccccttttgagcagccttattgtgagactatgtagggcccgtgtcttgaagctagcccaggtgattatttctcgaggctaaaggcaattccgtaagagagcttctcttaactcccattcagtagaagaagaaacttaggctttaagtagcttgcatcaagaatgtagaggcagaggtaacatttgcccccaggtataatttaaatgaatccaataggatatctctggtatcaataaataagtaagttgagctgttaaaccatactttcctcagggctagattrgtaaactaatacgtgcgtgtcactaaacccgtcaatgagaaaagtcatggtgcatcctctgtccaacaaaggacaaacttccagcaacactgtgaagagtctgcactgcttgatgaggaatctaacacccaacatacttcctgaaacttgtctcagtcattaattatattcgtgcattcagccattcagaaaacaattatggcgttcctgtagtaggcaagaattttgctt

SEQ ID NO: 5005 - DNA, 622 bp, Homo sapiens
tggggcatgctccattgtcctattggacttcactcacagaaaacaaattcaaagatataaacagtttcaggactgcgactgcagagcccagaacctcctgtgtgggggccccttttgagcagccttattgtgagactatgtagggcccgtgtcttgaagctagcccaggtgattatttctcgaggctaaaggcaattccgtaagagagcttctcttaactcccattcagtagaagaagaaacttaggctttaagtagcttgcatcaagaatgtagaggcagaggtaacatttgcccccaggtataatttaaatgaatccaataggatatctctggtatcaataaataagtaagttgagctgttaaaccatactttcctcagggctagattagtaaactaatacgkgcgtgtcactaaacccgtcaatgagaaaagtcatggtgcatcctctgtccaacaaaggacaaacttccagcaacactgtgaagagtctgcactgcttgatgaggaatctaacacccaacatacttcctgaaacttgtctcagtcattaattatattcgtgcattcagccattcagaaaacaattatggcgttcctgtagtaggcaagaattttgctt

SEQ ID NO: 5006 - DNA, 1468 bp, Homo sapiens
gtaccctccaaggttttctaataggacagcacatcagaaagagtagtcacagaatgaggtaggagagatgatgtcagatgaataggaggggaaatggagaggtgtctttcattctttgttcacttacttattccttcctatttattaggtgccactgcataccaggcatcaagccatggactgaggaggtaataatcactgccatcatggagcttatggtttcaagagggaagttgctcaagcaattatacaagtaaatgagaaattctagctgtggcaaagtgtcatagaggtgagaaacatgatgccatgagcaccaacaacaggagggtttgacttggttgaggaggtcagggatggcttctttgggaaggcaatacttgagctaaaatctgaaagaagagtaaatatgtggagtagtcatcaggattgttcataaatatttgattccttctctttgtccagggatatgcatggtagggttgcactttcctgccccattgaacccaagagtggtcattgcttcaaccagtgaaatgtgaacagaagcaatggctcacttccaggcaaaagacctcagaggcagtacacattttgcaatattctatttatcctctatcatagttgctagcaatatttcagatagtgcttgcccaggggcctggatcccagagtgcaaatgagagtaaaaatgcagggcagaatgccctgctaaaccatgacaaacatgaaaagtgtacaagtaaaggatgcagtgatgagtttgccattcattcagcaagtatttgraatgcctactgtgtcccagataccaagtctagcattttcttcctagatggagtgaccaaggggagggtggtatctgagctaggctttgaaaaagacataggatgtcgactgctttagaagaaaggggttggggaaggcatttcaggcaggataaatatcacttgcaaaagtgtaggtatatgaaaactatcggcttgttggagagacagctggaggagtagaaactgaagacagaaaagcaggtggggcaaagccttgaatgcagagctaaagaactgggggcctttcatctgagagccatagggagtcactgaaaaagtttgagctgaggacagtcatcatataagctgttcttgaggaactggctaggaagcaatgccctgtgatggcaagggtcagagagtgcatatgggagcatttcagcttggagaactgtttggaaactgatccttataaattgctggggaggagaaaagagtcctagagggctgtgatcattgacttaaaatgttcaaaaagctccaagtgggtgggtgagtgagtgggaatcatgggtattctaagagagcaaaagtgggttcaaagatagtgatggctgggaggtatatttgttccagcaaacagaacttcctgacaatgatagcaactatattcattttcttttgctggcctaacaaat

SEQ ID NO: 5007 - DNA, 812 bp, Homo sapiens
aaaggtgcttgggatggcattgttcccctcagtgtgtctgcccctaaacttagctcataactttgactatgcagtccattcaactgccactcctccacttgcttcctgtcagataaagggttttttgttttttttttgacggagtctagctctgtcgcccaggccagagtgcagtggtatgatcttggctcactgaaatctccgcctccygggttcaagtgattctccagcctcagcctcctgggtagctgggattacaggtgctcgctaccatgcccggctagtttttgtattttttatagagacgggatttcaccatgttggccaggctgttctcgaactcctgacctcaggtgatctgcccgccttggcctcccaaagtgctgggattacaggcatgagccaccgcacccagccttttttcttttttttttttaatgtttcttacatgcttttataccctttctctttgtccttgttgactataccttttgtataattttactgacctttcatgggtcttggggagggaaatgagattaagatgtattgtcaatatgtcatgcttaaccagaagccttgaaaagagcaagtttggaaatttaaataataggatttaaacttgatataaataatacaaaagagaaaaaaaatcttaaacttgatatgaataatacaaaaggaaaaaaaatctttaaaacttcaagtaaaatatataagatttgtgacttgtttccagagatcaatacatatatttaatttgtgtacttccattatatagctcttaagataacagcagaacatttttaaat

SEQ ID NO: 5008 - DNA, 847 bp, Homo sapiens
cgtgtgggtaccagactctgctgtcggctccaaacccacagacagagggcgcggcctcggggagagctctctgataggaatgacatctggagtccaggccaggggggctcaggtggggcctaaagctggagaccttctccagtacctgctgctgttgctatctggaaaaaatgtggcaacacatggggtaatggggacaagtgcatgctcaagagtcaagtgctgggcaggtgtgtcacactgtttcatgaacagagagagggtcactgcggggagtgggtggtttctggtccagagccctccccctgccgcagccacgctcaccgtgcccctctcccatggaagaatgtgttgactctgccaggactcctgagtcctccccactgggtgagccaagcgctgtgtggtggagatgggcgccaaggctggaatcctggctcctcatgtcacagctcagctccaggacacagcactatttctttcataagctgcagcagctccttttataaaatggcacactacctcgggttgcagtggagtgttactgaagtgcatactgtgtgaaggttgctatgtgtttgtgtgcagcattagttgcaaaagacgagcctttggtggaatgtcaggaaasacttcaaaattgcaatctcccaacaccactttcaagggctgtggcagtaaataaaggccagtgactgtgctgagtgtgtatgcgctggtgtgtgtgtgttctggggtggggaggtagatgctgtgaccacgggcgggcttccattagtctgcgagctcctgccctggcatgtcaggacagacagacacagatacaagacaaattccaagggactga

SEQ ID NO: 5009 - DNA, 1798 bp, Homo sapiens
atcctcagacgaatgcctgcaggagtcctccatctcattggaatgaacctgtcttacccatcccaccgtgttcagtcattagctgctagcaggcccccgggtgaaacatagccttggtgcaaatgcagtggtagatccagagggactgcagctggggcagtcatttatggtcccagcaggagatgtgagaggtgcattttcatggtccccataggcaactgtcctgagaagtttttctccaagyggtgattcagagatccagattccttctaccaaatccccactacctcttcagagtctccccttcagagacatggctaactcaactgatctatcaggtgttctgtgttaggccaccaaagagcaaagggaaaattagatttcatgggagactttttagggaccaagactggaagtggtaaacgtaaattctacacacattttatggcccaaacctgccaaatatccccttctaagcacttttggtgaagacataatggtgtttctgccacatgggagatcttaaatgttactgagatgtatgatagctcagctgtgttgttgccattcctgctgtgttgtctagcctatatttgttcttatgcatggaactggttgaatcctgtgtgtctctgaagttttaaaaccagtttaaatctcaagactagtattatagaacagagtattttagttttgtttatctcagtcctaacccatcctctctatctttcatgagggccatcctccaacattaagagcatccatcctcatgttttacaaggaagtgtgttctttccctaggagcaattctatttctagtcattaagccagcatttttgctttctctccagtatatgtacagatttttaatggaaatattctggagcagtatgccaaaatatgttaacataagacttttgtgggtgtcaagagtctcttaactctttatttaactttttattctcatatttatattttacattatattatacatctttctgtaatacattttagttatatatttataagaaaaaataattataagaattaaagtctaaatgatggtgattcttttaaaaatctgaaattaaaaatttcaggcatttataaattcttcaattttcaaatatatgttatatatatcatcctttaggagtccacctgagataatcatttttctaaaatttataatctctgctttaaatcaaatcagtaaaaagctacaaaattcagttctccagcaattttttttatttcagtgattaattcatttatttgtttaactagtacttattgatctcttgactatgtatttgaaactcttttagacactgggcatacacacagtaatgactattgtactcatgaccacatacaatagtcatgggccaccatagaatggtgtagatacaccatagtatcagataatgataagagctataaaaataagggatgcagctgggcgcggtggctcacgcctgaaatcccagcactttgggaggccgaagcaggtggatcacaaagtcaggagtttgagaccagcctggccaacatggtgaaaccccgtctctactaaagatataaaaaattagctgggcatggtggcatgcacctgtaatccctgctactcaggaaggctgaggcaggagaatcgcttgaacccaggaggtgggaggttgcatctcaaaaataaataaataaataaaaataagggatgcatcaacattgtaatactatgtttattagatccttttttttaaacaataatttcaacttttattttagattcaggggatcc

SEQ ID NO: 5010 - DNA, 1798 bp, Homo sapiens
atcctcagacgaatgcctgcaggagtcctccatctcattggaatgaacctgtcttacccatcccaccgtgttcagtcattagctgctagcaggcccccgggtgaaacatagccttggtgcaaatgcagtggtagatccagagggactgcagctggggcagtcatttatggtcccagcaggagatgtgagaggtgcattttcatggtccccataggcaactgtcctgagaagtttttctccaagcggtgattcagagatccagattccttctaccaaatccccactacctcttcagagtctccccttcagagacatggctaactcaactgatctatcaggtgttctgtgttaggccaccaaagagcaaagggaaaattagatttcatgggagactttttagggaccaagactggaagtggtaaacgtaaattctacacacattttatggcccaaacctgccaaatatccccttctaagcacttttggtgaagacataatggtgtttctgccacatgggagatcttaaatgttactgagatgtatgatagctcagctgtgttgttgccattcmtgctgtgttgtctagcctatatttgttcttatgcatggaactggttgaatcctgtgtgtctctgaagttttaaaaccagtttaaatctcaagactagtattatagaacagagtattttagttttgtttatctcagtcctaacccatcctctctatctttcatgagggccatcctccaacattaagagcatccatcctcatgttttacaaggaagtgtgttctttccctaggagcaattctatttctagtcattaagccagcatttttgctttctctccagtatatgtacagatttttaatggaaatattctggagcagtatgccaaaatatgttaacataagacttttgtgggtgtcaagagtctcttaactctttatttaactttttattctcatatttatattttacattatattatacatctttctgtaatacattttagttatatatttataagaaaaaataattataagaattaaagtctaaatgatggtgattcttttaaaaatctgaaattaaaaatttcaggcatttataaattcttcaattttcaaatatatgttatatatatcatcctttaggagtccacctgagataatcatttttctaaaatttataatctctgctttaaatcaaatcagtaaaaagctacaaaattcagttctccagcaattttttttatttcagtgattaattcatttatttgtttaactagtacttattgatctcttgactatgtatttgaaactcttttagacactgggcatacacacagtaatgactattgtactcatgaccacatacaatagtcatgggccaccatagaatggtgtagatacaccatagtatcagataatgataagagctataaaaataagggatgcagctgggcgcggtggctcacgcctgaaatcccagcactttgggaggccgaagcaggtggatcacaaagtcaggagtttgagaccagcctggccaacatggtgaaaccccgtctctactaaagatataaaaaattagctgggcatggtggcatgcacctgtaatccctgctactcaggaaggctgaggcaggagaatcgcttgaacccaggaggtgggaggttgcatctcaaaaataaataaataaataaaaataagggatgcatcaacattgtaatactatgtttattagatccttttttttaaacaataatttcaacttttattttagattcaggggatcc

SEQ ID NO: 5011 - DNA, 1798 bp, Homo sapiens
atcctcagacgaatgcctgcaggagtcctccatctcattggaatgaacctgtcttacccatcccaccgtgttcagtcattagctgctagcaggcccccgggtgaaacatagccttggtgcaaatgcagtggtagatccagagggactgcagctggggcagtcatttatggtcccagcaggagatgtgagaggtgcattttcatggtccccataggcaactgtcctgagaagtttttctccaagcggtgattcagagatccagattccttctaccaaatccccactacctcttcagagtctccccttcagagacatggctaactcaactgatctatcaggtgttctgtgttaggccaccaaagagcaaagggaaaattagatttcatgggagactttttagggaccaagactggaagtggtaaacgtaaattctacacacattttatggcccaaacctgccaaatatccccttctaagcacttttggtgaagacataatggtgtttctgccacatgggagatcttaaatgttactgagatgtatgatagctcagctgtgttgttgccattcctgctgtgttgtctagcctatatttgttcttatgcatggaactggttgaatcctgtgtgtctctgaagttttaaaaccagtttaaatctcaagactagtattatagaacagagtattttagttttgtttatctcagtcctaacccatcctctctatctttcatgagggccatcctccaacattaagagcatccatcctcatgttttacaaggaagtgtgttctttccctaggagcaattctatttctagtcattaagccagcatttttgctttctctccagtatatgtacagatttttaatggaaatattctggagcagtatgccaaaatatgttaacataagacttttgtgggtgtcaagagtctcttaactctttatttaactttttattctcatatttatattttacattatattatacatctttctgtaatacattttagttatatatttataagaaaaaataattataagaattaaagtctaaatgatggtgattcttttaaaaatctgaaattaaaaatttcaggcatttataaattcttcaattttcaaatatatgttatatatatcatcctttaggagtccacctgagataatcatttttctaaaatttataatctctgctttaaatcaaatcagtaaaaagctacaaaattcagttctccagcaattttttttatttcagtgattaattcatttatttgtttaactagtacttattgatctcttgactatgtatttgaaactcttttagacactgggcatacacacagtaatgactattgtactcatgaccacatacaatagtcatgggccaccatagaatggtgtagatacaccatagtatcagataatgataagagctataaaaataagggatgcagctgggcgcrgtggctcacgcctgaaatcccagcactttgggaggccgaagcaggtggatcacaaagtcaggagtttgagaccagcctggccaacatggtgaaaccccgtctctactaaagatataaaaaattagctgggcatggtggcatgcacctgtaatccctgctactcaggaaggctgaggcaggagaatcgcttgaacccaggaggtgggaggttgcatctcaaaaataaataaataaataaaaataagggatgcatcaacattgtaatactatgtttattagatccttttttttaaacaataatttcaacttttattttagattcaggggatcc

SEQ ID NO: 5012 - DNA, 1798 bp, Homo sapiens
atcctcagacgaatgcctgcaggagtcctccatctcattggaatgaacctgtcttacccatcccaccgtgttcagtcattagctgctagcaggcccccgggtgaaacatagccttggtgcaaatgcagtggtagatccagagggactgcagctggggcagtcatttatggtcccagcaggagatgtgagaggtgcattttcatggtccccataggcaactgtcctgagaagtttttctccaagcggtgattcagagatccagattccttctaccaaatccccactacctcttcagagtctccccttcagagacatggctaactcaactgatctatcaggtgttctgtgttaggccaccaaagagcaaagggaaaattagatttcatgggagactttttagggaccaagactggaagtggtaaacgtaaattctacacacattttatggcccaaacctgccaaatatccccttctaagcacttttggtgaagacataatggtgtttctgccacatgggagatcttaaatgttactgagatgtatgatagctcagctgtgttgttgccattcctgctgtgttgtctagcctatatttgttcttatgcatggaactggttgaatcctgtgtgtctctgaagttttaaaaccagtttaaatctcaagactagtattatagaacagagtattttagttttgtttatctcagtcctaacccatcctctctatctttcatgagggccatcctccaacattaagagcatccatcctcatgttttacaaggaagtgtgttctttccctaggagcaattctatttctagtcattaagccagcatttttgctttctctccagtatatgtacagatttttaatggaaatattctggagcagtatgccaaaatatgttaacataagacttttgtgggtgtcaagagtctcttaactctttatttaactttttattctcatatttatattttacattatattatacatctttctgtaatacattttagttatatatttataagaaaaaataattataagaattaaagtctaaatgatggtgattcttttaaaaatctgaaattaaaaatttcaggcatttataaattcttcaattttcaaatatatgttatatatatcatcctttaggagtccacctgagataatcatttttctaaaatttataatctctgctttaaatcaaatcagtaaaaagctacaaaattcagttctccagcaattttttttatttcagtgattaattcatttatttgtttaactagtacttattgatctcttgactatgtatttgaaactcttttagacactgggcatacacacagtaatgactattgtactcatgaccacatacaatagtcatgggccaccatagaatggtgtagatacaccatagtatcagataatgataagagctataaaaataagggatgcagctgggcgcggtggctcacgcctgaaatcccagcactttgggaggccgaagcaggtggatcacaaagtcaggagtttgagaccagcctggccaacatggtgaaaccccgtctctactaaagatayaaaaaattagctgggcatggtggcatgcacctgtaatccctgctactcaggaaggctgaggcaggagaatcgcttgaacccaggaggtgggaggttgcatctcaaaaataaataaataaataaaaataagggatgcatcaacattgtaatactatgtttattagatccttttttttaaacaataatttcaacttttattttagattcaggggatcc

SEQ ID NO: 5013 - DNA, 859 bp, Homo sapiens
ctcaattacttttacataattacagaatatttggagtcaaacattcacctatttcccttttactaaaacttattggaattaacatcatttgatatagtgactatttctgagttaagaaaacataattaagaccgcaaaattacaataattattaagccactggcttattccatagcactgtataaacacagcatagaataagaagatgaagatcccagaatgtggaaacaaaaagctgacaagtgattgaggaatggtgagaagacacaggttctgaggactgctggacagcctttcctgtttttaaagaaaagctctcttatcatgagagaagagtcatgaaaaccaaaaggtttctgcatttaattcgttatttagagggctgaatttatgctttgacttactctttgattacaagcactggtggttatattttatctattttgtggaaatgagttagcacatgtagaaaactgccctgaaaggggctgaaatgaagccattaagaccgaagtgtactttttaaaactccaaacgtcatgatttatttcttgatcttggtgatacttatatgggtgtgttcactttgtaaacattcatcaaactctatacttaccacttgtgtacttttctgtatgtgtgttwtacttcaattaaaaagtttacttgaaagaaaaaatcccaccacagctctgcttctgtctttttgcaacgcacgggtggtagccacggtgtttggttccccagaacatttccttcttacgcccacctttggatctggccaatcgcagcagctcatctccggcgctccagattggtgggtatgtatctgaagcagggccaatcagcgtccttccct

SEQ ID NO: 5014 - DNA, 790 bp, Homo sapiens
caagagcacctcccaataagcttcccacaaaatgatctctatctcagagtctgcttctcaggaactcaacagcagagtgattcttttaggcacagatccaagtgtcttacttctccatttaaaatcatctgatggcttcctactgcacttggaataaaattcagactgctcatgaggattgtagggctccaggtcaaggctgcctaatagcaatacacataggtaggtrgcacatttagaaagtaaaaaaaaaaaatcagatgaaattaacttcaataatgttttatttaatatataaataataattatatatataaatatatattttgtttaaccccaaaatcaaacatattatcattttaaagtgtgttcaatataaaatatgaatattttacattctttatttttcattctaggtctctgcaatctggtgcatatttacaattacagcacgtctcaattgggactccatgcattttttttttttttttgagacagtgtctcattctgtcacccaagctagagtgcagtggtgtgatctcagctcactgcaacctctgcctcccggattcaagcaattctcctgcctcagcctcccgagtagctgggattacaggtgcgcgccaccacacccggctaattttgtatttttagtagaaatggggtttctccatgtttgtcaggctgctctccaactcctgacctcaggtgatctgcccacctcggcctcccaaagtgctgggattacaggcgtgagccaccatgcccagctgggactcgatgcatttta

SEQ ID NO: 5015 - DNA, 828 bp, Homo sapiens
tgttagattgaccacaatgaccaataggaaggaaggattaccaatgggttgagaaagtgtatgggtttgattgcaaggttgatggcttttatgaaaatttaaaaatatatgaaagctaatttgaatcccaatttcttttactcattagaattaaatagtaaagaattaaaataatagaaaatggagagggttgttgattattttacaagatatattaatattttgatttatgataaaaatctttgctttacagaagaatttaccacataattcaaattttaaaaattcttacacctagagtttgtccagagtacaagttttgggggacaagaagttacatctgtaacagaaagtgagcaaacaactccaagactccgtattgtccctaagaacttaaggcagtgttgtccagtagaaatataatgggtttttttttttcttttcttttcttttctttttgagatggagtcttgctctgtcacccaggctggagtgcagcagcgcaatcttggctcactgcaacctctgctgcccgggttcaagcgattctcctgcctcagcctcctgagtagctgggattacaggcgtgtgccaccatgcctrgctaatttttgtgtttttagtagagacagggtttcagcatcttggccaggctggtcttgaactcctgacctcgtgatccacccgtctcggcctcccagagtgctgggattacaggcctgagccactgctcccggcctagaaatataatgttaatcacatgtaattcaaaattttctagtagcgacatttaaacaaataagaagataaagtttaaattacctttca

SEQ ID NO: 5016 - DNA, 712 bp, Homo sapiens
tcccaccttgttctcccaaattgctgggattataggcatgagctactgtgcctggtctggaattaagatttttaaccgaggcctgtatgttatctcagtagttatttattgcatctgtgattgtaattaccctatcttttttgttactgatctttgtcttctagccttgatgtatgtytaacatctccaatttattatgtcccaagccattcattactttccttttcaaagctgttcctctcttgtgcccagcctctcacgatagaaatcttaactccccactgcccttgcccttctggttcattatgtgtaattactctttaagtctctcagagtcttgctaaatagatctcaggttcctttgcatcttgatgaagcatctattaatattcttcctcacgcagaaaactactgtagacatagactcctaaatacagtggccacatgctcctagtggtcccacattgtgatctgctctccacagtacagctagaattatctttttaaagtgcaaatccaatcataacactatcctttaaaaatctctgcaagtctcaacacagtgtctccaggatgaaaatctaatttccttatctggtcacagtaacgaaatttgcatgctggctcccatctgccttttctttctttttttttttttttttattatactttaagttttagggtacatgtgcacattgtgcaggttagttac

SEQ ID NO: 5017 - DNA, 759 bp, Homo sapiens
tcattccccaaatagcttttccacaaaaacctaaacttccccttttaattgagttaagcattcctttcctggaacattctgatgagcatttcttycaggggagtgaatgtatatcctaatgacatttgtattctttgtagaaatatgtccacctttgataaggatgattcaagactgtgtccataaaagttaaaaatagagttaagttggtagttttcccataatcaaccttttctgccttcagtcattgcttcaaatctgtgcaaggcattgtgctaggcaggtcaaagggaacaaaaatggaaaagcctcagactgggtgacaaataaccattaatctagtcaggagaataagacaagcatattgcaaactatatccaagagagaataaagtacccaagggatgttctaaaaagaaagatcgaaatcaggttccctgaatgagccaacatctgtataggccttgaaatataacctgtttttttttttttaaggttgtgttaccttttattctgattataaagcatatatagtaaaagttaaaatatatacatgtaaagaagataaagtatgtgtttttcagaagaggaaagatgtgtttcaaataaataatctcactattaatcagagaaatgcagattacaataataatgtgatatttttctttatccaccagatcggttataatgaaaggattggatagtattaagtattgggagaatttgggcaatggctattactgtccattgttgataaggg

SEQ ID NO: 5018 - DNA, 759 bp, Homo sapiens
tcattccccaaatagcttttccacaaaaacctaaacttccccttttaattgagttaagcattcctttcctggaacattctgatgagcatttctttcaggggagtgaatgtatatcctaatgacatttgtattctttgtagaaatatgtccacctttgataaggatgattcaagactgtgtccataaaagttaaaaatagagttaagttggtagttttcccataatcaaccttttctgccttcagtcattgcttcaaatctgtgcaaggcattgtgctaggcaggtcaaagggaacaaaaatggaaaagcctcagactggrtgacaaataaccattaatctagtcaggagaataagacaagcatattgcaaactatatccaagagagaataaagtacccaagggatgttctaaaaagaaagatcgaaatcaggttccctgaatgagccaacatctgtataggccttgaaatataacctgtttttttttttttaaggttgtgttaccttttattctgattataaagcatatatagtaaaagttaaaatatatacatgtaaagaagataaagtatgtgtttttcagaagaggaaagatgtgtttcaaataaataatctcactattaatcagagaaatgcagattacaataataatgtgatatttttctttatccaccagatcggttataatgaaaggattggatagtattaagtattgggagaatttgggcaatggctattactgtccattgttgataaggg

SEQ ID NO: 5019 - DNA, 1870 bp, Homo sapiens
agctgatctcatgagagctctaaagctgcagtggctcttcagagctgccccaattaaggcaaaaggattaggcccttattccctcaaagtgaccagtcactgaatgtaggctgttttcaggaaggagccataaccttgggtgaggtagttcctttcagctgagggcaattcctgcagagggactcagccaggagctatcagcaggcaatgctatcagtagttggggggattcccaagaggggagttgggcagtgcaccacaccatcctctacagagtagacataaacacagctttgtcatatatctttggggagatcaatttggccagagtgaaaagtttgtgcagagtaatggtagcaaacagaagaatttaaggaattcttcaatatgtcttccattgtctacagaataaagtcttaactcttagccccacagccaagactcttcagagtccagcaccaacttgactttctagtcttattttccttgattccttttcatatactctacagatgaataaaaataaagaatctgaaaagttattcagagtttataaactgttaagaatatcaccctcagattcagtgtgtatatttcttattgagaccttagtaacaatactcggtaatagtctttacagcattgtaccattatgatcatttctgtgtaagaatgacattaaaggtctgaggaaggaatctggatggttctctgcttcagattcagcaaggtgaagttccacgttcagcctttgagaaggatggattgcttcatagttctatagcactgatttctaaaagagcttgccttctaggagatatttgctaatgtctggagagattttagattgtcataaatcaggcaaggaagtgcctaggagttacctatctaatgcgtagatatcaaagatatgctaagattctataacgcccaggacagccccacctcctccccaataaagaattatctgcctcaaaatgccaatagcaccaatattgattaatcttgcaccatagtttggcctacaagcccaagaaatggccccaaagaaatatggagatagactgttaggaaaagcagttcttatcactaaaggggaaagggagggagcatgcttttggcaaagagcccaagagaataaacggacagaactgcacctgcctacatttcttcagcccccacactctatccacactctttcccatatgtcccaaaaggctctccagatcctgaagggcatggcacacagaagccagatggctttgcctctcaccctctgcttgtccactcctctctgaactcatcaatttaacacaaataatcctaattactatggctattttcagcttgaggacagatattgcttgattgagcagtgcattcttactgaacaaaaaaataaagaaagaaaaaaaagaaaaacacttgtaaaatccccaaactttaagtgcttggcagtgagttcctcaattttatatcagggagcctgggcttggcctgaaggggaaatgcaacagagcatgccatcaaaataactaggtcaatgttcagcttcttcttggaaggctttctgcttcttctcttccctccatgctgggccctcagcctgtctgtgccagccacctttatttcagataagtagctctctcagcctacaaattccaaagtccgaatgcctctggaattggacaaactgtccacacaccttaaatcaaagaatacagtcctgcccattcaatttgagcatctggaattggtgataccaacagtgttcragcactggaccacctagtgaagaataaaattttatgcaatgcctgctggcactctgggcttcatcaattggctccaccacagcaaatatatcact

SEQ ID NO: 5020 - DNA, 778 bp, Homo sapiens
tcgctacaggggactccacattccccatggacatttgagctagtagggggctctacccagagagtaggcagagacaggtttcckccaatgtggatcacgcccaggggcttttgtgtgtagacagctctggtgggatgcagccatgggcactcaccctccatggctccacatttccttctgagaagctctagctcccagctgactgctggactcggagacagtgggcctggctgctctgcggggcggggtatatttgttctataggccctctgcctgccagcccttcagggcccctgcctagctgtcctgtaggagtggtgcacagtgcagcctccactgtccagcctgggtgctttgctccacctgagtagtttcccaaaaacctgggagcacttaggataccccagtgcagctggagctctaccccaagctgccggctgatccctgtgccccagggctatggcacacagcttgggaatgccaagccaagatctgtactcagcacttaagcagggtagagtcccgcactctcagggcactgagaggggtgaaacacaggggttcatgggctggcatggaagtggaacgtacttctctctgaagggctggtctggaaaggatgtggcttgtttccctgcgggggactcttcccaaggaagccccatatcctggaacacctaccaaagaaatgtgggcacacctgccgggcacggtggctcacatctgtaatcccagcactttgggaggctgaggcaggtggatcacgaggtcaggagtt

SEQ ID NO: 5021 - DNA, 462 bp, Homo sapiens
ccatacaaaatgtaaagtaaaaaaaaattgaaattatgaatttgaaaaggctttctaaaaatagtttcactggcgtctttgaaaaatcatcctttggtgaaactttgggatgcatacatggcaatttttgaaatagctgaaagactgttttgctgccttcctttaatttctattattctgttttatagatwgaaaaaaaaaatctgtgatttgagatttggaacttgcccaaattcacagctaggaagtgtcatatccatgatttgaacctagcaggctggctccaggccttgcactgtgaactggtgagaaatacacacactgcagagttaataattaaagtcactgataatatgataaagctgctcaatactaatggttaactatccaatattataaagtaaacttcagcacatgcattgatgtctcactctaaggttgaagattaaacaagtttcagga

SEQ ID NO: 5022 - DNA, 814 bp, Homo sapiens
ttaaaaaacaacttcctaggagaaagtaaacaacagccaaraccactttctgtaaactgtgctcagccacccctagctttgtagctcttgtctgccattatacacaccaacgtcaaatcctgtcacagtacaaggtcatctctggtacctccaaagccaaaggggtcaggtcatgcaatagaggaaaacagagctgcctatggctcttgaaactcaacaaagaaaatagaacacccgcagaggggcgagtgacacctttgttctgaactctttaaaggggttcagctgggcgcggtggctcacacctgtaatcccaggactttgggaggccaagacgggcagatcacgaggtcaggagatcgagaccatcctggttttagtgaaaccccgtctctactaaaaatatagaaaagtagccgggcttggtggccggtgcctgtagtcccagctactcgggaggctgaggtaggagagtggcatgaacccgggaggcagagcttgcagtgagccgagatcatgccactgcactccagcctgggggacagagtgatactctgtctcaaaaaaaaaaagagggggggtggttcaagtcatttgaagctttctctagattttttggtactacagatggcaaagggggaagaaagtacgaggtggaagaaaagtaaataaaagaacatttgtggttttttttaagacaggaagcaaacacagaaaccaagcacatgttttttgtttctttgttttttcctcttttgcagctatccaaattagagatgctttgttacccataatttggaattctcactcagat

SEQ ID NO: 5023 - DNA, 719 bp, Homo sapiens
tttctattatccttaccctccttataggagaggtgagtaaattaaaccaatgcttggcacatggaacaagctcccaggaggccagggaaggagccatatttgtcttattcattattggtattccaggcatggagatcagtacctggcacacagcaaagcacacaataaatatttattgatggagcagtaagggcttgaygtgtttttaaaacaaaatgactatgtatgtaaaatctccctaatcttgggtatagctggactcacgggaatttaaaacaaatattttaattcacttttaaagatgaccctaaatgcctaacccacacgatatatttagggatctattagattttacagttggaaagatcaaagctttttaagttacaagtagaatggtattaaggccagaacttgaaaagtatttctgaacttaaaacccagtgctctgtctctcttcccatcccccagtgattttctagataatatgatggtagtagaaacagaacaaagaaactctcatttttacacttgcctttatgaggcagcataatagatagcttactttgattatggtttgctgacacagtttggtttagactaattggcagagtggcagatctttgtctaattctgtcttccaggttgtgcctagcacattactggtgctcaaatgttaataaaacagcaatgcatgccaagtatctgatgtcctagatgct

SEQ ID NO: 5024 - DNA, 719 bp, Homo sapiens
tttctattatccttaccctccttataggagaggtgagtaaattaaaccaatgcttggcacatggaacaagctcccaggaggccagggaaggagccatatttgtcttattcattattggtattccaggcatggagatcagtacctggcacacagcaaagcacacaataaatatttattgatggagcagtaagggcttgatgtgtttttaaaacaaaatgactatgtatgtaaaatytccctaatcttgggtatagctggactcacgggaatttaaaacaaatattttaattcacttttaaagatgaccctaaatgcctaacccacacgatatatttagggatctattagattttacagttggaaagatcaaagctttttaagttacaagtagaatggtattaaggccagaacttgaaaagtatttctgaacttaaaacccagtgctctgtctctcttcccatcccccagtgattttctagataatatgatggtagtagaaacagaacaaagaaactctcatttttacacttgcctttatgaggcagcataatagatagcttactttgattatggtttgctgacacagtttggtttagactaattggcagagtggcagatctttgtctaattctgtcttccaggttgtgcctagcacattactggtgctcaaatgttaataaaacagcaatgcatgccaagtatctgatgtcctagatgct

SEQ ID NO: 5025 - DNA, 692 bp, Homo sapiens
caaggtcaggagattgagatcattctgactaacacagtgaaacctcatctctactaaaaatacaaacattagccaggtgtggtgacatgcgcctgtagtcccagctactcaggaggctgaggcaggagaatcacttgaacccaggaggcagaggttgcagtgagccgagatcgcaccactgcactccagcctggtgacagagcgagactctgtctcaaaaaaaaaaaaaaagaaaaagaaaaagaaaagaaatacagaaaatgagcaaagcaaagtgtcaagagctgagaattggtttagtctggaaactgtttcttgtagtttctctagctgtgctttattacctaaactcagatcttgaggaatggggtggaggcttcattgttaattcagctaattcggaagtccaagttgggaaaggagttcggtaayatcagaatgggtcagattgtctacacaaagggggaaggagtctagttgctgccaatcttggtgacggctgaaggtcaggacttgagccccctaagctgtgggtgggtgggtccattgggtgcccccaagacttgaaaatcaggcacactggggagggacaggtgcttgggtgcagctttgaatgtgagtaggtagaggaagtccagccaagctgcccaggcttacttgtagagggcctgcttgtgtcacttcctactgac

SEQ ID NO: 5026 - DNA, 534 bp, Homo sapiens
ggatccagctggggtctgctggcctcaaaatggtctcaagtagtgaatgcaggggctcccacaggactagagctttgcatttctggttcttcatccagttctgaagcttagacatagtggatataaaaataatctggggagcttgctcacratgcaggtattcctggcctcaccccaactattttaatttcaggtaatttgggtggggttcaggaatcttcatttaagaaaaatacctccagtgacagacagatggccatcaaccacaatttgaggaaaaaaaagcctcaagttcatgctattgagctcaacctttgggaaaaaattcttctatcctgtgtgaaagaaaatggtgtttttctaagtcccaagaaaacatcctaaagggatgcaaggaaggattcgatgggcattccttccaaggcatgaaaggagagcggatggctgtgtcttgtactcagccgccctccacagagcctgtggcagacccgggaatgtccatgtgtctcagagctgaagtgaggtgcataggcc

SEQ ID NO: 5027 - DNA, 534 bp, Homo sapiens
ggatccagctggggtctgctggcctcaaaatggtctcaagtagtgaatgcaggggctcccacaggactagagctttgcatttctggttcttcatccagttctgaagcttagacatagtggatataaaaataatctggggagcttgctcacaatgcaggtattcctggcctcaccccaactattttaatttcaggtaatttgggtggggttcaggaatcttcatttaagaaaaatacctccagtgacagacagatggccatcaaccacaatttgaggaaaaaaaagcctcaagttcatgctattgagctcaaccyttgggaaaaaattcttctatcctgtgtgaaagaaaatggtgtttttctaagtcccaagaaaacatcctaaagggatgcaaggaaggattcgatgggcattccttccaaggcatgaaaggagagcggatggctgtgtcttgtactcagccgccctccacagagcctgtggcagacccgggaatgtccatgtgtctcagagctgaagtgaggtgcataggcc

SEQ ID NO: 5028 - DNA, 778 bp, Homo sapiens
tttcatgtattctttcatttttaaaatgtaaaatacaaacacacacacagaaaagcatagcaatatactagttctctctggctctttctcaaagaaagctaatgactaataatgtcctgagtgttgtctttttcttttctaactccccacatagctatgtgtcctggagggtcatccgtcaggagaacttccccatgacatccacagctgcccagtgccctattgaggggacgccttgggattgattccgtttctctttgatccaagtcaggtgggttacagtcatggttttacaaataacaactccataagaaatagcttcgaacttgtaaaagacttgttttttgttttgttttgttttgttttgttttgttttgtttttgacagattcttgctctgccacccaggctgtaatgagtgcaatagtgcgatcttggctcactgcaagctccgcctcccgggttcatgcctttctcctgcctcagcctcccaagtagctgggactacaggygcatgtcaccatgcccagctaaattttgtatttttagtagagatcaggtttggccatgttggccaggctggtctcaaactcctgacctcaagtgatccacccgcctcagcttctcaaagtgctgagatcacaggcgtgagccactgtgcccagccataaataccgtattttatgtcacattcacaggccaattggctaaatttagatctgggcatcccagggtggaactatccaagacccagtgctgaattcattgttacagtctga

SEQ ID NO: 5029 - DNA, 833 bp, Homo sapiens
gtgtaatccagrgtgctgttttcttttctctatatagacggtactcctgggtctcctggcccccctgacacctgagggtcacaggactcccctgggtgatcacagagcctggttcagcccagagggtgggcttggggaggtgccctggaaggaaatcaggagtcggattctaactcatttcccacccaacccagcagattccagctctcagcccaggaccctccagacgccccgatcagtcagcccagaactgctattccccatccccagcggcacgggggtggccccttgtccccagtgaggaggagggacctggaagagctggggacagactcacctgcctgcacgtgggtcctggggcccagactcagccctggaagagagttcccggtgagggatttgccccctgaagcctgggcaggtcctcccctccctgggatctttgtgagcccctggggtctccttagggaccagagtttggctgtggggtgaggtccctcttaggttagaagctcccctccttcttcaaatctcaccgagacagatcaggaccgtgaggatgggggtcatggcgtctcctcccactgccctgctctgtggatggatgagccctcggtgctggcaggatagagagacacacagagtgtggccaatcggaggctgggtccttcttctcatggggtgctgtcatctgcagccacacaggaagtggaactgccctccccaggacccttgctctcattccattagggctgaggtgggggcagtcactaggccctctgcatcatttcagatggtaatgggccctttcctgacccccagccaccgtctgt

SEQ ID NO: 5030 - DNA, 833 bp, Homo sapiens
gtgtaatccagagtgctgttttcttttctctatatagacggtactcctgggtctcctggcccccctgacacctgagggtcacaggactcccctgggtgatcacagagcctggttcagcccagagggtgggcttggggaggtgccctggaaggaaatcaggagtcrgattctaactcatttcccacccaacccagcagattccagctctcagcccaggaccctccagacgccccgatcagtcagcccagaactgctattccccatccccagcggcacgggggtggccccttgtccccagtgaggaggagggacctggaagagctggggacagactcacctgcctgcacgtgggtcctggggcccagactcagccctggaagagagttcccggtgagggatttgccccctgaagcctgggcaggtcctcccctccctgggatctttgtgagcccctggggtctccttagggaccagagtttggctgtggggtgaggtccctcttaggttagaagctcccctccttcttcaaatctcaccgagacagatcaggaccgtgaggatgggggtcatggcgtctcctcccactgccctgctctgtggatggatgagccctcggtgctggcaggatagagagacacacagagtgtggccaatcggaggctgggtccttcttctcatggggtgctgtcatctgcagccacacaggaagtggaactgccctccccaggacccttgctctcattccattagggctgaggtgggggcagtcactaggccctctgcatcatttcagatggtaatgggccctttcctgacccccagccaccgtctgt

SEQ ID NO: 5031 - DNA, 833 bp, Homo sapiens
gtgtaatccagagtgctgttttcttttctctatatagacggtactcctgggtctcctggcccccctgacacctgagggtcacaggactcccctgggtgatcacagagcctggttcagcccagagggtgggcttggggaggtgccctggaaggaaatcaggagtcggattctaactcatttcccacccaacccagcagattccagctctcagcccaggaccctccagacgccccsatcagtcagcccagaactgctattccccatccccagcggcacgggggtggccccttgtccccagtgaggaggagggacctggaagagctggggacagactcacctgcctgcacgtgggtcctggggcccagactcagccctggaagagagttcccggtgagggatttgccccctgaagcctgggcaggtcctcccctccctgggatctttgtgagcccctggggtctccttagggaccagagtttggctgtggggtgaggtccctcttaggttagaagctcccctccttcttcaaatctcaccgagacagatcaggaccgtgaggatgggggtcatggcgtctcctcccactgccctgctctgtggatggatgagccctcggtgctggcaggatagagagacacacagagtgtggccaatcggaggctgggtccttcttctcatggggtgctgtcatctgcagccacacaggaagtggaactgccctccccaggacccttgctctcattccattagggctgaggtgggggcagtcactaggccctctgcatcatttcagatggtaatgggccctttcctgacccccagccaccgtctgt

SEQ ID NO: 5032 - DNA, 833 bp, Homo sapiens
gtgtaatccagagtgctgttttcttttctctatatagacggtactcctgggtctcctggcccccctgacacctgagggtcacaggactcccctgggtgatcacagagcctggttcagcccagagggtgggcttggggaggtgccctggaaggaaatcaggagtcggattctaactcatttcccacccaacccagcagattccagctctcagcccaggaccctccagacgccccgatcagtcagcccagaactgctattccccatccccagcggcacgggggtggccccttgtccccagtgaggaggagggacctggaagagctggggacagactcacctgcctgcacgtgggtcckggggcccagactcagccctggaagagagttcccggtgagggatttgccccctgaagcctgggcaggtcctcccctccctgggatctttgtgagcccctggggtctccttagggaccagagtttggctgtggggtgaggtccctcttaggttagaagctcccctccttcttcaaatctcaccgagacagatcaggaccgtgaggatgggggtcatggcgtctcctcccactgccctgctctgtggatggatgagccctcggtgctggcaggatagagagacacacagagtgtggccaatcggaggctgggtccttcttctcatggggtgctgtcatctgcagccacacaggaagtggaactgccctccccaggacccttgctctcattccattagggctgaggtgggggcagtcactaggccctctgcatcatttcagatggtaatgggccctttcctgacccccagccaccgtctgt

SEQ ID NO: 5033 - DNA, 781 bp, Homo sapiens
  misc_feature (1)...(781): n = A,T,C or G
aagcaggtagatcatttgaggtcaggagttcaagaccagcctggccaatgtggtgaaaccccgtcttaaaatacaaaaattagttgggcttggtcgtgggtgcctgtgatcccagctactcaggagactgaggacagcagaatcacatgaaccagggaggcggaggttgcagtgagctgagatcgcaccactgcactmcagcctgggcaactccatctcaaaaaaaggaaagaaactagaaactaacaggaaacagtgtaggattgtctaagtccagggggaaattttgtggggcccagagaagcggcctaattcctcacctgatgcaggctggggggagttgagaatacatccagcccctacaggacttggcagccagggtcacagggtgagagtctgagcagacttgtttcacttctaagtggtcaagggctgtcagtgagaccccagacatggctagacaagctctcagtccccttcttgggaacttttgaagtcatcatttaaaaaagaatacaggaaccaccagccagtgacagccacgaagagagctctgcttctttgacctcttcacagtctttgctgttttgtttattttccccatagtgattgacagctgaacccttcaaggaaaaggccttgtaaattgtttcatgaacagaaaaggaaaaaaacagagcaaaataaaaaaagaacacttcccatttcccagtcagccaggactgccagaaacctanngttgagaaacaggtgttggcaacagggagaagcaaatcctcat

SEQ ID NO: 5034 - DNA, 781 bp, Homo sapiens
  misc_feature (1)...(781): n = A,T,C or G
aagcaggtagatcatttgaggtcaggagttcaagaccagcctggccaatgtggtgaaaccccgtcttaaaatacaaaaattagttgggcttggtcgtgggtgcctgtgatcccagctactcaggagactgaggacagcagaatcacatgaaccagggaggcggaggttgcagtgagctgagatcgcaccactgcactacagcctgggcaactccatctcaaaaaaaggaaagaaactagaaactaacaggaaacagtgtaggattgtctaagtccagggggaaattttgtggggcccagagaagcggcctaattcctcacctgatgcaggctggggggagttgagaatacatccagcccmtacaggacttggcagccagggtcacagggtgagagtctgagcagacttgtttcacttctaagtggtcaagggctgtcagtgagaccccagacatggctagacaagctctcagtccccttcttgggaacttttgaagtcatcatttaaaaaagaatacaggaaccaccagccagtgacagccacgaagagagctctgcttctttgacctcttcacagtctttgctgttttgtttattttccccatagtgattgacagctgaacccttcaaggaaaaggccttgtaaattgtttcatgaacagaaaaggaaaaaaacagagcaaaataaaaaaagaacacttcccatttcccagtcagccaggactgccagaaacctanngttgagaaacaggtgttggcaacagggagaagcaaatcctcat

SEQ ID NO: 5035 - DNA, 781 bp, Homo sapiens
  misc_feature (1)...(781): n = A,T,C or G
aagcaggtagatcatttgaggtcaggagttcaagaccagcctggccaatgtggtgaaaccccgtcttaaaatacaaaaattagttgggcttggtcgtgggtgcctgtgatcccagctactcaggagactgaggacagcagaatcacatgaaccagggaggcggaggttgcagtgagctgagatcgcaccactgcactacagcctgggcaactccatctcaaaaaaaggaaagaaactagaaactaacaggaaacagtgtaggattgtctaagtccagggggaaattttgtggggcccagagaagcggcctaattcctcacctgatgcaggctggggggagttgagaatacatccagcccctacaggacttggcagccagggtcacagggtgagagtctgagcagacttgtttcacttctaagtggtcaagggctgtcagtgagaccccagacatggctagacaagctctcagtccccttcttgggaacttttgaagtcatcatttaaaaaagaatacaggaaccaccagccagtgacagccacgaagagagctctgcttctttgacctcttcacagtctttgctgttttgtttattttccccatagtgattgacagctgaacccttcaaggaaaaggccttgtaaattgtttcatgaacagaaaaggaaaaaaacagarcaaaataaaaaaagaacacttcccatttcccagtcagccaggactgccagaaacctanngttgagaaacaggtgttggcaacagggagaagcaaatcctcat

SEQ ID NO: 5036 - DNA, 720 bp, Homo sapiens
caatgaagtgaaattgaaatgaataacagaaggaaatttgggaaatttacaaatatctggaaattaagcaagatatttctagataatcaaagactcaaagaagaaatcacaagagaaattagaaaatactttaagatgaatgaaaatggacacacaatatacaaaaactaatgaattgcaaccaaaacagtgtgtagagggaaatttgtagctataaacacccacattaaaagaaaatcttgagtcaatgacttaaacttccacgttatgatactcgaaaaagaaaactaaacacaaagcaagcagaatgagggaaataataattagtgtgataattgataaaatagagtacagaagaataagaaagaaaatcaacaataccaactgttggttctttaaaaagatcaataaaattgacaaaatcttagctagactgattcagaaaaacaccaagaagattcaaattactaaaataaaaaatgtaatggaggwtattactccttaccttacagaaatgaaaaaaatatataaggaaatactgtgaacagttatatatatatgccaaaaagtttttattcttcagatctctgtttttcttgaattccaattcagttggctctgtctcaaaaaaatttaaaagtatttagctttttctttgttagaaaaagttgatatcaatgaactttaataagttagataaatattgtttgcacacttagg

SEQ ID NO: 5037 - DNA, 825 bp, Homo sapiens
caggacaaaatctgatgggcatgatacattctattttcaagttctcttaaaaagtttttgtaagtaaacttgtttgctcttgagtactgaaacaaaatataagactttagagcaaatgacatatacaaaaaaaaggcacagtcacttcaactgttttctgattagaagcctaaaataacttgctaattatgatcaaaatacaagcatattatcgtaacaaaatattcttttgggaaaattttgaattaagaaaagggagcctctttgactctaattctggtaggtactctatcgattatgtgtgaactatttyaactaaaacgcaacttatttttcatcaaggcagtgaaatatattgatgaaacatagcagaattaccaaaaaaagattgtcaattttcctaagttaaatgtaaggatgcaaatgttctaatattgaggggagataaaattcaaaaccattgggactttgcttctttatccatcactttgggtagctgaacacctaacctggtaaattgaatgtttttcatggaggcttatcagcaattcagtaaaatagtaaactatgtcaactcgggagaaactgacatcctcattctccatgctagccagtttctcatccagggtgtcattgtttctaataacaattcagaatctggctgcttaaaggcacctacgtacgtggttctttctaatttgtcaaggcatttggagtgatcctatcaccctgatttcaagcaaaagacagggaggcacctgacccaaaggcctgctgtctgaacacactctgaatgggtgagcagagatgtgctttaagatagaa

SEQ ID NO: 5038 - DNA, 825 bp, Homo sapiens
caggacaaaatctgatgggcatgatacattctattttcaagttctcttaaaaagtttttgtaagtaaacttgtttgctcttgagtactgaaacaaaatataagactttagagcaaatgacatatacaaaaaaaaggcacagtcacttcaactgttttctgattagaagcctaaaataacttgctaattatgatcaaaatacaagcatattatcgtaacaaaatattcttttgggaaaattttgaattaagaaaagggagcctctttgactctaattctggtaggtactctatcgattatgtgtgaactatttcaactaaaaygcaacttatttttcatcaaggcagtgaaatatattgatgaaacatagcagaattaccaaaaaaagattgtcaattttcctaagttaaatgtaaggatgcaaatgttctaatattgaggggagataaaattcaaaaccattgggactttgcttctttatccatcactttgggtagctgaacacctaacctggtaaattgaatgtttttcatggaggcttatcagcaattcagtaaaatagtaaactatgtcaactcgggagaaactgacatcctcattctccatgctagccagtttctcatccagggtgtcattgtttctaataacaattcagaatctggctgcttaaaggcacctacgtacgtggttctttctaatttgtcaaggcatttggagtgatcctatcaccctgatttcaagcaaaagacagggaggcacctgacccaaaggcctgctgtctgaacacactctgaatgggtgagcagagatgtgctttaagatagaa

SEQ ID NO: 5039 - DNA, 823 bp, Homo sapiens
accctctaactctcctaatgccacatgtcagctcataatagccaggggcatgcttgacccagcctctcagtcccaccttccagggccaggttgggagaataagatgaaggtttacccgactgagaatgagccagtgcgggccttgccctcagccccatcatccagtgtcactgctgctcggcagcacgtccgtctgtctccactgcagtctcacttatgtatgtgtacaacaaagagaccgatgctggtactcccaaaatgtgttttgtggttgccctgcagcgtgctgcctccatgacccacacatgatgggcagctggtgtaaagagccacagacttggcctgtgagagcctccgtctccagaagggcttggatgcagccagcagttgccactctatcagcatatagtgtgaggctgaggagaacagcttttggggttttggtttttttttgtatcagaagcccatggccatcatgggtggtccagagatgccaggaggcatgagaggaggttgccaaagcttccacagtgaatgagactcaggagggcactaatgtctgctgtattgcaatttgacagattctagaaccttttgttagaaggggccccattcaaagtgggcttattttgcaagtaacagcgtaaatgggcttacctaaaatctacaaatgaaggrtgtgtttccttgaactcaagaggcctgaaggatgctgggaggtttattagaacactgtgagtactcagagggtcaataattattttttgacagtgtcagggatggagcatccctcaactgaccagacaatggccagaaattggtg

SEQ ID NO: 5040 - DNA, 744 bp, Homo sapiens
ctccatcacattttcctacttgtgtctccatttttctttctggttctcttcttctggatttcttgcatcccacatggcagattccaatcttaccgtttctctctgcttttccctgctctggccatggaaatgcttttgctgaataagagtctccttgcaccaggccctggcccactcccctaagaacctgcaggcctccttgggtctcctgtgtgaactccaatccatgaccctggctaccctgatctctgccaaattcacacaaccatcaccgcagtgagtcagcagggatgtgggtcatgttcttgcttgactaatttgacctggtaaaagaccttacacattgctatgcttctacttctactttatttagctataaaatacaaataagcaaaagtttatccatcaaaattcataagctgtggagataaaatgacatcttgtttgccaaaattctttgaacaataactagrtaagatagtaacacaatggaaaatatttggcaaaaattatcatttagtttttcgagtagttggtctgatggaacatgtttcttttgaaggctttctatagtaagggacaaaataataatagtaacaaacaataatcgtttttattctctagagaaagtaagtggtgggtaggtataatcaagtttttattattagtagacatgaaagacatcatccttctctagcatatttctactataacatacacttaggaaaatttagcagaattata

SEQ ID NO: 5041 - DNA, 2605 bp, Homo sapiens
gggggacaggcaccaggtcctggctggagggaattggaaaacaaaagtgcatccttctcaccctgcctgggtggagggaatcctgagggaggtagtttgttttgcccatggaaaccccaaagaattatttttcccccttcaatgttgattgcaatattatttcacatttccgtgtatctgttgttttaatctctttcgtctgcgctaatctcgaagtggattattaatggggaagacagagaaggagagattcatttgcaggacttattttgctgtgtgaggagccgaaagccagcagcccccagtcctctctcgacttttctctgcgtcctgtgctcctgcatcctcctgatcccacgatgcgcattgtcgcccgaactggccctcggactgtgtggagtgtgcgggaacgaatgttatagtgcggtggttgctgcccgtgtccgaagcacggtctgtccgaggtgggtggagacttcgcttcgggccaaattgtcctggggatggggcgtgtcgagtcatgtataccagtggtcaaggctatcttagccggcagggctgcaccctctcgcggtggaccctgttccgtgcgcagcatgccgaaatagtctacctgtcatggggaagcttggatagagctgtgttgttgtgcatgcccaaatcaaatactggctagtcgaactcccagtgataaatgttggggactgcctcctgccacttgagcaattcctgagtccagggtaatcagatgattaggtgtttttaatggaaatacttagggtttttttttttttttttaagtcagatcctaagtaacctgacatttaatatacataataaagacaagygttttgttagctattcgattggatcctttgacctgaggttatgcttgtgtgtgtgtctggtctgtaagcctccaatggctacctgggtgcctgaagaggagtcttgcctgtaataactctatgcaaagggctccttcttccttaggagtggtggaagggtggctgtaaagcaaacgtctagagaaagctggattccaatcttttaaattaaaaaagaggaaaaaaaggaagaggaagaaaaatggacatgaacagtggtgctaaatctcagaagaggaacttgataagtcacacatatatttagtatagatatataataatgaaagaaatgtaaaatataaaattaagaatgtgcctgacccatgttgaaaatctttgattttatttattaataatttttaagctgaagatcctgaatgcctttcttctatagacactttatctgtgatggggtggggggagagagttaatttatccagcagctattttcattataataaatacttaaattaggaaagaggtgagtaaccaactgtgaaaatctactttcttgcatcctagaacaagatctagctgtggtcgtgctaggtagctattaaccacccccaccccactcccccgccccgcaaaaaaaaatacaaaatacaaagacgtatacctctgggagtgtggatgtggcaacccatgtggtggcttgtccctcctttgagtgcaattgccagtgactcttgcattcaaagtcttgctttaggcacacattcaaagcacagttcaaagcagtttatcttaatatagtgttggatcagggtattatttgtttcagatttcatcagactggaaacaggagggtgtaacatatttaacaatattaaagcttaaaaattggtgtgaggcagctctctggtcctcttaacacctccacctttacctttccgaagaatcctaaatgctgtgaggctagaagtttatttgtgctctgaggttctcaagcactttcactctttaggaaaaaaaaaaaagtctcacagttatttaagaaattgagcctgaaccatccgaggataggagatttcttccttttccgataaatgcctgtgctcagcatcctcaaatttggctgtctttatttacttctatattagttccaattatgtgcagtgtaaaccagctttttgattaacaaaacagcagagcattggttaagaacacttaaacttcaaaaaaattcccctgggaagtgggctctgaattggttaataatgtgcagtacttgctaaattgctgacttccagatgtggaaaatatctttcttgtttaggacctatgtaacctgattggattacgacagaagcgtcacgttggaagcttttgagtgattatttaattaaccatacagtagaaagctgtattctccaggaaatcccttccatatttgcataaccaatcccttcagagcaaaggtggagtcttttctttttaatcttactttaattgtaatatcaaaaaatatatactccaaaacttagaccccatgccgtttaatatcatgctctcccttccctgctaagtttctctatggcctttctcgtttctcctcctgcctccctacacactctcccttactttgtagtgaggtctccccgaggtgtagagagattcagagatcggccaaccgagtgttctattttaatttacttagagaccctttattaaaatgccaaactactttttaatattgggatccagtccagaaattc

SEQ ID NO: 5042 - DNA, 823 bp, Homo sapiens
tctctaccaaaaatacaaaaaattagctgggcatggtgatgggtgcctgtaatcccagctacttgggaggctgaggcagggagaattgcttgaacccgggagacagaggttgcagtgagctgagatcgtgccattgcactccagcatggacaacagagcgagactccgtctcaaaaaacaaagaaacaaacaaaaacctgcctattacttatcacaagctgctttgttgcctggaaatactatttgtaatcaaaagagggaagggccaggcatggtggctcacgcctgtaatcccagcactttgggaggctgaggcgggtgaatcacctgaggtcaggagtttgagaccagcctgaccaagatggtgaaaccccatctctaaaaatacaaaaattagctgggcctggtggcaggtacctgaaatcccagctactcaagaggctgaggcaggagaattgcttgaacccgggaagtgggttgcagtgagctgagatcatgccattgcactccagcctgggcaacagagcaagactccatctcaaaaaaaaaaaaaaaaaaaagcctgcattttattgcccatgtgtttctaaggggatatgtcttcagacgcttctggggaaaggagtgaaccatagcatagttgttgttcttttggcccatctttgtcatttgattgttttggactcagtgacttytccattctccacaaaaacattcttcagtttattagttactataattacttgtgcacttgctttcaattccacagacatttattgagctcttagaacgtgccaggatgtatgtgagaagatgggggcag

SEQ ID NO: 5043 - DNA, 823 bp, Homo sapiens
tctctaccaaaaatacaaaaaattagctgggcatggtgatgggtgcctgtaatcccagctacttgggaggctgaggcagggagaattgcttgaacccgggagacagaggttgcagtgagctgagatcgtgccattgcactccagcatggacaacagagcgagactccgtctcaaaaaacaaagaaacaaacaaaaacctgcctattacttatcacaagctgctttgttgcctggaaatactatttgtaatcaaaagagggaagggccaggcatggtggctcacgcctgtaatcccagcactttgggaggctgaggcgggtgaatcacctgaggtcaggagtttgagaccagcctgaccaagatggtgaaaccccatctctaaaaatacaaaaattagctgggcctggtggcaggtacctgaaatcccagctactcaagaggctgaggcaggagaattgcttgaacccgggaagtgggttgcagtgagctgagatcatgccattgcactccagcctgggcaacagagcaagactccatctcaaaaaaaaaaaaaaaaaaaagcctgcattttattgcccatgtgtttctaaggggatatgtcttcagacgcttctggggaaaggagtgaaccatagcatagttgttgttcttttggcccatctttgtcatttgattgttttggactcagtgacttttccattctccacaaaaacattcttcagtttattagttactataattacttgtgcacttgctttcaattccacagacatttrttgagctcttagaacgtgccaggatgtatgtgagaagatgggggcag

SEQ ID NO: 5044 - DNA, 815 bp, Homo sapiens
agtgtgggtacccaaaacaaggccgtcacaccagccctttgcccttgctggtggagggcagctgccccatgcaatgaggcaaggggctaactgagctgttaacacacagctgtccacaggcagtggaactaaaggagcattgtaacactcgctctgggtccttggggcaggttgcaggcattcgctgccctgacctgggcgctgccgccagagcttgctcctgctggcacctggagtggctggccaagtctcacactcgctcatttgtcactggtctggtcacgggcccgcagrgaacttgctcctgtgtgagttccccgagtggccagccgggttctgcactcactcgctcaagtgctccctcccgcaaggggttgagcatggcaggcaaagtaaaagtttgcccccatctcaagtcccatgaacagcctgagaaaaatcctgcatcagtcaggaagggcgaggagggaactctggtgaagctgtctgtgccctggactgacttcctgctggcacgcctcacccatcctgtgtcacctggcactgataggcaggagaacctgccagagtgccgttgtcagcccatgctaacccacttaagattattttctgctctataagttgacttaaactataaagtgctgttcaagtattttgttccaggacatcaataaataatcttaaattcttcctgggactctgtggcaggctgataatggctctcaaagatgggtctatatcgttatctcagcaatgtgtattaccttatttggaaaaaggacgtttgaggtataattaagttaaggatcttgaga

SEQ ID NO: 5045 - DNA, 770 bp, Homo sapiens
ttgaggtaatttgttatggccgccacaattaaactcacactggcatcaagtgtaaatttagagtccctgatatagaaatcagtaaacatatatgtaaataaataagttaatatgggaagggaggggtctaatttagcaacttttaagtgggcaatcagcggggatgactttatggaggacctggcaagatgggacctgaaaggcccaagtamtaataagcatctgtgcccttgggtgaagacgcaaatgcaacgaatatgtgtctaagatcatatcaaaaatgttcacgttttcatcatcttattttcttctgacaacaaacatcctaagattgatatacattcccctccttatggggaagaagtgcaggctcaaagatactaaataacatgttcaagatcaaacaccttgtaggtgcaggcttggagttgtggcctgggtctcctgattccaggtccagtgttcaaatgacataacatcaacagcccttggcctcctcttctgaaagagaagcagtatgaatttcaggtctccccaggcccattgcaaattcattttatggttctaaaatgagtgcataaatttgtggtaaatgcaagtaggaaaatgtgcttctatcctgcatggcagagtccctggcacatgcagaaactgagtgcaattggcattaattcttataagtccctatactgaaatgaattaaacatgtgacactgctctctcctccatgcaggaaaatgttagcacaatcccttagagtacataaacaa

SEQ ID NO: 5046 - DNA, 615 bp, Homo sapiens
aataagccaccaccattatttagataccttggttgttttcttcctcccagatactcatacatccttgatcatgggaagcagacagaggcaatggaatgtcatctgtacttcctacttcctccttaagtactttgacgtgatgccatgaaaacaatgtttagtgatgtaacatctcaaacacctagttacacacccaagccagtatctttgatgtgacaacacatacctcacatacctaagaccttttggagtttaaggaatatgtctgccttacttgctagaatgggaaaaaagggaccccacccttgtccaaataaaaacagctcccttcagtcataaaaggaattagtctttatatatgctgcaacatgaactttaaaaacattatgctaaatgaaataagacagatacaaaaggacaaatattttatgattctacttacataaaatatctggaatatgcaaattcasagagacagaaagtagaccagaagttactagggatttggcagagaagggaataggaagtaaggagttactgcttaatggttagcgtttctgtctggaatgataaacaattttggaaataggagtgatggttgcacaacactgtgaa

SEQ ID NO: 5047 - DNA, 849 bp, Homo sapiens
ctaggcaccaaggcttggaagagttccctttgtcaacaaagggaactctgttacacacaggtgctgggagagttaagcattttctgtatgactccactggaagaggccaactggaagcatgtgtctggtctctcccagactttgccctataaatttattgtttgatggtttgattaggtgccctattgctgtgatatatcataaccatgagtataacagcttttgtgaaccctcatgaatcattgaacctcagggtagctttatggattcccaacacagatgttaacatttgccatatgttatgcttccgatctttttttgtttaaagaaatatattggccaggtacggtggctcacacctgtaatcccagcactttgggaggctgaggtgggtggaccaccgaggtcagaagtttgagatcagcctggccaacatggcgaaaccccgtctctactaaaaatacaaaaattagctgggtgtggtggcgtgcacctgtaatcccagctacttggaaggctgaggcaggagaatcacttgaacctgggaggtggaggttgcagtgagctatcacgccactgcactccagcctgggtgacagtgagactctgtctcagaaaaaaaaaaaagaaatatattacagaaacagtttaagaccgcaatatttctcctctttatttcattcccttcctccttrtccagaagtagccacaattctgaggtttgtgagtgcttttgtttctgtttcatatgtgtgtgtatatatagttataaatacgaatgtaattttttttagagatggggtctcacagtgtttgcccaagctggactcaaactcctggagtcaaggg

SEQ ID NO: 5048 - DNA, 579 bp, Homo sapiens
agtgggagataaaatgaattccctgggtttcagcagacatacacatgagttgtgaggtcagagggttaaggtttgataagaaaatgaaataagacgacagggaaatactaggtgggaaagcggaaggaattatttctgggacttcctttacttgtaagtcagggacaggaatgaataaaagcatttggaytcctgacttctgtctttccccccgccctctttcacttttatctctagcaggggaaggctagcctaatcagggatatgtccagttcagaaatgtggaccgttttgtggcaccgcttctccatggtcctgaggctccccgaggaggcatctgcacaggaaggggagctttcgctatccagtccaccaagccctgagccagactggacactgatttctccccagggtatctttctatcagtatcctttttgggagtgcattgatctctcttcaagaggaggcagcccagaactgggttaacccacagaggtttattttttttgcttttgcctggggacaggaagcagtgtctgcactagagctgctctaagatggggaagggactgaatagg

SEQ ID NO: 5049 - DNA, 775 bp, Homo sapiens
tagagatcatctgtccaatctcttcattcttcccaygagtaaacagacccagacaagtcactaagtcatgcaacacattaattctagaaacacaactagaacccactttgccattcattttactgcctcatattgccatttgttttgtttcaaattttgctaagataccaatgtttacactatacactaaaagagacacttgggggaaaatgtgggaatatgttccattactaataattgagagtttgtgtgtccctttaatttttcaagttttttaggaaatcctttcctagaaaatatcactgggacttttcaggcaataccaagagtttcaggttttactttctaccattaataataacttttacccttccataaatgtttttatttcttgttattttgtgaaaatggaaaaattaattgggattatagccattcaagacttcttgggtaactttcagatttctttaacacttctaaagtaaattaatgggactgcatataactgattacatttaagttattctggatagtcatagtatcttacaaatttttccccaaagaatgagccttataagaaacaggtataagagttcttagcaattgtttgttttttagaaagagatcagtgaacaatagtgaataaaaatttttatcttaaaaaataaggtaagactgcttagggtattcagaaaataaaagatgaatatccttaactattaacattttatttatagtttcagtagctagtggttactgaaaagatgtttgatta

SEQ ID NO: 5050 - DNA, 806 bp, Homo sapiens
cttccctagggcgtgtcccccgagagccatctctcctggctgtgctgtactttgtggccagggtctggaaattcatcagtttctctttcatgaggcactttcttgccctatatctttatccaaaaaaaaaaaaaaattgtaaatgaacttcctagaaggagcttctcttccttcctgcttctcattgattcacagtgactgtactcctcggattcctcccctttcctgtgaaaatctcttctgctttcctttcctttcatctccgttcatcctcttctttttgtcttctggacamgatgttttgtgtctcagcgattccaagcaaacaaactgttctgctatacaaaaagaataagaaaaaagagaaaatgccttgaaacactacaaagtcaatcacttgccttcaagattaagctaaaaatgtttccttgagcttcatgcttcatgtctgaacatctgaacatcccaccacttaaccagatgataacagtgttttttatttttgcttcttatttttttttctgccagtaaaccatatctgtactaaaccagggccacctttcagtgagaatgaggcaggaggctgccctctgccatcccccacatgcctctagccctatttatttatgagaagctttgtactggatacaaactgccgtaaatgttatccagctttatgggagacatcacacggtcctggtaatctgatagaaggctttaaatggataggcggctctgccaggtttggatgccagaaggttttgggctttgagagaaagaaataacaaacaaaccccaaatcagga

SEQ ID NO: 5051 - DNA, 599 bp, Homo sapiens
tttcatttaatagtgatacttgaataactcaatttattcttagcctattcgattcttttcaagtctttcaaatttaagyaaaaaatgcacttacgtcatctgcaataccaaaaattttagatgtcaagtatttaagtatgacagttccaaataaccaaaaacatccttgaataacctaaacaaaagaaaacaaaaataactttgatgcttcatattccacagacataggctaggaagaaaaaaataaatgctttaatcatacatgaaatacatattactatctacaagagaaaatgctagaaaatgcatctcaatttaaaatcaagcatgttgctcaaaatcaagggacagtaactaaaaataaaaatataatcatacaatcttatcaaaattaatatattttatagaagatttacacaaccactgcagttaaattccctttaacagtttcttatacatgcactgtttctcagatgaaacatgagtaataaataaaactggaatttttaaactacatacccaggattaactttaacttgtttcataaaaagggcaatttggtacattaaaactgagccctaaaatactataaaactgtt

SEQ ID NO: 5052 - DNA, 663 bp, Homo sapiens
tctcctcagaagaatgcacatgcccatatataaacttgaacctggtttctgcaaaaactgtctgtggatcagggttaggaatgcttccttcaaaagagtctgatatagttttgctgtatccccacccaaatctcatcttgaatttaactcccacagttcccacaggtcatgggagggacccagtgggagatgattgaatcatggggatgggtttttcctatcctgttcttgtgatagtgaataagtctcatgagatctgatggttttataaagaagagttccccygcataagctctctatctttgccttccaccaaccatgtaagatgtgacttgctcctccttgcctcccaccatgattgtgaggcctccccagccatgtggaactgtgagtccattaaacctctttcctttataaattacccagtcttgggtatgtcttctttttttttttcaagacaatgactctgttttgtttttacatttacttttaagattttctcacatatatttcttaacaagaacataaacattgtttcaattttttaatattttccttacatacaaaatattgtgtttaattattcttagaatactatgcagccataaaaatgatgagttcctgtcctttgcagggacatggatgaagctggaaaccatcatt

SEQ ID NO: 5053 - DNA, 815 bp, Homo sapiens
taaagtggaactacttagaaaatctgcaaaaatcatgcaaagaaaatcatgtaaaatcatgatctttacttaggcacttacaggtgaaatgacgaggtatctggaattgcattaaaatagatcaaggtgaaaaagactgacaaaaacattaactgttaaaacttggggctatatatcaaagacattagtttctctatgagtatatttcaaattttcctcaataaattttttaaaaattcaatttaaaattcaagccacaaataaatgctttttaaaaatttcttagattatacaaatagtgccataacatcaagaataatcccaaatcattccatatacttcaaaagatacaaaaccaggctgggtgcggtggctcacgtctgtaatcccaacactttgggaggccgaggtgggcggatcacctgaggttgtgagtttgaaaccagtctgaccaacatggagaaaccccgtctctaccaaaaatacaaaattagctgggtgtggtggtgcatgcctgtaatcccagctactggggaggctgaggcaggagaatcacttgaactcgggaagtggaggttgcagtgagccgagattgygccattgcactccagcctgggcgacaagagcaaaactccatctcaaaaaaaaaaaaaaaaaaaaaaaaaaaaaagacacaaaagcaggaactcttttccaggagcaatcccatttagttaagaaaaagaagaaaaaaatattccctagattcagccagttccttatctctactgtccttcagagtcaaatttcttaaaaaaataagcaactctgccagg

SEQ ID NO: 5054 - DNA, 773 bp, Homo sapiens
agaatctccctcgggaggcttggtggtccattttcagatgccctgtgtcattttctgtatcatayaattggatgtcacagtttctaattttcaaagccattgcattttctatttcctcttccctacagcttggctgggcaggcaggtggggcaacactagcttcattttttttttttcactttgtcagggaggaaattgaaccccggggaggtttgacgatctgcccaaagtccctgggaagtttccggccgttctagggctaaagctcagctctctcgactgcatctccttcccacccccatgtggctacccccatagaatggcgcatccacgtagatggcccagatgttgggtttaagggagagagagaaaggaagtttggggcatctgtttatgagagaaaatcgtcagccgtgcgtggaaatcttatgcatagcaaataaatgatgggcaaatacccacttgcatattcagaggcacatttcagatgtgaacatcctgtctcaccaaaacaaccccagctaagaagttccgtcgggggtggaggactttttccaagcctttgtttctgtggagtctctgtgcatggcctgctgtgatgaggtaggggttgacccagaagtctaaggaggccaccaccccgtaggaaagaggagccagcagacagcagcgccgggggttattggggacccccaaatggggaaaggtaggggtgtagacaaaatcagcagccctgtctgtatttgacaagcagggcaaggaggaagaaagc

SEQ ID NO: 5055 - DNA, 1068 bp, Homo sapiens
attgggaggagaagaggatgagatcccccaggagagaggcagtattaaaaccaggcaccctgctccccccacacacgcagcatctgctcagctccagccttggggccgcgctttacttctgcamcctctcctcaaagaacacacatttccattcagctggggcccaggaaaagatgagtgggtgtctcgaggaggatgagtacccgggtgaggctgggggccctccatggggaacatggggacactcccagcctagtgtccacatggcatgaaccctcacggggctgctcacaccaagtcagggcccagaacacaggccctgtgggcacacacacctgagttcaaatcctgggaacctctgtgatgctggataaaagacttaccctctctgtgccccaggttcccctctagcctcccagggttatgtggggattgaatgggacaaagatattaaacaattagcacagtgtcgtcgcccagggactgctcaatcggtggaggccacaccatcatcttcacaccctggcctacaaaatagagctgggattttcccttgctgtgtggccagatataagtctttccctctctggactttacacaaaggaggctctgcatcctcctttgtgtaaggagagagttgggcagtgagactcagggttcttcctgggctcacagtccaagtcacaaggaatcacattatctagcatcctacgactgggttaaattaaaacagggggtgagaacgagtgagtctagaagtctaactctataaaagggaccacagttccaatttgaaccaacagttgagttaaggatgctgctaaagtcagccactgggtggcctaacggatctcttagatgacgtaaaactttgggtttgatgtgacagaaccaacactccctcaagttacccacagaagctactggctgtgaaatcctaattacagcataatgctgccaagtgaaaggggtagacataagcaaggagaaattaagagaggtaagagattcaccacgatgaggagtcttcttcagtgttttggggaaagctgtccacagcgtgaagtc

SEQ ID NO: 5056 - DNA, 684 bp, Homo sapiens
tatgttttaacactttaaatgtttcttactaatttttaggtttattgcatagtgatcaataaagatataaatttcctgcctttgaatttatattgaggatttctttgagttctaatacatagttgcttttcataaatgttccatgtgttggaaaagcagatatgttttctaataaactagaagtttaatatgtatctaataaatcaaatttttgcatttttattcaaattctccatacattttgcttatgcaaattatcagacttaatgcaatctctcataatgattgtttccaycaattttacatatatttctggtagttttacttcatagatttcaatgacatattatacaaatataaagatttattactactaaagcttcattgtgaattatactttttatgaatataaaatagttttttctcgaatttttctttgatattatcttttgacccatttttctttctatttttaactatttatcatactcatgcacatcttacattttcccttttttgtcaatttcacattcaagtgctttgcatatctatctatggggtcttaatgtttttcagtaaatttgcatgaggatttaaaatatgacaaatattaatcctttgcctctttcctgtaagtattctcttgaattataatcattgtatgttgtgtacaaaattcctttt

SEQ ID NO: 5057 - DNA, 750 bp, Homo sapiens
ccagaaaacaaattgacattagacaatgtggcagaagggttccaaatattaaaggctgctttctacttcttttatgacataaccccttctatggtatgggcactgaaactaaagcaaacagtaaaaggattggtactgtatagaaatatttttagagaaattaaaaagcaaaaaagtcaaacagaaattacaatatgcttccatgaagccataccaagtgtgcctgcctctcccgcctccccttccaccacctccatcttttcatttctgccaccactgagacagcaagaccaacccctcctcttccttctctccttagcctactcaatgtgaagatgaccagaataaatattgttgacttccacttaatgaatagtatttaaatatatttttcttatgattttttagctaacatttttattttctctcatttacttcattattaatataaggatacagtacatgatacatataacattaaaaatgtgttcattactgtgtatgttaccaataaggcttccggtccacagtaggctcttagtaaggttttgggggagaacaatgtgataaacaaattttcaagtgtgtgggagtttggctcgcctaayccctgttaggagttcaagggtccattggaaaatgctaaagtattgtctcttcagctttaaatttttgaaaacaaatggcttttcttaggtagaaagttgtttgtcacatttctccccagtgtcttttgaattgttaaggaga

SEQ ID NO: 5058 - DNA, 759 bp, Homo sapiens
gtgttagagacagatacagttaagaaacagattaaaatgcgtgaacatgtatccaaaataattattctacttgggttatattttaatattcagataatcaaaataaagcaattttaaatattgctttaatgtacacagtatatgttacttttattttttggaaattaatttatttttgaaaatactttttgaactgttttaaagatctatcaataaaataaaatagtaacttaaaaacatgtcacagagttacctaatttgaatttttacccccttttaccctcaaaagctataaattatgtgatctttccacctatgtcctcactagcaaatctagaccccaacactggcaacaagctaaaggaaacaggcttttccctttttagaaggcaggaaagaattgtgaatcctcattgttgtctcgtcacctatttttttctygcaacagtccgtttcctcataaggtcacataaactgagcactatgtgctcaaaagctgtctgaagttctttgcatgaatcaactcatttaatcattaaggtagccctatgataggtattgttattattctcatttgcagataaggaaacagaggctttgttcaagttagcttgcccaaaagtacatagtttataaaggtcaaatctgagattaggatcatgaatctctgtcattaactaccctccatatttcccttttaaaaaattctgcttcatctgccaaatttccagatttcttggaacaattataatcattcaa

SEQ ID NO: 5059 - DNA, 1330 bp, Homo sapiens
caaattacagacccattttcagagtgagtgcttttgattttgttttcttttcttttttttttttttaattttgttttcttctgtgcccactgtcctctgtgtggtgatatttcaggtgcttcagctgacctactgggcctcagtctagaatcagatatgataattgtgggtcaagggtcctgccctttgagttaattgggctattttcgatcctctcatagagtatggtcctgaggctgtttatatcttcccacttatctaagcctagagtattagataaactgtagttctaggcagagattggcagcagtattttttagcttcctttcagctccagcatcattgctggccttgagcagtgggtctggcccagatatctccgtttcttcatcctcctttgctttctgtcattactacctgcaggaagtgcacacctggtctagactccggatccagcaagcctagagcttcagtcctgcttgcaactttgtgtatctattctgtttctccaaatagaggtttatcttgtttttgagcctaattaaaaaaaattgttaaaaaatattttatccattattgtgtatttagagcagagaggatgcatcaaagaatgtacttactggccactttctagaagatttaattagccaagctcctttctcaactttatacaragacttttttctttgttatggcattgcctaggccttccagtacaagaataagtataataatgggcattttaatctttttcctgagtggtaatgtttccagtgtttcactgttagatatgatgtttactgttggtttttggaagatgtcttttgtcaatttaaggaagttttcttctgttcttggtaaatatttttaattgggtgttgaattttatggaggcctttttttggggcatttcttgaaattattttttcccttctttaacatgtcaagaataggacagatctctctgagttgtaggtaactgagagaaacagatgtatatgatttacttgttaattcacttttaacaaaaaacctcacaacctttaaagaaaacacattttaaacttgaatttttgtatactaacattatatataagttaaaatagggctgaaatgctgtagtaatcaggtttggactaaatatcatcgtaacttcactatatttgaatagtacctaataatatcaataatagtagctaacatttattgggctcttactggatgccattgtgctaaatgctttacatgatattgatttaagagttaccacagccccgtgaggttatttagctactcagaactctttgttgtagtggagtgcagttactga

SEQ ID NO: 5060 - DNA, 818 bp, Homo sapiens
ggtctcaaactcctgagctcaagtgatctgcccacctcggcctcccgaagtgctgggactacatccgtgagccaccgcgctcagccctttgagaggtttgaagccgaggagctgtgtgtgaatggaccagtgggtaaggacgaaaagaagagatggaggaaatgagagggaggaaaaatagtagagaaaaaaaaaggaaaaaatacagccagctcctcttgtcccaggcagaaaagcactgggccggtccccaccattccattattggccgctagggggggcgctgcaacttcccctgcccactcacaaacctaaccttcttgtccacccttaagtcatggctggggttccaagatcagagagatcagggtctcttggccctgagtttgaccccacgcccttgtcagaatagccttgagaatcctcagggccccctcgggcagggcacagcctgagccacctcttcccagtcccacccagggcacctctcagcttcgggcatcaggggaaagaagcccatgggtcatcactgatccccaaatgccgcataccccagcctaggcctcagctcaaccctggaccccaagagcacaggctttggggtcgaccagaagcaaaagttagaaaccagctccgacttcctggctgtgtgacccaarcaagtgtcacaacctctctgtgcctgtttccccttctctaaaatggggataaaaacagtccccaactcacaggttgtggtgtaagttaataagaataacattggccaggtgcagtggctcatgcctataatcccagcactttgggaggctgaggcgggt

SEQ ID NO: 5061 - DNA, 828 bp, Homo sapiens
cagtcccatttgcacagcacctggcacggtactgtttatgcatcggatttttttaatgatctatatttgttcacttaatggctgctgtaacaaattacgaacaacttggtggcttaaaacaacaggaatgtattctctcctagttcagggcgtaggaagtttgaaatcggtagcactgggctgaagtcaaggtgtcggcagggccgtactccctcgggaggctccaggggagaattagttccatgtctctttcaactcctggaggaaggttctaattggcgagggacaaacagactgagatactacctgtgtgtggtgcttagagacaggctgcttgggtttacatctcagctttgccacttgccaaaagtgtgactttaggcaagttccttttcctctctgagactcagtttcttcatctgtaaaatggaattgataatcatacctggtatcctcagcytgtgttagcgttactccaatcttggcagtggtggcttgtaatctctctctgctccatcttcacagcacatcctcctcaatgtgtgtcacatctccctctgcctccctatttttttctttcccctcccttttttttttttttttttttttagacagggtcttgctctgtctcccaagctggagtgtagcagcatgatcatggctcactgtgcagcctcaacctcctgggctcaagtaatcctcctgcctcagcctcccaagtagctgggactataggtatgtccccacacctggctaatttttgtattttctatagagacagagttaacaccatgttgcccaagctggcctcgaactcccaggcttaag

SEQ ID NO: 5062 - DNA, 700 bp, Homo sapiens
gtccacttatgaggaactgaggcctcccgccatcagctagcatcaccttgtccaccatgagagtgtcccatggtggaagccaatcccccagatccaaccttcagaggaccgcaaccctggctgatattttgactgccacctcctgaaagatcctgagccagaattgctcagctaagcaactcctgagttcctagtccacagagataatgtgagaaaataaatggctattattttaagccactaagtcttgggaatatctgctttgcaacaatagagaactaaytcactaacctgttatcggctcctagcccaatgtttggcatggtggacatctaataaatagctgtttgtgcatgagcacataatattattccataaggttgctttgtaggttaaatgagataatcgatggaggccctcagcatagtgcctggtgctgagcaagagctcagtaaataaccacccctggcatcattgttatcttcatcattaccagcattagttgtccatgttgccagaggcaggcagagtctctggtatttgactctcagagtttaagcagtgtctgaagaagaaagataaagagagaagcaggaaatgatcagggagggaagattgagggaaaaagacaaagactgataaaaaagagaagaaagtataagagaagtgcttacagatggcctgtggagtcaggaaacct

SEQ ID NO: 5063 - DNA, 801 bp, Homo sapiens
ttttggttggagaccttgtgattactgccaaattggttgtttataataggtaartgttgattgagcagagacaaagctggaatcttagcattgaatacccccagccttggcccaagtatgcaggaggtagagagttgggctatttggaaaagagacagataattaaatcttttagaggagaatgcttttgaatgcatatatgtaagttaagccataatttaaatgctcaaatcctaggcggctccagaatttcctccaacacctgaattcatggtggaggggtgagaccctgacaagccttgacagtcttttaggcattcatttatttttcgccagaccagtttggttttgacttaaatcttgggtcttaagtttttctctttttctgtaaccctattgattgaaaagacaatttttttttcttttggttttccactaattctggtatgataaggtgaggccaattttaaataactattttttacatctgcttatcaaccctaaaacctaattctatacccatcttcatctttttttttttttttcaagatggagtcttgctctgtcacctaggctagagtgcaatgactcaatgtcggctcactgcaacctccacttcctgggttcaagcaattctcccgcctcagcctcccaactgactgggactacaggtgcacaccaccatgcctgactaattttttttttgtatttttagtagagatggagtttcaccatattggccaggctggtctcgaactgctgacctcaagtgatccgcctgccttggcgtcccaaagtgct

SEQ ID NO: 5064 - DNA, 637 bp, Homo sapiens
ggttattgtgaggatgaaatgaaatcactgatgccaagcacagtccctgacttacagaaacactcaattaacagtagctttaaaaatctgacctggtcatggcagtaaacacactgatgggtacttaagggcctattaaatgctgttgaccactggacacgtgctcccacaatggccctctctccaagaaccttgacccaagctaggccaattggattttgttttgctaaaatttgtaattgctactcaggaattccagtccttgtggccaggcacggtggctcacatctgtaattccagaactttgggaggccaaagtgggaggattactttagcccaggagttcaggaccagcctggacaacatagtgagacccccatctctacaaaaaaaaaaaaagaaaaaaaagaaattccagttctttactgttgcctcttggagcaagctgacagataagagctgaagcggccactgtatgtcctgtgtccacagaagtgggggaagactgtgggaagagggaaagatgaaaacaggcagaatgaggagcggagataagaggccacagggtctgggggagaagtggggaaggaggaaagagagcatgcacrtgcacccttagttttcataagccacacca

SEQ ID NO: 5065 - DNA, 768 bp, Homo sapiens
agtcttgggtagttctttatagcagtgttaaaatggactaatacccatgtaaccagcacccatttcaaggcactcagcacaaccagcacctatgaggttccatttttcaacagagtatcagaacaaactctcctgtgatgtgggaactgtcactggggttgttgcccaaatatttccagctcgctgcctcctgttcttaaggtaggattgcacttctctgctgcctaccaggtgcagccactgacatgctctggcctatataagcacaagtgatgagtatcacttctccatggtccctattatgctgtggtgattgtggaatctgtgatgcaatggagcttccatcagcttcagtcccaagtgactctgtggagcagagcagccctgcataccacaaagggcatgcagcatgaagacaaatacatcttttgtagttaagccaatgaaattaagggcttgttacttcagcataacacaacccaacccaacctgatgataatcaaggtgayagctcggtaaagatctgaagagataaaagagtgaatcttctggaaacctaggggaagaacgacccagagacagcaaacacaaaggtcctaaaacaggaatgtgtatggtgtatttgagaagcagcatttgctgtgatctgaatgtttgtgtccctcccaaaattcacatgttgaaatcctaaccaccaaaatgtgatggtattaggaggcagggcctctgggaggtgattaagttatgaggtcagagtcttcatgaatg

SEQ ID NO: 5066 - DNA, 768 bp, Homo sapiens
agtcttgggtagttctttatagcagtgttaaaatggactaatacccatgtaaccagcacccatttcaaggcactcagcacaaccagcacctatgaggttccatttttcaacagagtatcagaacaaactctcctgtgatgtgggaactgtcactggggttgttgcccaaatatttccagctcgctgcctcctgttcttaaggtaggattgcacttctctgctgcctaccaggtgcagccactgacatgctctggcctatataagcacaagtgatgagtatcacttctccatggtccctattatgctgtggtgattgtggaatctgtgatgcaatggagcttccatcagcttcagtcccaagtgactctgtggagcagagcagccctgcataccacaaagggcatgcagcatgaagacaaatacatcttttgtagttaagccaatgaaattaagggcttgttacttcagcataacacaacccaacccaacctgatgataatcaaggtgatagctcggtaaagatctgaagagataaaagagtgaatcttctggaaacctaggggaagaacgacccagagacagcaaacacaaaggtcctaaaacaggaatgtgtatggtgtatttgagaagcagcatttgctgtgatctgaatgtttgtgtccctcccaaaattcacatgttgaaatcctaaccaccaaaaygtgatggtattaggaggcagggcctctgggaggtgattaagttatgaggtcagagtcttcatgaatg

SEQ ID NO: 5067 - DNA, 808 bp, Homo sapiens
taacagccaccacctcatagtgttgtcacagtgacttcatgagcgaatgaagcagaggcagattacctgaacaggggacagttcctgggcttgctggcagagtctctcctcttctctgcctaagggctcygccccacctcatggcagcctgcactgccttcctgtctctctttgggatggttcaagggtgcattctatgcagctccccagtggaaatccaaggggactgagctggggggttgagtgcttgctgttttcctcccttactctggtccctctctccctctccatacttctgcttctgaggatcatgatcaattcccaaataaaccacttacatctatgtccctgtttcaagctttgctttgaagctttgttttggaaaacccacatcaagaaaatgacatatataaactatttagcccactgcctggcaggctgtataagaagaagaaaaataagaacactagcagcaggctcagtgcagtggctcacacctgtaatcccagcactttgggaggccgaggtgggaggatcacttgagctcaggagttcaagaccagctgagcaacatagcccaaaatacaaaaattagccgggcatggtggcacatgcctgtagtcccagctatttgggagtctgaggtgggaggacctcttgagcccgggaggtcaagactctccagcctggatgacacagtaagaccctgtctcaaaaaaaaaaaaaaaaaaaaagaaagaaagaaagaaaagaaaagaatagtagcagctcttcttaaatgccaggccctttacatacattgcttatt

SEQ ID NO: 5068 - DNA, 546 bp, Homo sapiens
tttttctgccctctgttatattttagagccacccttcttcattcccttcatagcatgaatggatctgagtgcatcacatccattgatttgttggcatattcatggcttctctccctggctcaggaacacattagattttcctggaccctgtgcgcttttgccttcatggggctccttccaccataactatagcaacattaaaaattatttttgataaaactttaaatatttaaacattttatttttttctatttaggcaaaatgtaatcrgttttcattgatttttttcactgaagttttgtttttctgatatgagaaaaaataaaacattccaataaccctaagattttattttttctttctgattgtaaaaaatttaaaacactatggtgagcccctaaaagtagtgggtaagttggccccactctccatggaaggtaagccccatgagggcaggaatcccatctgcctactctctctccttggaatcccttcctactttttctccttgaaatcccatcttcctgctccctcttgttggaattc

SEQ ID NO: 5069 - DNA, 546 bp, Homo sapiens
tttttctgccctctgttatattttagagccacccttcttcattcccttcatagcatgaatggatctgagtgcatcacatccattgatttgttggcatattcatggcttctctccctggctcaggaacacattagattttcctggaccctgtgcgcttttgccttcatggggctccttccaccataactatagcaacattaaaaattatttttgataaaactttaaatatttaaacattttatttttttctatttaggcaaaatgtaatcagttttcattgatttttttcactgaagttttgtttttctgatatgagaaaaaataaaacattccaataaccctaagattttattttttctttctgattgtaaaaaatttaaaacactatggtgagcccctaaaagtagtgggtaagttggccccaytctccatggaaggtaagccccatgagggcaggaatcccatctgcctactctctctccttggaatcccttcctactttttctccttgaaatcccatcttcctgctccctcttgttggaattc

SEQ ID NO: 5070 - DNA, 522 bp, Homo sapiens
cacggcctgccaggcagggacgggagagatggtgtcaaaggagaccctggccctccaggtactgtgctgcagaccccaccctcagctgagggacacagaccccttttcaggaggcccatctgtccaggcccctaggctgtgggccatagtgagctgggggctatagtaagctgggtgggacttcagtctgcagggstggtgggttcctggggcccttatgatggcgcatcctggagagtctgtcctcatagtgcccacggagtgatagctgagccagccccggtgataatgggcatcgagtctcactagctccaaccagttgtgggtgacagatcctacacatccatgtctcttttctctgcaggccccatgggtccgcctggagaaacaccatgtcctcctgggaataatgggctgcctggagcccctggtgtccctggagagcgtggagagaagggggaggctggcgagagaggccctccaggtgagcagggcggggcaggtgggcagtggaaacatggg

SEQ ID NO: 5071 - DNA, 780 bp, Homo sapiens
caagcgtgcacatgcaggtgttggggaaaggaatgatgcttgcttttctgatgtctttgaatggccaagaggagacaagcagacacaattcactccccatttcataagaaagcaagttctctgcctgtcttgctttccactgaatcctaggaaattgcaccatttctggcaataagtaattgttacttagatgaatgaataaatggaggagagtctaaaagtgaatttagaaaactgcaattggaagaggaagagaagacacagagagaggcagagatggagagactggggagaatctggtagcagagaccctaggtgagggaggtggcttagagacaaagtggtcagtggcctgaccyggactcctctgctctcagccctcagtctgcagggctccataatgacagtaggagagaaggtcttctccagcaatgggcagtccatcacttttgatgccattcaggaggcatgtgccagagcaggcggccgcattgctgtcccaaggaatccagaggaaaatgaggccattgcaagcttcgtgaagaagtacaacacatatgcctatgtaggcctgactgagggtcccagccctggagacttccgctactcagatgggacccctgtaaactacaccaactggtaccgaggggagcctgcaggtcggggaaaagagcagtgtgtggagatgtacacagatgggcagtggaatgacaggaactgcctgtactcccgactgaccatctgtgagttctgagaggcatttaggccatgggacaggga

SEQ ID NO: 5072 - DNA, 780 bp, Homo sapiens
caagcgtgcacatgcaggtgttggggaaaggaatgatgcttgcttttctgatgtctttgaatggccaagaggagacaagcagacacaattcactccccatttcataagaaagcaagttctctgcctgtcttgctttccactgaatcctaggaaattgcaccatttctggcaataagtaattgttacttagatgaatgaataaatggaggagagtctaaaagtgaatttagaaaactgcaattggaagaggaagagaagacacagagagaggcagagatggagagactggggagaatctggtagcagagaccctaggtgagggaggtggcttagagacaaagtggtcagtggcctgacctggactcctctgctctcagccctcagtctgcagggctccataatgacagtaggagagaaggtcttctcyagcaatgggcagtccatcacttttgatgccattcaggaggcatgtgccagagcaggcggccgcattgctgtcccaaggaatccagaggaaaatgaggccattgcaagcttcgtgaagaagtacaacacatatgcctatgtaggcctgactgagggtcccagccctggagacttccgctactcagatgggacccctgtaaactacaccaactggtaccgaggggagcctgcaggtcggggaaaagagcagtgtgtggagatgtacacagatgggcagtggaatgacaggaactgcctgtactcccgactgaccatctgtgagttctgagaggcatttaggccatgggacaggga

SEQ ID NO: 5073 - DNA, 780 bp, Homo sapiens
caagcgtgcacatgcaggtgttggggaaaggaatgatgcttgcttttctgatgtctttgaatggccaagaggagacaagcagacacaattcactccccatttcataagaaagcaagttctctgcctgtcttgctttccactgaatcctaggaaattgcaccatttctggcaataagtaattgttacttagatgaatgaataaatggaggagagtctaaaagtgaatttagaaaactgcaattggaagaggaagagaagacacagagagaggcagagatggagagactggggagaatctggtagcagagaccctaggtgagggaggtggcttagagacaaagtggtcagtggcctgacctggactcctctgctctcagccctcagtctgcagggctccataatgacagtaggagagaaggtcttctccagcaatgggcagtccatcacttttgatgccattcaggaggcatgtgccagagcaggcggccgcattgctgtcccaaggaatccagaggaaaatgaggccattgcaagcttcgtgaagaagtacaacacatatgcctatgtaggcctgactgagggtcccagccctggagacttccgctactcagatgggacccctgtaaactacaccaactggtaccgaggggagcctgcaggtcggggaaaagagmagtgtgtggagatgtacacagatgggcagtggaatgacaggaactgcctgtactcccgactgaccatctgtgagttctgagaggcatttaggccatgggacaggga

SEQ ID NO: 5074 - DNA, 846 bp, Homo sapiens
agcaaccaagcagaaagcgccccttccctctgccctggggtccagtcacaggggcaggatggtggtcagaccaagaggtgacactctgggcccttgtcatttaagcagctggcctctctggctggcctggatttgttaagcccaggcagctccttgactccacagatggtcaccaggtgataagtgattgcccagcccttcctcctttgaactgagcattgtgtctcttcttcctgggagctgttttgcactgtcagttcctagggattaggtgcgtgtttaggctggatgaactcatgaatgaaaatattttgcttgttctttcggcagtggagacctgtacagtgagtccctcttttctctctcctgtctcccccagcaccacctgctcaggtccaccctaataacatcagccaaggcctctacagcagcccccaagctgcctctggatagttcagacaaggcctctgtgctgtgatggaaccaggtgacccgcagcctccgggccaggtgagtgctttcttgatattttcttctggttcatgttatattcttcagcacacgatggcagaggggcagccccagcctcttctgtgttaagagcaagggaggggttggggagaggaatcggccccgtgtttatgtgcttcgcccagctttgattccggtgccrtggacttcctgaaggtcctgggggtgtgggtcatgagaccagggaactgagtcagccctgtcatgttggaagtatgggctcatggaagaggcaggaggatcagagttcaaatcttagctctgcctccttttagttgtgtgaccttgggaaagtcatgcccagtttacagatga

SEQ ID NO: 5075 - DNA, 1698 bp, Homo sapiens
catcattaacgggtccgtgtgatagcgtgggacccaggcctggctatgggaatgggttagggctgagtccactgacgttcaatcacagagctttgctgacaccactggaatgggtgcccgattttcactggagttgctcagctgataggaaggagatggctgtgttcccactctgcaaaggaaggcctgcccaacatgggggatggcagtggagagatgtagaaagatagagtgttgtggtcactgtctgaagccctggggccatgtgtgtctgacctagcaacatcagactttcccttttcccttcaggccatcttgagttgggtttctgtcacttaagtctaaagagcctcgttaacggtaaagactctcatttacagtaggaagcgtttccacatcctttgtctcattggtttgtacaatagccctaggaggctgtttccagatgatgaaatgaaggcttagagagttgagtcactgggctgagaccctggtctgttagacatcaaagtccacgtggtctaccagggcaccttggaggttaggaaggaaggatgctagagagtgggacttagacttgagagaaaaggatggaaggaaaacgaaattgaggacaaaactcaaaagtacgtcttatggtctgtgaagggacaggtggggaagaaaaaaagtacagatgaaagagaaaatgaaggagaaggtggtgagatcggtaaggaagtgagtcagaatcagagaactataaagtgaaagaaagatgacattcaaattccctacgttccaggcaaatgagctggtccttaaacaactgtccacaggagaggcccagagtcagcccacgtttcattgcatgatcgtatttcaaggtgactaaaaacatcacctcttccttgaagccctcaggaaccctcctactctgcagcccccatcagtgtctcctttatcacactggccactttcagcctccccatttcacttatttaggtacatgactcatctctcttgcagggaagtccatgtcttactcatctttgattagacccaagctcctcaccttatgcctgcacccggtaggggctcagtgcatttaaaaatacatatatttatttgaaggaaatgagtgtcccaataagaagtaaatttagggccgggcgtggtggctcacgcctgtaatcccagcactttgggaggccaaggcgggcagatcactggaggtcaggaattcatgaccagcatggccagcatggtgaaatcccgtctctactaaaaatacaaaaattrgccaggcatggtgacaggtgcctgtaatcccagctactcaggaggctaaggcgggagaatcacttgaacccaggaggcagaggttgcaatgagccgagatcgcgccattgcactccagcctgggtgacgacagcgaaactccatttcaagaaaaaaaagaaaaaggaaaagaaggaaaagaaatttaggagaaggagagtaacaggaagttggagaggggaaaagcgagatggggcacagagacagagagactgagtcaggaagggggtgaaggagggagagaaggtggaggcctgagaagggagaaagagtgtcctgcttgcgtagagctgagggtctctgctggccctgtgtggggttcagttgcccttgcccctggggatggggaaaccatcaggaaaggactcagtttgctca

SEQ ID NO: 5076 - DNA, 1698 bp, Homo sapiens
catcattaacgggtccgtgtgatagcgtgggacccaggcctggctatgggaatgggttagggctgagtccactgacgttcaatcacagagctttgctgacaccactggaatgggtgcccgattttcactggagttgctcagctgataggaaggagatggctgtgttcccactctgcaaaggaaggcctgcccaacatgggggatggcagtggagagatgtagaaagatagagtgttgtggtcactgtctgaagccctggggccatgtgtgtctgacctagcaacatcagactttcccttttcccttcaggccatcttgagttgggtttctgtcacttaagtctaaagagcctcgttaacggtaaagactctcatttacagtaggaagcgtttccacatcctttgtctcattggtttgtacaatagccctaggaggctgtttccagatgatgaaatgaaggcttagagagttgagtcactgggctgagaccctggtctgttagacatcaaagtccacgtggtctaccagggcaccttggaggttaggaaggaaggatgctagagagtgggacttagacttgagagaaaaggatggaaggaaaacgaaattgaggacaaaactcaaaagtacgtcttatggtctgtgaagggacaggtggggaagaaaaaaagtacagatgaaagagaaaatgaaggagaaggtggtgagatcggtaaggaagtgagtcagaatcagagaactataaagtgaaagaaagatgacattcaaattccctacgttccaggcaaatgagctggtccttaaacaactgtccacaggagaggcccagagtcagcccacgtttcattgcatgatcgtatttcaaggtgactaaaaacatcacctcttccttgaagccctcaggaaccctcctactctgcagcccccatcagtgtctcctttatcacactggccactttcagcctccccatttcacttatttaggtacatgactcatctctcttgcagggaagtccatgtcttactcatctttgattagacccaagctcctcaccttatgcctgcacccggtaggggctcagtgcatttaaaaatacatatatttatttgaaggaaatgagtgtcccaataagaagtaaatttagggccgggcgtggtggctcacgcctgtaatcccagcactttgggaggccaaggcgggcagatcactggaggtcaggaattcatgaccagcatggccagcatggtgaaatcccgtctctactaaaaatacaaaaattggccrggcatggtgacaggtgcctgtaatcccagctactcaggaggctaaggcgggagaatcacttgaacccaggaggcagaggttgcaatgagccgagatcgcgccattgcactccagcctgggtgacgacagcgaaactccatttcaagaaaaaaaagaaaaaggaaaagaaggaaaagaaatttaggagaaggagagtaacaggaagttggagaggggaaaagcgagatggggcacagagacagagagactgagtcaggaagggggtgaaggagggagagaaggtggaggcctgagaagggagaaagagtgtcctgcttgcgtagagctgagggtctctgctggccctgtgtggggttcagttgcccttgcccctggggatggggaaaccatcaggaaaggactcagtttgctca

SEQ ID NO: 5077 - DNA, 1698 bp, Homo sapiens
catcattaacgggtccgtgtgatagcgtgggacccaggcctggctatgggaatgggttagggctgagtccactgacgttcaatcacagagctttgctgacaccactggaatgggtgcccgattttcactggagttgctcagctgataggaaggagatggctgtgttcccactctgcaaaggaaggcctgcccaacatgggggatggcagtggagagatgtagaaagatagagtgttgtggtcactgtctgaagccctggggccatgtgtgtctgacctagcaacatcagactttcccttttcccttcaggccatcttgagttgggtttctgtcacttaagtctaaagagcctcgttaacggtaaagactctcatttacagtaggaagcgtttccacatcctttgtctcattggtttgtacaatagccctaggaggctgtttccagatgatgaaatgaaggcttagagagttgagtcactgggctgagaccctggtctgttagacatcaaagtccacgtggtctaccagggcaccttggaggttaggaaggaaggatgctagagagtgggacttagacttgagagaaaaggatggaaggaaaacgaaattgaggacaaaactcaaaagtacgtcttatggtctgtgaagggacaggtggggaagaaaaaaagtacagatgaaagagaaaatgaaggagaaggtggtgagatcggtaaggaagtgagtcagaatcagagaactataaagtgaaagaaagatgacattcaaattccctacgttccaggcaaatgagctggtccttaaacaactgtccacaggagaggcccagagtcagcccacgtttcattgcatgatcgtatttcaaggtgactaaaaacatcacctcttccttgaagccctcaggaaccctcctactctgcagcccccatcagtgtctcctttatcacactggccactttcagcctccccatttcacttatttaggtacatgactcatctctcttgcagggaagtccatgtcttactcatctttgattagacccaagctcctcaccttatgcctgcacccggtaggggctcagtgcatttaaaaatacatatatttatttgaaggaaatgagtgtcccaataagaagtaaatttagggccgggcgtggtggctcacgcctgtaatcccagcactttgggaggccaaggcgggcagatcactggaggtcaggaattcatgaccagcatggccagcatggtgaaatcccgtctctactaaaaatacaaaaattggccaggcatggtgacaggtgcctgtaatcccagctactcaggaggctaaggcgggagaatcacttgaacccaggaggcagaggttgcaatgagccgagatcgcgccattgcactccagcctgggtgacgacagcgaaactccatttcaagaaaaaaaagaaaaaggaaaagaaggaaaagaaatttaggagaaggagagtaacaggaagttggagaggggaaaagcgagatggggcacagagacagagagactgagtcaggaagggggtgaaggagggagagaaggtggaggccygagaagggagaaagagtgtcctgcttgcgtagagctgagggtctctgctggccctgtgtggggttcagttgcccttgcccctggggatggggaaaccatcaggaaaggactcagtttgctca

SEQ ID NO: 5078 - DNA, 579 bp, Homo sapiens
cctcccgcctcagcttcccaagtagctaagactacaggtgcgtgccaccatgcctggctaagtttttaaaattttttgcagacaggttctcattatgttggtgaggctggtctcaaactcctggcctcaagcaatcctcctgccttggccctccaaaatgctgacattataggcatattatttttttaagtatgttagaggccatcacacctgggctataagatactttaaaaaataatatggcttcatcctggctaaaacagtgaaaccccatctctactaaaaacacaaaaaattagccaggcatgatggcgggcacctgtactcccaggtactcgggaagctgaggcaggagaatgacatgaacccgggaggtggagcttgcagtgagccgagatagcgccactgcactccagcctgggcgacagagcgagacttcgtctcaaaaawatatatatatatataataataataataatatgtcttataatgtgacaaatatacataatatgaattatacaaataaataaaggttgcacaaataggtataatatattagctctacacttacgacagata

SEQ ID NO: 5079 - DNA, 579 bp, Homo sapiens
cctcccgcctcagcttcccaagtagctaagactacaggtgcgtgccaccatgcctggctaagtttttaaaattttttgcagacaggttctcattatgttggtgaggctggtctcaaactcctggcctcaagcaatcctcctgccttggccctccaaaatgctgacattataggcatattatttttttaagtatgttagaggccatcacacctgggctataagatactttaaaaaataatatggcttcatcctggctaaaacagtgaaaccccatctctactaaaaacacaaaaaattagccaggcatgatggcgggcacctgtactcccaggtactcgggaagctgaggcaggagaatgacatgaacccgggaggtggagcttgcagtgagccgagatagcgccactgcactccagcctgggcgacagagcgagacttcgtctcaaaaatawatatatatatataataataataataatatgtcttataatgtgacaaatatacataatatgaattatacaaataaataaaggttgcacaaataggtataatatattagctctacacttacgacagata

SEQ ID NO: 5080 - DNA, 579 bp, Homo sapiens
cctcccgcctcagcttcccaagtagctaagactacaggtgcgtgccaccatgcctggctaagtttttaaaattttttgcagacaggttctcattatgttggtgaggctggtctcaaactcctggcctcaagcaatcctcctgccttggccctccaaaatgctgacattataggcatattatttttttaagtatgttagaggccatcacacctgggctataagatactttaaaaaataatatggcttcatcctggctaaaacagtgaaaccccatctctactaaaaacacaaaaaattagccaggcatgatggcgggcacctgtactcccaggtactcgggaagctgaggcaggagaatgacatgaacccgggaggtggagcttgcagtgagccgagatagcgccactgcactccagcctgggcgacagagcgagacttcgtctcaaaaatatawatatatatataataataataataatatgtcttataatgtgacaaatatacataatatgaattatacaaataaataaaggttgcacaaataggtataatatattagctctacacttacgacagata

SEQ ID NO: 5081 - DNA, 853 bp, Homo sapiens
agaatctgaattcttaatcactgtagtaccttgtctccatactatatatttcttcttaagcagaaggactgagaaactcatttttagctgcctcttaggatgtgtttgaaattatgaacctaaattygaccaagtgtttttcgggggctgttgggagaatggaatcaattaatgcttcaaagcacttgagaacccttaatgtaaaaaactgttatggaaagtgtatacctctctgtaaagccaactgtctgttattcccaaattcttatttgtgctttgtatgctagttgcttccaaatgggatctatttctatcggccacattctgaatatgacacttttcatttaaagtcagttgtacattatagaaatcctctaagaaacctgtttagaaaccgttctatccaaagtactttgcatagtttctaggttataagggatttgtttatggtgacaagattgactgctgaaatgtgtgcttgggagtgaatgcctcagaagtgtagcaatttactacaaaacgtgtgtatctgtgcacgatggaattttcttactttgtatgccagtctgccaactggcagcataaaagtgacctacgagagtctcagtggtgctctcttatgaagtccacccctttgggtctgatctgcttacttcttcaacccaggtggccatggaggcagttgctcctgctgctggctgctgactgctgactgctcttgctcgactaggaacaatagaccctcagctctaatgcatttcacatgtattggattaaactggtaactaatgcatcacgtggggaaattggcctggctgataaaagggccttgaaaatgtgcctggtgcttttg

SEQ ID NO: 5082 - DNA, 853 bp, Homo sapiens
agaatctgaattcttaatcactgtagtaccttgtctccatactatatatttcttcttaagcagaaggactgagaaactcatttttagctgcctcttaggatgtgtttgaaattatgaacctaaatttgaccaagtgtttttcgggggctgttgggagaatggaatcaattaatgcttcaaagcacttgagaacccttaatgtaaaaaactgttatggaaagtgtatacctctctgtaaagccaactgtctgttattcccaaattcttatttgtgctttgtatgctagttgcttccaaatgggatctatttctatcggccacattctgaatatgacacttttcatttaaagtcagttgtacattatagaaatcctctaagaaacctgtttagaaacygttctatccaaagtactttgcatagtttctaggttataagggatttgtttatggtgacaagattgactgctgaaatgtgtgcttgggagtgaatgcctcagaagtgtagcaatttactacaaaacgtgtgtatctgtgcacgatggaattttcttactttgtatgccagtctgccaactggcagcataaaagtgacctacgagagtctcagtggtgctctcttatgaagtccacccctttgggtctgatctgcttacttcttcaacccaggtggccatggaggcagttgctcctgctgctggctgctgactgctgactgctcttgctcgactaggaacaatagaccctcagctctaatgcatttcacatgtattggattaaactggtaactaatgcatcacgtggggaaattggcctggctgataaaagggccttgaaaatgtgcctggtgcttttg

SEQ ID NO: 5083 - DNA, 801 bp, Homo sapiens
ataggaaaagtgcagagctgggtgatcatttccactatgtggatgcagtacagttgatgtgtactttgggctagtttggttttttaaatagaacatttcccctgctaataagctagagagctcagttcctctttttgtaagtgggtgtggatgacgtagttctattgacactttgctatgtttttttccaactgtagctcttttatcttctcacacctttcagctacagatttattcctcatattcactcctctctctcctacctccctatttctataggtgtttatgtcctttcagtgagcccagcacaacagctgctgccacttattgagtgctgactgtgtgccagatgtgttcaacaccatrcatgtgcatatttctcttaatcttccttgcaactttaagtgtattatgtgtattatctccagtttacaaatgaggaaataagcccagagaggttcagtaacttgctcaagattgcacagctcataagaggtggaactggaatttgaggttatatctgtctgatataaggccaagcttgcagcactgcttcttggcactgtgctgttctgtgagataagaggcaattcttgcaattctcactttagtgtctgtaatgttggtggagggtgaatgagtattgcatctcagctgctgctcgcaggtagtggcaggaccaaaccacccagggctctgggtgtttgctgttggcagaagcttctcctggtctgcctgatgctccaagtaggcaggccattagggagccccccaaggtgatggctgttattttcagctgag

SEQ ID NO: 5084 - DNA, 1275 bp, Homo sapiens
tgcattagagttcaatcaatcggaggcactgtctttgtctacaaaagtctcaaggcctgggatggcccagacagttgtgaaaagattagctgataggactgagtattattctgtgctaaatcttttggtttggattgcagcccctgggcaattagggaagggatgctcagaggcaagagatggagaagatgaccttggaaggtctctttcttgcctgggattttctccttttgatgatgcccaggattctttctagcaggcacaatgctgtaatgttgcagttgtggctcccttgggcacattctctagtcatttccccaggactttccccatagcctgggaatatgctaataattgttgtccataatctggcctggaggaggaagatgtggatgaggaaaaggaggaagaggtgaggaagaggaggaagggccgcccttctgagggctctctcagcagccttccttcctgggctttgagaacaaggcagcatcctgtctcctcccaggtatccattcaggcccctgttctgtagacatcagtctaggctcctaccaacatcagccatgggtcccaccagcaggaaacatggagttagttgcatgaagagaaagcttttattgttggaattcttgatgtgaggatccttccttttctttcaacaagataagcagattccaactgctttggaaaatatcttcctttctctatcctcttgtttcttcctcctgtcatcattcctccttaamctttgcttcttccctcctacattctttttcccttctggtttctctaccttattccttttccttcatttgtttctgaatcctagatgataagttgagggaggtcttagaagtcctctagtacagtgtactcattcattttacagatgagaagaatgcatttccaagacagaaagagactcacagaatgagtccttggtggaacccagagtaacctgagttgagtgctcttccctctttattactctgcttatctccacatttctctcccctttcttgttttttttttaaattgttcattttatttcttgctcaatactctttcttctcgtttgttgcttcttaatcccataatgttaaatgaaaacaaaatcaggattttgggtagaagaactgaaagggaagtgtgttgtcaagttcttcccattgtggctgtgatttggggtgagcccctcaattttcctcctcagagtctctatctactttctccatcctaccccgccatgtctttggaggggtttgtccactg

SEQ ID NO: 5085 - DNA, 825 bp, Homo sapiens
agagaaaattatcctgtaccattatagtgtatcttgtagactattggtgtaactctgatttgattttagggaaagttgtcatggtaataagagacttggaattctcagttcttgtctgggctggacattaatttactgttgactttggacaagtccctttccctctggccacagttcctccctgggaactgaaacaactgggacatgtaattctttccatctctaactttttttttttgtcatgagtaggagtattttatgaaattgcacagtgaattgggtagggctccagtcaccctgatgagagtatgtaccatccatcacgttgttctgagcacccaattttataatataactctagccttccattttccagtgacattttgcttccagcacaatgacttctgtgggaaaagcaacttccatttgttcagaaaattctcctaaatacacgaaatagtttcagcytctaggctgatttttacttagagaaaacaatcaagacggcactggtttgggtgactccaaatgtctttctttcctacctggtacaggttgccttttattaaggtgggctctaagtttggttgaatgcccatactctctggcatcctcttttattaaaaaatatattttccagcttttcaaaagtaatatatattgttgtaaaacattcaagtattacaggaatatttaatgcaggaaataaaagttccccatggtctcattctcaagagacaataacaactataaacagttttcagtccatttttgtagaatttttccccataagagaacattaatacatataaaaaaataaaaatg

SEQ ID NO: 5086 - DNA, 822 bp, Homo sapiens
aagggattgggttggtttcagacatttgctggggttggctagactggatggtgggaggagggtcagggctcaccttctcctttttatctcttctccgcactaaagaacctttgtgctgttccgtcgctctgtgatgcaggcctagaactctggtctgagatgcacgctctcagtgtccagtagctccaggcagcagtgccaacaagagtgcccttcaaataatagagagccatttctttgtgggaggacactcrgtgcctatggctgaactcaaactggactccacgtggcatagattctactttctacctcctgtgtgggctggagctcctcttgtttttctgccatctagaggagaatcaatttttatcattatttgagtaaatcagagacccaagtcaagtaagagatcactagatcccatcaccagcataaactgatatttgcctatttgttttccttgctaaatcaataacatcagtgcaaagagacacctaagatctgtctcctcagagaatatcatccttctagagatacaggttgggcggggctcagagtgatacacagaggttttttgttgttgttgtttttttttctgatacagagtctcactctgtcacccaagctggagtgcagtggcacaatcttggctcactgccacctctgcctcctgggttcaggagaatctcctgcctcagcctcccgagtagctgggattacaggtatgcaccaccacgcctggctaatttttgtatttttttatttagtagagacggagtttcaccatgttggccaggctggtcttgaactcctgacctcaag

SEQ ID NO: 5087 - DNA, 673 bp, Homo sapiens
tccttgaggggctgctaggtaagaaaggagggtggaggccgggcgcggtggctcacacctgtaatcctagcactttgggaggctgaggagggcggrtcacttgaggtcaagagttggagaccagcccggccaacatggtgaaaccccgtctctactaaaaatacaaaaattagccaggcgtggtggcgggcagctgtaatctcagctactcgggaggctgaggcaggagaatggcttgaacccgggaggtagaggttgaagtgagcctctcagtctcaaaacaaagaaaagaaaaagaaaagcaaagaaaggacgatagagctccttgtagccaaggccctcctgcgtggagacaggagacagagaatgaatgggggagctggggcaaaggctcaggtgccctttgcatcttaaactgcagattccgggccccccaagaacctccctgttgcagattctgaatccactgtcaaaacaaactcacacttaaggctgatggctgacaaccagccctgagaagggtcttgtcctgatctgaaatcatccagagagcacatccctccacccaggcagccttcctccaggtgagggttctcccccttgggagacatcccctgtctcctctcgtggccccttcttagggggacctcctgcaccaccgcctgcctgggac

SEQ ID NO: 5088 - DNA, 802 bp, Homo sapiens
cacttttctcctctgagaaggcaaagatcaaagaggctgacttggcggttgctgcgttggcgaagccgtgggaaacaggcttgcagagcgctcgcggcggcgtctgcgacatcgaacackccctctaacccggcagttccccaggaggaatttatgcaacagaggatgatactgatcacagcaaacacatcgcacctcctcggtgccaggcacggagccaagcgccccacccacggcaacgcaagtcatcctcacagggaccctctcagggagctactgccattatccccattttacattggtggaaactgaggcacagagagtggaagcaacttgtgtcccattgtgctcttctgccttcttgaagcattcacaaaagtacacaaacacaaacgtaaaagaatattattgttggttttgtgtgtgtgtacctgtgtgcacacatgagagagagacagaacatggaaaagagtatttctccttccaaagaaccagcttcttactattgtccataattttttacttaaaattaactccctctaatctctatgaacgctttctttcaactttcagtgcactattttatagcttttttttcttcctgaattgtttgctttgctaatttcctctcggactttctctctctctgtctctctctctctctctctctctctcttctaattacaattaaattaaaggctgagtgcagtggctcacgcctgtaatttcaacactttgggaggccaaggcaggacgatggcttgagctcaggtatttgagatcagccttggtaacatagcaa

SEQ ID NO: 5089 - DNA, 562 bp, Homo sapiens
atgtatgctcccttgcagtcctacccatctcagataagggtgaccccatacttctgggagcttaggtgaacatattggcatatatttaaaatctaggacatagttccttgtttgaaaatgttttagggaataatataaagaaaaaattacatgattgcttaaaatgggtgaggaactagcatttccaaaattcttttgagttgagggagaaaaatgtttaaaggcctccaccctatctgatctgcacccccaggacctctctgacctcatccgctacctgtgtcrgccttgctccctctgctgtagctacacagatctcattccttttcctggagctgaggttgctcctgtctcaggaccttcacctgggctgtccctctgcctaggactctttagcccctcagttgcaggtgacaaacatccttccttttctaggcctgggttctgatatcaccttctcagtgaaggtttatgtgacccttcccctgtcacaacctcacctgctctggcccatattgcctcccctagatgtttctttctgctcttttgctgtccactgtct

SEQ ID NO: 5090 - DNA, 562 bp, Homo sapiens
atgtatgctcccttgcagtcctacccatctcagataagggtgaccccatacttctgggagcttaggtgaacatattggcatatatttaaaatctaggacatagttccttgtttgaaaatgttttagggaataatataaagaaaaaattacatgattgcttaaaatgggtgaggaactagcatttccaaaattcttttgagttgagggagaaaaatgtttaaaggcctccaccctatctgatctgcacccccaggacctctctgacctcatccgctacctgtgtcggccttgctccctctgctgtagctacacagatctcattccttttcctggagctgaggttgctcctgtctcaggaccttcacctgggctgtccctctgcctaggactctttagcccctcagttgcaggtgacaaacatccttccttttctaggcctgggttctgatatcaccttctcagtgaaggtttatgtgacccttcccctgtcacaacctcacctgctctggcccatattgcctcccctagatgtttctttctgctcytttgctgtccactgtct

SEQ ID NO: 5091 - DNA, 623 bp, Homo sapiens
atgtctcgggacacaggcttggaggcaggggtgctgtgatggtttgagagaacccaggatgaggagggggcaggtgaggccacgggaggatgggcttcatttgggacaagttgagtggatgacacctgcggaaatctggctagaccaggggcttcagtgagtgcgtgacagatggaaaacccagactgctgagcacagtggrcttgaatggagagtgctggtggctgctggcgtatgtgaggctgaacctcttgcaactgccatctttatagattgagaacagcctaatactggtaatgctgtctggctgaatagcagaatctgaaggtggggggttgggtaggactgggagtatgtaaactggcaaaggaagtgggggctaatgtggataagagactagggccagtactcagaagagaagacgaccccatgtgtccccactgggcccctttgctacaggggaatgaagccagtgccaggctcatcccaggactggcgtccaacagtagagacatgggctgtagtcggaagctgaaacgcctcacatttacaatgacagcctttttttttttttttttaacaccaaggttccctccagtccctgctgcagatgcctcctcccc

SEQ ID NO: 5092 - DNA, 623 bp, Homo sapiens
atgtctcgggacacaggcttggaggcaggggtgctgtgatggtttgagagaacccaggatgaggagggggcaggtgaggccacgggaggatgggcttcatttgggacaagttgagtggatgacacctgcggaaatctggctagaccaggggcttcagtgagtgcgtgacagatggaaaacccagactgctgagcacagtggacttgaatggagagtgctggtggctgctggcgtatgtgaggctgaacctcttgyaactgccatctttatagattgagaacagcctaatactggtaatgctgtctggctgaatagcagaatctgaaggtggggggttgggtaggactgggagtatgtaaactggcaaaggaagtgggggctaatgtggataagagactagggccagtactcagaagagaagacgaccccatgtgtccccactgggcccctttgctacaggggaatgaagccagtgccaggctcatcccaggactggcgtccaacagtagagacatgggctgtagtcggaagctgaaacgcctcacatttacaatgacagcctttttttttttttttttaacaccaaggttccctccagtccctgctgcagatgcctcctcccc

SEQ ID NO: 5093 - DNA, 623 bp, Homo sapiens
atgtctcgggacacaggcttggaggcaggggtgctgtgatggtttgagagaacccaggatgaggagggggcaggtgaggccacgggaggatgggcttcatttgggacaagttgagtggatgacacctgcggaaatctggctagaccaggggcttcagtgagtgcgtgacagatggaaaacccagactgctgagcacagtggacttgaatggagagtgctggtggctgctggcgtatgtgaggctgaacctcttgcaactgccatctttatagattgagaacagcctaatactggtaatgctgtctggctgaatagcagaatctgaaggtggggggttgggtaggactgggagtatgtaaactggcaaaggaagtgggggytaatgtggataagagactagggccagtactcagaagagaagacgaccccatgtgtccccactgggcccctttgctacaggggaatgaagccagtgccaggctcatcccaggactggcgtccaacagtagagacatgggctgtagtcggaagctgaaacgcctcacatttacaatgacagcctttttttttttttttttaacaccaaggttccctccagtccctgctgcagatgcctcctcccc

SEQ ID NO: 5094 - DNA, 623 bp, Homo sapiens
atgtctcgggacacaggcttggaggcaggggtgctgtgatggtttgagagaacccaggatgaggagggggcaggtgaggccacgggaggatgggcttcatttgggacaagttgagtggatgacacctgcggaaatctggctagaccaggggcttcagtgagtgcgtgacagatggaaaacccagactgctgagcacagtggacttgaatggagagtgctggtggctgctggcgtatgtgaggctgaacctcttgcaactgccatctttatagattgagaacagcctaatactggtaatgctgtctggctgaatagcagaatctgaaggtggggggttgggtaggactgggagtatgtaaactggcaaaggaagtgggggctaatgtggataagagactagggccagtactcagaagagaagaygaccccatgtgtccccactgggcccctttgctacaggggaatgaagccagtgccaggctcatcccaggactggcgtccaacagtagagacatgggctgtagtcggaagctgaaacgcctcacatttacaatgacagcctttttttttttttttttaacaccaaggttccctccagtccctgctgcagatgcctcctcccc

SEQ ID NO: 5095 - DNA, 623 bp, Homo sapiens
atgtctcgggacacaggcttggaggcaggggtgctgtgatggtttgagagaacccaggatgaggagggggcaggtgaggccacgggaggatgggcttcatttgggacaagttgagtggatgacacctgcggaaatctggctagaccaggggcttcagtgagtgcgtgacagatggaaaacccagactgctgagcacagtggacttgaatggagagtgctggtggctgctggcgtatgtgaggctgaacctcttgcaactgccatctttatagattgagaacagcctaatactggtaatgctgtctggctgaatagcagaatctgaaggtggggggttgggtaggactgggagtatgtaaactggcaaaggaagtgggggctaatgtggataagagactagggccagtactcagaagagaagacgaccccatgtgtccccactgggcccctttgctacaggggaatgaagccagtgccaggctcatcccaggactggcgtccaacagtagagacaygggctgtagtcggaagctgaaacgcctcacatttacaatgacagcctttttttttttttttttaacaccaaggttccctccagtccctgctgcagatgcctcctcccc

SEQ ID NO: 5096 - DNA, 685 bp, Homo sapiens
caacaccacgaggtactttattttaaaaggattaaaaaagccactgcttgtcaaatcttgaactaaaggactaacaccaattctcataacatccttaagccggccatgtgaaatgggtgctgtaattaccatcctaatcttaagggcatggaaaataaagcacagagggtaaatcctatggctaatcaggagcagaggytggttttgatgttgaatgtgtgcactctgagcccagagtcgatgactagatataaatgcatccaagcccagcccccaagatgctagttaggtggtggcacaaggtggggatgtgacaaggcagctgttgcttgctgctttatgagaggtacagatggacagaccccaaggaatcacactgagcaacgtttcaaccagaaatagaaatggtcttggaaggtggagggcaggacaggcgtgcccagaaaagcaggaggtaagtgtgactcccaggcaagaacccaaaagactcggggctggggacatggatgcctacaggacagacactgtggcttttggggattaaagaactcaaaatactgagcgcacaacctgtcaccagatgaatgtaaatcccccttcggtaaacccagcattattttttcatgacattttgagtgtgctttcaataacactgtgacattgctgctgtgttcctgatattttt

SEQ ID NO: 5097 - DNA, 1799 bp, Homo sapiens
tctgtgtttagcagttctaatattagctttgttttatgtaaccaataaatgaaaacactgctaatcatactggctattaaggtcatgtagtcataacaagagccttctctcacattttattctaaatgaagacaaaatattaataacaagtatgtttaagcactgggcttggaaatctaagcagtgcagaaagatagggacctatcaaatgattcaggatctttgagacatcatctcactacaaagttgagatgactgacagatatacctttttttttttttttgagacggagtttcactcttgttgcccaggctggagtgcactggcgcgatctcagctcactgcaacctccgcctcccaggttcaagcgattctcctgtctcagcctcctgagtatctgggattacaggcgcatgtccccacgcccggctaatttttgtatttttagtagagatggggtttcatcatattggttaggctggtcttgaactcctgacctcaggtgatctgcccgcctcagcctcccaaagtgttgggattacgggcgtgagccactgcgccccgccaactgaacagataagatatatctatattgcttaacagagtaagttcaaataatggatttatctttggatttcagacagaaaaacatgtcttatccctgctaaacctcagtgcaaatgggcccagtacaagaagaggaggaggaacggactggcaatacaaacgctacggtttggaaagcgcacaacatgtggacccaggaaactgttaaaatccactctccctctcaaagacggtgtgaaccgaggcaaggcactcacatcactgagccacaatgtacttactcaacaataaaacggcaatgcctgtctctcaaagtacagaacaaaatgaaagaccatgtgcaaaaacacagaaaatgtcctactactgtgtgctgtttttattattaatatgaatctggcttttaagggatttaagccccttggctatctttgcttttcagctaagatgtggcagtgaagtctggcatgcatgcacccaggctcctgaggctcacttcccctctgcacgtcaccagtgatgcggctgctgggccaatcgaagcatcaagtgtcttggctttgggctggatccacatctactcagttttgatctaaccaattcaacagctgccttgaaatgatctaaatgtcctgtcacttacatcttgggtttttcgaggggagaaagggaggagggactgctgactgagtagaatcaagtgttcctcaacaagtgcatctgtaaacctggtgtgagacccaagaggaaggagaagaaaaggagcccagtggtgaaaggctgggaaccacctttcgggccaggcrtggaggctacccagctttcactcccgaggccctaatgggactggaaaaaacacaaaaagcaccctgtgcatctagctgcctacttggacaatggagttgactccttatcagtagggctttcttaatatctctttatcctatgaggaaagacatgaagactgacctctcctggtttctcctgggtctacaactgtgtttacatttatacacaagatcttcaaagaaacaataccttaaataacttatcaggcgttttgttatgtgctaggcacagtgctaagtgctttatctcatttaattctcacactaaacctacaggaaacaacatctacttcatattgtaaatgagggacctgaagttcagagaggttaagtaatttgttccctatcagcttgtatgtggcagagcctagatttacccgggg

SEQ ID NO: 5098 - DNA, 2125 bp, Homo sapiens
attagcatattgaatagctatttttaaaaaacaatgattagccatgatagcaaaagaagaaacatgaacagagcttattcgtttgccaggctagtaaatatcatcttgctttgctttctaaactccttaatgaaaacagtggctctcaggcaaataaataaaacattaggtagacaacacacagcacatcacaagcacagtccactaatttgcctattgctgaaggacattagccacctttgagataatctccataaacatactgccccatctccctctctcaaacatgaattgtatcaagctaaatttttaatgtttttcaatgtcttatatatatttcatttcaacaacattttttaatagtaagatatccatcttaatcaaatgaaagctgtttttctgtaattgtcctaaaagccaattcattttctggaaaaacatcttcttgaatcacaagtggccgggctaaacagtgttctcagaatattaatgtgaaacttaagctattaacatgtcatggttaacctttctaaaagctaattaaattaaaataataatatgtggaatgcttttacagaaaggtaaggctcttttacaaagcacctgttccaagtctcagagctaacaccttatgaagccatggtgggaaaaaggttttgcaggcagacaaagaaagcctggctttgcacctgctgtgattaacttttagttgttggtattagagttaattattgcagcatgctggagggcagtgacaatttacttgcctgatcatacctaataagatgtatttgcggatgccagcatctcctggacttaatcaacaaactatcaagacaatcaatgctgttaggccccatgtccttgtgatagttttttccaaataaaaaagataaaaatccaaggatgcagtgctaaggatataggcaggctgcttagaaagcctccgttagctagcgtcaggcttatctccctccctgagtggctagatctattatgcaggagggttagtgcaccctaaggcccgattcaattgggagcaaagttcaaggcaaccacaccaggtacaaggaaattaagctctgagaactccagcacttcttggtaactgagctctggaaggcttcaaatgggccctttctactttatcttctatgggaaaaggttgttatacccaaggcgctataccctcttcctgctacacaaggagggagtttctgttcctttatttgataatctatgcttgaatccatggaatacatttttaaaggaaagaaactagctatgatataagacaggttggcaaattccataaaacaacatgctttagtttcaactctgttcctttttaggccccaacaaattagcaaaactcctatgagaggactggggtcatgtgtgggcacacaaaataaggagggtgctaccacctagagggatctcatacaggtaatggagaggtgcaggtgacagcaatcagcagcctgggggcactgaaaatagaactaagactgtctttgactcataagtcatccatcctgaataatgaaagaagaccaacattcagcatgatcacctagatctctaacgtcttttattcatccattcattcactcaacacatgtatttgttgaattcctccttcatgccagggactgtgctgaacatgttcctgatttcactaaatgtgagctgtgcaatcttgagctctagcagtttgcacaaggtctagctggaaaaaactgctttatgacaatgttggggatctttgttgactcccagccttccaaaaatatcaataccccagatatgacaagtatcatttccattcacattccattggtgagaaccagtcatgtggtcacaccaactgccagggagactggaaaatgtagtcttcattctatgttcagctaaaattcaggggttctgttaccatgtgaaagaagggaaaaaccaatattaaatgtctctgcttttgtaatatattttgtaatataagacactacaaaagatgtagtgycttaatcacactgatgagtcaagaattctgggcatctccatagaccagagagatggaggaatggccaggagccaagagccatgtaggtagatttctcaaatg

SEQ ID NO: 5099 - DNA, 2125 bp, Homo sapiens
attagcatattgaatagctatttttaaaaaacaatgattagccatgatagcaaaagaagaaacatgaacagagcttattcgtttgccaggctagtaaatatcatcttgctttgctttctaaactccttaatgaaaacagtggctctcaggcaaataaataaaacattaggtagacaacacacagcacatcacaagcacagtccactaatttgcctattgctgaaggacattagccacctttgagataatctccataaacatactgccccatctccctctctcaaacatgaattgtatcaagctaaatttttaatgtttttcaatgtcttatatatatttcatttcaacaacattttttaatagtaagatatccatcttaatcaaatgaaagctgtttttctgtaattgtcctaaaagccaattcattttctggaaaaacatcttcttgaatcacaagtggccgggctaaacagtgttctcagaatattaatgtgaaacttaagctattaacatgtcatggttaacctttctaaaagctaattaaattaaaataataatatgtggaatgcttttacagaaaggtaaggctcttttacaaagcacctgttccaagtctcagagctaacaccttatgaagccatggtgggaaaaaggttttgcaggcagacaaagaaagcctggctttgcacctgctgtgattaacttttagttgttggtattagagttaattattgcagcatgctggagggcagtgacaatttacttgcctgatcatacctaataagatgtatttgcggatgccagcatctcctggacttaatcaacaaactatcaagacaatcaatgctgttaggccccatgtccttgtgatagttttttccaaataaaaaagataaaaatccaaggatgcagtgctaaggatataggcaggctgcttagaaagcctccgttagctagcgtcaggcttatctccctccctgagtggctagatctattatgcaggagggttagtgcaccctaaggcccgattcaattgggagcaaagttcaaggcaaccacaccaggtacaaggaaattaagctctgagaactccagcacttcttggtaactgagctctggaaggcttcaaatgggccctttctactttatcttctatgggaaaaggttgttatacccaaggcgctataccctcttcctgctacacaaggagggagtttctgttcctttatttgataatctatgcttgaatccatggaatacatttttaaaggaaagaaactagctatgatataagacaggttggcaaattccataaaacaacatgctttagtttcaactctgttcctttttaggccccaacaaattagcaaaactcctatgagaggactggggtcatgtgtgggcacacaaaataaggagggtgctaccacctagagggatctcatacaggtaatggagaggtgcaggtgacagcaatcagcagcctgggggcactgaaaatagaactaagactgtctttgactcataagtcatccatcctgaataatgaaagaagaccaacattcagcatgatcacctagatctctaacgtcttttattcatccattcattcactcaacacatgtatttgttgaattcctccttcatgccagggactgtgctgaacatgttcctgatttcactaaatgtgagctgtgcaatcttgagctctagcagtttgcacaaggtctagctggaaaaaactgctttatgacaatgttggggatctttgttgactcccagccttccaaaaatatcaataccccagatatgacaagtatcatttccattcacattccattggtgagaaccagtcatgtggtcacaccaactgccagggagactggaaaatgtagtcttcattctatgttcagctaaaattcaggggttctgttaccatgtgaaagaagggaaaaaccaatattaaatgtctctgcttttgtaatatattttgtaatataagacactacaaaagatgtagtgtcttaatcacactgatgagtcaagaattctgggcatctccatagaccagagagatggaggaatggccaggagccaagagccatgtaggtagayttctcaaatg

SEQ ID NO: 5100 - DNA, 626 bp, Homo sapiens
acatacaccattggctacagccccagctccatgtcagcgctcaacttctttgatactcctcgaccatcattcagaggagttgatgttgtttgaatatcctttattttcaggcgaacacgaacgctgaagcctccaggggccttagttttttctcctatggttctaagattaactcattttctcaaaatatgaaaaggagggggaaggctgcatatcattttgctatgtggtctgttgtgtgactgtgaaagaaaactgacctcaaacttcccaaggatgatgcaaaaataaatcctctgctgacctccaggacatagaaacagcccgtgtccctgttgacagcctctaacttccaaagggctgggaaaaccacaggaggaaagcctggggttagcccttttccaggctgtccttctgcacggcatccaggtcaagtgagtcttcatgaggcaagccccagatatgcagctcccttggtccctcagaaggaccctggtactcacagagggtccggatgatgtcactgggccrgctgcgggggctggggccatgggaattcattgccctcacggcaaactggtagttggtatctggatcgaggcccttgataaccatggagtccatct

SEQ ID NO: 5101 - DNA, 474 bp, Homo sapiens
ttcctctttcacaaaatggcaaataatgcctccatcatagcacattaaatgacttagcatggtacctggcacaaaagtagctcccttcttctctccctgtttcttttaatgggtatkgaaataaacaggctgactgctcccacacacgatatcctcagcagtactcagcttttaaattcttgcctcctcttttgttgccagctgatacttcttgctgcctgtctcttcagcttctaaacagctgctacactttttagagcattttttgactgctggctaagggtgcctcagccctcctcccttggcgtagagtgcagaggctttgttacagattatcagtttgtagtggatgtttgtcatatctgttgctgtccagcaccttttgaacacttttcctgtgtttcattaaccaccccctacccctgaggccagttactaagctagtgtcttaacacaaaccaatcgttctatatt

SEQ ID NO: 5102 - DNA, 474 bp, Homo sapiens
ttcctctttcacaaaatggcaaataatgcctccatcatagcacattaaatgacttagcatggtacctggcacaaaagtagctcccttcttctctccctgtttcttttaatgggtattgaaataaacaggctgactgctcccacacacgatatcctcagcagtactcagyttttaaattcttgcctcctcttttgttgccagctgatacttcttgctgcctgtctcttcagcttctaaacagctgctacactttttagagcattttttgactgctggctaagggtgcctcagccctcctcccttggcgtagagtgcagaggctttgttacagattatcagtttgtagtggatgtttgtcatatctgttgctgtccagcaccttttgaacacttttcctgtgtttcattaaccaccccctacccctgaggccagttactaagctagtgtcttaacacaaaccaatcgttctatatt

SEQ ID NO: 5103 - DNA, 571 bp, Homo sapiens
agagatgttagtggggtatggagttagatgtgtgagttttttcacaactattatgagtataataattaaatgcccttactagaatgagattttgtgtggcgattcaaggtcactatattatgatattcccacactgctgtaaagacatacctgagagactgagtaacttatgaagtaaagaggtttaattgactcacagttgcataggctgtacaggaagcacacctcgggaggcctcaggaaacttagaatcatggcagaaggtgaatgggaagcaggcactgtctttacttggccagagcaggggaaagggagtaaaaggggaagtgctacatactttgaaacaaccagatcttgtgagaactcactagctatcacaagaagaacaagggagaaatccccctccatgatccctcacctcttaccccaacaatggagattacagttcaacctgagatttggattgggacacagacccaaaccatatcagtcaccatccagaaattggaygaccttctaagaacaccatccaagacataaaaatcataattaattaaaccccatatgtaga

SEQ ID NO: 5104 - DNA, 631 bp, Homo sapiens
tcctgggtctctttatagttaaaggggagaccctctcagcaaagactaggtcctggcaactggatgaaagctattgagtgtgtcagattcagactaaggctttgcaaagatcatatcactgagcagaaacacacagcctgacacataggatactgtgactgaggcaaggagggaacacagaagggaatctaaggtcttctagaaattccctgccctcgagtgaagaggaagggatgactccacacaggatgtccatggccccagtcagaagtggctactacagaggtccagggcccctcggtctcaccccacaagccagtcgtagtacagcccygtcccatcagggcaggcatcatcctgcagaccatcaggcctgctccgggcatttgagccacatgtggtgctctccctctaacaattatggctcttaattgagcacttactttttgacaggctctgtgcctggcactgtacaaggggaccccgggaaaaggttcctctttcttttgttctcttccactctcatactcgtgtgtgtgtgtgtgtgtgtgtgtgtgtgtgtgtgtgtgtgtgtctgtgtctgtgtttgtggtaggaggtggaggaaggcattgtgaagggttggaatcag

SEQ ID NO: 5105 - DNA, 631 bp, Homo sapiens
tcctgggtctctttatagttaaaggggagaccctctcagcaaagactaggtcctggcaactggatgaaagctattgagtgtgtcagattcagactaaggctttgcaaagatcatatcactgagcagaaacacacagcctgacacataggatactgtgactgaggcaaggagggaacacagaagggaatctaaggtcttctagaaattccctgccctcgagtgaagaggaagggatgactccacacaggatgtccatggccccagtcagaagtggctactacagaggtccagggcccctcggtctcaccccacaagccagtcgtagtacagccctgtcccatcagggcaggcatcatcctgcagaccatcaggcctgctccgggcatttgagccacatgtggtgctctccctctaacaattatggctcttaattgagcacttactttttgacaggctctgtgcctggcactgtacaaggggaccccgggaaaakgttcctctttcttttgttctcttccactctcatactcgtgtgtgtgtgtgtgtgtgtgtgtgtgtgtgtgtgtgtgtgtgtctgtgtctgtgtttgtggtaggaggtggaggaaggcattgtgaagggttggaatcag

SEQ ID NO: 5106 - DNA, 631 bp, Homo sapiens
tcctgggtctctttatagttaaaggggagaccctctcagcaaagactaggtcctggcaactggatgaaagctattgagtgtgtcagattcagactaaggctttgcaaagatcatatcactgagcagaaacacacagcctgacacataggatactgtgactgaggcaaggagggaacacagaagggaatctaaggtcttctagaaattccctgccctcgagtgaagaggaagggatgactccacacaggatgtccatggccccagtcagaagtggctactacagaggtccagggcccctcggtctcaccccacaagccagtcgtagtacagccctgtcccatcagggcaggcatcatcctgcagaccatcaggcctgctccgggcatttgagccacatgtggtgctctccctctaacaattatggctcttaattgagcacttactttttgacaggctctgtgcctggcactgtacaaggggaccccgggaaaaggttcctctttcttttgttctcttccactctcatactcrtgtgtgtgtgtgtgtgtgtgtgtgtgtgtgtgtgtgtgtgtgtctgtgtctgtgtttgtggtaggaggtggaggaaggcattgtgaagggttggaatcag

SEQ ID NO: 5107 - DNA, 1376 bp, Homo sapiens
gagactctgtctcaaaaataaataaataaataaaataaaataaaataaatacaaaacaaaacccaaaaaccccaagacttagtgatggttaaaaaaaataacttagtagaataaaacaatcattttattgacctcagaagttttgggtcagcaattcagacaggatggcagggatggcttttcactgctccacaatatctgggaactcagctagggacacctggaggctacaagctgaaaacttttggaggttcattcacttgcatgcgtggtgattgatgctggctattggctggggtctcagatggggctgccacgtggctttgccatgtagctccttgagcttcctcacagtatggtggcctcagagtactcagatttctaacaagacagctcaggactaccttgaaggtaagtgtctctgccaacagaagtcatgcagtagcacttctgccataaaccgtcccatatttaatgggagagcaatctattttttatttattcatttaattttgagataggatctcastgttgcccaggcgggagtgcagtggtgcagtcatagctcattgcagccttgaactcctggccttaaaggatcctcctgcctcaacctcccagagtgttgggattataggcatgagccactgcacccagcttgggagagcaattaagagtatactccttgatgggaaaattctataagagcaggatcaggaatgggtctgagacccactgtgatcaggagatactgttgtagccaactttggaaaatgtaatccaggctggacataatcacagcactttgggaggctgagatgggaggatcatttgaggccaggagttcgagaccagcctgggcatcatagcaacactaccccaacccgacattacacattttttttttttagattagctgggagtggtgggggtgcacacctgtagtcctagctactctggtggttgaggtgggaggatcacctgaatctaggagcttgaggctgcagtgagctatgattataccactcaatttcagcctgggtgacagagtgagatcctctcaaataaaaaaagaaaaagaaaatataatctgaaaatacagctggccactagaagaaattagaattattataatctatacactctgcgtggtccaggaaatgcttgatctataaattaacttaaataggccctggttgttagcaccttgggattccaggcagcagcaaaagcaaatccactctggagagtgacgctctggacttagatctcacagaattcccacagatgatcacatgtgtacaatcaaaaattacaaaacaaattaggatatcctgtgctgggaacaggacttggtttaagcaacagagaacaga

SEQ ID NO: 5108 - DNA, 1620 bp, Homo sapiens
  misc_feature (1)...(1620): n = A,T,C or G
agggagagaaagcattgcaggagggtcgggcaagataatggtggccaggatctgatgcaaacaggcagctgcggagaggttctcttcctgatccagttcctgatcctctcatttattctaccacctttagggaacttccaggcaggagaggatggtcggattctgaaacgtttctgtcagtgtgagcagcgcagcctggagcagctgatgaaagacccgctgcgacctttcgtgcctgcctactatggcatggtgctgcaggatggccagaccttcaaccagatggaagacctcctggctgactttgagggcccctccattatggactgcaagatgggcagcaggtggggctggggcagccctggggcagggatggagggcagggggtgggcattattgaaaatattggcctggccrggcgcggtggctcacgcctgtaatcccagcactttgggaggccgaggctggtggatcacctgaggttgggagttccaaaccagcctgaccaacgtggtgaagccctgtctctactaaaaatacaaagaattagccaggcgtggtggtgcatgcctgtaatcccagctactcaggaggctgaggccaggagaattgcctgaacctgggaggtggaggttgcggtgagctgagattgagccattgcactccagcctgggcaacaagagtggaaccctgtctcaaaaaaaagaaaagaaaagaaaagaaaatagcgccaagtccattttcaaagtggttgtaccagtgtaccttcccaccaccatgtatgagtgttacagtcgtcccagattctcaccggtgctnnnnnnnnnnnnnnnnnnnnnnnnnnnnnnnnnnnnnnnnnnnnnnnnnnnnnnnnnnnnnnnnnnnnnnnnnnnnnnnnnnnnnnnnnnnnnnnnnnnngagtcttactctatcgcccaggctggagtgcagtggcacgatctcggctcactgcaatctccacctcctgggtttaagtgattctcctgtgtaaaccaagtagctaggattacaagcgcccgccaccacacctggctatttttgtattattagtagagatggggtttcaccatgttggccaggctggtcttggaactcctggacctcagatgatccacccactacggcctcccagaatgctgggattataggcgtgagccaccacgcctagtctgcaagaagtgaactctaattgctttctccagctgggttcagtggctctcacctataatcccaacactctgggaggctgtatacacacacacacacagacacacacacacagacacacacatagtcttcaactctcccatttcattcttttagtagtcttttgataaacatatttttataaacaaaatagtatttgtattattactcttttttgagacagagtctcattctgttgccccgactgaagtgaaggagcatgattatagctcacagtagccttgaactcctgggctcaggcggtcctttcaccttagcctccagagtagctgggactataggtatgtcccaccaggcttggctatattttattttttatagagacatggtctccctgtactgcccaggctggtcttgaacccctgagctcaa

SEQ ID NO: 5109 - DNA, 790 bp, Homo sapiens
aaaataatttttgtgtgagggaatccatgtgatacttttttgggtgtgaactcaatttgaatcttcactttttggacactgacactgaggctggaaaggtcagcctttttattgtaatagaaatctgttacttatgtgctatgatttggggacacttccgaatatctacccctgcctccaaatggcatctaccatgcccggctgaatgcttgacacccaccatagtagtcagcagaccctgggctgagacagtgcctctttaaagagccataaaaatcccagacagaaataagaggttaagccattgtcttctgcaaggatttagcttgaatcaatcaattttcaggtttaagcctttgaaggaaagaggcataaataaggcttagaaaaggccaaaatgtgtaatgacttccagagaacaaacaaaagtcaactgcagaggcctcccaaggagaatggaaaggcctctggatggggagacaccctgtgttgagtcaacctcacctcttccaggctgtgtgacttgaggcagtctsttaacctctctgagcctccacttgatatccaaaattaaggccaataagactgactggcctccagggtgacggtgagtgtgaatgcctggttccagtcctggcacaaagcaggcaccgggttaaggcttcctgaatgaatcagtgcagcatcacactagatactatgaaagtagtacttgaacatcaaaaatgatcatgtaaccttgaaacaggcatttgatggaacaccagagaatggagcatcaaggagttgt

SEQ ID NO: 5110 - DNA, 912 bp, Homo sapiens
tctcttcatttcaaaatcctaaatataatcatatctacaaagtcccttttcccatataaagcaatatattcacacattcagagattaggacatgaacatctctgggggcctggttttctgcctaccacactccccaggagcattctatccttcagtcacttgtacttaatgagcatctattatttgtaggttaatggactatgtgctgggaatacagaggtcaataaggcagtagctaagggcctccggagcaaaggccgagagggctttatggtgatttgtatgtcctgtacagccctatttaaaaagaaaaaagttaaaaccaggagattttaaagaaaaacctggactttttggcttctctagaaaagccagatggtcagggcaccctgggactcattagttcccacaacatagcaaccatgtatggggtgtggatgcttcaaccacagggtacccaccactctgcgtcacctcctgccacactaagtggctgcttggctcactatgactcactggctcctgaaaacattagggtttgggcaccacagctttggagaagaaatggtaacgtgggatgccaagttatttactttggaaccaaaagaaaatgttaggacttctggggttgttgtatctaaaaaccagtaagaactgaagatttttttcatttkaaatttacagactgattgacatcctgtctcaactggcatgagacggcctcacctgctgagtgtgagtttcatctgctcagtacacaagtctcctaagggatgggtggggcttctacaatgtagaaagtgactgtgatgccctctctctctccccacattcagtacacaccaccggcaggtttgcctggataactgggtctactaattgcattatctcactgtaactaaacaagtcctg

SEQ ID NO: 5111 - DNA, 672 bp, Homo sapiens
ggatccttgtgagttcttttatttgacgggtgtggcgaccatggtctagagcrctatgaggactttcctaaagtaatagtgctactacttatttatttgctaatttattcatgcaacaattttttcacatctgctatcttctgtccttaaagagcttacagtgtgttctggaagattgccgataagaaaataaacattacagccaggcactgtggctcatgcctgtaatcccagtactttggaaggccaaggtgggaggattacctgaggtcaggacttcaagaccagcctggccaacacggtgaaaccctgtctctgctaaaaatataaaaattagctgggcgttgtggcgggcacctgtaattccagctactcagctactcaggagaatcgcttgaacctgggaggcagaggttgcagtgagccgagaccgtggcattgcactccaacctgggcaatagagcaagactctatctcaaaaaaaaaaaaaaaaaagaaaaaaaagaaagaaacattacaaatggtgatatatttcatgaatgaaacagataggctgctcttgtagagaaagaacaggtgagtggtgggaagggcctcttgggtagggttgccaggttacgtctttgggagatgcggttttaggcagtgggaagaggaaattgggggtgtgct

SEQ ID NO: 5112 - DNA, 839 bp, Homo sapiens
ttagattaatctcatctgcagagtcccttttgccatggaaagtcatgtactggccaggagccgtggctcacacctgtaatcccagcactttgggaggctaaggcaggcagatctcttgagctcaggagttcagaccagcctgggcaacatggcaagacaccatctctactaaaagtacaaaaaaatagcaaggcatggtggtgtatgcctgtggtcccagctccttaggaggctgaggtaggaggattgctgaaccctggggagcagaggttgcagtgagcccagatcacaccactgcactccagcttcgatgacagagcgagaccctgtctcaaaaaaaaaaaaaaaaaaagtcacatactcacaggctcyagggattaggatagggacatcattaggagacattattcaacctgccacaaagacacagacacaaccagatgacagaagccaggggaagagttggaatattattctgaatatggtgggaagctgctgttaagttttgagcagggaagtagctttatctgagtcaccttttcaaaggcccaccctagctcctgtgcggttggtccctaggtgagataattagcaccctgaggagcagtttgggtcaatgacctcagggtcgcaaggtagagggaagagaaagccattctgggcctctggaccagtctatgttccccagagagtttccccaaaagccctgcctggcatggggcagggcggttatttgctgctcatctgtcttctaatgaggggttgtatattagtttgctggggctgccattaaaaagtaccacagaggccgggcatggtggttcacacctgtaatccca

SEQ ID NO: 5113 - DNA, 659 bp, Homo sapiens
caggacgttaacctttagaccctatatggtctaaaaaggggaggcatgaataatccaccccttgtttagcatatcatcaagaaataaccataaaaatgggcaaccagcagccctgccctgtctatggagtagccattcttttattcctttagtttcttaataaatttgctttcactgtactctatgaactcgccctggattctttctagcrtgagattggagaaccctctcttggggtctggatcgggcctttctggtaacactttggcagcttggtgctgtcaaaatggatggagcctgccaggcgcggtggctcacgcctgtaatcccagcactttgggaggctgaggcaggtggatcacaaggtcaggagattgagaccgtcctggctaacatggtgaaaccccgtctctactaaaaatacaaaaaattagacaggcatggttgcaggcggctataatcccagctactcgggaagctgaggcaggagaatggcatgaacctgggaggtggagcttgcagtgagccgagattgtgccactgcactccagcctgggcaacagagcgagactctgtctcaaaaaataaataaaataaaatggatagaggctgcttttaccgcccagacatgggacacccacatggcgggttggactggg

SEQ ID NO: 5114 - DNA, 659 bp, Homo sapiens
caggacgttaacctttagaccctatatggtctaaaaaggggaggcatgaataatccaccccttgtttagcatatcatcaagaaataaccataaaaatgggcaaccagcagccctgccctgtctatggagtagccattcttttattcctttagtttcttaataaatttgctttcactgtactctatgaactcgccctggattctttctagcgtgagattggagaaccctctcttggggtctggatcgggcctttctggtaacactttggcagcttggtgctgtyaaaatggatggagcctgccaggcgcggtggctcacgcctgtaatcccagcactttgggaggctgaggcaggtggatcacaaggtcaggagattgagaccgtcctggctaacatggtgaaaccccgtctctactaaaaatacaaaaaattagacaggcatggttgcaggcggctataatcccagctactcgggaagctgaggcaggagaatggcatgaacctgggaggtggagcttgcagtgagccgagattgtgccactgcactccagcctgggcaacagagcgagactctgtctcaaaaaataaataaaataaaatggatagaggctgcttttaccgcccagacatgggacacccacatggcgggttggactggg

SEQ ID NO: 5115 - DNA, 659 bp, Homo sapiens
caggacgttaacctttagaccctatatggtctaaaaaggggaggcatgaataatccaccccttgtttagcatatcatcaagaaataaccataaaaatgggcaaccagcagccctgccctgtctatggagtagccattcttttattcctttagtttcttaataaatttgctttcactgtactctatgaactcgccctggattctttctagcgtgagattggagaaccctctcttggggtctggatcgggcctttctggtaacactttggcagcttggtgctgtcaaaatggatggagcctgccaggcgcggtggctcacgcctgtaatcccagcactttgggaggctgaggcaggtggatcacaaggtcaggagattgagaccgtcctggctaacatggtgaaaccccgtctctactaaaaatacaaaaaattagacaggcrtggttgcaggcggctataatcccagctactcgggaagctgaggcaggagaatggcatgaacctgggaggtggagcttgcagtgagccgagattgtgccactgcactccagcctgggcaacagagcgagactctgtctcaaaaaataaataaaataaaatggatagaggctgcttttaccgcccagacatgggacacccacatggcgggttggactggg

SEQ ID NO: 5116 - DNA, 659 bp, Homo sapiens
caggacgttaacctttagaccctatatggtctaaaaaggggaggcatgaataatccaccccttgtttagcatatcatcaagaaataaccataaaaatgggcaaccagcagccctgccctgtctatggagtagccattcttttattcctttagtttcttaataaatttgctttcactgtactctatgaactcgccctggattctttctagcgtgagattggagaaccctctcttggggtctggatcgggcctttctggtaacactttggcagcttggtgctgtcaaaatggatggagcctgccaggcgcggtggctcacgcctgtaatcccagcactttgggaggctgaggcaggtggatcacaaggtcaggagattgagaccgtcctggctaacatggtgaaaccccgtctctactaaaaatacaaaaaattagacaggcatggttgcaggcggctataatcccagctactcgggaagctgaggcaggagaatggcatgaacctgggaggyggagcttgcagtgagccgagattgtgccactgcactccagcctgggcaacagagcgagactctgtctcaaaaaataaataaaataaaatggatagaggctgcttttaccgcccagacatgggacacccacatggcgggttggactggg

SEQ ID NO: 5117 - DNA, 659 bp, Homo sapiens
caggacgttaacctttagaccctatatggtctaaaaaggggaggcatgaataatccaccccttgtttagcatatcatcaagaaataaccataaaaatgggcaaccagcagccctgccctgtctatggagtagccattcttttattcctttagtttcttaataaatttgctttcactgtactctatgaactcgccctggattctttctagcgtgagattggagaaccctctcttggggtctggatcgggcctttctggtaacactttggcagcttggtgctgtcaaaatggatggagcctgccaggcgcggtggctcacgcctgtaatcccagcactttgggaggctgaggcaggtggatcacaaggtcaggagattgagaccgtcctggctaacatggtgaaaccccgtctctactaaaaatacaaaaaattagacaggcatggttgcaggcggctataatcccagctactcgggaagctgaggcaggagaatggcatgaacctgggaggtggagcttgcagtgagccgagattgtgccactgcactccagcctgggcracagagcgagactctgtctcaaaaaataaataaaataaaatggatagaggctgcttttaccgcccagacatgggacacccacatggcgggttggactggg

SEQ ID NO: 5118 - DNA, 1258 bp, Homo sapiens
atgctcggccctgggcagggaattctgagggcttaaacttcatggtcttggggaggtgtgagcggagcagggagttggcaagagctgcgtgttctgggactggcatcccagggtgagactgggaggctgtgaattcaaggaagaggctagatagaggtggtgaagaagttggaggggagacctggagctgagaaacagagtgaagttggactgtgacgggcactgggaaaggcctgaaggtgagagacagaagtttctggaaatagggtcttctggggcggcggcttacacttgtaatcccagcacttttggaggccaaagttgggggatcacttaagggcaggagttcaagaccagcctggctaatgtggcargaccctgtctcactaaaaatgcaaaacttagccggatgtggtggcgcacacctgtaatcccaactactcaggaagctgaggctcccgcttgaaccgggaggcaggggttgctgtgagccgagattgtgccactgcactgcactacagcctgggtgacacagcaagactcaaaaaaaaaagaaagtcaggctgaaggcaatagggagctatggtaggtgtgtgagcagagcaggcacatcagcagatctgtggatggcaaagatgcgtctggactggagtgaagggcacagaccaagcgggtcttacctgcttcctaggccttggccactgacctcctccatggggcccagctgctccagcccggagctcaccggaggtggggcaaagctgggcttggagctcccactggctgcctcgacctcctctgaactctcagccacgggatccagttcaccctgcaaatgacccccggggccctgctctgagccaggcaggacaggaccttggggtccccaggatctgggtgtggaggggagagggtgacacttacgggtggagcatgcctccctcgccggcttcggggccgcgtggcccgggcactcattgctgtccagaagccagtgccctctgaatgcttctccttcgtcaacccctaaaaccacagcctgccatgagctcttgcctttgttgtcctggacaaaggacaacctcaatttcctctgctgtgaaatggggcactgactacccctcaggaagggattttgttatcaatgttgattgggcagatttgaatgcctccctggacagggagctcactacctaagaaggttgtcctgatctcccccttcttctctgccttctttaccttcactacgtctttgtcc

SEQ ID NO: 5119 - DNA, 1258 bp, Homo sapiens
atgctcggccctgggcagggaattctgagggcttaaacttcatggtcttggggaggtgtgagcggagcagggagttggcaagagctgcgtgttctgggactggcatcccagggtgagactgggaggctgtgaattcaaggaagaggctagatagaggtggtgaagaagttggaggggagacctggagctgagaaacagagtgaagttggactgtgacgggcactgggaaaggcctgaaggtgagagacagaagtttctggaaatagggtcttctggggcggcggcttacacttgtaatcccagcacttttggaggccaaagttgggggatcacttaagggcaggagttcaagaccagcctggctaatgtggcaakaccctgtctcactaaaaatgcaaaacttagccggatgtggtggcgcacacctgtaatcccaactactcaggaagctgaggctcccgcttgaaccgggaggcaggggttgctgtgagccgagattgtgccactgcactgcactacagcctgggtgacacagcaagactcaaaaaaaaaagaaagtcaggctgaaggcaatagggagctatggtaggtgtgtgagcagagcaggcacatcagcagatctgtggatggcaaagatgcgtctggactggagtgaagggcacagaccaagcgggtcttacctgcttcctaggccttggccactgacctcctccatggggcccagctgctccagcccggagctcaccggaggtggggcaaagctgggcttggagctcccactggctgcctcgacctcctctgaactctcagccacgggatccagttcaccctgcaaatgacccccggggccctgctctgagccaggcaggacaggaccttggggtccccaggatctgggtgtggaggggagagggtgacacttacgggtggagcatgcctccctcgccggcttcggggccgcgtggcccgggcactcattgctgtccagaagccagtgccctctgaatgcttctccttcgtcaacccctaaaaccacagcctgccatgagctcttgcctttgttgtcctggacaaaggacaacctcaatttcctctgctgtgaaatggggcactgactacccctcaggaagggattttgttatcaatgttgattgggcagatttgaatgcctccctggacagggagctcactacctaagaaggttgtcctgatctcccccttcttctctgccttctttaccttcactacgtctttgtcc

SEQ ID NO: 5120 - DNA, 1258 bp, Homo sapiens
atgctcggccctgggcagggaattctgagggcttaaacttcatggtcttggggaggtgtgagcggagcagggagttggcaagagctgcgtgttctgggactggcatcccagggtgagactgggaggctgtgaattcaaggaagaggctagatagaggtggtgaagaagttggaggggagacctggagctgagaaacagagtgaagttggactgtgacgggcactgggaaaggcctgaaggtgagagacagaagtttctggaaatagggtcttctggggcggcggcttacacttgtaatcccagcacttttggaggccaaagttgggggatcacttaagggcaggagttcaagaccagcctggctaatgtggcaagrccctgtctcactaaaaatgcaaaacttagccggatgtggtggcgcacacctgtaatcccaactactcaggaagctgaggctcccgcttgaaccgggaggcaggggttgctgtgagccgagattgtgccactgcactgcactacagcctgggtgacacagcaagactcaaaaaaaaaagaaagtcaggctgaaggcaatagggagctatggtaggtgtgtgagcagagcaggcacatcagcagatctgtggatggcaaagatgcgtctggactggagtgaagggcacagaccaagcgggtcttacctgcttcctaggccttggccactgacctcctccatggggcccagctgctccagcccggagctcaccggaggtggggcaaagctgggcttggagctcccactggctgcctcgacctcctctgaactctcagccacgggatccagttcaccctgcaaatgacccccggggccctgctctgagccaggcaggacaggaccttggggtccccaggatctgggtgtggaggggagagggtgacacttacgggtggagcatgcctccctcgccggcttcggggccgcgtggcccgggcactcattgctgtccagaagccagtgccctctgaatgcttctccttcgtcaacccctaaaaccacagcctgccatgagctcttgcctttgttgtcctggacaaaggacaacctcaatttcctctgctgtgaaatggggcactgactacccctcaggaagggattttgttatcaatgttgattgggcagatttgaatgcctccctggacagggagctcactacctaagaaggttgtcctgatctcccccttcttctctgccttctttaccttcactacgtctttgtcc

SEQ ID NO: 5121 - DNA, 1258 bp, Homo sapiens
atgctcggccctgggcagggaattctgagggcttaaacttcatggtcttggggaggtgtgagcggagcagggagttggcaagagctgcgtgttctgggactggcatcccagggtgagactgggaggctgtgaattcaaggaagaggctagatagaggtggtgaagaagttggaggggagacctggagctgagaaacagagtgaagttggactgtgacgggcactgggaaaggcctgaaggtgagagacagaagtttctggaaatagggtcttctggggcggcggcttacacttgtaatcccagcacttttggaggccaaagttgggggatcacttaagggcaggagttcaagaccagcctggctaatgtggcaagascctgtctcactaaaaatgcaaaacttagccggatgtggtggcgcacacctgtaatcccaactactcaggaagctgaggctcccgcttgaaccgggaggcaggggttgctgtgagccgagattgtgccactgcactgcactacagcctgggtgacacagcaagactcaaaaaaaaaagaaagtcaggctgaaggcaatagggagctatggtaggtgtgtgagcagagcaggcacatcagcagatctgtggatggcaaagatgcgtctggactggagtgaagggcacagaccaagcgggtcttacctgcttcctaggccttggccactgacctcctccatggggcccagctgctccagcccggagctcaccggaggtggggcaaagctgggcttggagctcccactggctgcctcgacctcctctgaactctcagccacgggatccagttcaccctgcaaatgacccccggggccctgctctgagccaggcaggacaggaccttggggtccccaggatctgggtgtggaggggagagggtgacacttacgggtggagcatgcctccctcgccggcttcggggccgcgtggcccgggcactcattgctgtccagaagccagtgccctctgaatgcttctccttcgtcaacccctaaaaccacagcctgccatgagctcttgcctttgttgtcctggacaaaggacaacctcaatttcctctgctgtgaaatggggcactgactacccctcaggaagggattttgttatcaatgttgattgggcagatttgaatgcctccctggacagggagctcactacctaagaaggttgtcctgatctcccccttcttctctgccttctttaccttcactacgtctttgtcc

SEQ ID NO: 5122 - DNA, 397 bp, Homo sapiens
agacgctcaccaaccagaagcaagggcactgctatggagtggtggcaggctggccacctgctcgtcgccggcgcttgggggtgcacctgctgcaccgtgccctccttgtcttcctggctgaaggcgagcgacagcttcatccccaggacatccaggcccggggctgagtgctggggagttggccatccagcctggggagaaatgtttgaatgttccagctgccccatgctgacagcagcccccatctctggtttcagaaggggtgtgtgtgtgtgtgtgtgtgtgtktgtgtgtgtgtgtgtgtgtttgtgtgtgtgtgtgtgtgtgtagggagcacccaggcagatctcccccaggctgagagaggactttgttacagatggtactgctggagagg

SEQ ID NO: 5123 - DNA, 397 bp, Homo sapiens
agacgctcaccaaccagaagcaagggcactgctatggagtggtggcaggctggccacctgctcgtcgccggcgcttgggggtgcacctgctgcaccgtgccctccttgtcttcctggctgaaggcgagcgacagcttcatccccaggacatccaggcccggggctgagtgctggggagttggccatccagcctggggagaaatgtttgaatgttccagctgccccatgctgacagcagcccccatctctggtttcagaaggggtgtgtgtgtgtgtgtgtgtgtgtgtgtgtgtgtgtgtgtgtgtktgtgtgtgtgtgtgtgtgtgtagggagcacccaggcagatctcccccaggctgagagaggactttgttacagatggtactgctggagagg

SEQ ID NO: 5124 - DNA, 755 bp, Homo sapiens
ccaatttctttacatttcaatcatcgtgtttcatttacttgagcaaagaggactgggtgcccagagtgtcacctgcagacccgtagcttctgagaaacacagaccctcaggcacagccccacccccacctgctcaatcagtagctgcagcttatatagcaaccccaggtgtttcacatgtgggttaaagtgggagaagcacraacatagactgactctcaacttggttgcacgttggaatctcctggtgagcttcccccgctggctgggtcccacccttggagagagtcatgttctaagtcccgtgtgaggctggatatagggatgggtggaccctttgaggttaagtcaaacatgggtcaaggttaggaaacactggagggagagggcgaagacaatgcttccctaacctgcctcctcccgttttcaccttgggaggaaactctcctgaatccagaaagatcagaaggctctgagggtgggatttcagtctcaggagatcgtccctgtctctctaggacctggtccctaaaaagcagtggatggaagtctccaggctgcctcttggatgggggcggaagccatgaaatataaagagtgatctggaagctcaggttgaactcctccagcgtgctttagtaaggtaatttttaaatatacgttacgtgagagccatctcttcaactccggccacccaatttgctgtacaaacagtttccctgatagagaaattacactctagcaggctgcaccaca

SEQ ID NO: 5125 - DNA, 755 bp, Homo sapiens
ccaatttctttacatttcaatcatcgtgtttcatttacttgagcaaagaggactgggtgcccagagtgtcacctgcagacccgtagcttctgagaaacacagaccctcaggcacagccccacccccacctgctcaatcagtagctgcagcttatatagcaaccccaggtgtttcacatgtgggttaaagtgggagaagcacaaacatagactgactctcaacttggttgcacgttggaatctcctggtgagcttcccccgctggctgggtcccacccttggagagagtcatgttctaagtcccgtgtgaggctggatatagggatgggtggaccctttgaggttaagtcaaacatgggtcaaggttaggaaacactggagggagagggcgaagacaatgcttccctaacctgcctcctcccgttttcaccttgggaggaaactctcctgaatccagaaagatcagaaggctctgagggtgggatttcagtctcaggagatcgtccctgtctctctaggacctggtccctaaaaagcagtggatggaagtctccaggctgcctcktggatgggggcggaagccatgaaatataaagagtgatctggaagctcaggttgaactcctccagcgtgctttagtaaggtaatttttaaatatacgttacgtgagagccatctcttcaactccggccacccaatttgctgtacaaacagtttccctgatagagaaattacactctagcaggctgcaccaca

SEQ ID NO: 5126 - DNA, 891 bp, Homo sapiens
tggatccaaacaggcacccgaggcgactgcacagacagcagccaccaagacagcaaccctgcagcccagagtcaacctccagcccgcacccagctcacctttcctgggcccagcccagggctgccccgtcctccagcctggaccacccattcatgttccagggaggcccggcagtgtcaccttcatgagaggggacaagggacagaagagccccaggttcagaaygcctcccacatcccgtcctcctgaaaactctgcttctgctcagagccctcgcttctcaaggcagcctgaggggcggggtccccaggtctcaacgagtgtcctctatgaggaccttcttgtcacttcctcctctgaggacagtgacagtgactgaggcccccaaggcaagaagacccagcttcaagcccatgcgacttggaagtggctgaaaggctgagaaggggagaggcaggaagcagccctgtgcggggtcagcccctccctggcagcggtgtctgttcaaacgtggaccccagatactatcggggatcaacgaacctgcctatttacattgtgtaaatttaacctgtattaaaatggggctgttgaaagtgtcctatagatttctttttcaattacatacaattatatgagaaactgagtcaacataagcaaacaatgctccactagtaaaagctctgaaactcatctagggagggagcaaaccactgaaatttgagtaattctgggcaaagggccctttgatggtagtggaaaacgtcagtgtctcctgactcaagaatatttgactgtgaaggagagttgtagtgagaaacgcttagcccttggaaaatgggaaatttttttttcttggaagaatgtgttttttttaaatcattgaattca

SEQ ID NO: 5127 - DNA, 891 bp, Homo sapiens
tggatccaaacaggcacccgaggcgactgcacagacagcagccaccaagacagcaaccctgcagcccagagtcaacctccagcccgcacccagctcacctttcctgggcccagcccagggctgccccgtcctccagcctggaccacccattcatgttccagggaggcccggcagtgtcaccttcatgagaggggacaagggacagaagagccccaggttcagaacgcctcccacatcccgtcctcctgaaaactctgcttctgctcagagccctcgcttctcaaggcagcctgaggggcrgggtccccaggtctcaacgagtgtcctctatgaggaccttcttgtcacttcctcctctgaggacagtgacagtgactgaggcccccaaggcaagaagacccagcttcaagcccatgcgacttggaagtggctgaaaggctgagaaggggagaggcaggaagcagccctgtgcggggtcagcccctccctggcagcggtgtctgttcaaacgtggaccccagatactatcggggatcaacgaacctgcctatttacattgtgtaaatttaacctgtattaaaatggggctgttgaaagtgtcctatagatttctttttcaattacatacaattatatgagaaactgagtcaacataagcaaacaatgctccactagtaaaagctctgaaactcatctagggagggagcaaaccactgaaatttgagtaattctgggcaaagggccctttgatggtagtggaaaacgtcagtgtctcctgactcaagaatatttgactgtgaaggagagttgtagtgagaaacgcttagcccttggaaaatgggaaatttttttttcttggaagaatgtgttttttttaaatcattgaattca

SEQ ID NO: 5128 - DNA, 891 bp, Homo sapiens
tggatccaaacaggcacccgaggcgactgcacagacagcagccaccaagacagcaaccctgcagcccagagtcaacctccagcccgcacccagctcacctttcctgggcccagcccagggctgccccgtcctccagcctggaccacccattcatgttccagggaggcccggcagtgtcaccttcatgagaggggacaagggacagaagagccccaggttcagaacgcctcccacatcccgtcctcctgaaaactctgcttctgctcagagccctcgcttctcaaggcagcctgaggggcggggtccccaggtctcaacgagtgtcctctatgaggacyttcttgtcacttcctcctctgaggacagtgacagtgactgaggcccccaaggcaagaagacccagcttcaagcccatgcgacttggaagtggctgaaaggctgagaaggggagaggcaggaagcagccctgtgcggggtcagcccctccctggcagcggtgtctgttcaaacgtggaccccagatactatcggggatcaacgaacctgcctatttacattgtgtaaatttaacctgtattaaaatggggctgttgaaagtgtcctatagatttctttttcaattacatacaattatatgagaaactgagtcaacataagcaaacaatgctccactagtaaaagctctgaaactcatctagggagggagcaaaccactgaaatttgagtaattctgggcaaagggccctttgatggtagtggaaaacgtcagtgtctcctgactcaagaatatttgactgtgaaggagagttgtagtgagaaacgcttagcccttggaaaatgggaaatttttttttcttggaagaatgtgttttttttaaatcattgaattca

SEQ ID NO: 5129 - DNA, 891 bp, Homo sapiens
tggatccaaacaggcacccgaggcgactgcacagacagcagccaccaagacagcaaccctgcagcccagagtcaacctccagcccgcacccagctcacctttcctgggcccagcccagggctgccccgtcctccagcctggaccacccattcatgttccagggaggcccggcagtgtcaccttcatgagaggggacaagggacagaagagccccaggttcagaacgcctcccacatcccgtcctcctgaaaactctgcttctgctcagagccctcgcttctcaaggcagcctgaggggcggggtccccaggtctcaacgagtgtcctctatgaggaccttctkgtcacttcctcctctgaggacagtgacagtgactgaggcccccaaggcaagaagacccagcttcaagcccatgcgacttggaagtggctgaaaggctgagaaggggagaggcaggaagcagccctgtgcggggtcagcccctccctggcagcggtgtctgttcaaacgtggaccccagatactatcggggatcaacgaacctgcctatttacattgtgtaaatttaacctgtattaaaatggggctgttgaaagtgtcctatagatttctttttcaattacatacaattatatgagaaactgagtcaacataagcaaacaatgctccactagtaaaagctctgaaactcatctagggagggagcaaaccactgaaatttgagtaattctgggcaaagggccctttgatggtagtggaaaacgtcagtgtctcctgactcaagaatatttgactgtgaaggagagttgtagtgagaaacgcttagcccttggaaaatgggaaatttttttttcttggaagaatgtgttttttttaaatcattgaattca

SEQ ID NO: 5130 - DNA, 661 bp, Homo sapiens
tgtatagaatgtagattttccccacaagagacagctttgcagggctgtttcaaaatatgtcaaagagatatattttggaataaaatgcttcaatttctttcagtgcctgctgtctgtcatgtgatgctatactagagtcaggtcagcatctggtgtctcactgctacaaagagtctgttttgtctgtcttgaagtctctatcttaatgttaacgctggtctgttgtgcctgaattcctaagggaagagaatataatgaggcatgtcctgcgcctttttgcctgtcatggcctgaaccagtttctcaggtttactttggaatccccttgaccaagaagcagggttcacttagtcagttggagggcttagaattttattttcggtttacatatgaatgtatkaaataatcacatgaaccctgaaaattttgtaaaaacttaaatgtgtaaataaattttttttttaaatttaggtaaggttacaaaaataggccaagagcatgaaatttattcagccatttcatcctcttggcctatttcagggaatgatgatgaaaatatcttactacatagaggtttgatgtttatttctaaacaaagcatttattagagtaatagaacttaaacatgactgggattgggccgggcgcagtggctcatgcc

SEQ ID NO: 5131 - DNA, 661 bp, Homo sapiens
tgtatagaatgtagattttccccacaagagacagctttgcagggctgtttcaaaatatgtcaaagagatatattttggaataaaatgcttcaatttctttcagtgcctgctgtctgtcatgtgatgctatactagagtcaggtcagcatctggtgtctcactgctacaaagagtctgttttgtctgtcttgaagtctctatcttaatgttaacgctggtctgttgtgcctgaattcctaagggaagagaatataatgaggcatgtcctgcgcctttttgcctgtcatggcctgaaccagtttctcaggtttactttggaatccccttgaccaagaagcagggttcacttagtcagttggagggcttagaattttattttcggtttacatatgaatgtattaaataatcacatgaaccctgaaaattttgtaaaaacttaaatgtgtaaataaawtttttttttaaatttaggtaaggttacaaaaataggccaagagcatgaaatttattcagccatttcatcctcttggcctatttcagggaatgatgatgaaaatatcttactacatagaggtttgatgtttatttctaaacaaagcatttattagagtaatagaacttaaacatgactgggattgggccgggcgcagtggctcatgcc

SEQ ID NO: 5132 - DNA, 722 bp, Homo sapiens
tggagtgtggaggggcgaattgagcgcgggaagcagcatgactagcaagacaatctgactcagagcagggaaaaatcaagcccgatgtcggagctggttattagtaattactaccatcacgggcattattgttgctaattataggcgatgtctcagtgtctgtcctcaggcccggaaaaccggagcccctcctgatgctgctgaagtccctgggcctcgaggctccgtgaagagagggaagcgaggcagggrgtgaagggaccgcctggccggtgtccaggatacgggtggctcaaaccaccagcagaacagcatgccgactctggcccgatggccgccttcatcccgtagccccaacccggcctaaagccgagaagacgccagagtgcgctgctgaaattcccgcggagtccggtgtgctggagagcggcagcggggtgaactcccggccccgtctctgcgtaggaagtggttcgcaaagtggccccgggagccgggactggtacccggttccccacggcaccgtccggagctctccagccacgaggcgcagaagtggcctgccagcgccttcccaggctcagggaggcgaggaggcccgtgcacttggcatcttctcccgggagccgcacggccagggccgcggcgaaacggagcccatctcaagtgcgccgcgcctggccgcgtcctgtagcccgacgaggctgaggatggagagggga

SEQ ID NO: 5133 - DNA, 791 bp, Homo sapiens
gcccgccttggcctcccaaagtgctaggactacaggtrtgagccactgcgcctagtggcgtagttattttcatagttagaaaagtcttgggtcttacagccatacccaacaagaattgatcatttcttttttttaatcccccaggtgtgatctaccatgcattgtctcagaaagaggcgaatgactccgatgtccaggtcagttcttggcagggagtccaggagcaacagaggtgatggcaaagatggctcagtagcttctgagcccccagcactgattgagatgtcctttcccacatcatactcctcatttttctggcagacatctaaggctggatcaaagtctgtagttctcattacctgttcccacgtgccagcctccttttctgttgtgccaaagtcaagtttggtaaaatgaggctttccttaaccttttatcatttcccactgtgttggggacaccaggctgtgcccacgtggtgggcagcatcattcaaccttgtcactgtgccctctgcacttctgcagaaggtgtgcaatcacatatcataagtgaaatttacagattatatctgaatgcctcggcctgctttgtcagttttgcaaaagttcctcttgtggctcataatgagagcattaccttgaaagcaagattttgaaagaccagtatacctttattttgcttctccatgaaagatgagccactcaggtatttaagagaatcagatcattgtcctattatagtcacaatgacgagagtgaattaatttttagttagcatctacaggtgca

SEQ ID NO: 5134 - DNA, 820 bp, Homo sapiens
agtagtgacttttacaktttatatctaaatagaagctggaggctttgttggggactcataggcataaaatattatttattatagagttaaatgctacaaagacaaatctaattaataggcctattttcctttttaaattctactcataatttcttcatagtttttatgataaaaggttggattttgattagaactcccatgcttttgtgtcagaattaaaactggtattagaataaataattcaaaagctagagaaagagtacaatgagaagccatgagttgcatttgaattataatattatgtcttacagatttggggtatatgctaaagttaccaaagttgtagaaaataaggccgggcattgtggctcacatctgtaattccagcactttgggaggccgaggtagatggatcatttgaggtcaggagttcgagaccagcctggccaacatggtgaaactccgtctgtactaatagtacaaaaattagccaggcgtgatggtgtgcacctgtagtccttgctactcagaaagctgaggcaggagaatcgcttgtacccaggaggcagaggttgcagtgagcagagattgtgccactgcactccagcctgggtgacagagtgctatgagtcaccacacctggtatgagccaccgtgcctggcccacaatgacttttacacatgttgttaaaccatcttacagattttataatttgggggaagaaaagttttactaaattgtcttttaatggaaactctacaagaaccagaatctttgctttgttcacttatgtatccattcctaggcctagaaaaatgt

SEQ ID NO: 5135 - DNA, 820 bp, Homo sapiens
agtagtgacttttacagtttatatctaaatagaagctggaggctttgttgggkactcataggcataaaatattatttattatagagttaaatgctacaaagacaaatctaattaataggcctattttcctttttaaattctactcataatttcttcatagtttttatgataaaaggttggattttgattagaactcccatgcttttgtgtcagaattaaaactggtattagaataaataattcaaaagctagagaaagagtacaatgagaagccatgagttgcatttgaattataatattatgtcttacagatttggggtatatgctaaagttaccaaagttgtagaaaataaggccgggcattgtggctcacatctgtaattccagcactttgggaggccgaggtagatggatcatttgaggtcaggagttcgagaccagcctggccaacatggtgaaactccgtctgtactaatagtacaaaaattagccaggcgtgatggtgtgcacctgtagtccttgctactcagaaagctgaggcaggagaatcgcttgtacccaggaggcagaggttgcagtgagcagagattgtgccactgcactccagcctgggtgacagagtgctatgagtcaccacacctggtatgagccaccgtgcctggcccacaatgacttttacacatgttgttaaaccatcttacagattttataatttgggggaagaaaagttttactaaattgtcttttaatggaaactctacaagaaccagaatctttgctttgttcacttatgtatccattcctaggcctagaaaaatgt

SEQ ID NO: 5136 - DNA, 820 bp, Homo sapiens
agtagtgacttttacagtttatatctaaatagaagctggaggctttgttggggactcataggcataaaatattatttattatagagttaaatgctacaaagacaaatctaattaataggcctattttcctttttaarttctactcataatttcttcatagtttttatgataaaaggttggattttgattagaactcccatgcttttgtgtcagaattaaaactggtattagaataaataattcaaaagctagagaaagagtacaatgagaagccatgagttgcatttgaattataatattatgtcttacagatttggggtatatgctaaagttaccaaagttgtagaaaataaggccgggcattgtggctcacatctgtaattccagcactttgggaggccgaggtagatggatcatttgaggtcaggagttcgagaccagcctggccaacatggtgaaactccgtctgtactaatagtacaaaaattagccaggcgtgatggtgtgcacctgtagtccttgctactcagaaagctgaggcaggagaatcgcttgtacccaggaggcagaggttgcagtgagcagagattgtgccactgcactccagcctgggtgacagagtgctatgagtcaccacacctggtatgagccaccgtgcctggcccacaatgacttttacacatgttgttaaaccatcttacagattttataatttgggggaagaaaagttttactaaattgtcttttaatggaaactctacaagaaccagaatctttgctttgttcacttatgtatccattcctaggcctagaaaaatgt

SEQ ID NO: 5137 - DNA, 820 bp, Homo sapiens
agtagtgacttttacagtttatatctaaatagaagctggaggctttgttggggactcataggcataaaatattatttattatagagttaaatgctacaaagacaaatctaattaataggcctattttcctttttaaattctactcataatttcttcatagtttttatgataaaaggttggattttgattagaactcccatgcttttgtgtcagaattaaaactggtattagaataaataattcaaaagctagagaaagagtacaatgagaagccatgagttgcatttgaattataatattatgtcttacagatttggggtatatgctaaagttaccaaagttgtagaaaataaggccgggcattgtggctcacatctgtaattccagcactttgggaggccgaggtagayggatcatttgaggtcaggagttcgagaccagcctggccaacatggtgaaactccgtctgtactaatagtacaaaaattagccaggcgtgatggtgtgcacctgtagtccttgctactcagaaagctgaggcaggagaatcgcttgtacccaggaggcagaggttgcagtgagcagagattgtgccactgcactccagcctgggtgacagagtgctatgagtcaccacacctggtatgagccaccgtgcctggcccacaatgacttttacacatgttgttaaaccatcttacagattttataatttgggggaagaaaagttttactaaattgtcttttaatggaaactctacaagaaccagaatctttgctttgttcacttatgtatccattcctaggcctagaaaaatgt

SEQ ID NO: 5138 - DNA, 820 bp, Homo sapiens
agtagtgacttttacagtttatatctaaatagaagctggaggctttgttggggactcataggcataaaatattatttattatagagttaaatgctacaaagacaaatctaattaataggcctattttcctttttaaattctactcataatttcttcatagtttttatgataaaaggttggattttgattagaactcccatgcttttgtgtcagaattaaaactggtattagaataaataattcaaaagctagagaaagagtacaatgagaagccatgagttgcatttgaattataatattatgtcttacagatttggggtatatgctaaagttaccaaagttgtagaaaataaggccgggcattgtggctcacatctgtaattccagcactttgggaggccgaggtagatggatcatttgaggtcaggagttcragaccagcctggccaacatggtgaaactccgtctgtactaatagtacaaaaattagccaggcgtgatggtgtgcacctgtagtccttgctactcagaaagctgaggcaggagaatcgcttgtacccaggaggcagaggttgcagtgagcagagattgtgccactgcactccagcctgggtgacagagtgctatgagtcaccacacctggtatgagccaccgtgcctggcccacaatgacttttacacatgttgttaaaccatcttacagattttataatttgggggaagaaaagttttactaaattgtcttttaatggaaactctacaagaaccagaatctttgctttgttcacttatgtatccattcctaggcctagaaaaatgt

SEQ ID NO: 5139 - DNA, 645 bp, Homo sapiens
agtgattctcctacctcagtctcccgagtagctgagattacaggtgcatgccaccacacctgcctaatttttgtatttttagtagagacggggtttcattatgttggccagtctggtcttgaacttctggcctcaggtgacccacccatctcagcctcccaaagtgctgggagtacaagtgtgagccaccatgcccggcctaggttggtctgaaactcctagtctcaagtgatcctcccacctcagtctcctgagtagctgggactacaggcacgtgccaccacactcggctaatttttaaataatttttgtagagacagggtcttgctgtgttgcccaggctggccttgaactcctgggctcagacaatccttctgcctcggccccgcaaagcgctgggattgcaggcgtgagcctctgcttggcctaggagtgtgaattaagtccccactcagtgcccaggcctgagccccatgttgggaacacaggagtaagtgacacaaagtccctgcccccacagtgcagagaggctgctggtttttagccgagggtggagttgggcctgcctggtgggggagacagtcacackgccaacagacaaaacccattgtaacatgggctacaaaagcggcccgtgagaagaca

SEQ ID NO: 5140 - DNA, 659 bp, Homo sapiens
ggcaggaattgctcctttgctcagcagatgtctctaggccgccggtgcagcagtggtcctgctgtcgggctgcctcacgatgtttctgttcacgacggaccatacatactggtggtccgctaagatgatcagactgtgtttttacttcccttctgtgtgttgagacatctacttgccattgtgttacagtggcttagagtgtctgggacagtactgtgctgtccaggtttgtagcctataagcattgggctctcccgtcagtgcaggcgtgtggcaggctgtgccttccagaagtgtgtgcgtgcactcggacagcacaatgacaaggtcgcctaaygatgtgttgtttcccagaacccgtctctgtcattaagcagtgcgtgactgtatgttgtataattttgtaaggtgtagactgtaaagtcactcagagaagcgtttgcatgcagagtgcttaactcagagaagcgtttgcatgcagagtgtttaattctgactgtaccctaagcatgtagagttttctgtaaatgtcaccacagcggcccagtcgaggggcctggtggtgacactgcctggcagcttgccctgcttggagctccatcctgcacgcagctgctgagcctcgaggcagccgccaccacgacattcccctgtatttt

SEQ ID NO: 5141 - DNA, 481 bp, Homo sapiens
gcgtcgaggcaatttcgtcattgagttgggatggggcgtcaggcaattcgtsaggagtgggagggcgcatcgggaaatttgccaggagggggaggggcgttcttttcttgctccgcatgtgtggggttttcttctcaattgactctcatgtgtagtgtgtccgctggatggtgctgtcccctgcggtgcccaagcccggaggggatggagctgctgtggagtctgtggaactgtgaagtgaggccagcttgcaggactccaaagaaacttagtgagctgagatcctgctgggtatccctatgtgaagaggccaccccaaaggctcatgccaactccgggttggattaatagaattggtgtctagaaaaaggaactgattgcttctggttgacattccatggaggggtgtggttgtcattttcagtgatacattgaaaggggtgctgatatgatggagggtgctagaggagagaagctggtg

SEQ ID NO: 5142 - DNA, 481 bp, Homo sapiens
gcgtcgaggcaatttcgtcattgagttgggatggggcgtcaggcaattcgtcaggagtgggagggcgcatcgggaaatttgccaggagggggaggggcgttcttttcttgctccgcatgtgtggggttttcttctcaattgactctcatgtgtagtgtgtccgctggatggtgctgtcccctgcggtgcccaagcccggaggggatggagctgctgtggagtctgtggaactgtgaagtgaggccagcttgcaggactccaaagaaacttagtgagctgagatcctgctgggtatcmctatgtgaagaggccaccccaaaggctcatgccaactccgggttggattaatagaattggtgtctagaaaaaggaactgattgcttctggttgacattccatggaggggtgtggttgtcattttcagtgatacattgaaaggggtgctgatatgatggagggtgctagaggagagaagctggtg

SEQ ID NO: 5143 - DNA, 481 bp, Homo sapiens
gcgtcgaggcaatttcgtcattgagttgggatggggcgtcaggcaattcgtcaggagtgggagggcgcatcgggaaatttgccaggagggggaggggcgttcttttcttgctccgcatgtgtggggttttcttctcaattgactctcatgtgtagtgtgtccgctggatggtgctgtcccctgcggtgcccaagcccggaggggatggagctgctgtggagtctgtggaactgtgaagtgaggccagcttgcaggactccaaagaaacttagtgagctgagatcctgctgggtatccctatgtgaagaggccaccccaaaggctcatgccaactccgggttggattaatagaattggtgtctagaaaaaggaactgattgcttctggttgacattccatggaggggtgtggttgtcattttcagtgatacattgaaaggggtgctgataygatggagggtgctagaggagagaagctggtg

SEQ ID NO: 5144 - DNA, 837 bp, Homo sapiens
  misc_feature (1)...(837): n = A,T,C or G
ccttggccatggcgctcgagggcgcggggcgcacgggctgcggtggctgcggtggctgcggcgctgggggagtggggctcctctcccgcgggttcctcctgttgaatgtgggatgctcggctgtgcaatggctgcagcctctgcgagcgccgccgcggtccacagcctccgccgtaatcctcacaagagccgtgccctaagcgcttcacccccgccccacccttctttcctgtcccaacgragcctcaactccagttcctgaaatagtcccaagttagggtcgggatcgcggccctaaacccaaatttgcccgaacaaagcggggaaaaaccgtttttgccccctgtttttgggtttcggaaccccttagaatagaatcccgggaaggggccccttaagggacggagggaccgcaacccctggtcatccgcccttgcctgtgggccacagtactntggttatatacggcacaggctcgggtgccttgaaatggaccgagactaatgtctgggcctggaggatgccttaccgcgacaaggttgccctctctccctcccatcttcgaggctgggcgggatagtcgggaaattgggtcgtttctcaaacagccagttttgggtggaagggcggagaggtttgggaagcagggaactagagatcccgctcactgcccntgaagagtccagtgcagggtcttttcactccagacctgcagggtcagccgggatgctctttgctgggtatcaccagngggcttccgttacgacggcgaattctcaccacccacaccatttcgggctattaaagaggcttcagacaagaatcctgtaccagaaa

SEQ ID NO: 5145 - DNA, 837 bp, Homo sapiens
  misc_feature (1)...(837): n = A,T,C or G
ccttggccatggcgctcgagggcgcggggcgcacgggctgcggtggctgcggtggctgcggcgctgggggagtggggctcctctcccgcgggttcctcctgttgaatgtgggatgctcggctgtgcaatggctgcagcctctgcgagcgccgccgcggtccacagcctccgccgtaatcctcacaagagccgtgccctaagcgcttcacccccgccccacccttctttcctgtcccaacgaagcctcaactccagttcctgaaatagtcccaagttagggtcgggatcgcggccctaaacccaaatttgcccgaacaaagcggggaaaaaccgtttttgccccctgtttttgggtttcggaaccccttagaatagaatcccgggaaggggccccttaagggacggagggaccgcaacccctggtcatccgcccttgcctgtgggccacagtactntggttatatacggcacaggctcgggtgccttgaaatggaccgagactaatgtctgggcctggaggatgccttaccgcgacaaggttgccctctctccctcccatcttmgaggctgggcgggatagtcgggaaattgggtcgtttctcaaacagccagttttgggtggaagggcggagaggtttgggaagcagggaactagagatcccgctcactgcccntgaagagtccagtgcagggtcttttcactccagacctgcagggtcagccgggatgctctttgctgggtatcaccagngggcttccgttacgacggcgaattctcaccacccacaccatttcgggctattaaagaggcttcagacaagaatcctgtaccagaaa

SEQ ID NO: 5146 - DNA, 731 bp, Homo sapiens
atatatatatatatttttttttttttatttttccccagaaagcagctggcacagtggctgatgcctataatcccagcactttgcagggggccgaggtgggaggattgcttgagttcagaagtatgagaccagcctaggcaacataggaagacctcatctcttcaaaaaaataaaaaaattagcagggcgtggtggcacatgcctgtggtcccatctacttgggaggttgaggtgggaggattgcttgggcctgcaatgttgagcctgcggtgagccatgatcgcgtcaccgcaatctagcctgggcgacacagcaaaactctgtctcaaaataataatgatgatgataataaaataagaataaatagaaagcaaatcagagaataatacactgacatatatacaaatatgcacttttttaaaaaaatmaaaaaaaaacaaacaaacaagtaaacaataaggtggttttctaggcaatggaaaggagagtgagtcgtagccaaaaaagggaactttaatttttaaaatgttatacaacttgtacttttgtgctgttcatcttttttcttacgtaaggagtatacacctatggtgtttctaatagttgatccttaacactaatatatatatattttttctttttttttgagacatggtcttgctctgttgcccaggctggcgtgccagtggcatgatcacagctcactgcagcctcgacctcctggactcaag

SEQ ID NO: 5147 - DNA, 890 bp, Homo sapiens
ctggagaaacacatgcttgaggacagagctcagatcattgtcccagcgcaaaccttggtgggatgtaaggtttggagcttcttaagttccaagaggcagtctcatgcagttcaaggagggctggagaagcctggtctgctcatgggagtcaattgttaaattttcaggaattttgtgagccaattattgaacacagctattattaaaaacaaaattataggctgggcgtgatggctcatgtctgtaatcccagcactttgggaggccaaggcggtggatcacttgaggtcaggagttcaagaccagcctagccaacatagcaaaatcctgtctctactaaaaatacaaaaacattagtcgggtgtggtggctcacatctgtaactccagctacttgtgaggctgaggcatgagaattgcttgagcccaggaggcagaggttgcaatgggctgagaccacgccattgcactccagcctgggcaacagagggagattgtgtctttcaaaataataaaataaaataaaataaaataataggctgggtgccgtgactcacgcttgtaatctcagcactttgggagaccaaggctggaagatcgcttgagcccagaagttggagatcagcctggggaacacagggagaccctggtctgtacaaaaaataaaaacaaaattagccaggcatggtggcacatccctgtggtcccagttacttaggaggctgaggtgaacaaagttaacactcaaaactcatcacttgtgaattactttgctacagtgcactattattattatttatttatttttactgggcagcctcttgagcctaagtaggcycagagactgtccagcatactattattgatgctttgtggttattgatattgatt

SEQ ID NO: 5148 - DNA, 596 bp, Homo sapiens
agttcggcatcatatatattattcacactaatcccataagaatgttgactctgacctctgttttcagagtttccgtataccagtcctctctccctatgaactatttaaggctgggatttctgttgcacacgttgaagtatggaaaacagtgacattgatgcatgccttcattggtcacaactttgtagtgtgttttaagcgtttatttcggtaaactcattgttaaatttatttttaaaacatttgtattatcatatatgaaaacctagtactacttgtctgcaaaagaaggtaaacaaatgtattaaagtctagaaaaatatatttgcttgtcaaaggctttattttaaaggggacattagaagtttagagatgtgtttcaggcactttaaactaaaataagatgtttttaaaaaatgtatttaaacaatctttggaaatttttgaacggagaaaaacattctaccatgtgattcaatgctattgagcaccagtgccacatagatcacaagtgattgttgtcccacactttgggraaatatctaagccactgataaaaagtattacattgacagactatttagtattcttagctg

SEQ ID NO: 5149 - DNA, 657 bp, Homo sapiens
tgtctctaaaatactactaccactgctgctactactactactactactactactactactactactactactaaattatatgaattaaaagaagccagaagcaaaaggctatatcctgtatgatttaatgcatagggtattctgaaaaaggataaacaatagggtcagaaatcaggtaagtattgaaagtaacagtgtttaggagaagaaagtaatcacacaaaggaaacttggagtgatgaaaatattctatatctctatcatgttgcaaacactaatcaaaactcatggatctgtatacctaaaaagaatgcattatattcttttaaatttatactttaacttgcattaaacaaagygaaagaaaacaagttgaaaaattatgacattttccgtatttctaatgtcatctttttctaccatttctgaaattaatacttgtgtcattactgtgttgttaatagttcctgtatattggttatctattgttgtataacaaattatcacaaatttagcagcttaaaaaaacatacattagttatttcacattttctgtggttcactttctgtctgagcacagctcaacggggtcctctgcttcagggtctctcataagaacggaattcaggaatcagagcttaagaccctactgtggca

SEQ ID NO: 5150 - DNA, 618 bp, Homo sapiens
ctcaaggcttggtgctgtcttcatgagagtgagtgagttcttrtgagatccggttattcaaaagttttgtggcaccgccccccgccaatctgtctcctgttcctgtttttgccatgtgacatgctgcttcacttttgccttccaccacgattctaagctttctgaggcatccctagaagctgagcagatgccagcatggggcttcctgtaaagcaaattgtgcaaaactgtgagccaattaaaccctttttctttataaattacccagtttcaggtatttctttatagcaaggcaggaatggcctaatacagtatggaactctgattgctggcaattgtgtgaacaactatgcataaatacctagaaactcctaactttacatgacccacttaaattgaatcctgtgtatttggttgcagttctcttcttttttcattcattctgaaggtcagttctgtcatcttctatatcagctatccctttgagtttgtgtcatgtgcaaatctttttaatttttaattgtaacttttattttaaattcaagggtacatgtgcaggtttgttatatatgtaaacagcatgtcgcaggggtttggtgtacagattattttaacact

SEQ ID NO: 5151 - DNA, 618 bp, Homo sapiens
ctcaaggcttggtgctgtcttcatgagagtgagtgagttcttatgagatccrgttattcaaaagttttgtggcaccgccccccgccaatctgtctcctgttcctgtttttgccatgtgacatgctgcttcacttttgccttccaccacgattctaagctttctgaggcatccctagaagctgagcagatgccagcatggggcttcctgtaaagcaaattgtgcaaaactgtgagccaattaaaccctttttctttataaattacccagtttcaggtatttctttatagcaaggcaggaatggcctaatacagtatggaactctgattgctggcaattgtgtgaacaactatgcataaatacctagaaactcctaactttacatgacccacttaaattgaatcctgtgtatttggttgcagttctcttcttttttcattcattctgaaggtcagttctgtcatcttctatatcagctatccctttgagtttgtgtcatgtgcaaatctttttaatttttaattgtaacttttattttaaattcaagggtacatgtgcaggtttgttatatatgtaaacagcatgtcgcaggggtttggtgtacagattattttaacact

SEQ ID NO: 5152 - DNA, 618 bp, Homo sapiens
ctcaaggcttggtgctgtcttcatgagagtgagtgagttcttatgagatccggttattcaaaagttttstggcaccgccccccgccaatctgtctcctgttcctgtttttgccatgtgacatgctgcttcacttttgccttccaccacgattctaagctttctgaggcatccctagaagctgagcagatgccagcatggggcttcctgtaaagcaaattgtgcaaaactgtgagccaattaaaccctttttctttataaattacccagtttcaggtatttctttatagcaaggcaggaatggcctaatacagtatggaactctgattgctggcaattgtgtgaacaactatgcataaatacctagaaactcctaactttacatgacccacttaaattgaatcctgtgtatttggttgcagttctcttcttttttcattcattctgaaggtcagttctgtcatcttctatatcagctatccctttgagtttgtgtcatgtgcaaatctttttaatttttaattgtaacttttattttaaattcaagggtacatgtgcaggtttgttatatatgtaaacagcatgtcgcaggggtttggtgtacagattattttaacact

SEQ ID NO: 5153 - DNA, 618 bp, Homo sapiens
ctcaaggcttggtgctgtcttcatgagagtgagtgagttcttatgagatccggttattcaaaagttttgtggcaccgcccccygccaatctgtctcctgttcctgtttttgccatgtgacatgctgcttcacttttgccttccaccacgattctaagctttctgaggcatccctagaagctgagcagatgccagcatggggcttcctgtaaagcaaattgtgcaaaactgtgagccaattaaaccctttttctttataaattacccagtttcaggtatttctttatagcaaggcaggaatggcctaatacagtatggaactctgattgctggcaattgtgtgaacaactatgcataaatacctagaaactcctaactttacatgacccacttaaattgaatcctgtgtatttggttgcagttctcttcttttttcattcattctgaaggtcagttctgtcatcttctatatcagctatccctttgagtttgtgtcatgtgcaaatctttttaatttttaattgtaacttttattttaaattcaagggtacatgtgcaggtttgttatatatgtaaacagcatgtcgcaggggtttggtgtacagattattttaacact

SEQ ID NO: 5154 - DNA, 793 bp, Homo sapiens
ctgggtatatttggggtgacagagactggggtctggttgtctagtgttgagtgacagaaactgggggtgccaagcagtatttggggcaaagaaactagggctaggttgtctagttttacaggacagagatgggtcccagagtatatatgggtgacagagactgggtatctggttgtctgcttttgggaaacggactggggcccctgcatgtattttgggtaacagaaatggggtctggttgtgtaggttgttatacagagatcattgtcccagtacatttgtgaggtgacagactagcttgctaatttaatttaatttaatttttatktatttatttttttgagatggagtctcgttctgtcaccaggctggagtgcagtggcacgatctcggctcactgcaacctctgcctcctgggttcaagcaattctcctgcctcagcttcctgagtagctgggactacaggcatgcgccaccatgcctggctaattttttgtatttttagtagagatggggtttcaccatgttggccaggatggagtcaatcttctgacctcatgatccgcctgccttggcctcccaaagtgctgggattacaggtgtgagccaccgtgcctggccttattttatttttttagacagagtctcattctatcgcccaggctggagtgcagtggtgcgatcctgggtcactgcaacctccacctcctgggttcaagcgattctcctgcctcagcttctcaagtagctggaattacaggcacctgccacaacgcccggctaattttgtact

SEQ ID NO: 5155 - DNA, 1636 bp, Homo sapiens
gtctttccaactatggatacgattgtgtccctccccagctcacacaccctccttggctccccaatgccctcagtgtggagctcatactcctcaggtcagcattcagggcagtcagcccctgcgtttacttcgtggctcaccttagcattgcctcagctcactgagctagactctgcacaaacacraggcaccgagacatggacgccatctcagagcagaccagggcccctggggcgcctctcagtgggatagggctgcagctttctccttgatccaagtgcttttgagttaaatctgctgccaacgactccaccattcacaggccagggcatctactgtgcgctagccacaggtgctgggcctgggcaagcctggcccccactccctgtagtggggcaggtgcaggcgggggtggctgctcggaggaggtggcctgagggatgtatatgagtttcccaggcagccttaggagggagggtggggatggagaaggttacccttctccatggagggtggtgaggggctgagttttatcccaagggccgtgggaccctggaggctttgaaacaggacaatgggctggctagacaggtgcaggctatggccaggaaaccccccaaatacaacggaattgaaagactcctgttggaatgctggcccccgcaggaaccaccatgatcccgattcacccaggagggccaccctcccgtccagccccccaagagcagcagggctccctcttgcccttgaacctcctctgccctgacaggcggcgtcacccagggctcaggatcctggcttccagcattccagaggtgactcaccaaccaaagtgtcactcaccaaccgaaggaccttgcacaaatgcaccagcctccccatgcctcagtctccccatctgtaaatgagtgttatgacggtactgtcataaactccctggaggatccaggtggtcacgttactgttggtgacattgtccctctgttggctgcagacgcatcttctctccagactgccgatcccagaaagccaggtgatcaccattaaccccgagctgcctgtggaggaggcggctgaggactacgccaagaagctgagacaggtgagccccgaggagcggccgcaagggagtcacatccacgaagcggccacaccccgggcaacagagcggccttctgattgtcaccagcaggaactgccccagggatcactggcagatccctttgaggaatcccctcttcgaggccacagccctgccctggggagcctgaaggccactcggcctctgttgcccaggtaacaggcctgggtcctcacatcttggggaaatatgatgggtatggctatggctttgatcacaggctacattgagcactgtttcctgcgttacagctacttgtatttctttttttttttttttctttgagacggagtctcactctgtcgcccaggctggagtgcagtggcgtgatcatggctcactgcaagctccgcctcccgggttcacaccattctcctgcctcagcctcctgagtagctgggactacgggtgcccgccaccacgcctggttaatttttttgtatttttttagtagagacggggtttcaccatgttagccaggatggtctcgatctc

SEQ ID NO: 5156 - DNA, 1636 bp, Homo sapiens
gtctttccaactatggatacgattgtgtccctccccagctcacacaccctccttggctccccaatgccctcagtgtggagctcatactcctcaggtcagcattcagggcagtcagcccctgcgtttacttcgtggctcaccttagcattgcctcagctcactgagctagactctgcacaaacacgaggcaccgagacatggacgccatctcagagcagaccagggcccctggggsgcctctcagtgggatagggctgcagctttctccttgatccaagtgcttttgagttaaatctgctgccaacgactccaccattcacaggccagggcatctactgtgcgctagccacaggtgctgggcctgggcaagcctggcccccactccctgtagtggggcaggtgcaggcgggggtggctgctcggaggaggtggcctgagggatgtatatgagtttcccaggcagccttaggagggagggtggggatggagaaggttacccttctccatggagggtggtgaggggctgagttttatcccaagggccgtgggaccctggaggctttgaaacaggacaatgggctggctagacaggtgcaggctatggccaggaaaccccccaaatacaacggaattgaaagactcctgttggaatgctggcccccgcaggaaccaccatgatcccgattcacccaggagggccaccctcccgtccagccccccaagagcagcagggctccctcttgcccttgaacctcctctgccctgacaggcggcgtcacccagggctcaggatcctggcttccagcattccagaggtgactcaccaaccaaagtgtcactcaccaaccgaaggaccttgcacaaatgcaccagcctccccatgcctcagtctccccatctgtaaatgagtgttatgacggtactgtcataaactccctggaggatccaggtggtcacgttactgttggtgacattgtccctctgttggctgcagacgcatcttctctccagactgccgatcccagaaagccaggtgatcaccattaaccccgagctgcctgtggaggaggcggctgaggactacgccaagaagctgagacaggtgagccccgaggagcggccgcaagggagtcacatccacgaagcggccacaccccgggcaacagagcggccttctgattgtcaccagcaggaactgccccagggatcactggcagatccctttgaggaatcccctcttcgaggccacagccctgccctggggagcctgaaggccactcggcctctgttgcccaggtaacaggcctgggtcctcacatcttggggaaatatgatgggtatggctatggctttgatcacaggctacattgagcactgtttcctgcgttacagctacttgtatttctttttttttttttttctttgagacggagtctcactctgtcgcccaggctggagtgcagtggcgtgatcatggctcactgcaagctccgcctcccgggttcacaccattctcctgcctcagcctcctgagtagctgggactacgggtgcccgccaccacgcctggttaatttttttgtatttttttagtagagacggggtttcaccatgttagccaggatggtctcgatctc

SEQ ID NO: 5157 - DNA, 660 bp, Homo sapiens
tcctgcctcagcctctcacgttgctaggattgtaggtacaagccaccatgtstagctccccaaaccattcttcttatctcagaaagaaatcctctggatttagctatatttgacatttcatgtaaatataagcagacaatatgcgtccttttggcctgagttttttcactgagtgtcatgtttcaaggccgtgctccatttttttggtgattgactactattccagcctacgaatatgccgcacggtggttcatctctctctgccgatggacatttgggctgtttctacgtttcgaatgatgtaaacgagctgtgtgtcttcttcaataaatgcccattgaagtcttttgcctattttttaatggggttgttggtcattttgttgctgagttgtatgcatagtttatgtgttctggatacttgatcctgatgagctcagtgaacatttataaacaaactgaccatagcagcccccactccaatgaaaacgccacctgtgacggcccccagaggcccctcgtccctcctggtccctgccccgggggccccatcctgacttccattgctggcagcgggtaggttcatgtcggctgctcttgaattcctcctgcctgggctgccccgcgtgatccactgagtgtggcagagacgtgtcgtgct

SEQ ID NO: 5158 - DNA, 748 bp, Homo sapiens
ttgtaactctcaaagagatcacactgcgattcaggactaaactgaaaagtcatcagttgcccatcacacaggaacaatgcagctgaaggcagtgggaattgctaagtctctgagtgctcacagaattgtyagggccaagcgtaggcctgactcatgaatggcggactatcatttaggtggagaacagaagcttcagataatcagaagcttccagataattttttagagatgtgaaacttccaggaatatcttatttggttgagacaataggaactacccatttaaccacataggtaaaactccagtatcttttgacgtgcctccaaattatctttacaagtacctaagagattattctcacatcagaattctgattgttgccgtcagcatacttcctataatttgtaattgtctttgtccttcacccaaaatgaggttatcttttcatttgttgtttccccagcactggcaagatgcctggagctgcgaaggccctcggtgaatgctgcaggattgcaagcaagggttggggagagcagcatgcttctgagattctgtagacctaaccatggccaaaatgattttgaactgtctttaatgtctggcaggagcttaatctcagaagcttcactcttattatttaaaaagtgctacatagttgtataaacatgatactactcagtttttaaatacagaattacaaacatgtaatgtgttatctcaaaaaaagtttatttttttttttaga

SEQ ID NO: 5159 - DNA, 818 bp, Homo sapiens
tactcggtaattacttttatgacttggcagtttcttttgctcaatggcatcacagaatgaatgaaatagtatttgaaggattttccctatgtctcttcgctaatccgtgagcggaacatcctcactagataatgtggactttataaataatttacaatcacattgatgtcaccatagacagactattgtcctggttagaaatgtcacattgtcctggttagccaggacaatgtgagtccctgtagctgtaattgtgtctagaggggtgggtctgagggascgctttctgtactgtctccctgcctagtgagctccaatgcctggcatcagctttggaccaggaaagcccatttgaactctggtgtcaaacttaccttgggcaggtcatttatcctctctggatttcaactttctcatctgcaaaacggggaagagagctgccaatacctagacactgggaggaaggtaccttggcgtctcatgcttgagaggtgctctgcatctgacttctttctaaaacaccttctggaaactgctttctagaacaccttctgagccagcagtgaatccctggtgagcctgctagtgagtctcagtaatttggaaggtcactgagaacaccatgctatttaattcagatcatgagaaaaactgctatctctagaaaagtactccttctctggtacagttatttcatcaacctttcatttttttccttctatccaaattttatactttcatctactctattcctacctcaacttcttcagaaacttcaagtcccaccacaggtcctgggacacagtctattctcactt

SEQ ID NO: 5160 - DNA, 553 bp, Homo sapiens
gaaaaatccaggaaaaggcagcaaaggaaaagcagcgtccaaaaggctgagggagactgtcaccctgtcctctaagtgccaccaagacacagagcctgagcgcagggacgtcatgtgtatgtcccttgcacctgggcctggtctggccgcagcgggggctcaagaaacagctgctcaccgagagtggtggctcacacctggaatcccagcactttgggaggccaagatgggaggatcacttgagcccaggatttcaagaccagcctgggcaacacagggaggtccctcaaccctacaaagagtcaaaaattagctgggcgtggtggcccacgtctctggtcccagctactcgggaggctggggagggaagattgcttgagcctaggatgtagaggctaaagcgagttgtgattgtgtcaccacacttcagcctgggtgacagagccagtcaaaaaaaaaaaaaaaagaaagaaagaaagaaaaagaaatggctaccgaatgaacaaatggtcggttggttgctcctgccccactcarttcccccaggtaaaat

SEQ ID NO: 5161 - DNA, 657 bp, Homo sapiens
aagtaccttccaaaaaagcagattcatccacagcttctatcgcattatccaaatctctcctctggagggttttcctgtttccctgttgagcacagcagtaggcatcttttgcaatggtctccacacacagttccccggctcaggccagaatgactgttctctgtcccgcccgtgtctcgttggggtcagccttcgccaaggccttcgctggcgcccgaggcagcctcgagggacgagccccaggcactcttgtcggggcttggggctgtgggacctatgcctccccaccaggtcgcccctccactgcttccagctgcccctgagtgcgctgcccggccacctattgtgttcagaaaaagaaagttaccattttatcagtttatctgtttttgtgtgtgcttgtttgtttttattttgttttgttttgttttttagacagagtctctctctgtggcccaggctggaatgcagtggcgcagtctctgctcacggtattctccgcctctcgggttcaagcgattctcccacctcagcctccttgaatagctggggccgcaagtgcgtgccaccactgccggctaatttttttttttytttctgtagagacggggaatctctctgtattgcccaggctggtctcgaacttctggcttcaag

SEQ ID NO: 5162 - DNA, 774 bp, Homo sapiens
cccacttggtggatggcacttgagtggggacagtgttgttgaggaccattcccttaaacctgtggaatctaatgctacctcaaagtggctagtgtcagatttacattctatcatggtgtgacagttgtagtcagaaaatagattctcttttacttaatggtatgttgtgatgatttgtgaataagtctgactgaactccaaggtgtcaggaacactggtggctgatacagtgtgttggagtttaattttttacttgtcatcaaattgggcattttttgactttacctacaattggttctccttcaaaacaatagaaaktatcaattaatatggtcttgatattcaagaaaatgaaaaagcatgagacaaaaaaaaaaacacctagtagctgaatctagttatgaagataaactacatggtagtagaaatgtttgtcagataaaaataatcattagaatacaagatttaaataagagcataaactggatggaagctaaaacctggcacccttttctttagcacattagaaaaatgaaaacttgcaagattttttgatccatagccaataaaacttaacaatgaaaaaaaactaaatcactttagaaaggaccatcaaacagatttaagattactccagagtcaaactgtgtctgaaaagtttttggcaattgtttaaggacacataactgtgggcaatcagaatgtctcctggtaaaggaaaaataaagtcgctgtatttttgagaaacagaaaaatggaagttttgaaaataac

SEQ ID NO: 5163 - DNA, 661 bp, Homo sapiens
tcctggatgcttcgccactgtggagatgccaccccagggctttgtctccgaggtgagctcttcctgggctggggacagcctccactcgctttgcagctgtccctatgcgcagcaaggggtcttcacctctcctgatactgccgaggggtggggcctgcaggtgggtggaaagggtggggctgaagctagagctgacgtcactgccctgtgccggtcggggccttgcagctggacagaggaggtggatgctcaatcggctcttcacagaaaagggtcctcctgcttcttcaaggatctgggtggccacaggcctcagctcctcaaaggctatggcttggggatctttcttttactactattattagctagtacttggagaaactcagtgacttaatgatatttatgatttctcatgagtctaggggtgagctgrttggttcttctgttcttggttgggatcacttgtgtatctgagtttggctgtgggttgaggagaggcttgtgttgacctaggatgggttcctatgtttgggggtcagctggccatcagcaggtttagagaggtttaaagtttgggtgtcgtcccctccaaatctcatgttgcagtgtgatccccatgttggaagtggagcctcatgggaggtgtttgtgtcatgggggt

SEQ ID NO: 5164 - DNA, 851 bp, Homo sapiens
gtggaaagctggctcttctctgcctactctcatcctgggatggagaattccccaaacataaaaaggggttcagcccccaaatcaagcattcacttgatgccagcaatgattattattagtccaggctctccgttgagagtcgtggtaaaattgaactcactccctggaattggagagggaggcagagtacaggttcttgtccaaccttgctaggatgtggccctgtgccacaggcgctgtcacccagatggcagccaaacacggagaaggtcagtagttcctggatacctgtctggttggtgagaccctgcttggaccagagagcctacagagctgactacytcatcagcttttgttggatggaggacaaaaatcaaaacaaaacagagagtgagaatgagcgtgcaacaagaaaaggcatccgaaagatgtttttaatgtgcatcagattatgcagccaagccaggggcctctgcccagcttcccggcacgttcctgcctgaagacaacttgatgatttgaagggagccgcggtcagattgtatacctgtcaactgcctctccatgctcactggggcacggggctgtaatgaggcctgacacttcaggaatctggcaggatacaaaacagccgcagagggcagaggggaggcaggcggggcctactccagccacttgagcctgcctggaatgttccagaagagtaccagagggaacccagggggcccagctccaggttctgccttgaccacttgctggtaggacaatgagaaaaatcacatcagctctctgaacctcagtttcctcatctacaaaatgggttttactctccccttaaagttttattggga

SEQ ID NO: 5165 - DNA, 851 bp, Homo sapiens
gtggaaagctggctcttctctgcctactctcatcctgggatggagaattccccaaacataaaaaggggttcagcccccaaatcaagcattcacttgatgccagcaatgattattattagtccaggctctccgttgagagtcgtggtaaaattgaactcactccctggaattggagagggaggcagagtacaggttcttgtccaaccttgctaggatgtggccctgtgccacaggcgctgtcacccagatggcagccaaacacggagaaggtcagtagttcctggatacctgtctggttggtgagaccctgcttggaccagagagcctacagagctgactacttcatcagcttttgttggatggaggacaaaaatcaaaacaaaacagagagtgagaatgagcgtgcaacaagaaaaggcatccgaaagatgtttttaatgtgcatcagattatgcagccaagccaggggcctctgcccagcttcccggcacgttcctgcctgaagacaacttgatgatttgaagggagccgcggtcagattgtatacctgtcaactgcctctccaygctcactggggcacggggctgtaatgaggcctgacacttcaggaatctggcaggatacaaaacagccgcagagggcagaggggaggcaggcggggcctactccagccacttgagcctgcctggaatgttccagaagagtaccagagggaacccagggggcccagctccaggttctgccttgaccacttgctggtaggacaatgagaaaaatcacatcagctctctgaacctcagtttcctcatctacaaaatgggttttactctccccttaaagttttattggga

SEQ ID NO: 5166 - DNA, 851 bp, Homo sapiens
gtggaaagctggctcttctctgcctactctcatcctgggatggagaattccccaaacataaaaaggggttcagcccccaaatcaagcattcacttgatgccagcaatgattattattagtccaggctctccgttgagagtcgtggtaaaattgaactcactccctggaattggagagggaggcagagtacaggttcttgtccaaccttgctaggatgtggccctgtgccacaggcgctgtcacccagatggcagccaaacacggagaaggtcagtagttcctggatacctgtctggttggtgagaccctgcttggaccagagagcctacagagctgactacttcatcagcttttgttggatggaggacaaaaatcaaaacaaaacagagagtgagaatgagcgtgcaacaagaaaaggcatccgaaagatgtttttaatgtgcatcagattatgcagccaagccaggggcctctgcccagcttcccggcacgttcctgcctgaagacaacttgatgatttgaagggagccgcggtcagattgtatacctgtcaactgcctctccatgctcactggggcacggggctgtaatgaggcctgacacttcaggaatctggcaggatacaaaacagccrcagagggcagaggggaggcaggcggggcctactccagccacttgagcctgcctggaatgttccagaagagtaccagagggaacccagggggcccagctccaggttctgccttgaccacttgctggtaggacaatgagaaaaatcacatcagctctctgaacctcagtttcctcatctacaaaatgggttttactctccccttaaagttttattggga

SEQ ID NO: 5167 - DNA, 2077 bp, Homo sapiens
aataacaggatatttgatattaaagaatagttatgctgagtggttggcttaatgatggtattatgattatgtttttttttttagtttttttttccctgggtgtggtgcctcatgcctgaaattccagcactttgggaggccaagttgcggggggaggattgcttgaggccaggagtttgagaccagcctgagcacaacagcaagaccccatctttacaaaaataaaaataaaaagttagtcaggtgtggtgtagtcctagctagtcgggaggctgagaaaggagaactgcttgaccctggcaggagattgatgctgcagtgacctatgatcacgccattgcactccaacctgggtgacagagttagaccctgtcttaaaaagaaraaagtagagttctttctattacatatgcatatcaaaatatttaaagatgaaattatatgatgtctgagatttgcttcaaaataacaagggaggaggagaagtgggtggaagcatacattaaacaagattggccatgaatcaataaatgttgaatctggtgatgagtatgtgaaaacttatcacactagtgtcttgtttaaagtgctccatagcagaaagtttttctaaaaatcaacttcatgcatttgtagttagtagtaaataagaccatgtatatagagtgctttatcactatggctgacagatagcactcaaacattgtttttagctttttatagtccctttcaattaatcacaccccaaggaggtatattatttagatgaagggccctgtcccatgtacctttgtcttcctcatagtaatgtattgaaattccaagtttagaaggaggaaatgccagtcttcggagtcccaaacctatcatgcagcagcagagccgacgatcccaaatgcttccctaacactcctggtaaataggaccactttcttctcacctcgtaggaatacttgggatcattccttcttttattcattatttttcattcacttactatgtgccagatattcgatgctgggatacaaatattaatacactagactctaaattaactgaaagcatccaaaggtgaatattcctgagggtcaaacaaattcaagaaacagtgctaacgatcaatggcctcaatcatcactaagtccctcctaacagccagctttactgagcatataaaaatgagtggagatatggaacttgttcgcacaaagtttaaaacccggtagggtacatgagacaagaacccaaataaacaacaacaggaagctgaatgtgattaaatggtcccaaaatgatttggttaccaaggtggagaaagtatgtttgacaggtgttaagtagtcaggtttggctgaagcatttaacaggtatttggtgagaggtggaaactaaggctgggaaggtgcagtaggtccacatgtggagaaggtcaggttaaggcatgtgaatgtcatcaggtagcaacagagagctgcttaacgttgcagagcaaggaataacattcttaggactgactgtggaaggggtctctagcagcaagtggcagagcccatagaccactcatggaagaccaatccaagcctggcaccacaccgtcaagttcatagcatataaccatatacatgttaacaagtttagtgactaatagatttacaagacctgagatggaattgagtctttggagatccagcttcagaggttagcctaacctattccgcacatatagactgggcctgaactatttccaagaaagctgcctgctattttagagtggggctcagcaaaccttttccataaagaaccagagagtaaatgttttaggttttgcagaccatatattcttttgcaactactcaacttgctgaagcaacaatagacaatacataaatggagcatggctgtattctaataaaacaggacttggctgtagttcgctaaccccaagtgtagagttggtagtctattcccagaaccaaagtgacccatccagatacaagtcagctccaacttctgccagagacccaagcctcatctgtcaaagagtaagaaggctcctttagatgtatgccctgaggat

SEQ ID NO: 5168 - DNA, 2077 bp, Homo sapiens
aataacaggatatttgatattaaagaatagttatgctgagtggttggcttaatgatggtattatgattatgtttttttttttagtttttttttccctgggtgtggtgcctcatgcctgaaattccagcactttgggaggccaagttgcggggggaggattgcttgaggccaggagtttgagaccagcctgagcacaacagcaagaccccatctttacaaaaataaaaataaaaagttagtcaggtgtggtgtagtcctagctagtcgggaggctgagaaaggagaactgcttgaccctggcaggagattgatgctgcagtgacctatgatcacgccattgcactccaacctgggtgacagagttagaccctgtcttaaaaagaaaaaagtagagttctttctattacatatgcatatcaaaatatttaaagatgaaattatatgatgtctgagatttgcttcaaaataacaagggaggaggagaagtgggtggaagcatacattaaacaagattggccatgartcaataaatgttgaatctggtgatgagtatgtgaaaacttatcacactagtgtcttgtttaaagtgctccatagcagaaagtttttctaaaaatcaacttcatgcatttgtagttagtagtaaataagaccatgtatatagagtgctttatcactatggctgacagatagcactcaaacattgtttttagctttttatagtccctttcaattaatcacaccccaaggaggtatattatttagatgaagggccctgtcccatgtacctttgtcttcctcatagtaatgtattgaaattccaagtttagaaggaggaaatgccagtcttcggagtcccaaacctatcatgcagcagcagagccgacgatcccaaatgcttccctaacactcctggtaaataggaccactttcttctcacctcgtaggaatacttgggatcattccttcttttattcattatttttcattcacttactatgtgccagatattcgatgctgggatacaaatattaatacactagactctaaattaactgaaagcatccaaaggtgaatattcctgagggtcaaacaaattcaagaaacagtgctaacgatcaatggcctcaatcatcactaagtccctcctaacagccagctttactgagcatataaaaatgagtggagatatggaacttgttcgcacaaagtttaaaacccggtagggtacatgagacaagaacccaaataaacaacaacaggaagctgaatgtgattaaatggtcccaaaatgatttggttaccaaggtggagaaagtatgtttgacaggtgttaagtagtcaggtttggctgaagcatttaacaggtatttggtgagaggtggaaactaaggctgggaaggtgcagtaggtccacatgtggagaaggtcaggttaaggcatgtgaatgtcatcaggtagcaacagagagctgcttaacgttgcagagcaaggaataacattcttaggactgactgtggaaggggtctctagcagcaagtggcagagcccatagaccactcatggaagaccaatccaagcctggcaccacaccgtcaagttcatagcatataaccatatacatgttaacaagtttagtgactaatagatttacaagacctgagatggaattgagtctttggagatccagcttcagaggttagcctaacctattccgcacatatagactgggcctgaactatttccaagaaagctgcctgctattttagagtggggctcagcaaaccttttccataaagaaccagagagtaaatgttttaggttttgcagaccatatattcttttgcaactactcaacttgctgaagcaacaatagacaatacataaatggagcatggctgtattctaataaaacaggacttggctgtagttcgctaaccccaagtgtagagttggtagtctattcccagaaccaaagtgacccatccagatacaagtcagctccaacttctgccagagacccaagcctcatctgtcaaagagtaagaaggctcctttagatgtatgccctgaggat

SEQ ID NO: 5169 - DNA, 2077 bp, Homo sapiens
aataacaggatatttgatattaaagaatagttatgctgagtggttggcttaatgatggtattatgattatgtttttttttttagtttttttttccctgggtgtggtgcctcatgcctgaaattccagcactttgggaggccaagttgcggggggaggattgcttgaggccaggagtttgagaccagcctgagcacaacagcaagaccccatctttacaaaaataaaaataaaaagttagtcaggtgtggtgtagtcctagctagtcgggaggctgagaaaggagaactgcttgaccctggcaggagattgatgctgcagtgacctatgatcacgccattgcactccaacctgggtgacagagttagaccctgtcttaaaaagaaaaaagtagagttctttctattacatatgcatatcaaaatatttaaagatgaaattatatgatgtctgagatttgcttcaaaataacaagggaggaggagaagtgggtggaagcatacattaaacaagattggccatgaatcaataaatgttgaatctggtgatgagtatgtgaaaacttatcacactagtgtcttgtttaaagtgctccatagcagaaagtttttctaaaaatcaacttcatgcatttgtagttagtagtaaataagaccatgtatatagagtgctttatcactatggctgacagatagcactcaaacattgtttttagctttttatagtccctttcaattaatcacaccccaaggaggtatattatttagatgaagggccctgtcccatgtacctttgtcttcctcatagtaatgtattgaaattccaagtttagaaggaggaaatgccagtcttcggagtcccaaacctatcatgcagcagcagagccgacgatcccaaatgcttccctaacactcctggtaaataggaccactttcttctcacctcgtaggaatacttgggatcattccttcttttattcattatttttcattcacttactatgtgccagatattcgatgctgggatacaaatattaatacactagactctaaattaactgaaagcatccaaaggtgaatattcctgagggtcaaacaaattcaagaaacagtgctaacgatcaatggcctcaatcatcactaagtccctcctaacagccagctttactgagcatataaaaatgagtggagatatggaacttgttcgcacaaagtttaaaacccggtagggtacatgagacaagaacccaaataaacaacaacaggaagctgaatgtgattaaatggtcccaaaatgatttggttaccaaggtggagaaagtatgtttgacaggtgttaagtagtcaggtttggctgaagcatttaacaggtatttggtgagaggtggaaactaaggctgggaaggtgcagtaggtccacatgtggagaaggtcaggttaaggcatgtgaatgtcatcaggtagcaacagagagctgcttaacgttgcagagcaaggaataacattcttaggactgactgtggaaggggtctctagcagcaagtggcagagcccatagaccactcatggaagaccaatccaagcctggcaccacaccgtcaagttcatagcatataaccatatacatgttaacaagtttagtgactaatagatttacaagacctgagatggaattgagtytttggagatccagcttcagaggttagcctaacctattccgcacatatagactgggcctgaactatttccaagaaagctgcctgctattttagagtggggctcagcaaaccttttccataaagaaccagagagtaaatgttttaggttttgcagaccatatattcttttgcaactactcaacttgctgaagcaacaatagacaatacataaatggagcatggctgtattctaataaaacaggacttggctgtagttcgctaaccccaagtgtagagttggtagtctattcccagaaccaaagtgacccatccagatacaagtcagctccaacttctgccagagacccaagcctcatctgtcaaagagtaagaaggctcctttagatgtatgccctgaggat

SEQ ID NO: 5170 - DNA, 2077 bp, Homo sapiens
aataacaggatatttgatattaaagaatagttatgctgagtggttggcttaatgatggtattatgattatgtttttttttttagtttttttttccctgggtgtggtgcctcatgcctgaaattccagcactttgggaggccaagttgcggggggaggattgcttgaggccaggagtttgagaccagcctgagcacaacagcaagaccccatctttacaaaaataaaaataaaaagttagtcaggtgtggtgtagtcctagctagtcgggaggctgagaaaggagaactgcttgaccctggcaggagattgatgctgcagtgacctatgatcacgccattgcactccaacctgggtgacagagttagaccctgtcttaaaaagaaaaaagtagagttctttctattacatatgcatatcaaaatatttaaagatgaaattatatgatgtctgagatttgcttcaaaataacaagggaggaggagaagtgggtggaagcatacattaaacaagattggccatgaatcaataaatgttgaatctggtgatgagtatgtgaaaacttatcacactagtgtcttgtttaaagtgctccatagcagaaagtttttctaaaaatcaacttcatgcatttgtagttagtagtaaataagaccatgtatatagagtgctttatcactatggctgacagatagcactcaaacattgtttttagctttttatagtccctttcaattaatcacaccccaaggaggtatattatttagatgaagggccctgtcccatgtacctttgtcttcctcatagtaatgtattgaaattccaagtttagaaggaggaaatgccagtcttcggagtcccaaacctatcatgcagcagcagagccgacgatcccaaatgcttccctaacactcctggtaaataggaccactttcttctcacctcgtaggaatacttgggatcattccttcttttattcattatttttcattcacttactatgtgccagatattcgatgctgggatacaaatattaatacactagactctaaattaactgaaagcatccaaaggtgaatattcctgagggtcaaacaaattcaagaaacagtgctaacgatcaatggcctcaatcatcactaagtccctcctaacagccagctttactgagcatataaaaatgagtggagatatggaacttgttcgcacaaagtttaaaacccggtagggtacatgagacaagaacccaaataaacaacaacaggaagctgaatgtgattaaatggtcccaaaatgatttggttaccaaggtggagaaagtatgtttgacaggtgttaagtagtcaggtttggctgaagcatttaacaggtatttggtgagaggtggaaactaaggctgggaaggtgcagtaggtccacatgtggagaaggtcaggttaaggcatgtgaatgtcatcaggtagcaacagagagctgcttaacgttgcagagcaaggaataacattcttaggactgactgtggaaggggtctctagcagcaagtggcagagcccatagaccactcatggaagaccaatccaagcctggcaccacaccgtcaagttcatagcatataaccatatacatgttaacaagtttagtgactaatagatttacaagacctgagatggaattgagtctttggagatccagcttcagaggttagcctaacctattccgcacatatagactgggcctgaactatttccaagaaagctgcctgctattttagagtggggctcagcaaaccttttccataaagaaccagagagtaaatgttttaggttttgcagaccatataytcttttgcaactactcaacttgctgaagcaacaatagacaatacataaatggagcatggctgtattctaataaaacaggacttggctgtagttcgctaaccccaagtgtagagttggtagtctattcccagaaccaaagtgacccatccagatacaagtcagctccaacttctgccagagacccaagcctcatctgtcaaagagtaagaaggctcctttagatgtatgccctgaggat

SEQ ID NO: 5171 - DNA, 825 bp, Homo sapiens
tatcgaaaacaaacatagtttgttttccagtcattctttcaagtaaaaagggtattcgctgaagaaagcaggtagtttgcaacccaagccatcaaacaagtgcttttgtttgcaacaaccatcttgctttagtatgcagcataagtggtttatgtgcacatctcacttcactacataaaattctaagaaggaatttactcaaaaagtgaagtttcaataaaatcaatacttattactgcttcatcaagagttcaagtacctgactctgaagaaatacaatgagtgccagtgccttgatttgggcaaaaggcagttttacccaccattgcttctgcacaaccactgcaaatgttaacacggtgaaaaaataacatcttaatattacaataaaaatagttttgaccctatggacccattgaaaggatcttggagacctccaggattccgatggactacactttgagaaccgatgctctattttgagaaagaaaaaaactcattcactaactgaaattcacacagaggaccgaatattgccaatrccagtttccaatccacactagacaaactccaaggacatcagcagctagggactccacccactgccattcataaattaaaaggaattttcttcctcggcatgtgattcatctggaaaaagcttttagtgcaaagttctgaaagaagccaagaagcattttattataacaatctattttaatgttgagctcagttccaacaccaaagcagttttcaataaaggtttagaaaatgcatcaagataatttctcatttaccacatatgctggagtctggcttagaagg

SEQ ID NO: 5172 - DNA, 825 bp, Homo sapiens
tatcgaaaacaaacatagtttgttttccagtcattctttcaagtaaaaagggtattcgctgaagaaagcaggtagtttgcaacccaagccatcaaacaagtgcttttgtttgcaacaaccatcttgctttagtatgcagcataagtggtttatgtgcacatctcacttcactacataaaattctaagaaggaatttactcaaaaagtgaagtttcaataaaatcaatacttattactgcttcatcaagagttcaagtacctgactctgaagaaatacaatgagtgccagtgccttgatttgggcaaaaggcagttttacccaccattgcttctgcacaaccactgcaaatgttaacacggtgaaaaaataacatcttaatattacaataaaaatagttttgaccctatggacccattgaaaggatcttggagacctccaggattccgatggactacactttgagaaccgatgctctattttgagaaagaaaaaaactcattcactaactgaaattcacacagaggaccgaatattgccaatgccagtttccaatmcacactagacaaactccaaggacatcagcagctagggactccacccactgccattcataaattaaaaggaattttcttcctcggcatgtgattcatctggaaaaagcttttagtgcaaagttctgaaagaagccaagaagcattttattataacaatctattttaatgttgagctcagttccaacaccaaagcagttttcaataaaggtttagaaaatgcatcaagataatttctcatttaccacatatgctggagtctggcttagaagg

SEQ ID NO: 5173 - DNA, 661 bp, Homo sapiens
ccttaacatgaaccaacaacwtgttgctacaaagaggtcttgttatcaaaatgagattttatcttgattgccttaatagatagataccaatcaaacatgcaaaactatttgtattagataataataatttgctaagacagtttttcagtgctagaaaacagaagtctttttaggtagcctaatattcttccccccatccccccgccccccgtaatcttatttacactattaatttgctaaacaatccattttcttattgttagtgtaatgatgaacctcagctgatctgaggccttaaataaatccctaaggtgcagagcccaaaattaataagcttactatttagtacggatggacggcagaaaaatggattttttttccttttgtttaatccacctgttgccaccctgtacctcctgctgtcagctcaccatgcactgaaaaataaatttgcaccacgtacattgtatattatggatttttaatgtttagggaactaatgcacatatacttctattattcctagaacgtttctcattttgcgttaagaaatatagaaagatgcaattaaaaaattagaaaattatccaattaggtccctcttgtgtatggaataactaagattaagcaagctcttctaaacatgcagagctttctgata

SEQ ID NO: 5174 - DNA, 661 bp, Homo sapiens
ccttaacatgaaccaacaacatgttgctacaaagaggtcttgttatcaaaatgagattttatcttgattgccttaatagatagataccaatcaaacatgcaaaactatttgtattagataataataatttgctaagacagtttttcagtgctagaaaacagaagtctttttaggtagcctaatattcttccccccatccccccgccccccgtaatcttatttacactattaatttgctaaacaatccattttcttattgttagtgtaatgatgaacctcagctgatctgaggccytaaataaatccctaaggtgcagagcccaaaattaataagcttactatttagtacggatggacggcagaaaaatggattttttttccttttgtttaatccacctgttgccaccctgtacctcctgctgtcagctcaccatgcactgaaaaataaatttgcaccacgtacattgtatattatggatttttaatgtttagggaactaatgcacatatacttctattattcctagaacgtttctcattttgcgttaagaaatatagaaagatgcaattaaaaaattagaaaattatccaattaggtccctcttgtgtatggaataactaagattaagcaagctcttctaaacatgcagagctttctgata

SEQ ID NO: 5175 - DNA, 661 bp, Homo sapiens
ccttaacatgaaccaacaacatgttgctacaaagaggtcttgttatcaaaatgagattttatcttgattgccttaatagatagataccaatcaaacatgcaaaactatttgtattagataataataatttgctaagacagtttttcagtgctagaaaacagaagtctttttaggtagcctaatattcttccccccatccccccgccccccgtaatcttatttacactattaatttgctaaacaatccattttcttattgttagtgtaatgatgaacctcagctgatctgaggccttaaataaatccctaaggtgcagagcccaaaattaataagcttactatttagtacggatggacggcagaaaaatggattttttttccttttgtttaatccacctgttgccaccctgtacctcctgctgtcagctcaccatgcactgaaaaataaatttgcaccasgtacattgtatattatggatttttaatgtttagggaactaatgcacatatacttctattattcctagaacgtttctcattttgcgttaagaaatatagaaagatgcaattaaaaaattagaaaattatccaattaggtccctcttgtgtatggaataactaagattaagcaagctcttctaaacatgcagagctttctgata

SEQ ID NO: 5176 - DNA, 773 bp, Homo sapiens
ccaaagtcttaatgcacagaaatattaatcttcaaatgtgtaagattccccagttctgtgactttgactttctgcatgaaaggaaaaataagaattaaagatgggaggcatccaatatagcttctttttcaatgtgcctataaacatatgtttaccatctgtggaattatgggaagcagctgaggtaaaaacgacagctgtggaatttttaaaaagttgtaatcaatttcacttcccagtgacacctcagctgttagaggagacagtgatgtccaggtaagggaaaggtttcagacccaagttcaccagacagacacagagacagagaaacaaagacaggagagccttggcctctgtgaaaggctttggaatgaagtctccctgaggcctcaactatttagaaactgtcagaacactcaacccctgaagcatccttataacttattttggttcacctcggctcatttttttatttttcaccctctgaaattgtaacagcataatcagctcagaatgcatcaaagggaaattgagtgggtartcaaccatcctgataatgaaaatctatgacaatcagaagattcagataagcctatcactactggccagcttttctcaaatggatgctgttttgaagtgaaaaaattcccagcttgtgttctgtgtctcagacaggaattacctaatgctagaggcttatgtaccaggcaccaagcaagtgattccatcctctgctatttaatcagcagcacttttttttgcactatccacaa

SEQ ID NO: 5177 - DNA, 841 bp, Homo sapiens
tcatttctcagcctccttacccccacccaaatcaatgggttggctttattatgtgctgctgctctccttctcctttcctgcattgcctctttctcttaaaattggctctggtgcaccccaatagctacaaacccttagatacccagagagcacgtcctcctccccagtagagccggaagcatctgtcccaaactgagcttcactgtgaaagagacattatttccactcatgaragctacaaggtatgtgaaatagtgaatttcatgtaaatatatgcacactcaagtgtataaaaaagaaattattctacaaagactgaagaggaacactcactgtcaaaagacatttttaattcttgagcatttgcagggaaaattgactttaagcttggctaaatcatgtagaaactgtgttttcttataaacatgggaaagaaacattcaagaagttttatcaaagaatgggaaatctagcctattgcccaggcctaggctcaccactgtccccaccacctcaagcagcacccccttccctccgttctgagctcactaagccttgttgaggagtggaagatggcagctgtgtgtgtccattggccactgcagctgcctcagtgtccacacctcacctcccacccgtagactccctccacctcttctaataagctccttgccctctggttttgattcggagctccagctactggctctgcctggacagagacctagggaagccatcagcctgagaggcaagaggcaaggcttcatctgaggttcaaccaaagaaaaagcgatttgctccccacttgtccagggggacttggtggtcccaagggtgaaat

SEQ ID NO: 5178 - DNA, 617 bp, Homo sapiens
acctctccaactccacttcccacctccctgtcccttgcttaccaccctcaccgtgttccatcacactgggcttgtgatagattatgaagtaagatacttctctacactagcccaccagcccttaagaaccagcctggactcacaattaacattgttatctctgtgtgatattgtgaacactatttcaaagcccactgctacttccttgaaygacaatacacttccatagcatttactgtacgccaggcactgttcagagtgctttatgtgctaactcatttaagcttcatgacagccttctgaaatagggctatcatcatgcccattttaaagatgaggaacaaagaggttaagtgacttggccagtgtcacacagcttggacttgggtttacgctcttggtctcagaggcagagctcttccccaccatattatgctggctgtggaaatgctgtgaagcactttatggggcctgtaatctcaggctatgaaatagtcattagcctttagccatcacaccaagatgcctctgggctcctctccaagtttttcatggtctggtgggctgtatcatgcactgaaaaggggatcattaactatgtaaaggatgcagggatc

SEQ ID NO: 5179 - DNA, 521 bp, Homo sapiens
  misc_feature (1)...(521): n = A,T,C or G
annnnnnnnnnnnnnnnnnnnnnnnnnnnnnnnnnnnnnnnnnnnnnnnnnnnnnnnnnnnnnnnnnnnnnnnnnnnnnnnnnnnnnnnnnnnnnnnnnnngagcacctggactttaggaggggcacttagtttcctgaatgaactacttgaaccatggataagggttgggtgaaggagaaaccctctggaaaaaaagatgcccakgtccaaatagttgaccatctgtagccttttctccaaatctgtagcatactccattgtagacagtcctatccaactgcttaactctagtgacctggccagggcaatgtagtcaaggggagagacaggccattatgtccctcattcctgattctgaagtgcagctgctcaaatgctgtttacttgtgaatgcattggcttctttccagccaatgtggagaaatctctgactcacagtaagaactttgcaaaatgacctcagtatagtgaatgagaaaaggcaattgaagtgtgggtgtttctgggtgcaacaaggat

SEQ ID NO: 5180 - DNA, 618 bp, Homo sapiens
gaccttaaataattaatagttttacgttgttggtggtgatgatggtggtggttcttttcgtccctccctaccttcctttattacttttttggaggtcaggtaggttggggaatatcatcacctcttgggacagaccaaggtagatggcagaggtgaaaagaggccaggtccagagaagacattaagagttttattactttcttgcccactatgtttagaacttttgaatcctccgtcctccaaatattggcattagagagtggatttttccagtgtttgaaagactttgttgaacttactcttttggggttctgggaattacatgggtaaattataaagaaaacattaaaaattttaaaaaaatttaagggagaaaaaagaactttttagaatcacaaaattctgtaaatcaatgttcttgctattgacaggaatagtatattaattacttacagtatgttagggtgctccttctctctgcctataagatgtggccagttgaagtttctatcatgtgaagatttacagagagctatctggtgagtatgtragacagttatttgacctatatatggtaatcataacatgtttctctttagcttggttctacagccattg

SEQ ID NO: 5181 - DNA, 825 bp, Homo sapiens
tccttctgggccctacttacttctttatcatgactactgtgacttccccaatggcctatcttccaggacacccttccttgatcatgctgttggtgtctctgcttgcagcagtccactggcattgatgagctgcttcttcccagatgctcatggtcaaatcctaccatttgtcaacgctcagctctcataccacctcctcaacaaggccttctttgacccacttcctttcagctctacatgaaatrttctcttccttttctaaatccccatggcacctggcaccttctgttttgcaacaaattttccattatcacttttcattacctgcgcatagctggtattcaatgagtatttggggaatatatggatgctgcttgtatttcaaggttttcctggtaagtatttaggagagagggtatggagaacaaaagatgctgaagatatcacccctcaaataacaggaggaaattcggataagagttttaggtattcaatcagaaatttctggatttttgtgagtacccttctcactcataaaggacccacttcccaaacatgtgggctctggagttgggatgccagtttcacatcccagctctgccacttcccacgggcatatcagtcatgtcctctctgttgcgaggttaaatgtaaattgcttaggatagtgcctagtataaagttagtgctcaataaatgttagctgctatcatgattactatattattatcgaatagaatatgcttccaaggaatttggggcttaatgatggaagcaaacctataaatagtaattaaaatttagtaagtgctgtaataggggaac

SEQ ID NO: 5182 - DNA, 664 bp, Homo sapiens
ttcagtttgtgaggtgggagcctgttggcaggacccttttttttttttttcctgagagatttcttttaataaattctgctctcctcacctttcaatgtgtccacatgcctaatttttcctggtcatgacacaagaacccaggttttagctgaactaacgagttaaaaaaaaaaatccatcatcatygcttgaagttcttaagtggtaaatgaaatgataaaataaaaacttaatcatttgcaaaataatagaaaacaaatgtaaagctttttggttttactggaataacaaaaaatcctggtacaaatataatgaaaagtaggaaatcgttcatttttcatctaataaattctgaatcttgcttcaggttttctcaatttttgttctagatcaagtatcttttgggtccaggaagaaataaattttttctactccattctcctcagaataaaacacagtcttcttttaaagacagtgaaaaaagcagcaacagtcagcctttcagaaactgagggtgccacttttcccaagagacgtagagtattttagaggggactctgggtctcatctgctgtgatcccactttccaggtctgtatacagatgaggcaaagggcacagcactgtgttgcagaactaatagagtccaccggatcattttgcaa

SEQ ID NO: 5183 - DNA, 2524 bp, Homo sapiens
tcacttctgaaacttaagtttgacagttaccaaaaaaattcatccactgtagagtttgtttttaccatcttgttccaatgacctacttttagaaaagcaygcttattttaaaacttgcttcaaaataaccccattttcttaacacatctcattcgtttttcaaatttgccactttccattttaaccatatattttttaaaactttcgacagtagtcataaaaatgtgcatattttgatttgatcaaatgttcatcttttgtgattaaaacaaaataaccccattcccagaaaggaaatactgactttcaggactatttccaaagctgcctaaaactactctgagggaaaaaaaaatgcaaatcagtaatgaagtattggagcccacagttaaattaatttataggggctttaatgcaattaaatttcatccagactgtatctctaatggtggctgtgttttttttttacttaatagactttaaagcataattcactttcatttttgcaaaattatttaaatattacaaacatcacttttatacatatttccatggtgacacaatatatttgaagtctatttaatttacagatgatggggccaaaatgaaaattctttgaggaccatagatcttctataacatcacattttccagttccaagatattaagtatataagttatcagtatttgaaagaatggagtcttgagaaagcaataaatattttaaatgatctgattgtgaaacttaaagaaaattaaaatccagagcaaggaaaagcatcagtaatacaaagagctaagatgtttagggttcataatttaagttaataaattattaggctctgaaattaaatttaacagatctttttcacagccaaattaaggaaatatttagagatgaacataagttatattccagccccaaatttcaactcaaattattcatatacataaaggataatgcatgaggtagctaagaatctcaaaatacattaacgtgactttgcagtcacaactaatgagcaaagctgtcaggataatttttcatgctctcaaacctagacatagaagatctatgctggaaagcatttaataataaatagctaactagtttaaaccctgaaagagacatgcagaactggtccaaagcgttcttagctgagaatatcagctaaattcagatgtcatttttgctacaaatgtgctgcacactggtgaaatatttgacaaaggagaagtagatgtaactatggaaatcataactttaattgacaacaacatgaaaattcagaaggataacaagcatcatggatggagaagacaattatgcaggagtaaaaaatcaaatatgagctgcagaatttaaaaaaaagagtctatttttcctctctggatatttcccactactttagaaagaagaagaagaaggatggaaagaatattcttcctgttaatgaaaataggacaaaggaacagccaggacattcctacctggtttccagatgaactgattatcctttttgccttccaaatgagctgcatgggacagcaagagagaaagcaatagaaagagcttcctcatgctcctccatacccagcaagtgactgttaggttgctctttggaaacatgcttcagatttttcagcctcttgacttgcctattcctaaaagagaaaaagaaaaatcaggtaagtttcttctgtaaagaaaagataacaactcattttgactgctagaacctttattatgatggtattgcaagtttttcattagcatgaagatagtacatataatatcaaccctgtgggaaaagctacaaaaagcaaatccacattctgtttttaccatgttttgtattattttttgtagtgaagtgtattcatgaatgaaatctaccactggatgataaaactacttatttccccaattgctttttattttatacttttggtaaaaaaagatcaatgtaacgtgataatattatcatggattctcacaggatccaaagtagttacttgattcccatagtagctctaaaaagaaaagaaacaaaagcctgaggtggttaactcatgtttatacttttggtaagaaaataagctttaatggtacacattattaaaagaaagtagtaaatatatgttatgttaaatgttaaatgtataccttttatttctctgaaataaaatcaggtaagtttcttctgtacaaaaaatcaagtaagtttcttctgtacagaaatgataaaaactgactttgactgctagaacgtttattatgatggtattgcaaattttctattgccatgaagatagtctttataatattaacatttgaaggtcagcagttaattagccaagttttcaatcctcacccactgaaggcctcatcaattctatggactccacagtctctgtgtcggtatattttattcttaaaagcagagttggcagataccttgtatattccctcccttctactcagacaaagtccatgaggagctcatgatttggagaaagagat

SEQ ID NO: 5184 - DNA, 2524 bp, Homo sapiens
tcacttctgaaacttaagtttgacagttaccaaaaaaattcatccactgtagagtttgtttttaccatcttgttccaatgacctacttttagaaaagcacgcttattttaaaacttgcttcaaaataaccccattttcttaacacatctcattcgtttttcaaatttgccactttccattttaaccatatattttttaaaactttcgacagtagtcataaaaatgtgcatattttgatttgatcaaatgttcrtcttttgtgattaaaacaaaataaccccattcccagaaaggaaatactgactttcaggactatttccaaagctgcctaaaactactctgagggaaaaaaaaatgcaaatcagtaatgaagtattggagcccacagttaaattaatttataggggctttaatgcaattaaatttcatccagactgtatctctaatggtggctgtgttttttttttacttaatagactttaaagcataattcactttcatttttgcaaaattatttaaatattacaaacatcacttttatacatatttccatggtgacacaatatatttgaagtctatttaatttacagatgatggggccaaaatgaaaattctttgaggaccatagatcttctataacatcacattttccagttccaagatattaagtatataagttatcagtatttgaaagaatggagtcttgagaaagcaataaatattttaaatgatctgattgtgaaacttaaagaaaattaaaatccagagcaaggaaaagcatcagtaatacaaagagctaagatgtttagggttcataatttaagttaataaattattaggctctgaaattaaatttaacagatctttttcacagccaaattaaggaaatatttagagatgaacataagttatattccagccccaaatttcaactcaaattattcatatacataaaggataatgcatgaggtagctaagaatctcaaaatacattaacgtgactttgcagtcacaactaatgagcaaagctgtcaggataatttttcatgctctcaaacctagacatagaagatctatgctggaaagcatttaataataaatagctaactagtttaaaccctgaaagagacatgcagaactggtccaaagcgttcttagctgagaatatcagctaaattcagatgtcatttttgctacaaatgtgctgcacactggtgaaatatttgacaaaggagaagtagatgtaactatggaaatcataactttaattgacaacaacatgaaaattcagaaggataacaagcatcatggatggagaagacaattatgcaggagtaaaaaatcaaatatgagctgcagaatttaaaaaaaagagtctatttttcctctctggatatttcccactactttagaaagaagaagaagaaggatggaaagaatattcttcctgttaatgaaaataggacaaaggaacagccaggacattcctacctggtttccagatgaactgattatcctttttgccttccaaatgagctgcatgggacagcaagagagaaagcaatagaaagagcttcctcatgctcctccatacccagcaagtgactgttaggttgctctttggaaacatgcttcagatttttcagcctcttgacttgcctattcctaaaagagaaaaagaaaaatcaggtaagtttcttctgtaaagaaaagataacaactcattttgactgctagaacctttattatgatggtattgcaagtttttcattagcatgaagatagtacatataatatcaaccctgtgggaaaagctacaaaaagcaaatccacattctgtttttaccatgttttgtattattttttgtagtgaagtgtattcatgaatgaaatctaccactggatgataaaactacttatttccccaattgctttttattttatacttttggtaaaaaaagatcaatgtaacgtgataatattatcatggattctcacaggatccaaagtagttacttgattcccatagtagctctaaaaagaaaagaaacaaaagcctgaggtggttaactcatgtttatacttttggtaagaaaataagctttaatggtacacattattaaaagaaagtagtaaatatatgttatgttaaatgttaaatgtataccttttatttctctgaaataaaatcaggtaagtttcttctgtacaaaaaatcaagtaagtttcttctgtacagaaatgataaaaactgactttgactgctagaacgtttattatgatggtattgcaaattttctattgccatgaagatagtctttataatattaacatttgaaggtcagcagttaattagccaagttttcaatcctcacccactgaaggcctcatcaattctatggactccacagtctctgtgtcggtatattttattcttaaaagcagagttggcagataccttgtatattccctcccttctactcagacaaagtccatgaggagctcatgatttggagaaagagat

SEQ ID NO: 5185 - DNA, 2524 bp, Homo sapiens
tcacttctgaaacttaagtttgacagttaccaaaaaaattcatccactgtagagtttgtttttaccatcttgttccaatgacctacttttagaaaagcacgcttattttaaaacttgcttcaaaataaccccattttcttaacacatctcattcgtttttcaaatttgccactttccattttaaccatatattttttaaaactttcgacagtagtcataaaaatgtgcatattttgatttgatcaaatgttcatcttttgtgattaaaacaaaataaccccattcccagaaaggaaatactgactttcaggactatttccaaagctgcctaaaactactctgagggaaaaaaaaatgcaaatcagtaatgaagtattggagcccacagttaaattaatttataggggctttaatgcaattaaatttcatccagactgtatctctaatggtggctgtgttttttttttacttaatagactttaaagcataattcactttcatttttgcaaaattatttaaatattacaaacatcacttttatacatatttccatggtgacacaatatatttgaagtctatttaatttacagatgatggggccaaaatgaaaattctttgaggaccatagatcttctataacatcacattttccagttccaagatattaagtatataagttatcagtatttgaaagaatggagtcttgagaaagcaataaatattttaaatgatctgattgtgaaacttaaagaaaattaaaatccagagcaaggaaaagcatcagtaatacaaagagctaagatgtttagggttcataatttaagttaataaattattaggctctgaaattaaatttaacagatctttttcacagccaaattaaggaaatatttagagatgaacataagttatattccagccccaaatttcaactcaaattattcatatacataaaggataatgcatgaggtagctaagaatctcaaaatacattaacgtgactttgcagtcacaactaatgagcaaagctgtcaggataatttttcatgctctcaaacctagacatagaagatctatgctggaaagcatttaataataaatagctaactagtttaaaccctgaaagagacatgcagaactggtccaaagcgttcttagctgagaatatcagctaaattcagatgtcatttttgctacaaatgtgctgcacactggtgaaatatttgacaaaggagaagtagatgtaactatggaaatcataactttaattgacaacaacatgaaaattcagaaggataacaagcatcatggatggagaagacaattatgcaggagtaaaaaatcaaatatgagctgcagaatttaaaaaaaagagtctatttttcctctctggatatttcccactactttagaaagaagaagaagaaggatggaaagaatattcttcctgttaatgaaaataggacaaaggaacagccaggacattcctacctggtttccagatgaactgattatcctttttgccttccaaatgagctgcatgggacagcaagagagaaagcaatagaaagagcttcctcatgctcctccatacccagcaagtgactgttaggttgctctttggaaacatgcttcagatttttcagcctcttgacttgcctattcctaaaagagaaaaagaaaaatcaggtaagtttcttctgtaaagaaaagataacaactcattttgactgctagaacctttattatgatggtattgcaartttttcattagcatgaagatagtacatataatatcaaccctgtgggaaaagctacaaaaagcaaatccacattctgtttttaccatgttttgtattattttttgtagtgaagtgtattcatgaatgaaatctaccactggatgataaaactacttatttccccaattgctttttattttatacttttggtaaaaaaagatcaatgtaacgtgataatattatcatggattctcacaggatccaaagtagttacttgattcccatagtagctctaaaaagaaaagaaacaaaagcctgaggtggttaactcatgtttatacttttggtaagaaaataagctttaatggtacacattattaaaagaaagtagtaaatatatgttatgttaaatgttaaatgtataccttttatttctctgaaataaaatcaggtaagtttcttctgtacaaaaaatcaagtaagtttcttctgtacagaaatgataaaaactgactttgactgctagaacgtttattatgatggtattgcaaattttctattgccatgaagatagtctttataatattaacatttgaaggtcagcagttaattagccaagttttcaatcctcacccactgaaggcctcatcaattctatggactccacagtctctgtgtcggtatattttattcttaaaagcagagttggcagataccttgtatattccctcccttctactcagacaaagtccatgaggagctcatgatttggagaaagagat

SEQ ID NO: 5186 - DNA, 2524 bp, Homo sapiens
tcacttctgaaacttaagtttgacagttaccaaaaaaattcatccactgtagagtttgtttttaccatcttgttccaatgacctacttttagaaaagcacgcttattttaaaacttgcttcaaaataaccccattttcttaacacatctcattcgtttttcaaatttgccactttccattttaaccatatattttttaaaactttcgacagtagtcataaaaatgtgcatattttgatttgatcaaatgttcatcttttgtgattaaaacaaaataaccccattcccagaaaggaaatactgactttcaggactatttccaaagctgcctaaaactactctgagggaaaaaaaaatgcaaatcagtaatgaagtattggagcccacagttaaattaatttataggggctttaatgcaattaaatttcatccagactgtatctctaatggtggctgtgttttttttttacttaatagactttaaagcataattcactttcatttttgcaaaattatttaaatattacaaacatcacttttatacatatttccatggtgacacaatatatttgaagtctatttaatttacagatgatggggccaaaatgaaaattctttgaggaccatagatcttctataacatcacattttccagttccaagatattaagtatataagttatcagtatttgaaagaatggagtcttgagaaagcaataaatattttaaatgatctgattgtgaaacttaaagaaaattaaaatccagagcaaggaaaagcatcagtaatacaaagagctaagatgtttagggttcataatttaagttaataaattattaggctctgaaattaaatttaacagatctttttcacagccaaattaaggaaatatttagagatgaacataagttatattccagccccaaatttcaactcaaattattcatatacataaaggataatgcatgaggtagctaagaatctcaaaatacattaacgtgactttgcagtcacaactaatgagcaaagctgtcaggataatttttcatgctctcaaacctagacatagaagatctatgctggaaagcatttaataataaatagctaactagtttaaaccctgaaagagacatgcagaactggtccaaagcgttcttagctgagaatatcagctaaattcagatgtcatttttgctacaaatgtgctgcacactggtgaaatatttgacaaaggagaagtagatgtaactatggaaatcataactttaattgacaacaacatgaaaattcagaaggataacaagcatcatggatggagaagacaattatgcaggagtaaaaaatcaaatatgagctgcagaatttaaaaaaaagagtctatttttcctctctggatatttcccactactttagaaagaagaagaagaaggatggaaagaatattcttcctgttaatgaaaataggacaaaggaacagccaggacattcctacctggtttccagatgaactgattatcctttttgccttccaaatgagctgcatgggacagcaagagagaaagcaatagaaagagcttcctcatgctcctccatacccagcaagtgactgttaggttgctctttggaaacatgcttcagatttttcagcctcttgacttgcctattcctaaaagagaaaaagaaaaatcaggtaagtttcttctgtaaagaaaagataacaactcattttgactgctagaacctttattatgatggtattgcaagtttttcattagcatgaagatagtacatataatatcaaccctgtgggaaaagctacaaaaagcaaatccacattctgtttttaccatgttttgtattattttttgtagtgaagtgtattmatgaatgaaatctaccactggatgataaaactacttatttccccaattgctttttattttatacttttggtaaaaaaagatcaatgtaacgtgataatattatcatggattctcacaggatccaaagtagttacttgattcccatagtagctctaaaaagaaaagaaacaaaagcctgaggtggttaactcatgtttatacttttggtaagaaaataagctttaatggtacacattattaaaagaaagtagtaaatatatgttatgttaaatgttaaatgtataccttttatttctctgaaataaaatcaggtaagtttcttctgtacaaaaaatcaagtaagtttcttctgtacagaaatgataaaaactgactttgactgctagaacgtttattatgatggtattgcaaattttctattgccatgaagatagtctttataatattaacatttgaaggtcagcagttaattagccaagttttcaatcctcacccactgaaggcctcatcaattctatggactccacagtctctgtgtcggtatattttattcttaaaagcagagttggcagataccttgtatattccctcccttctactcagacaaagtccatgaggagctcatgatttggagaaagagat

SEQ ID NO: 5187 - DNA, 784 bp, Homo sapiens
ctaaggcccatgtttaacatccccaagtcctggagttttctagacatccctgttggtgatgttcttccctaaatgtagtgtgacgcagaagaaggaacactgcgctccgagcgtggtctcctggtttcaagggcaagctctgcccgtgacagtgtacttgaaatcttggctgggcacaggtgctgacatactcccaggaactgtaggagaaacagaagatgaagtttcccttttcttaagtggtacagcttatagtaaaggagatggcactaacatgctgtgcagtgggaaacaacacagaaatgaygtaaaaccagcaaggtgacgtgagcgtcacctggcctataggtgttggggaagtccagaggatcagagcaggaggatgctagaagagacatcttcagagccaggacctggactctagggaaaattttcacatgaaaatgataatgatgaaaaaaccataattgtaatgataataacataactaatactttgagtgcctattggatggtaggatattgtactaggtgctttattttgattgttttttatatactcatgtgaatccacaaggtagaagttgctagctacattctatggaatctcagattaggattctgaccaatgtcacacagccagtaatagaacaggggacatgtcccaaatctgcctgttcctgacactgccaggtactctttcctttattcgactatgtctcacatcggcaatggaatctgtgagagctgattttgtgtgttaacctgactgggctaggaatggc

SEQ ID NO: 5188 - DNA, 807 bp, Homo sapiens
ttctctggagaatccttactaacacagaatcttactccagactctttcattgcataaagtaaaggcagatcaatccttcaatggggccagtagtatgaatttcaagttattcagccattgcttcctcagttcatttataaaaagacaaggccacaaagcattctgcagtagaattcatagccaaaaaattaattagagacaaagactctggaatttctttgagtgtcttatttctatctcctttactaggctcaaaataacctattaaaccatgtgataaaaataaatcgacaggccaagcacggtggctcacacctgtaataccagcactttaggaggctgatgtgggtggatcacctgaggtcaggagtttgagaccaccctggccaacatggtgaaaccccatctctaaaaaaatacaaaattagctgggcatggtggtgcatgcctgtaatcccagctacttgggaggctgaggcaagagaatcgcttgaactcagaaggcggaggttgcagtgaaccgagatcgcaccactgcactccagcctgggtgacaaagcgagactccatctcaaaaaaacaaaataaaatwaaaaaataaattgacagaaatggttattatttcaatttcactgtgaaatattttattattcttattgactcatttgttgaagaatctaagattaccaagtgacacactcattaattcaatttattttttgtaaatgaaagcactgctctggctggaccacaaaccgcatgtgctcagtggttggctgccttcatttcagctgcataagattggtt

SEQ ID NO: 5189 - DNA, 633 bp, Homo sapiens
tggcagcccacttacaccaacctattttacttctaagtggtgcacattaatcactccagaaatgcaaaggtgacaatgagtcaaagtttaagactgatggcgcaaaagttgccactaagtattaagagagtgctctatgcctaacacagtgcttggggcttcatatacattaattttcacctttaaaaagtcctctgcagccattattgtttcctgactttattttacagataagtaaactgaggggcaaaggtgtcaagtgacttttgttttgttttgtttttttgagtcagagtcttgctctgtcttctaggctgaagtgcagtgacctcagctcactgcaacctccacctcctgggttcaagtgattctcttgcctcagccacctgagtacctgggatttctggtgcccaccaccatgcccagttaattttttgtatgtttcrtagagatgggggttttaccatgttggccaggctggtctcgaacgcctgatctcaagtgatccgcccacctcggcctcccaaagtgctgggattataggcatgagccatcgcactggaccttaagtaacttttaataaccagcgtttgtcagatccaactgttagctgtccttcttttagtaacctct

SEQ ID NO: 5190 - DNA, 633 bp, Homo sapiens
tggcagcccacttacaccaacctattttacttctaagtggtgcacattaatcactccagaaatgcaaaggtgacaatgagtcaaagtttaagactgatggcgcaaaagttgccactaagtattaagagagtgctctatgcctaacacagtgcttggggcttcatatacattaattttcacctttaaaaagtcctctgcagccattattgtttcctgactttattttacagataagtaaactgaggggcaaaggtgtcaagtgacttttgttttgttttgtttttttgagtcagagtcttgctctgtcttctaggctgaagtgcagtgacctcagctcactgcaacctccacctcctgggttcaagtgattctcttgcctcagccacctgagtacctgggatttctggtgcccaccaccatgcccagttaattttttgtatgtttcgtagagatgggggttttaccatgttggccaggctggtctcgaacgcctgatctcaagtgatccgcccacctcggcctcccaaagtgctgggattataggcatgagccatcgcactggrccttaagtaacttttaataaccagcgtttgtcagatccaactgttagctgtccttcttttagtaacctct

SEQ ID NO: 5191 - DNA, 749 bp, Homo sapiens
caatctcaacttcagtcttggtctctggcacactgttctcaatcataacccatagaaacaattcttttagtttaaagttgggtagttataaacttgcttttgagggggcagagagagggaaggaagttggaaacattgattacaaggcagaattaaatactaacactaatttctcatttcaatttaagcaaaaagggggcctttctgagagttcttatgcttttgaaacattaaagattgggaaggtgcaccctatggataatagtgacgagcttcatacatctgaggccatcctcttgactctccttgctcaggaaaatttcctatttgggagaatgaagagcacaaaccagatagtatattcaactatggaaaaataatgacaaatttcattcagcaactacatggaagagaaagtttgatttccaaattgtagtcattttattgcagtacctgatcataagagagtaaaaccttcaattgaagttacaaagaatagggcaatgatacatgtcagcctttcatgtcttccaataaagtctcagtcactccccacaattaattacccttcttagtgaagatctggatagttcattgsttagtactaatccctgtgaacaggctctctctttccattgatttatctagatttgcactagtatttactatttaggcatcattcactttgtagaacccctgcaattcatagatctctgattgcttcccatgcactatgctatgggttttgg

SEQ ID NO: 5192 - DNA, 749 bp, Homo sapiens
caatctcaacttcagtcttggtctctggcacactgttctcaatcataacccatagaaacaattcttttagtttaaagttgggtagttataaacttgcttttgagggggcagagagagggaaggaagttggaaacattgattacaaggcagaattaaatactaacactaatttctcatttcaatttaagcaaaaagggggcctttctgagagttcttatgcttttgaaacattaaagattgggaaggtgcaccctatggataatagtgacgagcttcatacatctgaggccatcctcttgactctccttgctcaggaaaatttcctatttgggagaatgaagagcacaaaccagatagtatattcaactatggaaaaataatgacaaatttcattcagcaactacatggaagagaaagtttgatttccaaattgtagtcattttattgcagtacctgatcataagagagtaaaaccttcaattgaagttacaaagaatagggcaatgatacatgtcagcctttcatgtcttccaataaagtctcagtcactccccacaattaattacccttcttagtgaagatctggatagttcattgcttartactaatccctgtgaacaggctctctctttccattgatttatctagatttgcactagtatttactatttaggcatcattcactttgtagaacccctgcaattcatagatctctgattgcttcccatgcactatgctatgggttttgg

SEQ ID NO: 5193 - DNA, 796 bp, Homo sapiens
caggaaagcagtcccaagtactaagagtttcttacaggggcgggcttatggtgccgtggggccaggactccagctccacttctctgcaatgactctcagctgcaccctctgagttttgggttgcagtacaatgacacggaagtcccaggagccaaatccagacaggatgaaggcccaggggaagaacaaaaacgtctttttctcattctctgaagcaagaaaaacattcccagaattcccccagagcattggccagaattgcattacatgacagatactaaaccagtcrctgacaaagggagggagataactctgattggcttgaatcgatcaaagtttcctcttagaactggggataaggagtagcttgggagcaggtgactttctgaaagtgatctgggttctgttagaaggaagaatgaacagaaagacattgtgctgcaggtgaacagctgagcacattatgcacagagatatttcattttttagataattagaatagggagaggacattctacacagggcaaaagtgaagctgcctcttttgaggagaaatggttaatttagctgaagcatgaaagcaagagggggaatcactgcagaagaagatattctggacaacaatacaattatgatatcagagaactcttaatttctcaaaaacacttcactgactctcacatcaactagaacagcaagtatcaacagagaaatctgaagtccagagcaggtgagtaaatcttccaaggtcacacagcctgtaaacaacaaggtctggtgactcttgcctgggatc

SEQ ID NO: 5194 - DNA, 535 bp, Homo sapiens
  misc_feature (1)...(535): n = A,T,C or G
atnnnnnnnnnnnnnnnnnnnnnnnnnnnnnnnnnnnnnnnnnnnnnnnnnnnnnnnnnnnnnnnnnnnnnnnnnnnnnnnnnnnnnnnnnnnnnnnnnnnnccttctctttcaccagctcaaacccctccaatgcctctagagccttcctccatgacaatcatgacaatcaaatcaatcctctgtttttatgtgtatttttttctccacatatacccctcccccaacaagatcataagctctgcaaagccataaccttttcctctccctccccttcccaccccatgtaggatatcccccgtactgctcagtaaatgtttctgtattaataaagttaagccatgtgtcttagagaccttaacagacagtagcaacctaaagccaaaacagcagtttccagccctctgaagatggcagtgaattctggtagagcttggtaagtccaaagtgaattccctctctcttccaggragcccaccaaggcttcacaatattgagtggggaccccagctgtccagtgtgacttgagcttatg

SEQ ID NO: 5195 - DNA, 782 bp, Homo sapiens
ctttccatctggagatccactggggacaggatgtgcctttcaacaaccctcttccagctcagcaaacagctgacctgctcgagactattcctgacctccgctgcatggcatctgtggtcatgtattggtgcctgtaccatgagaccctgaaaaatgaagccctgtcatacagagagccccgcaaagcccatcagcctgccctgctgcctgaggcagaagctcagggcacaggctttccagccttcattccacaactgtgagttgcaatacctgcccaaacagctctatgctaaataagcacaaggggtatgagtggagaaaggtgagtggagataaatcaccaggccctacttaccagcagaaaacaagccacccaagtcacaaggttggctgcaacaaatgtcttagaggcagaggcaaagataaaaggctctaggagttccaagaagggaacggagccttccggctggagagcagggagcrggcatttgacccaggtgacatttctgtgccccagacagccaaatccacgtggatttagttcctgactttccctggtgagatgcaggaacaggtgatggagcagctaggagctccctccctgaaggcctgggaggggagtcagagttgaaaagtgtgccgtcctccttaaacctactgcatcgtcaggctctgagactccccactccaccctcccccacacctgagagctcccaacatggtctgcctggatttccctgcagaaaggagtcttactcaagacccccttgtgactttggagc

SEQ ID NO: 5196 - DNA, 2150 bp, Homo sapiens
  misc_feature (1)...(2150): n = A,T,C or G
ttcctgctcttgaacatcggactccaagttcttcagctgtgggacttggactgtcttccttgctcctcagattgcaggtggcctattatgggaccttgtaatcttgtgagttaataccacttaataagctcccctttgtgtgagtatatctatatctatagatagatataggtatactcactatatatacacatatatacatatactctctctctctctctctcatatatatatatatataatctattagttctgtccctctagagaaccccgactaatacagattttcataccagaagtggttcttgaggaacagaatattaaggatggaattcnnnnnnnnnnnnnnnnnnnnnnnnnnnnnnnnnnnnnnnnnnnnnnnnnnnnnnnnnnnnnnnnnnnnnnnnnnnnnnnnnnnnnnnnnnnnnnnnnnnngtgatgaggtggactctagaggatccccacattcacatattttagtcaatactccctcaactattgtagtcatgaccaagttcagaatttccatgatgccatgtccttagaccgggatgcacaggccagtggggagccaagggtgcatatattcccaggagtctacgttctccattaggagttttcaatatttggcatcttcatttcaataatgatctttaaaactttgtatgaaattattctgatcattccgctgactgctgaatgacctggcaccgtctcagggttttagtctggagtttttgtttatgctcatggcctcagggagaacaatattcacctgaagtgacagcgcttctctttttatgttgttgagaagcatgattggctcttttttgcaaaattattcacaaacttaaactttgattcagaattattgaagtaacatggtgaggcagagtaatatgtgacttaaattttatggagtactaaggaaaacgggcagacttaatataacagtgatgcattggtgrtgcttaagggcaaatacctataacatggtgtacaaataaaggatccccgtgattcgaacaggtggaagtgatgggagaactgagttgtcacacagtaccatatccacactgtcacacaaatctcacctttatttattcccttttgcactaatgtagccagaaatgtgaaacgatgacagttttttcagtaggatttttttaaaattttttagcattgacctttgaggtgcactattaaattgctcagtccattcaaataatggattgctgatttaaaaactggttccttgcttagcttcagcaaaacagcaaagtctaccacattaaatatatattgtttatttgatttttattgattttgttgttttattttaactatttaattgcaaacctgtcttggggttaacactgtgtaagagttgtaagcataagaagtttgtacttagagtttagatgtagttttatatttgtacatgttgatgtaacattttaataaaaataattcaggtctgctgggcatggtggctcatgcctgtaatcccagcactttgagaggctgaggcaggcggatcacctgaggtcgagagttcaagaccagcctgacctacgtggagaaaccctgtctctactaaaaatataaaattagccaggcatggtggcacatgcctgtaatcccagctacttgggaggctgaggtagcagaatctcttgaacccggaggcggaggttgtggtgagccgagattgcacggttgcactctagcctgggcaacgagagcaaaactctgtctcagaaaaaaaaaaaattcaggttaattctggggttttgcttctttccgagaggtgaatacgttactcaattattaataacatccctgtgggaaggggctttacaacaaattattttacaggtgaagggcagaaatgaaaacattttctagaaccactcctgaccttcacactcaagaatgtcgcagtagtcatatctcttttctggatcagtagtatagcaccagggcccctgcggatcgttgtctggattcctgcagtagttctcctccagtccctctgaggggtgtgtagcaggtgagaatctggggaggatggaaaagaagcacttagactatattctaaaaatcagcttgctattagcaaggcagaaggagatgctctcgattcccat

SEQ ID NO: 5197 - DNA, 834 bp, Homo sapiens
ttcctcagtggggcccagtggccagggctgttggatgcactccatgcctggtggccctctgcgtttattcattccctctctgattgtaaatgcttaccaggatggaaagaggagccagcagcggcttaagcaatcctcttctccttctggtttcctggaagtgcctttacccagttttggacccttaggtctttcctgtatttctcctttgaaggaaaatggcagctgctgtgttttaagctagctatttggaatgggaggtgtacaaattcaatagagctgctttccaccgtggaatctgtggctcagcctcacttctgcattcttgaaagccctggtatggccctgtagtcatcatagaatgaagaggaagaccagaagcgactgtggaatgggaggtgttttccagcacaattaatgtgaaatagaatactcacgagaccttattctaggaaccatcatgactttctagagcaagaagcttattcttattttaaattcgtggtccccttagagaatctgatggaagttaygaatcctcattccagaaaaacacattgatgtaaatatacataaaacatcagggattcaaaaatccatgacgtctgctcataggtcaaaggttaggagacttgaatctcattggtacaaagggaaaagaaagacaaggagtaaagagaaaaggaaaatatttggaaaatacaccagcaacatgtgtgtgtgcatttctgaagacagatgttaatgtattcattactgacattagtgtttgaatgtgtgtgcacatcagctgaggatctggttattattcaaatcagattcagagggtgtgac

SEQ ID NO: 5198 - DNA, 1790 bp, Homo sapiens
aaaattaggcatcaataattgacactgtatagtgggagctgggttccagctgaaatgcaaacatggttgaaacatactattacacgtctacagaaataaaagtagacaaggacaggaaaagggcttatggaaaaaaatttaatcctggaattttaaaattttttgttgccagrgtaacttacacctaagaatagaataaagttgtctggctggcattttggagaatagaatcataaagctttgcaagtcaaatttataatatataagactgtagcagaaaaggagtttgctttaggatagaagcctcatggaaattagacgaaaactagcgaatctatcagtaaggtttatctcagcctcatctcaaataggaaacggctgggcttgatgttgtataagaacttgaatcctcctgttggttaaaggagaacttcctagactcctcgggtaatcaagacaattataaattttgatgagaagatggttactcaagccaagaagcatgagaaactcaaaatatttgaaatacgaagattatgctatataagaatttagcccactagttgagaggccttattttgaccatgaaaaaattttacagaacagtagtgttcaaagtgtcaaaaggacaagggaagaaaattaactaaaaaaaatcaattttgaattatttactaaattattatagatatgaataacattggaattgcaaaaaggttataacctgaaaaaaattcattgaaaatattcccagagttaaaaatctttggagaatttcagaaaattgattggaatcagttttaaatcatgtaggatccactcaagcatgtggccttaccgaatcaatgtatcagcttcttcctccagagattagtagttttctgcagagaagattggactagctggtttcctcatgctgtgtttcatggtagttcacactcaaaagtgaattttacatcttaggatccatacaactcctcttcgttaatacaatttactgggtttacaacagttttcttaaagtggttcgcagaccagcagcttaaggatcaccccagacctgctgaacgctagagctaccgaaagagaaagtcctaaggtggggccaataattggtgttttaccaagacctccaggtgattctcattaacttaaagtttgtgatcctctgggccagagatacagagactgacatttaatctggaaatttgattgtaaggctgacatttccagaaaaataggtgattatacttgatataaaagacgtggtaacattgttcttaaaatgttaacaaatgccttcagaaagcacatgagtttggagatggagggagagaaatcaaatggagggggcaaaagagagagcaaggaaaaatcaaatggagagggagaaagggaaggaggagggtcatatgatgggcagagaaaccagattgaaagagagaaatcagatggggggaattccacatgaagggagatacaactaatagaaggaaccggatagaggaagaaaagagtggtggagagaaagaggggcacctgatttaaactgcccccagaatattctgcttttagcgggattaactctgcatccctgggaaagtttagacagatcagttcctttacttctcactgtgtgaagagttagaggtaggactgaacattttgaagtgaggaaacccagaggattttttatatttcagtggaaagaaaaagacactatagaaaatataggccttgctgataatatgggcttgtgaagattgtgttgggtttaatttgaaaagtga

SEQ ID NO: 5199 - DNA, 769 bp, Homo sapiens
cggcagaggggcttctgacccgaggtgcttggagagaatggaggccacatccagtgccttactcggctccattcccccacccactacagtaggccatgaccgacccaggtgggcccagttaagcaggaaggtctcacacaactgctaggatgtatcctggccaagtttcactgaaaacaaattcacttcaagtggcttctcctcttcgctaatttccatgacaatcctttcatgctctcccaccccctctggctttctcctcccattcttcctgacattcgccwagtctgtgtgtgcactgcaggaatatgaaaatgaatctacttctagtcccgccctcaaagttcctagtcctccagggagagggcatggagaatgtcaggtggaaagcagggagcagcagctgaggcggggtggacgtgtggggggtcaaccttatgtttggagcactcaaagaccagccatccctatctctgtgctccttagcatttcctcagaggatctaagcgaaaacagagcgggcatgagaagtcagacctaggactcccaggctgtttaccagaaatgcatttcatttagaagagcctgtcttagctttgtttgggtaaaaaattatatataaataaaataaaaaagaagagcctttctgcagagtgtgcttgctctgaaaacaaagggaagaccagattccgtagctgggtaggaaagtttagggaccccaggtgggtgagggggcagggcggagagggcagcctggcaaacaccaggg

SEQ ID NO: 5200 - DNA, 769 bp, Homo sapiens
cggcagaggggcttctgacccgaggtgcttggagagaatggaggccacatccagtgccttactcggctccattcccccacccactacagtaggccatgaccgacccaggtgggcccagttaagcaggaaggtctcacacaactgctaggatgtatcctggccaagtttcactgaaaacaaattcacttcaagtggcttctcctcttcgctaatttccatgacaatcctttcatgctctcccaccccctctggctttctcctcccattcttcctgacattcgccaagtctgtgtgtgcactgcaggaatatgaaaatgaatctacttctagtcccgccctcaaagttcctagtcctccagggagagggcatggagaatgtcaggtggaaagcagggagcagcagctgaggcggggtggacgtgtkgggggtcaaccttatgtttggagcactcaaagaccagccatccctatctctgtgctccttagcatttcctcagaggatctaagcgaaaacagagcgggcatgagaagtcagacctaggactcccaggctgtttaccagaaatgcatttcatttagaagagcctgtcttagctttgtttgggtaaaaaattatatataaataaaataaaaaagaagagcctttctgcagagtgtgcttgctctgaaaacaaagggaagaccagattccgtagctgggtaggaaagtttagggaccccaggtgggtgagggggcagggcggagagggcagcctggcaaacaccaggg

SEQ ID NO: 5201 - DNA, 1487 bp, Homo sapiens
tccctgggtgattcatacgcactaaagccctatgtagagatcgagccttaagccagcgggcagtctgggtcactggccacctgaataacattatttctacaggacatgtgtcccaaattttaaactgcagaattatatttctttaaaaaatttttttaaatttttttttggagatgaggtcttgctctgtcacacaggctggaatgcagtggcataatcatagcttactgttgcctcaaattcctgggcctaagcaatcctcctgcctcactcctgagtagcttagctaggactgcaggcatatgccaccacgcctggctaatttatttttatcttttatttttgttgtgatgggtcttgctatgttgcccaggctagttttgaactcctggcctcatgcgatcctcctgccttagcctcccatagtgctgggattacaggtgtgagccactgtgtcaggctttttaaactcccaatagtcccttaattgcaaaaaacaatttcttagaatttaaaatattcatttagttcaaccactacaagttaatgtggaaaactgaaacctaaacaaatactttctattgagataatgctaaatggcttgctttctgtgaacagaaatggactggagaagctaaaaaagacactgctggacttgtcacagccgccgggaaacaagaattaagacagttcggaagagtcccattcaaagtgggcggtctagaaaatgaaaattttaaattccacagcagcarcagcagctctcatgtatggagaatctgctggatccagggctctatccttgcgtggtctctgactcctaagacagcggaagccagcatcgctgtgctcatttgatagactcagagaaattaaatcactccctaaaacaccctgaagcaattcattcagtcatgtccttttgcttcctgctcttctgctggataacactgcctcactcactcactgcccttttaatggtctgataaacactttcaggcaggcgaattagtgccacagctcacctgttaactaggctggaatctgttttcagtaagagactgtctcaggcaaggattcttttaaagtctgtttcttaaattgctctttctggcatgacatcaattagtcacccatagggccacatgggcattgtgagcaggactgggtgcctgtgttagggggtcctccatcaaggggcatctccagcggcacattcagaggccttggagtcagacgtctcctaggaccagcaggaacgaaagggatctgattcaggcctgactactgcgaaagatgctggagccaaatcaatggtatgatcagagttgggaaaggcttaccaaggaagggggatagcctggtctgcccggtgggcccaagagatgggctgtgggaacagtgcatccacgtgcttggttgatgaaaaatccctcaagactattttgtctgactccacgttcaccgattaactttctgtcattctg

SEQ ID NO: 5202 - DNA, 600 bp, Homo sapiens
tgccatgagaggggagttgggagtagaatcgtctccaagagcaatcttcttcctactgcaaaacaccaaagcaagtcctggtgtcagagatgtctcttttctaacggatcacttagttttgcattccccaaccagggaatgatctgtctcctcaccttctaagtcaaccactgaggctaatctacaaatgataactaaaaatctttgaaatgaaaggaacttccatagtagtgctctctaacagaacytaaaacacctgcattgcatatgctggccctagatcaccacatccagaacacctgggttaattcctgtagttttagaaacaggttattcattgcttttatgtgaagtaagtagtgagtgtcgcagatttttcccacaaaacttctcttggtagcctctttttacttcaggtgtttagagtctgctatcttattaatcattcagtaaaccaaaatgtgaacatttcacaagtctctgattgtacctggtgtatgtgcctctgtgcaccattcccccgttcaatgttgtttcatactggaatggccctcatcagggtaagttcttgccagctgtttgttaggaactctgtgaaga

SEQ ID NO: 5203 - DNA, 803 bp, Homo sapiens
ttcaccagaggtagagaatctagtaaagtgagtagtaggaggaaaacctcaaactgtgttctgtttactccataaaaaaaaaaaaaaacatggctgacattttcttactcaataggaccttgcctgtaaagattgctttgcaactgacaagatccaggcaaaataagcagccgtgtctctactttcacatgtggaaactagtaccagctctacaacccagatctcctggcacctccaagagctatctttccattattttcacctccagacttccattaaatgatcctgaactactgcaaataagaatttaaaggcttttaggggggaaaaactcaaaatctattctagccactgtgctgaaaagaacataaaccttcgagaaggacagacctagtgttcctcactcccagttaccttaaatacttctaattctctcagttctcatttaatttataaaatraggaatgtgatacctccctcacatggtagttagcagaattaaataagatgatatatgtaagtgtaggtagatagtggattctctatcaatactaaatcccttaataatctcagcattcaagaaattcgactttaggccaggtgggatggttcacgcctccaatcccaacactttgaggaccaaggcaagaggatctctgaggccaggaattcaagaccagcttaggcaatatagtgagaccacccccaaccccgactccatctctacaaaaaaaattttaaaaactagccaggcatagtggcacgtgcctatagtcccagctactcaggaggctgagatgaca

SEQ ID NO: 5204 - DNA, 543 bp, Homo sapiens
aggcatgagccaccgcacccagcccaaataaagttttaagaaattacttggccaggcatagtggggcctttgtagaaaaacatagcttttctatgagaagatgatcaatattttcttttcctttgaatttggaattaccattttggaactgttgtcaacaatgcataataatatatcagaatgcttcctagtatattattggagaaagaacaaacaaaagtttaaattgatataaaatgcatataatggaacaagcaaccctgcaaaaaaaaaaatawatatatatatataccatctgggaatttctgataataacattgaaatctgttcacacagtctaaaattcttttgatgtatcgtagttttgaaaaaaaggtaacagtttactatatataacaaatataaggaaaatattaaattttttgaaagatactagtttttatttttgttcattttttagagacagggtctcactatgttgcccaagctagagtgcagcggcccgattatagctcactgcagcctctaactcccggactcaag

SEQ ID NO: 5205 - DNA, 460 bp, Homo sapiens
aatttaatattatttaaatataagtagcaaaattcttgtaatttccttttattgaaaaaggccttattgctccactgatttttacatggcttctttgtccatttaccaaaattccatcatgtgtgggcctggtttyaagcacttatcctactgcattcatcaatttgttgatagatgcactaacaccacattgtcctgctaaatataattccatataaaatatacagtagggcaaatcttacttttcttcttcagaattttcctgaataatttgatcttttattttacatatatatttaaaatcatcgtcacattccatgaaaatctctattagagtcattattagaattatattgaatcaatttgatttatatagaatcaattttacattaaatattaacttcataaacttggcttctcattaattagtattatctctcttagataattagcattatct

SEQ ID NO: 5206 - DNA, 460 bp, Homo sapiens
aatttaatattatttaaatataagtagcaaaattcttgtaatttccttttattgaaaaaggccttattgctccactgatttttacatggcttctttgtccatttaccaaaattccatcatgtgtgggcctggtttcragcacttatcctactgcattcatcaatttgttgatagatgcactaacaccacattgtcctgctaaatataattccatataaaatatacagtagggcaaatcttacttttcttcttcagaattttcctgaataatttgatcttttattttacatatatatttaaaatcatcgtcacattccatgaaaatctctattagagtcattattagaattatattgaatcaatttgatttatatagaatcaattttacattaaatattaacttcataaacttggcttctcattaattagtattatctctcttagataattagcattatct

SEQ ID NO: 5207 - DNA, 460 bp, Homo sapiens
aatttaatattatttaaatataagtagcaaaattcttgtaatttccttttattgaaaaaggccttattgctccactgatttttacatggcttctttgtccatttaccaaaattccatcatgtgtgggcctggtttcaagcacttatcctactgcattcatcaatttgttgatagatgcactaacaccacattgtcctgctaaatataattccatataaaatatacagtagggcaaatcttacttttcttcttcagaattttcctgaataatttgatcttttattttacatatatatttaaaatcatcgtcacattccatgaaaatctctattagagtcattattagaattatattgaatcaatttgatttatatagaatcaattttasattaaatattaacttcataaacttggcttctcattaattagtattatctctcttagataattagcattatct

SEQ ID NO: 5208 - DNA, 969 bp, Homo sapiens
aattagactgcggtccacaagagctggccaggttccccaggctgatgatgcctctaagacagagcatgcggctatctctgatgcatgttccctagtccccctgccacccacaaaatcctacatttcttacaagaagaattatgctaggaaggcagactgagatgtctgggaaacataaggatgtttaagatgtctgtccaacaggaagtggaaaatagcacactccagaaagcctcaggagggtgcggcatgcacggtaggtgatggccagactccamggccctcagaagaatgagatgcccgcccagtgggcctgggaagggcactggctaaggatacacagaaagcccttacggaaacatctagcatccactgggctcagtgggaggggctgttatcatctctgttgtaaaattcaccaccacctagactcctgacctcctgacatccaactgtcagctcatgcacatggttttaaatcgtgccttgagatcttacaaaaagcctggctttggccctgagacttgattcactttgccatcttctatctatcgagcacctctaagggtaagaagcccagcaggacatatagggaggtagatggggagcacacacagacttggggtggatcgtggggaggtggatggggggcacccacagactcgaggtggatcctggggaggtggacggggagcacccacagactcggagtggatcctggggaggtgaacggggagcacacacagacttggggtggatcctgtggaggtggatgggggcacccacagactcgaggtggatcctggggaggtggacagggagcacccacagactcggagtggatcctggggaggtgaacggggagcacacacagacttggggtggatcctggggaggtggatggggggcacccacagactcgaggtggatcctggggaggtggacaggtagcacccacagactgagatc

SEQ ID NO: 5209 - DNA, 969 bp, Homo sapiens
aattagactgcggtccacaagagctggccaggttccccaggctgatgatgcctctaagacagagcatgcggctatctctgatgcatgttccctagtccccctgccacccacaaaatcctacatttcttacaagaagaattatgctaggaaggcagactgagatgtctgggaaacataaggatgtttaagatgtctgtccaacaggaagtggaaaatagcacactccagaaagcctcaggagggtgcggcatgcacggtaggtgatggccagactccacggccctcagaagaatgagatgcccgcccrgtgggcctgggaagggcactggctaaggatacacagaaagcccttacggaaacatctagcatccactgggctcagtgggaggggctgttatcatctctgttgtaaaattcaccaccacctagactcctgacctcctgacatccaactgtcagctcatgcacatggttttaaatcgtgccttgagatcttacaaaaagcctggctttggccctgagacttgattcactttgccatcttctatctatcgagcacctctaagggtaagaagcccagcaggacatatagggaggtagatggggagcacacacagacttggggtggatcgtggggaggtggatggggggcacccacagactcgaggtggatcctggggaggtggacggggagcacccacagactcggagtggatcctggggaggtgaacggggagcacacacagacttggggtggatcctgtggaggtggatgggggcacccacagactcgaggtggatcctggggaggtggacagggagcacccacagactcggagtggatcctggggaggtgaacggggagcacacacagacttggggtggatcctggggaggtggatggggggcacccacagactcgaggtggatcctggggaggtggacaggtagcacccacagactgagatc

SEQ ID NO: 5210 - DNA, 812 bp, Homo sapiens
gagtcaaaaatgacaatattacagctatgcagataagttgttcagggtcaggcctattttttcctgacaaaatactactctaatattaaaatggtattttggtgattcattgtggagagctccaacaacagattagaatagggactctttgaaagcaaacttttagctggcatggtggaaagcgactatagtcccagctactcgggaggctgagaggggaggatcacttcatcccaggaggtcaaggctacagtgagccgggatcgcacttctgcagtgcagcccgggcaacagagcgagaccctatctcaattttaagaacgaaagaaagcaaacttgaaactaacttataaaaataaatcttaaaatttaagtctaggacaaacacaccacctgctctcctctctgttcctgatatttacaggaaacaagacggtcatcttttgattttctaaattcaaacatgaaagtgacttaagacattgcaaatgggaagtcccagagaggaacgtggagcatcccacattaaaaatcattccctggcctaactctcaggagaaaactccacatggtgagtgtgagtgggccaggtgggtcagcccacccagtccccagtggggagtcggcctggcctgtatctttaaagggagttgtttgtgtgagaatcgttgtgaaacctgttaacgtgcagatttcgggtccctgtgaaatgggtccaagcggagcccrgaaacccacattttgaaacttcccttggttacttgcaggtctctccacccagctgagtacaatggtttgaggactattcagcc

SEQ ID NO: 5211 - DNA, 812 bp, Homo sapiens
gagtcaaaaatgacaatattacagctatgcagataagttgttcagggtcaggcctattttttcctgacaaaatactactctaatattaaaatggtattttggtgattcattgtggagagctccaacaacagattagaatagggactctttgaaagcaaacttttagctggcatggtggaaagcgactatagtcccagctactcgggaggctgagaggggaggatcacttcatcccaggaggtcaaggctacagtgagccgggatcgcacttctgcagtgcagcccgggcaacagagcgagaccctatctcaattttaagaacgaaagaaagcaaacttgaaactaacttataaaaataaatcttaaaatttaagtctaggacaaacacaccacctgctctcctctctgttcctgatatttacaggaaacaagacggtcatcttttgattttctaaattcaaacatgaaagtgacttaagacattgcaaatgggaagtcccagagaggaacgtggagcatcccacattaaaaatcattccctggcctaactctcaggagaaaactccacatggtgagtgtgagtgggccaggtgggtcagcccacccagtccccagtggggagtcggcctggcctgtatctttaaagggagttgtttgtgtgagaatcgttgtgaaacctgttaacgtgcagatttcgggtccctgtgaaatgggtccaagcggagcccggaaacccacattttgaaacttcccttgrttacttgcaggtctctccacccagctgagtacaatggtttgaggactattcagcc

SEQ ID NO: 5212 - DNA, 812 bp, Homo sapiens
gagtcaaaaatgacaatattacagctatgcagataagttgttcagggtcaggcctattttttcctgacaaaatactactctaatattaaaatggtattttggtgattcattgtggagagctccaacaacagattagaatagggactctttgaaagcaaacttttagctggcatggtggaaagcgactatagtcccagctactcgggaggctgagaggggaggatcacttcatcccaggaggtcaaggctacagtgagccgggatcgcacttctgcagtgcagcccgggcaacagagcgagaccctatctcaattttaagaacgaaagaaagcaaacttgaaactaacttataaaaataaatcttaaaatttaagtctaggacaaacacaccacctgctctcctctctgttcctgatatttacaggaaacaagacggtcatcttttgattttctaaattcaaacatgaaagtgacttaagacattgcaaatgggaagtcccagagaggaacgtggagcatcccacattaaaaatcattccctggcctaactctcaggagaaaactccacatggtgagtgtgagtgggccaggtgggtcagcccacccagtccccagtggggagtcggcctggcctgtatctttaaagggagttgtttgtgtgagaatcgttgtgaaacctgttaacgtgcagatttcgggtccctgtgaaatgggtccaagcggagcccggaaacccacattttgaaacttcccttggttacttgcaggtctctccacccagctgagtrcaatggtttgaggactattcagcc

SEQ ID NO: 5213 - DNA, 1560 bp, Homo sapiens
cataggcctggggtcggactcatctgcattcacaacccgtccccctccctgttcattagctgaatgacattgggtgagagcctccgtcccgtctctgagttccttagcaatgggtataataatgtgtgactccaaggcttggagtacgggagatacgggaacagatatggagctatagagttcatgcttagagacatcagttcccttccttctgctcctggctcatggtacacacatgttttgaaaaccatgccaggcatctgacctcaatgcacgcaagcatttagctgctgggtcattggcagaaaagcctcaagcaggggttcagggaaggctttaattaagcttggcctgtgggggctgctgcctgggctggatctgctgtgaaacaagaggagcttgatgttctaggagaaatgcttggggcccaggaccatctgctggagggaaaagaatgagtrttcccagagaaacagaccagtgctggggctgttccctggaattcaggttaagtgtcctgggcttgtgaactgggcacaaaagatgctgcaagtctttgctttgggaagctgtcaagggtcattgcccctctcagcctaaacctcttagcacctctccgacgatgcttttcactttggtggtgactgataactcttcttggttgttgagaagtttggatgaaaagctctaggtgtgtattatagtttcatgttgctgttattacaggtccttagtgtcttacagaatgcagatttctgatctcatggtctgtttggcagacctccaggtaggctcattggatccctctgctctgggtttcatgaggctgaaatcaaaatccaggtgggctgggttccccctcagaggctctgggagcatcctcttctgccttgttggggttgtgggcagaatccagctccttcagctggtgggactgagcaggggctgccctgacctcccaaggcctctctcaagtctctgcccatgagccctgaacttcagagctcagccatgatgtggcttctttcttttgaagcctgattcaaagtcacacttggattctttctgacttccttttctgctccacagttctgtttgcagccagagaaagtcgcctgcttttaaggccttgtgtgatgatgctgggcccacccagatcgtccagaattacccaggcccgtcttagggtctgtggcttcgttatgtctgcaaattctgctttgcatatatggtgagaaatacataggtctcaggattagagagcatgcattctggagcacaccctgctcacccagggtggaagtgtgtactccaaggccccgcaggcagttctttgtaattagcacatcctgctcaccacagggcggaagtgtttacgccaaggccctgcaggcaggtcatttgtaattagcacattcctagtcatgagtggatgctttaggaattagtggctgatgagatatacggactaatttcaaggcgccacctgcagcagaacctatgttacagcatgaagaacccctgatattctttttttatatataatttttattttacaaa

SEQ ID NO: 5214 - DNA, 1560 bp, Homo sapiens
cataggcctggggtcggactcatctgcattcacaacccgtccccctccctgttcattagctgaatgacattgggtgagagcctccgtcccgtctctgagttccttagcaatgggtataataatgtgtgactccaaggcttggagtacgggagatacgggaacagatatggagctatagagttcatgcttagagacatcagttcccttccttctgctcctggctcatggtacacacatgttttgaaaaccatgccaggcatctgacctcaatgcacgcaagcatttagctgctgggtcattggcagaaaagcctcaagcaggggttcagggaaggctttaattaagcttggcctgtgggggctgctgcctgggctggatctgctgtgaaacaagaggagcttgatgttctaggagaaatgcttggggcccaggaccatctgctggagggaaaagaatgagtattcccagagaaacagaccagygctggggctgttccctggaattcaggttaagtgtcctgggcttgtgaactgggcacaaaagatgctgcaagtctttgctttgggaagctgtcaagggtcattgcccctctcagcctaaacctcttagcacctctccgacgatgcttttcactttggtggtgactgataactcttcttggttgttgagaagtttggatgaaaagctctaggtgtgtattatagtttcatgttgctgttattacaggtccttagtgtcttacagaatgcagatttctgatctcatggtctgtttggcagacctccaggtaggctcattggatccctctgctctgggtttcatgaggctgaaatcaaaatccaggtgggctgggttccccctcagaggctctgggagcatcctcttctgccttgttggggttgtgggcagaatccagctccttcagctggtgggactgagcaggggctgccctgacctcccaaggcctctctcaagtctctgcccatgagccctgaacttcagagctcagccatgatgtggcttctttcttttgaagcctgattcaaagtcacacttggattctttctgacttccttttctgctccacagttctgtttgcagccagagaaagtcgcctgcttttaaggccttgtgtgatgatgctgggcccacccagatcgtccagaattacccaggcccgtcttagggtctgtggcttcgttatgtctgcaaattctgctttgcatatatggtgagaaatacataggtctcaggattagagagcatgcattctggagcacaccctgctcacccagggtggaagtgtgtactccaaggccccgcaggcagttctttgtaattagcacatcctgctcaccacagggcggaagtgtttacgccaaggccctgcaggcaggtcatttgtaattagcacattcctagtcatgagtggatgctttaggaattagtggctgatgagatatacggactaatttcaaggcgccacctgcagcagaacctatgttacagcatgaagaacccctgatattctttttttatatataatttttattttacaaa

SEQ ID NO: 5215 - DNA, 1582 bp, Homo sapiens
caaaaatatttggaaaaagtaaaacaataaaaaaacacaaaaatttaaaaatactttatatcagctatttacaaagcatttatgttgtattaggtattatagcaatctagagatgatttaaagtatacggaaggatgtgcataggttatatgcaaatactatgccacattatatcaggaacttgagcatctgtgaattttggtatctctggggtcctggaaccagtatcttgaggttactaagcgacgactgtattcaatttcttctttggttattagtttattctttaatgtatttttgttgttgttttgtctttttgtttttgcctcttcaagtcaacgtcggaaacttagttgttctagactacccattagctcaaagctaccagtaatcagactaccactgcaatctaagcaaccgattttttttttacccatcagactggcaaaaattaagataagatctagtgatgttgaagctgtggggagtttttcctgagcatgttaattatgacagccctttttactaggcacctagacgattcatcaaaatgaaataaaatacccatgcacttgaagaagttacctggttatttccttatctgggtgctggttatgtgaggtctacagttgatgaaaacttattaagctttatatttctaataggtacaattttctgtatgtgtaatatatttgaaaagtttttaaaatgttttttgccacagcccgcagctgtgtataatgctattcgcttaacagtggaaaacatggcaatgacctgaatctccctggctcccgggatcctacccccttaagttaacgaaaataaaagtaaaagaaataacttccactgtctttcgtaatgccttaaatccgtcctcagttaaaccggcggttggcgctggttttttccagggcaggattctgggagacggaggagcagacgccagcatttcgcccccggcacctccagcgggctgcggtccgctcccggcctcactcgagcaggycccgccccgccagaggccgttagtccaagtcacgtgatcgtcgactcagctgacctggcgggaccggaaaaagaaattcccgggccctggcttcctcgcgcgatgtatgaggcaccaggggtgaagcgggcatgggctgctggagcgggaatgagggggcgccagtggctccggaaacgggttgaggttgtctgcactggccgctccgcaaacacagtgtgtgcgggcgtcagggcagcaggtctggtagagaaaagtccaccgccatccctctcccgaatggggcgggtaagacagagcaggccggccggcttagagttccctgcttccctggcggaaggaagggcccctgactcctggggcaggaactagggcttgtctggagctgggagtcctttcaggtcttctctagctccaaaaggacctcccaaggacacccccttccccagccctgctgtgggacttggacaggaaagtgctagaatcaggctcactcttgcacactgttaggaagccactccgctcttttcagatccagaaagtagtagttttggggctgatacttatccatcc

SEQ ID NO: 5216 - DNA, 811 bp, Homo sapiens
atccccacagtcctcccaaccagggtcaggtgaagtgatgggaagtgttaactgtcaataaacttggcagttctgatgcactgaaatgacactattttggaggcaaagtgctctgacgtgctctctctcttttttttttaatgacaagagaaattaaggggcttgcaggggattttatccaggagcggaaaaagaactaggtcatcaaaagagtctgaagggacagcagggagaaaaaaatcaagcgttctcggccagcatcccatcgcgtccagcctgtttaatgtagcagctgggctcccagtgctgcgaagctctggacacggcccaatgaggctctgcccgtccttctcctcctcacctggactcgccccttgtcttgtctcacctcttggttctcggcccagctcccttcgccccccactcctgacattaaccccatcagtgtttcctgggatgagccaggaccctcaccctcgggtccctgcacagctgccccctttgtctttcaamaccctgctcctccccaccgcttcctcctccgaactccttctcacccttgggagagttcacagcttagacctactcttgggcggcccacgcacctcactgtgcactgcctgcccatggacagtccctgctgcccagaagctggcccctctcccgtgcgcccccagcgcctggcacagagccagcccctctcccgtgcacccacagcgcctggcacagagccagcccctctcccgtgcacccccagcgcctggcacagagccagcccctctcccgtgcacccccagcgcctggcacagag

SEQ ID NO: 5217 - DNA, 619 bp, Homo sapiens
tagctacaagagagttccacgacccccacagacctttggactggcagaaggagctgcccagagaccatgcagaggcactgcttgaacttgcatgaaaccccaaaggcttcagtgttctggggagctacagcaaaatgcaatccttggtgcctaccccccaaggctcagcatcctttcctatgcagctgcagctgctgctgtctgcagggctgaggagtgagcagggcacaggcatgatcacaaaccccgaagagaggctccatcactactgctgagggacagaggtgcatttgagtcagataccccatgccgcctgttcttcccaggactgcctgcctggccattcccacagggggccaaccctgtakctgccattgccccacctgagtgttttgttggtgctctgggagcagttcacccctccctgttacagccagtgcttgggtttaagagccagaaggcaaatctcctggcctagccccagttctccagcacttgagcacactgcccaggggaatggagatgaggtctgtagtctgtctgaccttgagtggtggggaggagccccactgcaacaacacagagaaggatatggcatgaattcctgtagtgacatggg

SEQ ID NO: 5218 - DNA, 634 bp, Homo sapiens
ttttttttttttttttttttttttttaagacaaagtctcacttccattgcccaggatggaatgcagtggcatgatctcagcttactgcagccttgacctcccgggctcaagcaatcctcccacctcagcctcctgaatagctgggactacaggcacatgccaccatgcctggctaattttttgcatttttagtagagacagggcttcaccatgtttcctaggctggtctcaaactcccaagctcaagtgakctgcccatctcggcctcccaaaatgttggtattacaggcatgagccactgagcctagccagaatatttttaaatgcataataggcaactgatgacaaaggaaaccaaatgagttaacaacattattataaagaaacaaattttatgaaataatatatgcatcttctatatcacacactaaatgataagatcttgctggagtaactgccacaaattcaaaaacatctttcagatatatgagacaatcgtagtgagaaatatttctggtgttcttttagtttggtgaagcataatcgttatacgaaagttgtacatatttatcgtatacatcttgatgagtttggacatgaatacatagctatgatgccaacaccacaatcaggg

SEQ ID NO: 5219 - DNA, 634 bp, Homo sapiens
ttttttttttttttttttttttttttaagacaaagtctcacttccattgcccaggatggaatgcagtggcatgatctcagcttactgcagccttgacctcccgggctcaagcaatcctcccacctcagcctcctgaatagctgggactacaggcacatgccaccatgcctggctaattttttgcatttttagtagagacagggcttcaccatgtttcctaggctggtctcaaactcccaagctcaagtgatctgcccatctcggcctcccaaaatgttggtattacaggcatgagccactgagcctagccagaatatttttaaatgcataataggcaactgatgacaaaggaaaccaaatgagttaacaacattattataaagaaacaaattttatgarataatatatgcatcttctatatcacacactaaatgataagatcttgctggagtaactgccacaaattcaaaaacatctttcagatatatgagacaatcgtagtgagaaatatttctggtgttcttttagtttggtgaagcataatcgttatacgaaagttgtacatatttatcgtatacatcttgatgagtttggacatgaatacatagctatgatgccaacaccacaatcaggg

SEQ ID NO: 5220 - DNA, 634 bp, Homo sapiens
ttttttttttttttttttttttttttaagacaaagtctcacttccattgcccaggatggaatgcagtggcatgatctcagcttactgcagccttgacctcccgggctcaagcaatcctcccacctcagcctcctgaatagctgggactacaggcacatgccaccatgcctggctaattttttgcatttttagtagagacagggcttcaccatgtttcctaggctggtctcaaactcccaagctcaagtgatctgcccatctcggcctcccaaaatgttggtattacaggcatgagccactgagcctagccagaatatttttaaatgcataataggcaactgatgacaaaggaaaccaaatgagttaacaacattattataaagaaacaaattttatgaaataatatatgcatcttctatatcacacactaaatgataagatcttgctggagtaactgccacaawttcaaaaacatctttcagatatatgagacaatcgtagtgagaaatatttctggtgttcttttagtttggtgaagcataatcgttatacgaaagttgtacatatttatcgtatacatcttgatgagtttggacatgaatacatagctatgatgccaacaccacaatcaggg

SEQ ID NO: 5221 - DNA, 634 bp, Homo sapiens
ttttttttttttttttttttttttttaagacaaagtctcacttccattgcccaggatggaatgcagtggcatgatctcagcttactgcagccttgacctcccgggctcaagcaatcctcccacctcagcctcctgaatagctgggactacaggcacatgccaccatgcctggctaattttttgcatttttagtagagacagggcttcaccatgtttcctaggctggtctcaaactcccaagctcaagtgatctgcccatctcggcctcccaaaatgttggtattacaggcatgagccactgagcctagccagaatatttttaaatgcataataggcaactgatgacaaaggaaaccaaatgagttaacaacattattataaagaaacaaattttatgaaataatatatgcatcttctatatcacacactaaatgataagatcttgctggagtaactgccacaaattcaaaaacatctttcagatatatgagacaatcgtagtragaaatatttctggtgttcttttagtttggtgaagcataatcgttatacgaaagttgtacatatttatcgtatacatcttgatgagtttggacatgaatacatagctatgatgccaacaccacaatcaggg

SEQ ID NO: 5222 - DNA, 812 bp, Homo sapiens
gatcccaatatgacatgacatgaggacaaaaaggattaacaaacaaagcaatcccagtttctagttccagagtcacctgtcacttgcatcatttcttggctcctgggaaggcatgaataggggtagagagagatcaggagggttatcctaatggatattcctccagatggaagaaaacaacaagactaggcacgactmtttcctcaaacaaaagcaacatgagtagtataaaattacacacatagtatggctcatcaatgcatgaaaaattagaaactttccatcattcagaaaacatttactgagggtctgccttatgacgagcaccatgctagcaactgaagtacaaagcacataaaacacgatgtcaaatcacagtttctattctttaactgtgcaatgtatccaagacaaatattcaaaagataatttaaaaaaataatgtgaggtattcagaacaaattagagatctacattagaatattagaacctttgaatattatttaaattatgaatgatactcaagataacacctatatcattttatagacaaaacatggccataaaaaacaataagctgctttaaattcaaccaatttcaataattcgattatttggcattctacattctcaatactttaaggacaaaacttcaaaacttttgtatttacaataatttgcattttttttctttttacctcccagacaagtgatgcctccctattaatgcctatcctccatttatttatcataaatactgtaagagctctgcaaaagtgaagaatagtattttgtttcattttttttccaaa

SEQ ID NO: 5223 - DNA, 532 bp, Homo sapiens
aatataattttttttggagttggagcaaatctagataagggtcacaattgccccaagacttrcccaatttgagctcatgctacacaattaaatatattccttaaatattgtgtgcttgcaacttttgattttgtaaatgggttcccacaggacaaaaatgagtcttaaacataaaattaaaccatatgaatgttagttttttagttaatttcagctgggtggtagtctatagtcccagctactcgagaggctgaggcagaaggatcgcttgagcccaggagttcagggctgcagtgagctgtgatcacaccactgcactccagcctgggggaagagcaagaccctacaaacaaaaaagagttaattccattatatttatttttacatacccagagtttgactaaaatataccagacaatctcctgtccccaaatccatgtccaagcaaggggagccacgttttctaagctcacagtttaaaggttaaagagacacactgaggaaaactcagggaaagaagctgatttgcatg

SEQ ID NO: 5224 - DNA, 741 bp, Homo sapiens
cctgacttaacaattacgtggatcatttcaggcatcagtaaggaaaagttaacatgaagaaaacaacctaagcgcacacattaagaaataagcagaaagtgctagcaatgagatgcttttcagctctcacgttttactgagcagtgcaaagtcaaattgaaaaacaggaaatgacatattacgaaatagacatataaaatttaattcctttggtttaaaatacatcttcaatgatacaattaaaaataacacrcaagacaaaatcaacttcataaaaaatacaaaagttatatgacccatatcccatatcttatcttagaaaaccagcaatttagttcccatacttcattagaatactttaacctaagactgtaactaccagtccatttacacgaatgacctagtctagttccctgaacctaaagatacccgtgactttgttataaaattacatattttagtatttttatatacttaaatgtgtacaaaatgttcccctgccatagtaacatatttttgtgaattcatgaatgttttctagaattgttaacatacaagataatcaaagcacgaaggctctgatgcgtgataaaataatcatttctcaaaacaggaagatgagaactgcatttcgagttgtatcacttggtacgcaatacttgcaatctgtgtgctgtaattacagtgtttcttcactctaagtgcatctgactgatactagcataacaaaagacgtgattg

SEQ ID NO: 5225 - DNA, 741 bp, Homo sapiens
cctgacttaacaattacgtggatcatttcaggcatcagtaaggaaaagttaacatgaagaaaacaacctaagcgcacacattaagaaataagcagaaagtgctagcaatgagatgcttttcagctctcacgttttactgagcagtgcaaagtcaaattgaaaaacaggaaatgacatattacgaaatagacatataaaatttaattcctttggtttaaaatacatcttcaatgatacaattaaaaataacacgcaagacaaaatcaacttcataaaaaatayaaaagttatatgacccatatcccatatcttatcttagaaaaccagcaatttagttcccatacttcattagaatactttaacctaagactgtaactaccagtccatttacacgaatgacctagtctagttccctgaacctaaagatacccgtgactttgttataaaattacatattttagtatttttatatacttaaatgtgtacaaaatgttcccctgccatagtaacatatttttgtgaattcatgaatgttttctagaattgttaacatacaagataatcaaagcacgaaggctctgatgcgtgataaaataatcatttctcaaaacaggaagatgagaactgcatttcgagttgtatcacttggtacgcaatacttgcaatctgtgtgctgtaattacagtgtttcttcactctaagtgcatctgactgatactagcataacaaaagacgtgattg

SEQ ID NO: 5226 - DNA, 741 bp, Homo sapiens
cctgacttaacaattacgtggatcatttcaggcatcagtaaggaaaagttaacatgaagaaaacaacctaagcgcacacattaagaaataagcagaaagtgctagcaatgagatgcttttcagctctcacgttttactgagcagtgcaaagtcaaattgaaaaacaggaaatgacatattacgaaatagacatataaaatttaattcctttggtttaaaatacatcttcaatgatacaattaaaaataacacgcaagacaaaatcaacttcataaaaaatacaaaagttatatgacccatatcccatatcttatcttagaaaaccagcaatttagttcccatacttcattagaatactttaacctaagactgtaactaccagtccatttacacgaatgacctagtctagttccctgaacctaaagatacccgtgactttgttataaaattacatattttagtatttttatatacttaaatgtgtacaaaatgttcccctgccatagtaacrtatttttgtgaattcatgaatgttttctagaattgttaacatacaagataatcaaagcacgaaggctctgatgcgtgataaaataatcatttctcaaaacaggaagatgagaactgcatttcgagttgtatcacttggtacgcaatacttgcaatctgtgtgctgtaattacagtgtttcttcactctaagtgcatctgactgatactagcataacaaaagacgtgattg

SEQ ID NO: 5227 - DNA, 841 bp, Homo sapiens
ccatatttatatattatatatttatataagacatgtatgtacacatttacagaccttcaaaaatatattgcacttatatacaatgcagctttatcttaactgatttcatactgtaacccattaaaattcttcatgagaaaggcagttgatatgtccgagaaagtcgcaaaggaagatttcagtaacatgccctgtttagtaaacatctggtggagagtgagagggtaagggagagagggctccccccgtactcttcaggtgcgctcccgctaacgtgaggcagtggagttgtactgaattcaggcaagggcacgaaatccttaaagccaagcctatcgccttttctgacttctgctagcgagcaggcccacgacaytgtaggcacaaggcagagatcccaatattttgataaataacgtagcagatgtcctaaagcttcccagagactctgttaactcttggaataaagttttcactttaaatcctgtatatatcaggaaattcaaacataatggtatatggatttctctttcatctgaaaaacaccaatgcaatagattaaatgctaccaccaagccagatgcagccccgcctccaacctgcaaggaacccattccctcgacatagacctgtgctggcgacatggctgactggggttacctgcagttgccaaaccgtaagatctagaaacacctgcactgaactcctggggagctgtggcccgcaggcctttagatctccgtcagggtgagcttgtaagaccccccggcttcttcaatctgcagctggaaggtgtcctcattggagtaatgcttcacaatgttgtcgtccatgttcacca

SEQ ID NO: 5228 - DNA, 841 bp, Homo sapiens
ccatatttatatattatatatttatataagacatgtatgtacacatttacagaccttcaaaaatatattgcacttatatacaatgcagctttatcttaactgatttcatactgtaacccattaaaattcttcatgagaaaggcagttgatatgtccgagaaagtcgcaaaggaagatttcagtaacatgccctgtttagtaaacatctggtggagagtgagagggtaagggagagagggctccccccgtactcttcaggtgcgctcccgctaacgtgaggcagtggagttgtactgaattcaggcaagggcacgaaatccttaaagccaagcctatcgccttttctgacttctgctagcgagcaggcccacgacactgtaggcacaaggcagagatcccaatattttgataaataacgtagcagatgtcctaaagcttcccagagactctgttaactcttggaataaagttttcactttaaatcctgtatatatcaggaaattcaaacataatggtatatggatttctctttcatctgaaaaacaccaatgcaatagattaaatgctaccaccaagccagatgcarccccgcctccaacctgcaaggaacccattccctcgacatagacctgtgctggcgacatggctgactggggttacctgcagttgccaaaccgtaagatctagaaacacctgcactgaactcctggggagctgtggcccgcaggcctttagatctccgtcagggtgagcttgtaagaccccccggcttcttcaatctgcagctggaaggtgtcctcattggagtaatgcttcacaatgttgtcgtccatgttcacca

SEQ ID NO: 5229 - DNA, 777 bp, Homo sapiens
acacacacacacacacagcatgagaggactttttgtttttctggaggaagtcaagaaaaatttctctctgcttttcctagtttgagaacctcaactgcagcaatgcgctcatttcaagctctgtgtggcctgtttatttaatgctgttctcttacatacacatccgccacacggccggcccagggcctcttaaggacaaggacagagtatctggaatccaacattcaggtgtgagacacaggtcaccatccaacgctgggccgtactaggcaaggaaagtaacctctctgggctcattttctgctatacaattcaggggaggactatccatatcacctggcattaaagagaattcacgaaaattcctttgtaaattctaaggtacaattcagagaatcactgaaaaatgaatggaatgttatgtrttcagtttctatctaaggaaaagaaggtcgaggggtacagaattggcttttttgtttttgtttcttcagctttctaggaagccacactgctagggtgtatcagctatgacagaaaagaaaaaatgcttggcataaccttgatcaccaccacaactaagagaaaataattatgttattgactatgcaagaacgttaaatcacaattttatgatgtttcgccctgaacaggggcgctgtgggaagcgtcagggaccttagagatggcctcagcacacaggaagtggctgttaaatacaaagtcccctggcctgtacagagaacttctcttttggcaggtctgatgttaagctgg

SEQ ID NO: 5230 - DNA, 777 bp, Homo sapiens
acacacacacacacacagcatgagaggactttttgtttttctggaggaagtcaagaaaaatttctctctgcttttcctagtttgagaacctcaactgcagcaatgcgctcatttcaagctctgtgtggcctgtttatttaatgctgttctcttacatacacatccgccacacggccggcccagggcctcttaaggacaaggacagagtatctggaatccaacattcaggtgtgagacacaggtcaccatccaacgctgggccgtactaggcaaggaaagtaacctctctgggctcattttctgctatacaattcaggggaggactatccatatcacctggcattaaagagaattcacgaaaattcctttgtaaattctaaggtacaattcagagaatcactgaaaaatgaatggaatgttatgtattcagtttctatctaaggaaaagaaggtcgaggggtacagaattggcttttttgtttttgtttcttcagctttctagraagccacactgctagggtgtatcagctatgacagaaaagaaaaaatgcttggcataaccttgatcaccaccacaactaagagaaaataattatgttattgactatgcaagaacgttaaatcacaattttatgatgtttcgccctgaacaggggcgctgtgggaagcgtcagggaccttagagatggcctcagcacacaggaagtggctgttaaatacaaagtcccctggcctgtacagagaacttctcttttggcaggtctgatgttaagctgg

SEQ ID NO: 5231 - DNA, 777 bp, Homo sapiens
acacacacacacacacagcatgagaggactttttgtttttctggaggaagtcaagaaaaatttctctctgcttttcctagtttgagaacctcaactgcagcaatgcgctcatttcaagctctgtgtggcctgtttatttaatgctgttctcttacatacacatccgccacacggccggcccagggcctcttaaggacaaggacagagtatctggaatccaacattcaggtgtgagacacaggtcaccatccaacgctgggccgtactaggcaaggaaagtaacctctctgggctcattttctgctatacaattcaggggaggactatccatatcacctggcattaaagagaattcacgaaaattcctttgtaaattctaaggtacaattcagagaatcactgaaaaatgaatggaatgttatgtattcagtttctatctaaggaaaagaaggtcgaggggtacagaattggcttttttgtttttgtttcttcagctttctaggaagccacactgctagggtgtatcagctatgacagaaaagaaaaaatgcttggcataaccttgatcaccaccacaactaagagaaaataattatgttattgactatgcaagaacgttaaatcacaattttatgatgtttcgccctgaacaggggcgctgtgggaagcrtcagggaccttagagatggcctcagcacacaggaagtggctgttaaatacaaagtcccctggcctgtacagagaacttctcttttggcaggtctgatgttaagctgg

SEQ ID NO: 5232 - DNA, 2099 bp, Homo sapiens
cagtccttctgcttcagagtccagtagtcctagaccaaattagcttgaaatttaaaaagcgcatctgaagaaaaagtaaaattatgattatgagcaggattggatgtctgaacccagaaacaaccaaatgattcacatttattggaaatatactatcatattttattgaacttaagatacaattaattataaaacatatttttatgtatcattcaaaaattataaaatgccaattaattatgtcccctcattgtcaggtatatacaacttcagagatgttaaaatgtcaaaaaatctgtgtcttagaatcaatgaaataccatagtagtaggatgtgttataaaaaagaaacataataggaaatttgcttatgtagtgatttcttcactcttttgaacttgtttttcaaacatctcattctgttttgcccttattacttctctgtagtataggaaggaccaatgttttcattctcagtttactgataacaataatagcaacatgtatatagcagttacctatgaaccaggcactgttctatgtccagtgtcacaaagtaagtaacaaaatcaagatgtgagcctaagaaatctggctgcaaagtttgtgttgttaatcatgcatactcctcatgtaataaagaacctgagacctgaagagcttgggagacttgccatgatccttcggtggattcttactcctacaccagggcattctatacaccaccatttgaaagccatagttgcaagcactatgtgcctgaatgtttctaaatttttggttttggttcagaagagcttacaacctgggtctatggtgttacttggaagtctggaaggatagaaatgggggacatctcactctgtagaccacatgatctgaacctcaaagccccagcatcttccaacctctcctttcttatcttagcagtatggtgtcagaagctcaaaaactttgtacagaaaaaagaagctagttattggctaaaagtacatatcccttagtttttgtgttgtttaaaaattttcgccttgcttagaataagacattgccagttaagcatgagttcattgcagtgactttggttttctctcctggggctctcactttggctgacaccaggcagaatcactgatgatggcagctttctgagacaggcccttgttcagaatcgtgcagaactgacttctattgaccttaagaggatagtccttacaggtgagagatacagcttctttccttggagttaaccatggtcattatcttcatgtctgagtctgaacctttcgtgtggggtagataatttgcatttatctggaacaaatggctttctgaagtatcagctgatctaatcttttgaagtcatttccctctgcagagcacccaagggcatgtatatgagtgatttgtgagtcttcctgatgcttttttggggtaaaggacattccagatggtgtgaggcggcagcaattgcttttggatcttttcctggaattatggcaccaacctggttaaatgagaatcaggcagcctttctctttgtccaggccacaggggcatatttcctttgttctatgataagtgtggatcaacaattttctctaatgcttttacagcagtaggtgtcaaggagtaccaatctactgtgcgctcatcactgggagcccaagatgtaagtwgtgaaaagggagtttaagtcccagacagttcagccaaaaccagcccctacctaggttcatgcattaaaccccattgcaagggtttttagtccccattttgtctcagagtctaatcggctaagaatttggaaacatactgctaaagtgagcattgaggagggcacttcgtaggcacactataagggcttctgattggccatcaaagagaagggaaatctgctgactcctactaatgagaattttctgcagtctcatatgttaaaccttaactaattatccctaagaagagctgctccccaaactcattaactaattaaacatttccagatagagagttacccatgctgcattatattgctgaagtcactggtgttcttccccaggtttatagtgatttcttaacaaaacccaaggatgcct

SEQ ID NO: 5233 - DNA, 2099 bp, Homo sapiens
cagtccttctgcttcagagtccagtagtcctagaccaaattagcttgaaatttaaaaagcgcatctgaagaaaaagtaaaattatgattatgagcaggattggatgtctgaacccagaaacaaccaaatgattcacatttattggaaatatactatcatattttattgaacttaagatacaattaattataaaacatatttttatgtatcattcaaaaattataaaatgccaattaattatgtcccctcattgtcaggtatatacaacttcagagatgttaaaatgtcaaaaaatctgtgtcttagaatcaatgaaataccatagtagtaggatgtgttataaaaaagaaacataataggaaatttgcttatgtagtgatttcttcactcttttgaacttgtttttcaaacatctcattctgttttgcccttattacttctctgtagtataggaaggaccaatgttttcattctcagtttactgataacaataatagcaacatgtatatagcagttacctatgaaccaggcactgttctatgtccagtgtcacaaagtaagtaacaaaatcaagatgtgagcctaagaaatctggctgcaaagtttgtgttgttaatcatgcatactcctcatgtaataaagaacctgagacctgaagagcttgggagacttgccatgatccttcggtggattcttactcctacaccagggcattctatacaccaccatttgaaagccatagttgcaagcactatgtgcctgaatgtttctaaatttttggttttggttcagaagagcttacaacctgggtctatggtgttacttggaagtctggaaggatagaaatgggggacatctcactctgtagaccacatgatctgaacctcaaagccccagcatcttccaacctctcctttcttatcttagcagtatggtgtcagaagctcaaaaactttgtacagaaaaaagaagctagttattggctaaaagtacatatcccttagtttttgtgttgtttaaaaattttcgccttgcttagaataagacattgccagttaagcatgagttcattgcagtgactttggttttctctcctggggctctcactttggctgacaccaggcagaatcactgatgatggcagctttctgagacaggcccttgttcagaatcgtgcagaactgacttctattgaccttaagaggatagtccttacaggtgagagatacagcttctttccttggagttaaccatggtcattatcttcatgtctgagtctgaacctttcgtgtggggtagataatttgcatttatctggaacaaatggctttctgaagtatcagctgatctaatcttttgaagtcatttccctctgcagagcacccaagggcatgtatatgagtgatttgtgagtcttcctgatgcttttttggggtaaaggacattccagatggtgtgaggcggcagcaattgcttttggatcttttcctggaattatggcaccaacctggttaaatgagaatcaggcagcctttctctttgtccaggccacaggggcatatttcctttgttctatgataagtgtggatcaacaattttctctaatgcttttacagcagtaggtgtcaaggagtaccaatctactgtgcgctcatcactgggagcccaagatgtaagttrtgaaaagggagtttaagtcccagacagttcagccaaaaccagcccctacctaggttcatgcattaaaccccattgcaagggtttttagtccccattttgtctcagagtctaatcggctaagaatttggaaacatactgctaaagtgagcattgaggagggcacttcgtaggcacactataagggcttctgattggccatcaaagagaagggaaatctgctgactcctactaatgagaattttctgcagtctcatatgttaaaccttaactaattatccctaagaagagctgctccccaaactcattaactaattaaacatttccagatagagagttacccatgctgcattatattgctgaagtcactggtgttcttccccaggtttatagtgatttcttaacaaaacccaaggatgcct

SEQ ID NO: 5234 - DNA, 2099 bp, Homo sapiens
cagtccttctgcttcagagtccagtagtcctagaccaaattagcttgaaatttaaaaagcgcatctgaagaaaaagtaaaattatgattatgagcaggattggatgtctgaacccagaaacaaccaaatgattcacatttattggaaatatactatcatattttattgaacttaagatacaattaattataaaacatatttttatgtatcattcaaaaattataaaatgccaattaattatgtcccctcattgtcaggtatatacaacttcagagatgttaaaatgtcaaaaaatctgtgtcttagaatcaatgaaataccatagtagtaggatgtgttataaaaaagaaacataataggaaatttgcttatgtagtgatttcttcactcttttgaacttgtttttcaaacatctcattctgttttgcccttattacttctctgtagtataggaaggaccaatgttttcattctcagtttactgataacaataatagcaacatgtatatagcagttacctatgaaccaggcactgttctatgtccagtgtcacaaagtaagtaacaaaatcaagatgtgagcctaagaaatctggctgcaaagtttgtgttgttaatcatgcatactcctcatgtaataaagaacctgagacctgaagagcttgggagacttgccatgatccttcggtggattcttactcctacaccagggcattctatacaccaccatttgaaagccatagttgcaagcactatgtgcctgaatgtttctaaatttttggttttggttcagaagagcttacaacctgggtctatggtgttacttggaagtctggaaggatagaaatgggggacatctcactctgtagaccacatgatctgaacctcaaagccccagcatcttccaacctctcctttcttatcttagcagtatggtgtcagaagctcaaaaactttgtacagaaaaaagaagctagttattggctaaaagtacatatcccttagtttttgtgttgtttaaaaattttcgccttgcttagaataagacattgccagttaagcatgagttcattgcagtgactttggttttctctcctggggctctcactttggctgacaccaggcagaatcactgatgatggcagctttctgagacaggcccttgttcagaatcgtgcagaactgacttctattgaccttaagaggatagtccttacaggtgagagatacagcttctttccttggagttaaccatggtcattatcttcatgtctgagtctgaacctttcgtgtggggtagataatttgcatttatctggaacaaatggctttctgaagtatcagctgatctaatcttttgaagtcatttccctctgcagagcacccaagggcatgtatatgagtgatttgtgagtcttcctgatgcttttttggggtaaaggacattccagatggtgtgaggcggcagcaattgcttttggatcttttcctggaattatggcaccaacctggttaaatgagaatcaggcagcctttctctttgtccaggccacaggggcatatttcctttgttctatgataagtgtggatcaacaattttctctaatgcttttacagcagtaggtgtcaaggagtaccaatctactgtgcgctcatcactgggagcccaagatgtaagttgtgaaaagggagtttaagtcccagacagttcagccaaaaccagcccctacctaggttcatgcattaaaccccattgcaagggtttttagtccccattttgtctcagagtctaatcggctaagaatttggaaacatactgctaaagtgagcattgaggagggcacttcgtaggcacactataagggcttctgattggccatcaaagagaagggaaatctgctgactcctactaatgagaattttctgcagtctcatatgttaaaccttaactaattatccctaagaagagctgctccccaaactcattaactaattaaacatttccaratagagagttacccatgctgcattatattgctgaagtcactggtgttcttccccaggtttatagtgatttcttaacaaaacccaaggatgcct

SEQ ID NO: 5235 - DNA, 643 bp, Homo sapiens
catcttattcttgcttttgtaggtgtgctatttcttaaatctctttgaggctataccaagtttttaataagttctcttcttttcctgaattatctccatttatctggggtaagctgctctttttacatttccttttatcaagggaaattattatccttcactgaccrttcatatttacagaattcaagttttaattgatttctctgggcaactggtgtgggtttcctttattactgtgtatgtgggatggctattccctgtaagtatctcctctgaaatggaaatggaaggcttcctggaaagtctgcatataatagaagcatatcgatgagcaggaatgaaaatggttttactctgtgacactaactcacatactagcagacttagttctttctagacaatacattcagatgagtgttagtgggattttaatgaattatcttccagtaactgcagagggaactcacaggcaatttccagccccctggttctcaaactttagtttgaattagaactatctggaaggttatctggcgtggctaatacaaagtagccatatgtactccagagtgtttgactcagtatgtgtgggcatggtctaggaatttgccttttaataagttttcagctggttgcatgttat

SEQ ID NO: 5236 - DNA, 1348 bp, Homo sapiens
cagttctaaatggctggggaggcctcagaatcatggtagagtgtgaaaggcccttcttacacggcagtggcaagagaaaaatgaggaagattcaaaagcggaaacctctgatgaatccatcagatctcgtgacacttattcactactgtgagagcagtatgggggaaactgcccccaggattcaaattatttcccaccgggtccctcctacaacacatgggaattataggagtacaattcaagatgtgatttgggtggggacacagaaccaaaccttattaggggactactgcatgtgtgttggcaaacaaacatctacacacacatacacatatatttacacatatataaatacgtatgtgtgtatccatacatattcatatattttctgagtgtaaatatgtatctagacatgtatatatgtatacacgtatacatgtataaatatatgaatattatcagtatagaaaagaattatttttactaccatttccaccttgtttttaacgagcacctacttcatttaattaattttctaaaagaaaaaaatagactttttatttttttcagaataatcccccatatatatggactcataatagtgtgtttaaaaaaatactttagatgtgaaattttaaaaatgcacttaccagaaacttgtatttgtttcatagtttagtagttaatgctgtattctttagcctagttctttggttctcaactttggtgctytagtacaatccccttggaacattaaaaaatcctaatgcccaaactgacctgcagaacaattaaatgtgaatctctgggagtgggatccagggatcagtatttgttaaagctcttcaggtgatttcagtgtaccaccaagattgagaaccaaaatgcctgacgtggatgggatggaatataagtgatggtttgtgtgtaattaaggaaagaactcatagttgtaatttagtaaaattcactacaaggctgcaacattttgatggacacacacacacacgagcatacatacatactggcttgtatttagtgcaactaaaataatagctccatttcactaaaattccagcccattatgttgtgcaaaaatagcaattgagaagtaattttcagatactgctgcttcttccagatgcatcataaatacttgatatgttgatgttccttgtattttcaatcatcaatgctatagaagcattaagtagattttatttctctattaaagtgaattgtaaacaataaaatgactcccctaaaaatgtaaaggagtattaaataggattgatcagaattcaactatataagaagagttttattaagaatcagaatgcaaattaat

SEQ ID NO: 5237 - DNA, 1348 bp, Homo sapiens
cagttctaaatggctggggaggcctcagaatcatggtagagtgtgaaaggcccttcttacacggcagtggcaagagaaaaatgaggaagattcaaaagcggaaacctctgatgaatccatcagatctcgtgacacttattcactactgtgagagcagtatgggggaaactgcccccaggattcaaattatttcccaccgggtccctcctacaacacatgggaattataggagtacaattcaagatgtgatttgggtggggacacagaaccaaaccttattaggggactactgcatgtgtgttggcaaacaaacatctacacacacatacacatatatttacacatatataaatacgtatgtgtgtatccatacatattcatatattttctgagtgtaaatatgtatctagacatgtatatatgtatacacgtatacatgtataaatatatgaatattatcagtatagaaaagaattatttttactaccatttccaccttgtttttaacgagcacctacttcatttaattaattttctaaaagaaaaaaatagactttttatttttttcagaataatcccccatatatatggactcataatagtgtgtttaaaaaaatactttagatgtgaaattttaaaaatgcacttaccagaaacttgtatttgtttcatagtttagtagttaatgctgtattctttagcctagttctttggttctcaactttggtgctttagtacaatccccttggaacattaaaaaatcctaatgcccaaactgacctgcagaacaattaaatgtgaatctctgggagtgggatccagggatcagtatttgttaaagctcttcaggtgatttcagtgtaccaccaagattgagaaccaaaatgcctgacgtggatgggatggaatataagtgatggtttgtgtgtaattaaggaaagaactcatagttgtaatttagtaaaattcactacaaggctgcaacattttgatggacacacacacacacgagcatacatacatactggcttgtatttagtgcaactaaaataatagctccatttcactaaaattccagcccattatgttgtgcaaaaatagcaattgagaagtaattttcagatactgctgcttcttccagwtgcatcataaatacttgatatgttgatgttccttgtattttcaatcatcaatgctatagaagcattaagtagattttatttctctattaaagtgaattgtaaacaataaaatgactcccctaaaaatgtaaaggagtattaaataggattgatcagaattcaactatataagaagagttttattaagaatcagaatgcaaattaat

SEQ ID NO: 5238 - DNA, 738 bp, Homo sapiens
ggcaggtgggaaggtgtagatcagcaatatgtggtttgtgactgaacgtggaagttggattacacttcagggtgcatagatgcctgcccttgaccctttaccacatgagggtctttattagctcctcactaaggcattcctgttccccacctgctttcctgcccacctcacaagggtgatgggggcactattggttcagagtgggctgccactgcctgtggtatagtgtggaagacaaagaatggacatggattgaaaagacctggattcaactctgcctttgtgaccctttgacaagccacctcagttctccaggcctcatttcctctttagtaaaatgagaggattagactagatgagctctrtggacacttccaaatcaaatattctgatattgtgtctcctgctcccatcccctgtcctttgtcctcacgtgggctggaatgtgaggtacaaatgctgccagtcactggataaggactcttaaaagtcatctgctcactttcttccaccaggaagaattataataaaaattagcctgtttgcttaagttttatggatttgttttatagatcctagagattttcctaatgtaggtctctaactaaaatgcctccagttggatttaatgcccattttctcttgccctgttgattatatggctgtctggatgttcataggaaaacttgagacaaaatcacaattgcaataggatgaagaacatttcccaaaggaatg

SEQ ID NO: 5239 - DNA, 742 bp, Homo sapiens
aaaatcagactgcagatgtgacacatcccattcatgtacacaaattagattcaattcaagttaatgttttagtgcttacagtatgcccaccatatccccaagaaggttttgatgtaggaacatcaaataaatatataagatttaatacaatggaaaatgacaaggtcattagaaatacaagcaagatatgatggaaatatacagggagtagtaataaaatctgactgggagatatagaagtcctcactggggcatactggtatttaggatgtttagttcatgcctccccatagtggctgtggactctgcacctgtgtttatatgggattctggatctaattggtcagatccagaggtcttaggggaaatgacacaatggctgggtcattaaattttcctaggaatttagaattgagaactaaggatgctaggctgctgaatggtggctttgttgatggtaagatattaaggaggctgctgtagccatgtttgggttttgggagcagataagtgaagcaatgctgggatgagggagtcagaggttggggtggggtgggggaagacaggagagagatggggagagagaggagaatggctgtgaaggaagagataggaagtgaaaacargggaagagaagactgaaacagacacagagagatgcaggtattgttgagaaatctttgcttgtaagttcccaaattcactttgagcttgttaacctgaaaagaagcctttattatga

SEQ ID NO: 5240 - DNA, 827 bp, Homo sapiens
agctccagcaacagagagaacacaaatggtcctttctttcwtgttgcttacaaacagttttggttctacttcaccagcatagcctgttttactctatccaggtcatagagccagcaatgagttaaaggaacaatttctagaaaccagaaaatctggcatgacaaacacgtgcctttctttcatgtaatcgggtgtttatctagagaataaatggtttaacacattttaatactgtgctttttcctataaagaatatctgttgattatggctgtttggtgttgaccaacttaaagaagccagaattagattttcttccagtgtaaaattttagaaacaacctggagacagttgaagaaaaaggagtggaaacaaattgagtgtgttcatcttggggaacttacaggtttcccagattagaatcctagtttgaggacttaagtcagcaccagtcagggccagccacatatttgattttgctttctcagttcctagtgcagatctgtgacacttataagtggccataacgttttttaaaagactattcctggaagtcctcacaagagcagtcaggtaagaaataaataaaaggcatccaaattggaaaagaggaagtcaaattatccctgttcactgatgatttgatctcgtatctagaaaaacctaaagataccaccaaaaaaaaaaacctccctatatttgataaatgaattcagtaaagtaccacgataggaaatcaacattcagacatcaataaaattttatatgtatatatatctagctgaggaccaattcaaaaagtcaatcccatttataatagctataaaaa

SEQ ID NO: 5241 - DNA, 827 bp, Homo sapiens
agctccagcaacagagagaacacaaatggtcctttctttcttgttgcttacaaacagttttggttctacttcaccagcatagcctgttttactctatccaggtcatagagccagcaatgagttaaaggaacaatttctagaaaccagaaaatctggcatgacaamcacgtgcctttctttcatgtaatcgggtgtttatctagagaataaatggtttaacacattttaatactgtgctttttcctataaagaatatctgttgattatggctgtttggtgttgaccaacttaaagaagccagaattagattttcttccagtgtaaaattttagaaacaacctggagacagttgaagaaaaaggagtggaaacaaattgagtgtgttcatcttggggaacttacaggtttcccagattagaatcctagtttgaggacttaagtcagcaccagtcagggccagccacatatttgattttgctttctcagttcctagtgcagatctgtgacacttataagtggccataacgttttttaaaagactattcctggaagtcctcacaagagcagtcaggtaagaaataaataaaaggcatccaaattggaaaagaggaagtcaaattatccctgttcactgatgatttgatctcgtatctagaaaaacctaaagataccaccaaaaaaaaaaacctccctatatttgataaatgaattcagtaaagtaccacgataggaaatcaacattcagacatcaataaaattttatatgtatatatatctagctgaggaccaattcaaaaagtcaatcccatttataatagctataaaaa

SEQ ID NO: 5242 - DNA, 793 bp, Homo sapiens
cagaatagataagtttggaagtcatgaggatatatacatacatagtaagaaatgccatgatagtacacatagaggagaacgacatccaaggactgggtctaggatagacactccaccagaaggaaagagaaaaagcacagtatcaagtttgacttygcaacagtgcaattattttataataacaccattgttttagagtacaattatactggctcaattaaacatctcaaaaagattctgttgctgtagtttgttttcataccccatcatttgttgaaattatggcaagaaacctattccaacatccagggcctcaggatgtgactgtatttgagataagggctttaaagaggtaactaagataaattgaactcatgagattgggcctcaaaccagtaggaatggcacccttatcagaagagattaggacaccaacacagagaagaaagaccacatgaagagatgagaaaaaaacagccatctgcaagccaaggagagagctcttagaagaaataaccatgctgacaccttgatctgggacttcgagcctccaggagtgagaaaaatacatttctgttgtacaagccacacaataagtagtagtggcctgagattttctagacttcttaaggggcttacttccagcttcaaatttctattattattactactatttgtaatattaagacaaatgtagacaatgaaattaagccaactgcttaagcgattatgtgttagatataattgttccttaatattaacaatttacatatacactcactaaaaatgaaaa

SEQ ID NO: 5243 - DNA, 1161 bp, Homo sapiens
tattattaatattttcttggaataaaccagactgattgatctcaaaaaacagcattcttcttttagatataaacctgttcctctttgcttggctgggagaagatcccaggctctttgattttgttggaatacagtggccatggagtccagacgttgttgaagtctattgaggccctctgctgcctgttggggacacactgagattttctgagatagtttgtactggattcccaaggatccaccttatggtgacatttgtgctgcaaaagtattctgctttaaaatggtgaaagcagcaaaagttttaagtcttttctatttttcgcaaataagaaaaagttttgtgcagctgagttggcagcagtcattgggtccrtttatggatggtaaagttgaatggtggtcaaagttagagactggaaggcttcagtaaacgcgctgaagttgtctgagagccatcagagctgttgcttacattggattagatcatttactgggaagagaagaagcactctgatggtcctctctccatttgagactttctgtaagcggatcaaattctctggccctgcatggtgtgaagctccactgtgagtaactgcagctggactggtctctattgtaactggcaaaggctgatagaggagcataaggaggagatgaaacaagcttagattctacagaagactctgatagtgtggggacgctggggattctaaagcaggtgtaggcctctgagggcccctatctggagctggtattaggctgtggggtctggggtcacttgcccataaaacaaatgatcttctaatggatctgaggggctttgtggcttactaggctttagcccacaggtgctgcatggagctgggttttgttgtcgggccagaaagtcttgcacataggatacttcagaccattttccctgattactacagaaaagatctagctgtatgatggtgttaaatttcacagtctcattctccagccatgttttgtcagctaatctgtatgcaggctaaatagttttacaaaagaagataattgtttttttgcttcatttagccaaaagctgtttcaatttttaaatatacatcccaggtgtgtttcagtgacagtagaggaagtgattcccatggtgccgagagaatcctgcaaacg

SEQ ID NO: 5244 - DNA, 1161 bp, Homo sapiens
tattattaatattttcttggaataaaccagactgattgatctcaaaaaacagcattcttcttttagatataaacctgttcctctttgcttggctgggagaagatcccaggctctttgattttgttggaatacagtggccatggagtccagacgttgttgaagtctattgaggccctctgctgcctgttggggacacactgagattttctgagatagtttgtactggattcccaaggatccaccttatggtgacatttgtgctgcaaaagtattctgctttaaaatggtgaaagcagcaaaagttttaagtcttttctatttttcgcaaataagaaaaagttttgtgcagctgagttggcagcagtcattgggtccatttatggatggtaaagttgaatggtggtcaaagttagagactggaaggcttsagtaaacgcgctgaagttgtctgagagccatcagagctgttgcttacattggattagatcatttactgggaagagaagaagcactctgatggtcctctctccatttgagactttctgtaagcggatcaaattctctggccctgcatggtgtgaagctccactgtgagtaactgcagctggactggtctctattgtaactggcaaaggctgatagaggagcataaggaggagatgaaacaagcttagattctacagaagactctgatagtgtggggacgctggggattctaaagcaggtgtaggcctctgagggcccctatctggagctggtattaggctgtggggtctggggtcacttgcccataaaacaaatgatcttctaatggatctgaggggctttgtggcttactaggctttagcccacaggtgctgcatggagctgggttttgttgtcgggccagaaagtcttgcacataggatacttcagaccattttccctgattactacagaaaagatctagctgtatgatggtgttaaatttcacagtctcattctccagccatgttttgtcagctaatctgtatgcaggctaaatagttttacaaaagaagataattgtttttttgcttcatttagccaaaagctgtttcaatttttaaatatacatcccaggtgtgtttcagtgacagtagaggaagtgattcccatggtgccgagagaatcctgcaaacg

SEQ ID NO: 5245 - DNA, 1161 bp, Homo sapiens
tattattaatattttcttggaataaaccagactgattgatctcaaaaaacagcattcttcttttagatataaacctgttcctctttgcttggctgggagaagatcccaggctctttgattttgttggaatacagtggccatggagtccagacgttgttgaagtctattgaggccctctgctgcctgttggggacacactgagattttctgagatagtttgtactggattcccaaggatccaccttatggtgacatttgtgctgcaaaagtattctgctttaaaatggtgaaagcagcaaaagttttaagtcttttctatttttcgcaaataagaaaaagttttgtgcagctgagttggcagcagtcattgggtccatttatggatggtaaagttgaatggtggtcaaagttagagactggaaggcttcagtaaacgcgctgaagttgtctgagagccatcagagctgttgcttacattggattagatcatttaytgggaagagaagaagcactctgatggtcctctctccatttgagactttctgtaagcggatcaaattctctggccctgcatggtgtgaagctccactgtgagtaactgcagctggactggtctctattgtaactggcaaaggctgatagaggagcataaggaggagatgaaacaagcttagattctacagaagactctgatagtgtggggacgctggggattctaaagcaggtgtaggcctctgagggcccctatctggagctggtattaggctgtggggtctggggtcacttgcccataaaacaaatgatcttctaatggatctgaggggctttgtggcttactaggctttagcccacaggtgctgcatggagctgggttttgttgtcgggccagaaagtcttgcacataggatacttcagaccattttccctgattactacagaaaagatctagctgtatgatggtgttaaatttcacagtctcattctccagccatgttttgtcagctaatctgtatgcaggctaaatagttttacaaaagaagataattgtttttttgcttcatttagccaaaagctgtttcaatttttaaatatacatcccaggtgtgtttcagtgacagtagaggaagtgattcccatggtgccgagagaatcctgcaaacg

SEQ ID NO: 5246 - DNA, 1161 bp, Homo sapiens
tattattaatattttcttggaataaaccagactgattgatctcaaaaaacagcattcttcttttagatataaacctgttcctctttgcttggctgggagaagatcccaggctctttgattttgttggaatacagtggccatggagtccagacgttgttgaagtctattgaggccctctgctgcctgttggggacacactgagattttctgagatagtttgtactggattcccaaggatccaccttatggtgacatttgtgctgcaaaagtattctgctttaaaatggtgaaagcagcaaaagttttaagtcttttctatttttcgcaaataagaaaaagttttgtgcagctgagttggcagcagtcattgggtccatttatggatggtaaagttgaatggtggtcaaagttagagactggaaggcttcagtaaacgcgctgaagttgtctgagagccatcagagctgttgcttacattggattagatcatttactgggaagagaasaagcactctgatggtcctctctccatttgagactttctgtaagcggatcaaattctctggccctgcatggtgtgaagctccactgtgagtaactgcagctggactggtctctattgtaactggcaaaggctgatagaggagcataaggaggagatgaaacaagcttagattctacagaagactctgatagtgtggggacgctggggattctaaagcaggtgtaggcctctgagggcccctatctggagctggtattaggctgtggggtctggggtcacttgcccataaaacaaatgatcttctaatggatctgaggggctttgtggcttactaggctttagcccacaggtgctgcatggagctgggttttgttgtcgggccagaaagtcttgcacataggatacttcagaccattttccctgattactacagaaaagatctagctgtatgatggtgttaaatttcacagtctcattctccagccatgttttgtcagctaatctgtatgcaggctaaatagttttacaaaagaagataattgtttttttgcttcatttagccaaaagctgtttcaatttttaaatatacatcccaggtgtgtttcagtgacagtagaggaagtgattcccatggtgccgagagaatcctgcaaacg

SEQ ID NO: 5247 - DNA, 1161 bp, Homo sapiens
tattattaatattttcttggaataaaccagactgattgatctcaaaaaacagcattcttcttttagatataaacctgttcctctttgcttggctgggagaagatcccaggctctttgattttgttggaatacagtggccatggagtccagacgttgttgaagtctattgaggccctctgctgcctgttggggacacactgagattttctgagatagtttgtactggattcccaaggatccaccttatggtgacatttgtgctgcaaaagtattctgctttaaaatggtgaaagcagcaaaagttttaagtcttttctatttttcgcaaataagaaaaagttttgtgcagctgagttggcagcagtcattgggtccatttatggatggtaaagttgaatggtggtcaaagttagagactggaaggcttcagtaaacgcgctgaagttgtctgagagccatcagagctgttgcttacattggattagatcatttactgggaagagaagaagcactctgatggtcctctctccatttgagactttctgtaagcggatcaaattctctggccctgcatggtgtgaagctccactgtgagtaactgcagctggactggtctctattgtaactggcaaaggctgatagaggagcataaggaggagatgaaacaagcttagattctacagaagactctgatagtgtggggacgctggggattctaaagcaggtgtaggcctctgagggcccctatctggagctggtattaggctgtggggtctggggtcmcttgcccataaaacaaatgatcttctaatggatctgaggggctttgtggcttactaggctttagcccacaggtgctgcatggagctgggttttgttgtcgggccagaaagtcttgcacataggatacttcagaccattttccctgattactacagaaaagatctagctgtatgatggtgttaaatttcacagtctcattctccagccatgttttgtcagctaatctgtatgcaggctaaatagttttacaaaagaagataattgtttttttgcttcatttagccaaaagctgtttcaatttttaaatatacatcccaggtgtgtttcagtgacagtagaggaagtgattcccatggtgccgagagaatcctgcaaacg

SEQ ID NO: 5248 - DNA, 345 bp, Homo sapiens
ctcaggagcagatagtgttccagctttgttggagcgacatttaagatgtggagcacttggggtcgtttgaaacccgctatcttcagtagggacttttacttctagagaacatgtgcattttgattttatctgtcctcaaactgaacttttgctcattttaatagtaaaaacacattcctaggtggagacttaagatgctaatgagacatgcaatgtatgcacaaatawgtacagttagtgcacatgtgcacccagaagaccactcaaaacatgcttacactaacacttctttccaccttcttatgaataatcgtgcaaaacccccagaaggagggtttctccagt

SEQ ID NO: 5249 - DNA, 830 bp, Homo sapiens
ggacctgaggaaaactctcatcctggacaactcgcctgcttcttacgtcttccacacagagaatgcagtgcctgtgcagtcctggtttgataacattccagacagcagctgctgcacctgatatcagtctttgaggacatgagtggagcatagggcatctatactagccttgggcagcagtgggcccttagcctttcctgcttcccagcaatggccatcacagtaggggattttcccacactgtgcctttatgatcagcctgaaagaatgaagcctggaacacctacccacatgggcctggaaacagtgagaagtgattgaaaaaaagctttaggacagcttagattcccagtgggtgaatgccagaccaaggatacccagagctacctgccatcaagtttttgggttcccaagatgtgggtgtgagagaaagaaagagagcatgtgtgttttgtgatgaactgtgggcccaatatatagtgtttcagtaggggagaagctgaaggacaragactcttcccaagttagctttgtctcctctcctgtcaccctatgagaccctgagttccatagggatgaagactgttgaaggctccattgcaaacctggtctttcttcagtgctgcaaggcctatgccaaggagaaaggaaaagtatgcctttgggtgttccagacacatatctttctgaaatatttctccagccagttgttgcagacaaaagacgatatttctgggaagatggggacttatgtccagaccagtacccaaaccatcaggtcttgtggcctaaaggctatgcttacttaagtccagccaagtgcctgggat

SEQ ID NO: 5250 - DNA, 830 bp, Homo sapiens
ggacctgaggaaaactctcatcctggacaactcgcctgcttcttacgtcttccacacagagaatgcagtgcctgtgcagtcctggtttgataacattccagacagcagctgctgcacctgatatcagtctttgaggacatgagtggagcatagggcatctatactagccttgggcagcagtgggcccttagcctttcctgcttcccagcaatggccatcacagtaggggattttcccacactgtgcctttatgatcagcctgaaagaatgaagcctggaacacctacccacatgggcctggaaacagtgagaagtgattgaaaaaaagctttaggacagcttagattcccagtgggtgaatgccagaccaaggatacccagagctacctgccatcaagtttttgggttcccaagatgtgggtgtgagagaaagaaagagagcatgtgtgttttgtgatgaactgtgggcccaatatatagtgtttcagtaggggagaagctgaaggacagagactcttcccaagttagctttgtctcctctcctgtcaccctatgagaccctgagttccatagggatgaagactgttgaaggctccattgcaaacctggtctttcttcagtgctgcaaggcctatgccaaggagaaaggaaaagtatgyctttgggtgttccagacacatatctttctgaaatatttctccagccagttgttgcagacaaaagacgatatttctgggaagatggggacttatgtccagaccagtacccaaaccatcaggtcttgtggcctaaaggctatgcttacttaagtccagccaagtgcctgggat

SEQ ID NO: 5251 - DNA, 830 bp, Homo sapiens
ggacctgaggaaaactctcatcctggacaactcgcctgcttcttacgtcttccacacagagaatgcagtgcctgtgcagtcctggtttgataacattccagacagcagctgctgcacctgatatcagtctttgaggacatgagtggagcatagggcatctatactagccttgggcagcagtgggcccttagcctttcctgcttcccagcaatggccatcacagtaggggattttcccacactgtgcctttatgatcagcctgaaagaatgaagcctggaacacctacccacatgggcctggaaacagtgagaagtgattgaaaaaaagctttaggacagcttagattcccagtgggtgaatgccagaccaaggatacccagagctacctgccatcaagtttttgggttcccaagatgtgggtgtgagagaaagaaagagagcatgtgtgttttgtgatgaactgtgggcccaatatatagtgtttcagtaggggagaagctgaaggacagagactcttcccaagttagctttgtctcctctcctgtcaccctatgagaccctgagttccatagggatgaagactgttgaaggctccattgcaaacctggtctttcttcagtgctgcaaggcctatgccaaggagaaaggaaaagtatgcctttgggtgttccagacacayatctttctgaaatatttctccagccagttgttgcagacaaaagacgatatttctgggaagatggggacttatgtccagaccagtacccaaaccatcaggtcttgtggcctaaaggctatgcttacttaagtccagccaagtgcctgggat

SEQ ID NO: 5252 - DNA, 830 bp, Homo sapiens
ggacctgaggaaaactctcatcctggacaactcgcctgcttcttacgtcttccacacagagaatgcagtgcctgtgcagtcctggtttgataacattccagacagcagctgctgcacctgatatcagtctttgaggacatgagtggagcatagggcatctatactagccttgggcagcagtgggcccttagcctttcctgcttcccagcaatggccatcacagtaggggattttcccacactgtgcctttatgatcagcctgaaagaatgaagcctggaacacctacccacatgggcctggaaacagtgagaagtgattgaaaaaaagctttaggacagcttagattcccagtgggtgaatgccagaccaaggatacccagagctacctgccatcaagtttttgggttcccaagatgtgggtgtgagagaaagaaagagagcatgtgtgttttgtgatgaactgtgggcccaatatatagtgtttcagtaggggagaagctgaaggacagagactcttcccaagttagctttgtctcctctcctgtcaccctatgagaccctgagttccatagggatgaagactgttgaaggctccattgcaaacctggtctttcttcagtgctgcaaggcctatgccaaggagaaaggaaaagtatgcctttgggtgttccagacacatatctttctgaaatatttctccagccagttgttgcagacaaaagaygatatttctgggaagatggggacttatgtccagaccagtacccaaaccatcaggtcttgtggcctaaaggctatgcttacttaagtccagccaagtgcctgggat

SEQ ID NO: 5253 - DNA, 830 bp, Homo sapiens
ggacctgaggaaaactctcatcctggacaactcgcctgcttcttacgtcttccacacagagaatgcagtgcctgtgcagtcctggtttgataacattccagacagcagctgctgcacctgatatcagtctttgaggacatgagtggagcatagggcatctatactagccttgggcagcagtgggcccttagcctttcctgcttcccagcaatggccatcacagtaggggattttcccacactgtgcctttatgatcagcctgaaagaatgaagcctggaacacctacccacatgggcctggaaacagtgagaagtgattgaaaaaaagctttaggacagcttagattcccagtgggtgaatgccagaccaaggatacccagagctacctgccatcaagtttttgggttcccaagatgtgggtgtgagagaaagaaagagagcatgtgtgttttgtgatgaactgtgggcccaatatatagtgtttcagtaggggagaagctgaaggacagagactcttcccaagttagctttgtctcctctcctgtcaccctatgagaccctgagttccatagggatgaagactgttgaaggctccattgcaaacctggtctttcttcagtgctgcaaggcctatgccaaggagaaaggaaaagtatgcctttgggtgttccagacacatatctttctgaaatatttctccagccagttgttgcagacaaaagacgatatttctgggaagatggggacttatgtccagaccagtacccaaaccatcaggtcttgtggccyaaaggctatgcttacttaagtccagccaagtgcctgggat

SEQ ID NO: 5254 - DNA, 760 bp, Homo sapiens
aagttaattaataaaatattgagatacatgcttttagttaaataaaacttaaatattctaatatttgataagttcccatatattttaaagtaatattgtttgctatattaagttgcaatttgagggtcttcattatgactctgataaaaattttgctaatttagaattacccccaaatctgaggtctcctgctaaatattacttattaatgaaaatgcaataaagatcacatttaatagttcacatgaggaataaaagaactcagagctgtaggttggtagtaactttaactgaatatattcgctatgagccgaaagctcataaagtgaaatgagaaaccttctaactagtttttattttataagagtgaaatatttttaaataaatgcactggaaactcattctatctcatttttcattctgagtcttgattttttagacatttgaaaaaaatctgttctttaaatttattctagatatatccctcatttgccaacttaaaaattggagacaaatgtgacaatttattttcttgttgcttaatcagcaaggtacatcaacccatcaaaccagcaaagatgtggcracagtattcaagattaataatctttaaaatagattattattcttttcttttgggaagttagcttgcttaatatattattaagcttactgttaacaactgtttcaacccttactccaagctgagtcctatagcaactttctgccatgaatatcatggccaaaatgtcatcccgta

SEQ ID NO: 5255 - DNA, 796 bp, Homo sapiens
atttctgtacttcctactctttctttatctatcttcctaatcctcaccaggaccacacagtttcaactatgataattttacaacatattttaatgtttagtagagcaaatttttttatttatttcttattcttttttaaaaaaatcatgggcaattctcacacttacgtttccaaactttaaaataattccrtagttaggagttggaattgcatccatacaataaatcaactcatgaagggctgttacttgtcacctgtttccccaacttcctgcactttccatcaaaccctgcactctaactagacttagccagttgcttttccaccagcacacaccagggcacgctcctcactgtgccctcactccccaggctggtccactaggaaattccacttgtcctgttagctcaaagctccctttctctgtgaagccctttctgatacctctggacagaggtaggtgcttctcccaatttcttttgtccattcctatgttggaacaattatcttgttattttacatttgtttgtttacaagtgtgacttctcactatgataaacaatctgaggacaagtactgtgtcctttccattttgaatttccagaacctaccaatagcactttggctcaacaaaaatgtattgaatcaaaaagcataactcaagtcacactggaaaagttagctacaaccttgaatgtaggtatctgcaggctttgcctaggacagagctgtactgtgttcatttaatctggcagtgatgttttaactgaattggggtgtggaggtgataggaag

SEQ ID NO: 5256 - DNA, 609 bp, Homo sapiens
tcccaaagtgctaggattacaggcataagtactgtgcccggcccattggctatttgaaagattattattcatacgtttccatccagagaagcacccatttatccttgccactaaggtagcttcctacctgtgacaaaaaaccaccaaccatccaatgactcatggagccttacatggcaccacttgtcaaagactttttgaaggctgaagtctattacatgtatatatgcatgcaattgggcaaagaaactgtctttcccctgtgaagttaggtttgttcaaggatctcgttacctcgctctgttcagaggtgtacctggtaaaaattggtctctgtctcctttgagaggcaacgtggtgcagctgaacaaggatggagctcttggagttcagggtgtaattaggggatggagggccatctagatggagaagtgagaagaggccaccccaaaacagatccactcctgtcccaggagaagtccagaatgctattttcctacacggctctggggtgggttagtttcactgcttccatcatccaccagragaatgtgagtgggagagggaggaactggaggttgtagccatcttcttcttgcctccagagag

SEQ ID NO: 5257 - DNA, 698 bp, Homo sapiens
tagatactagaatatgggtaagaaaaagaaaccaagaaatgagttgatttggaacacctccataatttcttcagaagcatccttggaattagagcatctcttctggaaggggttaacagaagaagtcagtgraaggaacttaatctctacattttaccatttttatgtttcattttcatttttttctattcactgtttttgtttttatttttgtttgtttgacaaagcaaattccttttgaaattctagtttagtctaggaatggggggctttgggccttgtctatatctgggcagttttatttattatttttattttatttatttattttttttcgagacagagttttgctcttgttgcccaggctggagtgcaatggcgtgatctcggcttattgcaacttctgcctcccatgttcaagcgattctcctgcctcagcctcccaagtagctgagattacaggcgtgcaccaccatgcctggctaattttgtattttcttagtagggatggggtttcaccatgttggtcaggctggtctcgatctcctgacctcaagtgatccacctgcctcagcctcccaaagtgctgggattacaggcgtgagccaccgcactaggcctatctggacagttttaaaggagaagctgcagatctgaagggtctagttctagtcacagcagtgggaatcaaagtggca

SEQ ID NO: 5258 - DNA, 698 bp, Homo sapiens
tagatactagaatatgggtaagaaaaagaaaccaagaaatgagttgatttggaacacctccataatttcttcagaagcatccttggaattagagcatctcttctggaaggggttaacagaagaagtcagtggaaggaacttaatctctacattttaccatttttatgtttcattttcatttttttctattcactgtttttgtttttatttttgtttgtttgacaaagcaaattccttttgaaattctagtttagtctaggaatggggggctttgggccttgtctatatctgggcagttttatttattatttttattttatttatttattttttttcgagacagagttttgctcttgttgcccaggctggagtgcaatggcgtgatctcggcttattgcaacttctgcctcccatgttcaagcgattctcctgcctcagcctcccaagtagctgagattacaggcgtgcaccaccaygcctggctaattttgtattttcttagtagggatggggtttcaccatgttggtcaggctggtctcgatctcctgacctcaagtgatccacctgcctcagcctcccaaagtgctgggattacaggcgtgagccaccgcactaggcctatctggacagttttaaaggagaagctgcagatctgaagggtctagttctagtcacagcagtgggaatcaaagtggca

SEQ ID NO: 5259 - DNA, 698 bp, Homo sapiens
tagatactagaatatgggtaagaaaaagaaaccaagaaatgagttgatttggaacacctccataatttcttcagaagcatccttggaattagagcatctcttctggaaggggttaacagaagaagtcagtggaaggaacttaatctctacattttaccatttttatgtttcattttcatttttttctattcactgtttttgtttttatttttgtttgtttgacaaagcaaattccttttgaaattctagtttagtctaggaatggggggctttgggccttgtctatatctgggcagttttatttattatttttattttatttatttattttttttcgagacagagttttgctcttgttgcccaggctggagtgcaatggcgtgatctcggcttattgcaacttctgcctcccatgttcaagcgattctcctgcctcagcctcccaagtagctgagattacaggcgtgcaccaccatgcctggctaattttgtattttcttagtagggatgsggtttcaccatgttggtcaggctggtctcgatctcctgacctcaagtgatccacctgcctcagcctcccaaagtgctgggattacaggcgtgagccaccgcactaggcctatctggacagttttaaaggagaagctgcagatctgaagggtctagttctagtcacagcagtgggaatcaaagtggca

SEQ ID NO: 5260 - DNA, 667 bp, Homo sapiens
tcctgacaggaaacattgaaggcctgagtttttaaaaattaagttaaattagaaatcgaggcttttacacatatttcttatgtccctttcctcatagcccgggataaagcgttccataatccttattgagactttgttgtttctatgcttcttatgagtgtacggatttgcaagaacccaatctaagagagaagagttcctgggaagacataygcaaatccatgttcagggaggaaagaggaagtgggttttaaatttaccagaggtgtttcctgcttaaaagaaggtggtaatgcttttctattcatcatgggtttccttccctttcccttccatcctctgctgagccaatgcaggagtcagggggagaagatattttctatctagaaggtatttcccatctagaaatgacccaacttggaggtctccaatgcactcataaagcaagtgttcattcagaaactgacatcctgcgtatacacgggcacccacaacgtcaatgattttacttaaaatttccacgttcatcacaccacgttcaaaacacactctgttttgacttagtaaccaaaagctgaaagggtccttcctttcatgtatactaatgatctttggtgtgatcaggagcacaaacagaacgtgtcagccgggactctaagcccttcga

SEQ ID NO: 5261 - DNA, 667 bp, Homo sapiens
tcctgacaggaaacattgaaggcctgagtttttaaaaattaagttaaattagaaatcgaggcttttacacatatttcttatgtccctttcctcatagcccgggataaagcgttccataatccttattgagactttgttgtttctatgcttcttatgagtgtacggatttgcaagaacccaatctaagagagaagagttcctgggaagacatatgcaaatccatgttcagggaggaaagaggaagtgggttttaaatttaccagaggtgtttcctgcttaaaagaaggtggtaatgcttttctattcatcatgggtttccttccctttcccttccatcctctgctgagccaatgcaggagtcagggggagaagatattttctatctagaaggtatttcccatctagaaatgacccaacttggaggtctccaatgcactcataaagcaagtgttcattcagaaactgacatcctgcgtatacacgggcacccacaacgtcaatgattttacttaaaatttccacgttcatcacaccaygttcaaaacacactctgttttgacttagtaaccaaaagctgaaagggtccttcctttcatgtatactaatgatctttggtgtgatcaggagcacaaacagaacgtgtcagccgggactctaagcccttcga

SEQ ID NO: 5262 - DNA, 1105 bp, Homo sapiens
gctagtgatggaattcctgagatcattgatgtaattgattttacttttttctttttcaaaatacagtgtaattgctcttcaaacacagcacctttagaatagtgttggtttctctgtgtatgattctctaagacattcttccrttttctttctctgtagcttttagtatataagaaataggtggccgggcgcggtggctcacgcctgtaatcccagctctttgggaggccgaggcgggcggatcacgaggtcaggagatcgagaccatcctggctaatacggtgaaaccccgtctctactaaaaatacaaaaaattagccgggtgaggtggcgggtgcctgtagtcccagctactccggaggctgaggcaggagaatggcgtgaacccgggaggcagagcttgcagtgagccgagatcgcgccaccgcactccagtctgggggacagagcgagactctgtctcaaaaaaaaaaaaaaaagaaataagtaattaaacactattttcatcagtttatggcagagatgattggactgtgcttcaagataatattatcaaatacctcaatccaaatacgttagaaactgcattttgattacataatttaagaaatagattggcatccatttatatatttatgatgaaggtgagtgaaacttagccatacagggttgtgcgaactcttctaggtggtgcacagtaggccacatttctcttcctgttagcatctcatacttttcataacatcgttgtttaataatgatgtattcactgaatgaaaaacgaatgaatacataattgcttatattgaaaaaataagtcaatctgtggttcacatggcctttgatctatatgcattttctaaatatataaatatatgcatttctaaatatatccattttaatccatacatttctgaatatatagttatattttacatacataatacttttttacatacaagggccttcttttttttttttttttaaactagtgaaagacacttaactttgtccaggagctggttccccttatgcctagtagaggctgtttaggttcaggtctccacactgaatctaaaattcattcttgggcttaggacatgca

SEQ ID NO: 5263 - DNA, 1105 bp, Homo sapiens
gctagtgatggaattcctgagatcattgatgtaattgattttacttttttctttttcaaaatacagtgtaattgctcttcaaacacagcacctttagaatagtgttggtttctctgtgtatgattctctaagacattcttccattttctttctctgtagcttttagtatataagaaataggtggccgggcgcggtggctcacgcctgtaatcccagctctttgggaggcsgaggcgggcggatcacgaggtcaggagatcgagaccatcctggctaatacggtgaaaccccgtctctactaaaaatacaaaaaattagccgggtgaggtggcgggtgcctgtagtcccagctactccggaggctgaggcaggagaatggcgtgaacccgggaggcagagcttgcagtgagccgagatcgcgccaccgcactccagtctgggggacagagcgagactctgtctcaaaaaaaaaaaaaaaagaaataagtaattaaacactattttcatcagtttatggcagagatgattggactgtgcttcaagataatattatcaaatacctcaatccaaatacgttagaaactgcattttgattacataatttaagaaatagattggcatccatttatatatttatgatgaaggtgagtgaaacttagccatacagggttgtgcgaactcttctaggtggtgcacagtaggccacatttctcttcctgttagcatctcatacttttcataacatcgttgtttaataatgatgtattcactgaatgaaaaacgaatgaatacataattgcttatattgaaaaaataagtcaatctgtggttcacatggcctttgatctatatgcattttctaaatatataaatatatgcatttctaaatatatccattttaatccatacatttctgaatatatagttatattttacatacataatacttttttacatacaagggccttcttttttttttttttttaaactagtgaaagacacttaactttgtccaggagctggttccccttatgcctagtagaggctgtttaggttcaggtctccacactgaatctaaaattcattcttgggcttaggacatgca

SEQ ID NO: 5264 - DNA, 1105 bp, Homo sapiens
gctagtgatggaattcctgagatcattgatgtaattgattttacttttttctttttcaaaatacagtgtaattgctcttcaaacacagcacctttagaatagtgttggtttctctgtgtatgattctctaagacattcttccattttctttctctgtagcttttagtatataagaaataggtggccgggcgcggtggctcacgcctgtaatcccagctctttgggaggccgaggcgggcgratcacgaggtcaggagatcgagaccatcctggctaatacggtgaaaccccgtctctactaaaaatacaaaaaattagccgggtgaggtggcgggtgcctgtagtcccagctactccggaggctgaggcaggagaatggcgtgaacccgggaggcagagcttgcagtgagccgagatcgcgccaccgcactccagtctgggggacagagcgagactctgtctcaaaaaaaaaaaaaaaagaaataagtaattaaacactattttcatcagtttatggcagagatgattggactgtgcttcaagataatattatcaaatacctcaatccaaatacgttagaaactgcattttgattacataatttaagaaatagattggcatccatttatatatttatgatgaaggtgagtgaaacttagccatacagggttgtgcgaactcttctaggtggtgcacagtaggccacatttctcttcctgttagcatctcatacttttcataacatcgttgtttaataatgatgtattcactgaatgaaaaacgaatgaatacataattgcttatattgaaaaaataagtcaatctgtggttcacatggcctttgatctatatgcattttctaaatatataaatatatgcatttctaaatatatccattttaatccatacatttctgaatatatagttatattttacatacataatacttttttacatacaagggccttcttttttttttttttttaaactagtgaaagacacttaactttgtccaggagctggttccccttatgcctagtagaggctgtttaggttcaggtctccacactgaatctaaaattcattcttgggcttaggacatgca

SEQ ID NO: 5265 - DNA, 1105 bp, Homo sapiens
gctagtgatggaattcctgagatcattgatgtaattgattttacttttttctttttcaaaatacagtgtaattgctcttcaaacacagcacctttagaatagtgttggtttctctgtgtatgattctctaagacattcttccattttctttctctgtagcttttagtatataagaaataggtggccgggcgcggtggctcacgcctgtaatcccagctctttgggaggccgaggcgggcggatcacgaggtcaggagatcragaccatcctggctaatacggtgaaaccccgtctctactaaaaatacaaaaaattagccgggtgaggtggcgggtgcctgtagtcccagctactccggaggctgaggcaggagaatggcgtgaacccgggaggcagagcttgcagtgagccgagatcgcgccaccgcactccagtctgggggacagagcgagactctgtctcaaaaaaaaaaaaaaaagaaataagtaattaaacactattttcatcagtttatggcagagatgattggactgtgcttcaagataatattatcaaatacctcaatccaaatacgttagaaactgcattttgattacataatttaagaaatagattggcatccatttatatatttatgatgaaggtgagtgaaacttagccatacagggttgtgcgaactcttctaggtggtgcacagtaggccacatttctcttcctgttagcatctcatacttttcataacatcgttgtttaataatgatgtattcactgaatgaaaaacgaatgaatacataattgcttatattgaaaaaataagtcaatctgtggttcacatggcctttgatctatatgcattttctaaatatataaatatatgcatttctaaatatatccattttaatccatacatttctgaatatatagttatattttacatacataatacttttttacatacaagggccttcttttttttttttttttaaactagtgaaagacacttaactttgtccaggagctggttccccttatgcctagtagaggctgtttaggttcaggtctccacactgaatctaaaattcattcttgggcttaggacatgca

SEQ ID NO: 5266 - DNA, 748 bp, Homo sapiens
tgagactgttcccttactctatactatcaggggatgagttggccagagattcccagtgcctttagagagctctgggatcactaaagaaggggcctgttgcaggcatgagacctccaacttgttgagtgctcaatagtcaatgacctggtgctttacataaatcatcttgcaaggtaaagatttggttgcccaaatgaaatgaccatcattgtaggtcaaracagttgaacactggcaatttcatgtggcttcaacaaatattatttacctccattttacagatgagcaaattgagttcagtggagttaacttatacccacatctaccttctacattcctagtgtgtgtcgggggcggtggggagtttcatactacctgtccattgtttagaaggaaaaaaaaatcttgtttaaagtcacacatgtggccgggtgcagtggctcacacttgtaatcacagcactttgggaggccaaggcgggcagatcacttgaggtcaagagttcgagacaagcctggccaacatggtgaaacttcgtctctactaaaaatacaaaaattagccacgtatggtggctcatgcctgtaatcccagctactcgggaggttgaggcaggagaaccacttgaacctgggaagtggaggttgtagtgagccaagattgcgccactgcactccagcctgggcaacagagtgagactccgtgtcaaaaaataaataaataaataaagttatacatgttatttgtg

SEQ ID NO: 5267 - DNA, 748 bp, Homo sapiens
tgagactgttcccttactctatactatcaggggatgagttggccagagattcccagtgcctttagagagctctgggatcactaaagaaggggcctgttgcaggcatgagacctccaacttgttgagtgctcaatagtcaatgacctggtgctttacataaatcatcttgcaaggtaaagatttggttgcccaaatgaaatgaccatcattgtaggtcaaaacagttgaacactggcaatttcatgtggcttcaacaaatattatttacctccattttacagatgagcaaattgagttcagtggagttaacttatacccacatctaccttctacattcctagtgtgtgtcgggggsggtggggagtttcatactacctgtccattgtttagaaggaaaaaaaaatcttgtttaaagtcacacatgtggccgggtgcagtggctcacacttgtaatcacagcactttgggaggccaaggcgggcagatcacttgaggtcaagagttcgagacaagcctggccaacatggtgaaacttcgtctctactaaaaatacaaaaattagccacgtatggtggctcatgcctgtaatcccagctactcgggaggttgaggcaggagaaccacttgaacctgggaagtggaggttgtagtgagccaagattgcgccactgcactccagcctgggcaacagagtgagactccgtgtcaaaaaataaataaataaataaagttatacatgttatttgtg

SEQ ID NO: 5268 - DNA, 1921 bp, Homo sapiens
ccgtctctgcaaaaaacagaaaatattagccaagcatggtggtgcgtgcctgtagtcctaactacttgggaggctgaggtgggaagatcgtttaagcccaggaggttaaggctgcagtgagctgtgattgtgccactgcactccagcctgggctactgagcgagactgtctcaaaaaaaaagaaaatggttttatataatttgttccgtattttgctttacaaatctatgcaagctgtcttagggctcacatggacttactcactgatcttgggtatttctatgcctctgtaagattcaatttccccatttataaaatggagctaaggccagggatggtggcttccacctataattccagcactttgggaggctgaggcagcggggatcacttgaggccgggagttcgagaccagcctggccaacacggcaaaaccctgtttctgctaaaaatayaaaaaattagccaggcatggtggtgtgcacctgtaacccagctacttgggaggctcaagcaagagaattgcttgaatccaggaggcggaggttgcagtgagccgagatggtgccactgcactccagcctgggcgatagagtgagactctgtctcaaaaagaaaaatggaactaatattagcacttacctggcacatagtgtgtgtactctctcactctcttttatacacacacacacacacacacacacacacacacacacacactcccttaatacagagaccaggtattaatcacagcataaactttttttttttttcttgagatggagtttcgctcttggggcccaggctggggtgcaatggcgtgatcttggctcactgcaacctcggcctcccaggttcaaacgattctcctgcctcggcctaccgagtagctgggactacaggcatgtgctcccacgcctagctaattttgtatttttagtagagacgaggttttgccatgttggtcaggctggtcttgaactcctgacctcaggtgatccgcctgcctcggcctcccaaagtgctgggattacaggcatgagccactgtgcccggccccatagcgtaaatctttcatgcaaaaaggaaggtgcatttctgcctccagagcacactgtcattttcattagagtacttaaggtttctgttttttgtttgtttgtttgttttttagagtcagggtctcttatgttgcctaggctgcagtgcagtggctattcacaggtgcaatcacagctcactgcagcctcaaactcctgggctcaagccatcctcccacctcagcctcttgagtagctgggactacaagcacacaccactgtgcctggcttattctgttttctgaagcttcctcttctagtgatttttaaattgagaacaatggtttttaaatgatttttttgagtcatgaactcctttgagaatattataaaagttatgagatctctctccagtaaaatgcacacacacatacagaatgttcccagagcctctgaagccccgccatgcatccctggctaagaatccttggtctatagaatatgttctacttatagtgccattcatcacaaaacaagttgcaccgtcatgacctgatgttgaaatgcacatttggaatctcacagtcacataacctcaagtgtttgctcaagcaacacagattcctcccatagcaatgtggcaaaaactttgtgtagtacaccagggcctccttctggactgtttatgattcctccatactcttgaacacgtacacaacaatctgacacgcgaaaggcgcagaagctggtcttaatctgagcaaatcaacagctttcagaagctgcagggaaatgaagcatcagagaaagtgaaaattgtccctaatgatagctcagaaaatagggctgattaggcaaactgcatatccctgggtttcagt

SEQ ID NO: 5269 - DNA, 1921 bp, Homo sapiens
ccgtctctgcaaaaaacagaaaatattagccaagcatggtggtgcgtgcctgtagtcctaactacttgggaggctgaggtgggaagatcgtttaagcccaggaggttaaggctgcagtgagctgtgattgtgccactgcactccagcctgggctactgagcgagactgtctcaaaaaaaaagaaaatggttttatataatttgttccgtattttgctttacaaatctatgcaagctgtcttagggctcacatggacttactcactgatcttgggtatttctatgcctctgtaagattcaatttccccatttataaaatggagctaaggccagggatggtggcttccacctataattccagcactttgggaggctgaggcagcggggatcacttgaggccgggagttcgagaccagcctggccaacacggcaaaaccctgtttctgctaaaaatacaaaaaattagccaggcatggtggtgtgcacctgtaacccagctacttgggaggctcaagcaagagaattgcttgaatccaggaggcggaggttgcagtgagccgagatggtgccactgcactccagcctgggcgatagagtgagactctgtctcaaaaagaaaaatggaactaatattagcacttacctggcacatagtgtgtgtactctctcactctcttttatacacacacacacacacacacacacacacacacacacacactcccttaatacagagaccaggtattaatcacagcataaactttttttttttttcttgagatggagtttcgctcttggggcccaggctggggtgcaatggcgtgatcttggctcactgcaacctcggcctcccaggttcaaacgattctcctgcctcggcctaccgagtagctgggactacaggcatgtgctcccacgcctagctaattttgtatttttagtagagacgaggttttgccatgttggtcaggctggtcttgaactcctgacctcaggtgatccgcctgcctcggcctcccaaagtgctgggattacaggcatgagccactgtgcccggccccatagcgtaaatctttcatgcaaaaaggaaggtgcatttctgcctccagagcacactgtcattttcattagagtacttaaggtttctgttttttgtttgtttgtttgttttttagagtcagggtctcttatgttgcctaggctgcagtgcagtggctattcacaggtgcaatcacagctcactgcagcctcaaactcctgggctcaagccatcctcccacctcagcctcttgagtagctgggactacaagcacacaccactgtgcctggcttattctgttttctgaagcttcctcttctagtgatttttaaattgagaacaatggtttttaaatgatttttttgagtcatgaactcctttgagaatattataaaagttatgagatctctctccagtaaaatgcacacacacatacagaatgttcccagagcctctgaagccccgccatgcatccctggctaagaatccttggtctatagaatatgttctacttatagtgcyattcatcacaaaacaagttgcaccgtcatgacctgatgttgaaatgcacatttggaatctcacagtcacataacctcaagtgtttgctcaagcaacacagattcctcccatagcaatgtggcaaaaactttgtgtagtacaccagggcctccttctggactgtttatgattcctccatactcttgaacacgtacacaacaatctgacacgcgaaaggcgcagaagctggtcttaatctgagcaaatcaacagctttcagaagctgcagggaaatgaagcatcagagaaagtgaaaattgtccctaatgatagctcagaaaatagggctgattaggcaaactgcatatccctgggtttcagt

SEQ ID NO: 5270 - DNA, 713 bp, Homo sapiens
  misc_feature (1)...(713): n = A,T,C or G
tagtggcctaaaacaaatgttctgttattccagggcttccatcacctgcgcccagcttcaccttccagctttaccttctgctcctactagctgtcccctccatggttacccactggccgctctcctcctgccaccaagcctcacagggttactgattgcatctcattctcacctactttttgggaggctgttcttctatttgaaatgctctttcctctgctcttcctagcaaccttaccttcgaggtgtagttccaacatcttgtttcctgacttggacttttgtgttccacacactctgctctcagtgtataggatatcagtggtcacrgtccctctttgtgggtctacatctctgtggactctgagcttcttcagaatgggtcgtgctctcctttgacctctcagtatcctgtatttagcagccacctaatggaagtctgctgagtgaaggatggagaagaaagagagtgccgctctccctggcctcagggggccccgctccctatgttaaccagacccttcccctgtagagtggtgaggagtctcctcccgagaagtcccaggtgctgttcctgggcacctgctggagaaaacactttgtcccaccccannnnnnnnnnnnnnnnnnnnnnnnnnnnnnnnnnnnnnnnnnnnnnnnnnnnnnnnnnnnnnnnnnnnnnnnnnnnnnnnnnnnnnnnnnnnnnnnnnnng

SEQ ID NO: 5271 - DNA, 805 bp, Homo sapiens
caaaaattagctgggcgtggtggtgcacgcctgttatcccagctactcaggaggctgaggcaggagaatcacttgaacccgggaggcggaagttgcagtgagctgagattatgccactgcactccagcctgggcaacagagcgagactctgtctcaataataataataataataattcatgaaccccaggggaaaaagaaaaaaactttaaaagaggaaaacaaggatctaatgggcctcagaggctcccacacaattggcaatggctggtttgccctttggctgctggagatgcaggaagatgggggaggaaggaaggaggaaaaagagaatgtatttttttttcaaaaaagaagcacacttttaaaagctagaagagcctgtatcaatatgaccttgtccagaatttataaaagagctttggtatataaatttgatccctgaaaattattggatgaggaaagtgcagttatgattaatctaatttttcagttaaggagaaatacatcttcactagtttggggtttgctggcagcccaagccctgaccctccacagctctgtcccagaggctattcttcaccctgtggacactgctcctggttcccacctgtgttctatcacgggatcagttagggcttctcgagagaagagcaggagatggaggtgggaatcttggtctagagttctctagatttcagcaaaaatctcaactgagatccccaaggctgaaaaaagaccccaggccctcagaaaccattatccttccattcaagacacctgggactcctcagagtgcctyggca

SEQ ID NO: 5272 - DNA, 1765 bp, Homo sapiens
agttccagttctacaacaacctgttggagcacatgcagtcccatgcaggtaagtaggatacggcttctctccccctctccttcctcagttcctgcaaattgaagagatggttagggcctgacctgaggcccctggagaaggccgctctttcctggaaaatggtcacaggacatggaacctgcttgcagggagccccagtcagtcagttattaacacaggctggtctgtgctctgcaggtgggggcggtggggaggcagcacaggctctgtgggaacacggagaggtgggacagagttgaagagacttcctggaggtggtggcctcttggctggtcctaaaggccaagtaggagctagcctggaagcgaaatgtgcaggtggaaatggaacatggtttgagatcaaggtgagcagagacagaaggtggggatggagagacatgcagcccaaggcaagctgggctaaggcccacctcagagcagagtctcattcactaacaccctatgtcccagaatgcagttgcgcccaaacctgaggacacatcagaattaccaggagggcttgcttgagcacagatttctaggctccattgtgaatttctgattctgtaggtctgcagaggtggggactaggatttgcatttctggtaagtcttaagacagtgctgatgctactggttcagggaccgccctttgagaaccactgctctagagctacaggtgcagtcatctgctctctaggcagcctttttattacatttcaccacggcataacacaagtctcagggagacagtatgtgctggaataagtaaataattccaaattctcagtggttaaacatacagaccatttacttctcacccacattatagcccaatgcacatgatctagttgggtggcttccacatggtgattcagggatcaaggctcttttttctattggctccgtcctcctctagatcttcagcatcctctctctttgtggatggggagagagactatggggcaagcacacttctttaccatttcagaccacaagtgacacctgtaaatgctcaaattccagtgtggagaattagccacatgaccagcctgaacccatgggtggaagcgtgtccagagccactgtcccgggacagttggccactctgcaaagggaaacgtgagtctggggaggcagttagctgtccctccacccctttccccagaggaattctctagaggcattagaaataatgggtgagacgtgcctgacataatggtgctcagtaattggtagctgctgttatttcacctgttattgttattgtacaaatytttcacatcatctcccaggtctggcctgactggcatagagtattacaggactagaatctcttttaggctaagtactgttctgttagcgtagtctctatcattcattcatccatccagcatatattaattgggtatctgctgtatattaggcatgaaatcagatgatctttttggggagcctattatttatttctaatgaacttaaaatcaggacagagctctggagtggcagccaaggcacttgcctcggagacctgctctaactggtgtgtctgggtgctgtgtgacctcctgcaggaagctgtgtctccatctctaaagcaagggcctgaaaatccccttccccacaccacgcttcccgccccctgctttcctttgctgtcagctgtgcctcaccagggaaggccttgaatgccagctcaaggtgtttagaccccatggggaagca

SEQ ID NO: 5273 - DNA, 808 bp, Homo sapiens
tggagaatgggctgtcttggatggcagtgagctccccaggcaatggagatgtataagaaagagccatttgaccttttggttataggaccctctagcaggggccacagggaaagttctgtagaactaataaccactgcccccagctctgccactaacttgccacagtcttggcttctcttgtttccttcctgtaaaaagagattaatgacttctctcctatttgacatagttgttctgagatttcaatgagatgtgtcattgaaagtgaaagttgtaaataattacctaaaaacaaaaataaaaattcctagatgatctctaagttccctttcaactctgaagttccttaatctattttttgagtccttgaggtggataagacaaaaattactatccctgtttttcagaggaaaaaaaactgaactaaacagcgaaaggcagggaaagttatctaaggagaaaacaacaaatggcagaactgagagtttaaacccagaactatgagctgtacatcctgatgctgcttgctatggcaagttgcttttgtcaggagtaaacccagtaaatgaasaaggtgctcctttaaaagctgttgaaagtgttaaagactatcaatcactagcatcttagtgtgcattggtttagtcagattgctggccctcctcaggctggactgagatgagccacgctgaagggatttttgttttttttgttttgttttgttttgttttggagatgcagtttctctcttatcacccaggctggaatgcaatgttgcgatcctggctcactgcaacctccaccttct

SEQ ID NO: 5274 - DNA, 808 bp, Homo sapiens
tggagaatgggctgtcttggatggcagtgagctccccaggcaatggagatgtataagaaagagccatttgaccttttggttataggaccctctagcaggggccacagggaaagttctgtagaactaataaccactgcccccagctctgccactaacttgccacagtcttggcttctcttgtttccttcctgtaaaaagagattaatgacttctctcctatttgacatagttgttctgagatttcaatgagatgtgtcattgaaagtgaaagttgtaaataattacctaaaaacaaaaataaaaattcctagatgatctctaagttccctttcaactctgaagttccttaatctattttttgagtccttgaggtggataagacaaaaattactatccctgtttttcagaggaaaaaaaactgaactaaacagcgaaaggcagggaaagttatctaaggagaaaacaacaaatggcagaactgagagtttaaacccagaactatgagctgtacatcctgatgctgcttgctatggcaagttgcttttgtcaggagtaaacccagtaaatgaacaaggtgctsctttaaaagctgttgaaagtgttaaagactatcaatcactagcatcttagtgtgcattggtttagtcagattgctggccctcctcaggctggactgagatgagccacgctgaagggatttttgttttttttgttttgttttgttttgttttggagatgcagtttctctcttatcacccaggctggaatgcaatgttgcgatcctggctcactgcaacctccaccttct

SEQ ID NO: 5275 - DNA, 808 bp, Homo sapiens
tggagaatgggctgtcttggatggcagtgagctccccaggcaatggagatgtataagaaagagccatttgaccttttggttataggaccctctagcaggggccacagggaaagttctgtagaactaataaccactgcccccagctctgccactaacttgccacagtcttggcttctcttgtttccttcctgtaaaaagagattaatgacttctctcctatttgacatagttgttctgagatttcaatgagatgtgtcattgaaagtgaaagttgtaaataattacctaaaaacaaaaataaaaattcctagatgatctctaagttccctttcaactctgaagttccttaatctattttttgagtccttgaggtggataagacaaaaattactatccctgtttttcagaggaaaaaaaactgaactaaacagcgaaaggcagggaaagttatctaaggagaaaacaacaaatggcagaactgagagtttaaacccagaactatgagctgtacatcctgatgctgcttgctatggcaagttgcttttgtcaggagtaaacccagtaaatgaacaaggtgctcctytaaaagctgttgaaagtgttaaagactatcaatcactagcatcttagtgtgcattggtttagtcagattgctggccctcctcaggctggactgagatgagccacgctgaagggatttttgttttttttgttttgttttgttttgttttggagatgcagtttctctcttatcacccaggctggaatgcaatgttgcgatcctggctcactgcaacctccaccttct

SEQ ID NO: 5276 - DNA, 778 bp, Homo sapiens
acaggagccccagaccctatccccatcctactctgcctccaggaagcccatacccttgcagtccatttggtccagctggaactgcaggcgacggttctcctcctggagctgcagcatctctgtctccaaacgctggggctgctttgccacaggagactgtagggaaagaggcccagagccacctttatggttgtataagtcgtgcactgcacaagaacttccgggtgtgggaagtaactggggcctaaaatccagcccatgcttcattcgtcagccttgcatcttggcacaaggctgtatctgcctggarggggcaccttgtcctaagtgcactgtcctggagggccccactctgagctggactcagctgtgagtccaatcccaaactcagttctgtccaaaccttgggccagataatggttccaaacgagaccccacattaggccccacatcaactcccacttaaccatgatactaactgagctagaccctgaatcatatcccaactcaaactccaaccctagacctgccctaaacctggcatgaccctggctgggaccctgaccccatcctatacaaccatgataccgattccaggattccaaccctaatcccaactttgacccagtccaagacttcaatcaagggactcaggctccaactcctgcctgatcccccagcatctccacgcctgtccctcagcttgtgcctgcctatactcaccttgggggcctgtggtcgggtggtgacccgctgagctcggcttgcatatcgcagg

SEQ ID NO: 5277 - DNA, 823 bp, Homo sapiens
ttttgccctaaaagccattattgggacaaccaatgcaattggagtgaagtctgaagattcaatagtattactgtatcartgtcagtatcctggttttgaaagttgtattttagttatattggagaatgtccttttttatagaaaatacacagtaaagtatttcagggtggtggagctttatattggtaacttacttgaaaatcgttgtggggaaaaaaaatttttgtactgtacttataacttgcctctgcatttgagatggcttcaaaatgaaaaaagagaaacaaagtgatcgttttaaacctgcttatcacacatgcctcacaaagcccacccagggtgtttttttaaatttattttttctgcttgctgttttcatgtgttaatgaatagctcaggttattaatggatcacaagtactgccattgtacagtcatcaataagggctcttttctgtacccagcacactgcctgtgaaaaccaagtagtaagactggttgggtggtaggtgttttaactcctgtgaacaaagtttcaaaaggtacccttgatgactttttaaagtctcttggcctttatgttaatacacaaagaaaaatttcaccttcagtgtataagtgtcttccttagtgatctctcagtgcctttaaagaggcaaatgagtggtaaaaattcttagactttgagaggaactttgaattaaccattgaactctatttgcaaatgtgtattgtttttaaaaacattatttccacctgtttaaccttagtagcattataagaatatgtttagttaaatagttggatacattttgattttttcc

SEQ ID NO: 5278 - DNA, 698 bp, Homo sapiens
cagggtacctgaatgtaatccctggccctagccgattttatatttatgatcttggatgaattatttgccttttctaagccatagttttcccatttgtgaaatggatatattaacacccacttgcctcatgtaattgtgaggattaaatgttagtgtgttagggaaatatcacatcatagataggaggtggtatattcagtagtaagctcaaaacctctgtcatttacaaaatggcaaagggtatttagggtgttcctttatctccatttartaccttggcatcctgcataatacttgcagtgccaactttgaagtcttttttgcatgccttcaattgctgtaatgacattttcagcaagggcacagccaatctgttttgatcaaggtggatactgtagcttttgtttcccagagtgatgccaaatgacataaattttgcgacctaacaaggtcttgcttgtaccgtgtgcaacagattgcactttttgggcaggttggcagctccccatgttgtattaaaggttacatagcaaaaggggttttgtatacttctaaaacttgtctttttttttttttttcctgctgagttgtatagtagaaaattcacactccagttttggagtttagctcataattgctgccatttttaaacatcaaaatattttatttagctaactatagttgtttatgaaatagga

SEQ ID NO: 5279 - DNA, 698 bp, Homo sapiens
cagggtacctgaatgtaatccctggccctagccgattttatatttatgatcttggatgaattatttgccttttctaagccatagttttcccatttgtgaaatggatatattaacacccacttgcctcatgtaattgtgaggattaaatgttagtgtgttagggaaatatcacatcatagataggaggtggtatattcagtagtaagctcaaaacctctgtcatttacaaaatggcaaagggtatttagggtgttcctttatctccatttagtaccttggcatcctgcataatacttgcagtgccaactttgaagtcttttttgcatgccttcaattgctgtaatgacattttcagcaagggcacagccaatctgttttgatcaaggtggatactgtagcttttgtttcccagagtgatgccaaatgacataaattttgcgacctaacaaggtcttgcttgtaccgtgtgcaacagattgcactttttgggcaggttggcagctccccatgttgtattaaaggttacatagcaaaaggggttttgtatacttctaaaacttgtctttttttttttttttcctgctgagttgtatagtagaaaattcacaytccagttttggagtttagctcataattgctgccatttttaaacatcaaaatattttatttagctaactatagttgtttatgaaatagga

SEQ ID NO: 5280 - DNA, 698 bp, Homo sapiens
cagggtacctgaatgtaatccctggccctagccgattttatatttatgatcttggatgaattatttgccttttctaagccatagttttcccatttgtgaaatggatatattaacacccacttgcctcatgtaattgtgaggattaaatgttagtgtgttagggaaatatcacatcatagataggaggtggtatattcagtagtaagctcaaaacctctgtcatttacaaaatggcaaagggtatttagggtgttcctttatctccatttagtaccttggcatcctgcataatacttgcagtgccaactttgaagtcttttttgcatgccttcaattgctgtaatgacattttcagcaagggcacagccaatctgttttgatcaaggtggatactgtagcttttgtttcccagagtgatgccaaatgacataaattttgcgacctaacaaggtcttgcttgtaccgtgtgcaacagattgcactttttgggcaggttggcagctccccatgttgtattaaaggttacatagcaaaaggggttttgtatacttctaaaacttgtctttttttttttttttcctgctgagttgtatagtagaaaattcacactccagttttggagtttagctcataattgctgccatttttaaacrtcaaaatattttatttagctaactatagttgtttatgaaatagga

SEQ ID NO: 5281 - DNA, 658 bp, Homo sapiens
ttcctggctcttctaatgagccattcagccccaccttctacttgcgtttctcactccacaaaacaaaaaacaactagttcaatatctgtggcttaggaatttgcccttagaagtgggtgatggtctcagtttaatccactggagcaagagcatgaataaactaaggtagctgctgcagggattggggaaaaggggggacaaatattttgcagacaaaactattaagtttcagtgactggtatatcagaaagagaagtaaagggccattttctttcccaaagtccgctgccctagatcaggcttatactgttctgttttgttcggcccttatttttattgcattcacctaattatacacycctactctctagtttctcttcaaatgtataaaatgaattggagcaaaccagatgtctctctccaggttatcagtcattaatggtgccattgcctgctaggcagaactcaaaacgacctcacatggcctccaatggtctacaaagactttcttgatagagtccttgtgtgtcagggactcatctcccactacacccccatgtaactacacttactaagtatacttactacacttcaaaattaaggaatgacttatgatttataaacagtaagtcgtcacttaccaccatagtatgtgggg

SEQ ID NO: 5282 - DNA, 804 bp, Homo sapiens
tttctatgatatagttatagaatatatatttatacattaagatatatataatatgtaaatatataatatatattttagattttagaatgaagtgaaaaatgctctccccttactcttttaggactcatgtttctcccctaagcaactggcccagacacactccatattgattaaaataacaggttacagattttcaaccacaattgctaaaacagatctaatgaccacaatttacctttctctgaagatgtctcccagtattttgtttttcttgagagaatggactatgtcatattacctttgtgttccaaacaagaagtacaatttcttgctcagagtgagtgtttaatatatgtttgttgaatgtctttttttgtggcctaaaagtccaacaaacttttgaaaagccttcaaaatgaccattggaaataagctacaaaataattaaaacagcaacccttttgttaataatgccagaggacaatcccaagtaaactcttatactgtgttgatggtgttttctttaaaatataatcatgaaaaggaaatgtttccaagagagactactacaaaagaagccaaaaactctgagtaatttatattcatgaatgcatcaaaaatcataagactttttagtttccaaaaccagagctgagtagacctgcaaccaataatcatgaaagataattgatcagtacattccaaaagtgtcaagatattgaaagagataggactaaggaattgttatagattggaagaaactgaggagacattawaatgaaatgcaatgtgggatctttgata

SEQ ID NO: 5283 - DNA, 810 bp, Homo sapiens
aagaaagagtgttcgatcctctaattcagtgcttttcaaggagattttcagcagttccctagatgtgttctttgggatctgagagttctctaccagcatttttcaatgtttttgttttgatgttaccctaagcaaattagcagaagcatattttgcatgatcttgatggccgcyttataactgagccgcatttccaacctgcttctgggtttgtgtttaaaactgacctggtgctaacatgagagcatgtagcttttgctgtgctgggaagcatgctggttgcttttgaagtggcatgaaataacaatagccatgagggtccaccattatcctgatgggaaattctttttgtagttgacgagacaaaagtaaactcctctttgggattaaaattggcagttagaagtaccttcattcttaatgagctagtaagaaaataattcaagttgacctaattcgtaaagaatgccgtcacaccaaatgaaagccaggcaggtgtcatggagcatgaggtttccatagcaggctgaatattccaagttaaagacaaaagtaagcaatggccagaaattttgactcatgctcagattatctatggattatatgaatgaacgataactagcatttattcatttccctcagtgatttgatggtgaaattgttgctggactagacattctttttaatgtctgcaagaattaaaaactaatttcagatgttattttcaaaatagattccaacagtaattgaaattggtttacatttgcagatttcaataattctacaatacttttcttatctttttaaaag

SEQ ID NO: 5284 - DNA, 1627 bp, Homo sapiens
ttccttcttcccaagatgacactgggggctaatgcaaagctcccaggtcttcttggcagtagggaaggggaggtcagctctgtgggcctgctgtgggagtgccttagcacactcagggccaccatgtacagctgtgtgggttgtgcactgcacaactccatgggatgacatcagcatagactagagtgtatttggtactccctggagttgtctctcccctctgcttctcagccctgaatgcccctggcttctagatgtgtgctggctctgcagccccgcccagcagcctgctcctgactccaggccctgctgtactggcaggcttctcagcacttctctaccccttgaggagccataggcaatttctgggtcactaacccctccacaggagacaaggggtgctgtctcttaggggagaaagcaggcctctccttcacacccacctttctcagtcccatcaggagagccggggcctccctcaccatgactcttgaccctgccagatgtagagggttaactgagtttcttcccatcaaagctttgcttttgacagatgaggcagcagaagggttgggcgacccccattccctctgtckcaatggcctgtggccaggaggaatgagggcttctttgtcccaggtggcatccaccctccaggaaacatgggtttagagggcacgaaatcatcacacagttccaccccaccctgcaggggagggcactggccattataattgttccttcattttacagtggagaaactgaggctgagaaagagacagagacttgctccgaatcacaggaggcacaggccgcaagacaaggatccctggccaggcctgctccttctgttctcatggactgatcatttaaaaaggaatttgcgtcttgaaaactactttttaaggaatttgtttcactaagagacaagaggacttctggctctctttcttggacttaaaactgtttttgcaccctccctccagcctttcaggctggcaaatgcgcaaagaatgacaggaatgtcgcacacctgcgggtgccaagttgtctgagaaaccaggcccagaggaggtgagccccactcagagccccactgggaggggtggaagccactgggcaggctcagccacgtggaacaaaggagaaaaagtgccggggagtgcatggcaggggaaagcgaatgcacagggcaggctgggcccagctccgctcacaccaggcagcgtctgggtggttggtgagagcctcaggtaggaccccccaccgcaggcagcatctgggggaaggaaagctgatctgcagagggaaatgcgtcagggttctcagtagctgtagatagacagacaggtgatcgttctgagttggcctgtggtttcatggagggtaagtcccggggcctgcagggcgagcgtgagtggagccaggaggctggccggcttgggactcaggaagagtccatgtttcagttcgagtctgacccgtgtctcagcccaaaagctgtcaggcagaagaaattctcttcctctgaggagggtcaagcttttgttctctccaggccctcacctgatgtaggaggcgcacctgccctggggagggcggtctggttcactcagtctccacccaa

SEQ ID NO: 5285 - DNA, 1627 bp, Homo sapiens
ttccttcttcccaagatgacactgggggctaatgcaaagctcccaggtcttcttggcagtagggaaggggaggtcagctctgtgggcctgctgtgggagtgccttagcacactcagggccaccatgtacagctgtgtgggttgtgcactgcacaactccatgggatgacatcagcatagactagagtgtatttggtactccctggagttgtctctcccctctgcttctcagccctgaatgcccctggcttctagatgtgtgctggctctgcagccccgcccagcagcctgctcctgactccaggccctgctgtactggcaggcttctcagcacttctctaccccttgaggagccataggcaatttctgggtcactaacccctccacaggagacaaggggtgctgtctcttaggggagaaagcaggcctctccttcacacccacctttctcagtcccatcaggagagccggggcctccctcaccatgactcttgaccctgccagatgtagagggttaactgagtttcttcccatcaaagctttgcttttgacagatgaggcagcagaagggttgggcgacccccattccctctgtcgcaatggcctgtggccaggaggaatgagggcttctttgtcccaggtggcatccaccctccaggaaacatgggtttagagggcacgaaatcatcacacagttccaccccaccctgcaggggagggcactggccattayaattgttccttcattttacagtggagaaactgaggctgagaaagagacagagacttgctccgaatcacaggaggcacaggccgcaagacaaggatccctggccaggcctgctccttctgttctcatggactgatcatttaaaaaggaatttgcgtcttgaaaactactttttaaggaatttgtttcactaagagacaagaggacttctggctctctttcttggacttaaaactgtttttgcaccctccctccagcctttcaggctggcaaatgcgcaaagaatgacaggaatgtcgcacacctgcgggtgccaagttgtctgagaaaccaggcccagaggaggtgagccccactcagagccccactgggaggggtggaagccactgggcaggctcagccacgtggaacaaaggagaaaaagtgccggggagtgcatggcaggggaaagcgaatgcacagggcaggctgggcccagctccgctcacaccaggcagcgtctgggtggttggtgagagcctcaggtaggaccccccaccgcaggcagcatctgggggaaggaaagctgatctgcagagggaaatgcgtcagggttctcagtagctgtagatagacagacaggtgatcgttctgagttggcctgtggtttcatggagggtaagtcccggggcctgcagggcgagcgtgagtggagccaggaggctggccggcttgggactcaggaagagtccatgtttcagttcgagtctgacccgtgtctcagcccaaaagctgtcaggcagaagaaattctcttcctctgaggagggtcaagcttttgttctctccaggccctcacctgatgtaggaggcgcacctgccctggggagggcggtctggttcactcagtctccacccaa

SEQ ID NO: 5286 - DNA, 2249 bp, Homo sapiens
cattccacgtgtaaatgaaatcatgcagaagttttaccaattctctcaggatcttgcttatgtaatttggtgaacttccacttcagcactattgcaaaagccaggaacaactttgagtaaaactctgagtgagattttattttacttgcaatggcggtgaaaatggtatccagtattttccaagggaatgccaatacagtgtttacaagaaggaagcagaggacttgaaaacagagagagattacagggatccagaaaatcaggatacatcagatcaaactataataaacaactttcccgtgtttccagatgttctggatcatagatacagtctcctttctcagattcacaactggggcctaatcctttaagtttaatcaatacttcatcagaaaagcgtccttgagggtgaagaaaaacattgagtatattacttgaatatctgtattattcaaaaattagcttatcatatgttttttgatatcctgaaatttgtgtttagggttcaaaatagaggtgcaaattgtatcaagcaaaataaaacttgagattgctgctctttcatttttctttcttttcttttcttttcttttttcttttttttttttttgagatctgcagcttctagttttctaccctgacctcaatacaattatggggagggtttgaggggagagtctgaaatttctcattcactaaagctacatcattcctgagagctcaaaaatcattttccagtctgatgttctatgttattttctttttgtttttgttttcacaaagtcgactggtaaaatgatgagaagacaccaaagagtaactttaggattttgcagcctcaaaggccgagagagattgccagcaatttgaatctgatcctaaagagtagatgtgcaatgggctgggttcttgtggccggccccgggcgtctgacgtgtctcaccgttacagagagctggtctgcattgtccgggcatggccaggattcagagaggggaaaaaggaagctctgtttagtgtaatctaaacaccagcacaaagctgcaggtgtctgcccagagaaacacaagtaccatttctcttaggcacaggaagtcttcttcagacttgtttaaagaagaaagaccaggcagacacctcaacaatgatgatacgttatgtcttaaagggagtaaagtgctagtgaatgtaaatcttcccctcctcaaatcctttctttttcctcttcaaattgctgtttctaaacattatcctgacatacaaactggtttaacttgacatccataataaaaacatatttatctgaataaatttcaaatcaatgacacttttgcgtgcacctgatgcattttgctctgggtaggttgatactgttcaggcacagcctccacagactttctttcctatagcttctttctccacttccctcctcatttcccactcctgccaccacggcctccaccacaatctacaccacacttacattctggctttgctcctgtagcattaaagcatttgtattggcattgtaggttgtcttaccactttaaatgtaaaggagacagtgaactagagcaaaggagaatgggagagttgatttcgttcccctacctaccaaggaaagagaaagaatagccagaggaaatgaggtcttctgaaactcaaaaatgggattcgagaacaatgcagccttctggaaactgtggagtgttaagggaagttatgctctgtcacaggaagggtgagtgaggcactgtgccttgtgagacctctggccaggctctgtggcagctgcaggtggggcagcaacctgggaaacaagaggtgacttcacttggtagcactcagacttggattgaggaagatcggaggcccaccactgagttgtttgtattaaaaggtgtgcattaaagggggccaaatcgttgactatggcttgacttttaaattttaagaagctgaacttgaagcttattgtcctctcctccccctcctcttccctctccctccttccttccagagaactggtagagtttattggttaagaacatgagatctggtttgcatgcctgtgctgacaagtyctagctatgtgcttttaagcaagacacggatccctctatgtctcaattatctttcctgtaaaatgtgggcaatggtagtagccaccttgctaacgtttgccattaagattatgatatgactttttaatctttgggagtgaaactcttctttcagaagtacaagat

SEQ ID NO: 5287 - DNA, 786 bp, Homo sapiens
cttaaacccagtagtttaaggtgtagtgcaaaccttgatcatgtctctgcactccagcctgggtgacagagtgagaccctggaccctgtctctctttctctctctctctctctctctctctctctctctctmtctatatatatatatatatatatatatttagtaaactaacactaaaatatttttagattattttgaaattggatatactatcatatattctgtgggaaatagaaaaatgagatattataagtatattattactaattcaatcatagaaattaccatgtaaggaatgcaatagaaaattctaaggagcgatgtcatattactgaatgagtgccaattagatactccctgtcataattcagagcataattaggcacggacagtgaactgcaataggaaagggtagacatggaagggccaaattatccgtacatccattgtccatttccccaatactggggctgggaaaaatcctatggggatattaaccatattgcttggtgtcaaggtagaacccaaggactgggcaagatcagagtacggtatcacagggaggagatagagctattttcagtttgtagacagagaccaggcaagcaaaatgcctaggcaacaaaagcagattccagagatgctggaaataggggaatagatcagaaataaagttcaaaacaaagtgaagacagaggttgaagaaataaacgaggctgttccatctagcccaggtacaagtttcctaggatacagacatactactcagccagacaactacataat

SEQ ID NO: 5288 - DNA, 786 bp, Homo sapiens
cttaaacccagtagtttaaggtgtagtgcaaaccttgatcatgtctctgcactccagcctgggtgacagagtgagaccctggaccctgtctctctttctctctctctctctctctctctctctctctctctctmtatatatatatatatatatatatatttagtaaactaacactaaaatatttttagattattttgaaattggatatactatcatatattctgtgggaaatagaaaaatgagatattataagtatattattactaattcaatcatagaaattaccatgtaaggaatgcaatagaaaattctaaggagcgatgtcatattactgaatgagtgccaattagatactccctgtcataattcagagcataattaggcacggacagtgaactgcaataggaaagggtagacatggaagggccaaattatccgtacatccattgtccatttccccaatactggggctgggaaaaatcctatggggatattaaccatattgcttggtgtcaaggtagaacccaaggactgggcaagatcagagtacggtatcacagggaggagatagagctattttcagtttgtagacagagaccaggcaagcaaaatgcctaggcaacaaaagcagattccagagatgctggaaataggggaatagatcagaaataaagttcaaaacaaagtgaagacagaggttgaagaaataaacgaggctgttccatctagcccaggtacaagtttcctaggatacagacatactactcagccagacaactacataat

SEQ ID NO: 5289 - DNA, 914 bp, Homo sapiens
agtccatagtatcactataagtgttatcatcaaatcatgaaatctttaggtataagatctaagtacaacatttcttatcaggaattccaagaattctaagattaggaacatgagcttttgagtgagacacatctacctatactttaatcctggttctgctacttagtatcttattttcatttcagctctttatatctcattttctttatgagaccaaaaatgcttacatggcagaattgttgtcagaaataataacaaagaggaactcacctgtgttgggtactttacatgtgtcatcccattgtcgtatctccgcagcacccttttgcrttagtgccattactatctgaatttcctaaataagagaatggccatctatggtaaagtggttatctaagaggttaagtaacatgcccaaattatacagttaagaatggcagaactgggacataaacccagctctcctctgtcttggaagcctggcatataacccatatgctatgttgcctacccaataaattgagtgagacaatgaatataaaatgcttactacattgtgcgacacctaaaaagcactattttgttagggtacccaggtatctcacagccatgttgcatagtcatgaggatgagcagctgcttcactcttcccttactagacttccccagttggcaaggggccaccacacattgaaattcaggaggggtaggagggatgggagagttgttacattattcatgtccaattctatttgtctaatggccttgctaaaagcaccctggatggaaagtgtgagtcttaatggcattttataaaagttgctgtgatgaattaacacataaagcaaattaaaaacagcttatcgcttgttaaattaggtgatggggcactgtagcatttttcccagatgtga

SEQ ID NO: 5290 - DNA, 914 bp, Homo sapiens
agtccatagtatcactataagtgttatcatcaaatcatgaaatctttaggtataagatctaagtacaacatttcttatcaggaattccaagaattctaagattaggaacatgagcttttgagtgagacacatctacctatactttaatcctggttctgctacttagtatcttattttcatttcagctctttatatctcattttctttatgagaccaaaaatgcttacatggcagaattgttgtcagaaataataacaaagaggaactcacctgtgttgggtactttacatgtgtcatcccattgtcgtatctccgcagcacccttttgcgttwgtgccattactatctgaatttcctaaataagagaatggccatctatggtaaagtggttatctaagaggttaagtaacatgcccaaattatacagttaagaatggcagaactgggacataaacccagctctcctctgtcttggaagcctggcatataacccatatgctatgttgcctacccaataaattgagtgagacaatgaatataaaatgcttactacattgtgcgacacctaaaaagcactattttgttagggtacccaggtatctcacagccatgttgcatagtcatgaggatgagcagctgcttcactcttcccttactagacttccccagttggcaaggggccaccacacattgaaattcaggaggggtaggagggatgggagagttgttacattattcatgtccaattctatttgtctaatggccttgctaaaagcaccctggatggaaagtgtgagtcttaatggcattttataaaagttgctgtgatgaattaacacataaagcaaattaaaaacagcttatcgcttgttaaattaggtgatggggcactgtagcatttttcccagatgtga

SEQ ID NO: 5291 - DNA, 914 bp, Homo sapiens
agtccatagtatcactataagtgttatcatcaaatcatgaaatctttaggtataagatctaagtacaacatttcttatcaggaattccaagaattctaagattaggaacatgagcttttgagtgagacacatctacctatactttaatcctggttctgctacttagtatcttattttcatttcagctctttatatctcattttctttatgagaccaaaaatgcttacatggcagaattgttgtcagaaataataacaaagaggaactcacctgtgttgggtactttacatgtgtcatcccattgtcgtatctccgcagcacccttttgcgttagtgccattactatctgaatttcctaaataagagaatggccatctatggtaaagtggttatctaagaggttaagtaacatgcccaaattatacagttaagaatggcagaactgggacataaacccagctctcctctgtcttggaagcctggcatataacccatatgctatgttgcctacccaataaattgagtgagacaatgaatataaaatgcttactacattgtgmgacacctaaaaagcactattttgttagggtacccaggtatctcacagccatgttgcatagtcatgaggatgagcagctgcttcactcttcccttactagacttccccagttggcaaggggccaccacacattgaaattcaggaggggtaggagggatgggagagttgttacattattcatgtccaattctatttgtctaatggccttgctaaaagcaccctggatggaaagtgtgagtcttaatggcattttataaaagttgctgtgatgaattaacacataaagcaaattaaaaacagcttatcgcttgttaaattaggtgatggggcactgtagcatttttcccagatgtga

SEQ ID NO: 5292 - DNA, 914 bp, Homo sapiens
agtccatagtatcactataagtgttatcatcaaatcatgaaatctttaggtataagatctaagtacaacatttcttatcaggaattccaagaattctaagattaggaacatgagcttttgagtgagacacatctacctatactttaatcctggttctgctacttagtatcttattttcatttcagctctttatatctcattttctttatgagaccaaaaatgcttacatggcagaattgttgtcagaaataataacaaagaggaactcacctgtgttgggtactttacatgtgtcatcccattgtcgtatctccgcagcacccttttgcgttagtgccattactatctgaatttcctaaataagagaatggccatctatggtaaagtggttatctaagaggttaagtaacatgcccaaattatacagttaagaatggcagaactgggacataaacccagctctcctctgtcttggaagcctggcatataacccatatgctatgttgcctacccaataaattgagtgagacaatgaatataaaatgcttactacattgtgcgacacctaaaaagcactattttgttagggtacccaggtatctcacagccatgttgcatagtcatgaggatgagcagctgcttcactcttcccttactagacttccccagttggcaaggggccaccacacattgaaattcaggaggggtaggagggatgggagagttgttacattattcatgtccaattctayttgtctaatggccttgctaaaagcaccctggatggaaagtgtgagtcttaatggcattttataaaagttgctgtgatgaattaacacataaagcaaattaaaaacagcttatcgcttgttaaattaggtgatggggcactgtagcatttttcccagatgtga

SEQ ID NO: 5293 - DNA, 793 bp, Homo sapiens
attattatgtgtttgagtaaagtaggggaaaaatttgtaatgcaagaatgttggcgtccttcagttccacaggaaggaaaccagcaaagaattcaacagatattaaaatgattgcagaggaagaaagagttagtacctatgaaaggacaytggactacaaatcaagaggtttcatgttataatcatatctgtcaacaggctaagtgtccttgtataagtcagttaaacagcttggatctcaattttcttgtctaaatacagaaagcctctctctctctctctctctctctgcatgtgtgtgtgtgtgggggggagggttgtgagttgtgcagggtgtgtgtgtgtgtgtgtgtgtgtgttggagcagtagatatcaccaatgtaatcatctcttctttccgtaattattcattgacagtttacttcatcagtgtgctagagagattaaacaaatccctaactttaggaagtccgctgtgtaatgaaagagatagacaagtgacatatcaaaagacaattataatgctaaaagtaaggacaggactaatcacaatatttcacttgggttttcatgcatgaatcctttctatgacccacttaagcttcctgtccacctttgtacccccagtgctgctatctagacatcgaatgataattcattttgtggtataaaaagtgataccatgctggtatatagtcttccaggggattgacagttttataggtacaaaatcttaagcgtatgaagccatggtaatagaattcatacattttcagctagtgtagtcagata

SEQ ID NO: 5294 - DNA, 630 bp, Homo sapiens
tgaatattcagatcatagtccttttataatgccattgattgttttaaagacacggcccttttccaggcaggtctggaatccatggcttcactgtaagcatgaacacaccagttctcccaaggcctccaacagcatgtctggcctctcaaggccaaatgacttgaatttgtcccaagggcctggagctgtatttggtcaagtatctatttatgctttattacagaaaggatttaatgctgtactcttcagcattatcaggaagsaaagagttaatgattttccaacatcagcaaaaactaaataatctacttttttactgtatttattgtcctgctatttttaaccttatttgggggaataaattcagcaaggaaaaaagattataataacccacaacctggaattaaatatcgacattaaatatatatctatatatcctctcttttaaaaaattttaagaggctcaggaacaaagaccaaaaccttccaactcagcccagactaatgaaccagtcaagtcacatggcactcagtgtttttcagaccatatccagggagctcttgcattcctcagaagagtgccaggttcctggcaaggagagggccaggaaataggacagcaagaggcgg

SEQ ID NO: 5295 - DNA, 630 bp, Homo sapiens
tgaatattcagatcatagtccttttataatgccattgattgttttaaagacacggcccttttccaggcaggtctggaatccatggcttcactgtaagcatgaacacaccagttctcccaaggcctccaacagcatgtctggcctctcaaggccaaatgacttgaatttgtcccaagggcctggagctgtatttggtcaagtatctatttatgctttattacagaaaggatttaatgctgtactcttcagcattatcaggaagcaaagagttaatgattttccaacatcagcaaaaactaaataatctacttttttactgtatttattgtcctgctatttttaaccttatttgggggaataaattcagcaaggaaaaaagattataataacccacaacctggaattaaatatcgacattaamtatatatctatatatcctctcttttaaaaaattttaagaggctcaggaacaaagaccaaaaccttccaactcagcccagactaatgaaccagtcaagtcacatggcactcagtgtttttcagaccatatccagggagctcttgcattcctcagaagagtgccaggttcctggcaaggagagggccaggaaataggacagcaagaggcgg

SEQ ID NO: 5296 - DNA, 807 bp, Homo sapiens
ggcgggagatcgacttaataactgtgaacacgtgtcactggaaaaagcagtatgttaataagtaactgggctgctttgggaaaaatggaaatgcaggcgatgttagaacactggtacacacactaattcattcatcctcacaaagccctatagacaggtactattatgacccctcaactgtaacataggctggaaggtcacatgacaaggaagtagtggagctgggatttgaacccaggcagtctggcttcatacttgataagcttaatcacaatgccaaagtggtaaatagctgtgtggcataatttcaggtagtgataagtgctgtgaaggataaagcaaagaaaggggcagggatggctctttagagagactacttagggatggctttcaggaagaggtggcatttgagcaggggcccgagggattgatgtgacttgtgataaaagaaaaacttcagacgaattaaatttaaagaagtttaattggctaggcactgtggttcatgcctgtaatcccagcactttgggaggccgaggagggcggatggcttcaagtcaggagcttgagaccagcctggtcaacatggcaaaaccctgtctctactacaaatacaaaaattagctaggcatggtggtgggcacctgtagtcccagctactcgggaggctgaggcacaagaattgcttgaacscagaaggtggaggttgtagtgagctgagatcgcaccactgtgctccagcctgtgcaacagagcgagactccatctctaaataaataaataaatagagtttaattgagcaatgaa

SEQ ID NO: 5297 - DNA, 772 bp, Homo sapiens
tccacccacctcggcctcccaaagtgctggggttacaggcaaaaaaattttttaaaaatgaaaccaaagggttgtttcaaagctctccaagggctgaggtggccaaggggaacagggaagctactcagacaaaaagaaggcttaaaggttctgatcaggaaaagaactgaactctcccaggccttccccatcttcagtttcatcaaccagtgtgagttagggcagatttgcyattgcttcaggctgtagttaaaaacaaaggcaatgctgctaaggtacagcttctacagacaacccagcgctggccccctcagctctggcctttcctgccttggttatttaagtcttcacttgcaagcttcatgaatttctgcaccatcctcccacccacccaagcaccataaatcaggtggcatgagggagggtggcctgttgaaacaggtctattttcagtcgctaacagttcaaccacttttggggctgagcagtgggtgggaattttttaacctctagaaatagagatcgagttttctactttttttttttttttttttgagacaaagtctagctctgtcacccagactggagtgcaatggcacgatctcggttcactgcaacctccgcttcccaggttgaagtgattctcctgcttcaccctcccaagtagctgagattacaggcatgtgccaccacatctggctaattttgtatttttagcagaaacatggtttcaccatgttggttaggttggtctcgaactcctgacctcagg

SEQ ID NO: 5298 - DNA, 524 bp, Homo sapiens
aggcatctggatttttgtaaagctccccaggtggttctgatgggtgtggccaaggtcagaagcactgccaagcctggaggcagatttgtggcccacctgtagsctgtgtatggcattttctaaatacggtttcatgtaggcaacattccctcctccgtttcctgctcctacacttgtgattctctctcctacttttgatttatggtgtcttaatgtatccttttaagtcccctgcaatcctttctggaacttagcaaagtgaaaacaaatagagtagaaaggttcctgcttttctctggctgggatctgggcacagctcccaccccagtcagccctcgctggaaagagggtaggagcctcctgtttccccagccacagtagctggtcagcagcctcgttctgtaaccccacaatgggtaattgtagctagttctgccaagagccctccaagatcccgtagaagaggctggtttgggctgagagcggtggctgacgcctgtaatcccagcactttgagaggccga

SEQ ID NO: 5299 - DNA, 843 bp, Homo sapiens
tcccatgctaaacagcaggcggagattgtcaacaaaaggctggagatgcccagggatggactctttccccagtcctgaaagccagggagctgaggatagcatgcacatgggcagtttctcttagtgaatggcgggtgagatggaggggcgcacagccgtccagtctagctacagaaccttgtttggcacctgggctagaaatagcttctccacaaacctcagagtttatttttacggcaaaatttgattttctaagaggcctgtctycttgcttacctcgcacctgctcaggtggctgcggctgccaggaacagtggtgagtttgtgtcctccgtgagggcacctggccaaggagacatgggtgctgacccccagcctgtgctctgggagtgtcgctgtgcccttgagagttcagagagaggagtgcctctttctaacttgcacaaaagcatccatcggggaaagcaccatgtgtgcatcctgctcagggaaagcactgtgtgtgcatacattgagtgaccatgctctgaaattgatggacttctctcctgtagggatgatctcatttactcatactcagaggccactcagaaagacttttaagcttttgttttctaatcataaatttctcctctctccctccaactccacccctgtctctctctcttacaacaggacaaatagtgccaggagtactggggactacaggatgaatacccagcacatggtgaaacagaagagtgttgcaacgctcactcattcattcattcattcattcattcattcattcattcattcatccatcacttactggtagtcacattgtacattgtcctaggtctg

SEQ ID NO: 5300 - DNA, 843 bp, Homo sapiens
tcccatgctaaacagcaggcggagattgtcaacaaaaggctggagatgcccagggatggactctttccccagtcctgaaagccagggagctgaggatagcatgcacatgggcagtttctcttagtgaatggcgggtgagatggaggggcgcacagccgtccagtctagctacagaaccttgtttggcacctgggctagaaatagcttctccacaaacctcagagtttatttttacggcaaaatttgattttctaagaggcctgtctccttgcttacctcgcacctgctcaggtggctgcggctgccaggaacagtggtgagtttgtgtcctccgtgagggcacctggccaaggagacatgggtgctgacccccagcctgtgctctgggagtgtcgctgtgcccttgagagttcagagagaggagtgcctctttctaacttgcacaaaagcatccatcggggaaagcaccrtgtgtgcatcctgctcagggaaagcactgtgtgtgcatacattgagtgaccatgctctgaaattgatggacttctctcctgtagggatgatctcatttactcatactcagaggccactcagaaagacttttaagcttttgttttctaatcataaatttctcctctctccctccaactccacccctgtctctctctcttacaacaggacaaatagtgccaggagtactggggactacaggatgaatacccagcacatggtgaaacagaagagtgttgcaacgctcactcattcattcattcattcattcattcattcattcattcattcatccatcacttactggtagtcacattgtacattgtcctaggtctg

SEQ ID NO: 5301 - DNA, 843 bp, Homo sapiens
tcccatgctaaacagcaggcggagattgtcaacaaaaggctggagatgcccagggatggactctttccccagtcctgaaagccagggagctgaggatagcatgcacatgggcagtttctcttagtgaatggcgggtgagatggaggggcgcacagccgtccagtctagctacagaaccttgtttggcacctgggctagaaatagcttctccacaaacctcagagtttatttttacggcaaaatttgattttctaagaggcctgtctccttgcttacctcgcacctgctcaggtggctgcggctgccaggaacagtggtgagtttgtgtcctccgtgagggcacctggccaaggagacatgggtgctgacccccagcctgtgctctgggagtgtcgctgtgcccttgagagttcagagagaggagtgcctctttctaacttgcacaaaagcatccatcggggaaagcaccatgtgtgcatcctgctcagggaaagcactgtgtgtgcatacattgagtgaccatgctctgaaattgatggacttctctcctgtagggatgatctcatttactcatactcagaggccactcagaaagacttttaagcttttgttttctaatcataaatttctcctctctccctccaactccacccctgtctctctctcttacaacaggacaaatagtgccaggagtactggggactacaggatgaatacccagcacatggtgaaacaraagagtgttgcaacgctcactcattcattcattcattcattcattcattcattcattcattcatccatcacttactggtagtcacattgtacattgtcctaggtctg

SEQ ID NO: 5302 - DNA, 1434 bp, Homo sapiens
attaatgttcaaagctgtaaaaaccatgaaattaaccagtgttttgtttaggcatatgcagtaaacctctaaagaaaaacaaggaaatgattgaacacaaaattcaaaattaggaggggacaggatctgagagggttccatgacagatacaaaaatattatttttctttaagtaagtagtaggtacatagttgtttattgtattatgattccttatgtattgcatgtatttagtaagtgttcctttgaaactactcaatatttggtaaaagtataaaacaaagggtgctaatatttattgccattattctatctaagcaaaatattttaaaagtaatataatccttcagtctttcataactcatccacttgtgtgtggtctggaacattatttaatgatttatatgatattatggcagtgtttaattgctgtttaaataaaaagataagatggcaaaactggtaataccagttcatcgtggtctgtgaggctgcaaaaagtcaaattccataaagcaaactgacaggctgtctcaggtctattgtgtttcacaagatgcagaaaggaaaagttactgtgaaattacttttataatcgagatattataaaacatttttatttatgaggatcctcttcttattttgatcgaccttttcatgaaataatttcatatacttttagaatgactctttaaatgcctctgaaattccacatatctagtggtttgtatgtatttcaatacaattaaatgataaaacttacagttcttgttttgatgttaaatttattgtatcttctcatttcacacttttgcttctgtcaagaaattgctttagttaagaatcattggtccaaaagtctttcactctcaactaaagtttatggagagacttaaaggagagacccttatttttacatcaatatatcaatttggaagaattttatttatttttttctagttataatttaatggaccacactatactattaatattataaagaattacttaggatcatcttaaaaatgatccaaakcattttggatatgttttaaaaataacacctacggctgagtgtgataggctcatgcatgtaattccagcactttgggaggccgaggccagcagattgcttgagtccaggagttcgagactagcctgggcaacatttagtagaaacactgtctgtactaaaaatacaaaaattagctgggcgtggaggccacttgggaggcaggagaattgcttgaacccagaaggcagaggttgctgtgagccaagatcacatcactgcactccagcctgggcaacagagtgagactctgtctcaaaataaataaataaataaatagaaataaaaataccacataccaagttattatacaattataccaaaattgttacaattttttaaagaaacctcattatacttaaa

SEQ ID NO: 5303 - DNA, 442 bp, Homo sapiens
  misc_feature (1)...(442): n = A,T,C or G
caaaacaattagccaggcatggtggtgggtgcctgtagtcccagctactcgggaggctgaggcaggagaatggcgtgaacccaggaggcagagcttgcagtgagctgagatcgcgccactacattccagcctgggcgacagagcgagactccacctcaaaacaagaaaaaaaaaaggtttatatcatgccattttcatttgactttatcttaygactactatttaataacttgtgctaaaaagttggcttctaaatggctatgttatagtttatcttatggaagaactacagtttgtttaaccttgcccattttatgtgaacttttacaaactccatgatannnnnnnnnnnnnnnnnnnnnnnnnnnnnnnnnnnnnnnnnnnnnnnnnnnnnnnnnnnnnnnnnnnnnnnnnnnnnnnnnnnnnnnnnnnnnnnnnnnng

SEQ ID NO: 5304 - DNA, 1967 bp, Homo sapiens
caaaattgccaccactcctgtttctcttaccactgctctctctgcctagaaacttatgccctctcctcctgttccccatcattcttcctggagtggggtcctaatcatccttgaaaattcatcttaggtgccatcctttatgggaaaatgtcactaagtatatccttcccattgtcattgatagcagctcttcctcaaactgtaatgtacaaataaattacctgggtatcttgttaatatgcagattctctttcaatagggctgagatgggggtttgcatttccagcaaactcccaggtgctgttgatgctgctgatctacagtctacactttgggtactagaayttaataggtaaggaacacttctgctgagctcttgtagcatgctatgcattgaactcttccctagaattcttttgcaatggttcaattatatatctatctctcccactagacagtgcctcttgaggtcagaaactataaatctttcatttgcaactgataagaatacaactgaatctagactgagggaaagggaaagggaggatgttttggctcaattaactgaaacaaaaaaattctagacatagctggatccaggggctcaactgatgctttgtgtacgtgcttccttccctccttggctctgctttatgcagtacggaattcatggtaaaggaagtgaaagtagtgagcttagcaacctcaacaggaagaatatactccttctcaggtgctcacagactaatagagaagatgggttaaatctaataacagaaacatgttcagggtcaaatgagacctgagatgattagaaacctactcaacctggagaattcagagagggatactgagggttgaggtaaaaggatcaggagaagctttccagagtaggtaatgtcagacctgggtcttaaagaacgactgtgagtttgctaaggaagaatatccaagcagaagtcaccttgtatgcccgcttagacagcaacttcgttaataatgaaaataaaaattggaaaagtcaatttgatatctagataactgagttttgtaatgccaaatatcagggtatttgaaaatacctaaatggcctgagtaagatcataaaatcttaatgctggtacgctaagtatcatctaatcggaatttcttattttacagatgagaaaataaattgagaccctgaaattttaaataatcaaacatttattgactcttctgaaggcattaataattcctctgcttattctcaaatacccaggtgcatgcagtgatactaataaaaccataatttcagagatcaataaagtaacacttccaagggagacaagttttttttctaatcaagattttcacaagcaaacaaggcttctaagaaatatatccatgcactttttcaaaaaacttcaaaaacaataatagaacaaactgttaggaatagaaaaccaaataccacatgttctcacttataagtgggagctaaagagtgagaacacatggacacatagaggggaacaacacacactggggcctttctgagggtggagggtgggaggagggagaggatcaggaaaaataactaatgagtaacaggcttaaaacctgggtaatgacataatctgtacaacaaacctccatgacacaagtctatctatgtaataaacctgcacttgtacccctgaacttaaaatgaaagttaaaaaaaaaagaaaaaagtatcaggaattcatttagcaaatatcttatgcacagatactatgaggcgggcacaatgctaaagaaactaaaagggttgtgaagataaataagacgtcgcctgtgccctgcagtggaaatcatgattgagaaattaccttcagagagattaaaatttctaaaacctatagctttaaaatagaggataataggattgagagtgaagttacattgtgagtatcttaaatttttctaattcaaacataccagga

SEQ ID NO: 5305 - DNA, 588 bp, Homo sapiens
ccagtgaaatgaggctattgttgctcaaatacatttatttcctaagagaaaatttaacatgtatctttagtagtaacacagcacatataagcctttgtttaatgtttttgtatgaacgttacatgccaacttctctttgaaaatatcacactatgatctatatctagaactgtttatatatttcttccaaaatgagaagttaaaattccaggaaataaaatagaattagaaagagaatgttacaattttaagatgagaaatgaaaccaccattgsgaattatggactctttcatttaagaaatgtgaagtgattcatcgtggccaccaagccttttgctggtctcactgctgagccaggcattctgtgagccaggagccagtgtagtcacctgtgcagcaccctccatgctcttgtgcagggaggcctgccagcagccctctgggcttcatctcagagctattagaaagcaatcagggaaatgattagacctcagtcgagagccaagttgggacttcagatagttgtcaaatactgattcctctggaatggaactgttccctgaatcatcttattaggccacctccag

SEQ ID NO: 5306 - DNA, 781 bp, Homo sapiens
tttatgaaaccatggctttattggtcttagtcatcccatttccttagaggcctttgctgaactcagtgaacttatttaaacatccccggggcttctcctatttccctcagccccctttctgtgtgcccagagcctggtggcgctgacctaaggagacattgtggaaatactaaatctttctaacaattcccagattgtaggaaaaactgctgtttgcattcttcaccctccatctgtgtccacagagtcacagcctctgtccttgttgcccaagtggagtctcactttgtctcggagggagatggagctaagacccttgtcccagaggcaatccccactcctccctcagggttaaccctggttcattgacaagtgacttctctttycttctttctttttttaattgcaaatctgtagtaaaagaacttacagtcaaacaatgtctgggaagtaccttgaagtctcctgatgaaaggtgctacggaggtcctacatattattatttctgcaaacaagggaaataatagcttgttgcttcatctaattctcctgagtgggcttgggctctgtaattacctgggttatagggcacttgctcagaaggctgcatccgaagacacaggcagccagatggccccgacagggtttcacaacatggtccctgagtgctcactcaggcgtatcttctgtgaggccgacttggggatgagagagttaagccagatttttaatatgtggaaattgactttaatgggagaatctacaaacccgtgaggcaagt

SEQ ID NO: 5307 - DNA, 562 bp, Homo sapiens
tctagttttatataccaatagcaagtcattctttatttaatttagttttttgtttgttatagcaataaagaaaaattgtgtttctttgaaatggtattttgtgtgtgtgtgtgtgtgtgtgtgtgtgtgtgtgtgtgtgtgtgtgtgttctctagattatagtgccctcacgtggctgatgcacatcatttacttatgagtgttttcatatggatgaaaaaactgagaattaagcatgggccttacagcacagctactaaaattaaaaaataatwattattattattgttttgactaaaaccagtactagatgcaaatgaactttctttctagatcaacacaacattgtccagttgtaatagtgttgatatttcattatgtgtaagtaatgtgatcatttatagtaaaaacattaggagtgagaaaagatatgaagagcacgtatttcctctctggaatttctataattgtgtccagattcacaatgataaagagtgccactttacataatggcaactaaatctttattatgctttttattaaatatgaaagtcattactat

SEQ ID NO: 5308 - DNA, 673 bp, Homo sapiens
taaagttttaaacttcatggtggtgaaggcatggtagtgcataaaagtaagatttttccattgaactttgtcttccttgacgatattctactttattcaatatgctcattatgtgcacgattcttaccaactgtgtatttatgaccatgagtaaccctccagactggacaaagaatgtggagtaagtataaatatttttcaatattgacctccctttatgtttcatattgtgcttttaacaccttgagacctcctcaatttctttaacaaatcatgctagctactgttaaccagaccctgattcaaattcatttctgtcactaaatgtcttctaggacaaagcttgtagtgggctcacttagttgtgtaaattactgcagtagtttgactgctattatctgcagccctttatcttctttgtgagtcttatgttcttttgaagatcaccagtgatttactaatatctactgataaaaagtatacctagtttttatgttccttttttaatgactaccacagttctgtgttactagtatatgtttgatggcttttaatggtgcatattttatgaaatacaaatgcttcactcatttttgtattaatacctatttgctcaaatcrgactgaatgccagtgtatttcagattatgtcttcatatagagccacattatt

SEQ ID NO: 5309 - DNA, 791 bp, Homo sapiens
attgtctaataaaatgtgtcaacatcaaggacattcatttaactcaatgaatgaatattttctaaatgacgaagcatgatgttacaaaacaatgcattgtaaaatatgtgttcaaagtgcaagagagacgaaaagattttaatgtagcagagtgcaaagatttcattgatataatttcaaatttcacattgcagctaacctttaaaaaaaactacccttgtcaatttttgtaatagtamtaaaataatattcacaataatctacaaaggttattaacatatttctcactttttcaactacatatcaatgtgagataatttttattaatataattcaactagaacaacatatttcaacactttaaatccagaaactggtatgagaatccaactgtcttctattaaggctgacattaaagagatttgcaaaaataaaaaccaatgccatttttctcacttgttttgaaaaacagcgacttttttttttttacacacagaaaattatttataccaacacatattcagttcattgttgttattttaaatagattttaaaataaatattttacaattatctcagttttaatttctgatacagtaaatatagtccatgtaaacaaaggctctttgggattttccagaagtttaagattgtcttggaaacaaaatttgggaactgctgtattagaatacatctattagatcagggagctcatgcggggatgccaggtttgtaagtctgggaagttttcattgcaggaagggaaatgtgattgtcatggaagtgtcatg

SEQ ID NO: 5310 - DNA, 809 bp, Homo sapiens
agttctatcagtcaagtgatggtttgtcaggcccttcttggtactctaacccctaggccttcttcttgccgctgttgggtttatttgaccccagaagctctgccccatcctgcctctaggatgaatcctaagtggaaacaaaagacactaagggagctctatcgccgtaacgaggaattcacatcatgtcaccgtacttagttagtccagccctgatcatatgcctcaatgctggtaactgggcatcttctttcttctccttctgataatcagatcaagaattcgcctcctcttgaaagcattttcacagtaggtataaatatttgctaaattaatgacaaaaagactttacaccagtktccctcttggtttagagctctgccaggtccttgtcagtacgtcctttaatcccctacctcttcactcctggcagccttccctgatgctggctgaccatcagtagcctacacctgagagcatcagaagtacaagatatcttcctcgattcctactgccacattcatccacctttaggacttctcacttattccattagactctgtaaagccagctgcttttctgatccatgcttgcttgtcatacccagtggataccaccttctatttgccaactgttctctctcagggtctaaaacaggtctatatcctcagggcctgcctcacttggttcctgttccagctcgtggcttagccataccacaggaccctcactgggttaactggaaagatgctgtttagtcttggctaccatggcagaaccctgacagcacacaaagcagtgcaagtaat

SEQ ID NO: 5311 - DNA, 809 bp, Homo sapiens
agttctatcagtcaagtgatggtttgtcaggcccttcttggtactctaacccctaggccttcttcttgccgctgttgggtttatttgaccccagaagctctgccccatcctgcctctaggatgaatcctaagtggaaacaaaagacactaagggagctctatcgccgtaacgaggaattcacatcatgtcaccgtacttagttagtccagccctgatcatatgcctcaatgctggtaactgggcatcttctttcttctccttctgataatcagatcaagaattcgcctcctcttgaaagcattttcacagtaggtataaatatttgctaaattaatgacaaaaagactttacaccagtgtccctcttggtttagagctctgccaggtccttgtcagtacgtcctttaatcccytacctcttcactcctggcagccttccctgatgctggctgaccatcagtagcctacacctgagagcatcagaagtacaagatatcttcctcgattcctactgccacattcatccacctttaggacttctcacttattccattagactctgtaaagccagctgcttttctgatccatgcttgcttgtcatacccagtggataccaccttctatttgccaactgttctctctcagggtctaaaacaggtctatatcctcagggcctgcctcacttggttcctgttccagctcgtggcttagccataccacaggaccctcactgggttaactggaaagatgctgtttagtcttggctaccatggcagaaccctgacagcacacaaagcagtgcaagtaat

SEQ ID NO: 5312 - DNA, 1456 bp, Homo sapiens
aagccaccaagaattgatttttctgtatggtgtgaggtagggttcaaattttcaccccttactcagaaggctctttttttctacataatggttttggtttgatctctctgctttctgaagtctcttatcctatgaaacactatcaagattctacaacaatgaagcaaaacaaagtatcaatcccacagttttatttgtaaagaacaaagcatgaaaagtcatatttaaatgtactcccaaacctgaaaaacccacgtcagtttgtctgatatgtatgttaaagtgcttaatatcacaatactctttcaaattttatattatgttcagatgagaaaaaaaatccagttctgatgcattttgctaacaatacaaagaaaaacaatataatttaaattcagaaaagctaattaaaaaaaagatacacaggttacatttatacatggttcaagtgtaacacagagcattctaaatgtttcacaccctcatttgattgacaacaggaactccttactatacttctctactgttgacaagatttggtgtttagaatcaagattggattcacacacaagtacattcaggtaaattagaacaaatatgattccctcctacataacccaaggataccctggatcccttcgaatgaggaaaaattttatttgaggttttttttttttcctctagcttgatgtgatrtatctctgaagtcaatctttatcttgtccttgagagggtgaacagctccaatcagattttggagaggaggttctccttagattcttttgatcacactacatcagcaacctcttcaaaaagcttagaattcagttgattcaagggatttataaatttattttaataggaataaaggacctagtagtttattatccttttctgtctcctatttatgctaaacagtaaagtaataaatacttatataagaaacagacttcaaaagacatggatgacttggaaataggattcactttataaaagtagagaagggctcaagactctcaatcagtgaaggtgtgttaatactgaaatataaatagctaaagttcagattgtcttttcaacatagtgaaaaggatacactagtttctgtaaacctcacagaaaatattcacagttccctaaatgaaaaattgtaatctttagcagaaagaagatatttcattatgaagagctacactcctaatgttgtgaaataaatatttccctggaaatttgaggtccttgtctgtcacctcatgtttcaaaataccttagggatgtcaacatatactacacataagctgttgtatagtcttgaacctctttttcacttacatttacatataacagtgctttattgccaaaaaaggaaatatgagcagttcagtatttcccccatatcattcatatagtgtgatagaagttcattaaaataattttttaaaaagccatgtgaaag

SEQ ID NO: 5313 - DNA, 757 bp, Homo sapiens
gtatttattaatttgtattcacataaaggtagatatattgagcacatttatttttctttttaattttctctactaaaattcaaaagcaacttaaatgcaagctatgaaactgaagcttaaaagtacaacacattgaacctgggaattatatctttaataggcctaaaaacatttataagtaaaaatattattcattctttactttttaatcataggaggtgtgtatgtgtgtgtatctctttcttgtttaaattccagaaggtaatataaatgaaccaaagagagtgtacaaaatccgccccacttaaacgcttgaagttggtttttactgacatatatgatatctgcatggagtgaattcactatgttctgtttcacagctgctctgactttcaagtgcctgggagatcagtggccagtgtactgccgagtgatacgtgaaaagaacctatgtcaggacatgcggtggtatcagcgctgctgtgaaacatgcagggacttctatgcccaaaagctgcagcagaagagttgacctctagcaggctggctggatcacagctcttkgcaattacattatttataaacacacacactagcatgtttttcagaccaaatattatcagattacatataatttaatcaaattaatttatttttttgcctgccaaacatccaatgtggtgcttgttttggttacacaaacattttgatttatactatatggcttcataaataattttatatgaatgaattagtt

SEQ ID NO: 5314 - DNA, 807 bp, Homo sapiens
cgatactctcttggcagctacgttcagccacttcccttcatcccagtcctaatgggcttctgattgatcttgctttccagcttgcattaggacagctttggccaagtctgtatttcactgaggatattctaacagaattgagaaagacggcaaaggaggaaatcaaatcatgctacartgaaaattaggtcgctttcaagagtagtcttcagtttttgttgttgttgttgttgttgttgttgttgttgttgttttgagatggagtctcgctcagtcgcccaggctggagtgcagtggcgtgatcttggctcactgcaagctccacctcccgggttcacgccattctcctgcctcagcctcccgagtagctgggactacaggcgcctgccgccgcacctggctaattttttgtatttttagtagaaatggggtttcaccgtgttagccaggatggtctctgtctcctgacctcatgatccgcccgccttggcctcccaaagtgctaggattacaggcgtgagccaccgtgcccggccttttgttttgttttaatgtcaagcgttgtttttaaccatgcgggcagccttttcatgctcactcagtctcttgcgttcacagtcccacaagcttctgtaggtggcaaccctctgatattttctgggctattcagtgatccgatggcacaagcagtgttttaagggcatagactttagtgccagatgggtggcctgggtttgaatttcagtttcccccttttttgtggcaaattacataatctctcagatctacatttctctcttctgtaaa

SEQ ID NO: 5315 - DNA, 622 bp, Homo sapiens
agactccatatcatttacatgattcattctctgatcctgttttgactgggttggtttcaatcattcattagacacctatttcttctggtctattatgagatgtgtgagatgtattggggatggaataataaataaatagaaataatctcactctactcaatgagctttcatactagtagaaaataaaagatcaagaacaagtacacagacaagtaattcaaataattataaattgtggcaaattctatgaagaaaakaatgatgcagcaaaagcaaacaataacagggagatctagttagggtgaatcagaaaggcctttcagaagaagtgctatttaagccaatgcttgagggatgagcaggaaatgcccatgaaaaaaaaaagatagaaggacattccacacagtgagggcagcaagagatcagaggcgctgggatttcagcaaactttggtaactgagcacagctaagacaatgtgtttggagggggctgaatgaataggaggccctgagtatcttttacagtacagtgtaagaatataaagtgatttaatttaaaatgactcagctattgctttacttctataatcccattcagacaaaaaagattgctgtgaatcca

SEQ ID NO: 5316 - DNA, 806 bp, Homo sapiens
tgatcactaagacaagggcactcagtgagaccacccagaggtctggaagcgagggtcagagggggagatgtatgtctgccccagaaaggctaaagtaggtgccccagtatcaaggaggaaaacccctgtcttcccagcaccattttgcccaagtaatatccaagaagatgttagataccttctcagataccccttcagcctgccttctgtggagagcaacccatcgggcagacgtgtctctgcgtggacttcctgcgtggacctcctgcgtggacccataccacgggtcctgcaatccattctccacaatgcagccgtatggcttccttaaacacctgtggcctttccattaatcagtaattaattataatgaatgatgctgaagcagagagtgtgggagttacggtaagagccagtggtcactaaactaggtgaccaagggaacatgtagagttttctcttccaaatagaaagacctgctcattagagggatatggcctggctgtcagagagggcaccagagtgggattctctgcttccacactgagtcccrcgtgtctttgccagctactgaagcttgtggggcttgaagtgtgggtaacaccatgctggcctcagtgggctgcacagaggaggcagaaggtggatgagaggggcctgccactggggagggagagcactcttgttgggcagctgagaatgacctccggcaccaccatggaacccgctgaagatgttgctgcctcactgagcctgtgtctgcagagaggatgttctgcaactgaagctgaccttgcactatgaac

SEQ ID NO: 5317 - DNA, 813 bp, Homo sapiens
ggaacggtgatttggcgatgtttctgggtctgttcaggtgaatatagttcttggctcctgcaccgataaaccccaaactcccaggcttttggaattcatcagtttgaatttttgtttattcttttgtttctccttaatttttcactgtgaaacatgtaagcatattttactataaaataggcaagtgtctcactttcttatatattccatctgagctgcttctaatattctcggactgggaaaggaaatgattggccttataagaattgtgaatgaagtaagagtcagtagacttaagagttaggaaggcctgaggagctctcctctgagttaagtgattgaactctgtgatattttgagtgttcagaggccttctatgttttcttttggtctttgatttgatccwgcctagacaaattgacccctagagagaggacgacagcatgcataatttatgcataaggtctttgccaagggcaataaatcagaaggaaataatattggtacttagataattttagttcaaagatggccaaacatacacatatacctagccactaacatgcacacacacacacacacacatacacacgaatagcaatgacagacaaagccacaaaaccaactaacccagtttttcacttttatatctccgctccctaaaaagttgtctgggaacaaatgattaaaatcttaacattttcaaatgggaaagagctttcacagtcctttcattttgcttccctctttttagttcaggaatctcttctattatctcctggatagacaggcactttaacccccttcttgcat

SEQ ID NO: 5318 - DNA, 636 bp, Homo sapiens
atgtctgggaaggggcaagaaggtactttctggagtgctagaaatatgctgtatctgagaggtggttgcgtggaggcatatacatgcgaacatttaaccagccgcgctcgaaaaacgtcttcccttcactctatatatatctcagtaaacaattaaagctatacatgtgtgtagtcaacaatcccaaggtggaacatggtgcagtggagaaaggctgtgagctccagaggaagagacaggacagcttctagttttttccacctgtctgaagtagttcctgcctgccacttggtagacaccaaataaatactgttgaataatcaaataaattaatttgatgctgtgactatatttcttaacatggaaacctgtcaatgatatctttccaagtgcaataaacaggctgtagaagagcatgtgagaattatctcatttttgtaaatatttatgttcatagtttttgtgtatctagtctggaagaacacaccaaaatcctaatgaaagttatgttgggtgaaaagataaagacaatatattttcattctttttttcttctttgtacttaaatttttttctagcaagttaaactgggtgaaaaagcaaatatatatatctatatagatatatatakatata

SEQ ID NO: 5319 - DNA, 808 bp, Homo sapiens
cccagtctgatgctcttacccggaaggtataaattcttttcatgagttcatagtccatgggtttggaggtggagatgatccccaggtargggtcaatagaaaatggcaaagcttttggtccagcaatggaataggtgacatatccattttccccatgatcccggtcagtggcagtcacagccaaaacactggtgcctggagggatgttctcatccaaggtaccatcataggaagacctgttgaagaggggggcatggttgttgcagtccacaatgtcaatgaccaccacggtggaggcctggcccggtgaggttctgatgtgtagctgatagtgggctctgtcgtggaagtccatgagctttgtggtggtgatcaacccagttcgagcattaagtttaaatcctacattctctgaagatggctttagaacatactgcaggttggggaaggctggggtgactctcaccatcaccacgcggctgccaggaggggaaaactcactaagctgcactctgtaaacagccttctcgaatttgagggaagacagtttggaaggtggtaggtgaaagcccctgatctgggaataaaaataagggccgctcccactcctggcctggaggctgaggttgaacccatgaaggtactccatccagttgatgtctttgacagacaccaaactgaactcattgctccgggcataagacttgatggctttgaagtgctttccagggtcaccaccaacaacttccactgactccacttcagctcctgagctatttgcatcgaccagtacagtggcataggtggt

SEQ ID NO: 5320 - DNA, 478 bp, Homo sapiens
caagttttaggaaaagataggattgaaggggccctctctgaaggcctgcctactccaaaccatcctaccacccatctactgctgcctgaaaaactcactattagtgagtcatatctttgggtaaaggctgtattgccccaggtgggatatgtggaacttggggaacatggacaaacaacttcaataatttataccttctatttgtgacaggtgatgtagtagttatcagtttaaggcaatgatatcgtttcccttttaaacaaattttagggttttaaaaaatgggtcaactttaagaagaatgttaaacaacagtacagatgacataaagataagacaaaaatcatgcaggggaacacaaatgaagtgtgaaaaacactagggtttactttcaagaccctccctttaaatacaactacccggccraaggtggtgtcacacgcctgtgatcccagcactttgggaagctgaggcagga

SEQ ID NO: 5321 - DNA, 626 bp, Homo sapiens
  misc_feature (1)...(626): n = A,T,C or G
tgctccaatgagagtgtatttacacaacgattcatgtgcaaggatgtccactgagcattgtttgcaatggagaaaaattagaaggaactagagtgtccatttgttagaggaatggtgagataaattatggtacatccatacgatgagatacagtgaagcaattttaaraatatggtaaatctctatgaactaatatggaaagatttctaagatgtgttgaatgattaaatagcataggatactatttttaaaactataaagtagggatgggatggatgggtggacagatggatgagctcgtctgtgcccaggcaaatgctaggaagagtatacacacactcttacaagcagttgaggcggggagagaggctgtgattaggtgaataagggtttggggggccttccatttatggggacagtgtatctctttatggatgaatatcttacagtgaccactagtattaaaaaaaaaaaaaaaagaaggcaaggaaagcaagcaaggagtgggaggggattgccagcaccgncactctctgcctgggtcccgtgacggctggtggcagactggtggacctgctgattgcctttgctgttcatttcttttcagatgcccttctttctcttcc

SEQ ID NO: 5322 - DNA, 626 bp, Homo sapiens
  misc_feature (1)...(626): n = A,T,C or G
tgctccaatgagagtgtatttacacaacgattcatgtgcaaggatgtccactgagcattgtttgcaatggagaaaaattagaaggaactagagtgtccatttgttagaggaatggtgagataaattatggtacatccatacgatgagatacagtgaagcaattttaaaaatatggtaaatctctatgaactaatatggaaagatttctaagatgtgttgaatgattaaatagcataggatactatttttaaaactataaagtagggatgggatggatgggtggacagatggatgagctcgtctgtgcccaggcaaatgctaggaagagtatacacacactcttacaagcagttgaggcggggagagaggctgtgattaggwgaataagggtttggggggccttccatttatggggacagtgtatctctttatggatgaatatcttacagtgaccactagtattaaaaaaaaaaaaaaaagaaggcaaggaaagcaagcaaggagtgggaggggattgccagcaccgncactctctgcctgggtcccgtgacggctggtggcagactggtggacctgctgattgcctttgctgttcatttcttttcagatgcccttctttctcttcc

SEQ ID NO: 5323 - DNA, 704 bp, Homo sapiens
tgccttgggggccacagctggcctcttagcgcgctgccctagcatctccctcttcatgctccgtgggcccctggatgcccgcagagtctctctgaagagccaggctcagactgtgtggtcccttggcacccacagaccctctgcccttctcttctcccctccactgatatgtccctggcatatgttcttggtgtgtcttcaacagtgcacaaagtgcgatggagtgcaaggggccggacaggtgcagggggacccgactgtggccggccctgtgggccattctgaggggtgggggctccatcctgggggcaggggcaaccactggctggttttaggctcaggagtgaccaattagaaagctagagttaagattcaggagagagatgctaaggtccagaatagggaacatgagkaggtgagagagggtgttgggagccacggggcttagtgtggagggagctggaggcgctgacaacagcattcatattcagtgcgtgtctcctgggtgccactagatggggctataatggaagaagacacaaggtccctgctctcaggaagcttccgttctagaagaaagaaacagtgcgcagtgattgctgtagtgtccacaaacatgcatttacaagataaattcagatagtgttgattgccgtgaagaggttacactgggcagtggttaggtgtggcctgggggacgttgg

SEQ ID NO: 5324 - DNA, 860 bp, Homo sapiens
tcctgggtcctgtcctgctgatgtatcatggcccatgtaactttctttttgctgccaaagttgtattttgaaaagtgagaggtactaaaaatttaataggattcaccccaaagatacactataattgcttataaaacctatttaatcatcagccaacaaaatttggtcaccttaaggttcttacagccttatgtggcaactgtacagcctctatgtttacctaagtcacagaaagcgggcgacgccctatggctgtggatcaaacacaggaacatggctggccaggtcacccaggacctcagtgtgaggacgctattctgaatcttgtgccccactgcccctagactgctggtctccgggactaggaatctccttccttctccagcaagttggccacctctctcccgtccaaatgcctgagagakcctgggctccacctaggctcagagcatcaactctcccttctccagaggggggtcccaaacccaaggcccagtcccaactctatgttccacccttcctgcatccaacaatctatcccagaccacctttccggtctctgctcctaccaccgtgtaccttcagactctgacccctgcacccggtgcaccatgatttctgggctgcagtcccccagagagtgccctcagaccactcttcccacaccgcctgcagacacgccaagtctcctggaggcctggactgatggctctctttagaatgctctttgtacgaaagctatcagggccctgccttgaggaattctgcatggcatcaagtctcagtcgcatgaacccccaaagcttttcaatttgatgacgtcacaactattttaaagatataagctctaaaaatccgca

SEQ ID NO: 5325 - DNA, 750 bp, Homo sapiens
aaaaaaacagagatagggtctcactaggttgcccaggctggtctggaactcctggactcaagcgaccctcctgccttggcctcccaaagtgttgggattacaggcgtgagccactgtgcctggcctctctctgcttctggccccttctttgggtccttcctcctttctctcttcatctctcttttgtttttgtttttgagacagggtcgcccaggctggaatgcagtagtgcgatcatagctcactgcagccccaaccttcccaggctcgagcaatccttgcacctcagcctcccaagtagctgggactacaggtgcacaccaccatgcctggctaattttcttcattttttgtagagatgggagtctcactgtgttgcctaggctggtctcaaatttctgggctcaagtgatcctcctgccttggcctcctaaagtgctgggattatgggcgtgagccactgtgcccagcctgtcttcttttctctgtctyccccttccccacttgtttttgtgcctctcagagtctgcagcctgttctggaccagggagcacccaggtgctgggggcaggggctgggtacctggggaagtgaaagtgctacaggctcgaggtgggaaggtccctgggagtggggagggcgctgggccgtgccaacacccccagcggaagctgagcatcaggcggtacttcctgcctctgcagtggggcccgaggagcggaggccccagaggaggaggcactgagcctg

SEQ ID NO: 5326 - DNA, 750 bp, Homo sapiens
aaaaaaacagagatagggtctcactaggttgcccaggctggtctggaactcctggactcaagcgaccctcctgccttggcctcccaaagtgttgggattacaggcgtgagccactgtgcctggcctctctctgcttctggccccttctttgggtccttcctcctttctctcttcatctctcttttgtttttgtttttgagacagggtcgcccaggctggaatgcagtagtgcgatcatagctcactgcagccccaaccttcccaggctcgagcaatccttgcacctcagcctcccaagtagctgggactacaggtgcacaccaccatgcctggctaattttcttcattttttgtagagatgggagtctcactgtgttgcctaggctggtctcaaatttctgggctcaagtgatcctcctgccttggcctcctaaagtgctgggattatgggcgtgagccactgtgcccagcctgtcttcttttctctgtctcccccttccccacttgtttttgtgcctctcagagtctgcagcctgttctggaccagggagcacccaggtgctgggggcaggggctgggtacctggggaagtgaaagtgctacaggctcgaggtgggaaggtccctgggagtggggagggcgctgggccgtgccaacacccccagcggaagctgagcatcaggcrgtacttcctgcctctgcagtggggcccgaggagcggaggccccagaggaggaggcactgagcctg

SEQ ID NO: 5327 - DNA, 811 bp, Homo sapiens
tactgcgtttccacttccccttgagcatcccaagtatctagtaacttgtcgatttcaatgatctccccaaatctccttattacataggaattcaccaaaacactccctgtccttgaaaacatcccatttcccctaatatcaccccaactccccttactgcagactgattcctccggyacaccctccatccctccagttcccaggctgttagtctaatttctcccgcgaggtctctaatccccgtctccttccactccagggttactgtggcaacgccaacctttgaatccccctcctgcgcgctgagcggctcgtaaccatggagaccgaagcaggtttcccgcgtccgcctcctcacccagagactgcagccccggcgcccagaccctttggacaaggagatccaagcgggccccacaatgctcagcgggtaaagagctcctccccactcctctcccgccagcagacgaaggaaacaccccgcagcctgcacatgctcagatggagctctgggcccgcgggttctactgcgcaggccctcacactcagcaaagggacttggacgcgaaagcgctggtggcgctcagccggctgggagttgtagctttctggctgctacagcaggagatacaggtggccaatgggtgagctggctggaggtaggaacaaggttaaggaagctgggatcttcgtgcagactggatcgtcactatagcaacaatgaaacatcgggaagggctagttctgctaggcagtctgccattttcattctttcatctttttttttaactcaaagcttactttgcaacag

SEQ ID NO: 5328 - DNA, 811 bp, Homo sapiens
tactgcgtttccacttccccttgagcatcccaagtatctagtaacttgtcgatttcaatgatctccccaaatctccttattacataggaattcaccaaaacactccctgtccttgaaaacatcccatttcccctaatatcaccccaactccccttactgcagactgattcctccggcayaccctccatccctccagttcccaggctgttagtctaatttctcccgcgaggtctctaatccccgtctccttccactccagggttactgtggcaacgccaacctttgaatccccctcctgcgcgctgagcggctcgtaaccatggagaccgaagcaggtttcccgcgtccgcctcctcacccagagactgcagccccggcgcccagaccctttggacaaggagatccaagcgggccccacaatgctcagcgggtaaagagctcctccccactcctctcccgccagcagacgaaggaaacaccccgcagcctgcacatgctcagatggagctctgggcccgcgggttctactgcgcaggccctcacactcagcaaagggacttggacgcgaaagcgctggtggcgctcagccggctgggagttgtagctttctggctgctacagcaggagatacaggtggccaatgggtgagctggctggaggtaggaacaaggttaaggaagctgggatcttcgtgcagactggatcgtcactatagcaacaatgaaacatcgggaagggctagttctgctaggcagtctgccattttcattctttcatctttttttttaactcaaagcttactttgcaacag

SEQ ID NO: 5329 - DNA, 841 bp, Homo sapiens
gatacaatggaaaacaaaatagagcttctattttggcgggagatcgacttaataactgtgaacacgtgtcactggaaaaagcagtatgttaataagtaactgggctgctttgggaaaaatggaaatgcaggcgatgttagaacactggtacacacactaattcattcatcctcacaaagccctatagacaggtactattatgacccctcaactgtaacataggctggaaggtcacatgacaaggaagtagtggagctgggatttgaacccaggcagtctggcttcatacttgataagcttaatcacaatgccaaagtggtaaatagctgtgtggcataatttcaggtagtgataagtgctgtgaaggataaagcaaagaaaggggcagggatggctctttagagagactacttagggatggctttcaggaagaggtggcatttgagcaggggcccgagggattgatgtgacttgtgataaaagaaaaacttcagacgaattaaatttaaagaagtttaattggctaggcactgtggttcatgcctgtaatcccagcactttgggaggccgaggagggcggatggcttcaagtcaggagcttgagaccagcctggtcaacatggcaaaacccygtctctactacaaatacaaaaattagctaggcatggtggtgggcacctgtagtcccagctactcgggaggctgaggcacaagaattgcttgaacgcagaaggtggaggttgtagtgagctgagatcgcaccactgtgctccagcctgtgcaacagagcgagactccatctctaaataaataaataaatagagtttaattgagcaatgaa

SEQ ID NO: 5330 - DNA, 841 bp, Homo sapiens
gatacaatggaaaacaaaatagagcttctattttggcgggagatcgacttaataactgtgaacacgtgtcactggaaaaagcagtatgttaataagtaactgggctgctttgggaaaaatggaaatgcaggcgatgttagaacactggtacacacactaattcattcatcctcacaaagccctatagacaggtactattatgacccctcaactgtaacataggctggaaggtcacatgacaaggaagtagtggagctgggatttgaacccaggcagtctggcttcatacttgataagcttaatcacaatgccaaagtggtaaatagctgtgtggcataatttcaggtagtgataagtgctgtgaaggataaagcaaagaaaggggcagggatggctctttagagagactacttagggatggctttcaggaagaggtggcatttgagcaggggcccgagggattgatgtgacttgtgataaaagaaaaacttcagacgaattaaatttaaagaagtttaattggctaggcactgtggttcatgcctgtaatcccagcactttgggaggccgaggagggcggatggcttcaagtcaggagcttgagaccagcctggtcaacatggcaaaaccctgtctctactacaaatacaaaaattagctaggcatggtggtgggcacctgtagtcccagctactcgggaggctgaggcacaagaattgcttgaacscagaaggtggaggttgtagtgagctgagatcgcaccactgtgctccagcctgtgcaacagagcgagactccatctctaaataaataaataaatagagtttaattgagcaatgaa

SEQ ID NO: 5331 - DNA, 742 bp, Homo sapiens
cgcgccatcctccgctcccttgtgcccttggaggaccttgtgggcatcatcagcctcccactgcagattcccaccctgggcaaaggtgcagaggggatggaacttggcgaaggagtgatgctggggagggagcggctgggtccgcagggcatccccgaacccaccctccctgcctgcagatggggctctggtgcagccaaagatgtcagcatccttcgtgccggaccacaaggcgtccatggtgctcttcctggaccgtgtgtatggcatcgagaaccaggacttcttgctgcacgtgctggacgtggggttcctgccygacatgagggcagccgcctcgctggacacggtgagcaaccctgcccagcctggccaccctccccacttccacagagggacaggagatgggtcacggtagagcagcagcagctgcttttgtttttcttgggattgtggacatatcataatccccaataccatcatcaagatagaaaatgaaaacgaagaaacactgaattccgatgaagggtgagtaggaatctccaagacctccagttataagaaatcatcatttgaggtcaggcgtggtgactcgcgcctgtaatcccagcactttggggagccgaggcgagcggatcacaaggtcaggagttcgagaccagcctgaccaacatggtgaaaccgcatctctactaaaagtacaaaaattagccagacgtggtggcgcacacttgtaatccca

SEQ ID NO: 5332 - DNA, 728 bp, Homo sapiens
agtacagtgaatggctcgtggaaggtggttgtatggtagaggcaacatttcaatgagtagaatgaactccagaaatggatttcctgggtctgaatggcagctctgctacttactggctgtgcattcttttttttgagatggagtctcgctctgtcacccaggctggattgcagtggcatgatctcrgcacactgcaagctctgcctcccgggttcgagtgattctcctgcctcagcctcccgagtagctgggattacaggcatgaaccaccacacggggctaatttttgtatgtttagtagagacggggtttcaccatgttggccaggttggtctcgaaccaccgatctcaagtgttccgcctgcctcagcctcccaaagtgctgggattacaggtgtgagctgccccgcccggccttgctgtgcattattttctgcacctcaatgtcctcatctgtaagatggaagcaaaaaatatacttacctctaaggtgttgtaaagaccaaataagttaattcatactgcttaggacagggcatggtatacagggctgtgttagattatcatcattcatcatcgtcatcatggatgagagaaataaatacaagaaatcataagaagtatattttggtaagaatgtaagagttttccattcttctaggaatagactgatggttctgtagccatggtaataagtagctacctagacaggtttaaatccattaaat

SEQ ID NO: 5333 - DNA, 728 bp, Homo sapiens
agtacagtgaatggctcgtggaaggtggttgtatggtagaggcaacatttcaatgagtagaatgaactccagaaatggatttcctgggtctgaatggcagctctgctacttactggctgtgcattcttttttttgagatggagtctcgctctgtcacccaggctggattgcagtggcatgatctcggcacactgcaagctctgcctcccgggttcgagtgattctcctgcctcagcctcccgagtagctgggattacaggcatgaaccaccacacggggctaatttttgtatgtttagtagagacggggtttcaccatgttggccaggttggtctcgaaccaccgatctcaagtgttccgcctgcctcagcctcccaaagtgctgggattacaggtgtgagctgccccgcccggccttgctgtgcattattttctgcacctcaatgtcctcatctgtaagatggaagcaaaaaatatacttacctctaaggtgttgtaaagaccaaataagttaattcatactgcttaggacagggcatggtatacagggctgtgttagattatcatcattcatcatcgtcatcatggatgagagaaataaatacaagaaatcataagaagtatattttggtaagaatgtaagagttttccaytcttctaggaatagactgatggttctgtagccatggtaataagtagctacctagacaggtttaaatccattaaat

SEQ ID NO: 5334 - DNA, 663 bp, Homo sapiens
aaagtgtggttgcttgtcatgagggggatgggttattttatcagagaaaacaacagaagaaacaggacaagagaggtgtctgtaatcccagtgctttgggaggccaaggcgagtggatcgcttgaacccaggagtacaagaccagcctgggtgacatagtgagatcccatctctacaaaaaaattaaaaattaaaaaattagccaggggtggtggtgtacacctgtagtcccagctacttgggggactgaggcgggaggattgctggggctgggggaggttgagactgcagtgagccatgattgcgctattgcattccagcctgggcaacagagcaagaccttgtttcagaaaaaaaaaaaaaaaaaaaaraagaagaagaagaaagaaaaagaagaaacaggcgacagagaaaagggagccaaaggttctcagcctgaggctcccgggcaggtggggcggggatggctgagcctcctagtgcctcacgaggacctccctcccctagctgggcctggagcgcttccacagcgtgggaatcatgggtctcaactcagaagagtgggtcatcgccagcattggtgccatcatggcagggtaaagggcacgcggcctctccccggagtgttttgcgggcaggaagccaccagcccaccttctatgg

SEQ ID NO: 5335 - DNA, 490 bp, Homo sapiens
attcgggaccagcctgggcaacaaagcaagaaccccaacataaaaaaaaaaatctgtatttaaaagcmaaacacaaataacaaacaaaaaacaccagcctgggcaacatagtgaaacctcatatctactaaaaacacaaattagccgggcgtggtggtgcgccctgtagtcccagctactcgggaggctgaggcaggaggatcacttgagcccgggaagtcgaggctgcagtgagctgtgatcgcgccactgcacgccggcccgggtgacaggagtgagaccctgactcaaaaataaatacatatataaataaaaattaactattgtctctggccccagaccataggtgtccctgcagcaggggccgactggcgtgctctccactcgggcccctctaggaggtgctaagtaaatatttgaacgaagacctctgagtccctgtctggctgcgactatgtcctctcaggccttcccacgtggcagctgcagg

SEQ ID NO: 5336 - DNA, 490 bp, Homo sapiens
attcgggaccagcctgggcaacaaagcaagaaccccaacataaaaaaaaaaatctgtatttaaaagccaaacacaaataacaaacaaaaaacaccagcctgggcaacatagtgaaacctcatatctactaaaaacacaaattagccgggcgtggtggtgcgccctgtagtcccagctactygggaggctgaggcaggaggatcacttgagcccgggaagtcgaggctgcagtgagctgtgatcgcgccactgcacgccggcccgggtgacaggagtgagaccctgactcaaaaataaatacatatataaataaaaattaactattgtctctggccccagaccataggtgtccctgcagcaggggccgactggcgtgctctccactcgggcccctctaggaggtgctaagtaaatatttgaacgaagacctctgagtccctgtctggctgcgactatgtcctctcaggccttcccacgtggcagctgcagg

SEQ ID NO: 5337 - DNA, 1528 bp, Homo sapiens
ggacgggagagcagcgcagccgggtgcaccgcggccgcgccccgggagggctgttcgggccagcgcccgccggctgctccgcgctgacagcgccgggctggggcggggcggggggctttgcaggccgccagtgtcgacatgctgctggaggaggttcgcgccggcgaccggctgagtggggcggcggcccggggcgacgtgcaggaggtgcgccgccttctgcaccgggagctggtgcatcccgacgccctcaaccgcttcggcaagacggcgctgcaggtgaggccgggccggtccaggttggggcggggcggctaagcgggatgaggatcgagaccccagagctcctctctggtctcctggccctggtggtgacccactgggaaccggtccttcttctctaggctttcattgttcccccacagtcccccttcgaaggtgggtggtgggtgaggctaggttgtggggggaggggagagctttttagcatcttctctgggaggattcctggttctctgagtgccggggattcactttccctggggaggttcttattccgtgggtgcgggttcagctcctttggatgccgtttccatggggacggctcacgtttcttggggcttctrtggggagatccgatctctggaaggagaggtcctgtctctaggggttcctcattttgtagggggctctctgagacaaatctggttacttgggggtggggtcttcattcctaaaggttatgcggatccttgatatagtatgggggccccaatggaggaacaatgtcagattgcaagacatccctatattccctgggagacattttacagggaagtctcgtttctcttttattattacttttggaatcccgcttcttgaaaggagctctcaggtactctgaggtgacatcaccattatgtaggaggaggctatttcctggagaaggggttcgctttcctttgacatcttttttcccttatgaggactatcaattctttgggggtagttctccatctctgggggcccatttcctggaggggattttctgtttcctggtgattgcccatatctgggggcgtctttggtcccttgggggagagtcttaggttccttgaaagtttccatggggggctgttctctgggttggggggtctcattcttaagggagtgaccagcttttggggggggtccctattcccagaagaactttcctgggggcttatgcagcttctccgttcactagaggacccctcctctagcatttcctgtttctgggagatgcctctttctggatgacccttctctttccagtgaccccttttgtggaacctcctcccttgaggacctcctgatcctctgtccctcacacaggtcatgatgtttggcagcaccgccatcgccctggagctgctgaagcaaggtgccagccccaatgtccaggacacctccggtaccagtccagtccatgacgcagcccgcactggattcctggacaccctgaaggtcctagtggagcacggggctg

SEQ ID NO: 5338 - DNA, 1528 bp, Homo sapiens
ggacgggagagcagcgcagccgggtgcaccgcggccgcgccccgggagggctgttcgggccagcgcccgccggctgctccgcgctgacagcgccgggctggggcggggcggggggctttgcaggccgccagtgtcgacatgctgctggaggaggttcgcgccggcgaccggctgagtggggcggcggcccggggcgacgtgcaggaggtgcgccgccttctgcaccgggagctggtgcatcccgacgccctcaaccgcttcggcaagacggcgctgcaggtgaggccgggccggtccaggttggggcggggcggctaagcgggatgaggatcgagaccccagagctcctctctggtctcctggccctggtggtgacccactgggaaccggtccttcttctctaggctttcattgttcccccacagtcccccttcgaaggtgggtggtgggtgaggctaggttgtggggggaggggagagctttttagcatcttctctgggaggattcctggttctctgagtgccggggattcactttccctggggaggttcttattccgtgggtgcgggttcagctcctttggatgccgtttccatggggacggctcacgtttcttggggcttctatggggagatccgatctctggaaggagaggtcctgtctctaggggttcctcattttgtagggggctctctgagacaaatctggttacttgggggtggggtcttcattcctaaaggttatgcggatccttgatatagtatgggggccccaatggaggaacaatgtcagattgcaagacatccctatattccctgggagacattttacagggragtctcgtttctcttttattattacttttggaatcccgcttcttgaaaggagctctcaggtactctgaggtgacatcaccattatgtaggaggaggctatttcctggagaaggggttcgctttcctttgacatcttttttcccttatgaggactatcaattctttgggggtagttctccatctctgggggcccatttcctggaggggattttctgtttcctggtgattgcccatatctgggggcgtctttggtcccttgggggagagtcttaggttccttgaaagtttccatggggggctgttctctgggttggggggtctcattcttaagggagtgaccagcttttggggggggtccctattcccagaagaactttcctgggggcttatgcagcttctccgttcactagaggacccctcctctagcatttcctgtttctgggagatgcctctttctggatgacccttctctttccagtgaccccttttgtggaacctcctcccttgaggacctcctgatcctctgtccctcacacaggtcatgatgtttggcagcaccgccatcgccctggagctgctgaagcaaggtgccagccccaatgtccaggacacctccggtaccagtccagtccatgacgcagcccgcactggattcctggacaccctgaaggtcctagtggagcacggggctg

SEQ ID NO: 5339 - DNA, 801 bp, Homo sapiens
gagtttgtggcactcacgtgcatgatgttcgtgctctcattgaaaatcttcacatagggcttcaggattttgaagtggaaggcaggtgtgagcaggtggcggtgccatctccacttgtcaccggcactaatcaggagcccatcccctagtagaggcagccaagggccatgggcaaggacagcaccttcccctggccccagaaggttgtccccatccccattcatctagttactcacccagccagggcttcaggaagccatagaaactcatatccttgagtgcaacagcagctgacatgaataaggaccatcaggggttatggagaggggcaggggagggactttgagtgtagggggaggctcccagccagggatttgcacttccaccctccaggcccagcatagcaggaagagggtcaagggcaaaggaaggagggaggacaggggaggagactggggaccmgaccaggctgcagcggtgcagtagaacaatgacacagcccaacatggcacagcacaccccagtacgccttgacatggctcctacatggtccaacatgttctgcaacacctgagcatagctcaacgctctacaaaatgcctttacaaggacctaggacaccctagccgggcacggtggatcacgcctgtaattctagcactttgggaggctgaggtgggcggattgcctgagctcagcagttcaaaaccagcctgggcaacatggtgaaaccccgtctctactaaaaaatacaaaaacattagctgggtgtggcggcgggcgcctgtagtcccaactact

SEQ ID NO: 5340 - DNA, 801 bp, Homo sapiens
gagtttgtggcactcacgtgcatgatgttcgtgctctcattgaaaatcttcacatagggcttcaggattttgaagtggaaggcaggtgtgagcaggtggcggtgccatctccacttgtcaccggcactaatcaggagcccatcccctagtagaggcagccaagggccatgggcaaggacagcaccttcccctggccccagaaggttgtccccatccccattcatctagttactcacccagccagggcttcaggaagccatagaaactcatatccttgagtgcaacagcagctgacatgaataaggaccatcaggggttatggagaggggcaggggagggactttgagtgtagggggaggctcccagccagggatttgcacttccaccctccaggcccagcatagcaggaagagggtcaagggcaaaggaaggagggaggacaggggaggagactggggaccagaccaggctgcagcggtgcagtagaacaatgacacagcccaacatggcacagcacaccccagyacgccttgacatggctcctacatggtccaacatgttctgcaacacctgagcatagctcaacgctctacaaaatgcctttacaaggacctaggacaccctagccgggcacggtggatcacgcctgtaattctagcactttgggaggctgaggtgggcggattgcctgagctcagcagttcaaaaccagcctgggcaacatggtgaaaccccgtctctactaaaaaatacaaaaacattagctgggtgtggcggcgggcgcctgtagtcccaactact

SEQ ID NO: 5341 - DNA, 600 bp, Homo sapiens
tccttctcctccatcccaggttaggactctgctattgccatggttatgcccacagtctgacaatgcccaccatcctggccttgcctgcgttgctgatacaaagtgtttccctgtctgggtcgcaccgtgtccccagccagtcctaggttcagcccctgccttggccatgcccacaacagaccggccctccacccacacaactcaggttctggccacgcccatcaccatgaccacgcccacatcgcgctccccgcttcctcctgtccccacctcagggcgagtgtcgaaacttcgtaaaggtgctgctccttcgggacgagtccacgctctttgtgtgcggttccaacgccttcaacccggtgtgcgccaactacagcgtgagtcttcagactccctgygccccaggtccaacctccaggcctctgctcgcccgacctccgctggccatggcttttccccaggccgtgtcacctcctccaggaagccttcctggatatactctccctgcctcctccccctgagctcaagaggagtcagcgctgtccaaacgaggcctgtacagggggccggggaagccgtagctacttaggtaatgagcca

SEQ ID NO: 5342 - DNA, 753 bp, Homo sapiens
ctgagatcccagctgagagagactccatccccaacccctactttatctccgaacctttaaggagtcctgcatttctggtttggttggtttgcttgcttcatagttggtacctaactcttttttattttttattttttttgaggcggaatctcactcttttgcccaggttggagtgcaatggcgtgatcttggctcctgcaaccgctgcctcctgggttcaagcaattctcctgtctcaacctcccaagtagctgggattacaggcacgcgccaccaggcccagctaatttttgtatttttagtggagatggggtttcaccgtgttggmcaggctggtctcgaactcctgacctcaggcgatccacccacctcggcctcccaaagtgctgggattacaggtgtgagccaccgcgcctggccagttggtacctaactcttaacacctttccttgccgtgacgtccaagccacccccttcccacaacccctgttcctctggggaatacactgtttttgcactttacctccctaccagcagctctttccagattgcaggggcgagctggtgggaagcttgcagattgtttcgcactgccgtgtaatctgtgtgcttgtcactggggtctgttcttccttgagttggtacagtgaaatatgcattgagagtcccagggcagtcattgccactgtactttgtgggctggcttgccttctttattatttcttctttaaaataaaagaaaatgggagtttg

SEQ ID NO: 5343 - DNA, 753 bp, Homo sapiens
ctgagatcccagctgagagagactccatccccaacccctactttatctccgaacctttaaggagtcctgcatttctggtttggttggtttgcttgcttcatagttggtacctaactcttttttattttttattttttttgaggcggaatctcactcttttgcccaggttggagtgcaatggcgtgatcttggctcctgcaaccgctgcctcctgggttcaagcaattctcctgtctcaacctcccaagtagctgggattacaggcacgcgccaccaggcccagctaatttttgtatttttagtggagatggggtttcaccgtgttggccaggctggtctcgaactcctgacctcaggygatccacccacctcggcctcccaaagtgctgggattacaggtgtgagccaccgcgcctggccagttggtacctaactcttaacacctttccttgccgtgacgtccaagccacccccttcccacaacccctgttcctctggggaatacactgtttttgcactttacctccctaccagcagctctttccagattgcaggggcgagctggtgggaagcttgcagattgtttcgcactgccgtgtaatctgtgtgcttgtcactggggtctgttcttccttgagttggtacagtgaaatatgcattgagagtcccagggcagtcattgccactgtactttgtgggctggcttgccttctttattatttcttctttaaaataaaagaaaatgggagtttg

SEQ ID NO: 5344 - DNA, 753 bp, Homo sapiens
ctgagatcccagctgagagagactccatccccaacccctactttatctccgaacctttaaggagtcctgcatttctggtttggttggtttgcttgcttcatagttggtacctaactcttttttattttttattttttttgaggcggaatctcactcttttgcccaggttggagtgcaatggcgtgatcttggctcctgcaaccgctgcctcctgggttcaagcaattctcctgtctcaacctcccaagtagctgggattacaggcacgcgccaccaggcccagctaatttttgtatttttagtggagatggggtttcaccgtgttggccaggctggtctcgaactcctgacctcaggcgatccrcccacctcggcctcccaaagtgctgggattacaggtgtgagccaccgcgcctggccagttggtacctaactcttaacacctttccttgccgtgacgtccaagccacccccttcccacaacccctgttcctctggggaatacactgtttttgcactttacctccctaccagcagctctttccagattgcaggggcgagctggtgggaagcttgcagattgtttcgcactgccgtgtaatctgtgtgcttgtcactggggtctgttcttccttgagttggtacagtgaaatatgcattgagagtcccagggcagtcattgccactgtactttgtgggctggcttgccttctttattatttcttctttaaaataaaagaaaatgggagtttg

SEQ ID NO: 5345 - DNA, 753 bp, Homo sapiens
ctgagatcccagctgagagagactccatccccaacccctactttatctccgaacctttaaggagtcctgcatttctggtttggttggtttgcttgcttcatagttggtacctaactcttttttattttttattttttttgaggcggaatctcactcttttgcccaggttggagtgcaatggcgtgatcttggctcctgcaaccgctgcctcctgggttcaagcaattctcctgtctcaacctcccaagtagctgggattacaggcacgcgccaccaggcccagctaatttttgtatttttagtggagatggggtttcaccgtgttggccaggctggtctcgaactcctgacctcaggcgatccacccrcctcggcctcccaaagtgctgggattacaggtgtgagccaccgcgcctggccagttggtacctaactcttaacacctttccttgccgtgacgtccaagccacccccttcccacaacccctgttcctctggggaatacactgtttttgcactttacctccctaccagcagctctttccagattgcaggggcgagctggtgggaagcttgcagattgtttcgcactgccgtgtaatctgtgtgcttgtcactggggtctgttcttccttgagttggtacagtgaaatatgcattgagagtcccagggcagtcattgccactgtactttgtgggctggcttgccttctttattatttcttctttaaaataaaagaaaatgggagtttg

SEQ ID NO: 5346 - DNA, 830 bp, Homo sapiens
ggatcccagtgatcttagaaaaaacagctccttccttatcacagtttgcgagcagcaggcgcccacagtgtgcccagaggaggagcccagggtggtagctgtgttggaaggaaggaccacacaacttatcttaatgtcccagccccaaggaactagcacatatatcttcaggttacggaaaataaaaagcaatataaatttccggagtaataaaagtgaaatagtttacagtgctttatgccattgcatgggattcttcctgcattgttctaaagaatttcagtttgaggaacatttgtagggcacagaggaagtgccccagctgacaggcacttagggcgagacactcactaagttccaaaggtgggttcagctgggtgcagcggcttacacctgtaatcccagcactttgggaagctgaggtgggtggatcacctgaggtcaggagttcgagaacagcctggccaacatggtgaaaccctgcctctactaaaatacaaaaaaaaaaaaaaaaaaaaaatagctgggcatggtggcaggtgcctgtaatcccagctacttggtaggctgaggcaggaaaatctcttgaacctgagaggcggaggttgcagtgagccgagatggtgccactgcactccagccaaggtgacagagcaagactctctcaaacaaaacaaaacatatatatttaaaaatgtatattttaagtgaaatatataaataaaaatataaaaatatwtaattactttatataggtatttatttatatattatttctacatacattatatatagacacttcttttaaaaattactctgatcctccaaat

SEQ ID NO: 5347 - DNA, 598 bp, Homo sapiens
ctccagaccactggattctcatctcgtgactgaactgtgggatgctccttctctgggacgacagaggaaataaccagcttgagtttcggggccacagctctgaggtgcctacacgctgaggcctgcrcacagattcactcctgatctcacacttgccaagggaatggcaggcacaagtgtccatgtttatgtgatttttccctcttgctcctttaaatatttttacagttagggtttgttttgaatattgtgataaagttaccaaagaggtgcaaaaagagtgcagagaattccttcatacccttcacctagttccccaatatgttaacattttacataaccacagaccgtttatcgaaactaagacattagccttgggacagtgctagtaaccacagcacagaactcattcggatttcaccgggttttcctctaacaatcttgttttgtttgcccttccttccctcccccgctccctgccttcctccctccttccctccttccctccctccctcccccactccctcccttcctctctccttccctccctccctcccttccttctctctttctctctttctttcttttttcctctttt

SEQ ID NO: 5348 - DNA, 320 bp, Homo sapiens
gtgccactgcactccagcccgggcaacagagtgagaccctttctcaaaataataataataacaataaaatatraaataaaataagaaacaaaaacttggaagacagagcagcctaggttcgaatcctgcctccaccacccagcactgggagatcctgagtgagtgactttgcttcttggagctctctcctcgcctctgacttctcagctgctctgggtcaggaactgaatgactaaaagggcctggttcagaatgagtgctcctcctggccaagagaggaggaggaaggacaggggtgggtgggacagctgtagggatcc

SEQ ID NO: 5349 - DNA, 817 bp, Homo sapiens
tttttttgagacagggtcttgctctgttgcccaggctggaatgcagtggcgcgatcacagctcactgcagccttgacctcccagctcaagtgatcctcctgcctcagcctcccgggtagctgggacgacaggcgtgcggcaccatgcccaactaatttttaaattttgtattctgtaaagaagggggtctcgctttgtcgcccaggctggtcttgaactcctggactcaagtgatcctcctgcctcagcctcccaaagtgctgggattacaggcgtgggccactttttcccactggcaacctctactctacagccatcactgccaacccaggacaattctgcccctgatcccagtatgtttagcaatgtctggagactttctgaggtgttacgactgtggggctggaggtgtcactgacatccatcgggaagaggctagggtggcctctgagcatcctatagtacagaggacagcctcccacagagaatgatgcagtgccgaagtcaggagtaatggaaatcgtctaggaaatcctgtctgggaaagccagccccggacccctcacctcctcaagggataagaaggagaatccatctggcttcctgacctgatcatttgtgacctgcagggtatttttagcctctgagggaggggcactggctattctgagtttttttgttttttttttttggcrgggtgggggggggcaaggttatttttggcctgggcatctatttattgaatttttatctccccccaaattttggaacaggagacagtgaaggcaggggcatttttttttttttttaagagtca

SEQ ID NO: 5350 - DNA, 811 bp, Homo sapiens
ttgccaaatttcatctcaatgtcttccaactcctttgccatctgaccccctgctctggtgttctgggaaccaccagggccccaggaagcctcaatccagaaccctgtcctgaaggaacctccacacttgaggagatggatctggacagagacaaccccaaattcatggggtcaggaatgggcaagagagagatgggtgtgaaaacccacaggagaactagggttctgctgcggcaggctggaaggcttcctggaggaggaattgttggagctgggtctggacctatgagtaggaatttttttaagtgtggggtaggatgatgtaatgagcatcattggtatttgggggcccagccagtcctggcaccaaccttgtccatccttcagcctagagcggtaggaggacttgtcgctggtggtgattctgggctgctatttatgtgacatccatctatgatgggtcagttccttctacctyatcctgtcactcatccaccctacgctcactgctgtcctcctgtaggcctcaagaatctccagtagagatcccacaccagcttgttgatcttcccttattctctgctcttcccatccttggacagaccaggctgagaagggaaggagcaacgtcccacagaaactatggctctgaccccaaaatgcttagtgactctgtgcaggtcacctgctctctctggctgctgaggtctctttcacctgtgagtgatggaagctcaactttgtgcactataagcaaataaagggaatcaacggagtgtaaagtccagagaaagtggtcttcaggcatggct

SEQ ID NO: 5351 - DNA, 811 bp, Homo sapiens
ttgccaaatttcatctcaatgtcttccaactcctttgccatctgaccccctgctctggtgttctgggaaccaccagggccccaggaagcctcaatccagaaccctgtcctgaaggaacctccacacttgaggagatggatctggacagagacaaccccaaattcatggggtcaggaatgggcaagagagagatgggtgtgaaaacccacaggagaactagggttctgctgcggcaggctggaaggcttcctggaggaggaattgttggagctgggtctggacctatgagtaggaatttttttaagtgtggggtaggatgatgtaatgagcatcattggtatttgggggcccagccagtcctggcaccaaccttgtccatccttcagcctagagcggtaggaggacttgtcgctggtggtgattctgggctgctatttatgtgacatccatctatgatgggtcagttccttctaccttatcctgtcactcatccaccctaygctcactgctgtcctcctgtaggcctcaagaatctccagtagagatcccacaccagcttgttgatcttcccttattctctgctcttcccatccttggacagaccaggctgagaagggaaggagcaacgtcccacagaaactatggctctgaccccaaaatgcttagtgactctgtgcaggtcacctgctctctctggctgctgaggtctctttcacctgtgagtgatggaagctcaactttgtgcactataagcaaataaagggaatcaacggagtgtaaagtccagagaaagtggtcttcaggcatggct

SEQ ID NO: 5352 - DNA, 709 bp, Homo sapiens
agtccacagatgggctggtgactctcagaccaggattcagcacacctgtgaggctgtgactctactaaggaggcatagtgcacagaagaaagcgaggctcccacgcacagacctagtccaccattaagactcatgacttaggcccaaaataaaggagatattgattcccatacttagaattaggtcatatgcaagaattttaactttgtacctgtatctttctgcgtgtgagactgtgtgacttatgcctctgtccagcaactaagtgatttgacacttctgccttggcccaacccacagatggaattttgacatattgctaaacccagcaccttcacgatgggactctagtccactgccttggcacttcccacagacagcattgtgacatatcactatcactaggctttatattcagttaatgtgagtctacccttctgttttgtcaccstgcacagaaggcattgtgacattgggctccacacccaagttatgtgattctcctgcctatactcttcccacatggcccattgtcatatattgctgggtccagaacccaggtgatgtaactctcttgacttggccctgcctacaggaagcattgtgacatctctgcaccaattacccaggtgatgttactctcttgacttggccctgcctacaggaagcattgtgacatctctgcaccaattagccaggtgatgtgact

SEQ ID NO: 5353 - DNA, 798 bp, Homo sapiens
cgcccctccctcccaaatacacaccccttcccactcccagcaaaacggcctctgatgaaggtctagtcctgtgacacgccaagacttctgcacctggcctggtcactgctagatcctcagcacctagaacagtgcctgccagacagtgtgtgctcattaagtatttgttgaatgggtaagaagaatccagactgtggagccaggcagcctgggttcaaagtcgagctccgcccctcctgggctgtgtggccctggacaggtctctacccctctctgggcactgacttggccatccatgaaatgggaggacacttccrgtctgccacagagggcccagccaccggcttggcctggctcaagtcacttcaccccaccagagcaggtttcagagctctaaagtgggccacctctccctggaaggggataagcgctccaggaaggcggtaggggacaggcagggaagggtgcagctgggaggcagcacccagcagcgatgggagaggtgccaggttgagtccagcagatcagaagcccaggctgtttatttaccgttttttgaacagaccacaaggctccaccaggcgccttttgacttccagcccctatgagggtggggacggctacgtgcaggaacgatgcaggctcaaacccagagccttcccatgggagggagaatcaacagataagcccacagagggtgagtcagcagtgtggcccagagccagcaccccagggcaagccacccctcacctgtgcagcctggtgctggcagggcctggccaggaccctgggctggga

SEQ ID NO: 5354 - DNA, 1508 bp, Homo sapiens
aaaagttgaatcaatttgctttgatgctaactttttaatacatacacatatatttaaatatatggagggtcatttccctctagttaaaaaaaatcctctggttttccacacaactccatccagcaccacactggtgaacttttggtgacataggtcctatattgaaaaagagtagtgtttgttattcctctcaagcttcttagtgtcttaaggatcttgctgtaaaacatcatttgttattgttgtgctccattatcctcttccctttttgagtgctatgtttattttaaggaaaaggacaaaatagtgggatttggtggagaatcttctatcccaagaatagaaggcrtatgctctacatacaaattctggaagcagggctttgaagtatcctccctcctagaagatcaaagtccaggaaagtgaatacaaggaggaagaagagtagaggggggaaggaaaaacacaaaattaaccagcatattctaggattatatggagagaggttcttcaatttgccactctgcaatcatctttttttctcatgtgtcttcacgtttaaatagataaactttcctcaaacatgcgattatttcttgacactgtaacttagtgcaaataattcactcaaccttggatcacccgcccactttctgttttagaatgctgattaatcatccagagagtgctcacccctctgagaaacctttcctggtactggggttgccctttctctctttattctcccactgtactttagacatctgtgctgctggaggcagatttatctggcagtgagtgaagcctgaccttcaggatccctcacgcgcacaggcccctttgtgtccaaggagttgctggttgttgtagaattctctgtgggaggggaagccagtttgcaactgggaagcaattctgtgtaagcatgtttgtaaagcaccagagacatgagtccccagaagtccagtaacttttatttttccttttccttcaaaataaataagcacttttatacctggtggtgcatttgtaattttgttttcattttccaagaggattaccaaatggtataagcctggggccccacaaaacctggagctgttcccgatgcttgctttggtgagcactttctgttgagagctggagaaactcaactcaagcttgttgaaaaggataccaagattgcttctgggatcagtgatggaaaccagctcttggggttggacaagagcttggaaaccatttcatattttcttttgctttggctttcttatgcaagttgtgggaaagtaactgtcttcagcctctgcttcacatctttccagatccaaaagagaagaaacttcggttgggataaccccaggatcggcctctcacaagcacaccttgagactgatgtgtcaagggatttagtttctatgactgggagccaacagagtaacatggaaaggataatggggataaaggatgtagaggagcagtgtgatgttatctagaaaagcaagata

SEQ ID NO: 5355 - DNA, 806 bp, Homo sapiens
tggaggttaccagtatgaaggattgaacaggttggtatttctgattaccttcattgtaactgatattgtaaaggctataaaggaagtaccacagatcacgggggatggtatgctatctttaagaaaaactttatagacaaattaaatttagtagactttatttgagcagagaatgattcacaaattggacagcactcagaaccaggggaggttcagggaacttcgtccagccatgtggcaagcagtttttatagacaggaaaaggaagtaacatacagaaacagctttattggttacagttgagtgtttgcctaatttgcgtcttgtgatgaggcattggccctatatggacwtggtctgatcagttggcagcctgtgtttgtttggagcttagtggctgtgattggctgagactcaactatttcttacaaaaataaactcttaggttgcagttcattcttagggattcaatgtatgaaggttgcttcaggccaaatttaatttaatttagcactattatagccattccaatttgggaacccagccagtaacaatttgcattcttgtagaaagtgaatcagtatttatttcatgcattgatatggggattttaaaatttactagcattttgccatattctcatgaaggatttggagttaaaaatcactgatagaaagtcagtttactacactgacagtatgagaattgcctcttcagagaaagatcaggttgagctaaagaagagaggcacctaaatgaaaaacagaggctggctgataaatcctgctaaaatttaagcgggattt

SEQ ID NO: 5356 - DNA, 846 bp, Homo sapiens
ggaagcatcgtatgtcctttgtgtttctcaaatctgcccaattgttctctgctttcggggaagctttactcattttctaaaagaaatccaagtactgtttggtcattaccccttagtaaaaaaaagtaacaggaggatatcgtaattttctactgttttattcctctgttagaccgggccttgacatgaatgacgccgtaagggagaaagagatcttcccaatcagcaatcaccgtaaaagcctgctgtgttcccgttaaaattaggaaattctcactagatgaattgacatgggaggcatttagatttctaatagtcacatagtaattctgcggaggaattgagtcatctttgatagccatggaattaagcgatgttaattaaagtgcaaaagataacctttctgttcttactagaatagagtaataaaaagaacctaggttttcttttgtttgctggaagaaaaatcaaaattctttagttctgtcaaaccagaactcttgaaagcactttgaacaatgcctggaaaataacaggtactctgtaaatgtttaccttctctgcaagtgcctkccacgtgcccgaagaaaagacacattaaaaagttaagtgacaccagtcctgattttatatattttatatacctaacaacgtatatgttagtatgtagaaattatatccttgacctttttccctacctattacgaactgtacttttattaaaagctgccacttaaaaaaaatcttgtgatgtttctgtttttaaactagttcatgcatatgtagtgctttgttcattcatccatcaaatatgtacggagttcctaattacctgacattgtgcta

SEQ ID NO: 5357 - DNA, 655 bp, Homo sapiens
ctttccataggtccagatattccaaagtgcaattatagaattccagaaataaatcttacacatgatttcaggtatcatcagttaatttgcacttcctgccttcatattttgtgcaaaaatttcaatgcctttctgtttataagctttgtttttaacaactgcacattgcttgattcattcaatactataaaaaaagatccccaaatgattttgaccaaaatgcaaaccaaatttaaaagataccttaaaatgtccaatatcattttaggatataggttttgctgagttcttctatattctgtttataagcctttctaaaagtcaaatatttgtaaaatcatatcgatggcagtcaccacagaaagcgcatgctttcgtgcagacatactattttgtattcaacatcagctttgttttaaaaacgtgtagttcaccggctctgtatgtgtgtttatgtgtgtgtggtatcatgaccttgtcaatcttgacaactatagcttctatgttgattggttgtatatcacagttcctttggagacaattatgaattctatgtatacctcaaccaattcaaagtacatttctgctctataggagtcttaatttattaaagacattgatttctagcatgataayttcttcaaataaaaataat

SEQ ID NO: 5358 - DNA, 1760 bp, Homo sapiens
ttaactataactttccctttctgagatcaaacaaaacatagtagtttagaacaaccattctggagttagaagttttacattttaattctagcttcacagtgtactagctgagagacctcgttcaagtgacttgatctaaaatcttagttactcatatgaaaaataatgatcctaatggtaactttcttataagactgttgtaaaaattgagttaaacaaaacataataaagtatttgaatggtgatttaagtgctcaataaaggtttaaattttttaaatgagcaggttaattatagtcagactgtttcttagtgaattaggttaaaggaatgagagagaactatttccaaggtggggacatatctaccactcaaattagagagtttctgcggagagtttttatccctagttcatagtatcatcaaccatgtcaagtattagacaagtttttctaaattctttttctatttcatagcagaacaaccagttcgtactggtttctttagacagggtacgatggatcaaactgtatcatctcaaaattartatattgaagttctaactcctagtaccttaaaatgtgaccttatttagaaatatggagtagggttggtccctaattccatacaagtgtttccttataataagggatatttggagataggcatgcacagagtaagatgaaggcagaaagggtagtgcagaagtcaaggatcgcccaagattgccagcaaatctccagaagctgggggagaggcttgggacagttccttccctcactgccctcaggaagaatcaaccctgggttgattcatctcctgggtcaggtgactccttcctttaggaagaagctgaccatataacagctcagctgatcacaacagaggagggatttgcatggaaaggcaatcatcatcatgttcctttatttccaagtcctaacgatctgaactccgctacaccctcccagtactgacaacaccttccaagtctcctctttttctttccacagctctgattctgctgaggttccaccttaactttcatcatgagtcctaactctgtggccagtgaccttaccaacagcttcatctcagatttttggcctggactgtgagacaacacatttctacgtagttcaggtactttcttacagcagctctagagggccctatgtagagtataactttcaacttaattgaaagcaacttgtactggcctagaattattttgctttttaatgtactttggccatctctactctgatttattagtaacatttcaactctcagaaagtgtatgtatcagtcagcatcccagtaagaaacaggcaacactcacagctgagatgtttgtgaaaatgaaagatctatctgcaagagatatagacaagtttaaggaaaaccacagatgtgttgagacacccaagaagtagcaatagcaatcagctgataccacccccctagcactgatagagaaagaagagaaaatggaatcactaaagtctgggtcataatataaatgctaccaggcagaagccgccccttggcaaggcatagccagaaccacattgaatcagaaatacagttgtaggaaaaaactactctgagctacaggagtctcccgttaggctgatgcccaccagataccacagggaaaggagttccaggtgatgcagatcatacgagcaagccttgctgggcacagagcaagacagagatgggcagagaacagatgtgagggcaaagggaagagaaca

SEQ ID NO: 5359 - DNA, 1490 bp, Homo sapiens
acgctgccacccctggctaacttttgtattttcagtagagacagggtttcaccatattggtcagacccgtctcaaactcctgacctcaggtgatccacccacctcggcctcccaaagtgctgggattgcaaaaacattcttataagtatacttttgttcacatctcttagtatctcctcagtgaatattctacaatattaattatttaaccagaatgtatgaatattttaaatttattagtatattttaataatgtgctttcagaaagaatttatcaattttcattctcattagttgcatcgtacagtctcagtcttactgcagtctgtgcaacaccatggtcattgtttttcaaactttgcctgtttaatggacagaaaagctaatgtttgtttaatttgaatttcattaattacttataagaaatgtctttatatgtttctcagctcttcgtcactattatatgagtattttgttcatgatctttgtccatgtatctccttggtttctctccttgacttgtaagtgctctttacatagttctagtataaacctttgacatagattttgattgtttttcgtcacagaaatgcagaatacttttgaaacttttaatacagttgcacctttttttgagtttgaaatgatggtccttgcttgatttaaattgttttttctttgaatgcctatgaccaaaatatctccccgttaagccagcttctaggcccagaaaaatgaaagttgccttgggacaaaacaggaaaacaggatccatcaccattctaaaccatcagctttgtaaagacatctgagatgattatggcacaagaggcacagagagtaagtggatcttagtccagcagaatgattcctcctgggaccagaaaattcttctcattcttaattttctttatttgttttgcttcctataattactttaaaaattataatgtaaaatattttcaacagaccaaatatgagtaaggatatcatgaacactcatgttatgaatattctgcttaagaaatgatcatcaaaacgatgaaggccccaggtacctcatgctgatcacattcttcttaatgtcctcccaaactagaaaaagttactgccctcagaaagagtttcttatccctaagaacttctttatatttaatcatatagttrtatcatcccaaataataggcagaatggttttaaaattgtcaaatatgcacatttccaatttcattaagcagagaacatatattttcacccataattatgttttgaaactcactcatgttgatacctattttactcttttatagtatacattgtataatgttgatggacatttagcttgtggtacattcttattttcttttatcttgttttttttttgctattataaacatagctgataggaatatttatatacagttgacttgtgaacaatatgaatgtgatctcatttacttatacatggattcttttcaataaagatgaaa

SEQ ID NO: 5360 - DNA, 684 bp, Homo sapiens
atcctcctactaagcttacaaactaacacaggctctccactttctttgaaaatgcacgcctcacccctgttgtcagctccccagttacctcaggcttcctgctctctctgctttcccgtgrtgagagatgcttatatttaccaactgactcaggccttatgagccccgcagtggaggcccaccgacagctgcagaccttctgagctagttctactctccctttgattcccagccctgccccctccaccaacaaacaagaaaatagaaaactccccaaaaccaaccatccaatcgcaggtatacaatctatcagtaccacccttgaaaacatctgtaaaccatatgggttaacatacagaacaaagaaggatgctaatcacaaagcttcagaaatgctcagcaccctccaggtcacctaagctggggctctatgggttacaagaaactgaaacattttcaactcaggctccagggcattggcacacactgtccccactttgcagaaaagtctcctcccatatgtccacctggcttaccccactacttcctgtctttgctcaaagatcccctctccaaccatactatttaaaacattgaccatgcgccactcacatcccagcaccccatccccctcccggtaattattttcctcattgcacttatccttttcttacatgccatata

SEQ ID NO: 5361 - DNA, 684 bp, Homo sapiens
atcctcctactaagcttacaaactaacacaggctctccactttctttgaaaatgcacgcctcacccctgttgtcagctccccagttacctcaggcttcctgctctctctgctttcccgtgatgagagatgcttatatttaccaactgactcaggccttatgagccccgcagtggaggcccaccgacagctgcagaccttctgagctagttctactctccctttgattcccagccctgccccctccaccaacaaacaagaaaatagaaaactccccaaaaccaaccatccaatcgcaggtatacaatctatcagtaccacccttgaaaacatctgtaaaccatatgggttaacatacagaacaaagaaggatgctaatcacaaagcttcagaaatgctcagcaccctccaggtcacctaagctggggctctatgggttacaagaaactgaaacattttcaactcaggctccagggcattggcacacactgtccccactttgcagaaaaktctcctcccatatgtccacctggcttaccccactacttcctgtctttgctcaaagatcccctctccaaccatactatttaaaacattgaccatgcgccactcacatcccagcaccccatccccctcccggtaattattttcctcattgcacttatccttttcttacatgccatata

SEQ ID NO: 5362 - DNA, 780 bp, Homo sapiens
aggtgtcacagggttggtttcttctgaggcctctctttgtggtttgcagatggctgtcttctctttggtcttcacgtggccttccctctgtatgtgtctgtgttctaatctcttcttaaaaggataccagttttaatgggttagggcccactctatgaccttattttaccttaatcacctttttaaaggcctatttccaaatgcagtcacatcttgaggtactaaggkttatgatttgaacatatgaattgtggggagatacagttcagcccataacacgtagcaagcaggtggtagtgctaaaatttgaatgtgagtttcctgactgcaacccatacccttcttgctccactgtgctccagctatcctaagataggccctgacctgaagacctgacaaccacccccttacgtggacaatccacactgccctgtttccttccaaagaaggggcctgcttcccctcctccataaatgcatcgtgcccaagctagacagcacaatttcccacatcccaagaatgtgtgtgacccaatttctcctccagacttgaatcttattaatccagttcctccagtgcttaggattccattgtgagtcgcatggggaccatcttctgagctgtgtcttctgcacagagcatccctctttcaaacagctcccgaggcagcaaataggcactgcagaaatccacagcccaaatgatccccaggggaacccgcgatgctgctctggaagggtgggcgagaatttacccagagttagggcctgagatgaccaa

SEQ ID NO: 5363 - DNA, 780 bp, Homo sapiens
aggtgtcacagggttggtttcttctgaggcctctctttgtggtttgcagatggctgtcttctctttggtcttcacgtggccttccctctgtatgtgtctgtgttctaatctcttcttaaaaggataccagttttaatgggttagggcccactctatgaccttattttaccttaatcacctttttaaaggcctatttccaaatgcagtcacatcttgaggtactaaggtttatgatttgaacatatgaattgtggggagatacagttcagcccataacacgtagcaagcaggtggtagtgctaaaatttgaatgtgagtttcctgactgcaacccatacccttcttgctccactgtgctccagctatcctaagataggccctgacctgmagacctgacaaccacccccttacgtggacaatccacactgccctgtttccttccaaagaaggggcctgcttcccctcctccataaatgcatcgtgcccaagctagacagcacaatttcccacatcccaagaatgtgtgtgacccaatttctcctccagacttgaatcttattaatccagttcctccagtgcttaggattccattgtgagtcgcatggggaccatcttctgagctgtgtcttctgcacagagcatccctctttcaaacagctcccgaggcagcaaataggcactgcagaaatccacagcccaaatgatccccaggggaacccgcgatgctgctctggaagggtgggcgagaatttacccagagttagggcctgagatgaccaa

SEQ ID NO: 5364 - DNA, 729 bp, Homo sapiens
tgaacggggctgtggctcaagctgcaggtccccccatgagtgtggtaaacagagcttctggtccagcttagtggtgagaggaggagccaaaggctcagaaggatagttgtttgttattgttgttgtttaaaatgcatctgtttttcaaaaggaaatcatcatgtcgaagttcataacctgtttctgaaagtaaagcattgagccactgttgtgggttggaggcagcagccgggaggggattttggtcaggattctttagtgtcagatgacagaaatacaacacaactgrttcacaactaaaggaggagttgaggtaaggatgtcaggggttgatgacacaaaagagaagtgctgaagaagccatggctgccctggaaagtgagatcagcattaaggactcactgctccaaggaaaccctccgcctgcgtcttgtccctgaaattaccatcagagaataatataaacacctctacacaaataaactagaaactagaagaaactgatacattcctggacacatacaccctcccaagaataaaccaggaagaagttgaatccctaaatagaccaataacaggctctgaaattgaggcaataattaatagcctaccaaccaaaaaaagtccaggaccagatggattcacagccgaattctaccagaggtaaaaagaggagctggtaccattccttctgaaactactccaatcaatagaaaaagaggaaatgct

SEQ ID NO: 5365 - DNA, 780 bp, Homo sapiens
accccacacccgacactggaaggggtgagtgactgacccccgatacctgacctagtttcctttgcttctcaaacatgacatgccacacccatcacagaagcttaaaccagaagggtaatttcctgggttcttacgtgtggggagggaggagggcttcatgctatagggcacaagggatcttaacttctggagttgctttgggcttgttgccactctttctgggaagctggcatggaaagtcccccttgagcatgtggcaggccaggagggcttctcttaaggaaagcagcaggggtggcagaaacagcagtggacttggagtccgaagttctgtgtctgggctccacagtcacatgaatagccagctgaataactggggcaagacccttttatctgttgggacctgaatttctcaatttgcaaaaatactgggattgtactaggtctccagtccctttccagttctataggcctattaattattcatgactctagatgttaggcttttttgcttagtgacaccagaagcacaagctggttacagcagtgcccctcctttttactggacacasagaattctagaagccttggagggggaaagctgaatctttttagaatcataggcttttgaagcttggggaggtgtttgcaatcatcccatctttaaccctccctctcccttccagagagcataaaggaattgccgagggtcacacagtgagttcatgaccaggtcagggtagaagccaaggccacctgcctcctggcagtggtatttgg

SEQ ID NO: 5366 - DNA, 825 bp, Homo sapiens
ccctaaattctccaccctggaagccagaacaactgagggatttgacccacttaattgtttcaccaagtccagaaaaacttagtgatgggtgacaggtctctgaaaagagccacacagaccacaagtagcatagaaatgactgaggacataagggaggttcctttgaagccaaccgtatgaacattatggaattatccttctcccccaatacttccttagcacacagagaggaggtcacacaaagagaaggtcacacaaagagagagagagaaggaagcagagggtgagaaagaggaataggggaaggggagagggagaggaagagaatatacacaaggaactttagaaagagaaattccagcatatcacactagccccctagggcaagagatttggttgtagcctccggcaacttatgtaaaataagagtgactctttgctaggtgtaagagatgagccccatggcaaactgcattgacaaaataggtgactcttcctcaatgggaatgttctatggcaccctgcttcaggctacagaagggtcctgatcactattgcaggtagagactccagctctctccaagaagaaacataaagtctttccctgttgtgtaccctgcagggaactgtcactctagaaatgtcattgattatgtcaatasggttggaaggaaaaaggaagagaagtattggagagtgaagatgtggcaatagggttgagggcaaaggagaaactaattggctggctttgatattctcattgtgcattgacatggcacaatgtgggggatagatgaatgacatctcatctctctctagctttaa

SEQ ID NO: 5367 - DNA, 1432 bp, Homo sapiens
  misc_feature (1)...(1432): n = A,T,C or G
tttttttttcttgtgggagagtttcactctgttacccaggctggagtacagtggcataatctcggctcactgcaacctccacttctcggttttaagtcacttctgttgtctcagcctcctgagtagctgggattacagatgtgaatcaccacacttagctaatttttgtatttttttgtagagatatggttttgctgttggccaggctggtcctgaacacctggtctcaagtgatctgcctaccccagcctcccaaagtgctggaattacaggcatgagctccatgaccggccctttctagctttttgatgtggacattagtgctataaatttccctcttttcttggtttctagtgattattttattctatcttggtgagtagtcagggaaataatcttaaatttacaatcaacttatagtttaaatctaaataattatgtgagaagaaccctttgttatttgaaggggatgtttgaagattttgtaaccgtgccttttaggtagtcctaaatttctaattgtagttaaaaacatgccattttcatttctaacattttaannnnnnnnnnnnnnnnnnnnnnnnnnnnnnnnnnnnnnnnnnnnnnnnnnnnnnnnnnnnnnnnnnnnnnnnnnnnnnnnnnnnnnnnnnnnnnnnnnnncgcttttttctgttttttcaagacattttgacgccggtggtgaaagaagagtcctcggttatttgtcctctcgcagggtggggtgacgtcttccttccccctggtttgnggctctgcctcagtggtgggtcttgtggagatgcagaaaggatccatcccaggcacttggctgggcttgagtcagcatagcctttaggccacaagacctgttggtttgggtactggtctggacataagtccccatcttcccagaaatatcrtcttttgtctgcaacaactggctggagaaatatttcagaaagatatgtgtctggaacacccaaagacatacttttcctttctccttggcataggccttgcagcactgaagaaagaccaggtttgcaatggagccttcaacagtcttcatccctatggaactcagggtctcatagggtgacaggagaggagacaaagctaacttgggaagagtctctgtccttcagcttctcccctactgaaacactatatattgggcccacagttcatcacaaaacacacatgcatctctttctttctctcacacccacatcttgggaacccaaaaacttgatggcaggtagctctgggtatccttggtctggcattcacccactgggaatctaagctgtcctaaagctcttttcaatcacttctcactgtttccaggcccatgtgggtaggtgttccaggcttcattctttcacgctgatcataaaggcacagtgtgggaaaatcccctactgtgatggcc

SEQ ID NO: 5368 - DNA, 1432 bp, Homo sapiens
  misc_feature (1)...(1432): n = A,T,C or G
tttttttttcttgtgggagagtttcactctgttacccaggctggagtacagtggcataatctcggctcactgcaacctccacttctcggttttaagtcacttctgttgtctcagcctcctgagtagctgggattacagatgtgaatcaccacacttagctaatttttgtatttttttgtagagatatggttttgctgttggccaggctggtcctgaacacctggtctcaagtgatctgcctaccccagcctcccaaagtgctggaattacaggcatgagctccatgaccggccctttctagctttttgatgtggacattagtgctataaatttccctcttttcttggtttctagtgattattttattctatcttggtgagtagtcagggaaataatcttaaatttacaatcaacttatagtttaaatctaaataattatgtgagaagaaccctttgttatttgaaggggatgtttgaagattttgtaaccgtgccttttaggtagtcctaaatttctaattgtagttaaaaacatgccattttcatttctaacattttaannnnnnnnnnnnnnnnnnnnnnnnnnnnnnnnnnnnnnnnnnnnnnnnnnnnnnnnnnnnnnnnnnnnnnnnnnnnnnnnnnnnnnnnnnnnnnnnnnnncgcttttttctgttttttcaagacattttgacgccggtggtgaaagaagagtcctcggttatttgtcctctcgcagggtggggtgacgtcttccttccccctggtttgnggctctgcctcagtggtgggtcttgtggagatgcagaaaggatccatcccaggcacttggctgggcttgagtcagcatagcctttaggccacaagacctgttggtttgggtactggtctggacataagtccccatcttcccagaaatatcatcttttgtctgcaacaactggctggagaaatatttcagaaagatatgtgtctggaacacccaaagrcatacttttcctttctccttggcataggccttgcagcactgaagaaagaccaggtttgcaatggagccttcaacagtcttcatccctatggaactcagggtctcatagggtgacaggagaggagacaaagctaacttgggaagagtctctgtccttcagcttctcccctactgaaacactatatattgggcccacagttcatcacaaaacacacatgcatctctttctttctctcacacccacatcttgggaacccaaaaacttgatggcaggtagctctgggtatccttggtctggcattcacccactgggaatctaagctgtcctaaagctcttttcaatcacttctcactgtttccaggcccatgtgggtaggtgttccaggcttcattctttcacgctgatcataaaggcacagtgtgggaaaatcccctactgtgatggcc

SEQ ID NO: 5369 - DNA, 1432 bp, Homo sapiens
  misc_feature (1)...(1432): n = A,T,C or G
tttttttttcttgtgggagagtttcactctgttacccaggctggagtacagtggcataatctcggctcactgcaacctccacttctcggttttaagtcacttctgttgtctcagcctcctgagtagctgggattacagatgtgaatcaccacacttagctaatttttgtatttttttgtagagatatggttttgctgttggccaggctggtcctgaacacctggtctcaagtgatctgcctaccccagcctcccaaagtgctggaattacaggcatgagctccatgaccggccctttctagctttttgatgtggacattagtgctataaatttccctcttttcttggtttctagtgattattttattctatcttggtgagtagtcagggaaataatcttaaatttacaatcaacttatagtttaaatctaaataattatgtgagaagaaccctttgttatttgaaggggatgtttgaagattttgtaaccgtgccttttaggtagtcctaaatttctaattgtagttaaaaacatgccattttcatttctaacattttaannnnnnnnnnnnnnnnnnnnnnnnnnnnnnnnnnnnnnnnnnnnnnnnnnnnnnnnnnnnnnnnnnnnnnnnnnnnnnnnnnnnnnnnnnnnnnnnnnnncgcttttttctgttttttcaagacattttgacgccggtggtgaaagaagagtcctcggttatttgtcctctcgcagggtggggtgacgtcttccttccccctggtttgnggctctgcctcagtggtgggtcttgtggagatgcagaaaggatccatcccaggcacttggctgggcttgagtcagcatagcctttaggccacaagacctgttggtttgggtactggtctggacataagtccccatcttcccagaaatatcatcttttgtctgcaacaactggctggagaaatatttcagaaagatatgtgtctggaacacccaaagacatacttttcctttctccttggcataggccttgcagcactgaagaaagaccaggtttgcaatggagccttcaacagtcttcatccctatggaactcagggtctcatagggtgacaggagaggagacaaagctaacttgggaagagtctytgtccttcagcttctcccctactgaaacactatatattgggcccacagttcatcacaaaacacacatgcatctctttctttctctcacacccacatcttgggaacccaaaaacttgatggcaggtagctctgggtatccttggtctggcattcacccactgggaatctaagctgtcctaaagctcttttcaatcacttctcactgtttccaggcccatgtgggtaggtgttccaggcttcattctttcacgctgatcataaaggcacagtgtgggaaaatcccctactgtgatggcc

SEQ ID NO: 5370 - DNA, 836 bp, Homo sapiens
cactaccattattgctgttttccagattgatgctcatgcatctctgctttctcttgacagactattccatcagcaggtagatcaacaggtgtgagattcggaaccttaacattgggctgtgttcatgtgaaaagatgacaatttttgctcttggctcagtgtacatatgagtatcacaatctcacctttgttctgggccctagcaggacactctcttcaccatatgaagcctttatagagtatgcatgagtgtaacaattctctctgaaaccttaagcaggcacggacccctccttgtaccctttagctttaagccctggtatgacagtcaacatctttctacttggatgggtccaaataagagttcttaactgcctatgagctgcgtttaaaaatgagtcaccatcccacctgtggctggatgttcacatatgaaagtcagaatcccagttgtggactrtgtctgcatgtgtaattcaggacctcaagagtgggctctctccacgtgtgatagagaccatcctgaatattggtgtggtgtgcatctgagaagtataatctcaccagtgtggcgagccctgtggtgacaatttctctaccatagtttacacaatatgcaagacagtggtactcctccgtgtgacgtatcactgggtcttgcacacaggtaatgtgagtctcctctcctgccttggaatgctcacaggaggcattgggacataccactgaacctgatattcaggttatgtgcctgtctttcctgtgctctgtccatgggcgtttgtgacatatttctgggtcgaaaacacaggcgacatagctctcctgtctggatc

SEQ ID NO: 5371 - DNA, 836 bp, Homo sapiens
cactaccattattgctgttttccagattgatgctcatgcatctctgctttctcttgacagactattccatcagcaggtagatcaacaggtgtgagattcggaaccttaacattgggctgtgttcatgtgaaaagatgacaatttttgctcttggctcagtgtacatatgagtatcacaatctcacctttgttctgggccctagcaggacactctcttcaccatatgaagcctttatagagtatgcatgagtgtaacaattctctctgaaaccttaagcaggcacggacccctccttgtaccctttagctttaagccctggtatgacagtcaacatctttctacttggatgggtccaaataagagttcttaactgcctatgagctgcgtttaaaaatgagtcaccatcccacctgtggctggatgttcacatatgaaagtcagaatcccagttgtggactgtgtctgcatgtgtaattcaggacctcaagagtgggctctctccacrtgtgatagagaccatcctgaatattggtgtggtgtgcatctgagaagtataatctcaccagtgtggcgagccctgtggtgacaatttctctaccatagtttacacaatatgcaagacagtggtactcctccgtgtgacgtatcactgggtcttgcacacaggtaatgtgagtctcctctcctgccttggaatgctcacaggaggcattgggacataccactgaacctgatattcaggttatgtgcctgtctttcctgtgctctgtccatgggcgtttgtgacatatttctgggtcgaaaacacaggcgacatagctctcctgtctggatc

SEQ ID NO: 5372 - DNA, 836 bp, Homo sapiens
cactaccattattgctgttttccagattgatgctcatgcatctctgctttctcttgacagactattccatcagcaggtagatcaacaggtgtgagattcggaaccttaacattgggctgtgttcatgtgaaaagatgacaatttttgctcttggctcagtgtacatatgagtatcacaatctcacctttgttctgggccctagcaggacactctcttcaccatatgaagcctttatagagtatgcatgagtgtaacaattctctctgaaaccttaagcaggcacggacccctccttgtaccctttagctttaagccctggtatgacagtcaacatctttctacttggatgggtccaaataagagttcttaactgcctatgagctgcgtttaaaaatgagtcaccatcccacctgtggctggatgttcacatatgaaagtcagaatcccagttgtggactgtgtctgcatgtgtaattcaggacctcaagagtgggctctctccacgtgtgatagagaccatcctgaatattggtgtggtgtgcatctgagaagtataatctcaccagtgtggcgagccctgtggtgacaatttctctaccatagtttacacaatatgcaagacagtggtactcctccgtgtgacgtatcactgggtcttgcacacaggtaatgtgagtctcctctcctgccttggaatgctcacaggaggcattgggacataccactgaacctgatattcaggttatgtgcctgtctttcctgtgctctgtccatgggcgtttgtgacatatttctgggtcsaaaacacaggcgacatagctctcctgtctggatc

SEQ ID NO: 5373 - DNA, 771 bp, Homo sapiens
tcccaaatacctgatacctaatcccaaatattaagaggtgggggccttgggaggtggttaggaatgggattagtgccctttaaaactgaggtttttgggagcctgcttgccctttctgccatatgaagatgcttagaagaggccttctatgaagcagagaacttttctcagatgccagatctgctgggaccttgatcttggatttctcagccttcagaactgtgggaagcaaacttctgtgtgtatgaatagccatctaaaggattttgttacagcagcctgagcagactaagacaccctgtgagtcagttatttttggctgtgtcacgagtgaccgcgagtgcaggagctgaaacggcagtgagtgggttaccatttctcaggaccctgcggaattggtgcgatggtgcttctgctccacctgttgttggctgggattgtcctgcagctgcattcttctgggggtcagctggggctggaagcttcctgtggtctagtcacacagctggggtctcagctagggygatagaacactgggggcaggccggccttgctgtctctctctggcttctcatcattcagtggtctagcctgagttttttacatggcagctcaggagggtcaatgtggacgctatacagcctgtaaggcccgggtttggaagtccaagaatatgacttctaccatgttctactggtgaatataaattccaaggccagcctagattcaagggataagaacgtagatttcactccttgatgggaggatccc

SEQ ID NO: 5374 - DNA, 510 bp, Homo sapiens
cttaatcagaaactttctcctgcaagccctgaggacgcttaaacacctaagacaccaggattcaataaattaagaaatggtcggctacagtggctcacacctgtaatcccagcacttcgggaggccaargtgggaggatcactcagagccaggagtttgagaccagcctaggcaacacagggagacctggcctctacaaacaaacaaacgaacaaaatagccagatatgccctgtagtcccagctgcttgggaggatcacttgagcccaggagtttgaggctgcaatgagctatgatccatgccactgcactccagcctgggtgacagaatgagaccctgtcacgcctcttcgaccccgcaaaaaaaaaaaaaaaaaaaaagtaaggagactggatacaaggtgacttttaaaacacagggaggaagtgaggttagtaattcatgctcccttctcttcctttccctccttcccttggttccatcttaacaagtcaagttacaagccaggc

SEQ ID NO: 5375 - DNA, 1911 bp, Homo sapiens
tatcaccctttattgcaccatgctctttatctcttcatttacaaccaccttctcattggcctcttcatcactgtattttgaacacataactagtcttttacccacatacagcgtcctgcacctgctggggctgagcttcagtatgtaggggctcacaacgatggtgttttgctttgcttttcagactcaaaatacctcagccaggagccgcagctggtttctttcaaagtggtttgcagatcccctgcatcctaatatgcctggggtgcccagtgaatgcaggttttgaagatcccattccagatcccctgattctccagatcccctgattcagaatctctgcactttcacctaacaccttgatgctggagacaccactcacacattcccttctacacctctgtctcactgctaggagccacctcagctaactcatgcatctctttgtagatggctcttttagttgttttctttgccagcagaagctgggatagattttctgagaagttcacacgtcttatttcagtaggctcatacctctagcacactgtggttttaccataagcacttagacaatggccacggatttaacataaccgagcgtgcagttctagttctcatcatacatacgcttccaccaaagttgtaatctgtgtaaccatagcgtttcttgtgctttttcacctgttactttctattacttaacagcccaatgtgaggaaatgattgtcaatgagtgctgggagtaccacactgttgtactttttgacagagtaggcggctctggaacctgtatcggtctggctgcctggtgcatttgctggccgagcatttctgtttttgttttctttttttctttcttttttgtttctgagatggagtctcactctgtggcccaggctggagtgcagtggcatgatctcagctcactgcaacctctgcctcccgggttcaacttttgtatgtttagtagagatggagtttgaccatattggccaggctggtcttgaactcctgacctcaaatgatccacacgcctcgacgtcccaaagtgctgggattacaggcatgagccaccacacctggccctggccaggcatttcttactgatgatctgagttgttccatcttactctgttccctcttagtatttcctagttactaacatgccctgaggctgcatttggatcaatttaataccactgttgtttccagttgtcacctcccaccatatggcagttactccagtctcctgctcttgcttatccttgaaatgcatcccagccagttaggcatctctgcttctgagacaggaggctgagaattccaccatgttcaaggaaatggcccttaggcactgtctaaggggaccatataggcagtctgataaagtcacatctaagaaaaacatttcagaaagcgtcagctagcacamctttgattatagaggaagccaattatgctcaaacactaatgaattcatttttaaggatgttatgatacagttatgcatgtgcttctttcccaatgcattaagtaaagggaaacagctgtgactgagatgatctttgtaaatttgaagagctagtgatcataaatgatattttgagataactaaaaattatattaatgtgaaaatatctgtaatttgtattggaacaatatcacatgtacggttagtagtattgtgggttatgacttacattcataattggaggaagtgctatacattttagttaaagattataggaaataaagattcattctttcattaagttcacgatcccctcaactgatttctaagaacccctgatctagctcagtctcccagttctacctgggaacaaagactctgagatataaactggatgccaggatcacactcctgtttgccaggtaggattgactctc

SEQ ID NO: 5376 - DNA, 728 bp, Homo sapiens
aagcctggctttctgccccaaggtacctgcaggcctgagcatctcaggctgggcaaggcagcccatgctgctgacacccaatcccttgggctgtcagcctgccccaggccctcagatacaaagagataccatttccccagccgggagcgctgccagccaggcctgtctaggcagacctacccgtggagaaagcgaagacaacccctgtgggaggtggggagctcagcaccagccctacagtcagctccccaagaagcgccccagccttggggaaggacaggccccgaggggtttcccctatggaccaacttgttctaccagcagggggccctcagactcaggtgggaagtaggactcatggaaatgtggcctcagcttccatacctgccccctacagacaaaaataataataaaataaataataatccttgcctgaagcttctgatcaaccttcatggcctggcaatagctcccttgtccctcctagaggaracttggctcctggcctggggattcccatctctctgacttcacttgctctgggcagttggctctgtgcccttggtaaggcttgacctcttctctcttccttgctttgcctctgtttcactcagttgcctcatgcaggccttctcagggggctctttctgcaaaagcaagactgggttcgagagcagccctgctgggtctgtggcccttacccatgttccatgtcctgtcctggccag

SEQ ID NO: 5377 - DNA, 785 bp, Homo sapiens
tcccacctcagcctcctcagtagctgggactacaggcacacaccaccatgcctggataattttttaaaacttttttattaatagagatggggttttgccatatttcccaggatggtctcgaaatcctggtctcaagccaccctcttacctctgcctcccaaagcgctgcaattatgggcatgagccatcatgcccagccttgttcccctgttcttcagggcaacacatcccaaggatgtgactcctgtgtggctgtgacctgtgtgcagttggtgcagtggggtggtagtgagggcagaggcactgagcaaggtgaagaggaggggaggcccagcaycactgggggaatccagaatgtgtcaccccaggatatgtctctttgacataactacttttgagctaaaggcaattaagaagcagcaaatgggccgggtgtggtggcttacacctgtaatcccagcactttgtgaggctgagacaggtggatcacttgaggtcaggagttcgagaccagcctggccaacatggtgaaaccccatctctactaaaaatacaaaaattagctgggtgtggtggcacacacccgtaatcccagctactcaggaggctgagacagaagaatcacttgaacccaggaggaggaggttacagtgagccaagatcgcgccattgcaatccagcctgggcgacagagcgagactttgtctcaaaaaaattaaattaaattaaattaaatttttaaaaaagaagcaggaaatggagaaagagctctttctgtcctcccc

SEQ ID NO: 5378 - DNA, 796 bp, Homo sapiens
acgctgagtgtgtgcggaatcgtaattccagtcccatcacattctgcattctaaattgtcagatattaccagttactcctgcctctgctccagttgtacttcaaatatgtccctggtcccagctctgtagctgggactggcaggcaaggagatcaggtctggctctgcttggtcactaggaagccagactctaaaaccaagtcacctctgagttgaggttttcagatgaccagagtagggagctgatcccttgcaccaaagccattaaccggtttccaaatttggtctgagagagcctgaagccggcattctgccaatgcaggaagctaagcttgggccctggctggtggcattcagctttgagcctgggtctttcccttcagtaacaccaggtaggtgtgaattatgttgaaactagtggaagctggggtgggggttcttgaagggtagggaggggctggcgagggccctgcagaagggaatgaaggctgccaccagccgcctccacagacatgggaatggccacacacmcacatcattcctccatcagtcctctcctgccagaaggcatatacactgtgcccatgggtccccatggccttgttttcaaaagaagaaagcagctggcacccagaatgccacttgtactcatcttcagcagtctagcatttatttcattagtccttgaggattcattaaatgatctgcaagaaaaccaaatgtccccacatcacaggttctgtgctctactctctgaccacttctctgagctgaggcagcctgcttggagtatggg

SEQ ID NO: 5379 - DNA, 808 bp, Homo sapiens
ggttggatgggcatctcctctctcccacagcttcttttgtcagtttccacatgcacaacatacacatcacccaagcctagtccctcccctcagaatgcacggtgcctccatccacagccacctcccaccacggcgttccctctcccaacagaaaccccacctgcctcattacttaaataatctttatttctcatgcactaggaaagatggttcgtatgaaacactgcagttcacagcaaaggcctcagtccagaacacaacataggggccagctgggatcacaatctggtcaaagctctgggagccacactgggaacaccactcccggggttgagtggcagatccaggactttgcagcaactgtggccccagacataacacaaggcagctgccctctcccacagaggcacaggaagctgacacccaaggagcacgtgggctggggacaggacggagaaggctgctgggcagtgacttggcggagatgtggtccagcacctctgccgcctgcgtctacccactcaggccaggaagcccaggcctgtgactgagctctaggcccagctctacccagtgcagagctgctggagttccacagaccctcagcagccccgtgcccacagcagaggtgtagagrtcccccgcctgcccctcggctacatgaacaagacaggggcctaaacttcggccctggccaaggcttagatttgcccaggaaggaccggaaaggctagaggggccagccccccacaaccatcccaagcccctgtggacactggagaagcccataggacagtcaggcttctga

SEQ ID NO: 5380 - DNA, 2252 bp, Homo sapiens
gtccgctgtctgtctcctgaaccagggagtctgacccactcrcagctcccatggggtccgtgcagccaaggccccgcagccacactcactctccgccccacagtggctcctggggctgatggctgggtgatcccagggggtccccaggctcttccgattggctcaggtgccctctcctgcggtggcgggcccacctgggtgcctgccagggccatcaggtgccctgaccccctggctggagggaggatgggaagtgggctccgagggcctcacaggtgggctctcaggagaggccccacctttggcaggagttggtgggtggggggaccctgttcttccccagaggcctgggcagcctgggtccctacagcactggcagcccaggcccccctacaggtcctccgaggggatcagcatccgcttctccaggctccggctcttcctgctcccgccggagccgccgctggggtgggtgccgggcctgggcgcctcgtgcgtggcctgctgcgtgtagtgctggtaggcgggggagaagttgtggatggcgtcctgcacgatgtcctgggggctcactgtctccctgatgccgctggagatgctctgcatgggtgccgggggggctgggggagggcagtgtatgagccccaccatcccccctgcactccagctccccggacaagtcccctcccaggatgcccagggctgtagctcctgcatgtccaggtctggcctcggccagcagagggtggccccagacccctggaccccagcccagcttgctccacccagcaccgggcccgtccctggccagacccctgacaaggaccacgtcccctagagcttccgaggggctccaagcagcggagtacgcctttggctggcctcgggtgggcaccctggtctctccacagtgactgatgagaagccggcaggccacaggctgtctccgccctaatagggggtgtgcctggcaggggacacccatcccccatcaccattggggtccgggaccgcctggaccccacacagcccaggtgcctgtccggagccggatgccctttgcccgtctccctgcccagcgagctggcattcctgggcctcgagaatggcacggacacagacacggtgcccggggcagggctgtgcgctccgggtgccccagctggaaggcagggtgtacctggtgaattctccttcttctctgcgtacacctggcaggggaaggcataacgcagggccacggaggcgaacagcatctccacgcagatgatgaagttctggtagccggcggccagcgtgccagcccccagcttgttcccgccgctggtctccacctccgggatgaccccgcaccgctccaggatggccagcagcagccctgcggacgccacggccgctcagccccagccccagacggggtctgcaggggaggaagaggccccagaccccgcagcggctcctctgacgggtgctgtgaccccgtccgtgtagtctcgtcccaccccaggagactgaggttcaggggggcagggcgcctccaaagtcgggggtctcggcacagcaggtgctcaggagctctcccgggcccgccctgccactccagccccagatcctgggcccgtgccctgtctggtggccatcctcctctgccaaagtgggctgtcagtgccctggcctggcccagggcccagtgggggccaggattcaggaaacacctggtgtggcctctgtgcgacctctctccacctgctggcgggacctccccactcccccgtgctggcgggacctctccactccctcatgcccgcaggttctaccctggcttccagctgacctgtgctgcagctggagaaactgaagcacgtgggggctggggaaaggggtgtgaggtgaccccaggctcactggactgcagcccccacctcggtagcacccctgccccacctgccccacacaccttgccagaacgacaggaagatgacggctttgatggtgaggaacttgaggacgggctggaagggccgcaggagctccctggtggtgaagtagaagaggaacagggcgtagagggcgaggctgacggaggcgttgtagatgagggtcacatagaggtagccgctgcggacactaggacagacgggggctgtggtcagggcggtcccatgaccccgccactgtccccaccctagagccaccgccgctgcaccctcagcctggtccccaccctgagcttgggagcatgggccctgcag

SEQ ID NO: 5381 - DNA, 805 bp, Homo sapiens
tacttggtcttccaggctcccctaatcttcattcttctagttagttagatttattcacttctctcagatctttgcctgtacttgaaatgtggcacagctctattttgcttgtgtctgccctgggaacagtgtggacttggctcaggcagaayagactgcctctctgttctaccacttacttaccatgtggcattggactaatttttaacactcataaaatctcggttttctcgtcagaatcagtaccaatctcatatagtttttgtgaggattggttggagagctctatataaaatgcttggcctgcgctgggtgctcagtgctcatgaccccttcctcccgtgattaattcatctccatggcatccagtgaaagggctgcacaaaataattaccaaaggaatggttgctaagtgaatgaagacaatgtttaatggactaaaatcttccaagtcagatatttttcctttgttacttttggacacatgtttatctgattttattgaaattcttcttaatagtggatgccgtgatgcccctcacagaccctccttcaggactgctgctgtgagttgccagcactgccagcagacagccctcagctacagccctctactgcaagtggctgggctgccaagattcactgcaccctggtcatgcccatttccagtccttgtagagaagaaagggtggttccttcacccaactctgcatacttccttcccttcacttccagagcactgatcgcctgtaaactgtgcacttgtccttgtctcagagggcaatctctgggaaaatatgtctga

SEQ ID NO: 5382 - DNA, 736 bp, Homo sapiens
ctgccattgatgtatcttattcagatatctatagtacatctatctcctgctctccaagtcctttcagcatgttatcaatatgctaaaccagcctgatttcttgtaggttaaagagatgattaaatatctctgtggactaaattatgacatagagatggggagccagagcaataaagtatattgcaatccttgccaggtgaaagcaaattgtctttctattgaaactatatttttaaaaaaaccacttgccatataaatagctgcagcgtaagtgtcaagagctgagttatttgctccagtaaagtggctatatctggagtagctgtcattggaggccacttcatcacatttataataatctactaccatttttcaggatatctccactttctgcaagggacaaataagtgatcaaaatggggttgtgataaaaatcacaatatctgcaccttccaagtctctgatggcttcagtgatatcccctggagacaaggtattgcctttggtttactactttaagtctttcatttggcactttctaacatagmaatcttttagaaaatcagggagacaattctgccttgtactgaacatatccattccaaccatatagtcaggaactgagaaaaataacatagaatggcttggagactactaggccaactatgatttcaaaatttatcatctgacccctacaaggttcccctcctgatcagtgaaccaaagtggtatactg

SEQ ID NO: 5383 - DNA, 808 bp, Homo sapiens
acagtgaaccactgacctaattaacacagttaatcaggataaataagaaagcaaaagctctaattcttgagacagaggtctaattcttaatcctaaacaaatctgagcaatgttgatcatacttttgaaagaatagcctaaaagacaggcttactcagggttttcattacatttctgcaaaatggcagstacttcaactccaatcaaaagaatttccactttttttttattagaatcacagtttgcaaaagagtcgatgtctataatggggattggctgagtcctttagaactctgtctggtaatgaggctgcatcaaaaatggcttttcatggtcgggcactgtggctcactcctgtaatcccagcaatttgggaggccaaggtgggaggatcacttgagcccaggagtttgagagcagcctgggcaacatagggagactcccatctctaataaaaaaaaaaaaaatggctttcctactatgtggactgtgaagcagcttttacttatggtgaccaggtcttaaaataataatgtgatttttattttgtggtaagagtgataaaaattcagaattcagtaagagtaaagcaggaaaagagagttttaaaaacactattccaaatgtagtgttaaatatttaagatgagcttctgttactgaaaacacagaatgcagtcttacaaatttcttaattaaaggtataaagttggccagatctacatctttctgcccaggccattcaaattaacctagaaaattatcttctgaattaaaaaaaactaagaatgagccattccccgcaaaaa

SEQ ID NO: 5384 - DNA, 399 bp, Homo sapiens
caggcatcagccaccatagagtcacttaccggaactgggctctgtggggtgctcctccttcgggatgggttgtgaggtctcatgactggggtcctctgttgttttccttgagggcctgaaaccccaaagccctcattattctgtgcctctagtccttgcccatctccacaggttctgcccatatcccatgtccattcttgaacaatgcccacaaccctctgaattccccaggtgccagacaagactcagcaccatggtcagcaacacgcccggcaagcgccccctgctggccacatccccatccccatccccctccctgtatccctgtgttaccgtctggcatttctgatgyagagaaaatagcccagttctgaggccacagcaatgacagccaggatc

SEQ ID NO: 5385 - DNA, 872 bp, Homo sapiens
caaaaaaaaagaaagaaaaagggacagagtaaaatgtctccttaggaaccaagaacctgatgccaaggaaataactaaggaatagcacctattgagtcacttgtgtgaagagatcctaataagaaaagacagatggtctagaagtgccagctgctctgaactcaccaagagaggaaaaaggtgggtgattttaaagcctccttaaagtctaagcccaaggaaggagcagcattctcaaacatctaattttgttgagagataaatgtgtccttggcagttcctcaaggagttcaagctcctcctataagctggtctgtgtgactatggaaaaattgattcattggctctattttctagggaagatgcttascccacggtagctgaaactgctttttaataaagggcgttcattattcctcctggaattttcttacaaaactggaaatttgtaggtagcttaatgtggtatgaagttatactaaagtgggaatcaatggacatttttagccctgaattgccttctttaaagggaatttcctgagcctttcctttagacactaggacatggaaacagtgtgggcttggattcagtcttgtctcctctggccttggctacctccttttccttccatttgcccttacaggtatttccatccatttgccctgaaaggtacctcctgtcactaacgtgtcagagatcagtggttcttcactagttataactatctgtctcttagcacactactacggacagatctccagggagcagatttcttatcctgatctcaaatagatgaatttcagagcatcctataaatcatagtagatgtgtacgttaacacaagcctgtgcatatgcaccttctgggaaaa

SEQ ID NO: 5386 - DNA, 631 bp, Homo sapiens
cccaggacgggggtagttggagggccacttttttacagcctgygtgaccaaaatgccaatgcgtcttcagagcctcgagttctcagtagctaagtgtgtcagagtagaggaacaacataggtttccagcactcatacttctcacatagcaaaaatgaagaattaaacagagtctcttcatcttgacgtcacctgcgttcttcacacagtgctttcaataccatctctggatgccatctttgtagattgtttgtttgtttgacatttacttttttttttttttccaattcggtaatactgattcttgacttccccctctttttggtacctttgtgattctccttgtaccttccttctttccctcttcccccttctgtgtatatgaatagacattccatgcacatcaagaatatgggggaagtgatgtttctcccttctcagtgtgtcacatatggatgtgtacagcgtcagcttgtcccaatactggagatctttttctgactatgtaaactctgtgtgtgtgtgtgtgtgtgtgtgtgtgtgtatacacaccagctatgtgtgctgggctaaggcttcctcccctagttaaactggtattccctggtttctccgtgtactgtacaggtatt

SEQ ID NO: 5387 - DNA, 631 bp, Homo sapiens
cccaggacgggggtagttggagggccacttttttacagcctgtgtgaccaaaatgccaatgcgtcttcagagcctcgagttctcagtagctaagtgtgtcagagtagaggaacaacataggtttccagcactcatacttctcacatagcaaaaatgaagaattaaacagagtctcttcatcttgacgtcacctgcrttcttcacacagtgctttcaataccatctctggatgccatctttgtagattgtttgtttgtttgacatttacttttttttttttttccaattcggtaatactgattcttgacttccccctctttttggtacctttgtgattctccttgtaccttccttctttccctcttcccccttctgtgtatatgaatagacattccatgcacatcaagaatatgggggaagtgatgtttctcccttctcagtgtgtcacatatggatgtgtacagcgtcagcttgtcccaatactggagatctttttctgactatgtaaactctgtgtgtgtgtgtgtgtgtgtgtgtgtgtgtatacacaccagctatgtgtgctgggctaaggcttcctcccctagttaaactggtattccctggtttctccgtgtactgtacaggtatt

SEQ ID NO: 5388 - DNA, 631 bp, Homo sapiens
cccaggacgggggtagttggagggccacttttttacagcctgtgtgaccaaaatgccaatgcgtcttcagagcctcgagttctcagtagctaagtgtgtcagagtagaggaacaacataggtttccagcactcatacttctcacatagcaaaaatgaagaattaaacagagtctcttcatcttgacgtcacctgcgttcttcacacagtgctttcaataccatctctggatgccatctttgtagattgtttgtttgtttgacatttacttttttttttttttccaattcggtaatactgattcttgacttccccctctttttggtacctttgtgattctccttgtaccttccttctttccctcttcccccttctgtgtatatgaatagayattccatgcacatcaagaatatgggggaagtgatgtttctcccttctcagtgtgtcacatatggatgtgtacagcgtcagcttgtcccaatactggagatctttttctgactatgtaaactctgtgtgtgtgtgtgtgtgtgtgtgtgtgtgtatacacaccagctatgtgtgctgggctaaggcttcctcccctagttaaactggtattccctggtttctccgtgtactgtacaggtatt

SEQ ID NO: 5389 - DNA, 786 bp, Homo sapiens
aggttcctcatttgtggtagacttttccttgttctatagtcaatgggatctgagtagtaccagctggatggcttgtttgagtgaacgcttcaaaaggaatatcaggggctaaactctgaggataggattctagaattttaggactccaaggtgtttagcaccaacatagagagctgagcccagagaaggaaaaatgacttaacttagattcactcagtttgtcagtgggcaaaaaggaactgcaacctggccatgaactctcactcttctgtagtggcctctcagtaccactcatgttgaagctactttaagttccaattataataataataatgacaacaacaaaaactactacagcaataacaactgctattcaaaatatttattaaatgcttattgtgagccagacactgtttaaagtgctttgtatgtatgtttcattaaatcttcacaatctacgaagtaggtactattatgatctccaaaacaggcaaggaagctgaggaaccttgcctaaggaacctgcccaagatcatggaactagaaagtggtaactccaaggtgtagcttcagatcccctgctcttgacccttatgccatgccacctccaatgcatgtcagtgtctgagaagacagtgaccatgtaagatggcagataactagtgggtggccagttctggtgtatgtggtcttctcattctcctttgcccrttgtttttgagtcttatctgactttctaccaagtttttaaaaaatgttaacagtcttttgttgttacttatctga

SEQ ID NO: 5390 - DNA, 807 bp, Homo sapiens
attttttaaaatgaaatagatcaacatgtactgacctgttcagctatatatgatacattaaatggaaacaaagcaagttgcacaaagaaaattgagtgcttaagaataaattttaaaagaaatgtataaaacacatctgaggaaaactttaaagcattcttaaaaagacacaaatgaagagtttaaccacagacatctcttatattcagatagaacaagttaacataaaaatgtcagttcatcataaatttagaaatttaatgtaatcctcataaataaaccaagtttttttaatggagacatacaattgatactgagccttgtattgamaaataaatgtgcagtaacagccaggaaaacactaacacactagagggaaggccgagttcttccagacattaaatcacagtctaaagcctccatgatgaaaagtgtcttactgacacatgaatagacagacaaaccaacagaataatacagaaagttcaaaaacagatccaagtgcagatgaagttttagtattgtatattattaaggtggcatctaaaatcaccaaggcaaaaactatttaataaatgatgtttgatatggtttggctgtgtccccacccaaatctcatcttgaattgtagttcccataatcctcacgtgtcatgaaaaggacccagtaggaggtaatttaatcatgcaggtggttaccctcttactgttcttgtgatagtgagttctcatgagatctgatggttttataaggggctgttctcccatttgtttggcacatctccatgatgctgtcatgggaaaaagg

SEQ ID NO: 5391 - DNA, 807 bp, Homo sapiens
attttttaaaatgaaatagatcaacatgtactgacctgttcagctatatatgatacattaaatggaaacaaagcaagttgcacaaagaaaattgagtgcttaagaataaattttaaaagaaatgtataaaacacatctgaggaaaactttaaagcattcttaaaaagacacaaatgaagagtttaaccacagacatctcttatattcagatagaacaagttaacataaaaatgtcagttcatcataaatttagaaatttaatgtaatcctcataaataaaccaagtttttttaatggagacatacaattgatactgagccttgtattgaaaaataaatgtgcagtaacagccaggaaaacactaacacactagagggaaggccgagttcttccagacattaaatcacagtctaaagcctccatgatgaaaagtgtcttactgacacatgaatagacagacaaaccaacagaataatacagaaagttcaaaaacagayccaagtgcagatgaagttttagtattgtatattattaaggtggcatctaaaatcaccaaggcaaaaactatttaataaatgatgtttgatatggtttggctgtgtccccacccaaatctcatcttgaattgtagttcccataatcctcacgtgtcatgaaaaggacccagtaggaggtaatttaatcatgcaggtggttaccctcttactgttcttgtgatagtgagttctcatgagatctgatggttttataaggggctgttctcccatttgtttggcacatctccatgatgctgtcatgggaaaaagg

SEQ ID NO: 5392 - DNA, 614 bp, Homo sapiens
ggatgtgcccatagcacacattactcagctttgaaactggcagataaggctgttgccttacagaagggcagagaaacatgaaggaatcaacccaagtccatgagtgactgaatgagttgagtaggccacctatgtgctctggactgtcaagtggagagaaacttgacaagtggtgagttctttgactccctgtactattgggtttttatattatagaggcttagccctttaagcctgataaagccagggaaacttggaggtctgaaagctccgattggtagcttgtggggaagagtggctcttggtggcacaggacaggtgggaaggaaaagggagtcaggayttggcacaagactaccaaccatggtaggtgggtatggcaagtgcgtgtccagttgatttctaaggatgattttggtggtactgccaggtaggggagataagaaataaggaataagcttggttgtgagtcatacagaagtgtagttttcttatgagaaagaataactgagtcaggggaaatggtaccacttagtcatccagtttaggattagagagaaatgaaatcaagggagccacatcaggcataggtcatctctgggtcacctcatgca

SEQ ID NO: 5393 - DNA, 790 bp, Homo sapiens
gctccacccttttagatgaaaagtaagaccaagactcaaagtgagggtgcccgggtcctccctgaacagagggagctgttcgtgtcagagactcactgccagaaactgtcacagcagctgcaggtttgcacacccagtgcttgacattaggcaaaccmcctcatttctcggggtcctcgacctcctcaaaagttttttcttttttttttttttttttgagacagagtctttctctgttacccaggctggagtgcagtagcatgatctcggctcactgcaacatctgcctcctgggttcaagtgattctcttgcctcagcctcctgagtagatgggattacaggcatgtgccaccacgcttggctaatttttgtatttttagtagagatggggttttaccatgttggtcaggctggtctcaaactcctaacctcaggcaatccacccacctcggcctcccaaagtgctggaattacaggcgtgagccaccgcacccagccggaagtttattctcttaactggagctcaagacttcaagaccagtctgggcaatatggctaaacctggtctccacaaaaaaataccaaaggtatccaggtgtggtggtgaatgcctgtagtcccagctacttgggaggctgaggtgggaggattgcttgagcctgggaggtggaggttgcagtgagccaggatcgcaccactgcactccagcttgggtgacacagcaagatcatgtctcaaaaaaaaaatacataaggatggttaagaatgtaatttgacaaaaagaatgta

SEQ ID NO: 5394 - DNA, 791 bp, Homo sapiens
tggccccccaggatctcgtggtagtggaggaaaatgaactccgtcctcccgtgttgaggctttaccttgtgctgagcttgctgagggctgctggggatgccggagtaagcagggcagttcacacaggcccctgcctcctccacaaggacagggacaagatgaagtgctctacggggtcctgcaggggcatggctggaagtgagggtggagggtctggggcaggcaaaggccagcctggtcttgaaggatgggcgggagacagtgcctactcagtgggtttggctggtgcccatggtggggcaggatggcatggggaattctgggaatggcgtggcrtagatcagtgatgatgagtgtggaaatccaagagtttcaagtgtgcagtgagtgtgtcattagcaatgctcatagatccaaatcagaaatttaaatgcttggttggtgttacctcgtgtgctgtttccaacaaagctcaaagattgatctctttatcatgtgctatatacccagaaagagctgtgcccaggcaggaaggaggtttggaactcccaggataagctttgctttttggccagaatttaaatgtgtccttatactcagcttgatgtcgtggtttttatattaagtgggaaaattttactcatctaagatttttgattaagattatccaattattaagaatcctggccttatcattggaaacattttatctattatatttttaatatgctgttatttacaaatcacatataccaacatttctctcatttgcgggttctgcttgtacatgc

SEQ ID NO: 5395 - DNA, 791 bp, Homo sapiens
tggccccccaggatctcgtggtagtggaggaaaatgaactccgtcctcccgtgttgaggctttaccttgtgctgagcttgctgagggctgctggggatgccggagtaagcagggcagttcacacaggcccctgcctcctccacaaggacagggacaagatgaagtgctctacggggtcctgcaggggcatggctggaagtgagggtggagggtctggggcaggcaaaggccagcctggtcttgaaggatgggcgggagacagtgcctactcagtgggtttggctggtgcccatggtggggcaggatggcatggggaattctgggaatggcgtggcgtagatcagtgatgatgagtgtggaaatccaagagtttcaagtgtgcagtgagtgtgtcattagcaatgctcatagatccaaatcagaaatttaaatgcttggttggtgttacctcgtgtgctgtttccaacaaagctcaaagattgatctctttatcatgtgctatatacccagaaagagctgygcccaggcaggaaggaggtttggaactcccaggataagctttgctttttggccagaatttaaatgtgtccttatactcagcttgatgtcgtggtttttatattaagtgggaaaattttactcatctaagatttttgattaagattatccaattattaagaatcctggccttatcattggaaacattttatctattatatttttaatatgctgttatttacaaatcacatataccaacatttctctcatttgcgggttctgcttgtacatgc

SEQ ID NO: 5396 - DNA, 675 bp, Homo sapiens
acctcccaccatcttccctgaccatggccctgctccatctgatttgtttgtcctctgatcaggtggggcctgagtccggcagtggatgccagtgagtcagccatggttggcagggactggctggctgcccccctctcttcattggccccgcctgtctggcctgggcgcccactcactcctgctgcacctgccacaactgccggctgatcctgctgctctgatgccccctcacgtctccagcctgcgccccgcactgcgttcgctgcccatcttcctcccaagctcacagtctagctccaggtgcctgytctccttgttctgtgtctgtttctgcacaccctgcggggaggccaggctcacccaagaaaagagtcaaggctgcaccatgaagcctctcgggctgggcagggagtccaggccctgggagccccccagagccccccacagaatgtgcagctagcctcgccagacgcgggcgatggggccgaaccccgcaggacaacttaggaggagtgaagagtggaagagtgcccggtgcagggatgggtgggaggaacctggggtagtgtgcacgcctgagacagggtgggggacacgaagggagacaggcgagggtgggacaggcaagggtgggtagtgtgcatccctgagacggggtgggggacacggggggag

SEQ ID NO: 5397 - DNA, 797 bp, Homo sapiens
aagctctgtgagtgcagtgacctcggggaagtgcagggagtgcggggagctagaggcaggaagagcatcttggaaacaaaggtgaaaggagaaagcctgtgtctcatttcagaagaagtctgagtatatcaacgtgataaaattgaacagtaaacatttactcaccacatttagtagcatatgtacttagtaaaactttttaaaaaacaaacttacaatgactagaccatgagaaagacagacacgtgcgtggaagagaagatagaaagaaaacggtgatactagagtcactgaaattctaaacattcgttagaggcccgcatgcgccaagcgctgtgtgaagataaatcacaacgtggccctgaaggtttaaggccccatggagacacgtcactgctgcctgctggtggggggcaggctgctgcttttggaatgacttcctttattgttcaggtgcaatttgtaaaataaataagaatcagtggaagacaaaaatatgaaataaatgctaagctgctctttgatagtgagaaagcacctgagggtgtttccgccgtgtaagccgccaccacgcgcgcgggacaggttcatctgtttatgaggaaggacagaactgagttgaaatgcacagacctggcggggagcccccrcggccttctctgtaaacaaagccctgcgttttggtgtctcactcctgttttctttctcctgaaaatgaaaataagaatgggcaattattccatattttcccatcatgcaatcagtagaaattttggtgggtgtaatcattgattcat

SEQ ID NO: 5398 - DNA, 622 bp, Homo sapiens
acccgtgcttagtgtgtaaggtgtattcatttacttctgttaaattgagctctttagtaaggaaaggcaaaattagaaagggraaaaatataagtgctatcacttagattccattgcttgttaagacagggggttctggtttctgaaaatgcagttaatcattagaaaggaaaaagtatttgatcaacagaatgttatttctaatggctttcaatcaattctttcaaaacacaaagagaaaaagacatcaacaaaataatataaaagcaaacatcaaaacttaggaggttaacaatcaatttaaaagcctcaggaattttgttactgaaacagtcattagaaagcagagaagacaggactgtggtaagttaaagatgatgtttgtgtttgaagaatttgatctggggaaggaagcttgaacacacacaagctctgattcatacaggatgattttaaaggccaggacagtcttatgatctaatgatgtgggacatgaaatcttcattagtcttaggaccagttaaaaaataacaccaccaccctgcactctttaaatagtatttataataagttagtgtatgttgaacattaaatttggtccagataatctaggcagataatt

SEQ ID NO: 5399 - DNA, 621 bp, Homo sapiens
aactgaactgtccaaaaaaggttaaataacaaagttttttaaaagtttcattgaaaatggctccaaaacaaatcttttttttttttctgtctagtatcaggtcgcaaaaaatttaagctttgccaatcacgtggtctctgctacaactactcatctctgcctctacagtatgtaagcagacaaagacaatatgtaaatgaataagtatggctatgttccaataaaactttacttacagacactgaaatttgaatttcatacaattttcacatcacaaaacattattttttttgaatcattaaacactgtaaaagccatcctgagctaccttgctatacaaaacaagtggcagtagtttgcaggtccctgcaacaaatttsaattactagagaggattactgctcattctttatcagataaatgagctgtcactgcaaaaacttaagaaattaggagaagatccttgtattggggtggccacagtatactcattctgtaattttccaaatgtaattgcataagtctgagtacatagtctgtatataaaaactacagattcctgaaaccatctctaagagatttagctaatatcaagtagggctaggaaggtgtttggatccc

SEQ ID NO: 5400 - DNA, 822 bp, Homo sapiens
tcctaatggcattggtggtcaggggcaggtaatgaggggctcttagttgccaagatgactgagatgtgctgtttgtgttggaaagcaggggccatggaagttaagtcatcagcaatgcaagaggtagtactcaaaacttacctttcacacccaaatcaagaataccccctattgagaaatagttatgtgtctcccccaccacagttaaccagtaaaaagaaacaaaacttaaaaccccccaaaaaactaaagcaacaacaacaaaactcaggcatttagaaatcaaagaagtgtaattatggattttttttttttttttttacaaaggcatgaaagttgacagttttcccatcaatgtgtgcctctgaggttctcttttcaagatctcaattctctttccctttctatcccccaggcgcccaaaccaccaaggctttgaccttgcagtagctgccttggggtctccctaattgtcttctgaaatttccccatcctataagtcacatcccaagctgccaagaaactgatacaataacctgccctgatttaattaatagcaatttgcagaacagcagccctgcacacatgtgttcctaggttggggctctggtgacacacagatgggtatgggactctgggccaaattgatgcttctccaaacgatttctactctttcccacattctatctggaaccttctgctcaaccatgctgacctggctgcagacaccacctggagtggcagcctgcacctgcctttgcttcatatagcagcaattwtttccataaaccttcaatagacagacatctggagcttttgagt

SEQ ID NO: 5401 - DNA, 791 bp, Homo sapiens
catgaaccttccatgtcataacctagaatgatcccacttctaaaatccagaactggactatccacctttacagacccattttctctcttgctttcgcattccttacttttactagatttgctctattttataaagacttccagttcctagaaagtgctctcatctccattatttcctctttctcaaggaggactgttgattttttttttttgatagagaaaataacacaactctggggttttatgccactataaatgtatgatttcctggtaacttattttcagcttgtttcaactctatctcactggaacaagaccacaaaattttccttttgtaggcctcacagcagatgcaactctgtcaatataaaataaccatacctcccatctttaaaagaaagagaaacaaaataaagagaagaaagtactaagttagaaggtgcaataataagcaatggtggtgggggctggggggacactaagacctttcaaacccagcctctgtcttttaggataagaatatgattctctttagtcatcgggaaatactatcattaagatcacataaaggtttcctgctttataccaagtaagccaaaatgtctctgcctggatttcaggtgccccacagttgagttctacctgacacctctagctttgtctctccttcattcctattgccttactgtctcccaaataagtcatgcccaggmtccctaaaatgctccttcttgaaacccctccattcccgtattcatctctgtattcttctagtgctcccgcctttctgtt

SEQ ID NO: 5402 - DNA, 670 bp, Homo sapiens
aagacagaccaggtatggtggctcgcacatgtactgccagcacttaactggtaccatttaactctatcaacagaacattcctgaatcaaggaactcggccacacaaaccccttgtccctgcctgcagagaaccaactggttttgcaagacaaggaaaataaaaccttttaatatgagcagaaaaaggaagataacatccataaaaactactagaagaaaaaatgagaatcaattacagctgatgaaaattctcaaccacaggcagaagaaaactaccaatatctagtatgaattaaataggcctttgcagaaataaaaaytaacgtgaaattagaaatttaaatctcaaaacaaaaatggaccaaagggggggaaaaaacagaggaagctgagaaaagttgaagtaactcagcaaagaaattgaaaaagatgaattaatttaagctacaaggtgaccaagtggaaatataatgaagggcattgcaaaaaaggtagggaagcagccaagaacagaacagttacgaagggttagaaagtatgacacacacacgtgctcccttgtggtatagttgcacaatgaaatcccgtacatcagtgagaccaatctacaaacccaacaattcgggtgactcacgtcatgtggagaagctgggctccagcctctgcacat

SEQ ID NO: 5403 - DNA, 670 bp, Homo sapiens
aagacagaccaggtatggtggctcgcacatgtactgccagcacttaactggtaccatttaactctatcaacagaacattcctgaatcaaggaactcggccacacaaaccccttgtccctgcctgcagagaaccaactggttttgcaagacaaggaaaataaaaccttttaatatgagcagaaaaaggaagataacatccataaaaactactagaagaaaaaatgagaatcaattacagctgatgaaaattctcaaccacaggcagaagaaaactaccaatatctagtatgaattaaataggcctttgcagaaataaaaattaacgtgaaattagaaatttaaatctcaaaacaaaaatggaccaaagggggggaaaaaacwgaggaagctgagaaaagttgaagtaactcagcaaagaaattgaaaaagatgaattaatttaagctacaaggtgaccaagtggaaatataatgaagggcattgcaaaaaaggtagggaagcagccaagaacagaacagttacgaagggttagaaagtatgacacacacacgtgctcccttgtggtatagttgcacaatgaaatcccgtacatcagtgagaccaatctacaaacccaacaattcgggtgactcacgtcatgtggagaagctgggctccagcctctgcacat

SEQ ID NO: 5404 - DNA, 1788 bp, Homo sapiens
tatttggtcctctgcttccaggccctctgggctggcccagagggggcaccaggggcaccctctactcctgcctagcctctcccagtctgaatttattgccttctcccttaaacctgctgttcctctgggttggctagctcagaaagcagcccactgtctgcccaggtgagaccagaacctggcgtctctccagcctttctcattcttcaatgcccaccctggctccaacatccagccgcctgtcacatgcaggtgaatgcacctgtgtgaagttctctcccctttgccttccctcctgccccaggctcttgccctcggtcaggacctggtctcctgtctcttcccaacccattcctcctctatgttgcctccaagtgatcatccgcgccgtgctaattccatgctccaagaccttcagtgactccccagactgcagtaaagacatccgggccccatgatcctggctcccatccccctccatgatctgacccccccatacccgtccagccttgttccccatcccccagtctcagccatgagtcagtccatcatctctcctcctatgacacagtccatcatctctcctcctggtgcccttattgtggggtttccttgccctgggatacccttcttcataggacggtgaagttcgcatccattcctccaggcctctgggctcctcccacatccactgcccaaaacatcttccttcctgtctttttcgggaggacttagtctgtgttagaggtatctgtgttggactctttcctgttccgctatcgcccccacccctgtcatctgtacttcctctgaccccctcacatttactaactgctcactgtgggccagattctgtgctgagtgttatatacactgtcccatttcacccaatcaatcaaccaccgcagacacgagcgccagcaccacaccattttaggggacattaaacgaggctccgtaaggctgagtgacccgctccacgttacacaggagtgaaggggagtggaactgtgacttgaacccaggtccgcctaactcctcttgaaaccttttctctaaaccactaatctagatcttccaacagtgtgccctggtcatggtgtggcgggactgggtagaagggccccacgacagtgctctcctccgcctgccttggggcacatggataggccaggcactgccagccacgagcaggctctgtggtcaccagggtgctgtgctaatattgtgtgctgtgatgtgaaagaggatggaaagccctgccataaattagacttgattgtggccctgagctggcaagggcagccctcttccccatagttcctgcctggcctaggagtgcctgttcaagtgccccacccagctgcatcttgccctgggccagactcctctggccaaggagcctctctgtgggggagagggtggtggttggccttgggcttggggtcagatctgtggcccctaaagtgagtagagctcccagagggccctgcccaagctgtccagctccagtcctcgtccaggmtggcatccctcccacccaggccttggacctcccagcctagaccttgaggcagctgagctgttcccactcagccctggcatggccgtgcagaggctgtgtctctcatcaccttctcacagggctctgctgagaactcagtgcacaacctggttggctgttcatggtgactccctgctgtcaagtccaagcccagcttggcgtgaatggagaggtgacagaactagagtgcgaagattctctaaatcaggactctgtaccacgtg

SEQ ID NO: 5405 - DNA, 1788 bp, Homo sapiens
tatttggtcctctgcttccaggccctctgggctggcccagagggggcaccaggggcaccctctactcctgcctagcctctcccagtctgaatttattgccttctcccttaaacctgctgttcctctgggttggctagctcagaaagcagcccactgtctgcccaggtgagaccagaacctggcgtctctccagcctttctcattcttcaatgcccaccctggctccaacatccagccgcctgtcacatgcaggtgaatgcacctgtgtgaagttctctcccctttgccttccctcctgccccaggctcttgccctcggtcaggacctggtctcctgtctcttcccaacccattcctcctctatgttgcctccaagtgatcatccgcgccgtgctaattccatgctccaagaccttcagtgactccccagactgcagtaaagacatccgggccccatgatcctggctcccatccccctccatgatctgacccccccatacccgtccagccttgttccccatcccccagtctcagccatgagtcagtccatcatctctcctcctatgacacagtccatcatctctcctcctggtgcccttattgtggggtttccttgccctgggatacccttcttcataggacggtgaagttcgcatccattcctccaggcctctgggctcctcccacatccactgcccaaaacatcttccttcctgtctttttcgggaggacttagtctgtgttagaggtatctgtgttggactctttcctgttccgctatcgcccccacccctgtcatctgtacttcctctgaccccctcacatttactaactgctcactgtgggccagattctgtgctgagtgttatatacactgtcccatttcacccaatcaatcaaccaccgcagacacgagcgccagcaccacaccattttaggggacattaaacgaggctccgtaaggctgagtgacccgctccacgttacacaggagtgaaggggagtggaactgtgacttgaacccaggtccgcctaactcctcttgaaaccttttctctaaaccactaatctagatcttccaacagtgtgccctggtcatggtgtggcgggactgggtagaagggccccacgacagtgctctcctccgcctgccttggggcacatggataggccaggcactgccagccacgagcaggctctgtggtcaccagggtgctgtgctaatattgtgtgctgtgatgtgaaagaggatggaaagccctgccataaattagacttgattgtggccctgagctggcaagggcagccctcttccccatagttcctgcctggcctaggagtgcctgttcaagtgccccacccagctgcatcttgccctgggccagactcctctggccaaggagcctctctgtgggggagagggtggtggttggccttgggcttggggtcagatctgtggcccctaaagtgagtagagctcccagagggccctgcccaagctgtccagctccagtcctcgtccaggctggcatccctcccacccaggccttggwcctcccagcctagaccttgaggcagctgagctgttcccactcagccctggcatggccgtgcagaggctgtgtctctcatcaccttctcacagggctctgctgagaactcagtgcacaacctggttggctgttcatggtgactccctgctgtcaagtccaagcccagcttggcgtgaatggagaggtgacagaactagagtgcgaagattctctaaatcaggactctgtaccacgtg

SEQ ID NO: 5406 - DNA, 1788 bp, Homo sapiens
tatttggtcctctgcttccaggccctctgggctggcccagagggggcaccaggggcaccctctactcctgcctagcctctcccagtctgaatttattgccttctcccttaaacctgctgttcctctgggttggctagctcagaaagcagcccactgtctgcccaggtgagaccagaacctggcgtctctccagcctttctcattcttcaatgcccaccctggctccaacatccagccgcctgtcacatgcaggtgaatgcacctgtgtgaagttctctcccctttgccttccctcctgccccaggctcttgccctcggtcaggacctggtctcctgtctcttcccaacccattcctcctctatgttgcctccaagtgatcatccgcgccgtgctaattccatgctccaagaccttcagtgactccccagactgcagtaaagacatccgggccccatgatcctggctcccatccccctccatgatctgacccccccatacccgtccagccttgttccccatcccccagtctcagccatgagtcagtccatcatctctcctcctatgacacagtccatcatctctcctcctggtgcccttattgtggggtttccttgccctgggatacccttcttcataggacggtgaagttcgcatccattcctccaggcctctgggctcctcccacatccactgcccaaaacatcttccttcctgtctttttcgggaggacttagtctgtgttagaggtatctgtgttggactctttcctgttccgctatcgcccccacccctgtcatctgtacttcctctgaccccctcacatttactaactgctcactgtgggccagattctgtgctgagtgttatatacactgtcccatttcacccaatcaatcaaccaccgcagacacgagcgccagcaccacaccattttaggggacattaaacgaggctccgtaaggctgagtgacccgctccacgttacacaggagtgaaggggagtggaactgtgacttgaacccaggtccgcctaactcctcttgaaaccttttctctaaaccactaatctagatcttccaacagtgtgccctggtcatggtgtggcgggactgggtagaagggccccacgacagtgctctcctccgcctgccttggggcacatggataggccaggcactgccagccacgagcaggctctgtggtcaccagggtgctgtgctaatattgtgtgctgtgatgtgaaagaggatggaaagccctgccataaattagacttgattgtggccctgagctggcaagggcagccctcttccccatagttcctgcctggcctaggagtgcctgttcaagtgccccacccagctgcatcttgccctgggccagactcctctggccaaggagcctctctgtgggggagagggtggtggttggccttgggcttggggtcagatctgtggcccctaaagtgagtagagctcccagagggccctgcccaagctgtccagctccagtcctcgtccaggctggcatccctcccacccaggccttggacctcccagcytagaccttgaggcagctgagctgttcccactcagccctggcatggccgtgcagaggctgtgtctctcatcaccttctcacagggctctgctgagaactcagtgcacaacctggttggctgttcatggtgactccctgctgtcaagtccaagcccagcttggcgtgaatggagaggtgacagaactagagtgcgaagattctctaaatcaggactctgtaccacgtg

SEQ ID NO: 5407 - DNA, 814 bp, Homo sapiens
gatccaagaaggaaggacatcatccagggaatagtgcctcctaagcctgtctgcctgatgttattttctctctattttctgggaaagaataaaacaaatccaagaacatctaaagtagcattgacattttttggataaaatctcttcctacattagaaaagcatgatagctgttctcatgatgcctctgtcctgcagtatcatgcaatacataaaacagcactgggcgtttcacgtgtccctggattcctgcagtatcatgcgatacatgaaacagcactgggcatttcacatgtccctgggattcctggctgacatgtctaactctctctgtggaatcatgagctcttgaaggcacaataaaagtctttcccaacttcatgtgctctatacctagcgcagaatctgaaagatagcacatgctcaataaacttcaactgaatatttactaaatacgtaaaagagaattatcattaaccaatacacttaattaaacttagtcttcctaagttagcagagtacaatttattaragttcaaacacaagaggcctagaggtatcagattcacatctctaataaaaataataaccagatctcaagagaaggttctaaataggtgtaatagataatagttattctttcccttggtttctccctaattaactttccaattgtgtgtttcatgagtttcagatgatttccaataggattaaggtccaaatataaatctgtaaagacagctggaaacaaaattgctgaaattttccatttcgcctttggaaaattcaagagtcaatagcatctgtctgccaaa

SEQ ID NO: 5408 - DNA, 1606 bp, Homo sapiens
ccatcctggctaatacggtgaaaccccgtctctactaaaaatacaaaaaattagctgggcatggtggcacgtgcccatagtcccagcttcccaggaggctgaagcaggagaatcgcttgaacctgggaggaggaggttgcagtgagcccagatggtgccagtacactccaggctgggtgacagagaaagactccgtcttaaaaaaaaaaaagaaagaaagaaaggcactaaattttataaaataaaagaacataagaacatatctggtacctaagtttattgttttttccctatcattttgaattctgtraacactttctttctagaaagaattgtacactactgagtcagaggggaaaatacagtgggcaccccacaagtgttacaggggctggatctccctcttcctcagcttatttggaaatctggttaagattcactatatttccatgtgcttggctcaatatagagggttctagggtcttaatgttacaagtattgattatttcacatttattctcaccatctaaaggcagagattcattgctacataggtatattttatattattgttctcctagaagatcatggttgaaaatgatataaaatgttttattcagggttattttatatctgttcaaaaatggtggacttccttaaaaatcacctgtgctgaactgggtaacagctggattcatattaaaacttgcaggtttgaagaagagaagcatttggaaaatgcagagaataaacacagtatgggttggtgacttagctgaaggctcaacaacggttgagagagaagtagagataaacccatagaggatcccacctgccaccttccatgcagccacctcaagtgacaactttgaagatgcacgctagaccagagggtttttggcttgctgcacttccctaggcttgttgatttagtctcggcgattagctctgcctaggttcctctctccccactctatggtcttggtttgtcccctgacccctgcctggcatcactcttagctttccacttctccttgacaagtattcccagcatgctttgtgattcccagcatggtgcctatgaacggtttgggacagaaaccatttcttagtattatgttcatgaaagacagcagaagattaaaattagcctaagggcttcctgtatacaaatcaacattgcattcacagatgtgctagtttatgacaatttttaccacatgaatatgaaatgattaaaaaatcaatttgaggaattgcccttacctaagacagagatgatatacttttcaaaacagcgtttcatttatgttaattcttgcacttatttaataaaagtgtattgagcacctaccatgtgcaaagcattatggggcataaagagagacatagttctaggttcaagaagtccagaatctaacatgggagggagatgtgtaaatatctgttataggaaataaacagaagagcaaaatatttagatactactatttattccaaaacacagggaagcatcttaattgcttaggaacaaaaccagcctctgaaagagcaaacagtactagggagagatgcgtataaaagtgcttctggaaaagataaacat

SEQ ID NO: 5409 - DNA, 580 bp, Homo sapiens
gtgcggcggcagatggggatgagagggaacaggagaacctcactcccragaaaggagccttgcctgctgactgatgattctggggtgaggaagagagactggcatgaccagctgatgagtgtctggttcccgggacatgacagacaattcctacagtctacctgtgggaacagatgaggcttggaagaagacacatagaaacaggtttaaattctataaattagaatttacagggggtaggagataggggttacacgttgtctctccttccagatgacattttgacttgttaaagaaaacctagcataggaacattgaatacctcctgacattggtgttttcaaatgacttacagcactacaaatataaagttataacaacagcataccaattttaacataccaggaccaaggactttattctatgagaactacaaaagacacaacacaaatgaagacctagaggaaagtttacagagtttttttttttttttttttgagacggagcctcgccctgtcgcccaggctaattttttttttgtatttttagtagacacggggtttcaccatgttagccagga

SEQ ID NO: 5410 - DNA, 580 bp, Homo sapiens
gtgcggcggcagatggggatgagagggaacaggagaacctcactcccaagaaaggagccttgcctgctgactgatgattctggggtgaggaagagagactggcatgaccagctgatgagtgtctggttmccgggacatgacagacaattcctacagtctacctgtgggaacagatgaggcttggaagaagacacatagaaacaggtttaaattctataaattagaatttacagggggtaggagataggggttacacgttgtctctccttccagatgacattttgacttgttaaagaaaacctagcataggaacattgaatacctcctgacattggtgttttcaaatgacttacagcactacaaatataaagttataacaacagcataccaattttaacataccaggaccaaggactttattctatgagaactacaaaagacacaacacaaatgaagacctagaggaaagtttacagagtttttttttttttttttttgagacggagcctcgccctgtcgcccaggctaattttttttttgtatttttagtagacacggggtttcaccatgttagccagga

SEQ ID NO: 5411 - DNA, 580 bp, Homo sapiens
gtgcggcggcagatggggatgagagggaacaggagaacctcactcccaagaaaggagccttgcctgctgactgatgattctggggtgaggaagagagactggcatgaccagctgatgagtgtctggttcccgggacatgacagacaatwcctacagtctacctgtgggaacagatgaggcttggaagaagacacatagaaacaggtttaaattctataaattagaatttacagggggtaggagataggggttacacgttgtctctccttccagatgacattttgacttgttaaagaaaacctagcataggaacattgaatacctcctgacattggtgttttcaaatgacttacagcactacaaatataaagttataacaacagcataccaattttaacataccaggaccaaggactttattctatgagaactacaaaagacacaacacaaatgaagacctagaggaaagtttacagagtttttttttttttttttttgagacggagcctcgccctgtcgcccaggctaattttttttttgtatttttagtagacacggggtttcaccatgttagccagga

SEQ ID NO: 5412 - DNA, 580 bp, Homo sapiens
gtgcggcggcagatggggatgagagggaacaggagaacctcactcccaagaaaggagccttgcctgctgactgatgattctggggtgaggaagagagactggcatgaccagctgatgagtgtctggttcccgggacatgacagacaattcctacagtctacctgtgggaacagatgaggcttggaagaagacacatagaaacaggtttaaattctataaatyagaatttacagggggtaggagataggggttacacgttgtctctccttccagatgacattttgacttgttaaagaaaacctagcataggaacattgaatacctcctgacattggtgttttcaaatgacttacagcactacaaatataaagttataacaacagcataccaattttaacataccaggaccaaggactttattctatgagaactacaaaagacacaacacaaatgaagacctagaggaaagtttacagagtttttttttttttttttttgagacggagcctcgccctgtcgcccaggctaattttttttttgtatttttagtagacacggggtttcaccatgttagccagga

SEQ ID NO: 5413 - DNA, 580 bp, Homo sapiens
gtgcggcggcagatggggatgagagggaacaggagaacctcactcccaagaaaggagccttgcctgctgactgatgattctggggtgaggaagagagactggcatgaccagctgatgagtgtctggttcccgggacatgacagacaattcctacagtctacctgtgggaacagatgaggcttggaagaagacacatagaaacaggtttaaattctataaattagaattkacagggggtaggagataggggttacacgttgtctctccttccagatgacattttgacttgttaaagaaaacctagcataggaacattgaatacctcctgacattggtgttttcaaatgacttacagcactacaaatataaagttataacaacagcataccaattttaacataccaggaccaaggactttattctatgagaactacaaaagacacaacacaaatgaagacctagaggaaagtttacagagtttttttttttttttttttgagacggagcctcgccctgtcgcccaggctaattttttttttgtatttttagtagacacggggtttcaccatgttagccagga

SEQ ID NO: 5414 - DNA, 777 bp, Homo sapiens
ctgagggtgaacctagtcagggagaactccaaagagcagcctgggccacagcctatcggcagggctcaatggaagggtggccaggggcttctttgacctggaaccagactcagggagacagccagggcatgcagccatcccccaacccccacagggggtactgraggcaaacgaagctcagagccagcccaaccgtgatgccccctccccaggacatgtcatgcttggggatacctctcagccaggctacaattcaacctctcagtttggaattagaacaattcaagggaagatgtagaagcagagggcggtgggctaaatggtggaccccaaaagacgtgtccacatcctaacccccatacctgtgaacatggcctgatttagagataaggacttggcagatataatcatgttaaggaatcaaaatgagatccttctgcatctagggcgggccctaaatccaatgactgggttagaagagaaaggagagggagtggtgacagacagcaggggagaaggccctgggaggatggaggcagaggctggagggaggcagctatgagccagggaacgccaaggcctgggctgacctccaggagcaggggagagccatggattagcttctcccacagaatccccagaaggaaccaaccctgccaacaccttgatcttggacttccagcttccggagctgtgatacagacaataaacttgggctgtggaagccaccagtctgtggtatctgttaccgtagccctaggaagccactgtggagtt

SEQ ID NO: 5415 - DNA, 649 bp, Homo sapiens
tataattagttaagtatagctgatatagatctctgtaagatctctgttttatggatagataggtttgcaactatttctatggatctagtgctattttctgatctcaagtgagatgaaacccactaggcaacttgtatgatgctcaccaattagggagataatttgccatgaattgtaagtaaattatacaatagatatcagctacgtatatgatatggtttggctgtgtccccaccaaaatctcaacttgaattgtatctcccagaattcccacatgttgtgggagggacccagggggaggtaattgaatcatgggggcctgtctttcacatgctgttttcgtgacagtgaataagtctcacraggtctgatgggtttatcaggagtttctgctttctcttcttcctcattttctcttgatgctgccatgaaagaagtgcctttcaccttctgctatgattctgaggcctccccagccatgtggaactataagtccaattaaacctcttttcttcccggtctagggtatgtctttatcagcagcgtgagtatatatgttgttcacctttcattccctgctctccctctccatgacttccattctcatggttgcaggactggcttcagttgctatgttcatagaatatta

SEQ ID NO: 5416 - DNA, 718 bp, Homo sapiens
tccatcccctcacccctgctttgaccacggtagttccactgcccttaagtaagaytggtttggtatcgcagagtgaatcctgagacagtaaaatgtgcattagtggaaaagctggtaaaatccaaacaaagtctgtagtttagttaataatttgtgtcactgttaatttcttattttttgccaaggtaccctggttccatacgatgccaacaggaggaaaaactgagtgaaggatatatgggaattctctacactatttttgcaacttttctgtacatctaaaattactctcaaataaaattttattataaaaatttgggaaaaccacttcctcgggaatggaatacaacgctcctccattgttctcctctatataaataggacgatggttaaagaatgattacgatatttcaaaaacagcaaaggaagaatcaaacacaataaacagagtctggtcactggacaaccagtacaagaacctcatctcctgacagccagcatcacttcttcattggtgcctgggtctacttaggagtacctaatggctaaaaccaaagggacaaatctggataagccctctccaaacagggtcagcatccctcaagaaccagtatgcctagctgctaatcctttatcaccagttaagctaggggtcaagcctccctactcctggtctcagaggaaggaactatatgattctgagtgtagctggcaactg

SEQ ID NO: 5417 - DNA, 718 bp, Homo sapiens
tccatcccctcacccctgctttgaccacggtagttccactgcccttaagtaagactggtttggtatcgcagagtgaatcctgagacagtaaaatgtgcattagtggaaaagctggtaaaatccaaacaaagkctgtagtttagttaataatttgtgtcactgttaatttcttattttttgccaaggtaccctggttccatacgatgccaacaggaggaaaaactgagtgaaggatatatgggaattctctacactatttttgcaacttttctgtacatctaaaattactctcaaataaaattttattataaaaatttgggaaaaccacttcctcgggaatggaatacaacgctcctccattgttctcctctatataaataggacgatggttaaagaatgattacgatatttcaaaaacagcaaaggaagaatcaaacacaataaacagagtctggtcactggacaaccagtacaagaacctcatctcctgacagccagcatcacttcttcattggtgcctgggtctacttaggagtacctaatggctaaaaccaaagggacaaatctggataagccctctccaaacagggtcagcatccctcaagaaccagtatgcctagctgctaatcctttatcaccagttaagctaggggtcaagcctccctactcctggtctcagaggaaggaactatatgattctgagtgtagctggcaactg

SEQ ID NO: 5418 - DNA, 718 bp, Homo sapiens
tccatcccctcacccctgctttgaccacggtagttccactgcccttaagtaagactggtttggtatcgcagagtgaatcctgagacagtaaaatgtgcattagtggaaaagctggtaaaatccaaacaaagtctgtagtttagttaataatttgtgtcactgttaatttcttattttttgccaaggtaccctggttccatacgatgccaacaggaggaaaaactgagtgaaggatatatgggaattctctacactatttttgcaacttttctgtacatctaaaattactctcaaataaaattttwttataaaaatttgggaaaaccacttcctcgggaatggaatacaacgctcctccattgttctcctctatataaataggacgatggttaaagaatgattacgatatttcaaaaacagcaaaggaagaatcaaacacaataaacagagtctggtcactggacaaccagtacaagaacctcatctcctgacagccagcatcacttcttcattggtgcctgggtctacttaggagtacctaatggctaaaaccaaagggacaaatctggataagccctctccaaacagggtcagcatccctcaagaaccagtatgcctagctgctaatcctttatcaccagttaagctaggggtcaagcctccctactcctggtctcagaggaaggaactatatgattctgagtgtagctggcaactg

SEQ ID NO: 5419 - DNA, 779 bp, Homo sapiens
caacaacaatgatgttgacagcaacagaatatcattttaaaggcccaatcaagacttgaaatatcaagtaaaggattttaragtttttgttgcagagaaaaaagtttgagccagagtaagatgatcagatctgggcttttgaaagtgcatttgattaaagggaacaaggcctgaagtggccagtctaccttaagatggtgacaaagagggaagagagatgtatggggcacccaagtctccagggacctgagcctggcctgttggactcacccaagatgcaacggttgcacatcaaagcccccattcctcacatactggctggctttagacattctggctttagcccaggcattgtgaggcctataaacatgcactgagatatgactgattggatgtagagataccatcaaaagaaattccctgtatgttgtggaacggatcttacaggcgaaaagcagagcaaaacaaccaccaacagaaaaccttcccatgctgagaatgggagctctgttgtgaagccacagctttgagaccaggagacccatgttcttgagagactctgctgaagtctggataagacaggcagggatgactgagggcaaacagcagatccaggcctctgcgataaaagcagccaggggtgatttagacttccatcataaaacagagtccacggtattcttccccttcctcctctcatactctccacaaccacaagctctcaagattccagccagctgggagcctcacaactgaactccccagaggctactgtgagg

SEQ ID NO: 5420 - DNA, 1876 bp, Homo sapiens
cttactctgtagcaagttctgtatgcataagcctctctttgttcttattttggtggcctctgtttatttacacaaagagaaataactgctattcccataaatcatggctttcaaaatggtcacagttcactgggcatgcttgctcatgcctgtaattctaccactttgagagaccgaggcgggcagatcacgaggtcaggagatcgaggccatcctggccaacccagtgaaaccccatctctaccaaaaatacaaaaaaaaaaaaaagccgtgattggtggcatgcgcctataatcccagctactcaggaggctgaggcaggagaatcacctgaatccaggaggcagaggttgcagtgagccgagatcatgccactgcactccagcctggatgacagagtaagaccgtctcaaaaaacccaaactggtcaggctcggtggctcacgcctgtaatcccagcacttttggaggctgaggcaggtggatcacaaggtcaagaattcaacaccagcctggccaagatggcttatccccaactctactaaaaaatacaaaaattatccaggcacggtggcaggcacctgtgatcctagctacttgggaggctgaggcaggagaatcgcttcaacccaggaggcagaggttgcagtgagctgagatctcaccactgcactccagcctgggcaatagagtgagaatctgtctcaaaaaaaaaaaaatggggaaactccatctctactaaaaatacaaaattagccaggcatggtggcacatgcctgtaatcccagctacttgggaggctgaggcaagagaattgcttgaacctgggaggcagaggttttggggaggtggaggttgaggtgagccaagatcgtggcattgcactgcagcctgggcaacaagagtaaaactctctctaacaaacaaacaaacaaacaaacaaacaaaacaaaacaaagaaaaatacacacaacttatttcctggtttgtgataatctgtgaaatatattttgaaatgaattggaattcaatacagtactattcacaccccaaatactcctaatatttcctttcccagatgatgacctggtactcttcctagggcttgacttctccctacaggtccccagtacaagtatttgtgattctgagtcaattcattgtctacatgtgtgacaatgcaatgctcttgttgtagagtaccaagatgaggcaggtccaaactgcacatttgtagagaacatagtatatgtgcaattgaacatgtatgtggttgtgatactgaaaacaatacgaacttatgccaggtgcaatggctgatgcctgtaatcttagcaatttgggaggccgaggcatggagatcacctgaggtcaggagtttgagagcagcctggccaacctgctgaaaccccgtctctattaaaaatacaaaaattagcggggggggggtggcagggcccctgtaattccacctactcggtaggctgaggcgggagaatcgcttgaacccagagatggaggttgcartgagccaagatcacaccactgcattccagcctgggtgacaagagtaaaactgcgtcaagaaaaaaaaaaaaaaattggccttgggcgtttctttaggttggctcctgtgttctatttatagcatgcctttatcagggggttggggtgtgggactaattaccaactttctggcacataaagtgttttgattcatctggtattttccctgacccagacgtggaataaaccatttatttaaagatccttggcttctttcattgaaaagtattatttacaaagcaccaaaatcttgggctgggtgaggtggctcaggtctgtaatctcaacactttgggaggctgaggcagga

SEQ ID NO: 5421 - DNA, 1876 bp, Homo sapiens
cttactctgtagcaagttctgtatgcataagcctctctttgttcttattttggtggcctctgtttatttacacaaagagaaataactgctattcccataaatcatggctttcaaaatggtcacagttcactgggcatgcttgctcatgcctgtaattctaccactttgagagaccgaggcgggcagatcacgaggtcaggagatcgaggccatcctggccaacccagtgaaaccccatctctaccaaaaatacaaaaaaaaaaaaaagccgtgattggtggcatgcgcctataatcccagctactcaggaggctgaggcaggagaatcacctgaatccaggaggcagaggttgcagtgagccgagatcatgccactgcactccagcctggatgacagagtaagaccgtctcaaaaaacccaaactggtcaggctcggtggctcacgcctgtaatcccagcacttttggaggctgaggcaggtggatcacaaggtcaagaattcaacaccagcctggccaagatggcttatccccaactctactaaaaaatacaaaaattatccaggcacggtggcaggcacctgtgatcctagctacttgggaggctgaggcaggagaatcgcttcaacccaggaggcagaggttgcagtgagctgagatctcaccactgcactccagcctgggcaatagagtgagaatctgtctcaaaaaaaaaaaaatggggaaactccatctctactaaaaatacaaaattagccaggcatggtggcacatgcctgtaatcccagctacttgggaggctgaggcaagagaattgcttgaacctgggaggcagaggttttggggaggtggaggttgaggtgagccaagatcgtggcattgcactgcagcctgggcaacaagagtaaaactctctctaacaaacaaacaaacaaacaaacaaacaaaacaaaacaaagaaaaatacacacaacttatttcctggtttgtgataatctgtgaaatatattttgaaatgaattggaattcaatacagtactattcacaccccaaatactcctaatatttcctttcccagatgatgacctggtactcttcctagggcttgacttctccctacaggtccccagtacaagtatttgtgattctgagtcaattcattgtctacatgtgtgacaatgcaatgctcttgttgtagagtaccaagatgaggcaggtccaaactgcacatttgtagagaacatagtatatgtgcaattgaacatgtatgtggttgtgatactgaaaacaatacgaacttatgccaggtgcaatggctgatgcctgtaatcttagcaatttgggaggccgaggcatggagatcacctgaggtcaggagtttgagagcagcctggccaacctgctgaaaccccgtctctattaaaaatacaaaaattagcggggggggggtggcagggcccctgtaattccacctactcggtaggctgaggcgggagaatcgcttgaacccagagatggaggttgcaatgagccaagatcacaccactgcattccagcctgggtgacaagagtraaactgcgtcaagaaaaaaaaaaaaaaattggccttgggcgtttctttaggttggctcctgtgttctatttatagcatgcctttatcagggggttggggtgtgggactaattaccaactttctggcacataaagtgttttgattcatctggtattttccctgacccagacgtggaataaaccatttatttaaagatccttggcttctttcattgaaaagtattatttacaaagcaccaaaatcttgggctgggtgaggtggctcaggtctgtaatctcaacactttgggaggctgaggcagga

SEQ ID NO: 5422 - DNA, 1876 bp, Homo sapiens
cttactctgtagcaagttctgtatgcataagcctctctttgttcttattttggtggcctctgtttatttacacaaagagaaataactgctattcccataaatcatggctttcaaaatggtcacagttcactgggcatgcttgctcatgcctgtaattctaccactttgagagaccgaggcgggcagatcacgaggtcaggagatcgaggccatcctggccaacccagtgaaaccccatctctaccaaaaatacaaaaaaaaaaaaaagccgtgattggtggcatgcgcctataatcccagctactcaggaggctgaggcaggagaatcacctgaatccaggaggcagaggttgcagtgagccgagatcatgccactgcactccagcctggatgacagagtaagaccgtctcaaaaaacccaaactggtcaggctcggtggctcacgcctgtaatcccagcacttttggaggctgaggcaggtggatcacaaggtcaagaattcaacaccagcctggccaagatggcttatccccaactctactaaaaaatacaaaaattatccaggcacggtggcaggcacctgtgatcctagctacttgggaggctgaggcaggagaatcgcttcaacccaggaggcagaggttgcagtgagctgagatctcaccactgcactccagcctgggcaatagagtgagaatctgtctcaaaaaaaaaaaaatggggaaactccatctctactaaaaatacaaaattagccaggcatggtggcacatgcctgtaatcccagctacttgggaggctgaggcaagagaattgcttgaacctgggaggcagaggttttggggaggtggaggttgaggtgagccaagatcgtggcattgcactgcagcctgggcaacaagagtaaaactctctctaacaaacaaacaaacaaacaaacaaacaaaacaaaacaaagaaaaatacacacaacttatttcctggtttgtgataatctgtgaaatatattttgaaatgaattggaattcaatacagtactattcacaccccaaatactcctaatatttcctttcccagatgatgacctggtactcttcctagggcttgacttctccctacaggtccccagtacaagtatttgtgattctgagtcaattcattgtctacatgtgtgacaatgcaatgctcttgttgtagagtaccaagatgaggcaggtccaaactgcacatttgtagagaacatagtatatgtgcaattgaacatgtatgtggttgtgatactgaaaacaatacgaacttatgccaggtgcaatggctgatgcctgtaatcttagcaatttgggaggccgaggcatggagatcacctgaggtcaggagtttgagagcagcctggccaacctgctgaaaccccgtctctattaaaaatacaaaaattagcggggggggggtggcagggcccctgtaattccacctactcggtaggctgaggcgggagaatcgcttgaacccagagatggaggttgcaatgagccaagatcacaccactgcattccagcctgggtgacaagagtaaaactgcrtcaagaaaaaaaaaaaaaaattggccttgggcgtttctttaggttggctcctgtgttctatttatagcatgcctttatcagggggttggggtgtgggactaattaccaactttctggcacataaagtgttttgattcatctggtattttccctgacccagacgtggaataaaccatttatttaaagatccttggcttctttcattgaaaagtattatttacaaagcaccaaaatcttgggctgggtgaggtggctcaggtctgtaatctcaacactttgggaggctgaggcagga

SEQ ID NO: 5423 - DNA, 1876 bp, Homo sapiens
cttactctgtagcaagttctgtatgcataagcctctctttgttcttattttggtggcctctgtttatttacacaaagagaaataactgctattcccataaatcatggctttcaaaatggtcacagttcactgggcatgcttgctcatgcctgtaattctaccactttgagagaccgaggcgggcagatcacgaggtcaggagatcgaggccatcctggccaacccagtgaaaccccatctctaccaaaaatacaaaaaaaaaaaaaagccgtgattggtggcatgcgcctataatcccagctactcaggaggctgaggcaggagaatcacctgaatccaggaggcagaggttgcagtgagccgagatcatgccactgcactccagcctggatgacagagtaagaccgtctcaaaaaacccaaactggtcaggctcggtggctcacgcctgtaatcccagcacttttggaggctgaggcaggtggatcacaaggtcaagaattcaacaccagcctggccaagatggcttatccccaactctactaaaaaatacaaaaattatccaggcacggtggcaggcacctgtgatcctagctacttgggaggctgaggcaggagaatcgcttcaacccaggaggcagaggttgcagtgagctgagatctcaccactgcactccagcctgggcaatagagtgagaatctgtctcaaaaaaaaaaaaatggggaaactccatctctactaaaaatacaaaattagccaggcatggtggcacatgcctgtaatcccagctacttgggaggctgaggcaagagaattgcttgaacctgggaggcagaggttttggggaggtggaggttgaggtgagccaagatcgtggcattgcactgcagcctgggcaacaagagtaaaactctctctaacaaacaaacaaacaaacaaacaaacaaaacaaaacaaagaaaaatacacacaacttatttcctggtttgtgataatctgtgaaatatattttgaaatgaattggaattcaatacagtactattcacaccccaaatactcctaatatttcctttcccagatgatgacctggtactcttcctagggcttgacttctccctacaggtccccagtacaagtatttgtgattctgagtcaattcattgtctacatgtgtgacaatgcaatgctcttgttgtagagtaccaagatgaggcaggtccaaactgcacatttgtagagaacatagtatatgtgcaattgaacatgtatgtggttgtgatactgaaaacaatacgaacttatgccaggtgcaatggctgatgcctgtaatcttagcaatttgggaggccgaggcatggagatcacctgaggtcaggagtttgagagcagcctggccaacctgctgaaaccccgtctctattaaaaatacaaaaattagcggggggggggtggcagggcccctgtaattccacctactcggtaggctgaggcgggagaatcgcttgaacccagagatggaggttgcaatgagccaagatcacaccactgcattccagcctgggtgacaagagtaaaactgcgtcaagaaaaaaaaaaaaaaattggccttgggcgtttctttaggttggctcctgtgttctatttatagcatgcctttatcagggggttggggtgtgggactaattrccaactttctggcacataaagtgttttgattcatctggtattttccctgacccagacgtggaataaaccatttatttaaagatccttggcttctttcattgaaaagtattatttacaaagcaccaaaatcttgggctgggtgaggtggctcaggtctgtaatctcaacactttgggaggctgaggcagga

SEQ ID NO: 5424 - DNA, 836 bp, Homo sapiens
agttaaaggcgcccagccacgttgctgctaaccccgaccacgctttgcactgccgttcattcaaaaacggttatctcctcgatttgggttttcaaaaatgctttggtacagtaaacaacgacaaaaataagcccgatttcctttttcagcgctgcatttgacatgttggtgcattttttcatctgtgacaatgcaacgttcaaaatcatatttatgctgttgtttcatattcacaggtgccaagatgcagagacagggatattaaatctttatagggatatgcttctaacaggctgatatcgcaaaaacaagccagtggattctagctggttaggattcaggaagttctaacacaatctgtgctattccaaggcttgaattatttgaggggggyagcaactatcttgaagaaccaggcagagcaggatggcgttaagccacaggcattataaaatctagaattagagctctcctcattcagatctcaagaccgccctctataacctgtggccactgtactacctcttgggatacccagggtaaataaataaataatcactaagtagcctatggaatttatatttacataatcaaaatgtattactgtcaaccaattcactaatgttctgtggtttttatttttaattgggaaaggcacttctagttcaatgtcttctttcctgtaagagaactgctaagaacagaaagattacagctttagaagttatagaaggcacttttagttcaatgtcttctttcctgtaagagaactgctaagaacagaaagattacagctttagaagttatagaaagctagctgtataaagcagggatcc

SEQ ID NO: 5425 - DNA, 737 bp, Homo sapiens
tgttgagcacagtgtgaaagccagttttgagcagaggttctgaaagttctatgaaaactagttccccagatgtcctgaggaataaaggtttccaggtaagtttgagacccttcgctcaccatgtctgctcttagaggtccgtgcatatcatcatggtccacgtatgccagtcccacagccatgtgctcaccttgttatccaggcattttccaggcccgtctgaccacagacagctttctatggagcacccgttagcatcttacagatagagtgttccaaaagacagttttgagatgctttttaggccccatagatacctaatttaaaaaaaaawtttttttaattaaacttccacaatattttctacatggtggtttcagatttcttcagaacattttgttctttaaaaaaaattcctagaaagctaaaaatgtctgtaattatcctcacaacaagagcaggatctccagcgtgtgcctctgagtgctggaggttaataaggattgcgccttcataaggcagcagaatagcatttgtggttacactagttaaggatgctacaaattacaaggccctctcagccccagcatgcagtgggaaaggaaagacagtgaactcagaaactgacatgcagaagtggtccaaccactgtacacacttcagggtggtagtttttaactttttccatatacatgatgaaagcttctttgaaattgagccttcataagtgggcataa

SEQ ID NO: 5426 - DNA, 729 bp, Homo sapiens
cctactatgtgacaagcactggactcagtgcaagtgacatggtgataaataagaggcatctcgaggggctcacagattagtgggggacatatgcatgcatacgagttagtgtgctagctggacaagcacagctaccttgtggttttgggttcctgggacatgaaggagggtgtggtcaggtctgcctgaagagtgacgcggtgtttcagcctctgagttgagttctaacctcacggattgaggagggtctaggaaaggcactctaggctgatagcacagcgggttaggcatgtmtcccagctgtaaggatggaaacccaactccaactcacgtttttaagcaaggaaaatgtcacggtggtgttactgaaagtccaggggctccttttcccatcagtgcagctagatctaggcattcagacgtcttaatgaatccctcctgaccctgtttccctttgttttggccttattctcaggcaggcattcctcatatgatgacaaagggacccctgcaagcttatctactaccagccttgtaaccaaacggaaaaaaacagtgccactttttctatagctccagaaaaatcttgtgattgcctctgattggcctgaccaaagtcacatatttgcctgaatcagtcaccctagccagggtgctgagcatggagtttgatgggtgatgtggagggagggggcaggacagagaagaagaatcaacaagcctgcattt

SEQ ID NO: 5427 - DNA, 670 bp, Homo sapiens
tgggcttaatacctaggtgatgggttgatttgtgcagcaaaacaccatggcacacgtttatctrtgtaagaaatctgcatatcctatacatgtacctcagaacttaaaggttaaagaaaaaaatccaaaaataacatatacagaaactaaaacaaacaaaaaaaatgaattgcctctctattcactacagtctcaaactgcctctatgcagtaaactggggccatcattttcatatattttgtttcattttctagtttttaatggtgggaaggcaattgctgtagcagttaattcttagtgaggcataaaccctgtaacttatttgtaaacatgaatttttacaatctaaataatgctctttcaaagtaataatagtgttccaacactgttaatatttcagaattaaacaaataaaaatagctaacattgatccactgctcacaactgcacaacaaaaattacaggcattttataaacaagttctaaaactagaagaatcttcttcaaaagttgatttatcatttcagaatatcttctatgataaaaattcagtcctgaaggttttgattaagctacttatatttgagaagttaataaaacatatggtcaatacaactattaagtttttggaagaaagaggtgattattttaaacaattagactccctaa

SEQ ID NO: 5428 - DNA, 468 bp, Homo sapiens
aagttaaccttaaataacttatagggagaaaaaagatcaacattctttaaagagagtacagagtacagatcacattcagcaacataaaattcatagtgtctgacttatgattagaaattgctggatatgccaacaagcaaaaaaattwttattacaaaataataaatagactctcagtgaattttgcaaccctatagcgcattctaataatgtatgtgtaataggtgtccacaaaaggagaatgtcaggaagagaaagcaaatacacattatatgtagtggaacaaagataaaaaggactataaagttttcataagaaactttgcaaatgagaagacaatggaacaaaaagtttaaagtagacaaacaaacaataacaacccacaaacctagagctctctatcctgaagatgtgtctttcaaaaattaagaaagaataacaaaagagaggataaaagataattacaaa

SEQ ID NO: 5429 - DNA, 468 bp, Homo sapiens
aagttaaccttaaataacttatagggagaaaaaagatcaacattctttaaagagagtacagagtacagatcacattcagcaacataaaattcatagtgtctgacttatgattagaaattgctggatatgccaacaagcaaaaaaattawtattacaaaataataaatagactctcagtgaattttgcaaccctatagcgcattctaataatgtatgtgtaataggtgtccacaaaaggagaatgtcaggaagagaaagcaaatacacattatatgtagtggaacaaagataaaaaggactataaagttttcataagaaactttgcaaatgagaagacaatggaacaaaaagtttaaagtagacaaacaaacaataacaacccacaaacctagagctctctatcctgaagatgtgtctttcaaaaattaagaaagaataacaaaagagaggataaaagataattacaaa

SEQ ID NO: 5430 - DNA, 468 bp, Homo sapiens
aagttaaccttaaataacttatagggagaaaaaagatcaacattctttaaagagagtacagagtacagatcacattcagcaacataaaattcatagtgtctgacttatgattagaaattgctggatatgccaacaagcaaaaaaattatwattacaaaataataaatagactctcagtgaattttgcaaccctatagcgcattctaataatgtatgtgtaataggtgtccacaaaaggagaatgtcaggaagagaaagcaaatacacattatatgtagtggaacaaagataaaaaggactataaagttttcataagaaactttgcaaatgagaagacaatggaacaaaaagtttaaagtagacaaacaaacaataacaacccacaaacctagagctctctatcctgaagatgtgtctttcaaaaattaagaaagaataacaaaagagaggataaaagataattacaaa

SEQ ID NO: 5431 - DNA, 468 bp, Homo sapiens
aagttaaccttaaataacttatagggagaaaaaagatcaacattctttaaagagagtacagagtacagatcacattcagcaacataaaattcatagtgtctgacttatgattagaaattgctggatatgccaacaagcaaaaaaattattmttacaaaataataaatagactctcagtgaattttgcaaccctatagcgcattctaataatgtatgtgtaataggtgtccacaaaaggagaatgtcaggaagagaaagcaaatacacattatatgtagtggaacaaagataaaaaggactataaagttttcataagaaactttgcaaatgagaagacaatggaacaaaaagtttaaagtagacaaacaaacaataacaacccacaaacctagagctctctatcctgaagatgtgtctttcaaaaattaagaaagaataacaaaagagaggataaaagataattacaaa

SEQ ID NO: 5432 - DNA, 847 bp, Homo sapiens
tggatccttccatcccttcctgtgttcagcacacacatgccctacaaactaacctgttatctatacttaacataactgaaaatatttctattatcaaagatgagtaagtcttacaactcgtcttcagtaatagaaatgaatgttctctaaaagcaaatgctcattacaacttgatagcctatttacctggtaggtaatttttacattagaaataaataaaatatctctgattgacaagtttaagatttcctttttcttttctcctgggaatgagaggccaagagatgggtgagaacgttcacagacaatgaaagccacccgattttctacttctgagccgtaaagagtcaacagcattttgcagagctgaatggtgtttttactcactctgtggcatttctctcttccaaatcttgyccccttcccccacatggtggcaacagtcactcccagctctagacatatcacctattctagctttgcctctgaatatgcaaggaaacactctcccctgcatttggagggtggactgaggctctctgatctcatatgcacaggcaactgcctccccacattgctcacttattgggctgcctccttccagaatgaagaaatgaaagcattctgtcaagagaaaaggtgagaagccccggggcagttttctgctactgtattgggggtgatgagccaggatctgctgagagaatgcttattctgaaaggggctcaagctggctttctacaaggaggcaagagtgttaggtctggggagaagtggcacaaaaagcagagaaaagtagactttagccttcaatgtcaagcattgcctacacaattgcgccaaaggc

SEQ ID NO: 5433 - DNA, 793 bp, Homo sapiens
ctatccaaacactggggacaatgcaaacacacatgagctggtgaatgggaaaatgttgtcgtgtctgtacagtggaacagcactcaacagtaaaaggaacatacttccgatacacacaacacaacagacggctgctcagtgaggtcaaacacacgaacgcacactgggctctcacccatatgaccttctggaaaagccagccctcagggagggaatggagatcagcagtgccaagggctggggtggagggggtgctgagagggaggggctcaggcgakactttgggtgatggaaaggctctacatcgtgatcgtggtagtggctgcacaactgtgtgtgttgatcagaactcacagctgtctaccctaaaggtgaattttactctttgtaaatcatacctcaataaacctgagttcagaaagagcccatttcaccctaggacaccgtcagtctacagaagggtgaggttccacgcccaggacacggtgtcaccaagagccacccgggaagggctctgcgagccagcccagaacctaaccccaggctctggtttgagcattctcagctgctccatggatctcccaaagcctttgtatttgttcatcagttatctgtcaacatgctttatagactcctggtcagcaaaactgcaaacagtaagaccttttcccacttcccaactcaaacgctgtagtgggtcagagcacgcatatgggtcaataacagacacacgtggacatcagctggcctttctgaagaggacagagattgatggatgtgcagacttcccata

SEQ ID NO: 5434 - DNA, 793 bp, Homo sapiens
ctatccaaacactggggacaatgcaaacacacatgagctggtgaatgggaaaatgttgtcgtgtctgtacagtggaacagcactcaacagtaaaaggaacatacttccgatacacacaacacaacagacggctgctcagtgaggtcaaacacacgaacgcacactgggctctcacccatatgaccttctggaaaagccagccctcagggagggaatggagatcagcagtgccaagggctggggtggagggggtgctgagagggaggggctcaggcgagactttgggtgatggaaaggctctacatcgtgatcgtggtagtggctgcacaactgtgtgtgttgatcagaactcacagctgtctaccctaaaggtgaattttactctttgtaaatcatacctcaataaacctgagttcagaaagagcccatttcaccctaggacaccgtcagtctacagaagggtgaggttccasgcccaggacacggtgtcaccaagagccacccgggaagggctctgcgagccagcccagaacctaaccccaggctctggtttgagcattctcagctgctccatggatctcccaaagcctttgtatttgttcatcagttatctgtcaacatgctttatagactcctggtcagcaaaactgcaaacagtaagaccttttcccacttcccaactcaaacgctgtagtgggtcagagcacgcatatgggtcaataacagacacacgtggacatcagctggcctttctgaagaggacagagattgatggatgtgcagacttcccata

SEQ ID NO: 5435 - DNA, 628 bp, Homo sapiens
ttttccaaagtgaaattagagaaggaagaaaattcaatcattattttcaaaaacagctgtagccctgtcaatgtggccttttagcaccagttgttgaagcaaaatgctaagcagtctgtaagaaccatcccatcaggtaccttatctgaggctatggtcacagatgcctatgaactctgcaaagctatgtcacacaaagacatctagcatgacaagctttacagaattgaatggatgcattaccatagcaagaaaatttgcatcttgccttcctaaccaaagcccacagtggaaatatgtcctcgtacctggcaagcccaargaaacattcccacctttaccacttctgcagggagtactgcttgggttctccaatgtggttagaacaggtcacaaattcttctagagtggaagcttccttgtctactcatgacttctcaacccattgacttacataaatctgagcaagtttcccagtctctaaatattatcactatccacactctgaaacaaacacactattgctgggttacacccaccaattagagagcttattatggagaaagctatggttttctcctcttccttctttttcttcagaaaaattaaaacttggcgacaaaaccct

SEQ ID NO: 5436 - DNA, 628 bp, Homo sapiens
ttttccaaagtgaaattagagaaggaagaaaattcaatcattattttcaaaaacagctgtagccctgtcaatgtggccttttagcaccagttgttgaagcaaaatgctaagcagtctgtaagaaccatcccatcaggtaccttatctgaggctatggtcacagatgcctatgaactctgcaaagctatgtcacacaaagacatctagcatgacaagctttacagaattgaatggatgcattaccatagcaagaaaatttgcatcttgccttcctaaccaaagcccacagtggaaatatgtcctcgtacctggcaagcccaaggaaacattcccacctttaccacttctgcagggagtactgcttgggttctccaatgtggttagaacaggtcacaaattcttctagagtggaagcttccttgtctactcatgacttctcaacccattgacttacataaatctgagcaagtttcccagtctctaaatattatcactatccacactctgaaacaaacacactattgctgggttacacccaccaattagagagcttattatggagaaagctayggttttctcctcttccttctttttcttcagaaaaattaaaacttggcgacaaaaccct

SEQ ID NO: 5437 - DNA, 842 bp, Homo sapiens
acaaccgtctactcaaaacaccgaaaagcttcyattttactttgctgtatgaattgtacctactgtgtgatgagcttctagagggcaaggggttctgtcttaagacttcacgtttgcaataacgtaacacttcagggctacaggacactatgttacttgagataagccaggaaaagaaagttaaacatcttaaacatcgcatgttctcattcatatgtggaagctacaaaagtttatcttatagaagtaaaaagtggaacagaggatactaggggctggaaaggatagtgggacaggagggataggaagaaatttgttataggatacaaaataacatctagataggagaaataatttctagtgttctgtatcactgtagaattactatgattaacaataatataatttcaaatagtaagaaggaggatattggacgttcccaacaccaataaatgataaatgtttgaaatgatggatatgctaattaccctgatctcatcactgtacaatatatatctatctatggaaacatcattaactatctgaatatatgcaattattatatgtcaaaaatataacaaaggcttcagtgaaaaacaccaaattttctgccaataattacacattatttttgcaaaaacaggggctaaaagaaaaaccaaagcaatactagtattctgttttattttcaggatgataaatagcttttttagttaatcagtaagataaaattaagttctcccatggttaaaatgaaatacctcaatagtaaggattatactatataaaattataacaaccatgaaaactgaaaggcaaacttgagattcagtgttaccctc

SEQ ID NO: 5438 - DNA, 866 bp, Homo sapiens
cctccctcctttgtgctaatgttgtgtatattacagtattacagtttttgccttagttgtgtctgtattaaattaagaaaaaaagaaatagagaacatttcatatttccctacctttaccatgtccagtggattttactcctttctatagatgactttctgcctagcaataattctttctgccaagcaataattccttcagcctgaagatattcctttaacatttctatagtstgtctgctggcaaagccttctctcagttttccgttatctgaaaatgtctttattttgcttttgtttttgaaggatattgtcactggatagaactctgggttgacaatcgtttttctttagaactctaaagatgccagtccatcatcctctggcctccagtggttataagaagccagacatatttgaatctttattctttgagtgtaacgtctttttccttccaggtgctatctttgtctttggtattcggtagtttgactacaatgtgcccagataacattttctcttacttttactgcttacagtgtgctgagcttcttggatttacacatttatatcattcagctattatttctttaaatactttttatgccccattttctgtgtcctctctctgtggggctccaatcacaagtatgttagaccacctggtgctatatgcctcattctctgtgtcctctctctgtggggctccaatcacacatatgttagcccaccgggtgctacgtgccccattctctgcgtcctctctctgtggggctccaatcacatgtatgttagaccacctggtgctatttgccccattctctgtgtcctctctctgtggggctccaatcacatgtatgttagacc

SEQ ID NO: 5439 - DNA, 866 bp, Homo sapiens
cctccctcctttgtgctaatgttgtgtatattacagtattacagtttttgccttagttgtgtctgtattaaattaagaaaaaaagaaatagagaacatttcatatttccctacctttaccatgtccagtggattttactcctttctatagatgactttctgcctagcaataattctttctgccaagcaataattccttcagcctgaagatattcctttaacatttctatagtgtgtctgctggcaaagccttctctcagttttccgttatctgaaaatgtctttattttgcttttgtttttgaaggatattgtcactggatagaactctgggttgacaatcgtttttctttagaactctaaagatgccagtccatcatcctctggcctccagtggttataagaagccagacatatttgaatctttattctttgagtgtaacrtctttttccttccaggtgctatctttgtctttggtattcggtagtttgactacaatgtgcccagataacattttctcttacttttactgcttacagtgtgctgagcttcttggatttacacatttatatcattcagctattatttctttaaatactttttatgccccattttctgtgtcctctctctgtggggctccaatcacaagtatgttagaccacctggtgctatatgcctcattctctgtgtcctctctctgtggggctccaatcacacatatgttagcccaccgggtgctacgtgccccattctctgcgtcctctctctgtggggctccaatcacatgtatgttagaccacctggtgctatttgccccattctctgtgtcctctctctgtggggctccaatcacatgtatgttagacc

SEQ ID NO: 5440 - DNA, 658 bp, Homo sapiens
ctcaggctctaattattcaacatttccaaattcaaaaatgtatcaatttcaagaggtagatgcatattttataattttttatagtttttctttctttttgagacagagtctcactctgttgcccaggctggagtgcaatggagccatctcagctcactgcaacctctgcctcccaggttcaagcaatactagtgcttcagcctcctgagtatctgggaccacaggtgacacaggtgagcccccatacctggctaattattgtatttttagtaaagagggggcttcactgtgttggccaggctggtctggaactcctaacctcaagtgatccacctgcctcagcctcccaaaatgytgggattataggcatgaggcaccacacccagccaagtggatgcatatttcaaacaaagcacccaaaaatgcccaggcatgaccatttctccttttcttgaaactacaaggtcaatccccttgggaacttcctaatacttctctaaaaaccaacctaaaaaacccaaaactaatacatcctccaattcttcaacatgtaaagtccttgtaaacaaagctacaatgacccagaatatgaaaaaaattattttttttttttactttttaaaatattatataattctattctttggctaccttttaa

SEQ ID NO: 5441 - DNA, 678 bp, Homo sapiens
agtcctgtgactatcagtagcagaaggagctattggttgtcttgagaagaggccacattagcctcagcccaaattatctcagtttcgtggttgaagaaattgaagcacagagaggctaagtcatttgcccagcatcacacagttggaagcaatggaatcaggacttaaatccaggcaacctggcccagacttgtgcccacttttctattctgcctctgtgaagcacctgccagggaaagaccaccagtcatcagcctgcccmacagctgcccggttcaccctggagagaggagcagggtgctcactgcctgcctccagctggccacactgagctctcctcacctcttcaagtaggtcccgcccttccccacaccagcatcatcgcaagcactgcaccctccatgctccaccctctgcctacccgacccttacccagatcaccaccacagcctccttcctcctgagaaaacttcccgacctctcacactagtgtactttgctcattaaacactcccaaggcactagagtgaatatttaattagtcaagatgttaatgatccaaaagtcaacattttggatgtgtttattaattcaaaacttgcatatggttcttgcaaaggatgtggtgttcatccctatgagaaagaattctgaacatttctttacgctgcctcatgt

SEQ ID NO: 5442 - DNA, 788 bp, Homo sapiens
actgctccccttcgagtgagctgcaaaggctgctccaaattgggcccaaagcacagaaaatggtgctctggcttcacagttgtgattttgcaaacggcgtgtgtgatcactgcacaacccaacagagatgcccaacttggtgcccagctgcagctcacccagggccccttcccacaggacctcacccctccctttcttgcttggttcagttacttcatggtgacagctcacagtgtctcctctctcctggtaaccctctagagctgggtttgctcgtctgagttttccaggcccctggtggtggatggggacagtgaagcagaatgcttaggagcagacacaggtcctgcagacttccctgtggatgggattatggggactccttctgtggggtggtagtttggttttgkggtttctctttctgcacattgggttgactatttttaaacatggtatacgttgggcctcaagttccttgagtgtagaaatggggtcataaggcccacctcacctggcttactgtggggatttcgcgagctaggattcttcacctgctgatgcccagtggcccttgccacacaatcactaaagggtagtgaggctgctgctgtgttttaatgtagctgtaggtgtcatctcagcttcagaatcgactcaaacagttcctggtatttagcgatgtgtcacctcccacagggctctgggttttttgttggtgttgttttgtgatataattcacgtagcataacattcatcattttaaactgtaccattcagcggtgcgtagt

SEQ ID NO: 5443 - DNA, 1066 bp, Homo sapiens
agtacttctgaaaggattggaaaacactgatccctatgaactcttgaaactaactagtaaaagatacctttaaagacaraaattccacactgaggagaaacaattggtaatcacattcaaactgagcaaagtaaagatagcaacagcaaaggaaaaagaaagcccagataaaataaaggaaagcaacagagaagcagattccagaaactataaactatctctcaatccacacagagtttttttttttaatgatttggaaaaaacagaagagcaagttctagagatatacagtgagaacaacttgcctgacccagcttctactaaaagttcaaactaacgtatgtaaaactaaacaaaagaaatgcatgatagtcaaattctatatagaatgattatttttttaagcaaaaaaatttttaaaagactaatataatgtccttacagaaagatgtgcctaatgtatgagaacaagcttcttaaaaaaaaacattacagaaaataagagtaacgttaattctggctcatgctggtaatcccagcactttggaaggccaaggcaggcacatagcttgagctcaggatttcaagaccagcctgggcaacatgacgaaactccgtctctactaaaaatacaaaaaaaaaaaaaaaaaaaaggcaggcatggtggtgcgtgcctatggtcccagctactcgggaggctgaggtgggaggatagtttgagcacaggaagcagaggctgcagtgagctgagatcacgccactgtgctccagcctgggtaaaagagcaagaccctgactcagtaaaagttaaataaataaaagaataacataagtcaaaattagaaaatctcagaaattagatgagataaactgggaatgaattcgagatgaaagaaaaaattatttcagaaatgaaaatctaaacttaaaaaattaaaatagtaaaggctaatagaaaataaaacaagaagttaaaagatcaaaaacattagaaataaagaagttcatagggagctataaccctatttttcaaagtatcaaatggaaattctaaaactgaaaaacc

SEQ ID NO: 5444 - DNA, 653 bp, Homo sapiens
aggctgacacttcatggatctcagatttggtcatgttcttagggaaaaatcgtcagagagaaatgattgaaaatgagccctcaaaattaaagtggaaagggatctggcacctttagtagaccattaaagccctgctcaggaacagcaaagtccctgcagaaacccagcctcaggccaggtgggcttctgacgggctctctgctcacatactaatattcaaacaaaagtagaagctattccccgagggccgcagcatggggaatggcattggggtagatgctctggccctacctgctggaggccagagacacactcaactcccagtggggcacggggtggggaggatacgagcaccaagtccaggaccccaggccagcaagttggaggcagcaggaagtacccwgggagaggcatgtgactggcacgtgaatggccctccaggctcaggctctgggtagcatggacaaccctgggaagaactgggcaccacctcccacaaacagtcccgtacccagcactaagagctctcagagcttaaactcctctttcagactgcaattctaaggtttgggttctaatgctgacatttcgggcccaaagatggggagagggtggtctgttttaactcacccattagagtcctctttctacct

SEQ ID NO: 5445 - DNA, 845 bp, Homo sapiens
tcaagcagaaccttgtatttattcttggttgagtcagcccatcatgtgatcatttgaatcctatgcttgtcattccaaacagcctcagctttgcccagcttagtgtcaacttcaaatgacatttgtcagcctgccatgtgcaccatcatctgccttcccaggaggtggtatagtgagtgacacagctgaggatgggcccagtggtaggccactagacacctcctttcctattgactcctatccactaaacagcaagtggaattgttcaacctatcacgaacctactttatttaactaggatttagacacattcctctgttttgtccacctggtaaccatgaaaagtaacatcaggccgggtgtgatggctcatgcctgtaatgccagcactttgggaggctgatgtgggcagatcacctgaggtcaggagttcgagaccagcctggccaacatggtgaaaccctgtctctactaaaaatacaaaaattagmcaggcgtggtggcgggtgcctgtaatcccagctacttgggaggctgaggcagaagaatcatttgagcccgggaggcggagtttgcagtgagctgagaccatgccactgtactccagcctgggcaacaagagtgagactccaaaaaaaagaaagaaagaaagaaagaaagaaagaaagaaagaaagaaaggaaggaaggaaggaaggaaggaaggaaggaaaggcaggaaggaaggaaggaaagaaagaaagaaagagaaagaaagaaagaaagaaaagaaaggaaggaaagaaagaaagagaagaaagaaggaaagaaagaaagaaagaaagaaagaaagaaagaaagaaagaa

SEQ ID NO: 5446 - DNA, 710 bp, Homo sapiens
aaagaagaaaggattctcccctagagccttcagagggaccacagtcctgccgacacttgattttagacttctaggttctaaaactgggagagaataaatttctgttgttttaagccaccaagatcgtactaattgttatgacagttctaggacacaaatgtagactctgaaataagcaactatgtttacccattcaagccaggtgcggtggctcacgcctgtaattccagcactttgggaggctgaggtgggtgaatcacctgaggtcaggagtttgagaccagcctgactaacatgatgaaaccctgtctctactaaaaatacaaaaattagtcatgcatggtggcctgagcctgtaatcccagctactcaggaggctgagacaggagaatcactkgaacccaggaagaggaggttacagcgagccgagatcgcgccactgcactccagcctaggagacagagccaagactccgtctcaaaaaaaaaaaaaaagtacttccttaacacccactacatgccaagctctgagctatgcaggacatgaggaacatgttggatgagataaggaaaaggtgaattcaacaaacacattttggcatatgggctgggctggcatccaacctcatgatagagtatggtcagtacacaagaataaactggcctaaataaaagatgaacatgacaaagcaggctgatactctgtagctg

SEQ ID NO: 5447 - DNA, 710 bp, Homo sapiens
aaagaagaaaggattctcccctagagccttcagagggaccacagtcctgccgacacttgattttagacttctaggttctaaaactgggagagaataaatttctgttgttttaagccaccaagatcgtactaattgttatgacagttctaggacacaaatgtagactctgaaataagcaactatgtttacccattcaagccaggtgcggtggctcacgcctgtaattccagcactttgggaggctgaggtgggtgaatcacctgaggtcaggagtttgagaccagcctgactaacatgatgaaaccctgtctctactaaaaatacaaaaattagtcatgcatggtggcctgagcctgtaatcccagctactcaggaggctgagacaggagaatcacttgaacccaggaagaggaggttacagcgagccgagatcgcgccactgcactccagcctaggagacagagccaagactccgtctcaaaaaaaaaaaaaaagtacttccttaacacccactacatgccaagctctgagctatgcaggacatgaggaacatgttggatgagataaggaaaaggtgaattcaacaaacacattttggyatatgggctgggctggcatccaacctcatgatagagtatggtcagtacacaagaataaactggcctaaataaaagatgaacatgacaaagcaggctgatactctgtagctg

SEQ ID NO: 5448 - DNA, 1218 bp, Homo sapiens
cagatatacactccagctcagttttttttttgtttctctttcctaataatggaaaagttgttttcctataactagttttttccccacataccattacatcaccgatacccttgtaggtcaatagctataggtttctcttaaaaataattacacaagctttcataatattccatagtacacacaatttatttagccattttcatatttatagaccttatgtatgttttcagttctgtttatttggccccaaccctgcagtaaatacctttgtgggcttatatcccaggagtgggatcgtcaggcaagagggtatataaatttatacttttcttaaaattgtcagattactttctcagacaggtcaaagcagatgtattcccaccagcagtataagagagtgtctgtttccccacaccagcgtcaccatgactggatgctccagggtgcaggctggcctgttgcagaggcggccttctgtcctcagccccaggcgcagcccaaggtagatgcagaattgagcagtcaggaacttcttctcagagaccagctttctcaatctcagcagcacatttcaacccactgggggacgtttaaaacccaaggatccagatgcaggaccccacccccagagagtctcacctgattggtcaagggggcacagaccgtggtgttttcaaaagctctcagaggattctgatggcctgccaaggtggagacttctactagagaccttgcagacaccaagatyctaacttctctttcccctctcttcccttccctctcatttcttccccactcctcgggccctgtccttgctggtcgggggagacttcgctgagatagtatcctctacctttactgtcctgggcctgcagaaacacattggttgtaagggctagcttttaatttccatgtccgaacctcatcattgaattggaaactcaggaggtgaggttagggcctcagcattttataaatgctgccaagatagctccagtatgcaggcagaggcaaaccattgccctgtttttttccagagcaggaaacacttctgacctctcaaggtccatctgtcctggctggtcaaaaccttttttctacctgttggaggggccagattttgaggagccagtgacctagtgtctgtgcatcccacgtgggcctgcactcatgagggcagagggctggccaaggtagacgtgaccaccggaccagctg

SEQ ID NO: 5449 - DNA, 1218 bp, Homo sapiens
cagatatacactccagctcagttttttttttgtttctctttcctaataatggaaaagttgttttcctataactagttttttccccacataccattacatcaccgatacccttgtaggtcaatagctataggtttctcttaaaaataattacacaagctttcataatattccatagtacacacaatttatttagccattttcatatttatagaccttatgtatgttttcagttctgtttatttggccccaaccctgcagtaaatacctttgtgggcttatatcccaggagtgggatcgtcaggcaagagggtatataaatttatacttttcttaaaattgtcagattactttctcagacaggtcaaagcagatgtattcccaccagcagtataagagagtgtctgtttccccacaccagcgtcaccatgactggatgctccagggtgcaggctggcctgttgcagaggcggccttctgtcctcagccccaggcgcagcccaaggtagatgcagaattgagcagtcaggaacttcttctcagagaccagctttctcaatctcagcagcacatttcaacccactgggggacgtttaaaacccaaggatccagatgcaggaccccacccccagagagtctcacctgattggtcaagggggcacagaccgtggtgttttcaaaagctctcagaggattctgatggcctgccaaggtggagacttctactagagaccttgcagacaccaagatcctaacttctctttyccctctcttcccttccctctcatttcttccccactcctcgggccctgtccttgctggtcgggggagacttcgctgagatagtatcctctacctttactgtcctgggcctgcagaaacacattggttgtaagggctagcttttaatttccatgtccgaacctcatcattgaattggaaactcaggaggtgaggttagggcctcagcattttataaatgctgccaagatagctccagtatgcaggcagaggcaaaccattgccctgtttttttccagagcaggaaacacttctgacctctcaaggtccatctgtcctggctggtcaaaaccttttttctacctgttggaggggccagattttgaggagccagtgacctagtgtctgtgcatcccacgtgggcctgcactcatgagggcagagggctggccaaggtagacgtgaccaccggaccagctg

SEQ ID NO: 5450 - DNA, 687 bp, Homo sapiens
tctttcattgggttttattgtgtttatcaagatcaaaagcaaagttatcctcagtaaagtctgtgaatactttctcccatcattctcctggagaaagggcccaaacagaagggactgrgtcctgcctctccatgctaccacacctgttgcagggagcagagtgcagagcctgtcccctggacctagatggttggctcaacacatgttggacagggcatgggtcattcgtcattctaattagctccagtgcctgtttccccagcaggcacagagtcaggacaaaatccacatctgccatgtgaacttctgcagaggtgccacttgctgagtagggccaaagtcatgtaattattgtaattatttttgtttatgggatgtcccttcccaggagatcccaggcacttcactgcccagaagttgtcacttgagagcaggacagcattgacccatgctggggctgaaggaagtgatgaagggccctgaccacccatggtgctatgctggctgcccggaagccatggcatgcataagcttctggagaggccactagggggtgtcacactgctatgcagagagtggaaggggggctcgggttctttttttttttttttgctggaggaggcgaggttagctagacatggaagattggttctcaaaggctatctttgggctggttttacaaaaacc

SEQ ID NO: 5451 - DNA, 687 bp, Homo sapiens
tctttcattgggttttattgtgtttatcaagatcaaaagcaaagttatcctcagtaaagtctgtgaatactttctcccatcattctcctggagaaagggcccaaacagaagggactgggtcctgcctctccatgctaccacacctgttgcagggagcagagtgcagagcctgtcccctggacctagayggttggctcaacacatgttggacagggcatgggtcattcgtcattctaattagctccagtgcctgtttccccagcaggcacagagtcaggacaaaatccacatctgccatgtgaacttctgcagaggtgccacttgctgagtagggccaaagtcatgtaattattgtaattatttttgtttatgggatgtcccttcccaggagatcccaggcacttcactgcccagaagttgtcacttgagagcaggacagcattgacccatgctggggctgaaggaagtgatgaagggccctgaccacccatggtgctatgctggctgcccggaagccatggcatgcataagcttctggagaggccactagggggtgtcacactgctatgcagagagtggaaggggggctcgggttctttttttttttttttgctggaggaggcgaggttagctagacatggaagattggttctcaaaggctatctttgggctggttttacaaaaacc

SEQ ID NO: 5452 - DNA, 620 bp, Homo sapiens
tgttagccccatcacccactgccagctcattcagcccgcagcaggtatttaggcagaacaagatgagcacctgcatattctccctgcagcacacctgagtcgctgctgctctgcaggcctcccacctcagcctacgacgtattccaactcaaagggagcaacggtgcaccaatcatgcgatgaatgaggccagagtttcattggattggattctgtaatacatctctcagaggtgcgcctttggtggagtgagaacatgaactactgttcaggaggtaggggcatggaccacaccagtgcacactgcaggtagtaaggtgcagggtggcaggtggaaggacggtgtgtgtcctgcctggtgtgagcaggctgcatcacctacagagcaggacctccatgagtctcaggtcatcaaagaggagtggagacacagccccttctctcctagaagcagaggcacgggaacaatgagaaggctctctccagggcagtgtggccctgcagggtcctaacagctctgaaagccagcaggggctctctgcaaaagctaaagtcrgcagcagatgatatgatgcaggattatgcacattcgaatcccctggggagcttttaaaacccag

SEQ ID NO: 5453 - DNA, 303 bp, Homo sapiens
cctcctcaggtwtatttctctccatctatgttatttatgatttacttgttccttgacactggagaccatgttggtttcattcacctctgcgtctgcagtgtcctggcccgtgcctggcactcactgaatcctcgtggtttgttgttacagcttagctgtatgcttcctcaaggcaggaattggggctgcacactcaccattttccccagcactgagaatagtgtctggcataacgaatgaaagtgagtaaacaaaggtatccacttgaggcttagtactgttatgcaaaaagcactggctttg

SEQ ID NO: 5454 - DNA, 303 bp, Homo sapiens
cctcctcaggtttatttctctccatctatgttatttatgatttacttgttccttgacactggagaccatgttggtttcattcacctctgcgtctgcagtgtcctggcccgtgcctggcactcactgaatcctcgtggtttgttgtyacagcttagctgtatgcttcctcaaggcaggaattggggctgcacactcaccattttccccagcactgagaatagtgtctggcataacgaatgaaagtgagtaaacaaaggtatccacttgaggcttagtactgttatgcaaaaagcactggctttg

SEQ ID NO: 5455 - DNA, 303 bp, Homo sapiens
cctcctcaggtttatttctctccatctatgttatttatgatttacttgttccttgacactggagaccatgttggtttcattcacctctgcgtctgcagtgtcctggcccgtgcctggcactcactgaatcctcgtggtttgttgttacagcttagctgtatgcttcctcaaggcaggaattggggmtgcacactcaccattttccccagcactgagaatagtgtctggcataacgaatgaaagtgagtaaacaaaggtatccacttgaggcttagtactgttatgcaaaaagcactggctttg

SEQ ID NO: 5456 - DNA, 303 bp, Homo sapiens
cctcctcaggtttatttctctccatctatgttatttatgatttacttgttccttgacactggagaccatgttggtttcattcacctctgcgtctgcagtgtcctggcccgtgcctggcactcactgaatcctcgtggtttgttgttacagcttagctgtatgcttcctcaaggcaggaattggggctgcacactcaccattttccccagcactgagaatagtgtctggcataacgaatgaaastgagtaaacaaaggtatccacttgaggcttagtactgttatgcaaaaagcactggctttg

SEQ ID NO: 5457 - DNA, 812 bp, Homo sapiens
ttttcaaagtactcttggtacaggccacactcgggtactaggctgtctggtgttgctttctgagtggttcatgccaaatatgaacactattaaatcaccagtggaatttgatcagctcatttacatgcattatttagttttcgtccactgagagattgggttgtccctatgctttctttgaatatggcaactataaataattcctacttggtactggctgccagtctttttatccctaagtagtgtgaggctgaatctactatgyctgggtcttcctttaagtagtttgctattgccataattgactttaagaacattggtttgccatctccaaaaacaactcaaagaaacttttaccaaaactcagaagattagcatgagagatgccctacagagaactactccatctgctttaacaaggtcttgaaacaagtgtgctccaacatgggcatttcatacaaggcaacatgttttgagaactattttatcaaggatattgtcaagcacacagtaggacaagactctctctaggcccattgtaacagatactgcactatcgcctccagagagagctaatgatctgtgcacctgctcctacccagggaattgattaggcatgctatatctgaggacatcaaggccattattaactacaccaattctatccaaataagctgctgttgaggattcaaagaacataagacaaaggctctgttcacagccatcaacattttctgttaatagctacctcttaatgtattcatatttctgatggatagccctttgtattacctctttgtgaattgttcagg

SEQ ID NO: 5458 - DNA, 812 bp, Homo sapiens
ttttcaaagtactcttggtacaggccacactcgggtactaggctgtctggtgttgctttctgagtggttcatgccaaatatgaacactattaaatcaccagtggaatttgatcagctcatttacatgcattatttagttttcgtccactgagagattgggttgtccctatgctttctttgaatatggcaactataaataattcctacttggtactggctgccagtctttttatccctaagtagtgtgaggctgaatctactatgtctgggtcttcctttaagtagtttgctattgccataattgactttaagaacattggtttgccatctccaaaaacaactcaaagaaacttttaccaaaactcagaagattagcatgagagatgccctacagagaactactccatctgctttaacaaggtcttgaaacaagtgtgctccaacatgggcatttcatacaaggcaacatgttttgagaactattttatcaaggatatygtcaagcacacagtaggacaagactctctctaggcccattgtaacagatactgcactatcgcctccagagagagctaatgatctgtgcacctgctcctacccagggaattgattaggcatgctatatctgaggacatcaaggccattattaactacaccaattctatccaaataagctgctgttgaggattcaaagaacataagacaaaggctctgttcacagccatcaacattttctgttaatagctacctcttaatgtattcatatttctgatggatagccctttgtattacctctttgtgaattgttcagg

SEQ ID NO: 5459 - DNA, 806 bp, Homo sapiens
ggtctcaaaacctttacttctttcttggcataatattaattgaaaagaaacacaggagatttgctttttaattctctcattttctaccttgctaattccatctccccttcaatttgtaggaatgcttaatgaaagcagcaagagagattatcattgggaactgaaatgtgtaatcaatccctgaatagaaaaaaatagtgggaattatataaataagataattttatagctcaagtacttaaaatcagacaacagagcaatacaaaactttttatgatggagtttctataattcatccttacatacaataagaaatgaaaccctatagatattactttagatattgcttaggagcagacaatcttttgttcatagagaagatagcattgaaaatgaacatttcatggagctttaacaactagcaaagctgaaagaaatatttttcactaagattgctttgatccatgataggtatttacaatatgcagccaagggctttgaccattaacaaaaataaaataaaatatatagtgcttgaattcccattaggtctcaagggtaaaagagtaaatttctctcaacaactttccttatgacatttttatcccattctttataatagttggtgctgggttgagaaaagtagaagagattccagtaagctcctaccttctttactcttccatagartttcatctcaagctgggacaggagctagagagggagtgagacagccagctcattctgtcttctcccccatcttacgtcactgctcaagaagcgggtgtgtggagtccagagaggat

SEQ ID NO: 5460 - DNA, 677 bp, Homo sapiens
ggtaagggtgctgtcttccttgatggttacatttcaaagggatggctcccaggtcctcgagaaagacatttctccatcaaaagctgacaaaagacttatctggccgttaaaaagatgtgcatgtctttcaaagagacagagacagaactgccaattacaagttttctaaagtcaataccctaagaaaggagggaggagaaatccactggcagactsgggctcagcagctggagctcccctggaaggtgctttctagagtagagcagtgtttctcaatgccattctgtggaacaccaacatcaggatcatctggtatgcttgctgaaagacatggattcctgggacttgttcccaggcctaggaatcagggtgatattccacaaggctccatgtggtcatttgtattgttttgttttagagacagggtcttgctctgtcatccaggcctgggactacagtccttaggacggcctgcctgcaaggttggctctctgtgggcatgtgagaacttggatttttggaggctttcaacaattctctgactgctggggtggcttattctgtctaaatgtttatacaacccatgtggtttatgctaaacacctgcttttcttcagggacatcagccagtccttctgactttgcccaggcagtttatccctttgctgatttgcttt

SEQ ID NO: 5461 - DNA, 803 bp, Homo sapiens
attccaccctctgtccccaccccaaattcaagtccttctgacatccaaaatatgtttaccccattccaagagccctgaatcttaactcattccagtatccattctaagtccaaagtctcatctaaatatcatctaaatcaggtatgggtgagactcaaggtatgattcatcctgagtcaaaattcctctctagctctgaacctgtgattcctatttttgcaatggtggggcaggcataggataggcattactattccaaaaggcagaaatgagaaagaagaaagggtgatgagtcttgagtgagtccaaaacctaacaaggcaaatttcatgggctctaaggcctgagaataatcttcttcagctggatgttctgccctatgggaccaccggggtgacagcctcattttctgggcccacgggggcagtggcctcactttcttggacatgagtggtgatcttgcctctgaagcctcacataggagcaacctgacccactgaaaccaaggaagaggccataccctctgaaaccaacaaggagtgtgtgctccgggcctgtggtaacagtggcagtgctgccaatctctgaattgcctttgaggtcattcttcccttttctggaagggtaaggcatgttcacagccagatagctctgttgttccactctggcttctgctgagatggctgattaaatccatgggtcatctctttatrcagtgattgtacaattatacccttggtgttctcctcagaacatactttctcatttttttgcagcagagagtaagaatttttaaatattta

SEQ ID NO: 5462 - DNA, 1500 bp, Homo sapiens
atcattatactttaaagtcagactgactaggcttaaatcctgattctatcacttataagccatgtggccttggaagatcttccaaccttttttctgtaacagttttttcacttgtaaaatgtgggaaaaaagtgattatctattttaaaagtgcccaacatacagtaagaagataaacttcctagcaaatagtaagaactcaataaatggaaataggagagaatactattttaaaacatttactggaaaataatacataggggtgtgtgtatatttaataaatatcaacacataattgttctattgttatwcttgtacagtattccagaccttaagcttttatacatgattatggtttttatactaaggaaagtaatggaaatgttagattttacagttaatattattctgtgtactgtataagaaatatttttccattacacaagctcttccttggtagttagtaaggatacttagaagcatggccacaaaacacagatcacttcccaaagctttccccacactgtgacagcttccataattcttagaatatggcttagtaaaaacatgtgaaaacatgtcaccctatgagttaaacaatttcaaatgaagaagacagaatatagatgttagcagagactatacattattgattaggtgttgatatagttggatatttgttcctgcccaaatctcatgttgaattgtaatcctcactgttggaggtaggccctgggggaggtgtttgggtcatgggggaggatccctcatggcttggtgctgtccttgcaatagcaagtgagttctcatgagatctattgttgtaaagtgtggcacccttccgccactaccaatccctcttgctcctgcatttgcaatgtgatgtgcttgctctcgcttcgctttccaccatgagtagaagctccctgaggtctccccagaagctgattagatgcaggtgctgggcttccactacagcctgcagaaccatgagccaattaaacctctttactttataaactacccagtctcaggtatttctttatagcaatgcaagaaaggcctaacacagatatctggagttatttttaagataatttaaattttcagaaatcccagcagctttagagaaacacatgtgagagtgaaaaattatagatttttcctttgacctgtcaaataaattcaacaagcgcacgggggataggccaaatctcactcccttttctacactgagagccaaagctgaatgggtgttgaagagtggcttttctcttttagggtaggatagtttttccttcccataacatttctgtttttcagatttgacagtcttgtgaagctctcttttttgggtgacattaacctcagacttgaagaaaatactagatttcatatcatttcacaactgcattaatgcagcataagttactttctttgcaaatcatccttatcattgattaccaaaaatcattgcaagaattacatgagattatatag

SEQ ID NO: 5463 - DNA, 1500 bp, Homo sapiens
atcattatactttaaagtcagactgactaggcttaaatcctgattctatcacttataagccatgtggccttggaagatcttccaaccttttttctgtaacagttttttcacttgtaaaatgtgggaaaaaagtgattatctattttaaaagtgcccaacatacagtaagaagataaacttcctagcaaatagtaagaactcaataaatggaaataggagagaatactattttaaaacatttactggaaaataatacataggggtgtgtgtatatttaataaatatcaacacataattgttctattgttattcttgtacagtattccagaccttaagcttttatacatgattatggtttttatactaaggaaagtaatggaaatgttagattttacagttaatattattctgtgtactgtataagaaatatttttccattacacaagctcttccttggtagttagtaaggatacttagaagcatggccacaaaacacagatcacttcccaaagctttccccacactgtgacagcttccataattcttagaatatggcttagtamaaacatgtgaaaacatgtcaccctatgagttaaacaatttcaaatgaagaagacagaatatagatgttagcagagactatacattattgattaggtgttgatatagttggatatttgttcctgcccaaatctcatgttgaattgtaatcctcactgttggaggtaggccctgggggaggtgtttgggtcatgggggaggatccctcatggcttggtgctgtccttgcaatagcaagtgagttctcatgagatctattgttgtaaagtgtggcacccttccgccactaccaatccctcttgctcctgcatttgcaatgtgatgtgcttgctctcgcttcgctttccaccatgagtagaagctccctgaggtctccccagaagctgattagatgcaggtgctgggcttccactacagcctgcagaaccatgagccaattaaacctctttactttataaactacccagtctcaggtatttctttatagcaatgcaagaaaggcctaacacagatatctggagttatttttaagataatttaaattttcagaaatcccagcagctttagagaaacacatgtgagagtgaaaaattatagatttttcctttgacctgtcaaataaattcaacaagcgcacgggggataggccaaatctcactcccttttctacactgagagccaaagctgaatgggtgttgaagagtggcttttctcttttagggtaggatagtttttccttcccataacatttctgtttttcagatttgacagtcttgtgaagctctcttttttgggtgacattaacctcagacttgaagaaaatactagatttcatatcatttcacaactgcattaatgcagcataagttactttctttgcaaatcatccttatcattgattaccaaaaatcattgcaagaattacatgagattatatag

SEQ ID NO: 5464 - DNA, 1500 bp, Homo sapiens
atcattatactttaaagtcagactgactaggcttaaatcctgattctatcacttataagccatgtggccttggaagatcttccaaccttttttctgtaacagttttttcacttgtaaaatgtgggaaaaaagtgattatctattttaaaagtgcccaacatacagtaagaagataaacttcctagcaaatagtaagaactcaataaatggaaataggagagaatactattttaaaacatttactggaaaataatacataggggtgtgtgtatatttaataaatatcaacacataattgttctattgttattcttgtacagtattccagaccttaagcttttatacatgattatggtttttatactaaggaaagtaatggaaatgttagattttacagttaatattattctgtgtactgtataagaaatatttttccattacacaagctcttccttggtagttagtaaggatacttagaagcatggccacaaaacacagatcacttcccaaagctttccccacactgtgacagcttccataattcttagaatatggcttagtaaaaacatgtgaaaacatgtcaccctatgagttaaacaatttcaaatgaagaagacagaatatagatgttagcagagactakacattattgattaggtgttgatatagttggatatttgttcctgcccaaatctcatgttgaattgtaatcctcactgttggaggtaggccctgggggaggtgtttgggtcatgggggaggatccctcatggcttggtgctgtccttgcaatagcaagtgagttctcatgagatctattgttgtaaagtgtggcacccttccgccactaccaatccctcttgctcctgcatttgcaatgtgatgtgcttgctctcgcttcgctttccaccatgagtagaagctccctgaggtctccccagaagctgattagatgcaggtgctgggcttccactacagcctgcagaaccatgagccaattaaacctctttactttataaactacccagtctcaggtatttctttatagcaatgcaagaaaggcctaacacagatatctggagttatttttaagataatttaaattttcagaaatcccagcagctttagagaaacacatgtgagagtgaaaaattatagatttttcctttgacctgtcaaataaattcaacaagcgcacgggggataggccaaatctcactcccttttctacactgagagccaaagctgaatgggtgttgaagagtggcttttctcttttagggtaggatagtttttccttcccataacatttctgtttttcagatttgacagtcttgtgaagctctcttttttgggtgacattaacctcagacttgaagaaaatactagatttcatatcatttcacaactgcattaatgcagcataagttactttctttgcaaatcatccttatcattgattaccaaaaatcattgcaagaattacatgagattatatag

SEQ ID NO: 5465 - DNA, 576 bp, Homo sapiens
  misc_feature (1)...(576): n = A,T,C or G
tagaaggawnnnnnnnnnnnnnnnnnnnnnnnnnnnnnnnnnnnnnnnnnnnnnnnnnnnnnnnnnnnnnnnnnnnnnnnnnnnnnnnnnnnnnnnnnnnnnnnnnnnnaactgatgggacttagtaaataaatccaaataagggagagtgtcaaagaaggatatcttagaaagatctcacaattttttagatttggtgatttaatgtattgttagtaccatttattgatattggacaattaggtaaagaactggtttatgaaagaagtaggtgagttgagattagaatttgttgagtttcatgtctgtagtgcctctagaaggtaagtcacattagtgtgtattccattaggaagatgctatatacccgttttgtatcaataaaagacaatatatatttaacatatgacaaattaacactgacaaaatgtgtgcttacaaatggcataaactagacatattgactagaagattcatcaaaatcttctttgaagaaatgggacatgaattagatcttgaactatgcattagaggcagggggaatagaatgagaaggtacataggttaagagctttt

SEQ ID NO: 5466 - DNA, 645 bp, Homo sapiens
ccgccagcccagcggcaacagttcccacgcgcggccctattctttgtagttgagtcatccccccccccccccttccccctttttgtttcgtttttaacataaagatgaaaatattttaatggacggcaatccttccccattttggtgtaaagaattgtatgcttcctctgagctcacgtgagttcttctgtgacactcacctcttctaccttgggggcaggctcaaaacccgtctactgaatactgttgtcttgtgaccaagggtggtggtctctcatttgtaaaatagttcacatagtgattaaaaggcataaaaagaagctgcagccttggataccctagagctgaaggccccttttttttaccatttggaactgaaagggcccaaggtctgcaggtgaggctttcagatctcggactaactttccccagggaggcttttgtggccgcyccaaaccacgtggcaggtgatggggtagagggtgagagcggggccatttctaggcattcggggtcagttaagggtgtgggggctcaggttgggggtgggagtcagtgtgggctcagagttcagctcgggacgcggctgcagggtgggtgtggccctgggggaggggccaggctaggctcagctcggctccaggt

SEQ ID NO: 5467 - DNA, 608 bp, Homo sapiens
ggctaatccttgccatctttcagctctagatgcaaacagcccagaattcaaggcaatcatagcctacattgttcatgataaatcctcccaatcccattaataagaacactcattagaatggattcccatgacagcccagaatgaaccagcctggctctccctgaattgatttggtaagtccctgcgttaactggctagcttcctgtaggctggcagtgggggcaccagtgtgaggtgaaaggactctaggccaagagcctgggctctgcatcttgctacgtgtggctctcggagtctcttggcctgatggaggctgagttttctcacctggacatgtgaatgaayggcaccttctgtgtagagttcctgtgtgtgtcaatgtgcctggtgagcgctgatgggtgggggtttattgccattgatcagaggcttggcaggaatctcagagtcaatgggataaaacgcagcatttgaccctgagacctaactggggagaggatcaccagttacgaatggcagacaaccaaggagtgagagtggaaggggacacgtagaatggataattgtcgtcaaggctggagatcgtcccagatcacgacggagggcag

SEQ ID NO: 5468 - DNA, 576 bp, Homo sapiens
aggagaaaatttggttccaaagagaacgctgggctatgggagaccaggagtttaccatcatgctaattaaccatcttctgttaggcaaatcacaagttgctggacctttgctttctcctctttaaatgacattaggccagataatctagaacatcacttctagagttctgatccttatttctatgtaattcatttgcactaaagtatcataacttataaagaaagttgtgtgtaagagaacaagaacacagaggaaagaaagatgagaggctctttaytaagagccacttgtccatcagggcaagctgcctcctttgcattatgtcaggcttatttaaaaaaaaaatttgtgtctctgttgactatttaaggtaactaaatggttccttagacatgcaacaacatcaatggaggaagaattctggtggagatgaataataaaggaatcttttaatatgtatacatttaatgagtaaaaagacatacactactttctcttaatgtgactgattcttcgaggaggagcaaacgcattctgtgttcttactgcacaaatcaaagaataaacacaggaag

SEQ ID NO: 5469 - DNA, 295 bp, Homo sapiens
atccttagtggctgtgtaacccagagggacctccacctccctctgcctcagtctccccatggatggcatgaggttagccaaggtgaccttccagccctgcttcaactgaaaagtgcatatactcacgacrggatgttgttaacatacgaatttgactcagcaggtctggggtggggttggagattctgaatttcttatttatttattatttttattgattatcattattattattgagatggagttttgctcttgttgcccaggctggagtgcagtggtgcgagctcagcttact

SEQ ID NO: 5470 - DNA, 778 bp, Homo sapiens
ggcactgatgagacattcacgttgcctggagagctttattttaaacaacgaaggagaaagaagaaaagaagaagaaggagaaggagaagaaaaagaagcagcagccgccaccaccatctcatgcccatttaaatgagaatttctgagcgtgggaccccaggcatcagatttttttcagtttctccttgggccaccaaggttgagaactggtacctcctgtagcagtggttctgaaacgccagctgcctcggaagctcctggagggcttgttagataggactgtgtcccaccacagagtttctgattcaggaggtctgggttgggctggkgctttgcttttctaacaagttcccaggtgaagctgctagtctgggggccagactttgagagcctctcgcctgcattctcaggactccttttgtggcttgtggacccacagcctggggtgtctcccagaagcttgttagaaattcagaatcttggcgcagtagctcacacctgtaataccagcatttgaggaggctaaggctggaggattgcttgagcccagaagtttgagatcaacctgggcaacatagagacacctagtctctagttaaaaaagcagtctatggccatactaccaggaacgtgcctgatctcgtgaagctaagcaggtttgggcctggttagtacttagatgggagaccacctgggaataacgggtgctgtaggcttttggcttggctgggcgcagtggctcacacctataatcccagcactttgggaggcgaggggg

SEQ ID NO: 5471 - DNA, 681 bp, Homo sapiens
tggactccatcctggaagcaattaaatggttggggatttccattgttgttgttggtttggtttgtttgtttgagacagaatcttgttctgttgcccaggctggagtgcagtggcgcaatcacagctcactccagcctcaaccccctgggctctagtgatcctcctgcctgagcctcctgaacaggtagggctacgggtrcataccaccatgcctagctaattttctttttaatattttgtagagatggagttttgctatgttacccaggctggtctcaaactcctgtcctcaaatgatcctctggccttggcctcccaaagtactaggattacaggtgtaagccaccacactcgaaggatttaaagggctaaaccctttaacccaattaaagggtttcaagtgaaagctctctgagatctttgctcccaagcatccaatgaatctctgaatcttttgttggatagtgaatgaccacagactcccaagaggacggttctgaagtaaagctccaaaaccttcaagttgttcaagttgagtactgcgaaagtatgcccaggcagaggggtgataaggattagaacccagcctatacgctatccactgagccatatgctcacaggacagggtcttctcagagtagccacttttgtgttgtacaaaagccttatatagactagtag

SEQ ID NO: 5472 - DNA, 834 bp, Homo sapiens
ctttgcagaaccacagtgctatcaataaatacggccaagctgatctagtgcttggtagtttggggcacctggctctttcctcttgaaggttgaatataatgctcgtgctcttttacaggtggccagtggcgatttcgatgcttgcgtccaagtctgtgaatgtaaaacccctcgtcacccataggtttcctctggagaaagctctggaggcctttgaaacatttaaaaagggattggggttgaaaatcatgctcaagtgtgaccccagtgaccagaatccctgatgttaatgggctctgccctcatccccacagtcttgggatctcagggcacaatggctggacatgggtgggctctgatgcagaactttctcttttgaatgttaagaataactaatacaattcattgtgaacagaagtccttamgcagaggaattggtgtgccttaaagatacaatctgggatagtttgggggaacttgtagccagaatgccctgttcatgctgagcaaagttcagcaagtagagcagagtttggcaggcaggtgccaggaactccccttcttcctggagtgccttcattgaggaaggaaatctggcccttgggtttcctggttccactgctactgacccagaggggaatgagggctgagttatgaaaagataacttcatgaagacttaactggcccagaagctgattttcatgaaaatctgccactcagggtctgggatgaaggcttgtcagcacttccagtttagaacgcaatgtttctagagacatattggctgtttgttttgatgataaaaggagaataagaaaaggcatcactttcct

SEQ ID NO: 5473 - DNA, 719 bp, Homo sapiens
cttctatctggacaaaggcccactgccagcttcaccttcagattttacacatcctcttcctcaactttagagtgacaacaaatgtagttcacacatwtgaaccagtgagtgaacgtgtgcaatgaaaatgcgcttacatttaaaaatcaaattgcagcaggcctttctgagctgggcagaccctgtgctgggtctacgacagcacatccccctcagacgtggcccgcacgccgcacatagcccagcgaggggcgttctgcagaaacgtcagcgagctcatggctaacgtgctcagaatagacactgccagctaacttccagtcacctggctatgacacactcaagcctgtgagagtgaaccgggtttgtaaaaaccaggactagtcaaagcccattattaagttttacactttgctccctggcctaagggagtagaaatccaagcttgaagggaaaggaggggtctgatttggtgaacagagatatgaggctgaggcttctgagcacgtgggtttggggtaggggtaggggcgtgggggtactgaagatcaagaagaggctgaggacactcaagggagaaacccgggctctagagccagcccccgtgggacaggccctggctctgtgtgatcttgggcaagtcttagcctttctgtgcctcagttgcttactgtagaatgcggtaactactgctgttatgggcagggttatgtcccccc

SEQ ID NO: 5474 - DNA, 719 bp, Homo sapiens
cttctatctggacaaaggcccactgccagcttcaccttcagattttacacatcctcttcctcaactttagagtgacaacaaatgtagttcacacatatgaaccagtgagtgaacrtgtgcaatgaaaatgcgcttacatttaaaaatcaaattgcagcaggcctttctgagctgggcagaccctgtgctgggtctacgacagcacatccccctcagacgtggcccgcacgccgcacatagcccagcgaggggcgttctgcagaaacgtcagcgagctcatggctaacgtgctcagaatagacactgccagctaacttccagtcacctggctatgacacactcaagcctgtgagagtgaaccgggtttgtaaaaaccaggactagtcaaagcccattattaagttttacactttgctccctggcctaagggagtagaaatccaagcttgaagggaaaggaggggtctgatttggtgaacagagatatgaggctgaggcttctgagcacgtgggtttggggtaggggtaggggcgtgggggtactgaagatcaagaagaggctgaggacactcaagggagaaacccgggctctagagccagcccccgtgggacaggccctggctctgtgtgatcttgggcaagtcttagcctttctgtgcctcagttgcttactgtagaatgcggtaactactgctgttatgggcagggttatgtcccccc

SEQ ID NO: 5475 - DNA, 1637 bp, Homo sapiens
cgtgtaggaacttttctctggatgagaaaaatgtaaatccattcagaaacatttcttctctatcagtgaagctctacttatatttaggggaatagaaacatttgagggtatctaaaatatctggtaatagaggaaatttaatatattatttggtgtgctttttacccagtgaacagttgaacccattatttacaacttagcattactttagctgaaaaggtatctggagattaagaaaaattatactgatcataatattaaaaatgtaacttattttttattttgtgtttccagagttagaggataccctgtagtgttctagcccacccatatctttctaatttttaagtgtgatcaccattagaacatgaacattaccaaatggggattaggcttattcatatgtttcatttattttaacctacttgaacactgaactttctttccttataatttgcaaagacaaagtcaacatctggaggaggccatgctgatcccatctatgccataacctttacactgctggctcaactgtgagattgcaaagggatcagtgaactagatcgcagacccccagctccttctggccatttctcacctgctctcttcttcctgyccttcatctgcccacctgtccctctatttttctctctgctgctttcagaccacaaagaaaattgagtgcagtgtcaccttatgatatggattggatgtttgtcctctccaaacctcataatgaaatgtgacctccagtgttttgaggttggcctggtgggaggtattggatgatgagggtggatccattatgaatggcttagtgctattcccttggtgatgagtgaattcatcagttaattcacaagagatctggttgtttaagagtctaggacatcccccttctttctctctttctcctgtttttaccatgtaatgtgtttactcctccttccccgtgctccataattggaagcttcctgaggccttcaccagaaggagatgcagcactattcttggtgtacagcccacagcactatgagccaattaagcctcctttctttataaattactccaccttaggtatttctttatagtaatgcaaaaatagactaatagacatcttacctactcatgccactgtttcagaagccacccccgttccacttaaatatcatacatgatggaaaacaaaacaatacacaaggtagaaaacatcctagatagcagctcctgagggaaggtacacttctacaaaataaaaatcaatgagtttatattttggtagcctgtgatgttatacagaatagacagagattctacttaggattccaattcccttaggcccattaagtagggcagatggacattagaagagatgccttcaaaagtggacattaatgtactcttaaaagtaatgggtctgacctataaatcatgggaggaatgtagtacaaaatagtgaatgaaatatttatacgttccattgaagcttcgtgtatattctagagggagaagtcccagagagatgggtcttcccctttgttctgaatctattttccaattgctctgacacagctgttggcttcacagtcattctgaagttgattagatcagaaagcagaggcctgcctgcccagcat

SEQ ID NO: 5476 - DNA, 630 bp, Homo sapiens
taataggagaaaaggtatttaagaaacaaaaagcaacacagtacaacataatagctgagagaaaagaggtatgtacatagtacaagggaaacaccaggtaaaatgtggtcaatttccctggaatggcgatggggagatgggaagggcatctgcaagcggatgtctacctgaacttaacttgattgcccaggtccaagcactgaggtgacctgaacatctacccaggcatgattggtttgaaatgtgcagacatgaggtttgggargggccaggggtggaatgatatggtttggctctgtgtctccagccaaatctcaccttgtagctcccataattcccacttgttgtgggagggaccagtgggagataattgaatcatggggatgggtctttcccatgctcttcttgtgatagtgaatacgtctcacaagatcttatggttttaaaaattggagtttccctgcacaagctctctttttttgcctgccaccatccatttaagatgtgactttttcctccttgccttccatcatgattgtgagacctccccagccatatggaactgtaaccccattaaacctctttcttttgtaaattgcccagtctggggtatgtctttttcagcagcat

SEQ ID NO: 5477 - DNA, 793 bp, Homo sapiens
tatgccctgagaggataggcaatgtcacttacatactaacatgcatgaaccaaaactaatccatctcctaacattttcatacctgattttgaagacccagctttccctttattgtccctttaaagcaaagtggggaccaattctgccgaagacccatgtgtcctgggagggctcggaaactgccttcctccctaggcatcaacaaattaattacttgtcaaattgcatcatgacagaaatacatcagaagtctggagaaataaagaaataaagagaaaaatagggcaatactagagtggttctgattgccatagaattttaaaatataaattaaaacaataccaccactgaaccaagtaacttgtatacgamggagttattctttgttgagggcttgctcaaaacaaatattttcacatttaatattcaaaatgatgctttgaatagcaatttatataatcccattttttaaaaaataagcaactgaggctaactaggaattcaaagccagacaatccagcaattccacgactgactcacaatagtttgtttttgcattgctataaagaaatatctgagactggtattccttttaaaagacaggtctagttgtatttttcatactgctagaacaaacacatccttacatctcagcatagttaattctgtgctaaaactttttaaaaggcaaaaatttaaaaaaatggatatgaaaaccatgaatatatgatgaatgccaagtcaaaaccaaaaaaagctatttcattgagaaggcagtgtgagtttattttaa

SEQ ID NO: 5478 - DNA, 914 bp, Homo sapiens
ttgtagactaaagttcttgttttaatagtgagctctgtgcttccagtgtctatatgtaaactacaagcctgcctaaggcaagtggcaaccttgcatataaagggcaatcacccatttatactcctggaagatccatcttgtgagaacatattctacattctcaccactctggagagactttttttcttgtaaaatttgagaatacatttttacagcctagagtcaagtcttcctgtgaagacggtgactttttaagaaacacatcagcagtctgttgcttgtctcctgtcagtgctgacccttcttgggtttaggatgaccattttccgagaatagaaaatttgggctaaataagaaatactctttaaaattgctttattgctatgttggtttttctttgtaattatggttgagttattccataaaatttgctgctacaatagtcttataatggcaatacagtccaaccaatttgtttttcactggagtagatggtaaatgggccacggaatataaacttgttttgctggagatgctggttaggttttccagaagctgttggttgggttttccataagaattggactagaagcaaggctgaatttgaggtatcctagaaatagcatgagaaaaatgccttttwagccatatttccatcttaaataatgagcagaaccgtgcgttgaaagggaatcgtttgtgttggactcaagcagtgaaggagggaaaaagaaaaagaagaaaacatggaaagaccagaacaaaagtaggcagagtgcctggaaataaatatgaatatacatataattttaaaatgttaaaactatagacttgaagaaatagaactctcaaactctgaagacaggagtcaactggcataattttgctttgcaaagtgatattgcagaaagtgt

SEQ ID NO: 5479 - DNA, 914 bp, Homo sapiens
ttgtagactaaagttcttgttttaatagtgagctctgtgcttccagtgtctatatgtaaactacaagcctgcctaaggcaagtggcaaccttgcatataaagggcaatcacccatttatactcctggaagatccatcttgtgagaacatattctacattctcaccactctggagagactttttttcttgtaaaatttgagaatacatttttacagcctagagtcaagtcttcctgtgaagacggtgactttttaagaaacacatcagcagtctgttgcttgtctcctgtcagtgctgacccttcttgggtttaggatgaccattttccgagaatagaaaatttgggctaaataagaaatactctttaaaattgctttattgctatgttggtttttctttgtaattatggttgagttattccataaaatttgctgctacaatagtcttataatggcaatacagtccaaccaatttgtttttcactggagtagatggtaaatgggccacggaatataaacttgttttgctggagatgctggttaggttttccagaagctgttggttgggttttccataagaattggactagaagcaaggctgaatttgaggtatcctagaaatagcatgagaaaaatgccttttaagccatatttccrtcttaaataatgagcagaaccgtgcgttgaaagggaatcgtttgtgttggactcaagcagtgaaggagggaaaaagaaaaagaagaaaacatggaaagaccagaacaaaagtaggcagagtgcctggaaataaatatgaatatacatataattttaaaatgttaaaactatagacttgaagaaatagaactctcaaactctgaagacaggagtcaactggcataattttgctttgcaaagtgatattgcagaaagtgt

SEQ ID NO: 5480 - DNA, 797 bp, Homo sapiens
aaaacataatgtccccaaactaagattttatgtaacacatgatttaaagggacagaggcaactagattaataaactacagtagaaatttgcctttttcttctacatctttatatatttcgggttggccccaaaattttcagtctttgtgttgagaaaataggtgatagccttatatcgggcatgaacgagaaagagctgcatttcatgatttacatataacttgggctcttgtgaaagtgctttattaaaggggtactctcaagaaaaatgtggagggaataagggaagcagggaggggtaagaaaaagatgggaatgggtggaggcctggcctggtggagaggggttctagacaggacaccaacagcatccactaccaacatcacttgtagcacaaaacatggagaaggcagcttgctggccaagcaactcactgagcacctctacccattaggaagcaggtcaggttgtgatcgacakctgtgctgtgtgttcagcagccatgccccacctcagttctcctttagagaacatccctcctcaatataagctgggtgacttatgaccactccttttcatctcttggagtgagcatattccacccacctggccaagtagaaggttcggggccaggcataagacccacactgatgatgggattttgaacagaaagtaggtataatataagccagggccatgaggccaccatgtgcctagggatgaaggcaacccaaaggaacgtctactctgatttgaagagggatcaacagagacctggtcacattgtttacatccct

SEQ ID NO: 5481 - DNA, 797 bp, Homo sapiens
aaaacataatgtccccaaactaagattttatgtaacacatgatttaaagggacagaggcaactagattaataaactacagtagaaatttgcctttttcttctacatctttatatatttcgggttggccccaaaattttcagtctttgtgttgagaaaataggtgatagccttatatcgggcatgaacgagaaagagctgcatttcatgatttacatataacttgggctcttgtgaaagtgctttattaaaggggtactctcaagaaaaatgtggagggaataagggaagcagggaggggtaagaaaaagatgggaatgggtggaggcctggcctggtggagaggggttctagacaggacaccaacagcatccactaccaacatcacttgtagcacaaaacatggagaaggcagcttgctggccaagcaactcactgagcacctctacccattaggaagcaggtcaggttgtgatcgacatctgtgctgtgtgttcagcagccatgccccacctcagttctcctttagagaacatccctcctcaatataasctgggtgacttatgaccactccttttcatctcttggagtgagcatattccacccacctggccaagtagaaggttcggggccaggcataagacccacactgatgatgggattttgaacagaaagtaggtataatataagccagggccatgaggccaccatgtgcctagggatgaaggcaacccaaaggaacgtctactctgatttgaagagggatcaacagagacctggtcacattgtttacatccct

SEQ ID NO: 5482 - DNA, 589 bp, Homo sapiens
tgccttgttcaggagaatattgacagctcagtaatacacactaagctttctgaggggcttgagggctttgagagataagatagtctggcttgtacagactaccacagggccccagtgatgtagttgttttcaaaaatacttgtgtcaataatcaggtatttttcagatgggcaacagatccccatcaccctaccctgaaccactttactctcccccaggctccaagcccagggcctctccccatttccaggcctcagggcctgtcttatccagggctgggggtggaggctagagagtgacacagatcaaacttataagttgtcagttgaccatttaatggaagtctacactgaatartcctttgccaagtgaatagccccggaatttgttttgtggtgtaataagggttgccaaatggcttagtttacatacaacagcatgacatatagacggttgcagcgagacatgactctaggcactttatgggccaaatgtaggcagttatcatgattcctatttcagagatgaagaaattgaggccttggtcagtgacttgaaaagtcacatagctagaaaatggccaagattt

SEQ ID NO: 5483 - DNA, 673 bp, Homo sapiens
ctaatgcagatccttccaccaagaaagctaactcctgtgacatgtgtgggccattcttgaaagacattttgcacctggctgagcatcagggaacacagtctgaggagaaaccctacacatgtggagcatgtgggagagacttttggttgaatgcaaaccttcaccagcaccagaaggagcacagtggagggaagccctttagatggtacaaggacagggacgcacttatgaagagctctaaagtccacctgtcagagaaccccttcacttgcagggaaggtgggaaggtcatcctgggcagctgtgacctcctccagcttcaagctgttgacagtgggcagaagccatattccaatcttgggcagcttccagaagtctgtaccacacagaaactcttcgagtgcagcaactgtggaaaagccttcctgaagagctccactctccycaaccatctgagaactcactctgaagagataccatttacatgcccaacaggtggaaatttcttagaggagaaatcaatccttggtaataaaaagtttcacactggggaaataccccatgtgtgtaaggagtgtgggaaggcctttagtcactcatctaagctgaggaagcaccagaaatttcacactgaagtaaaatattatgagtgcattgcatgtgggaaaacctt

SEQ ID NO: 5484 - DNA, 634 bp, Homo sapiens
ttctctagggttcttttcaccctataattctggaaagagagagtgaaatcaacttggggtccggtgtaccctcagatcctggaatcacacccctcaatacyatattttacctgcatcatgtgtgcctgggtccattcccctagggaggtcaagagccctgttgtccaatagagagagaatgtgagccactgaggtgattttaactgaggacatttttctagcagacacaataaaaagaaacaagcaaacttaaatttgataatatattttatttagcccaatatatccaacatattatcatttcaacatgtaattaatatacaaatcatgaatgagattttttcaatcttttattcattctgaatcctcaaaatccagttcggatttgacgcgtacagcacatctcagttgggagaagtggtatgtcaagtgcttattaagagccacctgccgctcgtgacctccaccttagacggctcatgactatagccttcgccatcctcctgaaagggacctgtggcaacccataaaagcttagaatttctgctcaagtgtctgtcatgctgtagagattccaatttccatctgcaaataacagagagccacttcagctctgcgtacgggccgcgtcttt

SEQ ID NO: 5485 - DNA, 716 bp, Homo sapiens
caccaggtggaggtgcaggagacagtactgatgagtgagtacctgggagcaaccctcagccaggtgtgcgcaggccattggtgcaccaccgtagcttgtgctgtctgccggagctcccaagcgggatggagygcctggcgatcatggtgataattgtatgaataaggcatttttattggttgccttcctgtcctcatctcctgtccccactcctggattcctctcccaattcaatgacttgcagtcaactcctcgtctcaaagtctgccttctggggagcccagctgtgggctgcacagatgagaaaatccacccaaatggactccatggccaggaagtgagtgagcccttgatggatagccaaggtccttgtctctgttagagtggattgtggcaaaattggtggttatcagtctgttttgaggggcccatctccccacaaggagaagtgagctagaagcaaagacagaggccgcttcattttaggacagtttccttcctctatccacagctcagcatcagatagaagcctggggcgtttatctgttgagcatgggacgcagcttggacagtggtttgctttcctctctgaaatgcacttttccaaggccaaatcgcagataagcagcttccccctggagtacccctgttttatgcggggtagggagggccgtgggtgcgattatgctggtctggaagcacacattgactttaga

SEQ ID NO: 5486 - DNA, 730 bp, Homo sapiens
aacctccacctcccgggctcaagtgattctcctgccttagcctcctgagtagctgggattacaggaatgggtcaccacacccggctaatttttgtatttttagtagagatggggtttcaccacgttggttagcctggtctcaaactcctgatctcaaatgatctgcctgccttggcctcccaaggtgggagccacagctccaggcccaaaggtgggatattttaaacttgggctagtttaccatcggctcaagaaagaagttaggtaatcaaagcggtaaatggttctctgtctacccaattttaatttccagtactggcttttttttttttcaagggtgaggagggctcaaaagtacagggggaggagatggaaaaagaatggaggggcagggtcaaggaattgatcaacggcataaaacgacctgccgtccctgagctccccctctttggctccagctggcaggagctcaagactgttcaccagttaccccagggcaaaatgaaagaggatcaaatttctgctacaacctactctatccccccacctagtaaatccatcatgtgtggaagagcctcggggccctgcctcccagacctccatcttctcatggtagctgcgtttrcctcgtccccagtgagatggacaccctgggtcccatctgggaccctccctctggtcctccagctggcccctggccccggccctggcccctcctcagactgggtca

SEQ ID NO: 5487 - DNA, 831 bp, Homo sapiens
ttagaataatggcctccagctccatttaagttgctgcaaaagacattatttcatccctttttatgtctgagtactatttcagggtgtatatttaccccattttctttatccacctatattggtcaatgggcacttagattggttccatatctttacaattgtgaattgtgctgttataaacacgtgtgtgtctttttcatgcaataacttctaagaattcatttctttccccattgttccccttgagacattcttagagaatatatgaaattactgcttcagacacctccctagatccttcagtaaaatagaaaaaaawgattcactgaatattccattgagagcctactgtgttctcaggtgcctgttctagcccctgatggaaggaatataggtgggggaagagtcagcagtgacatttgagcaccatccctatgtgtcttttctaattcaaacctcctgtcaaccctgaaggaatatcatagcaagacatatacaaatactattccgtattacagaggatgagactgaggcacacagaggttgataacttgcagagggttgcatcgtttgaggaaaccaaagcagaattgagacctaggcagtgtgactccagagattgcacacttaacagctgtaatgccttggctcagagggatgatagaagatgaggccaaggcagggaacaggaggcactgagtatcacaaagagaggagaagtcctcctatttggcatgtgaatggctttttagtacctacattccaaaaaaggaattgtgagccaatccggggcaagagactattagaggacatctgggcatcaacctcaat

SEQ ID NO: 5488 - DNA, 831 bp, Homo sapiens
ttagaataatggcctccagctccatttaagttgctgcaaaagacattatttcatccctttttatgtctgagtactatttcagggtgtatatttaccccattttctttatccacctatattggtcaatgggcacttagattggttccatatctttacaattgtgaattgtgctgttataaacacgtgtgtgtctttttcatgcaataacttctaagaattcatttctttccccattgttccccttgagacattcttagagaatatatgaaattactgcttcagacacctccctagatccttcagtaaaatagaaaaaaatgattcactgaatattccattgagagcctactgtgttctcaggtgcctgttctagcccctgatggaaggaatataggtgggggaagagtcagcagtgacatttgagcaccatccctatgtgtcttttctaattcaaacctcctgtcaaccctgaaggaatatcatagcaagacatatacaaatactattccgtattacagaggatgagactgaggcacacagaggytgataacttgcagagggttgcatcgtttgaggaaaccaaagcagaattgagacctaggcagtgtgactccagagattgcacacttaacagctgtaatgccttggctcagagggatgatagaagatgaggccaaggcagggaacaggaggcactgagtatcacaaagagaggagaagtcctcctatttggcatgtgaatggctttttagtacctacattccaaaaaaggaattgtgagccaatccggggcaagagactattagaggacatctgggcatcaacctcaat

SEQ ID NO: 5489 - DNA, 583 bp, Homo sapiens
ttcagaagagacaagtgtgtgtacaaattattatgacacttagttatcatacagtggcagaaaggaagatacagtgctttgggaatagaaaagactgtagcatgcagctcacaagagctgttaagttagaattccaaaaaaaaaccagttgtacaaaaattttgccctgggagaagccaaattaacrcaagcatacttatcaacaatgaactataaaaggtacacagtaatccccacaatttcctgagtgtatcagtaagggtttggtcagaaaatcagaaataattctagatatttcaagcaagaagattttaatacacggaactgggggtactaacaaaactgtgcatagaactggcacaagggagatcagagaagaccactgctagctttaaggaagtcaagaaattacagcaacaagaaactgctggcagtactcacagctctgaggtgggtgtttggcaggaaatgtctctggagttgacgcaaaatctcatgcctgcctactggtgctggaaaacaataatacaacttctgcttctgctcagccttccaaatctcatgtgagtgcctacattaccca

SEQ ID NO: 5490 - DNA, 826 bp, Homo sapiens
tttgcctgggaaacatacaaatattacaggcacttttgcacaggcacaaggggtctttttcagattggtatgggttggaacggatgactctgccaatggtgaccgtggccaggggggcaaagtgatgtctccacacctgccgccatggtgagtagaaaaagctctggtcttgcataagcatgtgatgcctggcctgaggccagtcttgagcactttgaaaatggcagagcgaggatacgcattgccacggggacacaagacctgagcagccatcctcgcctcagcctgcccttgcarggttttcagtcccaaaggggtagttcagtaaagccaatgacatgcacattcagatctcaattctaccccaacaaagtcacctcccctcaatgggtagacacccaggcccgttatcaaacacacatcctagaacatactagaaaggaatgctgtttattaagagctgtgtttgagcccaggaagaggttattttctaccacactgaaatgacttgacacagacaaaagaaaatgtttgaaacagaatagtaaggaaaatgtctacaacagaagaaaaatttcttaaagaatgcctgtctttgctactagtatcaatacacttttactgtctacacttatacaacggagaggaaataggagctttctaatgtgttgaagttatgagccagacaagaaagatgttagaattgaacaggcaataaataatgtattaaaaagcaattatttccctctgtctaatggttagtagttgcctgtttccccttgaatgaatctgtttcttaaactatacatcactcacaaaaataaaa

SEQ ID NO: 5491 - DNA, 684 bp, Homo sapiens
  misc_feature (1)...(684): n = A,T,C or G
ccagggcaggacttcactcagtgttccaggaacagctgagacacccaggtcaccacgggctcacgccgctgctgctcctacccggtgcgaaccgccatacgcgccgcgcggtgggcccggaggcactccgcgtactgttgcggaaactctatctcacaaggtgcgcaacactnnnnnnnnnnnnnnnnnnnnnnnnnnnnnnnnnnnnnnnnnnnnnnnnnnnnnnnnnnnnnnnnnnnnnnnnnnnnnnnnnnnnnnnnnnnnnnnnnnnntgcacgtcgcgcaatcctgrctgcattcggcccgcacggtcgccaggagcccggggccgagcaacagcagccaagtgcaaagtgtcaggaaccgcgccatggactgcgaggagagagggacgcgtgcttcgagcctgcctgggcgcagaacggggtccctcggcaggaccctcgccgcgacagcctcagcaggggatcgtcgagcaaaagcccgcaggaatgctcctttctggggccccgccctcccggccgacagcttttaggtagacgtggaggcgactcagatcgcctcgcggttcccgggatggcgcggtcgcccccaacgcgaggctgcctggggcacccggctcttttcctgggcgtccgcggcccagggcaagattccggagagaacgccgcagaccaggggcga

SEQ ID NO: 5492 - DNA, 614 bp, Homo sapiens
tcagctttacaaggctaagggaggaagaatggagggggtggtggaaggagaggcagagagggagagaagggagtacggagtgagccagctccagggaccagccactgaacaaagtgctgcccttgtctcagcctggaatcagacggtatgggttctggctcaggctcgagattcccagtgaaagccacaaagttctatgacttcatcaaaaaygttcccttgcccacagtgccattagctattccacgtgaccacaccaatctttttgaccaaatattctctctcactgattaaactattctactacaaattgttgatgcctttgggcatatacaggatggaaatagcttagaaaaaaaagtattctatttaacaaaactttacagtaatcggtacagtccctcatttagtcaataaacactcggcgaccacatgctatgtgtcaggtcatatgccagctacaattaataacaacttaaaaagtaatcatagctaaacacattgtgcacttaactgtactaaacactttacgcatattagctcatttaatcctcacattaatcctttgaggtacgtattattctttcttttccactattcacaatagacaaaat

SEQ ID NO: 5493 - DNA, 614 bp, Homo sapiens
tcagctttacaaggctaagggaggaagaatggagggggtggtggaaggagaggcagagagggagagaagggagtacggagtgagccagctccagggaccagccactgaacaaagtgctgcccttgtctcagcctggaatcagacggtatgggttctggctcaggctcgagattcccagtgaaagccacaaagttctatgacttcatcaaaaatgytcccttgcccacagtgccattagctattccacgtgaccacaccaatctttttgaccaaatattctctctcactgattaaactattctactacaaattgttgatgcctttgggcatatacaggatggaaatagcttagaaaaaaaagtattctatttaacaaaactttacagtaatcggtacagtccctcatttagtcaataaacactcggcgaccacatgctatgtgtcaggtcatatgccagctacaattaataacaacttaaaaagtaatcatagctaaacacattgtgcacttaactgtactaaacactttacgcatattagctcatttaatcctcacattaatcctttgaggtacgtattattctttcttttccactattcacaatagacaaaat

SEQ ID NO: 5494 - DNA, 614 bp, Homo sapiens
tcagctttacaaggctaagggaggaagaatggagggggtggtggaaggagaggcagagagggagagaagggagtacggagtgagccagctccagggaccagccactgaacaaagtgctgcccttgtctcagcctggaatcagacggtatgggttctggctcaggctcgagattcccagtgaaagccacaaagttctatgacttcatcaaaaatgttcccttgcccacagtgccattagctattccacgtgaccacaccaatctttytgaccaaatattctctctcactgattaaactattctactacaaattgttgatgcctttgggcatatacaggatggaaatagcttagaaaaaaaagtattctatttaacaaaactttacagtaatcggtacagtccctcatttagtcaataaacactcggcgaccacatgctatgtgtcaggtcatatgccagctacaattaataacaacttaaaaagtaatcatagctaaacacattgtgcacttaactgtactaaacactttacgcatattagctcatttaatcctcacattaatcctttgaggtacgtattattctttcttttccactattcacaatagacaaaat

SEQ ID NO: 5495 - DNA, 614 bp, Homo sapiens
tcagctttacaaggctaagggaggaagaatggagggggtggtggaaggagaggcagagagggagagaagggagtacggagtgagccagctccagggaccagccactgaacaaagtgctgcccttgtctcagcctggaatcagacggtatgggttctggctcaggctcgagattcccagtgaaagccacaaagttctatgacttcatcaaaaatgttcccttgcccacagtgccattagctattccacgtgaccacaccaatctttttgaccaaatattctctctcaytgattaaactattctactacaaattgttgatgcctttgggcatatacaggatggaaatagcttagaaaaaaaagtattctatttaacaaaactttacagtaatcggtacagtccctcatttagtcaataaacactcggcgaccacatgctatgtgtcaggtcatatgccagctacaattaataacaacttaaaaagtaatcatagctaaacacattgtgcacttaactgtactaaacactttacgcatattagctcatttaatcctcacattaatcctttgaggtacgtattattctttcttttccactattcacaatagacaaaat

SEQ ID NO: 5496 - DNA, 803 bp, Homo sapiens
acacattggagaaataaaatttattatgaaggatttatatagattgtccaatttcgtgtatctttataatatcaaaagttccataaagagaattcactttgagaataaaattattttcaaaaagaatagcttatagatgttaagtgttttcattggttgtccatagtacacctctttatccaaatatattagcatattgcatataaattactttattaccaagaaattcggaaactgagtatayaaaattatcagtttctgtctcaactattttgagatggcagtgaacagactaactatgatttgatgataaactaaagaaaaatatcacgctttgtcgaatataatcaatttggaattgaagaattaattgtgatgcaattacatactttcttaaaactaaaaaaaaaaaagtcaaattgactatcaaaatgtctttagcagaaatatactcacagctctttttcaaagcaaatgtacaaaatctcctacagccccttgctgtccaagagagtcacgtgacgtaaaacatcttcctcatcacctcggccacaccagttcccaattccatatgctcacctaactgcacccctgtccccaaaggctccagtctccctcaatcttacctgccctttatgcaacatcatttcctccctgaggctctttcttggtctttcactgagctcccaaaatcctagattccaaaaccactctcagcctgttaccattcccaaatccaataagcaaactataggacttatgaactccaaaataaatacctgggtccctaccccaggcactct

SEQ ID NO: 5497 - DNA, 803 bp, Homo sapiens
acacattggagaaataaaatttattatgaaggatttatatagattgtccaatttcgtgtatctttataatatcaaaagttccataaagagaattcactttgagaataaaattattttcaaaaagaatagcttatagatgttaagtgttttcattggttgtccatagtacacctctttatccaaatatattagcatattgcatataaattactttattaccaagaaattcggaaactgagtatacraaattatcagtttctgtctcaactattttgagatggcagtgaacagactaactatgatttgatgataaactaaagaaaaatatcacgctttgtcgaatataatcaatttggaattgaagaattaattgtgatgcaattacatactttcttaaaactaaaaaaaaaaaagtcaaattgactatcaaaatgtctttagcagaaatatactcacagctctttttcaaagcaaatgtacaaaatctcctacagccccttgctgtccaagagagtcacgtgacgtaaaacatcttcctcatcacctcggccacaccagttcccaattccatatgctcacctaactgcacccctgtccccaaaggctccagtctccctcaatcttacctgccctttatgcaacatcatttcctccctgaggctctttcttggtctttcactgagctcccaaaatcctagattccaaaaccactctcagcctgttaccattcccaaatccaataagcaaactataggacttatgaactccaaaataaatacctgggtccctaccccaggcactct

SEQ ID NO: 5498 - DNA, 803 bp, Homo sapiens
acacattggagaaataaaatttattatgaaggatttatatagattgtccaatttcgtgtatctttataatatcaaaagttccataaagagaattcactttgagaataaaattattttcaaaaagaatagcttatagatgttaagtgttttcattggttgtccatagtacacctctttatccaaatatattagcatattgcatataaattactttattaccaagaaattcggaaactgagtatacaaaattatcagtttctgtctcaactattttgagatggcagtgaacagactaactatgatttgatgataaactaaagaaaaatatcacgctttgtcgaatataatcaatttggaattgaagaattaattgtgatgcaattacatactttcttaaaactaaaaaaaaaaaagtcaaattgactatcaaaatgtctttagcagaaatatactcacagctctttttcaaagcaaatgtacaaaatctcctacagccccttgctgtccaagagagtcacgtgacgtaaaacatcttcctcatcacctcggccacaccagttcccaattccatatgctcacctaactgcacccctgtccccaaaggctccagtctccctcaatcttacctsccctttatgcaacatcatttcctccctgaggctctttcttggtctttcactgagctcccaaaatcctagattccaaaaccactctcagcctgttaccattcccaaatccaataagcaaactataggacttatgaactccaaaataaatacctgggtccctaccccaggcactct

SEQ ID NO: 5499 - DNA, 758 bp, Homo sapiens
tccagtcattatatcagcaagcacaaatatccttgttgagttcaacagttcatcagttgatgaagaaattgaggtcagggaaaagaagttgcatggtcaaggtcacttcacacgcttgttctttttcaggccttggaagtatgactcttttaaggtgtatgtttcaaagcatccccagatgtctcaatacaaatacgatgacacacctccctttgtttcccagaaaggcttttctctaactggagtgttttaatagaagcaggcaagaaaccccaatatcatagaaaaactaattagcaagagtggaggtgatccttcaatcccatctgttgtccccagtgccagagtcctaaacagggtggggcaccccaggttttgtgtcagggctacaagatacagaaggtgcaaagattccaaatctcattgytaatgcaactgattgaacaatgtgcagttcctgcctcagcagcacccccaactcaatgcacacctcatcagactcaaggcaggcctgctcctggtcccccagctagccagaggagaaggacagaggggtgaccaaggcctcctgtgatctgggggtgccgttcatgtttgctcatgagggttgaaggtttcttttctatcaaagtgccctgccttggagaccccatgcttgtcctgctttaccttccaaggtctctgattctcagagaggagatctgaggctggcatgctcttccttcctctcttttcccattcatctccactgcacccca

SEQ ID NO: 5500 - DNA, 792 bp, Homo sapiens
cacatcctctatagggtgcagtctttcggggcaagagatcaacttaagcattctaatgatgaatttataaaaggagtgcttgtcactcttcttctcctcagttttcagtcgatctaagaaactccttgaaaattattttttaaacaattgttgtctcatattaaagggtatcagctgtgatttaaaacctctatctggggaaaaatagacaaattccttccacatcagggtagttgaaagaatccatgatttggaatttagagacctgggcttaggtcctagctctactgtttaatagcagggtggccttgggtgatcattatctttatgttctactttctttccctgaaaatgggaatcacattcatgtttacttctatgagctacttataaagaccaaatgagatcatgcacaggcattatcaactgaaaagctttatccaaggataagggatcttcctttatttttgattgactattagaggggccaaagccaacactgagaatcaaaaactcttccttttcatcacyctttgcttcctagattatctttaggtcctcagaggtacccaacctctctccattttcatccatgtatagcatgaaatgggtataactttattcattaccaaagtgtaaatgtctctcgtggggacattttcttagttacaggaaacaaaactttgatctgatttgctaaagttctttgaatgagggattaggggactcatttgaggctggggaggcattttggtttccccaaattcaattgctagggagctgtttgcttgt

SEQ ID NO: 5501 - DNA, 467 bp, Homo sapiens
ggaagtcagaagtcctaaaatcaatgtgtcagcagggctgccttccttctggaggtgctggggggagtccttatccttttcagcttctagaggccactggcattgcatgactcttggtcccttcctccatcatcaaagccaaaagtgtagcgatttccactcttatatccctggccacatcctcactcgaacaccctttctcaaactctcaagtctttgttctttttccctccctttcggaggattcttcaggtgtctcctaaattgctgaattcattttcttgctttgtcagatctactgttttttgttctaatagtgattttaaaatttggttatattttagattccttataatcttttgttaatcaatcctgctcttaaatttctgtctccatctcagtctactattaactcaactctattttatggacaccatagtscagtggttaagggtgtacagtgtgga

SEQ ID NO: 5502 - DNA, 1355 bp, Homo sapiens
gatccttggaaggcatagatgcttcaaaaattattttgaaatgtgaaacttaggggactatttgttcttctagatattaagatgtattttaaatctctaataattaaacagaaagtagtaggcttgcaaagcaagtcagtcacatataaaaaaatagctctgacatagattctagtatattttatgtataaaaatatgttttaagtatattaatatataattgtattatatgttaattatgtatgttatataattatatatgttataggctaataaagttatatattatgtaactagtatataattttatgttttaaaattatgttttataaaataatattttatgcatattttatatagcttagtacatgataaagcattgcaaactmttggggaaacattattctacacacatggggaaaatagtcataataaagaagccatggaagttcttggtataagaactgagttactatattgccactgtaggaatcattcagttgtaagaaaaagtattcaacctaaattctctatttttctaatttaaaaactgaaattccaaaaaacatacatttttattgtgatcatttagacagtttaattgtatatcttatgcttgcttgatagtgacttgagtaggatatttttacttttaatttgctaagtttttttgttacatcaaggaaaaaggaaaggacaaaatgaactgataattactcaaaaccttggctttactaatgatattaaaccttttagatgaagtagatggaggagatacacaaaagaagcaactcataaatcctcatgtggaacttcgtaagtatgagatattatatcattggtttggggagagggactacagttgagccatctctattatttgagaattctagcttcatactaaataaatgtcccagttcttgaaatgaatattaagtctttatgctgacatgaggtatatttaatcaacagtttataaaatataaatttaatttataaagaaatttaatcaaaagtataatttatttgtaaattatgctcttatttctaatagttaaacatttacttattatgtaatctagagccacagaattttgacagttgcatttagaattgtgtatatgtgtgccagaaacgtattatccagaataatatgtacagtacattttaagatatttattaagaattactataaaagtacaatgatgttaatatggtaggtaacaagtgtaaaattagaactgagtcttttttttatgtgatttttatttttttctctttttttggaaagtatgtaaggatggtcatacgatgttctttaattccccctgaagatcagtttaacaaaattgtga

SEQ ID NO: 5503 - DNA, 1355 bp, Homo sapiens
gatccttggaaggcatagatgcttcaaaaattattttgaaatgtgaaacttaggggactatttgttcttctagatattaagatgtattttaaatctctaataattaaacagaaagtagtaggcttgcaaagcaagtcagtcacatataaaaaaatagctctgacatagattctagtatattttatgtataaaaatatgttttaagtatattaatatataattgtattatatgttaattatgtatgttatataattatatatgttataggctaataaagttatatattatgtaactagtatataattttatgttttaaaattatgttttataaaataatattttatgcatattttatatagcttagtacatgataaagcattgcaaactattggggaaacattattctacacacatggggaaaatagtcataataaagaagccatggaagttcttggtataagaactgagttactrtattgccactgtaggaatcattcagttgtaagaaaaagtattcaacctaaattctctatttttctaatttaaaaactgaaattccaaaaaacatacatttttattgtgatcatttagacagtttaattgtatatcttatgcttgcttgatagtgacttgagtaggatatttttacttttaatttgctaagtttttttgttacatcaaggaaaaaggaaaggacaaaatgaactgataattactcaaaaccttggctttactaatgatattaaaccttttagatgaagtagatggaggagatacacaaaagaagcaactcataaatcctcatgtggaacttcgtaagtatgagatattatatcattggtttggggagagggactacagttgagccatctctattatttgagaattctagcttcatactaaataaatgtcccagttcttgaaatgaatattaagtctttatgctgacatgaggtatatttaatcaacagtttataaaatataaatttaatttataaagaaatttaatcaaaagtataatttatttgtaaattatgctcttatttctaatagttaaacatttacttattatgtaatctagagccacagaattttgacagttgcatttagaattgtgtatatgtgtgccagaaacgtattatccagaataatatgtacagtacattttaagatatttattaagaattactataaaagtacaatgatgttaatatggtaggtaacaagtgtaaaattagaactgagtcttttttttatgtgatttttatttttttctctttttttggaaagtatgtaaggatggtcatacgatgttctttaattccccctgaagatcagtttaacaaaattgtga

SEQ ID NO: 5504 - DNA, 1394 bp, Homo sapiens
tgtccatttctaagaatcttaaactattagttggctgtagtgtgaagcattacttgtcattggaaagatggagagagtggccttaaccggaagtggtcagtagaagcaggtgtcattttaagggccaaactttaatctgtcagcaatagggaaacaactgttcaaattatctttgtagataagaacagtgtttcttttttcttttcttttgtttttttgtttgtttgttttgttttgttttgagacagagtttcactcttgttgcccaggctggagtgcaatggcacaatcttgatctcagctcgccgcagcctccgcctcccggttcaagcgattcttctgcctcagcctcscgagtagctgggattacaggcatgcaccaccacgcctggctaatttcgtatttttaatagagacagggtttctccatgttggtcaggctggtctcaaactcctgacttgaggtgatctgcccgccttggcctcccaaagtgctgggattacaggcgggaaccactgcacccggcaggtacagtgtttctttaggtgctggtggtacaccagggaatcagggcagaagctggatcctgcaagagtaatgtttgagaacaaataaatactttcgaaaggaggtcgaaacaaaaaggagtgtaggtgttattactgcagagaagactgaatggagtccacttttcttattagtaacttactaaaaatgatctcaaatgggctccacacactttgccctggccatgaggcaaacttgttgggtttggagaaaaacacataaccctaaattcactatttttgccctatataaaacattaaaataacatgctctgtacacatgctgtcaacaaaagccagctctaggaacctgagtgccagaatgcctgagggagctacagctgggcttagttggctgggattgagctcgctgtctgagggagctcgctctgtctctctcacactggcagtttacaccagccggcagccctgagcagcagtgggtgtaactttttataaataaggattcattgattcattcatattctcaatatttcttgaagacctaccccgagccaagcatggtgccaggcagtggggatgcagtggagagcaaacagccctgcccatgcaaagtgtcctgtacggtgagaagtgtgagctgcacccacaaagggaaagagcccagtgcagcttttgcaaaatgcagggaaggatgctgctagcctcagggtgacctagaactttaagctcatctttgttttcaggagcccagtgcctcccctccacccctaaagaatatctcaaagacgtggattttcatttcagtaagatttaggggtgcatgggcaggcagtgctggaggaactgggaggcaggtttggagg

SEQ ID NO: 5505 - DNA, 724 bp, Homo sapiens
tgggtactgattctcagctaagtcccttccccctctgggcttcagtccttcatgcatagargaaatgttctggggacacttgcagctgccagggcacctcttggattcttgctccagaggccccccttggggaggaggtgcagagggcaggctacaaggcctggatggtttccaggaaatgacagcacatttaaaagcaagtggatgtggccaactgcagctgtgcagacggtgctgcgtggcagagttgcgggtgaggaatggtgggtagcctcttggttttggcagcagcaatgatgctgaggagagatccttgaaccctgggcagggctgagggcaggcctcagaaagactgctcctgctcccagagaactgggtaaagcacaggccttagccacaaggccaagcagtgcatgcagaggcaggcctggcccctgtgccctgcagatggtttcatgcccaggaggtgctgcccctacacccttcccaggcagtcctctctgtcccacctaccccaggacttcccctcacagtcccctcttgccagaacttccactgcgccatctgcccttgtttgagagcactgattttagagcactggcatggggatgggggcagctggcattcagtgcctgcagagcagccagccaggggctggaaagctggcccaggaagggttggtgcccggcctcgatggatggagtgagggcaaggggattctccc

SEQ ID NO: 5506 - DNA, 768 bp, Homo sapiens
aaggtaaagggcatgagcaaagtggtttaaggaatattccagaagaggtttgagagtgctgtctgtgctggagtcgagatactggcagagataggaagggaaagagggtgttgggagcttgtggttttcttagtggaaagaacttgggcattggaggtagagagtcctgggttcaaatcctgaagtggcctctttctgtttctgaatctctatttcttccttggtttggttgatttgagattggaaagaggtaatgtctgagagctcccakcccagagcctcgcacatagagtctggccctcacccgttaacagctcctgctctgattctaccgaggacgggttggacagggagagaggagaggcaggcaaaggagaggagaagctcagagatgccctactgcgaattcattagcactgtgagatggagcgccatctccccctcaaggttttgctgaggtacagaagcatctcaatcagccctacagggactttcaggctccggtgttgatctgcgtgtgagtgttttatacaaagaactctgtcttgcagccaggcctgtaactggggaaatgctgcaatgatctccctcacagggctgatgccttccacctccccaatcacctttcaactgtgtctttgaggcctctctttcccgattgttcagaagcatcttgtgtgtctagataatcgccttcccgggatctgctgaccggcagcatgcagccttgccaaccgggccataatcaggcttttgacatacaaaggt

SEQ ID NO: 5507 - DNA, 768 bp, Homo sapiens
aaggtaaagggcatgagcaaagtggtttaaggaatattccagaagaggtttgagagtgctgtctgtgctggagtcgagatactggcagagataggaagggaaagagggtgttgggagcttgtggttttcttagtggaaagaacttgggcattggaggtagagagtcctgggttcaaatcctgaagtggcctctttctgtttctgaatctctatttcttccttggtttggttgatttgagattggaaagaggtaatgtctgagagctcccagcccagagcctcgcacatagagtctggccctcacccgttaacagctcctgctctgattctaccgaggacgggttggacagggagagaggagaggcaggcaaaggagaggagaagctcakagatgccctactgcgaattcattagcactgtgagatggagcgccatctccccctcaaggttttgctgaggtacagaagcatctcaatcagccctacagggactttcaggctccggtgttgatctgcgtgtgagtgttttatacaaagaactctgtcttgcagccaggcctgtaactggggaaatgctgcaatgatctccctcacagggctgatgccttccacctccccaatcacctttcaactgtgtctttgaggcctctctttcccgattgttcagaagcatcttgtgtgtctagataatcgccttcccgggatctgctgaccggcagcatgcagccttgccaaccgggccataatcaggcttttgacatacaaaggt

SEQ ID NO: 5508 - DNA, 768 bp, Homo sapiens
aaggtaaagggcatgagcaaagtggtttaaggaatattccagaagaggtttgagagtgctgtctgtgctggagtcgagatactggcagagataggaagggaaagagggtgttgggagcttgtggttttcttagtggaaagaacttgggcattggaggtagagagtcctgggttcaaatcctgaagtggcctctttctgtttctgaatctctatttcttccttggtttggttgatttgagattggaaagaggtaatgtctgagagctcccagcccagagcctcgcacatagagtctggccctcacccgttaacagctcctgctctgattctaccgaggacgggttggacagggagagaggagaggcaggcaaaggagaggagaagctcagagatgccctactgcgaattcattakcactgtgagatggagcgccatctccccctcaaggttttgctgaggtacagaagcatctcaatcagccctacagggactttcaggctccggtgttgatctgcgtgtgagtgttttatacaaagaactctgtcttgcagccaggcctgtaactggggaaatgctgcaatgatctccctcacagggctgatgccttccacctccccaatcacctttcaactgtgtctttgaggcctctctttcccgattgttcagaagcatcttgtgtgtctagataatcgccttcccgggatctgctgaccggcagcatgcagccttgccaaccgggccataatcaggcttttgacatacaaaggt

SEQ ID NO: 5509 - DNA, 768 bp, Homo sapiens
aaggtaaagggcatgagcaaagtggtttaaggaatattccagaagaggtttgagagtgctgtctgtgctggagtcgagatactggcagagataggaagggaaagagggtgttgggagcttgtggttttcttagtggaaagaacttgggcattggaggtagagagtcctgggttcaaatcctgaagtggcctctttctgtttctgaatctctatttcttccttggtttggttgatttgagattggaaagaggtaatgtctgagagctcccagcccagagcctcgcacatagagtctggccctcacccgttaacagctcctgctctgattctaccgaggacgggttggacagggagagaggagaggcaggcaaaggagaggagaagctcagagatgccctactgcgaattcattagcactgtgagatggagcgccatctccccctcaaggttttgctgaggtacagaagcatctcaatcagccctacagggactttcakgctccggtgttgatctgcgtgtgagtgttttatacaaagaactctgtcttgcagccaggcctgtaactggggaaatgctgcaatgatctccctcacagggctgatgccttccacctccccaatcacctttcaactgtgtctttgaggcctctctttcccgattgttcagaagcatcttgtgtgtctagataatcgccttcccgggatctgctgaccggcagcatgcagccttgccaaccgggccataatcaggcttttgacatacaaaggt

SEQ ID NO: 5510 - DNA, 591 bp, Homo sapiens
acacacacacacacacacacacacacagacaaagagatagacagaaagaaagcaagagcatgctctatgatgtctcttccggtgagggcactaatcccatcatgagagccccaacttcatgacttcatctaaacctaattatatcccaaaagatatatccctaactctatcccatctccaaacaccagcacactaggggttagggctttaacataggaatttggggtgtggcaggacataagtcagtccatagcacatgatctcccctcaactacaagtcaagtacgattttccccacttaacagaggaagaaagcaacacccagagatgtcaggtccactgagctaatcagtggtaagcctgggcctcaaaaccagaactcctggctccaattcccacartgcctaaaattagtggagagacaaaaattgtctttatcacttctgtcatctccttgtgtcctacagtttggcaacactcataggacaatcccaaggatgatggctttgctttcaacaacttgagtctaaaaatgacaggacagtttctcaaactgtgggaaactccctttgtacctttcccgtaaagcag

SEQ ID NO: 5511 - DNA, 591 bp, Homo sapiens
acacacacacacacacacacacacacagacaaagagatagacagaaagaaagcaagagcatgctctatgatgtctcttccggtgagggcactaatcccatcatgagagccccaacttcatgacttcatctaaacctaattatatcccaaaagatatatccctaactctatcccatctccaaacaccagcacactaggggttagggctttaacataggaatttggggtgtggcaggacataagtcagtccatagcacatgatctcccctcaactacaagtcaagtacgattttccccacttaacagaggaagaaagcaacacccagagatgtcaggtccactgagctaatcagtggtaagcctgggcctcaaaaccagaactcctggctccaattcccacaatgcctaaaattagtggagagacaaaaattgtctttatcacttctgtcatctccttgtgtcctacagtttggcaasactcataggacaatcccaaggatgatggctttgctttcaacaacttgagtctaaaaatgacaggacagtttctcaaactgtgggaaactccctttgtacctttcccgtaaagcag

SEQ ID NO: 5512 - DNA, 591 bp, Homo sapiens
acacacacacacacacacacacacacagacaaagagatagacagaaagaaagcaagagcatgctctatgatgtctcttccggtgagggcactaatcccatcatgagagccccaacttcatgacttcatctaaacctaattatatcccaaaagatatatccctaactctatcccatctccaaacaccagcacactaggggttagggctttaacataggaatttggggtgtggcaggacataagtcagtccatagcacatgatctcccctcaactacaagtcaagtacgattttccccacttaacagaggaagaaagcaacacccagagatgtcaggtccactgagctaatcagtggtaagcctgggcctcaaaaccagaactcctggctccaattcccacaatgcctaaaattagtggagagacaaaaattgtctttatcacttctgtcatctccttgtgtcctacagtttggcaacactcataggacaatcccaaggatgatggctttgctttcaacaacttgagtctaaaaatgacaggacagtttctcaaactgtgggaaactcccttygtacctttcccgtaaagcag

SEQ ID NO: 5513 - DNA, 839 bp, Homo sapiens
attgtggttttgaaaaaggattggttgacatgatctttcagtgaygtagtttagtgaattttatatttagaagttttattgcgtaggggaatgtatctgctttttaagtggcagaattcttagagaagggaactctaaggaactgcctgatggacatttggcaatatgggaggtgaaattaactgaagcctgggctaagacatcacaaacgcagcagtgtagtattttaacaaaatggtctggcttgggagtctgcactcaacacaggttattttcctttttctctttcattgtcttaagaagctttatttattgtttataacccaaaatgtagtcattttttaaagagccaaattcaattaaaatcacattataaaactttcctgtgaccattaggaaacaatttcttcttacactgaatctattacacttacaattagcttattttcacaatattgctttggaaattcataaaccatagttatatgaataaatccctattgctctttactttgaagcatatctcatggagttccctatggaagatgcagcttaattataaatcgattcttataaactcaagtccctggcctcatgactttttatttgaacctcatgtttgaaaacagcattatctctgttcatgttgtctacacattatggcgagtctgttgtctgttacagttagtatccacataggcctctggtatcaaggtttcagttactcttggcattattttgatcgcctaaagttgtaacgtgggcatggaaagtgaattccatgagtgccacatggcctgtatttatgttcaaacttactcttgaaattaaaaatcaat

SEQ ID NO: 5514 - DNA, 653 bp, Homo sapiens
cctgaacccaggcaatggataataygtaagctatgattgcgccactgcactccaacctgggcatgagctatgattgcgccactgcactccaaccttggcaacagaatgagaccccgtctctaaaatataatatttaaaaaaaaatgatagttatctctaagaggtagaattacaaatgattttaattttggcttttcctaaaattctaattctttatgttaagcacaaattatattcataatcagaaaaagggtattaatttttaatgacaggaatcagaggttagaaattcaagtggaaggtacaaagttattaggtattattcagggttctaagcatcatatatgaaattcaaatttccttcagacatcacttccaatcacagcaccaaaaaaagtatgcataataagcttaggaaaaatatgaaaaaaaaaaatctcatctgtcctctggtctatctcttaaggattactatgaaattattttcatcctcctactttatggatgttttgtccatttttgttttctgttacctaggtaatggtatttccagcatttcccttaaaagactgtgaaactaacaatctggtatttctcactgtcgagttttcctgaccttcagctttgagaggccatctccctaagggaaggca

SEQ ID NO: 5515 - DNA, 783 bp, Homo sapiens
gcatttgccacgtgattaaaaatggctcaaaaacgtgattttcagtggctgcatatacagttcatagtgattataccataatttattgaactattgccacagtatatcattgtatttttatttggaccccatgagtttctgtttttaagtggccttcacggggggaagataaatatgtctttagactaatagatttgcacttcatattggctatgagaagaaattgcctgtaattagcatcttcaaattatctacaatctaagttgcttgctgtttaaagattcaaatactagataagaactttttttttgagattctatttttgtagttatgtgcacccaagcccagtagtggagataagaacagtcaaaacartaaaacattaagaaaagatgggaagaggagaaaactgacatttatggagcacatgctatgtgaatgcgcatacattatttcattacgttctcccagccagtctgtgagatagatgttacttattcttgttctgcagaagacaaaactgagctcagagaggttcagcacttgcccaggtagctggaaaatggcagagccagcatttgaacccaggtctctcaaatccaaaacgcaaattcttccgattttatatcatactgcctaaataaaatcaaaccctggatcaaggtgactgctgctgctcttctgccctatattactgtaaagctctcaaaaaaattcagaaagatagtccacaagagcagtgttcccactgcttgggggaccatggagttgagacttcatatg

SEQ ID NO: 5516 - DNA, 722 bp, Homo sapiens
ggaagtaaatttattaaaggagaatacactgctcagatgtggggtattaacactcactggtccccacccactccacttctggacttctgcagagctgctagccctacttgactaataattcccagcagaggggcagtctccccataacctatgacacatcgctcactttcctccactgctcytggaggtggcccccattgggaatcttagctttactggctacatctttagcagagaggcctgggtcatctgtcctccctgtatcttcagctcagccaaacaataaaatgcaagacacaaaacgttgcctttgaaaatgaggcagctggggagaggaacgatgcctttaaaagggcaaaggttctttgggacaccgatcctcaacatctcaccctgcagctcaaagtcaaggcttgccagggttcaagttctcaagtgtgcttcagtggtgttatttagatgtgaccctataggctgaagggcatgcacattagcatattttgtaacagctgttgatgaagatgttaagtcttgctcaggggaccagttgcagtgagaagcattttatgagaacaatatatattgtagacatctgaatatatttccatgagaaaataaggatgaagaaacaaaaaaaaatggtatagtgtccttacacagcagatgaatatttaatacactggagcttatctttaagagaaaaaaataccctttgcaatttt

SEQ ID NO: 5517 - DNA, 779 bp, Homo sapiens
agcaatagcagcatcagctcccacccaccccatcccacatctcaccccaaacaaacacatataggatctacttggtgccctaataaaaccatttattcatttccaagggcactcaaactatcatttcataccaccatctcatttttgtttgttttgaaacatagctttttaaaaatcacttttcagcttgaggtggtcacctagtagttcactccaggcaggctgtaacctgaccatccgtctaatctcctatcaaagatgtctgtcttccagaacacttagcaattatacagctcacatggctttaggcaccttgattatgtatttccaggtgtgtgtttgtttgtcttggaactcctggagagatggggttctgactcatttgtttccaaatagtactagtcatgtctgctttgggcctttttccaatcccacaactgasaaatcatacagctttcaaagctttcaattaactgggaccatttttcttgtcctactgtagtgacaggtgctcttcaaatggtaatcttgattatcagtaagaaaaggatcttaggacttggaaatgtttggttaaaataaacataaaacaggttttctttagaacgtttctaaggctttcatatgctttttccaaatttatttgaccaatacagttttcttttgaggcatcagaattaacatcccccagccactgaaccatctcagaaatgcagatctaagccatagtggggaaataccttgttttagggtaaggaagttctttcctgtacgtaatt

SEQ ID NO: 5518 - DNA, 806 bp, Homo sapiens
actagctggctggggacaaagtcacacttgccattgggtatctggagggccccaagcctattcagtcatgcagcaaaatcctcaggagttcctagagcagggagaacagacacagggaaggaactgctttccttaccttatcctttacccactgctccaaagggctcctttcccctccctcttcctttctctccaagccctggaaatggcctctgcaatgtcatttttaatgtgctgaaagccattccccscatcgccaaaatagccaaagtgatgcctaacatttataaccaggatgtagattttcattccatagagataaagcttaacataaaaatcccctgggaaagggaacctggtatcttagtagaaaatggctgagctcaaatcctcaatgtgagtgctaacagggaagagtatgagtgtttgaaaagcaggaagagagggcaccgcagagaaagaaaaggaacagcaagcgaccttggaaccaggccgatagatgttttttcaccatttgcataagacgtgctattcccccatcatcccacccactcccacctccatcctcttctagaagctgccacatggctattctaaggggacactgctcaaacttgcagtggagaataatggatgggatggggatttgcaggcgagagccatctagagggaaggtgagggagagcagaaggagaggcctgcaggccagggagtgggtggctgggagagagtggcagggagaactggtggaaggcgggatatggcgaaagacacgctcagaggcaagggagctttctgctgaacat

SEQ ID NO: 5519 - DNA, 813 bp, Homo sapiens
gggaatttaattgtgtcactcattacacgggccttatggtcaggacagctcttagtaggtgtcctggggcatttaattcactcaggcagcagagcctaatggttgagggcatggcatctgagggtggaaggctggggtttggggcccagttctgccactttccagatgggtatgtttgggcaagttccttaaccagtgcatacctcagttttcccatgtgtaaggtggaggtaataatggcatgttcctaggttagatgaagtacattgtttcctgttattactgtctagtttggaaggtaaatgggatctatgtgattatttcagcaatcttttgtgtggtatttttacttttcacactgacttcatagctgttgcttttaactcttacaaaaaccctgtgggataaaaatggaaggcatcaattccagctaacaggcgaggaaactgaggctcaacatcacagcatctgtaagtggcagaggtcagacttgagctcagagttggtgttttttgtttgtttgtttttaagccagaggttctcaactgtactccctgctagagtcacctccccttagagattccccttcccctctccagccaaggctgtccctgaagctcttcctccatgggcctttgccttctcccatcgttttccagcaagtcacataggcatctttactttttttagtggagcactacaagggtgacttacccttggctgttttctggtggtcagagtgacttcgtcctattctgtccctgggtcctctgtgccctggaagcacacctgragctggccatcccgagtgag

SEQ ID NO: 5520 - DNA, 729 bp, Homo sapiens
aaagatggacagtgtttagcaggggagcctgaaatgtattttttctaaaggaatgaagagaatcactctcacattctgagtctgctttccttttcagtgkaaatgggattatgtaattgtgtagatacttaaaatttaagaaattgtagttaaatgcacatgattacactgatgattatattcccagtttttccctttttttttttttgagttggaaaggtaatagatggacatagtgaacaattcatagtagaaaagcttgtacactgaaaagtaggctttttcctactccaggtatccagaacctttttttgagacagtcattgtttacagctgtttctgaatctttccagaaaaaatgaattcttctgtcagcacatacatatgtttatacaaaagagagtatctctatcttctgctctgtgcctagatttttttcactttatgtgttatgatttattccaaatcactacacatagatcagcctcattcttaagctttattaaagcatactttacatactataaaattcatggccaggtgcggtggctcacgcctgtaatcccagccctttgggaggccgaggctggtgtatcatgaggtcaggagttcaagaccagcctggccaagatggtgaaaccccatctctaccgaaaatacaaaaatgagccaggcatggtggcgcgggcctgtaatctcagctactccgaaggctcaggcagagaactg

SEQ ID NO: 5521 - DNA, 729 bp, Homo sapiens
aaagatggacagtgtttagcaggggagcctgaaatgtattttttctaaaggaatgaagagaatcactctcacattctgagtctgctttccttttcagtgtaaatgggattatgtaattgtgtagatacttaaaatttaagaaattgtagttaaatgcacatgattacactgatgattatattcccagtttttccctttttttttttttgagttggaaaggtaatagatggacatagtgaacaattcatagtagaaaagcttgtacactgaaaagtaggctttttcctactccaggtatccagaacctttttttgagrcagtcattgtttacagctgtttctgaatctttccagaaaaaatgaattcttctgtcagcacatacatatgtttatacaaaagagagtatctctatcttctgctctgtgcctagatttttttcactttatgtgttatgatttattccaaatcactacacatagatcagcctcattcttaagctttattaaagcatactttacatactataaaattcatggccaggtgcggtggctcacgcctgtaatcccagccctttgggaggccgaggctggtgtatcatgaggtcaggagttcaagaccagcctggccaagatggtgaaaccccatctctaccgaaaatacaaaaatgagccaggcatggtggcgcgggcctgtaatctcagctactccgaaggctcaggcagagaactg

SEQ ID NO: 5522 - DNA, 637 bp, Homo sapiens
agtaatattagggaggctttgagtgttgttgctgtttttcacagatgtggagaggggaatgttaattcttccttttaggaacacattccagattttcattttctttgagcaatttyttttaatttggtgaatggaattttttctaaattatgctattaagaagtttaaacttttaagtagacttgaggagtaagagtatgttttaggaaaagaaagtagaggctagagactggaaagtcattggaaagctatttcaatattattataagttggatctgaggtaagactttaggaataatctaaatattgttgctgtggtgttcttacagagcttggtcagatgtaaactactaatatcttaatacttacattaagaattaatgtaaattctgtccagttcagattattttattttatttttgatacagtctcactctgtcacccaggctggagtgcagtgatgtgatcttggctcactacaacctccacctcccaggttcaagtgattctccctcctcagcctcctgagtagctgggactacaggcacgcgccactgacttggctaattcttgtatttttagtagagatgggctcttgccacgttgacgaggctggtctcgaactcctggccacaaa

SEQ ID NO: 5523 - DNA, 815 bp, Homo sapiens
cttgagcccaggaatttgaggctgcagtgtatgtaccatgatcgcaccactgcatgccaacttgggagacagagcaaaaccctgtctcaaaaacaaaaaacatctattttttttgcttgtactttgatgaacatcctcaatgatatttttaaaaacacatttcaggaagctctatgcagaactgtgccaaggcatcgtggacatagccatttccagtgtcttcccacccccagatgtggagcaacctcagacccagccagctgccttcatcaagctgtgacagagggcactccctgctgccttggaaaaagcacggggtcctgctccagggaatggtgaaatgactggattgctctttatccagcccacagcaggggaaagaaaggcaactcgcaaagawgagatggaagaaggcacgtgagcagaggaggcagctcccaaagagagggctgctcagggggcttcccagatgtagctctcagcagtgctgttgagacttttgaaaacaactttggtacacaaaggcagctttgtgagcagagctccttcccctctccccgggaacggcagggcactgggacctctggtcggtgcctcccacccactgcagccctagtgccttagctccatgcccggctgcagccccactgctctggactatggattggacgtcagagcatattggaggttgcctgtgtgttccccacccatcccttcggtaacactctgccacactaagctctgtacaagcatgcaccaacagtccttagttttgtgctgtgcactggcctctcggcaaaggtggtttccctcat

SEQ ID NO: 5524 - DNA, 754 bp, Homo sapiens
ccaatgtacaatgttcactaagctataacaagaaatgagacaggctgggcatggtggctcaygcctgtaatcccagcactttgggtggccgaggcgggcagatcacgaggtcaggagatcgagaccatcctggctaacacggtgaaaccccatctctactacaaatacaaaaaattatccaggcgtggtggtgggcgcctgtagtcccagctacttgggaggctgaggcagaagaatggtgtgaacccaggaggcaaagcttgcagtgagctgagatagcaccactgcactccagcctgggcaacagaatgagactccatcaaaaaaaaaaaagaaatgagacatcaagagtctaggaattctatttttaaaaatcaggacagttggggaaatgtgaactaatgactagatatttgatattaagggattcttagatgtgataatggtgtaaagtatgtttttgtttttattttttaagagtccttatcttttgaagatacatactgaaatatttccaagtgaaattctacgtcttggttgtcaagggttggatatgggggtaggtagagtgtacatgtaacaagattggccatgagttcgtaattgttgaaatggatgagggatacatgggacctcatcatactattttcagtacatctgcatattattggactgtcccattataaaaagctataagcatctggaagcttataagcaacattcatgtgcaacagacatgaaggaaaagtcactt

SEQ ID NO: 5525 - DNA, 754 bp, Homo sapiens
ccaatgtacaatgttcactaagctataacaagaaatgagacaggctgggcatggtggctcacgcctgtaatcccagcactttgggtggccgaggcgggcagatcacgaggtcaggagatcgagaccatcctggctaacacggtgaaaccccatctctactacaaatacaaaaaattatccrggcgtggtggtgggcgcctgtagtcccagctacttgggaggctgaggcagaagaatggtgtgaacccaggaggcaaagcttgcagtgagctgagatagcaccactgcactccagcctgggcaacagaatgagactccatcaaaaaaaaaaaagaaatgagacatcaagagtctaggaattctatttttaaaaatcaggacagttggggaaatgtgaactaatgactagatatttgatattaagggattcttagatgtgataatggtgtaaagtatgtttttgtttttattttttaagagtccttatcttttgaagatacatactgaaatatttccaagtgaaattctacgtcttggttgtcaagggttggatatgggggtaggtagagtgtacatgtaacaagattggccatgagttcgtaattgttgaaatggatgagggatacatgggacctcatcatactattttcagtacatctgcatattattggactgtcccattataaaaagctataagcatctggaagcttataagcaacattcatgtgcaacagacatgaaggaaaagtcactt

SEQ ID NO: 5526 - DNA, 775 bp, Homo sapiens
cagtgaagaaatatcttttacctgtgataatatcttcaatggcaccatcttttccctcatatacatgtctgttatctttaacttgtcgtcttcttaattctgcaattaactcttgctgctgcctctttgatttatgagaaggagactgagaagaaagaagggcagagattagtgaggccagcacccattaggagtttgtgaaaatccaaaatgtgcctgagcattatgttactaataagcagcttcggccaaaaacacacacacatcccacattctgctcarttgcagagaactcaagcttctgggaaggaaacaaaaacttccactgacgaacacacaaaacttcacctggcagcaacaagaaggctggagtctacggcaacaagaggcaactggtaatgaccatagatgtcttaaactgtgttgccaaggatcacaatgaagaaaactttggactgccagcctttatgctctttacctactaacgaggttgccctccatgaaatgttccctccattcctgctagcaagtccctccagctatcaaggccagcaccaatgggcatctgcataaagccttctctggatgctaagccctctggtcactgggtcatctggtgtggcctctctgtatatccaactaagttccagatgtctatacgcttggatatgctacacaaacatgctcttagcctcattccagtggttgcagaacaaagtaatcaatgagcatatttccatttgccaagtgtccaggcaccagaaggaagtggtca

SEQ ID NO: 5527 - DNA, 791 bp, Homo sapiens
tttttgagttaaggtactgacagttctaatgaaacataaatacaagagagtaacatgtatcttataggtatcccaagcttaccatgacacagtggttcctaccacccagtctggagagcascagatctggactcaagtccaggacccagaagtgataagctgtgtggccccaatcaagctatttagtgtctctgagccttgatatgccaggagcccctgcctcatctgattattataagaagcaatgcatgcaaagcacttagtactgcaccagacagatagtaggcacttcactggtgggggataccaaacaaggctgttctgagagtgaaatgagttaagatctatattaaaaagtgcttggaagttatgacaagtttattcattgcctctttctgtgtttggggtcccagtgatgccattatcctcagagtgcccaagtcagatacctggaccattcccaacttatttctctctcgctttaccctatctttcctgtctcccgccccaaaccacttcaagtcctgttgactttgcctccctactgtctagccttgcttcccctcatagtctttggaccttatcatgggcccccaagctccttgttcctcttattcacagctgttttcacaatttgtgtttttctatttatttctggcactatatgtttcttccccactagtagaccagatgttttcagagtcagggactctgttttgctcaccattgttcatccccggtgcctagcacagtgcctgttatatggtaggtactaaataaagattcttggg

SEQ ID NO: 5528 - DNA, 702 bp, Homo sapiens
ggggagcatcctctgagcacgcccaggacctcctggttgccctagcagagcactttgtctgctgcctgcccgtatcacccattagcacatgaacgtatggaggacagggaccatatattcatattagtctttcatgtcttccactgagcttgtctcagaagaggaagttagtacttttttagtcgtgggcsagggagtgagtgaatgaaaccacaactccccactaacactgtagacaggaatttgttctgtatgggagcatctcatagagagtagcacttcagaatagactgcaaatcagcatggtggagagcagagaaacagccctccaggactgcaaatacagagcacccaggcctgggagatgcagtgaggtggggcattgggggttaaacagtctgtgctgggtgatgagagcaggacctccggtaagtctgaaacttaccttctcctgggagagacggacacaggcgatggacaaatgagcaaaacagatcaatgtaaaataattacagattactgtaagagttttgaaggaaacaaacctgggaatttgaatagtatggtcacaaaaagcccatctgaatagtgttatttaaaaggaaaagatgagaaggagccccatgtgaaaagctggaggaggagcaatgcaggcagcagacacagcatgtgcaaaggtccagctgctgacttgtgtgagga

SEQ ID NO: 5529 - DNA, 847 bp, Homo sapiens
ttttaaaaacatgtttatttggcctttctttttggtagaggagacactgaaggcctgatttttccaggaagatagggaacaagagggtgatggtctaatggccacactgaattgaggtaggtgggaagaactaatagatatagatattaagaatttgcaaaagaaagcaggtagtttttggcaccagagaagggaatagaagacaagtgagaagttggtatgccatgtgttcctattcaatgcagttctatagtctatggcagggcactcaggagacagaagccggagggtgacttatggcaatgaaatacwcgttgacttagtaatgcccattgactttgcatgggacaggctgtagagggctacagtagatgatgatatgatactctttcatatatgtgtacacgcagagacacacacaattttttgttattgttccaaactaaattatatgttatgcagtaaatatagagaaaagattcctggttcagaccttaccagcatgaattactttgcaatcattcctctgtgactgatgattcatttttatcatcttccaaaaaacagcaaccatgcccataccctattgagacaaggctaagggtatataagagtatctgccataccattccccagcctgggcctaatccaaggatgcaagccactcccaatgtggcatttcataaaaattgcatgtgacacatggaagcccctcattagcaggtggtcccattgaccagaatcccagcacagagggtagaaaaaaactgcaaatgatgcccctgcttcttgggtatggttttccagaagaagcaaaagctgtcattagccagttgattcctttgtg

SEQ ID NO: 5530 - DNA, 847 bp, Homo sapiens
ttttaaaaacatgtttatttggcctttctttttggtagaggagacactgaaggcctgatttttccaggaagatagggaacaagagggtgatggtctaatggccacactgaattgaggtaggtgggaagaactaatagatatagatattaagaatttgcaaaagaaagcaggtagtttttggcaccagagaagggaatagaagacaagtgagaagttggtatgccatgtgttcctattcaatgcagttctatagtctatggcagggcactcaggagacagaagccggagggtgacttatggcaatgaaatacacgttgacttagtaatgcccattgactttgcatgggacaggctgtagagggctacagtagatgatgatatgatactctttcatatatgtgtacacgcagagacacacacaattttttgttattgttccaaactaaattatatgttatgcagtaaatatagagaaaagrttcctggttcagaccttaccagcatgaattactttgcaatcattcctctgtgactgatgattcatttttatcatcttccaaaaaacagcaaccatgcccataccctattgagacaaggctaagggtatataagagtatctgccataccattccccagcctgggcctaatccaaggatgcaagccactcccaatgtggcatttcataaaaattgcatgtgacacatggaagcccctcattagcaggtggtcccattgaccagaatcccagcacagagggtagaaaaaaactgcaaatgatgcccctgcttcttgggtatggttttccagaagaagcaaaagctgtcattagccagttgattcctttgtg

SEQ ID NO: 5531 - DNA, 847 bp, Homo sapiens
ttttaaaaacatgtttatttggcctttctttttggtagaggagacactgaaggcctgatttttccaggaagatagggaacaagagggtgatggtctaatggccacactgaattgaggtaggtgggaagaactaatagatatagatattaagaatttgcaaaagaaagcaggtagtttttggcaccagagaagggaatagaagacaagtgagaagttggtatgccatgtgttcctattcaatgcagttctatagtctatggcagggcactcaggagacagaagccggagggtgacttatggcaatgaaatacacgttgacttagtaatgcccattgactttgcatgggacaggctgtagagggctacagtagatgatgatatgatactctttcatatatgtgtacacgcagagacacacacaattttttgttattgttccaaactaaattatatgttatgcagtaaatatagagaaaagattcctggttcagaccttaccagcatgaattactttgcaatcattcctctgtgactgatgattcatttttatcatcttccaaaaaacagcaaccatgcccataccctattgagacaaggctaagggtatataagagtatctgccataccrttccccagcctgggcctaatccaaggatgcaagccactcccaatgtggcatttcataaaaattgcatgtgacacatggaagcccctcattagcaggtggtcccattgaccagaatcccagcacagagggtagaaaaaaactgcaaatgatgcccctgcttcttgggtatggttttccagaagaagcaaaagctgtcattagccagttgattcctttgtg

SEQ ID NO: 5532 - DNA, 1127 bp, Homo sapiens
actaacttccttctgtttttgtgcattgctgagattgagtttcrgtgcccaaatcagtagtacccatgttaattcgccatttgaattacatcgaaaacccaactctgccacatactatctgtatcaccttgagaaaaccacttcaggcctctcctttccccagcttcagagttgtgtccgacctagttaatgcccattcaaatgggaagaaagtgtaaaaatcacgggagctctgactgttaggcagttattcattctcgcccttcacaaccacacgctggctggcaggcactatctgtatctctctgagtgtctgatgctgtgatctacctttttgccagtcgttctctctagtttgaagcacagtccatgaggagtcttcactgtcctcaccactagctcttggctggctgctttcctttcgaccgacctttcttccttctggatcttctcaggcaggtccactctccacctgtgactgcctgaactggagcataatgctggtgagcagagctcatatggaagcttccagaatgactgttgtttgacatctcattaacctccacttaatcctgccttccctggaagcttgatgagtcaatgctgctggtggaattgcatcaaacccaagatgggtgggaattgcattccacccatcagaaggaagatgcagggcggcctggtcttcaaatcccatgagccatttcttgcctaatgggaataggcagctctgagctgcaaaacaaaactgtgcatggctcactcaactgctacttctcttcactttatttctggccaggcatgatggcacacacctataatcccagcactttgggaggctgaggctggaggatcacttgagcccaggagttgtagactgtcttggaccacatggctaaatcctgtctctacaaaaataaaaataaaaaaattagctgggcatggtgcacgtgtggtcccagctactcaggaggctgaggtaggaggctcgcttgagccagggaggcagaggttgcagtgagccatgatcaagccactgcaccccagcctgggtgacagagcaagaccctgtcttgaaagaaaaaaagtgttatttcactttttcatggattcctttcccaggaaaa

SEQ ID NO: 5533 - DNA, 585 bp, Homo sapiens
ctagaaacacttatcctgggagcacaaggaaggtttgttgtttcccatggaaactgctttctggtctgctggggcaggtagaaagggcatggcctgtttaaggatgggatgtggggagccagggcctgctgacaccctgtctgaggcctcgcactgtgccaggtgcagggctcaaggctgagcagtgggcagggcagccctgtcctcctcttcctcttgtcctctggaagcctcagagttcaaaagcaatttctggtcactaggctgacgccatgccataccaggggctggggacagtggttcctcttccttcctcgggtcctccttgcctttggccccacgaagaccaacttcttgggcaggagacaygggagggagagcagattttgcaaaacaatattacgtcctttatgccactaatccatgaacagacccaggagctggtggggtagcttcatgataactaatcagggtcctgaggttaaaacacttgagcacccggccgcacggcccccaagggaagagtagggaccagctccagcatccaaaccagatacctgcccccagaggtcactcaaggagaga

SEQ ID NO: 5534 - DNA, 1107 bp, Homo sapiens
ggaattcatagcagccacgaacatccgagcaaaagaattcaagcggaggttttaagcagagaaatgacatatgtcctgctttaacaggacacctggccaatggtgtggagatatgtcatgccagcctcctcctgttttttgttgacaaccctcgtgacctttttccctccccactctccctttccactctgaccaagagtcaggactaaaccctaccccctgggcactgccctctgcacatgtgttaagaaggtacacagagcatgtgctgagatggtgcacacagcgggtctcagggagagagtgcccttatctggcatctgcccagccccaaagactcggttttccataattgggatggccacttgaatagaggaaggtagaaggaagattgcaggagagtctgaaagagcttcctgcctggatgcctcatcactgtcctctggatccaatgtcctgctggttaatggtggcagtgctagcactgtgaatgggaggcggggaggaactctggattcttcttattcccctggttggccctttctggagctgctgtgagtaccaccccaggggggcaccattcatgctgtgtctgtttccacyaggagagtttcctcatggcagtctagtttccactcttcctccctttctctaacgggtgccacacctactttggaacaatctgaacagccataaatagggactccagattcaggaatgcagagcttcatgtagcaagcatccaaggttccatcctatccggccaagaagcagctaatcactggcctgcagggctgtcctgtctgcactcgggtggtgtgtgcaccaaggaactgctgggcagattccacttgcaaggagggagggctccagtgcctggataccaagatctgggctctatatgcccttgccatctgaccctgactagaaggagctagaagtgcactgtgctggaccaagggaggccagtggctccagctgagaggttgacagcaagaagcccaccaggctggcagcacagcaggaagagctggcttacacaggccagccctataggtggcccagttatcacctcccagatgctagtcactgagctctcaggaggca

SEQ ID NO: 5535 - DNA, 1107 bp, Homo sapiens
ggaattcatagcagccacgaacatccgagcaaaagaattcaagcggaggttttaagcagagaaatgacatatgtcctgctttaacaggacacctggccaatggtgtggagatatgtcatgccagcctcctcctgttttttgttgacaaccctcgtgacctttttccctccccactctccctttccactctgaccaagagtcaggactaaaccctaccccctgggcactgccctctgcacatgtgttaagaaggtacacagagcatgtgctgagatggtgcacacagcgggtctcagggagagagtgcccttatctggcatctgcccagccccaaagactcggttttccataattgggatggccacttgaatagaggaaggtagaaggaagattgcaggagagtctgaaagagcttcctgcctggatgcctcatcactgtcctctggatccaatgtcctgctggttaatggtggcagtgctagcactgtgaatgggaggcggggaggaactctggattcttcttattcccctggttggccctttctggagctgctgtgagtaccaccccaggggggcaccattcatgctgtgtctgtttccactaggagagtttcctcatggcagtctagtttccactcttcctccctttctctaacgggtgccacacctactttggaacaatctgaacagccataaatagggactccagattcaggaatgcagagcttcatgtagcaagcatccaaggttccatcctatccggccaagaagcagctaatcactggcctgcagggctgtcctgtctgcactcgggtggtgtgtgcaccaaggaactgctgggcagattccactkgcaaggagggagggctccagtgcctggataccaagatctgggctctatatgcccttgccatctgaccctgactagaaggagctagaagtgcactgtgctggaccaagggaggccagtggctccagctgagaggttgacagcaagaagcccaccaggctggcagcacagcaggaagagctggcttacacaggccagccctataggtggcccagttatcacctcccagatgctagtcactgagctctcaggaggca

SEQ ID NO: 5536 - DNA, 806 bp, Homo sapiens
aatcagaatccactgtatttggctgatatttctcctgaatccttaaacttaggtttcctcctcctccctcttttattttcttaccagtcatttttgaagaaaacagggtcatttgtcctgtaaaattcccatattctggattttgctgattatattcccttgtgggtattgctaataggtgcctctaagctgttagtttcagtattttaagattattttccagtttttactttgaatgtaaatctcaacatgtcttcatttttctattcaagtaatttaaatctctattcaagtccaatccaaaatctacctttttcttgccataccagtcaatcacttttgcagtattttaaaagaagattgcacatgaaaagattgcttttccacttgttcctagacctcaaagagagattaattgaaagacatatactgtagctcrtgtcctaagaaagttgatctcaccgaagtagagggtagaatggcgattgccagagactggggtggttaatgtggagggagaatgggaagatgttggtcaaagaacacataattacagttaaataggaggaataagttcaagagacatactgtacagtgtggttaccatagttaatggtgatatattgtatttttgaaaaatgcagagtggatgttaagtgctgttatcacaaaaatgataaccatgtgaggtaatccgtttgttaattagctaactattccataggtgtatatacacaattgtctgtcaatttttaaataaaacactttttaacagaaaaaataggagcttaatcaataaaaaattt

SEQ ID NO: 5537 - DNA, 725 bp, Homo sapiens
tcccacctcagcctcccaaagggctgggattataggcatgacccactgaactccgccctccgccactttttctttcttgaaactgggtcttgttctgttgcccaagctggagtgcagtgttataatcacagctcactgcagcctcaacctcctgggctcaagctgtccttccacttcagcctcccaagtagctgggcctacaggcatgtagccaccaaacctggctaatttttttattttttattttgtagagataaggtctcactatgttgcctaagctgatcttgaactcctgggctcaagaaatcctcctgccttggccttgaaamtgttggggttacaggtgtgagccactgtgcctagcctcacctactttttctaaatgatttaagataatcattttaccaaaaaaaaaaaaaaaaaaaaaaactacacacacacacaaaagtggttttataataaaaaccacaggatcactaggaccaacagctaacaacatgggatgaaagaccaaaatttagcagtaagggggaattggaggagggaatggagtgagggcaaactatagtattgaaaccctatttgaggaaagccacagaaattaagcatgagtacttagctccatgtttgctagcagtccaagtaaagagtagagcagcatgaatgaaatggctcccactggaaggaaacagactagcttttagaaggcataatctttcttgggg

SEQ ID NO: 5538 - DNA, 810 bp, Homo sapiens
aagccagagggggtctggaacgccctttctcctctggtcagattgggaacaattcataatgagcggggctaagacacagaacagcagagaggcaggaaagaagaaagagaccaaggtgcgaggagcggacagggaaagagacctcaacatgaccagggatgggaggagagaactccattacttagaaacagtggctgctatgctgggaagtgtggactgttacagtgggctctaattccaggaggaacaaaaagaccccgcatatcaccatgagtcagtcctctgagtcgccatgacccatgaccttgctaaacaagtgtggggctgtcacagccttaagcagcacatctcaagtctcacattctccagtgctaagaaaacagctacacagacagaatgctaaggagagctcagaagtagaaaacccttaagagtccccccttccttagataggaaaactgaggcccagagaggcaaacaatgggtcagtatgtgtgtctaaacttatctaaacatagaagaggtatagtaaaaatacggtattagaatctgatgggagcaccatcgtatacgcagtctgtagttgaccagaacattggtatgcggcacatgactgtagatcttctcattaataataggcarcctggtcaggtgcacgaagtctagggttcagaatccaacaggctcaaattcaagtccagctcagccacgtggctgagtgctgtctgaacctcagcgtcctcagctgttaaacagaggtaaccatccccatctcagcagctttgggaggaaattaaatgagatatattg

SEQ ID NO: 5539 - DNA, 682 bp, Homo sapiens
tcctcaggtcacacatgctcttgagcttccaaagtaaacctccctggtagtttaccagataggtcttttgtttgagttaaagatagccaaactcaaatagcagcaccatgtaaaataagccatgttcttggatttgttataaaagtatgttgaaaggaggaactcctggatgagaagaaaatatgctggatgtcaagagcctaaaagaggtgctggaaaggaagtatccagtgtggtccaatggagagagtgacctgagaatgagagcacagttcctgtttggtgggcagacaacagtgatcccataggcctcytaagcccgacaaaaatacctctgaaggacacctctctgccctgatcctgtattcatcaagcaaacttccaattttaattacattttccaatgactctgataccagtaagttgccagaaaacagcaggacaagcattatgatttgtgtggcaaggacatgtcctgttatcaattggtaaatctaacattctggggtgcatcattctcctgggtcattgaagagtcatgatcataagtatgttaatgtgactttccagcctcaaagaattgagacgagacactagcccatcatgatacctctccaaagagcagcaacgcccggagctcatgcctgacgttttactcaaagttcagtgctctgtggcatgc

SEQ ID NO: 5540 - DNA, 654 bp, Homo sapiens
ctgaggggcctcattcccagtgcatggcacagtttacacggttttgtcagcagcagatgcactggagacacattgccacaaactccaatccctggcctcctggagctcacatcagccagtcctaccttcttactgggtagatggggaaactgaggcccacagagaaaagagacttcccaatgccatcagattattagtgaagaaagactgacctcaacccagactggcaaattcccaacggggttgatgggcaaagggggacgatgacagtgatggcagctcacctccactgcacacctctcccagtctagrtcctgcaacctccaaaagccttgctatcaagcaggtccttgccagcccctcctatccccaggtgcttctgggaaattctcggtaaactgagcaatgcttgcaagaggggtgttcattcagccagtgtgcaccgaatgttatgccaatgggctgtgccttggcaccaggaggatggagggctgactccctacctccctgagcctcaggattccagcagtatgattgggagggtgactgggttggactgtcaggaagacctcggagctctaagatctatgcctctctcctcccctgccagactgtcagctccatgacgcagacacccagtctcttgctcagagg

SEQ ID NO: 5541 - DNA, 698 bp, Homo sapiens
ttttgaaggacgacacataagtaaaggaaattattgtcggaagtgtgagtgaggtaaacaagagcaagaccacatgtgcaaatccaaacaacaaatttcaatatctttccaaaagccaaaaatattcatacggatgaaaataaatgttaattcaaaaataaactttgcaagttgacaataaatcacttgctatttatagtaaagacaggagtttttaaagctaaagagaaaattgctcttccagcactaaaagatgcttatcagaatgtgacaggacaggggttacacattcaaatgtaacaagattaggctttgaattcccaaagtagaaagaatgtgttcggcagaaatggtttttacgttgcctgttgggctgcttttgaatcaattctgtttatctgtggcatcagctgtggttctgygactggagatttttagttagagaaaaaatcagaaatactgaattctagagttttcttggtggtaaaatgcaatgcaaaatagtctttattatacacaggtttgacctaactttaattaacttcaatataattataggatgtgacttttatacttgattttaaggtttgtgctaagtgagaaaaactctataaatatactaattgatacttaaatcatttattatagaaaaaatatccattctacattcacatcacaatatttaatacttagttttt

SEQ ID NO: 5542 - DNA, 427 bp, Homo sapiens
tgatttgcacatttatcttcttaaaggaattgcccaaactccttagtctggcattcaaaggaccttaataatcttgtggcaatatatgtttgtttttgacctcttcttactttctatgtaaactcttttattggtcatggtggctgacttgctgtcacggtgcctgacttgctgctccytaaagctttcttcatattattgcaccacctgaattgctatccttttcccagctcataggagtccatccatttttcagggtagggatggtggttggtcactgttatgtctgacccacactatgagggctagtatatatttgttgaatagatgaatacttgttggttagccttctcttggagttcagattcattagctactccttatgtctagaatattatcgagtgcagtcaaaagcatcaccatccta

SEQ ID NO: 5543 - DNA, 818 bp, Homo sapiens
caccttttttctaggctcagttctctcatccatacaatttggaggctgaattagttgttctgctgtccagggccccctttcactctaaaaccccatgactgggtgagatgtcttctcccacttctggtttcctcctgaccctgcccaatactctcggctccccaggcaaggctcatgttcagctggtcaggaatgctgcacaaccaacagtgacagagcagccctgatgcacagagctctgtgaggggcacaaaaatagacgtgacctgtgcctctcccaaatggaaattaacaaggtgaactaacatggagaagtaacacaggaaaaggctctaacgcagacgtgatgacaagcggaaccagccacaggggaaggccagctccccgcgacaagggtgccgtgttcaagaggacaaggaccacggcctggctgtgcccaccttcarttcctcaggaatgtgcttctcttctggcaacttcctcacttccggcatggttgtcaggaacagaaactcctgtttggcactgtacactggaagacagagaggttgaatgtcttctctaaaaggaaaaggcacacaggtggatgggacagaacagaggccccagaaatagaagctctcaaagatgcccaaatgccttttgacaaagccataaaagccattcagcggaggagggcagtctgtccaacaaatggtgctggggcacctggacattcacacacggaacaaaccttgatccaaacctcaccccttattcaacaatgaactcaaagtggatcacagacctgaatgtgaaacataaaaccatcaatcttt

SEQ ID NO: 5544 - DNA, 1332 bp, Homo sapiens
  misc_feature (1)...(1332): n = A,T,C or G
tgaacagaaactgtaacactaaaaaaagtaagtgttgctttaaacagcaactcacgacaaccatgctcttcctaggggctccagtggcaggagaaaccgggaaaggcaggtaggtgagaagaacatgcacaccactgatgggggttctgaggctggccctgtcccagaggacagagctgaaaggagcagcccgggagcactgaggccaaggcttctccacgcactttccaggaaatggaactccccaccgtggaactgccgtgtctgttatttcctggtcttgacacttcacaatgggcttctggttcataatcaaaaacaccgtgaacgtgtgtgaaataaactccaacatgtgagaarccctttatggccacgagcttagaggggttcctgtgctgcccaagatccaggctccgggacacactctctaaagcacagtgctggaagggcaggctccaggggagaggcctacaccaccccagcccagggnnnnnnnnnnnnnnnnnnnnnnnnnnnnnnnnnnnnnnnnnnnnnnnnnnnnnnnnnnnnnnnnnnnnnnnnnnnnnnnnnnnnnnnnnnnnnnnnnnnnccttgattctcctggacacaatctcttcctgtgttttctttttttttttttgagacagagtctcgctctgtcaccaggctggagtgcagtggtgcgatctcagctcactgcaacctccacctcccaggttcaagcgattcccctgcctcagcctcctgagtagctgggactacaggcgcatgcctggataatttttttttttttgtattttagtagagacagggtttcaccacgttggccaggatggtctcgatctcctgaccttgtgatcctcccgcctcagcctcccaaagtgctgggattacagtcatgagccaccgtgcctggcctcttcctgtgttttcttataaattattttcttcatatataaattcttactttttacacaattgacatccaaggtacctgccaccactttaagaaaaaaaatttccagtatagttgaagcccctctgtagcctttctggtttgtatcagtcttcccaggagtcactgatctcctaaatttgatgtttatcctcaccaaggtgctgaacttatataaatgttatcttgctgtaaaaagcatcctgcttgtttcactcaacatcatgattttaaggctcgtctaacttcatgcaaatggttcattcattgtcactactctatacatttgatttctatgaataacacagcatttattcatctcttgtcttgttaaaggacatctgagttcttaataacccttttgcttaacaaaccat

SEQ ID NO: 5545 - DNA, 619 bp, Homo sapiens
atctagatcattttgttctttcttgcttattgcagggggcttcgayattgaaagggcaatttggccttaacttggaaatgctggagattgattgcatacaatctgtcctgctagtgagagaagcaaggactgcatctaagtgcaacatgaagacttttggtcccaagctttcctccaacttcagtgggaggcagcccaaaaccaccgtcggttcaagaatacaagtgacctgcaattcttggaaagactcccccaattcttctcccaatatgtggtcagcttttccagcaggattaggttcggtaggaattattgaatataatataatataatgtaaaatatcggaattatttttcttaggtgcttagtaaggagggtattagattttaatcatatatgtgttatttctttaaatcttgccttaatttatattatttaataagtgaagatttgctaggcgaatcttagtgataaattaatacttaatgttagttactatttgtcttacatagagttcatttctatgaagacacgtgtttcaaaacgtatactatatgcctttgtcttggctgttgaaattctgtgatgctttatatgcatatcacatcctagagcctgg

SEQ ID NO: 5546 - DNA, 619 bp, Homo sapiens
atctagatcattttgttctttcttgcttattgcagggggcttcgatattgaaagggcaatttggccttaacttggaaatgctggagattgattgcatacaatctgtcctgctagtgagagaagcaaggactgcatctaagtgcaacatgaagacttttggtcccaagctttcctccaacttcagtgggaggcagcccaaaaccaccgtcggttcaagaatacaagtgacctgcaattcttggaaagactcccccaattcttctcccaayatgtggtcagcttttccagcaggattaggttcggtaggaattattgaatataatataatataatgtaaaatatcggaattatttttcttaggtgcttagtaaggagggtattagattttaatcatatatgtgttatttctttaaatcttgccttaatttatattatttaataagtgaagatttgctaggcgaatcttagtgataaattaatacttaatgttagttactatttgtcttacatagagttcatttctatgaagacacgtgtttcaaaacgtatactatatgcctttgtcttggctgttgaaattctgtgatgctttatatgcatatcacatcctagagcctgg

SEQ ID NO: 5547 - DNA, 619 bp, Homo sapiens
atctagatcattttgttctttcttgcttattgcagggggcttcgatattgaaagggcaatttggccttaacttggaaatgctggagattgattgcatacaatctgtcctgctagtgagagaagcaaggactgcatctaagtgcaacatgaagacttttggtcccaagctttcctccaacttcagtgggaggcagcccaaaaccaccgtcggttcaagaatacaagtgacctgcaattcttggaaagactcccccaattcttctcccaatatgtggtcagctyttccagcaggattaggttcggtaggaattattgaatataatataatataatgtaaaatatcggaattatttttcttaggtgcttagtaaggagggtattagattttaatcatatatgtgttatttctttaaatcttgccttaatttatattatttaataagtgaagatttgctaggcgaatcttagtgataaattaatacttaatgttagttactatttgtcttacatagagttcatttctatgaagacacgtgtttcaaaacgtatactatatgcctttgtcttggctgttgaaattctgtgatgctttatatgcatatcacatcctagagcctgg

SEQ ID NO: 5548 - DNA, 649 bp, Homo sapiens
ggtgaataaggaatgttttctcctttaagggagtggggatggggacgataacaacagcttttaacaaatacaccatggcttctgaggcactgctccttcctgtgcgtaggatggaggcctctctcccatatccatatgtctccgatctggtgtgttctatctcccagtatttgtgcaaaggcagccactgtctatggtttgaccatcttcctcgtcagattccctctttgttctcttttgtaattccatcttactttctgcccagcctcacacaatactgattcaatcacagaaaataggtagattttgccactgaaccagactaatgccatgaaagtgtggggagactttgttattcattcattcatctatcattcattcaaccaataagcattgataactattatgtcaggccccaggcatgtggaatacaaagagaaataagacatgttctgaccttcaggaagctcacaatcccctataattgtgtcaggaatttttctctgatcaaccttgcactaaaaatgctcacttttctgcaaacaaggtgccatcttagccctcagagaatggagcatggtactaactcaactttgagggktttttttaaagtaaaaccatctaagcaagaatacttccatttccaaat

SEQ ID NO: 5549 - DNA, 809 bp, Homo sapiens
gaagtcaatgttggcttggagtcaggtagacctgcaattgaagtcggctccttccagctaagagctttgcaaccttgggtaagtcttttaacctctgtaggccttagtgtcctcaaatagcgagaaatacccaccttgcagggctgttgtgaggattaaactcaataatgtatgtaaagtgccttgcacattacctggcacataataagtgctcaataaattttaattccctttcttccttctcctttctccaattcaatcaagcattatgatagatgtgtttcctgtgcagtgtaaagctttttaaagtgcatataaatcaattaaatagggcartgctgtaactgatcacataacatttatttaagagatcctggggagagggggagaatattagaggcttgcagaaactgctagagagatgctagaagagggctgttcaggcgaagactcctgtgacagggctcctgcactccctgctgtaaattctatgggaaagggcagggtcggggggctgggctgtgttttatgattgggaatgtggaagtgagaagagtgaccctgagtgattctggctgctgggcaggcactacaggaaaatgcagtgatgggaggagtcactgaaatggctgttcagcccgtcttccaagtgcaaggtttgtgaaccaatgatctcctcaatgagcatagaagagaaaccagatgatccaaatctacatgtctcaccacttacctgttgtgaaaagggaggcacatttgcaggtacttttcccctgtctggctgctttaggacctgaacctggagggca

SEQ ID NO: 5550 - DNA, 547 bp, Homo sapiens
ctcctcccctttgggggcccaytggctggccatgcccctcttagcctgccccttctccccacaccctgcctgtgcctgcactcacacacacacacacacacacttatgcacacacatgcacgcacagatgtgggcatgtagaggctcacgagctggggctgtaaggggagaaaaacaagttaaatacaatcatcttcttacctctgtaattttctccttggcatttgcctttgattaatggtcctgtgtcaccccctccccagcctgcatacctggggatcagatttcagtttcctagtgtgtcctggtctcaggccctcggcaggaggagctgggtctcctggagcggttgggggagggtccgtgccagccaggagggcaaatctggccagcttagccctaccccagtgtcctgatgcccactgccaaagagggcctggcccgaaagcactttgtggagcagcggccctgctccatccaggtccttccctgtggcagcgtggggactttcatggctgtcgtccattcctgggatttggcgccccgg

SEQ ID NO: 5551 - DNA, 625 bp, Homo sapiens
cccttccccacatcatcccaggaattctctgactgtccttgggtctctctgggaagacttctcggagcccctggcccagctgggggtccctyctctgtgatcccatggcaccctaactttccacaaggaactggggtgagtgagggtctcttgagtgcagggagctcattcaggtttattatggaagctgggtgacagtgatggttgcatggttgcacaactttataaattttctaaaaattactgaattgttaaacaagaaagaaggaagcaaaagctgttttgttgaaggatgtacatggaaataaagaagacaggactctcagctccgtgcaagcctgcccgggtcccaggacaggctcacagcaagacctcccgggaggtccccatggggcctggaacacggctcaggtttggaagggcttgagggtccagggaagtctattggctctgctctatccttcctgcctttcggtctctgtctcctaccaccgttgtcccagctggcggccactatctctgctggcctctccacccgtgtccatcactggcagcctgaggatgggctacctgtgaatcacgtgctcctccctggtccagtcaaccacggcggaggagatggggc

SEQ ID NO: 5552 - DNA, 678 bp, Homo sapiens
ggaaataaataaaagggggcttctcctagacaacactctcctcctgctcctgctcattgaacaaggtgaccaaatgtcccagtctgtccaggactgagggagaccaaggctactcagtgttaaagcttggaaagttccaggcaaactgggataatgtggttccttatattggatacctggcctctctatatgttgaagcagctgcctacctcatttgggcaatgaatccactgtagttagccaggtagaaccatgtgtgcctagtagaaataggaatacacataatcagctgcataacagattcaaacaacataacagtgtaaaggagcaaggcagtacctggtggtagcagttgtgctgaggattctgggtgttaccagtgaagcgggtaagatctcgtggggctgggatgatggagaaaggctttctgggaagctggagtccactcaagtcttgattggatgagacagaatcatctctggcagagaaggaaggcagcgaccttactggtgcacgaggtccctggtgtccacgtatcagtccccagggaaaattcggattggtcacatgtcatctcctgagccaagttctgtggccagagaaataaggcgccgactggccagtcrggatcacacgcccatctcagaggcatgttgggtgctgactgtggtactaaga

SEQ ID NO: 5553 - DNA, 474 bp, Homo sapiens
ccatctctacatcctagtgaaagaaagtgaaaaattgaatcaaagatattttttcttagaaaattacatatggcatggaatttggaaaaaacgaagtccttattggagatgagtacatttttatttgggacattttattagtttcttattgctgttgtaagaaattactcytttcataacagcttaacaattatccatgtattttctctcagttttgtatgttgtaagtctggtaggctcagcttagcatcttacaatgctgaggtatgggcagggctgcgtttcttactggagggtctttggggagaatccattccaggctgattcaggaggttgactgcattcagttccttgtggttgtagaaagtaggcccctattttctcgctggctgtccacagaacattgttctcagcctctagaccctgcccacattccctatatcatggctcaattcctctatcttcaaagccaac

SEQ ID NO: 5554 - DNA, 474 bp, Homo sapiens
ccatctctacatcctagtgaaagaaagtgaaaaattgaatcaaagatattttttcttagaaaattacatatggcatggaatttggaaaaaacgaagtccttattggagatgagtacatttttatttgggacattttattagtttcttattgctgttgtaagaaattactcctttcataacagcttaacaattatccatgtattttctctcagttttgtatgttgtaagtctggtaggctcagcttagcatcttacaatgctgaggtatgggcagggctgcgtttcttactggagggtcttkggggagaatccattccaggctgattcaggaggttgactgcattcagttccttgtggttgtagaaagtaggcccctattttctcgctggctgtccacagaacattgttctcagcctctagaccctgcccacattccctatatcatggctcaattcctctatcttcaaagccaac

SEQ ID NO: 5555 - DNA, 770 bp, Homo sapiens
taatttcaattcttttggataaatatccagaagtgggattgctggatcatatggtagttctatttttaattttcttaggaacttcacactgttttccatagtggctgcaccattttgcattcctaccaacagcatatgagggttccaatttcctccacatcctcaccaccacttgttatctttatatatataacaaccatcctagcaggtgtgaggtggtatctcattacggttttgatttgcgtttttctgatgattggtgatgttgaacattttcttatacctgctggctatttgtatgtcttctttggagaaatgtctattccagtccttagcctatttttaaaattaggggttagtttttttttaattactgctattaaatgtaggagtttcttattttgaagttctaaatctcagagtgaatatttctcatagcaaccccctcttctccattccyacttctgttccctttgtctagtgcacattatccatctcggcacaaagtactgaatggtgtttttttttcttttttaaatgaggcttttatcatgttggccgggctggttttcaactcgtggcctcaagtgatccacccacctcagccttctaaagtgctgggattacaggaatgagccaccacaccggcttctgaatggtctttatctggcttcctctggaaacgaaacctgaaacatggattctactataaatagttcatttgagaggtgatctcaggaatccctgggagctgattcagggagcaggac

SEQ ID NO: 5556 - DNA, 871 bp, Homo sapiens
attctgaggatttacagaatgcttaaaattatctaggaaataattcatctggtaatatcaaaaatgcaggatggctgggcatggtgcctcacacctgtaatccagcactttgggagggtgaggcagaccaatcacgaggtcagaagttcgagaccaacctggcaacatggtgaaacccccgtctctactaaaaatacaaaaattagctgggcgtggtggcaggtgcctgtaatactactcgggaggctgaggcaggagaatcgtttgaacctgggaggcagatgttgcagtgagctgagatcgcactattgcactccagcctgggcaacagggcaagactccgtctcaaaaaaaaaaaaaaaaaaatgctggacaacagcagcagggtaatttctgcctaatttttgtggaattgagctgtttaaatgtttacttgatgatggaatgtgtctcaaaaagctatatatcagcagcggggccagggttggggctggggtgcagcccaaatgtttgtgagattctgagaacaccaagacagacagtaatatctgtccaagggaataatgccctttgcaaacattaacagtgtgagatttttacgtttttcaatgattttttaaacatcaaagttgagcraatgactgcagtttttcatgtaagaaaaaactatttatcataaatatgtaaaataagtataaatgagaaaataaaagaaagagtgttgaactataaacactgccagcacaaacataaaagaatgcgagacagaagatatcacagtggaaaaattaaaattggcttcggctgtagcgagcaacataattgacattgtagaaaatgaaatcactaataaagtagacagttctctaaa

SEQ ID NO: 5557 - DNA, 1140 bp, Homo sapiens
ataaaatgaaaggggaagaaactctgttcaagagtaggcattttcacttctctaaataaatatttaatatgactactagcagcataagacaattaaagttaccagaaaacagaggacttaaaatctgtttaagaatatctttccctcgtctggagtttgacctaatcttaccgcttaaactcaaataagaacaggactaactttggtttgtcaaatgtaaccatattcagtgcactatgttcatcagttcttttctattacattagtaaagatcttttcatttaacccatttctaaaggtggggcctttaggaaggtcataccatttttatttacaaaaagaatatatataaaaaaagaagagagtagcagaaaaaaacctctaaaacactatgacaaggattctagctgacagaagtttcatttggaaaaaacatggagtaaacattagggtagagagtttttatcagcgcctcaagcttaccagctaggatcccaatggagtgtttggctcccagaatctctccaagaacctctcaagaattccttgaaaatgtacaggccagatcttagggtgagaaattcaaagaactgctcagactccacccagtggagaatttataaatattttactttacttcctctcccctaaccaatcggtaatctccagccactgtcagaaatttaagcaacatgtgctcctgcccaccatttcaaatgccagagcctccagtgagggcttctttccagaggcaactttgctctttaaactcaggtaaacacacacttgtcctttaactatataaatctctgacccctgaactgatgagttkgtcttagagctaaattccaaattttgcctttcttcttcactttgagctctggatttttgagacaataccctccttcaaatacactgaggattttcagtctgatggttgaatctatgacatttaatgggtaaactttttagtcaaaagtttaaaataggctctcaattccagaatacactctattgcctaatatgtgagttttcaaaaactcctaggtaataaatctggacagttaacaagacaatgaaggaagaaagatctgaagattcaagtggaaactagcctggcaaacttcattaatgcaaatt

SEQ ID NO: 5558 - DNA, 1140 bp, Homo sapiens
ataaaatgaaaggggaagaaactctgttcaagagtaggcattttcacttctctaaataaatatttaatatgactactagcagcataagacaattaaagttaccagaaaacagaggacttaaaatctgtttaagaatatctttccctcgtctggagtttgacctaatcttaccgcttaaactcaaataagaacaggactaactttggtttgtcaaatgtaaccatattcagtgcactatgttcatcagttcttttctattacattagtaaagatcttttcatttaacccatttctaaaggtggggcctttaggaaggtcataccatttttatttacaaaaagaatatatataaaaaaagaagagagtagcagaaaaaaacctctaaaacactatgacaaggattctagctgacagaagtttcatttggaaaaaacatggagtaaacattagggtagagagtttttatcagcgcctcaagcttaccagctaggatcccaatggagtgtttggctcccagaatctctccaagaacctctcaagaattccttgaaaatgtacaggccagatcttagggtgagaaattcaaagaactgctcagactccacccagtggagaatttataaatattttactttacttcctctcccctaaccaatcggtaatctccagccactgtcagaaatttaagcaacatgtgctcctgcccaccatttcaaatgccagagcctccagtgagggcttctttccagaggcaactttgctctttaaactcaggtaaacacacacttgtcctttaactatataaatctctgacccctgaactgatgagttggtcytagagctaaattccaaattttgcctttcttcttcactttgagctctggatttttgagacaataccctccttcaaatacactgaggattttcagtctgatggttgaatctatgacatttaatgggtaaactttttagtcaaaagtttaaaataggctctcaattccagaatacactctattgcctaatatgtgagttttcaaaaactcctaggtaataaatctggacagttaacaagacaatgaaggaagaaagatctgaagattcaagtggaaactagcctggcaaacttcattaatgcaaatt

SEQ ID NO: 5559 - DNA, 590 bp, Homo sapiens
cctgaaggctttatattcacaggcccgctaaggtgttcaaggcagtttttgcgtccatcatcgcacctgatttgcatcaacatagaggttttacagataagaaaagtacatctcagagaggttaaggatatgccccggaatacacagcaagctcagggagccaggagtcctgtcctgacaccagrgttccttcccctctaacaagtggctagacatgagtgaaaagatagtaactgtagggttagatgagcaccatttacaaagacagggtgaggaagggaagttagactatagattccaaactctcaagtccagtcttcctgttgactcaaagcaggctacaagcctcctaagtgttcatcattgattttcagaccacacaactcagggatgggcatgggggccattttccatgatgcagaagctggctgttattgccacacctccttccccaaagctccagaagacccaacatatatggaacatcgtgcctgttattacatttaaccgtcacagcaaccccatgatttgatatttttagctgtttaacagaagaaagaagaaacccgttaagaggttaagagcaaggg

SEQ ID NO: 5560 - DNA, 590 bp, Homo sapiens
cctgaaggctttatattcacaggcccgctaaggtgttcaaggcagtttttgcgtccatcatcgcacctgatttgcatcaacatagaggttttacagataagaaaagtacatctcagagaggttaaggatatgccccggaatacacagcaagctcagggagccaggagtcctgtcctgacaccagggttccttcccctctaacaagtsgctagacatgagtgaaaagatagtaactgtagggttagatgagcaccatttacaaagacagggtgaggaagggaagttagactatagattccaaactctcaagtccagtcttcctgttgactcaaagcaggctacaagcctcctaagtgttcatcattgattttcagaccacacaactcagggatgggcatgggggccattttccatgatgcagaagctggctgttattgccacacctccttccccaaagctccagaagacccaacatatatggaacatcgtgcctgttattacatttaaccgtcacagcaaccccatgatttgatatttttagctgtttaacagaagaaagaagaaacccgttaagaggttaagagcaaggg

SEQ ID NO: 5561 - DNA, 590 bp, Homo sapiens
cctgaaggctttatattcacaggcccgctaaggtgttcaaggcagtttttgcgtccatcatcgcacctgatttgcatcaacatagaggttttacagataagaaaagtacatctcagagaggttaaggatatgccccggaatacacagcaagctcagggagccaggagtcctgtcctgacaccagggttccttcccctctaacaagtggctagacatgagtgaaaagatagtaactgtagggttagatgagcaccatttacaaagacagggtgaggaagggaagttagactatagattccaaactctcaagtccagtcttcctgttgactcaaagcaggctacragcctcctaagtgttcatcattgattttcagaccacacaactcagggatgggcatgggggccattttccatgatgcagaagctggctgttattgccacacctccttccccaaagctccagaagacccaacatatatggaacatcgtgcctgttattacatttaaccgtcacagcaaccccatgatttgatatttttagctgtttaacagaagaaagaagaaacccgttaagaggttaagagcaaggg

SEQ ID NO: 5562 - DNA, 888 bp, Homo sapiens
catttaatatttagggccaggtaaagaataatcattcagtttattcatttaaggctctttctgtttagttgcatgatgcattgcaaaagcttatcattactagtgcttgcaaattatacactttatgaatcaagcagccatagcagaaactacacatatgaaagamagcatttgaaagaaaaaatgatgtaaaaatatgctttaataaatttggaaaataaagctctaaccagtttccaaaatagtccatataaagacaataaatataggtaccgtgtaatagtaatggtgctaaagtttttgaaattcaccacatctgtttcttatttgtttgtttttgccatatttataatgggacatctgatttcatctcttatttattttgattttgtattttatttcatatctctgttcaaatgaaggataggtttatattttttgctttgttgttttactgagatactcaccatctaatttaagtgctccccatccagtgacaaacactttactcttaggcaaggcttcaaaagtagcttctggaagacagactctgtgcacctcattggaaaatatgatgggggtgaagagcttcactacagcgatatcatcctcgtgtttatgggcagcatagttctcatgaataataattgactccccctttcttctcattagtgagggattcgggttattccaaaactagccatccagagtttgggtttttcttcactgatcacagagtaaaaggaatacagttggttcatttctaatttaaatttgcccaggactgtggatgggcaggggacataaatgtgggagaagggcaaattttttaaggtaataattgattgggaccatcccaccttcttatctgaggcttctctcctaaga

SEQ ID NO: 5563 - DNA, 661 bp, Homo sapiens
agatataacctatagtttagaatactattaacagagttttttttttaatctaaaatatctctcaggagaactggtgagtgtgtataatttttcacaatgctggcttgttcctacttaaaattgagattgttggagtgtatattttcaggtggaactgaagatactctttctaattttttctgctcttcttcagttaactgtcttttattcctaagcctgctggacaatcataagtggcaccgggaggcctaagatgttttcttctttgggtgtttgtttgtttgtttgttttttgagatggagtatcactctgtcactcaggctgaagtgtgatggtgtgatctcagctcactgcaacttctgcckcccgggttcaagtgattctcctgtctcagcctcatgagtagctgggactatgggcacgtgccaccaagtccagctaatttttgtatttttagtagagacgggtgtcactatgttggccaggctggagcctaagatgtttataaaggaaatgtaaaagagagaactataggatgtgaagagatgaaaaagaggtgaagctggtgatcccatgggtatagactgggaactcacaagtcaaaacagtgacccgctgtcaggagccactcttcactgatcaaagatgcaccacacaaat

SEQ ID NO: 5564 - DNA, 689 bp, Homo sapiens
gtaaattttacttcggtttcttttgtagaacacatagtaataagttatcaagtaatttattgacctaaagtataaaacttgtagagatatagatttggtaatagccttaaacttaagatcaaagatagcatttggaaaataaattgctagtatccaaaatatgtctttattggtacttaaataaagaaagccccatttagctgaggtggtgtggggttyatctgctagaaacaaaattcttttggaagacatgtttttgaaagggtgactttgttataacaatttctctctcatcacccacagccagctctactactcagtatggaggtgagggattccaaaaaataaaaaggcaaacaaaatggaacagggagagaagtgatacaatttagaaggaaaaaagcaaatagcagttgggtatttaaagaagtttgttttgtaattaccctctgaataagttcaaccacatttgattcctggccatttgtaactttttggtgaaggcattggatgaagtttttgactctggatgacatcatcaatctggcaccgtgcctgctatgaatgtctaaaccaagcaccaattttatctttgaattgttaggttgtctgggaagataggagctgtaaaaataacatgagaagaatctaggcagaagtaactttggtgatcacaataataaaaagga

SEQ ID NO: 5565 - DNA, 846 bp, Homo sapiens
tcagggcccaggctctctggacactgtccacactcccatggtggggaggggggacccctgttctgtctcctactctgtgcattgctcttcttcttacacgtgatgctaacattatggcgcgtgtgtctgcctccttcttgggagacaggctccttggaggtgggtgtggcatgctgagcatcgtgtctgccatgcacttgcaaaggcattgatagcagtgggactcgactcacctcctctgactgctcacttccccatctcagtgaccagcccttgtttccgcagggccaaccttgggggttgccctagaacccaccatattctctgtcactgtgtctccacctggaagtgtctatttcttggaagctgctctcctctttgcccagcaaagcccttctcttctcagtagagcactccaacacccccttgccttgcgaagcccacacytggagtgtgcactaagcgatgacttcattgtccttccatgtttcaaaaaacgtggcccatatttctattctagcgtatcacatttaaatgacccgtttcttatccgcaagctctctgaaaacagaagtcatgtcttttaatctttaaatctactttaaatcaactgtgtgattgatacaaaatagacgtttaataaatattggatggctgactaaatgtatacataaatgagggaacaactatcgctggaggagataaatgggcttgtcaatctgcccttcccaggcacagagcaatcaaacaaaagagaaacaaatcagcaaataaatttgaaactgcatgcgatatttggcaagagtcaaggcagctggaacaaagccctccataccagtcagcgag

SEQ ID NO: 5566 - DNA, 680 bp, Homo sapiens
aattatctctagactcactttgcagctatgccaccttgggtagttacttatatagtccaagtctcagtttccttatttgtaaatggagagtagcaatcatggtacccacctaggattttaataatgattcaatgggttaattcatgtgaagcacttaaaatagtggctgggacagagtaaccactcaaaatttatttgctcttacttgtgtatcacccccaaagtccatatagtgctggtgtacaataaggattcctgaaaagttgagttagtcacatgaagtggtggacttctgtgtgtcgtaaatgatatagttgtattctgtcagtaaataatcaaagtcctaacaatatgcatccctagtaaagggccattcctaatacatttttggsggggattgacatatgttttagatgagaagatgcttgtttgtttcctgtctggactgaagtaggacacggaggtttgggcaacagtacctgtactcgggcctcggtgagcttcgccctctgggccagttcctccctagtataaatgtcagggtaatgagttctctcaaaagcacgctccagttcctccagctgttctgctgtgaaggtggttcggcttctgcgctgtttcctctttagtggtaaatctggttcagagtcaatatcagagccttcatctgattggggtgc

SEQ ID NO: 5567 - DNA, 824 bp, Homo sapiens
agaaccattggtttagtattctggagggagcaggcaacagagcaaatacttctggatgcacggatagagatttgtcttatacctcatcaaagattggcaaaactctctcccataatgattttcaaggcaaacaatgtgttcactgaggctgtatcactagcagaaattgttgaaagtaatctgaaatgttttagctactatttaatctatcataataattaaaccaacttaggaaagataattatgttttttaagtggagagcaaggaatagagatattttaaagtcaaaggcattttagcttgaaaagtstgactggccttaaatccaaaaagtgaaataatcaaatgactataacaacactttaaaaaggcctttgggaaacaaaaactttgtgaaacttcttagagttagataaagtaaatcaactttgtatccaacttcagattaacaaagctccctttcagatggtttcaaaaaatgtcattaaattgatgaaaatgacatgagagagaagaaacaaagatatataagatacctggctttatggtcagatacaacatctatgtgtggttacttggtgcacagaacttgtgcaccaaggaattatatagctaagcaatttaaaatcctagctctttgctcagaaagttgagaattgataaaaccttcataacagtaattctctaacagaaaatagaacataaagtctaaatatggctcaaaggaaagcatattccccaactttcacttcaggtgaagccacggagaataatatatagggaagaacagacttcagtatgggggtaaggaacatcgaggaaa

SEQ ID NO: 5568 - DNA, 824 bp, Homo sapiens
agaaccattggtttagtattctggagggagcaggcaacagagcaaatacttctggatgcacggatagagatttgtcttatacctcatcaaagattggcaaaactctctcccataatgattttcaaggcaaacaatgtgttcactgaggctgtatcactagcagaaattgttgaaagtaatctgaaatgttttagctactatttaatctatcataataattaaaccaacttaggaaagataattatgttttttaagtggagagcaaggaatagagatattttaaagtcaaaggcattttagcttgaaaagtctgactggccttaaatccaaaaagtgaaataatcaaatgactataacaacactttaaaaaggcctttgggaaacaaaaactttgtgaaacttcttagagttagataaagtaaatcaactttgtatccaacttcagattaacaaagctccctttcagayggtttcaaaaaatgtcattaaattgatgaaaatgacatgagagagaagaaacaaagatatataagatacctggctttatggtcagatacaacatctatgtgtggttacttggtgcacagaacttgtgcaccaaggaattatatagctaagcaatttaaaatcctagctctttgctcagaaagttgagaattgataaaaccttcataacagtaattctctaacagaaaatagaacataaagtctaaatatggctcaaaggaaagcatattccccaactttcacttcaggtgaagccacggagaataatatatagggaagaacagacttcagtatgggggtaaggaacatcgaggaaa

SEQ ID NO: 5569 - DNA, 786 bp, Homo sapiens
taagagtatcaactctggctcatgcaaaagtgaatgactagtagaaataatggggacagaaacagaggtgttcttgtcatccgatcatcccttttcctggaaaatttgaatattttccataaaattattatacagttattcactttaaagctgttctcaaatgtccatagaggctcagtcatgaacggatattcattgaggcttcacactgtctgggcatgtcaggaaccatccatgtaataaatagacatgagcacacatctatgaaaacttagctggttactcaagacagtgtgtccaagcataacctggaaattcgtcccatgaggactcagaagcaggaaagaaaatgtcactgttaactgatgtgcatagaaaaggcttcattgatggaagaagaatagaactcaggcagagaagargaaagaagggcctctgggtgggaaggcacccagagcaaaggcacccaggtgggaatgcgtatgcatactaggatgcagaattctctccattatacctaagggtcaaggaggtgggagcaatgtaagaaccgaaaaatgttttcagatgtagaattagcatatataaaggaataagatttttttctgatttataaaaatattcctgaagttattctaaaattaagcaacatttagtttaagatctaacgaatcactcttttagagaagaaaataattatatgagaaaagaatcctctcccctcattgtatgagctgttaattctccattgttctctgcgtgttggttatttatctattgtctctt

SEQ ID NO: 5570 - DNA, 786 bp, Homo sapiens
taagagtatcaactctggctcatgcaaaagtgaatgactagtagaaataatggggacagaaacagaggtgttcttgtcatccgatcatcccttttcctggaaaatttgaatattttccataaaattattatacagttattcactttaaagctgttctcaaatgtccatagaggctcagtcatgaacggatattcattgaggcttcacactgtctgggcatgtcaggaaccatccatgtaataaatagacatgagcacacatctatgaaaacttagctggttactcaagacagtgtgtccaagcataacctggaaattcgtcccatgaggactcagaagcaggaaagaaaatgtcactgttaactgatgtgcatagaaaaggcttcattgatggaagaagaatagaactcaggcagagaagaggaaagaagggcctctgggtgggaaggcacccagagcaaaggcacccaggtgggaatgygtatgcatactaggatgcagaattctctccattatacctaagggtcaaggaggtgggagcaatgtaagaaccgaaaaatgttttcagatgtagaattagcatatataaaggaataagatttttttctgatttataaaaatattcctgaagttattctaaaattaagcaacatttagtttaagatctaacgaatcactcttttagagaagaaaataattatatgagaaaagaatcctctcccctcattgtatgagctgttaattctccattgttctctgcgtgttggttatttatctattgtctctt

SEQ ID NO: 5571 - DNA, 786 bp, Homo sapiens
taagagtatcaactctggctcatgcaaaagtgaatgactagtagaaataatggggacagaaacagaggtgttcttgtcatccgatcatcccttttcctggaaaatttgaatattttccataaaattattatacagttattcactttaaagctgttctcaaatgtccatagaggctcagtcatgaacggatattcattgaggcttcacactgtctgggcatgtcaggaaccatccatgtaataaatagacatgagcacacatctatgaaaacttagctggttactcaagacagtgtgtccaagcataacctggaaattcgtcccatgaggactcagaagcaggaaagaaaatgtcactgttaactgatgtgcatagaaaaggcttcattgatggaagaagaatagaactcaggcagagaagaggaaagaagggcctctgggtgggaaggcacccagagcaaaggcacccaggtgggaatgcgtatgcatactaggatgcagaattctctccattatacctaagggtcaaggaggtgggagcaatgtaagaaccgaaaaatgttttcagatgtagaattagcatatataaaggaataagatttttttctgatttataaaaatattcctgaagttmttctaaaattaagcaacatttagtttaagatctaacgaatcactcttttagagaagaaaataattatatgagaaaagaatcctctcccctcattgtatgagctgttaattctccattgttctctgcgtgttggttatttatctattgtctctt

SEQ ID NO: 5572 - DNA, 786 bp, Homo sapiens
taagagtatcaactctggctcatgcaaaagtgaatgactagtagaaataatggggacagaaacagaggtgttcttgtcatccgatcatcccttttcctggaaaatttgaatattttccataaaattattatacagttattcactttaaagctgttctcaaatgtccatagaggctcagtcatgaacggatattcattgaggcttcacactgtctgggcatgtcaggaaccatccatgtaataaatagacatgagcacacatctatgaaaacttagctggttactcaagacagtgtgtccaagcataacctggaaattcgtcccatgaggactcagaagcaggaaagaaaatgtcactgttaactgatgtgcatagaaaaggcttcattgatggaagaagaatagaactcaggcagagaagaggaaagaagggcctctgggtgggaaggcacccagagcaaaggcacccaggtgggaatgcgtatgcatactaggatgcagaattctctccattatacctaagggtcaaggaggtgggagcaatgtaagaaccgaaaaatgttttcagatgtagaattagcatatataaaggaataagatttttttctgatttataaaaatattcctgaagttattctaaaattaagcaacatttagtttaagatctaacgaatcactcttttagagaagaaaataattatatgagaaaagaatcctctcccctcattgtatgagctgttaattctccattgttctytgcgtgttggttatttatctattgtctctt

SEQ ID NO: 5573 - DNA, 677 bp, Homo sapiens
acagacttgagccaccactcccagcccaatttccctttttaaacaaagagagtgcagacaacattgtctagctaggattttaaacatttattcttaagaattatttcattatcattgaatttattttatgattaccttctatttatagcaagtattactggttttcacgtggcaatataaagttttattttaaaataaggttagttaataaaaagtagtgacttgatgtaaagaaaaagattaagcatataatgaaacaggtggtgcacagatatggcaacaggcatcagggttgtagacgatgactgaagtttgggaaatgccaccaaaggggaggaaaatgaagaaagggacaattaggtcttataccttaaatgggagagggtcttgcaagaaacagggaaakaaattcagggcttaaaacataattatgcatcaataaactggctctttcagaaaactttcattaagtggatgagatagcaaggaagacatgtttaactagctggtcagaaattgtgcacttgcttttctagttggatagactctagcaggtaacacaatagagtcccaaggggtcaacttgatatccgggggccaggatgtaaaggccccattccccatcccccaacacacaccccaggtgtctcctctacatcatcaaagacccagaagcc

SEQ ID NO: 5574 - DNA, 580 bp, Homo sapiens
gggttcaagcgagcctcctgcctctgcctcccaaagcactgggattacaggcatgagccaacactcccacaccaagatattcatacagtaaatatgaactcctatatcagattccatatctaataatgattgctggcagtaaggatgctcacaagttacaagggtaatgataatggaatcaccacgatcttggcgatgcagcatctcaacctcctgccttcttcaattgtgatcatagagatgaagagcacatgaaactcttacacattttctttcaagatttcgcctagaagtgatacatctagaatccttgattttagaatgactgtttttaaaatcgaggagatgagtacaacacggtcttctgtgtccccagagtgagatgagaaatgtataagtgactcaggcagttattcaattattcttctattcaccaatttttcttttacacacaggaaggaaggacagaaggaagaggggaaggggaagggaagaaggcaggaaggaaggaaagagggaagggagggaggaaggatggaaagagggagggagggagtgagggggggawggaggggggtta

SEQ ID NO: 5575 - DNA, 467 bp, Homo sapiens
agacgagcgctccccaaccaaggacaacggcctyccaggcgctcatcgtccacccgcaggagggtgcccgcagagcttcaagaaggtggttgtcacgcctgtcgccctctgccctcatcgagaaatgtagccacagctcgacgcagggacggagaaggaagccggcaaggggatggggcaagcatgtctgtctctcaaaggctggccttcctggccgagtcacccgtttgacactcctccccggatgccggtggtggtggcatggcccccccgtatcctgcctgggctctggcctctgctctgacctccctcttgctgtgtctgccccgtctctgagaagcctggcggcttcttagtgtggctcagtgtcttccacaaagaagacttccccgtccatcagggagaaacctcgtggcggtccgcgtcatgattgtttccctctccacacctctttctggatgattggg

SEQ ID NO: 5576 - DNA, 597 bp, Homo sapiens
tctgatcctttatagtttctctctctttcctctgagctgcttttgttctgattatttggtctctcactttttaaagtgaggcaataaaaagcgaattgaaagttccctgggcatycccaccctatcaccccacaattgacaatcatcatcatgttgatttccaccttccacattttttcctaaatgttattttaatgcttttcattattttatatgttccattaagctaatgaccatatttgcttataatttcccagttgtttttttggacattgtttttttttttttctggctcttagagaaaagtttgctataaatatctttctacatgtgacttttatttccatctaaattatttttttggaataaatttgaggagtagaattaccgggtcaaaagcttatgggtgttttcatcagtctttcctgtgtgttgccaaatttctaatggtagtgtatacaggtaccatagcagcagcaacaggagtacaaccctcccagcactctttttttggagacagggtcttgctctgttgcctgggctggagtgcagtggtgtgatcatagctcactgcagctttggccttccaggcttaag

SEQ ID NO: 5577 - DNA, 597 bp, Homo sapiens
tctgatcctttatagtttctctctctttcctctgagctgcttttgttctgattatttggtctctcactttttaaagtgaggcaataaaaagcgaattgaaagttccctgggcatccccaccctatcaccccacaattgacaatcatcatcatgttgatttccaccttccacattttttcctaaatgttattttaatgcttttcattattttatatgttccattaagctaatgaccatatttgcttataatttcccagttgtttttttggacattgtttttttttttttctggctcttagagaaaagtttgctataaatatctttctacatgtgacttttatttccatctaaattatttttttggaataaatttgaggagtagaattaccrggtcaaaagcttatgggtgttttcatcagtctttcctgtgtgttgccaaatttctaatggtagtgtatacaggtaccatagcagcagcaacaggagtacaaccctcccagcactctttttttggagacagggtcttgctctgttgcctgggctggagtgcagtggtgtgatcatagctcactgcagctttggccttccaggcttaag

SEQ ID NO: 5578 - DNA, 787 bp, Homo sapiens
catctgtgctctccctctgcaaccaggatttaggaggcagaactccagagagaccctcccgggctcctggttcctgctcacttgccccagcagggcctttggaaggcctggaaggctgatccacgaggctgatccttgactcactttaatgaggaaaaaatgtcctctaggaacaaatacatttttaatgagctattttctggcagattcaattattttagtagtcacgccaagtttattaatcctttaccatctgtcgttgtgccttattacaaattcaaaaacatattaagagccccatcacccatcatcccaggggagttgtcaatttgttcacagaaaatggggatttcaacagagatatacacttgtttctcaatgactgctttttggtaataaacaagcccaaccatgaggaattcaggaaattgctggggttattccccctctgatacaccacattcttccatctgaccttgttacagaatatctgtattgccaaggagggctgacttcattatatttatttattaactcatttttgactcttatttttccyatttgaaaagtggtaggctcattgtggaaaattgtgtatgcataaagataaagaagcataactttgagataaagatggaaaagggctccgagaatccatcttgctactcaggggtgatcactgtgaaccagtgaccccagagtctgacgggccaccggccgagggcctggcatcccaggaagtgcagaggaggggggcagctgaagtctgctgatttttcagtgccta

SEQ ID NO: 5579 - DNA, 724 bp, Homo sapiens
caaactgtttttgtctctttctcttcctacttctgatccagtctgcaggtctgctcacctctctttctcaatctcacctgtgtacatgtgcaatatgaaggtcagatgccaggtgctgccttccaaccagaccaaacccttgagaaaagtacgacctgcggggagsggggtgtgatgccggcttttttctgagacacaggggaaaccttggctaaaagtgtttcctgtaagttgagatggctggaagcctaaagctgttttgcttcaaagttcttgttactgctaattgaaacatatgagaaaggaataaaaatgctgaagttaagaaagtagaagttgggagtaggaaagtaagaaagagtattgccaactcaactggcctaagcatttatttgcaatgtttcttactatatgataatcaatgaattatatcttcataccagtaaaaaatgacaatgccatggaagaatttgggtttaatgtcatttcttaaaggtctgggttaattcacactggcaaggctgcagagttggcaggttagtgactgtccttctctaggacaggtgaatggcagttttagacttgggcagggcatgacttgcacagatctctgcagtagcccagggcaccagcagttgagggtcaagatttttggtatccttatctatcaagatcacaggataatgcttttctctgtctgttgtcagggatggaatggggtgac

SEQ ID NO: 5580 - DNA, 724 bp, Homo sapiens
caaactgtttttgtctctttctcttcctacttctgatccagtctgcaggtctgctcacctctctttctcaatctcacctgtgtacatgtgcaatatgaaggtcagatgccaggtgctgccttccaaccagaccaaacccttgagaaaagtacgacctgcggggagcggggtgtgatgccggcttttttctgagacacaggggaaaccttggctaaaagtgtttcctgtaagttgagatggctggaagcctaaagctgttttgcttcaaagttcttgttactgctaattgaaacatatgagaaaggaataaaaatgctgaagttaagaaagtagaagttgggagtaggaaagtaagaaagagtattgccaactcaactggcctaagcatttatttgcaatgtttcttactatatgataatcaatgaattatatcttcataccagtaaaaaatgacaatgccatggaagaatttkggtttaatgtcatttcttaaaggtctgggttaattcacactggcaaggctgcagagttggcaggttagtgactgtccttctctaggacaggtgaatggcagttttagacttgggcagggcatgacttgcacagatctctgcagtagcccagggcaccagcagttgagggtcaagatttttggtatccttatctatcaagatcacaggataatgcttttctctgtctgttgtcagggatggaatggggtgac

SEQ ID NO: 5581 - DNA, 809 bp, Homo sapiens
gttctctttgttttctaaggtgtttctcaaataagtaatgttattccagttaaatattccccagcatggacactgaaagcccagattataacttcgggaaagttatgccattcagggagacatgcacaagaattaaaattttaatgagaatgtatatataagaggcaggaatgtctgctggaggatgagaggatttaggcttagatggtctcataagatttggcaatagctggtcaaaaagtgatgcttgtccatttcctgtctcaggcaccaaatctaatagttggccatttttaaattcagactagacagtcttcactccacatcagaaagaaaaccagaaagattgttctttctgtgtcaaagccaagacatcagtaccaaaaatgtagatggaaaaagagctttgtctaatattactggtgacccagagcaaagtttgtccaaatggattcctatccagtgagaacaacactcacctgtttgtgtggctgacttatgtaacagggttataaggcatggttgtgtyataatcagtgattctccttatgactaataacaattttagacagcacaaaacagaagcacaaaagggagcagaacaggatgaaaatgaatggcctgattctagcaagaatgccaaaaaccgggaagcgataacaaaacctgggtgccaagcagaataaatagctgtagagctcaacaaaaacacagcagagttcagaccgggtgctgatgtactcattgatctactcattgtgatcaacaagattcagggcactccatgggtaattttacaccaaagtgtg

SEQ ID NO: 5582 - DNA, 809 bp, Homo sapiens
gttctctttgttttctaaggtgtttctcaaataagtaatgttattccagttaaatattccccagcatggacactgaaagcccagattataacttcgggaaagttatgccattcagggagacatgcacaagaattaaaattttaatgagaatgtatatataagaggcaggaatgtctgctggaggatgagaggatttaggcttagatggtctcataagatttggcaatagctggtcaaaaagtgatgcttgtccatttcctgtctcaggcaccaaatctaatagttggccatttttaaattcagactagacagtcttcactccacatcagaaagaaaaccagaaagattgttctttctgtgtcaaagccaagacatcagtaccaaaaatgtagatggaaaaagagctttgtctaatattactggtgacccagagcaaagtttgtccaaatggattcctatccagtgagaacaacactcacctgtttgtgtggctgacttatgtaacagggttataaggcatggttgtgttataatcagtgattctccttatgactaataacaattttagacagcacaaaacagaagcacaaaagggagcagmacaggatgaaaatgaatggcctgattctagcaagaatgccaaaaaccgggaagcgataacaaaacctgggtgccaagcagaataaatagctgtagagctcaacaaaaacacagcagagttcagaccgggtgctgatgtactcattgatctactcattgtgatcaacaagattcagggcactccatgggtaattttacaccaaagtgtg

SEQ ID NO: 5583 - DNA, 809 bp, Homo sapiens
gttctctttgttttctaaggtgtttctcaaataagtaatgttattccagttaaatattccccagcatggacactgaaagcccagattataacttcgggaaagttatgccattcagggagacatgcacaagaattaaaattttaatgagaatgtatatataagaggcaggaatgtctgctggaggatgagaggatttaggcttagatggtctcataagatttggcaatagctggtcaaaaagtgatgcttgtccatttcctgtctcaggcaccaaatctaatagttggccatttttaaattcagactagacagtcttcactccacatcagaaagaaaaccagaaagattgttctttctgtgtcaaagccaagacatcagtaccaaaaatgtagatggaaaaagagctttgtctaatattactggtgacccagagcaaagtttgtccaaatggattcctatccagtgagaacaacactcacctgtttgtgtggctgacttatgtaacagggttataaggcatggttgtgttataatcagtgattctccttatgactaataacaattttagacagcacaaaacagaagcacaaaagggagcagaacaggatgaaaatgaatggcctgattctagcaagaatgccaaaaaccgggaagcgataacaaaacctgggtgccaagcagaataaatagctgtagagctcaacaawaacacagcagagttcagaccgggtgctgatgtactcattgatctactcattgtgatcaacaagattcagggcactccatgggtaattttacaccaaagtgtg

SEQ ID NO: 5584 - DNA, 902 bp, Homo sapiens
gcattctccagtccagtcagtagtagaaggcttttctgcggtggggaatggaacccaggccaagtgggttctagctgcagagaaggggatacacaaccttaggtaagagggtgcacatcccagccattggatgtggggctggaggaagacattcggctgggctcctaccgtttatacttattataccgttacggtcagtaagagacaggtggtgatgacgttgtcagttaagaatagccatcatttgcttagttaagtgtggaattgtcctgggagtctaacttactaagttaatttcacacttaactcccacagcctgtccacacctaatttcaggatatatgtcaaaaggaaagaataaatgtgatatacagttatataagttacatcagtggtccccagccttttttggcaccagaaatgggtttcctggaagacaatttttccacagatggcagggaggatagttgcaggatgaaatttttccacctcagatcatcaggcattagattctcataagtgcatgtaacctagatccctcacatgtgcagttcacattggggttcgtactcctatgagaatcgaatgctgcagctgatctgataggaggcggagctcaggtcataatgctcactcagccaccactcacctcctgatgtgcagcccggttcctcagaggccacrggcaatacctgtccatggcccagggatggggaccactgagttacattatatatactattaatatctggctgtaccaaaaagtattgtgaaaatatttatagtcctgtttgagggtcttttctgaagctttccatttacaaatagaaaagaatattaaggccaggcacggtggttcatgcctgtaatcacaacacattgggaagctgaggcaggaggat

SEQ ID NO: 5585 - DNA, 800 bp, Homo sapiens
tcctcccatctcagcctgctgagtagctaggactccaggcaagtgccaccatgcccagctggttttaaaaaattttctgtagaggtggggtcttgctttgttgcccaggctggtctccaaytcctggcctcaaacaatcctcctgcctcggcctcccaaaagtgctgggattataggtgtgagccactgtgcccagctgaatttaagattaatagctatcatagcatcctttaagtttcagaatccttcatgagtatttaattgttcagtgtaaccttttagcagtggatgaatctgacctgcacgtagacttttggggagagtccctcagttcttcctaagcagtctgtacagctgagagcaaggtcagcagtttctctgtcaggcctttgacttcattcatcagactggatgcttattaaacatctactacatgcaaagttctgtaccagatgaagttgaaggcaggttacactgccccggtgtggcttataattgacctggaaatatttccagagttaggtaacagacagaataccttcctcattctcagctgttattttggaacagagaactttacaaaagctttgtctttgtaaataataaaatgttacacactgataaaaagtattccagaaaccaaacacataacaccattttttaattttagaaaactgccattgctcttacttagaatgccagtgttttctgaaggttcaaaacactgaagttacagacgattaaaacattgcactgttacaactgctgctttccacatggttcttgttcatacagttttt

SEQ ID NO: 5586 - DNA, 800 bp, Homo sapiens
tcctcccatctcagcctgctgagtagctaggactccaggcaagtgccaccatgcccagctggttttaaaaaattttctgtagaggtggggtcttgctttgttgcccaggctggtctccaactcctggcctcaaacaatcctcctgcctcggcctcccaaaagtgctgggattataggtgtgagccactgtgcccagctgaatttaagattaatagctatcatarcatcctttaagtttcagaatccttcatgagtatttaattgttcagtgtaaccttttagcagtggatgaatctgacctgcacgtagacttttggggagagtccctcagttcttcctaagcagtctgtacagctgagagcaaggtcagcagtttctctgtcaggcctttgacttcattcatcagactggatgcttattaaacatctactacatgcaaagttctgtaccagatgaagttgaaggcaggttacactgccccggtgtggcttataattgacctggaaatatttccagagttaggtaacagacagaataccttcctcattctcagctgttattttggaacagagaactttacaaaagctttgtctttgtaaataataaaatgttacacactgataaaaagtattccagaaaccaaacacataacaccattttttaattttagaaaactgccattgctcttacttagaatgccagtgttttctgaaggttcaaaacactgaagttacagacgattaaaacattgcactgttacaactgctgctttccacatggttcttgttcatacagttttt

SEQ ID NO: 5587 - DNA, 662 bp, Homo sapiens
tggaaccaattcccccaggatgccaagggataactgaacatacacttttgcatctggcttctttcactcagcataatttctgtaagattcatccatgtggttgtacatatttggaaatttgtcccctttaattactgaatagaaatttatcgtatgaatgtactatagtttgttyattcattctcctttgactgacacaaggacatctctaatttggtggtatgatgaataaagctgctacaaatattttgaagtcttttgtgggcatatatagattcatttctctcgggtaaagacctagggatgaaactgctgagccaaaggataggtgtgtgtttacatttgttagaaactttcagacagttttctaaagtggttgtgtcatgttatctttcatttaaccttcaatattagatgtattttaagctgccgtaaatatcttttggaagtaggtgagttttaagtgaaggaatgaatgaatgatggatggatgacccaacaattcagctatcctctaacccagtatgtggccaacacagagcctgtgctcactgtcctcatcctgctgggtttcttgaactcagggtggctccatctgcacagcaaaccacaccaccaaggctggcccctcctagcttttcaaccccattgccactgtagat

SEQ ID NO: 5588 - DNA, 496 bp, Homo sapiens
gttgccacatggtacaaagattttccttacaccctttacccagcttccccaaatatttaccctttgaaaattgattatatgatttaagtgattttgtctcatctgtttcagtatattcaggatcaacagattttgatagaataaaagatttttaatattaatccagtatagcatcagcctatttaaaacctagctggcaataagctttgttttatcatctttttgccatcttcttagttccgtgaggcggatgaccatgaagagagcaacctagcacttttttctagagagggagtgggctcccccgtttattttgaagtgtcgaacctatggaaaagttagacgaatagtatagtgaggaacacccatgtagcctatcctagatttacsaattgttgctttttttttttttttttttttttgagacagagtttgctctgttgcccaggctggagtacagtagcgtgatctggctcactgcaacctctgccaccca

SEQ ID NO: 5589 - DNA, 2016 bp, Homo sapiens
agacaaaaggtattttttataaatacttgatgtctttaatagactacaagatagtctgggctctatcgaacaagaatgagaaattataatgagacaattgcctaagatgaaaagacaacaaaatgaaatttaaaggcaaatggttggaataagaaaaaaatggcaaggaaaaccaaaggttccattgtagaatcaaaatcgaagtgggatgatgtagagagccacagtgatattaaggaaaggcaaatgtgatgaaagcagtggagaaaagtattgaagacagagaacagaagccaaaactgaagaatcaaatgtatttctgaacaataaaacagcaatgatagatagaattactaattaaacatcacacacacacacatttttttctacacattttctgcaaattaagacattaccacattacattagagaaaaatatgaaataactccaacacctagaagaaccagagcaaaaatttcccttataaacacaaattctataactatccaataaaaactgggcaaattaaacccaaagtaatacaaagttagcgggttttagatttctcctgtgtaatgtcaaacagcccaaaataagagaatccaaaacaccgttgaaggaaaactattgtaacacaatagttaccactgccactttttctatgtgcaggcaataaaaagatttccagatatctgaaatatatatttcccggggtatatttcttaaaaaaaaattagttgaaaaaattcattctatgtgaaatgtagaacaaaactaagaatgtaagactagaaaattctgtgaaaacaaaaaataaagctggtggtgacaaaacagttaaaacatggaattaattcaaaaatatttcttaataatatcaaagccaacactgatttagtgcttactatcttcctgcactgtgctaagtattttacacatacctttatttagaagacttcatgcagatgtcaaaaactattcaacatggccaggcgtggggctcacacctataatcctagcacttgcggaggccaaagcaagaagatcacttgaggtcaggagttcaaggccagcctgggcaacatagcaagatcctgcttctaaaaagttatttattaaataaaagatttaaaatataaaaacaggaatgtaataaaaacaatctaagctttaaatcttcagattgtattatgaaaaccaaccactgaggaaagagtgaaagaagttctagaagttcttagttcttcattttaatattgaaaagacaatgatatgcaaaagaaactgttttaattttcatttcctttgatgatttgaggcatattaggctgcccacaaagtaaaaaataaaattaaaatataaggtaaatgaaaagttacaaagcatgttatgacaaaaatagtaggcataaaagaaattatcaatatgctaaactttttaatgtaacaataggagaaacataagcaaacaccttcaaataaaacaaagcaagaatccaaataggcaattgaaaaaacaatactcattgacaattaacacgaaaaaaatgtgaacttcataagtaacttttacaagtgcaaattaaaacagcaatggcataccatgttaaagccatcaaactggcaaaatkcaaaagaacaataatccctgctgttagctaggattgagggagagggccctttaatatactgccagtagaagagtaaattggtaagttggtactcttttggaggggaatttggcaacatacatcaaaagctttctaaatgcaaataccttttgactcaagaattgtttttccaaaagacatactcagaggtggccacaaagatttaactactctgatgggaagagagatcttcatatatgggacttctcccttgaaatggaggataatacacaagccacaaatagaaagagaacaacagtggattattaaaaggcagggccttcctgtctattggatgccctgctcgggtataacacaggaaccatgggctcccaagggaccctg

SEQ ID NO: 5590 - DNA, 2016 bp, Homo sapiens
agacaaaaggtattttttataaatacttgatgtctttaatagactacaagatagtctgggctctatcgaacaagaatgagaaattataatgagacaattgcctaagatgaaaagacaacaaaatgaaatttaaaggcaaatggttggaataagaaaaaaatggcaaggaaaaccaaaggttccattgtagaatcaaaatcgaagtgggatgatgtagagagccacagtgatattaaggaaaggcaaatgtgatgaaagcagtggagaaaagtattgaagacagagaacagaagccaaaactgaagaatcaaatgtatttctgaacaataaaacagcaatgatagatagaattactaattaaacatcacacacacacacatttttttctacacattttctgcaaattaagacattaccacattacattagagaaaaatatgaaataactccaacacctagaagaaccagagcaaaaatttcccttataaacacaaattctataactatccaataaaaactgggcaaattaaacccaaagtaatacaaagttagcgggttttagatttctcctgtgtaatgtcaaacagcccaaaataagagaatccaaaacaccgttgaaggaaaactattgtaacacaatagttaccactgccactttttctatgtgcaggcaataaaaagatttccagatatctgaaatatatatttcccggggtatatttcttaaaaaaaaattagttgaaaaaattcattctatgtgaaatgtagaacaaaactaagaatgtaagactagaaaattctgtgaaaacaaaaaataaagctggtggtgacaaaacagttaaaacatggaattaattcaaaaatatttcttaataatatcaaagccaacactgatttagtgcttactatcttcctgcactgtgctaagtattttacacatacctttatttagaagacttcatgcagatgtcaaaaactattcaacatggccaggcgtggggctcacacctataatcctagcacttgcggaggccaaagcaagaagatcacttgaggtcaggagttcaaggccagcctgggcaacatagcaagatcctgcttctaaaaagttatttattaaataaaagatttaaaatataaaaacaggaatgtaataaaaacaatctaagctttaaatcttcagattgtattatgaaaaccaaccactgaggaaagagtgaaagaagttctagaagttcttagttcttcattttaatattgaaaagacaatgatatgcaaaagaaactgttttaattttcatttcctttgatgatttgaggcatattaggctgcccacaaagtaaaaaataaaattaaaatataaggtaaatgaaaagttacaaagcatgttatgacaaaaatagtaggcataaaagaaattatcaatatgctaaactttttaatgtaacaataggagaaacataagcaaacaccttcaaataaaacaaagcaagaatccaaataggcaattgaaaaaacaatactcattgacaattaacacgaaaaaaatgtgaacttcataagtaacttttacaagtgcaaattaaaacagcaatggcataccatgttaaagccatcaaactggcaaaatgcaaaagaacaataatccctgstgttagctaggattgagggagagggccctttaatatactgccagtagaagagtaaattggtaagttggtactcttttggaggggaatttggcaacatacatcaaaagctttctaaatgcaaataccttttgactcaagaattgtttttccaaaagacatactcagaggtggccacaaagatttaactactctgatgggaagagagatcttcatatatgggacttctcccttgaaatggaggataatacacaagccacaaatagaaagagaacaacagtggattattaaaaggcagggccttcctgtctattggatgccctgctcgggtataacacaggaaccatgggctcccaagggaccctg

SEQ ID NO: 5591 - DNA, 2016 bp, Homo sapiens
agacaaaaggtattttttataaatacttgatgtctttaatagactacaagatagtctgggctctatcgaacaagaatgagaaattataatgagacaattgcctaagatgaaaagacaacaaaatgaaatttaaaggcaaatggttggaataagaaaaaaatggcaaggaaaaccaaaggttccattgtagaatcaaaatcgaagtgggatgatgtagagagccacagtgatattaaggaaaggcaaatgtgatgaaagcagtggagaaaagtattgaagacagagaacagaagccaaaactgaagaatcaaatgtatttctgaacaataaaacagcaatgatagatagaattactaattaaacatcacacacacacacatttttttctacacattttctgcaaattaagacattaccacattacattagagaaaaatatgaaataactccaacacctagaagaaccagagcaaaaatttcccttataaacacaaattctataactatccaataaaaactgggcaaattaaacccaaagtaatacaaagttagcgggttttagatttctcctgtgtaatgtcaaacagcccaaaataagagaatccaaaacaccgttgaaggaaaactattgtaacacaatagttaccactgccactttttctatgtgcaggcaataaaaagatttccagatatctgaaatatatatttcccggggtatatttcttaaaaaaaaattagttgaaaaaattcattctatgtgaaatgtagaacaaaactaagaatgtaagactagaaaattctgtgaaaacaaaaaataaagctggtggtgacaaaacagttaaaacatggaattaattcaaaaatatttcttaataatatcaaagccaacactgatttagtgcttactatcttcctgcactgtgctaagtattttacacatacctttatttagaagacttcatgcagatgtcaaaaactattcaacatggccaggcgtggggctcacacctataatcctagcacttgcggaggccaaagcaagaagatcacttgaggtcaggagttcaaggccagcctgggcaacatagcaagatcctgcttctaaaaagttatttattaaataaaagatttaaaatataaaaacaggaatgtaataaaaacaatctaagctttaaatcttcagattgtattatgaaaaccaaccactgaggaaagagtgaaagaagttctagaagttcttagttcttcattttaatattgaaaagacaatgatatgcaaaagaaactgttttaattttcatttcctttgatgatttgaggcatattaggctgcccacaaagtaaaaaataaaattaaaatataaggtaaatgaaaagttacaaagcatgttatgacaaaaatagtaggcataaaagaaattatcaatatgctaaactttttaatgtaacaataggagaaacataagcaaacaccttcaaataaaacaaagcaagaatccaaataggcaattgaaaaaacaatactcattgacaattaacacgaaaaaaatgtgaacttcataagtaacttttacaagtgcaaattaaaacagcaatggcataccatgttaaagccatcaaactggcaaaatgcaaaagaacaataatccctgctgttagctaggattgagggagagggccytttaatatactgccagtagaagagtaaattggtaagttggtactcttttggaggggaatttggcaacatacatcaaaagctttctaaatgcaaataccttttgactcaagaattgtttttccaaaagacatactcagaggtggccacaaagatttaactactctgatgggaagagagatcttcatatatgggacttctcccttgaaatggaggataatacacaagccacaaatagaaagagaacaacagtggattattaaaaggcagggccttcctgtctattggatgccctgctcgggtataacacaggaaccatgggctcccaagggaccctg

SEQ ID NO: 5592 - DNA, 2016 bp, Homo sapiens
agacaaaaggtattttttataaatacttgatgtctttaatagactacaagatagtctgggctctatcgaacaagaatgagaaattataatgagacaattgcctaagatgaaaagacaacaaaatgaaatttaaaggcaaatggttggaataagaaaaaaatggcaaggaaaaccaaaggttccattgtagaatcaaaatcgaagtgggatgatgtagagagccacagtgatattaaggaaaggcaaatgtgatgaaagcagtggagaaaagtattgaagacagagaacagaagccaaaactgaagaatcaaatgtatttctgaacaataaaacagcaatgatagatagaattactaattaaacatcacacacacacacatttttttctacacattttctgcaaattaagacattaccacattacattagagaaaaatatgaaataactccaacacctagaagaaccagagcaaaaatttcccttataaacacaaattctataactatccaataaaaactgggcaaattaaacccaaagtaatacaaagttagcgggttttagatttctcctgtgtaatgtcaaacagcccaaaataagagaatccaaaacaccgttgaaggaaaactattgtaacacaatagttaccactgccactttttctatgtgcaggcaataaaaagatttccagatatctgaaatatatatttcccggggtatatttcttaaaaaaaaattagttgaaaaaattcattctatgtgaaatgtagaacaaaactaagaatgtaagactagaaaattctgtgaaaacaaaaaataaagctggtggtgacaaaacagttaaaacatggaattaattcaaaaatatttcttaataatatcaaagccaacactgatttagtgcttactatcttcctgcactgtgctaagtattttacacatacctttatttagaagacttcatgcagatgtcaaaaactattcaacatggccaggcgtggggctcacacctataatcctagcacttgcggaggccaaagcaagaagatcacttgaggtcaggagttcaaggccagcctgggcaacatagcaagatcctgcttctaaaaagttatttattaaataaaagatttaaaatataaaaacaggaatgtaataaaaacaatctaagctttaaatcttcagattgtattatgaaaaccaaccactgaggaaagagtgaaagaagttctagaagttcttagttcttcattttaatattgaaaagacaatgatatgcaaaagaaactgttttaattttcatttcctttgatgatttgaggcatattaggctgcccacaaagtaaaaaataaaattaaaatataaggtaaatgaaaagttacaaagcatgttatgacaaaaatagtaggcataaaagaaattatcaatatgctaaactttttaatgtaacaataggagaaacataagcaaacaccttcaaataaaacaaagcaagaatccaaataggcaattgaaaaaacaatactcattgacaattaacacgaaaaaaatgtgaacttcataagtaacttttacaagtgcaaattaaaacagcaatggcataccatgttaaagccatcaaactggcaaaatgcaaaagaacaataatccctgctgttagctaggattgagggagagggccctttaatatactgccagtagaagagtaaattggtaagttggtactcttttggaggggaatttggcaacatacatcaaaagctttctaaatgcaaataccttttgactcaagaattgtttttccaaaagacatactcagaggtggccacaaagatttaactactctgatgggaagagagatcttcatatatgggacttctcccttgaaatggaggataatacacaagccacaaatagaaagagracaacagtggattattaaaaggcagggccttcctgtctattggatgccctgctcgggtataacacaggaaccatgggctcccaagggaccctg

SEQ ID NO: 5593 - DNA, 795 bp, Homo sapiens
acctccatgacccagacacctcccaccaggcctgacttccaacactggggattttatttcaacatgagattggggtggggacaratatccaaactgcatcaacctctgatgtaaaaatccaataatcaagcagcaatattttaagtgcagcacagagtcttccatgtcattatttacaagacctgaatctctttacataataacaaaattgaatacagacttagccattaagtccatttaaaaaatctgtccttttacatggtgacagatttcattttttgttatctttctctttatcttttgctcttctttgacttccttttcttatgtctgtgttttttggcttttttccaattcccctgcagtacctgcatgtatggttttttttttttttttttttaatgtttcttgtgcttttccttttcctactttttattattcttcctgctattctaactttctgcagaactggccctgctgctatggcctcaagtctggcctccagaagggctctgacttctgctcggactctggctcctcctatgcctacctggccaactgtgtccaggctttcttttgctttctcctgctttctccattatcttatctttcaggaccttagaagtgtttcctgaagtttcctcatcttttacagatacataacttccactgtcactttcattataatctggctcaaaagcagcttcatcagtgtctctagttaagtcaggggacagtcgagaggagtgacttaactggggtttagggttggtagcattcttctcaacttgccca

SEQ ID NO: 5594 - DNA, 795 bp, Homo sapiens
acctccatgacccagacacctcccaccaggcctgacttccaacactggggattttatttcaacatgagattggggtggggacaaatatccaaactgcatcaacctctgatgtaaaaatccaataatcaagcagcaatattttaagtgcagcacagagtcttccatgtcattatttacaagacctgaatctctttacataataacaaaattgaatacagacttagccattaagtccatttaaaaaatctgtccttttacatggtgacagatttcaytttttgttatctttctctttatcttttgctcttctttgacttccttttcttatgtctgtgttttttggcttttttccaattcccctgcagtacctgcatgtatggttttttttttttttttttttaatgtttcttgtgcttttccttttcctactttttattattcttcctgctattctaactttctgcagaactggccctgctgctatggcctcaagtctggcctccagaagggctctgacttctgctcggactctggctcctcctatgcctacctggccaactgtgtccaggctttcttttgctttctcctgctttctccattatcttatctttcaggaccttagaagtgtttcctgaagtttcctcatcttttacagatacataacttccactgtcactttcattataatctggctcaaaagcagcttcatcagtgtctctagttaagtcaggggacagtcgagaggagtgacttaactggggtttagggttggtagcattcttctcaacttgccca

SEQ ID NO: 5595 - DNA, 795 bp, Homo sapiens
acctccatgacccagacacctcccaccaggcctgacttccaacactggggattttatttcaacatgagattggggtggggacaaatatccaaactgcatcaacctctgatgtaaaaatccaataatcaagcagcaatattttaagtgcagcacagagtcttccatgtcattatttacaagacctgaatctctttacataataacaaaattgaatacagacttagccattaagtccatttaaaaaatctgtccttttacatggtgacagatttcattttttgttatctttctctttatcttttgcycttctttgacttccttttcttatgtctgtgttttttggcttttttccaattcccctgcagtacctgcatgtatggttttttttttttttttttttaatgtttcttgtgcttttccttttcctactttttattattcttcctgctattctaactttctgcagaactggccctgctgctatggcctcaagtctggcctccagaagggctctgacttctgctcggactctggctcctcctatgcctacctggccaactgtgtccaggctttcttttgctttctcctgctttctccattatcttatctttcaggaccttagaagtgtttcctgaagtttcctcatcttttacagatacataacttccactgtcactttcattataatctggctcaaaagcagcttcatcagtgtctctagttaagtcaggggacagtcgagaggagtgacttaactggggtttagggttggtagcattcttctcaacttgccca

SEQ ID NO: 5596 - DNA, 588 bp, Homo sapiens
tcaatgaaatctttcatctctatcttgtggggaaccgaaattgccaccttaggtagcatcttactctagccatcttcttatatttggccagacttctttccttgcacaagacaagcccttaacatgctgctctaactttcccatttgtcatgatacttaggcaataaagctgcgggttgctgagagcctgccatgtgccaggcaccttggtaagtttgtcacatgtatmatctttttaaattttctcccaaatctgacgtggaaaatgttccccctcgccccccttttcttttcaggcaaggaagcttgagtcctagtgtagttaaccatgtcctaagacaacccagcctctaagtgacagaaaagtgatttgccccattgtattctgttctttattctatgcaagcactcagagctcttaatgttgataaataaataataacagctgacaatgcatgtgctcaacataccacatgcagtcactcacaaaaataacatgaagtccttttactgtttttctcattttacacatgagaaaactgtcttaaagatttatataatttcccccaaatcacaaagttaccaggt

SEQ ID NO: 5597 - DNA, 732 bp, Homo sapiens
agggaaactgtagagctcctaatcagctgtatcaggcatacayatggctaattctgaatgcccagctctgtgttcccttctcccttttctcctctctttctatgctatatatgaaaaaaatagaagaataaatagcagaaccaaaaagtggtataagagtttggaggaaagagacttatgtaaactggagaaccaaaaatatataaatatattggaggtaatatttgagtagggccaggccaggggttgatagaaaggaggagttagtaaattaaaggcaaggaaaacagaaagagcaaaggcaaagggaggtggccacagctcaaattcagcagaccgtgagatcaagcagactggaacaaacgtttcatgctgaggagcacaggcagatgagataggacagataaagtggagtgtgattctggaggatctgaatacatggatggcaagcttatatttactcttagagggtctaagataagtctggatatccggtattcccaacttgttcttttttaggagtgccttaactattatcaatcctttgtgcctccacataaaatttagaatcatcttgtcaaattctctttgggattgtacctgtaatagcattggttctatagattaatttaaggggaactgacatctttacacttttagctaacaatgaatatggtatatcttctcatttacttacttttctttttttttaagacaaggtcttgctctgtt

SEQ ID NO: 5598 - DNA, 806 bp, Homo sapiens
ttcccaggcccgccccttatgaacctctgctgtgtggtcctccgagttctttcctctccgccagtcagcctggaaactatgtgatgccacggttgtgaggtgtggggtgctggggtcaccgtgtagaggagagctgcctgctaatcaggaatacctgtttcctgttctggacgttttttgtttgtttgtttgtttgtttgtttgtttgtgacagagtckcactctgtcgcccaggctggggtgcagtggcacgagctcagctaactgcaacctcagcctcccaggttcaagtgattctcgtgcctcggcctcctgagtagctgggattacaggtgtgcaccaccacgcctagctaatttttgtacttttagaagagatggggtttcaccatgttggccaggctggtctcgaactcccgacctcaggagatccgcccacctcggcctcccaaagtactgggattacaggtgtgagccaccgcacccagcctgttttggactttctgtggacaaatttgcatgaaggctttgagatgtggggcattgtctgttacagcagctagcattaccaagccaggaattggaggagcgggtttcaagcctgtctacctcatttcccccagttcccatagtgtagggtgttgagtgaggcttcgagggagcagcatgttccccaaatatgtgtgtgtgtgcacacatgtgcgtatgtacagcagaattatggtgagaagaatctccactcccttcccacagtctctgaaccgtggtcatctttgccttgcctgactttgaaaggctggtgggttt

SEQ ID NO: 5599 - DNA, 743 bp, Homo sapiens
aagtatctgctatagttttgagatgtgtctagtattgtacttgttatctataccagttttggggaaattaataagagtattagagggttctgtctttttttttttttttttttttgagatggagtcttactctcagctcactgcaacctccgcctcccaggttcaagcgattcttctgcttcagcctcctgagtagctgggattataggcgtgcactaccatacctagctaatgtttgtatttttagtagagacagggtctcactgtcttggccaggctggtcttgaactcctgaccctgtgatccacccgccttggcctcccaaagtgctgggattacaggcgtgagccaccatgcctggccttagagagttctgttttttttttttgtttgtttgtttktttgaaatggagttttgctcttgttgcccaggctggagtgcaatggcgcgatctcggctcactgcaacctccgcctcccaggttcaagcaattctcctgcctcagcctcccaagtagctgggattacaggcatgcaccaccacattaatcttgtatttttagtagagacggggtttctccatgttgaggctggtttcgaactcctgatctcagatgatccacctgcctccacctcccaaagtgctgggattacagacttgagccaccgcacctggctgagagttctgtcttaaatgttcttcagtatagcaagtatgtgagtgtctaacttatgtttagccc

SEQ ID NO: 5600 - DNA, 743 bp, Homo sapiens
aagtatctgctatagttttgagatgtgtctagtattgtacttgttatctataccagttttggggaaattaataagagtattagagggttctgtctttttttttttttttttttttgagatggagtcttactctcagctcactgcaacctccgcctcccaggttcaagcgattcttctgcttcagcctcctgagtagctgggattataggcgtgcactaccatacctagctaatgtttgtatttttagtagagacagggtctcactgtcttggccaggctggtcttgaactcctgaccctgtgatccacccgccttggcctcccaaagtgctgggattacaggcgtgagccaccatgcctggccttagagagttctgttttttttttttgtttgtttgtttgtttgaaatggagttttgctcttgttgcccaggctggagtgcaatggcgcgatctcrgctcactgcaacctccgcctcccaggttcaagcaattctcctgcctcagcctcccaagtagctgggattacaggcatgcaccaccacattaatcttgtatttttagtagagacggggtttctccatgttgaggctggtttcgaactcctgatctcagatgatccacctgcctccacctcccaaagtgctgggattacagacttgagccaccgcacctggctgagagttctgtcttaaatgttcttcagtatagcaagtatgtgagtgtctaacttatgtttagccc

SEQ ID NO: 5601 - DNA, 777 bp, Homo sapiens
tactgttattccttgaaatggttttcctacactggttgtggagtaatccatccttcctgtagtggtcatatgctaaattcttgtaaatcttagatctggtcttcttggcctattttttttttttttttttttttgagatacagtcttgctctctcgcccaagctggagtgcagtggtgcgatcttggctcactgcagcctccgcctcctgagctgaagcaattctcctgcctcagcctcccaagtaactaggattacaggcatgcgccaccacgcctggctaatttttttgtatttttagtagagacacggtttcaccatgytggccagactggtttcaaactcctgacctcaagtgatccgcccatgtcggcctcccaaagtgctggaattacaagtgtgagccaccatgcccagtcttcttggcctattgatttgcctattcccacacttgttctacattattttttatttttcttctttaactattggtaatacaaaccatttgtgtggttcaaaatcctaagattgtattttagtttactttagtttttgagacagagtctcactctgtcacccaggctggagtgcagtggcatgacctcagctcactgcaacctccacctcctgggttcaagtgattctcctgcctcagcctccctggtagctgggactataggcgtacgctgccacatctggctaatatttttatttttatttttttagcgatggggccttgccgtattgtccaggctcgtcctgaagtcctggcctcaag

SEQ ID NO: 5602 - DNA, 807 bp, Homo sapiens
gtgattgggctccacgggtgtcagcggctttggtagtaatggcagcggaacttgaggagccgagaccacgggccatagcgctagggaggcagagctgcgacaatcaccctggcagcatgactatgtttttcttcatgcggacatgatatccatgggattcctgtgacgtgtggtaacgcgtgtacatcgcgtagtgatcgatggtcaactgaggggatgtagggcatccatcccgtgggtatctgtcatctctacctgttgggagcatctcaggtgctgtcttccaggagctcttcggaaacaagcactaatacatcgttgttacccctagtcgccctactccgccgtagaacattattggaacgtattccctccatccaaacgcatgctcggacccatttcaccaacctctcttcaccgcagtcacccacacaccctctccagcctstggtgtctatcgttctactctctacctccacaaggtgaacattttgagctcccaggattggagtaagaacctgccctctctgtctttctgtgcccggctcgtttgatgttccatcgtgacctttagctccgcctctgttgctgcagaccagaggatttcgttcttttctatggccaaagagtattccatggtgtctatatgccacatttttgttaatccatttcccggccgatggacacttaggttgtcttagccacatcttccctacctgcacgtccttcataggctctctgcaagaagaaaaatatggctctttctgcccgacctcgcaggcagtcagaccttaccgttgtcttccc

SEQ ID NO: 5603 - DNA, 819 bp, Homo sapiens
atgtgaaaatgaatcttgagaggtcccgttagtcagaccaacctggccacgggcattgaagcgtggagatgcagcagttcgtggggaaaacccaacggccaggctgaccaaagcgcatgtgcggggttggggttcctgacagacttctagccsaagtttgcttcccattgcctgacctacgctctctatcgtctctccaaatgtcaaggaacatgtggagatggtacctatccccagcgccaagattcgctgtgggactttttttcccctcccctccttagcacagatgagcccagttctacaaccctctattcaacccgtactgatcttattgtttggctgattccccaggtcaatggcagaagtcagtcgacttcttgccaaaacccctctgtaggggcaaagtagacgtccaaccaactgcacaaacctgtcccgtgtcattcgtgggatcttggcacagtcggatcacctgcagggaccagaccctatcggggatagagatgtttgccatccccacgggaggctggcttgcttgccagcgtgttgtgggtggatgtcagtgggtgacagcgacggaagaaggtgtccgatcccgtggctggcgtccaccctagcccggggcaaggggctgacaccaaggaaaggagagaagcatgtcgcgtgctgggagctggaagaaggagtccagggtgtccagggggtgcacagggctggctggccaggtctgggagtgaggctgtgcagtcaaacggaggttgtgcagatgcctggggcgttagggcacctcgcgggctgcctatgccataggtcggaggg

SEQ ID NO: 5604 - DNA, 819 bp, Homo sapiens
atgtgaaaatgaatcttgagaggtcccgttagtcagaccaacctggccacgggcattgaagcgtggagatgcagcagttcgtggggaaaacccaacggccaggctgaccaaagcgcatgtgcggggttggggttcctgacagacttctagcccaagtttgcttcccattgcctgacctacgctctctatcgtctctccaaatgtcaaggaacatgtggagatggtacctatccccagcgccaagattcgctgtgggactttttttcccmtcccctccttagcacagatgagcccagttctacaaccctctattcaacccgtactgatcttattgtttggctgattccccaggtcaatggcagaagtcagtcgacttcttgccaaaacccctctgtaggggcaaagtagacgtccaaccaactgcacaaacctgtcccgtgtcattcgtgggatcttggcacagtcggatcacctgcagggaccagaccctatcggggatagagatgtttgccatccccacgggaggctggcttgcttgccagcgtgttgtgggtggatgtcagtgggtgacagcgacggaagaaggtgtccgatcccgtggctggcgtccaccctagcccggggcaaggggctgacaccaaggaaaggagagaagcatgtcgcgtgctgggagctggaagaaggagtccagggtgtccagggggtgcacagggctggctggccaggtctgggagtgaggctgtgcagtcaaacggaggttgtgcagatgcctggggcgttagggcacctcgcgggctgcctatgccataggtcggaggg

SEQ ID NO: 5605 - DNA, 819 bp, Homo sapiens
atgtgaaaatgaatcttgagaggtcccgttagtcagaccaacctggccacgggcattgaagcgtggagatgcagcagttcgtggggaaaacccaacggccaggctgaccaaagcgcatgtgcggggttggggttcctgacagacttctagcccaagtttgcttcccattgcctgacctacgctctctatcgtctctccaaatgtcaaggaacatgtggagatggtacctatccccagcgccaagattcgctgtgggactttttttcccctcccctccttagcacagatgagcccagttctmcaaccctctattcaacccgtactgatcttattgtttggctgattccccaggtcaatggcagaagtcagtcgacttcttgccaaaacccctctgtaggggcaaagtagacgtccaaccaactgcacaaacctgtcccgtgtcattcgtgggatcttggcacagtcggatcacctgcagggaccagaccctatcggggatagagatgtttgccatccccacgggaggctggcttgcttgccagcgtgttgtgggtggatgtcagtgggtgacagcgacggaagaaggtgtccgatcccgtggctggcgtccaccctagcccggggcaaggggctgacaccaaggaaaggagagaagcatgtcgcgtgctgggagctggaagaaggagtccagggtgtccagggggtgcacagggctggctggccaggtctgggagtgaggctgtgcagtcaaacggaggttgtgcagatgcctggggcgttagggcacctcgcgggctgcctatgccataggtcggaggg

SEQ ID NO: 5606 - DNA, 819 bp, Homo sapiens
atgtgaaaatgaatcttgagaggtcccgttagtcagaccaacctggccacgggcattgaagcgtggagatgcagcagttcgtggggaaaacccaacggccaggctgaccaaagcgcatgtgcggggttggggttcctgacagacttctagcccaagtttgcttcccattgcctgacctacgctctctatcgtctctccaaatgtcaaggaacatgtggagatggtacctatccccagcgccaagattcgctgtgggactttttttcccctcccctccttagcacagatgagcccagttctacaaccctctattcaacccgtactgatcttattgtttggctgattccccaggtcaatggcagaagtcagtcgacttcttgccaaaacccctctgtaggggcaaagtagacgtccaaccaactgcacaaacctgtcccgtgtcattcgtgggatcttggcacagtcggatcacctgcagggaccagaccctatcggggatagagatgtttgccatccccacgggaggctggcttgcttgccagcgtgttgtgggtggatgtcagtgggtgacagcgacggaagaaggtgtccgatcccgtggctggcgtccaccctagcccggggcaaggggctgacaccaaggaaaggagagaagcatgtcgcrtgctgggagctggaagaaggagtccagggtgtccagggggtgcacagggctggctggccaggtctgggagtgaggctgtgcagtcaaacggaggttgtgcagatgcctggggcgttagggcacctcgcgggctgcctatgccataggtcggaggg

SEQ ID NO: 5607 - DNA, 723 bp, Homo sapiens
tcctcagaaattatttgggaagcaactggattatccgtacttacattgcatgggagcttgagttattttatttctatgacaaaggaaasagttgatctagacaagatatattctagtaggaaattgtatcagattaacagaaaccatgcccatttctttttggccataaaacaagacagggaaagcacagatggctctctgtggatgaccaaactggggaaaattaccagatttcaggaaagatcctatagtttagactacatagcttctttgaagaatcaaacctgccttcttttaaaaataaatttgctgtgataagcagaaaatccttctaggaaaattttgattcatataaatgtaaataacaattaaagaggatatttttacttatgaaactaaaggtagtctgtattaatttactattgttgattaacaaattaccacaaacttagtgacttatatgatataaattaattctcttacagtctggaggtcagaaatcctaaaatcaagctgtcagcagggctgtgttccttcttgaggctctaggggagaattcatttctttgacttttcaggcttctagaggccacctgaattccttgacttgtgtccccatcttccatcttcaaagccaatgttataacttcttccggtttttctgccttgaaccctccttcttccttcttagaaagccccttgtgattacattgtgcccacccag

SEQ ID NO: 5608 - DNA, 761 bp, Homo sapiens
ctgggttcaagcaattctcatgcctcagcctctcaagtaactgggactacaggtgtgcaccaccgcacttggctaatttttgtattttttgtagagacagggtttcaccatgttggtcaggcttgtcttgaactcctgacctcaagcagtctgcccatcttggcctcccaaagtgctgggattacaggcgtgagccaccatgcccagcctggatatggtgatatgatgtttagttagycacagcctctggtgaggacagttgactaatttaaaaatgcttggcacacacatgagcattgtatcctgctgagagtcttccacagatttgtcctttggtctaacttatatttctctaggtgaagtttacactcatttctttttgttctacccttatcggtgactaagagaccagctgtattccaacttctgaatactggcagaattctgaatcagtagctcttccaaaagggcctagcttacctcagagaatcagtctggcccttgtgtccttgtctcctctatggagaacatggagttgcttttctttgcagttggttgtagcttaaaccatagtgcattgctgagtcgtgtgatgtgtgattcatcaggcctcaggtgacaacggtggatttccttcaggaatgagtagcaaacattttggcccctctttgggtgccaagcaccatgaggtaagggagtactttacagacccctagagatccacgggtgctctagatatagccatatttcagcccctggat

SEQ ID NO: 5609 - DNA, 761 bp, Homo sapiens
ctgggttcaagcaattctcatgcctcagcctctcaagtaactgggactacaggtgtgcaccaccgcacttggctaatttttgtattttttgtagagacagggtttcaccatgttggtcaggcttgtcttgaactcctgacctcaagcagtctgcccatcttggcctcccaaagtgctgggattacaggcgtgagccaccatgcccagcctggatatggtgatatgatgtttagttagccacagcctctggtgaggacagttgactaatttaaaaatgcttggcacacacatgagcattgtatcctgctgagagtcttccacagatttgtcctttggtctaacttatatttctctwggtgaagtttacactcatttctttttgttctacccttatcggtgactaagagaccagctgtattccaacttctgaatactggcagaattctgaatcagtagctcttccaaaagggcctagcttacctcagagaatcagtctggcccttgtgtccttgtctcctctatggagaacatggagttgcttttctttgcagttggttgtagcttaaaccatagtgcattgctgagtcgtgtgatgtgtgattcatcaggcctcaggtgacaacggtggatttccttcaggaatgagtagcaaacattttggcccctctttgggtgccaagcaccatgaggtaagggagtactttacagacccctagagatccacgggtgctctagatatagccatatttcagcccctggat

SEQ ID NO: 5610 - DNA, 761 bp, Homo sapiens
ctgggttcaagcaattctcatgcctcagcctctcaagtaactgggactacaggtgtgcaccaccgcacttggctaatttttgtattttttgtagagacagggtttcaccatgttggtcaggcttgtcttgaactcctgacctcaagcagtctgcccatcttggcctcccaaagtgctgggattacaggcgtgagccaccatgcccagcctggatatggtgatatgatgtttagttagccacagcctctggtgaggacagttgactaatttaaaaatgcttggcacacacatgagcattgtatcctgctgagagtcttccacagatttgtcctttggtctaacttatatttctctaggtgaagtttacactcatttctttttgttctacccttatyggtgactaagagaccagctgtattccaacttctgaatactggcagaattctgaatcagtagctcttccaaaagggcctagcttacctcagagaatcagtctggcccttgtgtccttgtctcctctatggagaacatggagttgcttttctttgcagttggttgtagcttaaaccatagtgcattgctgagtcgtgtgatgtgtgattcatcaggcctcaggtgacaacggtggatttccttcaggaatgagtagcaaacattttggcccctctttgggtgccaagcaccatgaggtaagggagtactttacagacccctagagatccacgggtgctctagatatagccatatttcagcccctggat

SEQ ID NO: 5611 - DNA, 833 bp, Homo sapiens
atccaggttctttgtgaacttgagcaagttgataaacctcagtttccttaatttgtgcctcagtttcctcaaaagcaaggtagtacctataaagcacttasaaaaagacatggtacagagatggtgttcaaaaaataatggccatatgattaattattctttcatgttgttatgaatatgagaatctgacccatatttgagcaccactctcatgaggctctgcttttcctgtaatttgcttattcctattaaattttgtagtcctcacatgattcctggtagcaattatcgatgaaattaacaaaagcaaagggtttggtgtttgccctggggcagcaagaaaagaggaattactgataactggttttggggttcaggcattaacctgaacccaagttgttggttctccagcatttaaggttgaccccatcttaaatatagatccataaggcccatatcatttggtaagcagtagttcaggatgcagtggagtagtgtggttgaaaatctaggttttggagtctgatttttctcatttgactccagttttgacacttattctataactatgggcaacttatttaatcataataatatattccttcagtttattgtcaagatcaaatgagaatatattcacagtgctttgtacgatgtaggaggtcaagaaattctagtaataattttaagttatagaaatgaatttctaaaacaaagtaatagggtttggatctgagtccccaccaaatcgcatgttgaattgtagtccccagtgttggaggtgaggcctagtggaaggtgtttggatcatggggatagatttttcatgaatg

SEQ ID NO: 5612 - DNA, 800 bp, Homo sapiens
gccatgattgtaagtttcctgaggccttaccagaatccaggcagatgccagcatcttgcatcctgtacagcctgcagaactatgagctaattaaatctcttttctttataaattacccagtctcaaatatttctttataggaatatgagamcagactaatacataaagtcaattcttagaaatgaccatgttcaaaagtaatccaagccacattctctgggcttcatagtgcatcttaaggaggagaagaaggaaggaatattaagacctaccttcctggcaagtgaaggttcccagtgctcaaagaggcttactgctagagccaggtggagctgctctcacattcacaagaaatgtaggagactctgaagttggcttaccctgacacccacccatcaactgaaaatttaaaatgtgcttgaactcgttatttcgtagcagataaatttttttaaataaatttttttcttgaatacaacaaaatacgtgtctattatagaaatgcaagaaagcatagaataacccaaagaggcaaaccgggtttatttccactgcccagaagttgcccttgcaaggtttttgcacagcaccttaggtgggtaagcaacataaagcagggctgtgtctttctggcctaatcccaagaccttagaaaggaatgcagcatcatggtacagaagagtgattagtaaagagtggctggatgaatgacgataatcatgtctataaatatatttttacccccactggggataaaaattgccaggtagatttctttccgttgttgtttcacttaattg

SEQ ID NO: 5613 - DNA, 872 bp, Homo sapiens
tttattaatcaaggtggtagcctgagggtcaggggcaggagagaaaagcaaagccgcttcctctggcactaaatcctgggccaacagagaaagaattcctgttagtcttgctctatttcttcattaacccttgcatgcttagaaagtgctttgctgcctaagtctctcagcccaagtcctttagagaaatctctatgtaggaaacaccacagatttatcatttatgaattattcatcattatcattattagctctcataattccagccatgctgctcatggggctctgtctttttgcttaagtcatataaaactcagctgacaaaacattagcagacattctatggggaattgttggggcctggtttggctgattacagccaccttctatatctaacaccagtgatgttgtgtatatatgactgctcatactttccaaacacaaagtttccaaaaaagtaaagtttatcaaagcaataggttgaagccaatgagtattcccactcaaagaacttggtagcaaagcyagcttcatgagtaaaattgaaacccactcttcatcgatagcccatgtgtagcgggcacagtgatgggtggctaatgtacaacagtacgatagaccattccttatgacatctcaagcagtcagagatttatttttcacagataccttaaatgtcactaatactgacccattctttacatttaggtgtacactcataaaatgcaaatatccaagtaaagggtttcatctccagctccctatcttttattataaatctgtgcatcaaattattcgtccaaggcaattggaaagggaatggattgaaagcacagcctctctgtttgcggggagtgggatttgcaaccaag

SEQ ID NO: 5614 - DNA, 774 bp, Homo sapiens
tggagaggtgtttaatccgtaggaatgaagcagacctgtgaatgacatagggaagaagggtgccaatatcataaattgttagttttgttagttttagtccacggtggtgttcagacacaactgtctgggagggaaggcagcctgcacaggtgttgaacttaccctagcatgtgggtgtcagaatgtcacaattaaatcttattttttctttatacattcagagagcatttaaaaaattctattctatggttccagttataggagtcacmttattattctagcatgccatctgatattaaaataatttaatatgaaggcctatgggttctaacacaataacttcttatcctatcatttacatacttctaatttctaatatctcctattttattctatttatttattatttaaaggcagggtcttgctctgtcacacaggctggagtacagtagctacgatcatggctcactgcagcctcgacctcccaggctcaagtgatccttccacttcagtctcccaagtagctggcactgtggttgcatgccacaagtccagctaatttttttaaaataatttttttgtagagatggagtctcactatgttgtctgggctggtctcagacttctgagatcaagtgatcctcctgcctcagcctcccaaagtgctaggagtacaggcataagccactatgcctggcctctcttatttttaaaaataatacttatctttttatctcattataaaatttatgagtaattgatgcagaaaatttg

SEQ ID NO: 5615 - DNA, 964 bp, Homo sapiens
atcccaggtggtaacactgggcttctctctggatttccccaccttgaaactttttcctcatattctgttggtgggagtgtagattagtacagtcactatggagaacagtatggaagttcctcaggaaactaaaaacatatagttctctaccatctgattcagcaattccactactgggtatatgtcgaaaagaaagggaatcaatatatcaaagagttatctgcatgcccatgtgtattgcagcactattcacagtagcgaagatatgcaatcaacctaagttctcatcaatggatgggtaaataaagtaaatgtggtatatatatatatgcaatggaatattattcagccataaaaagaatgaaatcctgtaatttcctgcaacatggatggaactggaggtcattatgttaaataagccaaccacagggagacaaatatcgtatgttctcactcatatgtgggaactaaaattgtggatctcatgaggatatgcagtagattggtggttactagaggccaggaaggagagagtggacaaagtagggaaaaggatataaatgggtttattaccattgaaccttacacttaaaaatggtaaaaatggtaccttttaaaatgttgtttttagaaaaagaaactttccygtaaccagtccctggtacactcctgccctcatcctctgggagaccgtggtcctgaggtctcaaagtggttccctaaggacccaccagaggcgttgcccagaagacagagacctttccagcgaatgcattgctgactgttgaaacttctccactgatttcactcctcaaaaaaagaaaaaaaatatgtttctgaattttgcaagcctttaagatgtaaatccttgcactgcattttcttatagcccaaattcatctgaagccttgggttgggagattgtttctgtacattaaataggggttaactctgagatcctgca

SEQ ID NO: 5616 - DNA, 964 bp, Homo sapiens
atcccaggtggtaacactgggcttctctctggatttccccaccttgaaactttttcctcatattctgttggtgggagtgtagattagtacagtcactatggagaacagtatggaagttcctcaggaaactaaaaacatatagttctctaccatctgattcagcaattccactactgggtatatgtcgaaaagaaagggaatcaatatatcaaagagttatctgcatgcccatgtgtattgcagcactattcacagtagcgaagatatgcaatcaacctaagttctcatcaatggatgggtaaataaagtaaatgtggtatatatatatatgcaatggaatattattcagccataaaaagaatgaaatcctgtaatttcctgcaacatggatggaactggaggtcattatgttaaataagccaaccacagggagacaaatatcgtatgttctcactcatatgtgggaactaaaattgtggatctcatgaggatatgcagtagattggtggttactagaggccaggaaggagagagtggacaaagtagggaaaaggatataaatgggtttattaccattgaaccttacacttaaaaatggtaaaaatggtaccttttaaaatgttgtttttagaaaaagaaactttcccgtaaccagtccctggtacactcctgccctcatcctctgggagaccgtggtcctgaggtctcaaagtggttccctaaggacccaccagaggcrttgcccagaagacagagacctttccagcgaatgcattgctgactgttgaaacttctccactgatttcactcctcaaaaaaagaaaaaaaatatgtttctgaattttgcaagcctttaagatgtaaatccttgcactgcattttcttatagcccaaattcatctgaagccttgggttgggagattgtttctgtacattaaataggggttaactctgagatcctgca

SEQ ID NO: 5617 - DNA, 835 bp, Homo sapiens
ggcaaggaaggagggatggtgtcttgcccaaaggcacggcaggtgctaacgtgggtctgctggggcaagcggaggcagacggaggccagcttcaagaggcctgtgcaagcccctctggaaagctgggacttctgggggcactggggacatggcacagctgagctcagagaacaagagggtagatagagaaggaagaggggctgtagagagaggtgatggcagagggaagagaggggcatggagaggggccaggtgagtggggtgccctcaggcactggatcagaaagtctgggtgtgggctggggcggtggctcatgcctataatcccagcactttgtgaggccgaggtgggtggattgcttgaggtcaggagttcaagaccagcctgaccaacatagtgaaaccccgactccactaaaaatacaaaaaaattagccgggcatggtggtgggtgcctgtaatcccagctacttgggaggctgaggcaagagaatcgcttgaacctgagaggtggaggtttcagtgagccgagatcgtgccactgcactccagcctgggtgacagagggagactctgtcaaaaaaaaagaaaaaagaaaggctggkgtgtttaccatccagcaaagggaggtaaagtgatagggagaggggtcctcttttccaactcaaatggagatgccatatgggctagctctggtgctgcaggcaggacccccgtgagcactccctctggacccaagccctgttctgggaaggagttgcccggcttcccgatagcagtcctccaagctctgagcactcttgggctggtgagccagtatgggatgaggagggga

SEQ ID NO: 5618 - DNA, 655 bp, Homo sapiens
gaaattttcaatctcatcaagtctcaacaatctctcttccctacacaatgcaagaatttcagtcccatcaacatttgtaatttatttaaagcgcgttgcaaaaagagcataggctatggagttaaaccactattgttcaagtctcccctctcctattgagtagatgtataactttaattcagccacttcacctttgtaagaactttcagcactctcgcctgtaaagcagaaataaaactaatcacattttaggaattttgtaaaggttacacaaaataatatacattaaaatcttagcatataattaaaactgaaaagatcttagaaacttgtcccttttacttcatctctctcaagttcaaagttccacagatctctaggcagggtcaaaatgccaccagtctctttgctaaggcatagcacgagtgacttttattccagttcccaaccagttcctcatctccatctgagagcacctcagcctggacttcattgtccatatcactatcagcatttcggtcaaagccattcagcaagactctatgaagttcaaactttcccacatcttctgaccttcttctgaggactccaaactgttccaacctcascctgttacccagttccagagtcacttccacattttgggtaattttta

SEQ ID NO: 5619 - DNA, 787 bp, Homo sapiens
ttgcagtgatcaaatttgtactgttgaacatttcaaataaaattaccatagtgaaaacctttttgcacaggctaatgagactttaagtgagatcaagcaggaggcaratccaatcattcacgtaagccttcatatgtaactcagggctctctggtttaagaaacagactgctcaatgagaaaaagaccaacaacccaatggaaaaacgagtatagcacttgggaaaaaacgctcaacttcacttataataaaataaaagtaaacttcaagaaactatttttacctgtcagattgataaagatcaagaagttgtgataggcaagagtcctgtacgtcgttgctgagaatataaattgaaagacaggttttggaaggacggttgacaatgtctatcaaaaatttaagtgtaatgaaatagactcagcaatttcacttctatgaattctttattcttttagaatgtatgcacagtagtactagcgttctttataatagtaaatgtctggaaacaatctagatgtccatcaatgggctacgggttaaatacacttttgtatttccatatgatagagcagtattcagccagtaaaaacaaagagctacatctcaacaaacgagtataggaaaaattccaagatctatagtgtacgaaagaaagctaccatttatgttgcaggcactgttctaaatccttcacacttgttaattaatttaatcatcaagtcatatgaagtagtaccatactaatggtacatctcagtttctgtgatgaggacactaaggccca

SEQ ID NO: 5620 - DNA, 787 bp, Homo sapiens
ttgcagtgatcaaatttgtactgttgaacatttcaaataaaattaccatagtgaaaacctttttgcacaggctaatgagactttaagtgagatcaagcaggaggcaaatccaatcattcacgtaagccttcatatgtaactcagggctctctggtttaagaaacagactgctcaatgagaaaaagaccaacaacccaatrgaaaaacgagtatagcacttgggaaaaaacgctcaacttcacttataataaaataaaagtaaacttcaagaaactatttttacctgtcagattgataaagatcaagaagttgtgataggcaagagtcctgtacgtcgttgctgagaatataaattgaaagacaggttttggaaggacggttgacaatgtctatcaaaaatttaagtgtaatgaaatagactcagcaatttcacttctatgaattctttattcttttagaatgtatgcacagtagtactagcgttctttataatagtaaatgtctggaaacaatctagatgtccatcaatgggctacgggttaaatacacttttgtatttccatatgatagagcagtattcagccagtaaaaacaaagagctacatctcaacaaacgagtataggaaaaattccaagatctatagtgtacgaaagaaagctaccatttatgttgcaggcactgttctaaatccttcacacttgttaattaatttaatcatcaagtcatatgaagtagtaccatactaatggtacatctcagtttctgtgatgaggacactaaggccca

SEQ ID NO: 5621 - DNA, 774 bp, Homo sapiens
caaacaaatgggagaacagccccttataaaaccatcagatctcatgagaactcactatcacaagaacagtaagagggtaaccacctgcatgattaaattacctcctactgggtccttttcatgacacgtgaggattatgggaactacaattcaagatgagatttgggtggggacacagccaaaccatatcaaacatcatttattaaatagtttttgccttggtgattttagatgccaccttaataatatacaatactaaaacttcatctgcacttggrtctgtttttgaactttctgtattattctgttggtttgtctgtctattcatgtgtcagtaagacacttttcatcatggaggctttagactgtgatttaatgtctggaagaactcggccttccctctagtgtgttagtgttttcctggctgttactgcacatttatttttcaatacaaggctcagtatcaattgtatgtctccattaaaaaaacttggtttatttatgaggattacattaaatttctaaatttatgatgaactgacatttttatgttaacttgttctatctgaatataagagatgtctgtggttaaactcttcatttgtgtctttttaagaatgctttaaagttttcctcagatgtgttttatacatttcttttaaaatttattcttaagcactcaattttctttgtgcaacttgctttgtttccatttaatgtatcatatatagctgaacaggtcagtacatgttgatctatttcattttaaaaaat

SEQ ID NO: 5622 - DNA, 774 bp, Homo sapiens
caaacaaatgggagaacagccccttataaaaccatcagatctcatgagaactcactatcacaagaacagtaagagggtaaccacctgcatgattaaattacctcctactgggtccttttcatgacacgtgaggattatgggaactacaattcaagatgagatttgggtggggacacagccaaaccatatcaaacatcatttattaaatagtttttgccttggtgattttagatgccaccttaataatatacaatactaaaacttcatctgcacttggatctgtttttgaactttctgtattattctgttggtttgtctgtctattcatgtgtcagtaagacacttttcatcatggaggctttagactgtgatttaatgtctggaagaactcggccttccctctagtgtgttagtgttttcctggctgttactgcacatttatttktcaatacaaggctcagtatcaattgtatgtctccattaaaaaaacttggtttatttatgaggattacattaaatttctaaatttatgatgaactgacatttttatgttaacttgttctatctgaatataagagatgtctgtggttaaactcttcatttgtgtctttttaagaatgctttaaagttttcctcagatgtgttttatacatttcttttaaaatttattcttaagcactcaattttctttgtgcaacttgctttgtttccatttaatgtatcatatatagctgaacaggtcagtacatgttgatctatttcattttaaaaaat

SEQ ID NO: 5623 - DNA, 775 bp, Homo sapiens
agagccattcttaggctctttacagagtaagaaagagtctgactccacttttgacgtttcatcactgagagtggtcaagctccaccccttgcccttcctctcttgccccatatctggycaagtccataaaatagcccatgtgttcccccacttgacacctgtgggtgatttcaaaccatgcaaaccctgcccctgcaaaagaaccttaaccccactccgtaagcacaacacaaatcaaagccccttggctgtcctctactcaacccacttcagatcaggttgggagtgtgccctgctctctccagaaaaccccagcacataagtttgttccttctcactcactgtgtgggtagcatcagtcttaacttctgaaccagctttgggtggggacttgaccccattatctgggaggaactgcaagatacccatctccaattctaagactacaaaattttataaatgaaacattttacaatgaaaaatacagaccaaaaccccaaaacacactaacaaacagggttttatgaagctcttaaagttctactctaatgatataagcctcactaattgctcagtattatcttcatagaaaattgtcaataattaccatgtacgtcattttactcaagtcattacaacatttacctagaatagtctacaaagtatcagactttccattttaataatattttataatatatgtcagtcaatatttatggcaacttctgtatacctgccacttaaacctcctaatatgaaaaacctaagcacattc

SEQ ID NO: 5624 - DNA, 775 bp, Homo sapiens
agagccattcttaggctctttacagagtaagaaagagtctgactccacttttgacgtttcatcactgagagtggtcaagctccaccccttgcccttcctctcttgccccatatctggccaagtccataaaatagcccatgtgttcccccacttgacacctrtgggtgatttcaaaccatgcaaaccctgcccctgcaaaagaaccttaaccccactccgtaagcacaacacaaatcaaagccccttggctgtcctctactcaacccacttcagatcaggttgggagtgtgccctgctctctccagaaaaccccagcacataagtttgttccttctcactcactgtgtgggtagcatcagtcttaacttctgaaccagctttgggtggggacttgaccccattatctgggaggaactgcaagatacccatctccaattctaagactacaaaattttataaatgaaacattttacaatgaaaaatacagaccaaaaccccaaaacacactaacaaacagggttttatgaagctcttaaagttctactctaatgatataagcctcactaattgctcagtattatcttcatagaaaattgtcaataattaccatgtacgtcattttactcaagtcattacaacatttacctagaatagtctacaaagtatcagactttccattttaataatattttataatatatgtcagtcaatatttatggcaacttctgtatacctgccacttaaacctcctaatatgaaaaacctaagcacattc

SEQ ID NO: 5625 - DNA, 621 bp, Homo sapiens
ggctagtttccacttgaatcttcagatctttcttccttcattgtcttgttaactgtccagatttattacctaggagtttttgaaaactcacatattaggcaatagagtgtattctggaattgagagcctattttaaacttttgactaaaaagtttacccattaaatgtcatagattcaaccatcagactgaaaatcctcagtgtatttgaaggagggtattgtctcaaaaatccagagctcaaagtgaagaagaaaggcaaaatttggaatttagctctargaccaactcatcagttcaggggtcagagatttatatagttaaaggacaagtgtgtgtttacctgagtttaaagagcaaagttgcctctggaaagaagccctcactggaggctctggcatttgaaatggtgggcaggagcacatgttgcttaaatttctgacagtggctggagattaccgattggttaggggagaggaagtaaagtaaaatatttataaattctccactgggtggagtctgagcagttctttgaatttctcaccctaagatctggcctgtacattttcaaggaattcttgagaggttcttggagagattctgggagccaaacactccattg

SEQ ID NO: 5626 - DNA, 621 bp, Homo sapiens
ggctagtttccacttgaatcttcagatctttcttccttcattgtcttgttaactgtccagatttattacctaggagtttttgaaaactcacatattaggcaatagagtgtattctggaattgagagcctattttaaacttttgactaaaaagtttacccattaaatgtcatagattcaaccatcagactgaaaatcctcagtgtatttgaaggagggtattgtctcaaaaatccagagctcaaagtgaagaagaaaggcaaaatttggaatttagctctaagacmaactcatcagttcaggggtcagagatttatatagttaaaggacaagtgtgtgtttacctgagtttaaagagcaaagttgcctctggaaagaagccctcactggaggctctggcatttgaaatggtgggcaggagcacatgttgcttaaatttctgacagtggctggagattaccgattggttaggggagaggaagtaaagtaaaatatttataaattctccactgggtggagtctgagcagttctttgaatttctcaccctaagatctggcctgtacattttcaaggaattcttgagaggttcttggagagattctgggagccaaacactccattg

SEQ ID NO: 5627 - DNA, 1515 bp, Homo sapiens
tggaaggtgggctccagcagagagaagaggaaggccagaagtagaccgggacagggggaggaaaggacagagtcaaggaacatttaggagttcggttcccggaggcctggcgacaccctgacggggaggggtgacgcgcacccatttgcaggcagaaaggcaggagcaggggggtgtccgaggatggtggctcggagggaccaggcataggtggtgcaagctcagcagtcactcaaggggtggcatgcggatgagggaggcgcctcccggactgggggaccgggaaaggcattagcaacctgccagaacccggttaacaaaggcaggactacaattcccggcatgctcgggctcggtggggtgacggcgggcggtggctgcgctgcacccgactggtgggcgcaggacctgggtcggcaccggagcctgtcatcccggagcggtcggcgggggtgcagagacggcgatgcgcccctgtcccccgcacccgggccgctccgggctcgcgcctcccgccccgcgccccgccccctgccccaccccagtcgggaggcttagctggggccgcagcgcggcggcaacatcactctcgctgccgctgctccgccccatccccttctgtttttctctctcattctccagtggcggcggcggggaaggcggaggcagaggcagcagcagccgcgctggctcgaatgaatgatcccccagcttggggggaggactccaggtgagcctctgccctcgggaggcccgggacccccggccgcccacgaccggcagcccacgctatggatccctagaggaaggaggagaagacagctcgccgcccacccccatcccattttcctcttcctttatctcattgttgccgaagctgtttacggcagcgctccctctgctccwgcatggggcgggctccgggcacggctgctcggcaggcgctgctcccgcggcgactgggggattctgcctaattcacctcccagccggtgcagagaggaccggagagcggtggaggcccggactgcagcagcgttggggccacctcccagcgtccccaccctaggaggctgcatgcggattgaagagctgcgcctgggggctgggccggccccgctgatcccgacctagcgagcaggatagcaggaccgcccaggctgcggaggggctcgggggcaggaaggtcagagcagcaagatggccagtaagaccaaggccagcgaggccctcaaggtggtggcccggtgccgccccctcagcaggaaggaggaggctgctggtcacgagcagatcctgaccatggacgtgaaactgggccaggtgaccctgcggaacccccgcgccgccccgggggagctgcccaagaccttcacctttgacgccgtgtatgatgccagctccaagcaggccgacctgtatgacgaaaccgtgaggcccctgatagactccgtgctccagggtttcaatggcacggtgtttgcctatggccagacgggcactggcaagacctat

SEQ ID NO: 5628 - DNA, 730 bp, Homo sapiens
gagaggcctaaggaagcctccaaaatcaacctctcattatctgccctgggcaacgtgattgctgccctggcgggcaacaggagcacccacattccctaccgggactccaagctgacccggctgctccaggactccctgggggggaatgccaagaccatcatggtagccacactggggccagcttctcacagctacgatgagagcctctccaccttgcgctttgccaaccgagccaagaacatcaagaacaagccccrggtgaacgaggaccccaaggacacactgctgcgggaattccaagaggagattgcccgcctgaaggcccagctggagaagagggggatgctggggaagcggccccggaggaagagcagccgcaggaagaaggccgtgtccgccccgcctgggtaccctgagggcccagtgattgaggcctgggtggcagaagaggaggatgacaacaacaacaaccaccgcccgccccagcccatcctggagtcagccttggagaagaacatggagaattacctgcaggaacagaaggagcggctggaggaggagaaggcagccatccaggatgaccgcagcctggtgagcgaggagaagcagaagctgctggaggagaaggagaagatgctggaggacctgcggcgggaacagcaggccacagagctgcttgcggccaagtacaaggtaagggccccagaggagctgggcactcgagatgtcc

SEQ ID NO: 5629 - DNA, 1344 bp, Homo sapiens
cagcaagaggggactactataataaacaagagtccaaatgtcttttcctagattgattctttctgtcctcacgattgacacctgtgaattctcaaaattgcagaaatacaaatacagagtaattaggtgtcccaccatactggttaaattgactttaagataactaggtaagaaatgcctacataacccaaacatttgtctggttacttgtttcacaagaaccttggactaaagagaggaggttggaagaaaagaagtcagaagatcaaataattgttgtttctttattcaattacctaattctttatagttctataaataagtttccaattaagacctgtttgctgcatcaaatattaatcctaacaaaaacagtgcttaatatatatgtaatatatgtataaatgtaaaaatataatatataatatataaactgcatttgttaggattaacatgtatgtgtgtacatgtaatataygtaatacatatacacatatatatatctgtctttataagatacagtatgagtatgtgcatacttgtagacaaacccaaatcctaatcatagtattttgcctttcttggccatgtgaggtgtatctgtatattgctcaggaaaatttgtcaccagcctgtgttagttcagtacacattatagcacctggacagttgtcaatggcagtagttacacatcatgaacaaaaacattccatattgagtcatatgcattaaaaaaaaaacctggatccctgccgaaatgttgtgccacttgtaattataaagtgccaactgtacttggtttctgtacattctcgttctatattttgtgttccaaattcctcgttctgatttggagttccaagtcatgaatccaggatatgctgcatgcacaataaatgttgtgcattttattaacttgcatttttttttagtgagcttcagctaaaagagcaagctaatttataggaaaacagatcatttaacacagtaaaattaaccaaagttatttcgtcaaaagaagtttttctctctctcttttgcttttgttcatggaccctggaccaaattttccatttgagctcaaccaaattcttttttgttttctccccaccttggaactgtaaactagtgtcaaagaatgtcttatttcttctcagttgaagaggattctggcttgagcattaagagtctccagtttttactttgtaccatagccagattatatctcaaccattaaggtcacttattacacaaaatttaaataatggttctactgggactcctccatcacccaccctcataatcccccaaataatgcgacaatgcttgccagtaaaagttact

SEQ ID NO: 5630 - DNA, 1344 bp, Homo sapiens
cagcaagaggggactactataataaacaagagtccaaatgtcttttcctagattgattctttctgtcctcacgattgacacctgtgaattctcaaaattgcagaaatacaaatacagagtaattaggtgtcccaccatactggttaaattgactttaagataactaggtaagaaatgcctacataacccaaacatttgtctggttacttgtttcacaagaaccttggactaaagagaggaggttggaagaaaagaagtcagaagatcaaataattgttgtttctttattcaattacctaattctttatagttctataaataagtttccaattaagacctgtttgctgcatcaaatattaatcctaacaaaaacagtgcttaatatatatgtaatatatgtataaatgtaaaaatataatatataatatataaactgcatttgttaggattaacatgtatgtgtgtacatgtaatatacgtaatacatatacacatatatatatctgtctttataaratacagtatgagtatgtgcatacttgtagacaaacccaaatcctaatcatagtattttgcctttcttggccatgtgaggtgtatctgtatattgctcaggaaaatttgtcaccagcctgtgttagttcagtacacattatagcacctggacagttgtcaatggcagtagttacacatcatgaacaaaaacattccatattgagtcatatgcattaaaaaaaaaacctggatccctgccgaaatgttgtgccacttgtaattataaagtgccaactgtacttggtttctgtacattctcgttctatattttgtgttccaaattcctcgttctgatttggagttccaagtcatgaatccaggatatgctgcatgcacaataaatgttgtgcattttattaacttgcatttttttttagtgagcttcagctaaaagagcaagctaatttataggaaaacagatcatttaacacagtaaaattaaccaaagttatttcgtcaaaagaagtttttctctctctcttttgcttttgttcatggaccctggaccaaattttccatttgagctcaaccaaattcttttttgttttctccccaccttggaactgtaaactagtgtcaaagaatgtcttatttcttctcagttgaagaggattctggcttgagcattaagagtctccagtttttactttgtaccatagccagattatatctcaaccattaaggtcacttattacacaaaatttaaataatggttctactgggactcctccatcacccaccctcataatcccccaaataatgcgacaatgcttgccagtaaaagttact

SEQ ID NO: 5631 - DNA, 797 bp, Homo sapiens
ttcctacagagagcaataatgatgcaaacgttgtcatagaaagcggcaaagtgaatcggcatccagcctcttttttcagaaagcgtgtaatcagctttggaacacagtagacaaactgttgtttctaatgagcaagcctgtgcagcaaggtgtagaggtgttggacctagaatggatggacaattacttcagtgatcacagcactaccattcctaaaaaaaacctaaatgccttattgatatccagccacagagcttagtattgtatgatataaaatctccaaagtaagcattaaaaaaaaatttagacaaccctatattcctttatttaactcaggattaaaaatcccaaccactaaaaatccatacttggaaacaaaaaacaaaaatttttaaaaatccatatttttttataagcaaagaaaaatgagtaacatttaaaatattaaatatttaaaaaaataaaataaaatgttaagtatttgaaaatttaagtcaatgtgtaaaatagtcttatggtaaactatttcttgtttattttccattttactcatgttttttagttgaagataagatcctttgaaattaaaattatatatatatatatatatatatatatatatatatatatatatatatatatatgttaacaaaggcctcaatgtcactaaatccaatgggcatttttyttttattttttccagtgtatatagatatttattatgtgggtagagtcccaaaaatgggctgggcgcagtggctcatgcctgtaatcccagcactttgggaagctgaggt

SEQ ID NO: 5632 - DNA, 847 bp, Homo sapiens
agagcttggttacaatatgaggtgctgggacacgtattttaaaacaagagtaaggcaggaacacagaaaaaagaataaaattgtaaatagtgttttatgactcaagctgtttcccaattaactgaatgtcaacactttgtcctataacatttccaaaccctatttttcagtttctcctgaattgcaaagttctatctgaaacactgtacttctgaaaccaaactcacatgctacagtttctgtagcactgaaatttcatgttaaaaagacgtgctccaggagtcatgtaaaaatcttggcaattaagcaaaaagaaggtgggtgtgaaggtctgggctctggagaagcagggatggtctgagaggagcttgcacagctggaggcctgacgtgtcctcggaggtcctgactggactgaaaccagcccaagcaggcgccagtcagttagggatgtggatatgaacaagactgaaaaatacaattactgcctctcagcacaagcatagctatacacatacacataattagacactggcaacacgtaactgagatggtgcagaaatgttctaaaccaataatttggtcaggttatggataaaatgaatgtcactggtaagcgrcatgtttacaataattatgttagaaaattggtcataattatcacttgagtccctcaattgagaaatggtactcaaatgaaaataaacacaattgatattgtaaacttatgaaacatctttggggaggaagaaaggcaaaataccaggagaaaaaaggacaaagccattcatagtgagctagattaaaacaacggaatgctataattgatacactatgggggaattaca

SEQ ID NO: 5633 - DNA, 671 bp, Homo sapiens
tattaacattgtaaaaggacctctgacccagcacctcacccctaggactctctccatagaaataaaaacaacagaacatgaggagacaggcaccaagctgtccactgcagcactgttggcagggcaaaaacaaacaattgggggccgggcgcggtggctcacgcctgtaatcccagcactttgggaggccgaggcgggcggatcacgaggtcaggagatcgagaccatcccggctaaaacggtgaaaccccgtctctactaaaaatacaaaaaattagccgggcgtagtggcgggcgcctgtagtcccagctacttgggaggctgaggcaggagaatggcgtgaacccgggaggcggagcttgcagtgagccgagatcccgccacygcactccagcctgggcgacagagcgagactccgtctcaaaaaaaaaaaaaaaaaaaacaaacaattgggaacaaaccgaatgtccatcaatagagaatggcagactaaattgtagcattatccatgccatgggatattatgcaattttaaaaagatttatatcagttggcctacagtctcttccaagattagtgataaggaaaattgcagagatgatgtattttaccaaaatgtaaatccaatgcatgtaccctggacacccacacacagacataacgttaaatc

SEQ ID NO: 5634 - DNA, 762 bp, Homo sapiens
agtggctggaacttcagcagggctcagggtcttagagttgtgacctaaaagtgttgtgagaacaaaatcctggaggagtttcagtccctacctgaacccacagccgtccagatccctgtcctggatgtgtgggagggggcgcatgctgggctccaggccaaccctgcaaatactccacttgccccgtctctgcattgattaatccagctttgagaggctgagcctctcaatgaatcaggtccttgctcagccataagaagaaggtgattggccaggtctgccagggctttgtgacccgctggcttgctccccagcccctcagaacccctcagccccrcctgcacatactgcctccatgcaagcccagaataacctggatgtgtgactcacaggggtaggggtagcaattttgcagattttccaaacaggtgacttcagcccccgggcctgggcaggaaggggtagcccagtgacaatgggcatagtcccacttcaggaacgggaaacgtgttggctggctctgtggagttctctctcttctgatcccacagcatctgttccagttgtcttggccggtaggatggcgtctacaaagcaggctatatgggaaatctggagctggggagggattgtggtcagagcccagctttgggaagcccatgtggctgtctcaaggcaaagcagcagagaaaagttctgtagtctgtctcctttctggactggcatttccatggtctgagaccagaggctggctgtgtgtca

SEQ ID NO: 5635 - DNA, 777 bp, Homo sapiens
cactggagagctctgtggtgtcagttgttccagcctgaggcgagggagcgtggctttcaagcattgcccctgagtcaccctgagtaaattctaggaacttctggaatgtactgaaattacctagaatatattccaaggccttctggatctgtggagggtggaggtgggagctgagtggttctcatagcccaaaggcagtcctcatgaagccatagtgctgggtgttagaagcaaaagcacgctgaaggggggcaggcacacacacaaagcagggattcaaaggtctgggtggacagccaacactgtctgatacatcagataagaaaacattattttgaaaagtttgactttgaagaataggagaaagacaaaatcatagctggaggggaaaagggacagttttgatttaatgggaacaactcacaaatgtttaaaatcaacatgaagagtcaagttgaaagagagaggtaagctattcaagaaatgaaaggataattgatcatagaagagttgagaaagaagaaagagaacaggtgcaaagcacagatgaaaatgttggccttccgttgacaacttgcaaagggcactcaaatacagagctcattcaaacctcacaaaatcatgggagasttttttaatgtgcctactccatgcagcctttttttacatgaactatttcatttaatcctgataactcagtgaggtaaaatactatcactttacagatgaagaaaccaaaactccattagaattttgattggctgcatgtgactggaa

SEQ ID NO: 5636 - DNA, 810 bp, Homo sapiens
tcacctcttttactctatatagtccattcccatggctttaaattctagctatatgctaatgtcttttaacattataaatccagacctgactcctttcttgagctctaaattcatgcatcccatgacttaaaacatcctcatctggatatctaataggcatttcaaaactagcatgtctaaaactacactgatttacacccaccacccaccccactaacgggtctttcctccaagacttctcatatagcttcaatatctatccatttatttgactccaaaacttaggaattattctcaatttctcttttttccatccccctctgttctgtccatctcccacacatccgacttcactctagggatgtcccctgagcagtctaaaccaatcacgatagtcccatactctttgctagtgatcagaatccttggccaaaactagtctgcatggaatgycatgtgtcttaattcaggtcaatggtacaatgaggtaaagatttctgggaacatttcttttttgaggatgtcagtgaagtaacatgtatcccacatttccactatccagtgccctatgagcgtactcaaaaagaatccaccttaggatgaagctgattttctggatgcagggaagaggaggaaagaacttggctcatagatgacatggctgattacctagaacaggggtccctgatccctgggccatggaccaatacctgtccacggactgttaggaaccaggccgcacagcaggaggtgagtggtgggcaagtgagcgaagcttcatctctatttacagctgcttgcattactacc

SEQ ID NO: 5637 - DNA, 635 bp, Homo sapiens
aaatttatatgtatcagaaggaaatacatttaggtgtgtatgttacatttttcttacaattttcaatgattttattcttaaaatctttgaatgtcttattaagtattttaacatttttctccacatctccatttaatatatttgacctcttcagtaatatcttgctgacttyaatcttaaaagttttgtgcctcttcaaacatttttaaaccatttcactttgatcttcatttgtctattttttaaaaggtaatcgtaacaaaaacataaaataacatagaaaatctaagtttctgaaattttttcatgcaaaacggcttataagatttcaaacagctgcatatgtcagaagtcattttcaaagagtgctgtttaatgtgcagaggtggtcaggcttggctgagattgcaactattaatgggtatctatggctctttcgtatttcccaggtggggttcattagcattgccaagtgatttaaattggatgggttatgaacaaaatttcaggtggttggaagtctgcagacaaataaaatgcataaattgtaatatatgattgtgggtgttaattttattccaagtggtattaggaggcttaaaacagacaacttttaaactccttactgttttcat

SEQ ID NO: 5638 - DNA, 635 bp, Homo sapiens
aaatttatatgtatcagaaggaaatacatttaggtgtgtatgttacatttttcttacaattttcaatgattttattcttaaaatctttgaatgtcttattaagtattttaacatttttctccacatctccatttaatatatttgacctcttcagtaatatcttgctgacttcratcttaaaagttttgtgcctcttcaaacatttttaaaccatttcactttgatcttcatttgtctattttttaaaaggtaatcgtaacaaaaacataaaataacatagaaaatctaagtttctgaaattttttcatgcaaaacggcttataagatttcaaacagctgcatatgtcagaagtcattttcaaagagtgctgtttaatgtgcagaggtggtcaggcttggctgagattgcaactattaatgggtatctatggctctttcgtatttcccaggtggggttcattagcattgccaagtgatttaaattggatgggttatgaacaaaatttcaggtggttggaagtctgcagacaaataaaatgcataaattgtaatatatgattgtgggtgttaattttattccaagtggtattaggaggcttaaaacagacaacttttaaactccttactgttttcat

SEQ ID NO: 5639 - DNA, 823 bp, Homo sapiens
ttcctggaggtgagggagccccggccctccagagatgaacccccagtcgtactccagaaacctgggagaatgctgcacctgccctgaggggcagccttggcttcggtggccccgtggattcatgcttgaattatcctggaagttgtgtggggttttgttttcttctttttttytctctctcttcgaataagccttttgtactcctaaagttctgtgttttgaagaaataagtacacttggggtcagcggctgcatgctgcgtgatgcgtattcataaacttcattctgggggaagaatttgagaatggaccggagagaatgctttgacagtcagaaaagtttttctcaaaatttcccatgaacttgggaagtgtggagatgcacgtggctgtcccaaagccatatgaatggagttgatccaagcgcccaattccagcctgagatccagtgggcgctccgtctgggctcccatgggaatgtgttggggctgccgccaagcaggaaccgatggtgcctgtgattgtggaccccagattcctgctggagcccacactatgatacacaaaacccggactgaggcattcaaaggcacaatcaccatccgtttgctgctggaccccaagggcgttcttgataggttcttccctcctctgtgggccgtgtggggatcacctttctttgatctcccaaccctggcatgaggctgatggaatcttctgggtgttgttaacacagacaacacaaaggcaggacggtccaaacaatgaaatcccagacatggagcacagaaaacagcttaagggaaataaggttagaacattcc

SEQ ID NO: 5640 - DNA, 823 bp, Homo sapiens
ttcctggaggtgagggagccccggccctccagagatgaacccccagtcgtactccagaaacctgggagaatgctgcacctgccctgaggggcagccttggcttcggtggccccgtggattcatgcttgaattatcctggaagttgtgtggggttttgttttcttctttttttttctctctcttcgaataagccttttgtactcctaaagttctgtgttttgaagaaataagtacacttggggtcagcggctgcatgctgcgtgatgcgtattcataaacttcattctgggggaagaatttgagaatggaccggagagaatgctttgacagtcagaaaagtttttctcaaaatttcccatgaacttgggaagtgtggagatgcacgtggctgtcccaaagccatatgaatggagttgatccaagcgcccaattccagcctgagatccagtgggcgctccgtctgggctcccatgggaatgtgttggggctgccgccaagcaggaaccgatggtgcctgtgattgtggaccccagattcctgctggagcccacactatgatacacaaarcccggactgaggcattcaaaggcacaatcaccatccgtttgctgctggaccccaagggcgttcttgataggttcttccctcctctgtgggccgtgtggggatcacctttctttgatctcccaaccctggcatgaggctgatggaatcttctgggtgttgttaacacagacaacacaaaggcaggacggtccaaacaatgaaatcccagacatggagcacagaaaacagcttaagggaaataaggttagaacattcc

SEQ ID NO: 5641 - DNA, 2613 bp, Homo sapiens
tgtgttttctcagagttctagaggctggaagtctgagataaggcatccgcaggggtgcttccttccaaggatttgagagaagccctgtctccgtagcttttagatgccatcttcacgtcgtcttccccctgtctgtgtctaagtgtccaactgtcctcctttttatgagaatattcgtcttggattagagtccactctaatgacctgtttaatttgattgccgctgtaacgaccttatcttcaaataaggttccattctgaggtcctggggcttagaactttaacataattaggggggtccataattcaacctgtaacagtcagtgtgtgacctgtgggcatttaattgaaaaggtttctttttttttttttggttggttggtttctattttgagacagagtctcactctgttgcccaggctagtgtgcagtggcgtgatctcagttcactgcaagctctgtcccctgggttcaagcaattctcctgcctcagcctcctgagtagctgggattacaggtgcccaccaccacacctggctaatttttgtatttttagtagagatggggttttgccatgttggccaggcttgtctcaacctcctgacctcaagtgatccacccaccttggcctcccaaagtgctgggattacaggcgtgagccaccatgcctggcctgaaaaggtattttaattgctttggggacttaattgacatcaagaccataaatgttcaggcttggatgactatggcaggaagtacatgaggagtgggcctccagggacctgcctttccctaagggtctccatgtaccgttttcgaatggtgtctggggtggggacataaacttgggatccaggtatcctgagtcctcggaccttttttcccatttatttgtctggcttgggctctaacatgcacaatatccccataaaatgtctcagagcagatctttaaatggccattaccttgtcaagaattctccagtgggatttcatgtaaaattaggatccctgatggtagctcacgatgagctgtaattctccacataggtgactgtattcatgggcaccatccaccctcctcatccrgatgtctccctctccagaggactttggtgcaggaggcctgtgaggaccccagttcattatgacaaggttgcagttctctagaagattctcatcaggagccttgtctactcctccccagcaacctctttccactaacttatattttagctatagcctggaacattctgagctatgatgagtgttaaaatggggtggtgtactcgtcagagacctggagaccgggactggaagccactgtgaaacaggtgaaatgattcaagaagacagctgaaccccagcgacaccccataacagaaacaaaagaactcttgtgagccgcacccccacccttccttttcccggcatttgataggcaaagatgaatttgtgtgacacgggagtgtcccaccctcctcctccccatcagactctgcgagacgcccgctctccctttgggtgcagtcatggataccaaacaaagccttcatccctctgggtttccgttacgtagccgtcttccacgtgaaaaccgtgttaagcaaaatgaatagctgcaagctattttatttcatgttaaataactgtggataagactaagatttttctctttatgactcaggttgaaaagataaggtctgggaagcggtgtctttgaatctagagattttctggagttagggatgtctgatttctacatatcatttccacgacctgtcgcaggagacagggtaccggtgccccatgatgctgcagagcggcttttggtgatagagacgcattatggaatgtgtatacttgtaaggacccaggcatagagtatctgccctcataaagcaaacataatcctccactcctgaggtctgagttggctctcctggatgccagcctttgcatgagtgatgccttagttgaaatgaaggatgggccaccccaggtgcctggagcacttttatcccagtgcatgcccaaactactggtgtcctaaacagttggcccctcagacgtggggtttggggagctgagctgtgcactggggcggtggctacactggcctggtcacgtcaggctgggcagaagagttggagcagggtggctcaagagtcttgatttggtttgactctataacttggctggcatggaacttggaaggctgggtccccactccttcagcaggtgggcccctttggagggagccgttcctgcttgtttttgagataatctctccggacacttggcagcccagccagcgtttgctttgatagcttatctctgcccgtccagcttgaactcccctttcccaccatcttcgaccatgcctgcgggtctccacctctccctggccaccatgtagccctcattccttgctgaaggttccacactgaagtgggttgtacagaggaacctcgtcctggaaagtgaaagcaagtcccactgaatgtgacttggagcaagcttgtgaggtattcgtggcatcagagccatgaagagaaggtggagaggcgctgcctgggggaggtggcaccggagctcaggggggggctcccca

SEQ ID NO: 5642 - DNA, 2613 bp, Homo sapiens
tgtgttttctcagagttctagaggctggaagtctgagataaggcatccgcaggggtgcttccttccaaggatttgagagaagccctgtctccgtagcttttagatgccatcttcacgtcgtcttccccctgtctgtgtctaagtgtccaactgtcctcctttttatgagaatattcgtcttggattagagtccactctaatgacctgtttaatttgattgccgctgtaacgaccttatcttcaaataaggttccattctgaggtcctggggcttagaactttaacataattaggggggtccataattcaacctgtaacagtcagtgtgtgacctgtgggcatttaattgaaaaggtttctttttttttttttggttggttggtttctattttgagacagagtctcactctgttgcccaggctagtgtgcagtggcgtgatctcagttcactgcaagctctgtcccctgggttcaagcaattctcctgcctcagcctcctgagtagctgggattacaggtgcccaccaccacacctggctaatttttgtatttttagtagagatggggttttgccatgttggccaggcttgtctcaacctcctgacctcaagtgatccacccaccttggcctcccaaagtgctgggattacaggcgtgagccaccatgcctggcctgaaaaggtattttaattgctttggggacttaattgacatcaagaccataaatgttcaggcttggatgactatggcaggaagtacatgaggagtgggcctccagggacctgcctttccctaagggtctccatgtaccgttttcgaatggtgtctggggtggggacataaacttgggatccaggtatcctgagtcctcggaccttttttcccatttatttgtctggcttgggctctaacatgcacaatatccccataaaatgtctcagagcagatctttaaatggccattaccttgtcaagaattctccagtgggatttcatgtaaaattaggatccctgatggtagctcacgatgagctgtaattctccacataggtgactgtattcatgggcaccatccaccctcctcatccagatgtctccctctccagaggactttggtgcaggaggcctgtgaggaccccagttcattatgacaaggttgcagttctctagaagattctcatcaggagccttgtctactcctccccagcaacctctttccactaacttatattttagctatagcctggaacattctgagctatgrtgagtgttaaaatggggtggtgtactcgtcagagacctggagaccgggactggaagccactgtgaaacaggtgaaatgattcaagaagacagctgaaccccagcgacaccccataacagaaacaaaagaactcttgtgagccgcacccccacccttccttttcccggcatttgataggcaaagatgaatttgtgtgacacgggagtgtcccaccctcctcctccccatcagactctgcgagacgcccgctctccctttgggtgcagtcatggataccaaacaaagccttcatccctctgggtttccgttacgtagccgtcttccacgtgaaaaccgtgttaagcaaaatgaatagctgcaagctattttatttcatgttaaataactgtggataagactaagatttttctctttatgactcaggttgaaaagataaggtctgggaagcggtgtctttgaatctagagattttctggagttagggatgtctgatttctacatatcatttccacgacctgtcgcaggagacagggtaccggtgccccatgatgctgcagagcggcttttggtgatagagacgcattatggaatgtgtatacttgtaaggacccaggcatagagtatctgccctcataaagcaaacataatcctccactcctgaggtctgagttggctctcctggatgccagcctttgcatgagtgatgccttagttgaaatgaaggatgggccaccccaggtgcctggagcacttttatcccagtgcatgcccaaactactggtgtcctaaacagttggcccctcagacgtggggtttggggagctgagctgtgcactggggcggtggctacactggcctggtcacgtcaggctgggcagaagagttggagcagggtggctcaagagtcttgatttggtttgactctataacttggctggcatggaacttggaaggctgggtccccactccttcagcaggtgggcccctttggagggagccgttcctgcttgtttttgagataatctctccggacacttggcagcccagccagcgtttgctttgatagcttatctctgcccgtccagcttgaactcccctttcccaccatcttcgaccatgcctgcgggtctccacctctccctggccaccatgtagccctcattccttgctgaaggttccacactgaagtgggttgtacagaggaacctcgtcctggaaagtgaaagcaagtcccactgaatgtgacttggagcaagcttgtgaggtattcgtggcatcagagccatgaagagaaggtggagaggcgctgcctgggggaggtggcaccggagctcaggggggggctcccca

SEQ ID NO: 5643 - DNA, 735 bp, Homo sapiens
taatggatagcaatagacaattgcaaaatcaaccaagtagtagccccaattgcagctgctgtgtcatatgtggaaaacaatgcattcacttgatatacactgcatacctaaggttctgggtcagtcattgtgaatgtcatttttcattactatcaggaaagaggatcagacatagctcatactcacaggggataacaaactgtacacacctacactcttttccaaggctatattaactttctttcctactgtcatgacagccttgagggacctggatcacgtggacatttctcagagcaccacattagtccactatatctgcatcaatggcattctgttagtcaggccctgaaataggattacctaaccatgggacataaaaagaatgcccattatgagatggattctgtcagaaacaacaattcataatgtatcaatccgtcatatgatgaagtaagatatctgggattgagcatgaatcagagcaaataagtaagctgcccaggcagstggctcagtacccttcgtctttttctttctttctttctttctttctttctttttttgaggagtcttgctctgtcacccaggcaggagtgcggtggcacaatctctgctcactgcaacctctgcctcccagtgggggtgattcccctgcctcagcctcccaagtagctgggactaaaggcgtgcaccaccacacctggttaatttttgtatttttagtggaaatga

SEQ ID NO: 5644 - DNA, 775 bp, Homo sapiens
tagaaasctaatcctccttggaacctaaatatttctcagcgataagttatcttcaccaatgcttagggaagagaattaaccctagcagtgaaaattcttgagagaattaagaataatgctaccattgctaattttagggaaattggaaaaagttttaattcacttctgataatttatgttaaatgtttatttttcaatatttaaagacatttagtctttacacagggctctttactataaagtttctttctactttgtattatggaaaatcatccctgcatctaaaacccatcacaatttccttctatttcaatgccactaaaagtgcttactcttctttcttatctttgcttttctcctctttctttttcttctctttgtcctttttcttctttttcttctctgggtcgtttttattttcgtttttatcatctgacttgctgaaaaaattaagcaagtagtattaaaatacagaaatgttatgggcagaaaaatgtggggtaattcttgccaaagtcttacctcttcttttcttttttctttttctttttttcttctggttccctaaagaaaaaaataatatatctgtcacataatcacagtcttccactcttatttactttctttttcattgagcaaaaatctcagctttgcattcaaagacctgctccagtgctcaaaacccatctggtctcttactggaggtttctaccccaaaaagtggggggtggggcagacaattatccagataataaacaagaacttctaagctaat

SEQ ID NO: 5645 - DNA, 775 bp, Homo sapiens
tagaaacctaatcctcyttggaacctaaatatttctcagcgataagttatcttcaccaatgcttagggaagagaattaaccctagcagtgaaaattcttgagagaattaagaataatgctaccattgctaattttagggaaattggaaaaagttttaattcacttctgataatttatgttaaatgtttatttttcaatatttaaagacatttagtctttacacagggctctttactataaagtttctttctactttgtattatggaaaatcatccctgcatctaaaacccatcacaatttccttctatttcaatgccactaaaagtgcttactcttctttcttatctttgcttttctcctctttctttttcttctctttgtcctttttcttctttttcttctctgggtcgtttttattttcgtttttatcatctgacttgctgaaaaaattaagcaagtagtattaaaatacagaaatgttatgggcagaaaaatgtggggtaattcttgccaaagtcttacctcttcttttcttttttctttttctttttttcttctggttccctaaagaaaaaaataatatatctgtcacataatcacagtcttccactcttatttactttctttttcattgagcaaaaatctcagctttgcattcaaagacctgctccagtgctcaaaacccatctggtctcttactggaggtttctaccccaaaaagtggggggtggggcagacaattatccagataataaacaagaacttctaagctaat

SEQ ID NO: 5646 - DNA, 602 bp, Homo sapiens
agcacccagtgtttcttatggaatgacaagtcctgaattcctaacaaaggtcaggcaggtgtttgatctgycgaatggggaatcccctgagagtctgaacgaggaaagcgctgctctcgccttagaaagcaaaaccagtgcgagctctgggcctcaccgtcagggctctgtcctcctcccgcctgaggctctaagggaaacctgcagaaatgggcagcaggcgcgggggagctggggcagaattgcacacacacaaactacaactctgcctttaaactaaaaacatgcctccctcatttaggtacaaagatggcagtctgatttgccaggcggctgaaccgggaaagtacaggattgagagcaactatggcgtacacacactggagatcaacaggtatggctgtggtgggggctctggacgctggcgtccagtaatcagcattgcagaccccaaagaagaagtcagatgggtaactggaggccaaatcacacctgtctgtttgcaccccgggtgactttaaatagcatttatgagttaatggtactggtgttggaagcttccctttgtttttctttagtgtctggccagaggaatgcaaact

SEQ ID NO: 5647 - DNA, 797 bp, Homo sapiens
aaagtggactcacagtatattttctctgatgtgggaamagtttatgacaagagaataatgaaaatctaaattgccttgtacaatttattgtattttatttttgttcttggcttcttgcgtatctaccaaggagaaaagaggaaataattttttaagagtacttttattcatttagcaacaagtctttttttttttttttccattttagcagagccaaatgaagattcttcaagatatggtatcttttcacttggctgtttctgcctgggtgactcagaggataagtatttgggaaagacatgaatggtagtgccagggtccaccagcccagaagcattggacgcattttatcataggaccatgagttggacaaaattttataggtgagaaaaaaagaaatgggctggagaagggagactgtcatctctcttggcttgctctgtctcctcctctcacccatcaagtcaagggaaccagacgcccaaagccaagttcatcagtccctccatcggcactgaaaaaatccatcagtgttcataagctgctaagcttgtgtaaactgaatgccatctccaaatttccagtcttgccaacaagctgaaacaggagaaagaatatgcaaccagatgggggtcacagcattttaagtgctttcttcaagattaagagttggtagaaccaagaaaaggaaaagacatacagaatgtcttcagctcatgtatccacagatctctgtcttgttcaggtatatctaagctcatccactggaagaggagaacaatattttatcctgaaaa

SEQ ID NO: 5648 - DNA, 797 bp, Homo sapiens
aaagtggactcacagtatattttctctgatgtgggaacagtttatgacaagagaataatgaaaatctaaattgccttgtacaatttattgtattttatttttgttcttggcttcttgcgtatctaccaaggagaaaagaggaaataattttttaagagtacttttattcatttagcaacaagtctttttttttttttttccattttagcagagccaaatgaagattcttcaagatatggtatcttttcacttggctgtttctgcctgggtgactcagaggataagtatttggsaaagacatgaatggtagtgccagggtccaccagcccagaagcattggacgcattttatcataggaccatgagttggacaaaattttataggtgagaaaaaaagaaatgggctggagaagggagactgtcatctctcttggcttgctctgtctcctcctctcacccatcaagtcaagggaaccagacgcccaaagccaagttcatcagtccctccatcggcactgaaaaaatccatcagtgttcataagctgctaagcttgtgtaaactgaatgccatctccaaatttccagtcttgccaacaagctgaaacaggagaaagaatatgcaaccagatgggggtcacagcattttaagtgctttcttcaagattaagagttggtagaaccaagaaaaggaaaagacatacagaatgtcttcagctcatgtatccacagatctctgtcttgttcaggtatatctaagctcatccactggaagaggagaacaatattttatcctgaaaa

SEQ ID NO: 5649 - DNA, 632 bp, Homo sapiens
ataaacacacgcagtcttttgcaacacactcaacgtatactagggaaggtacaggtcacagttagagatgacacacacaagtagtcatgtgttttctctctgggccataactgcctagaatattgccacatttataactcgattatggacaggcaactttagtgtctaacatttcataaggaattgtcttaatgtttcttaaagtcatartatactacagctagaaaatatctttcagaatgtttagctgcaattcaaggtcctcattttatatatgaacaggctgaggccatcattctaatactagtaagtgacatatccatggtttcacctggagcccatgtcctctttcttttatttatggatgtagactgcacttcattaaaaataaaatatgactaagagtcgtcatctgcctgaaaggtgctcatggctgagtgagacatagcccataccatgtttctagtcctgggaacatatgggacagagctggtatagattccaccccaaccccaatggcaacatttataaatgctgttaaagtgtagctatcattttttaaaaatacagagccaagtctgaaagaagaatttatcgtcagacgtcatgggtaaagtcataggctgactgca

SEQ ID NO: 5650 - DNA, 685 bp, Homo sapiens
tgagcccccatcacaaggcagccctccccgtagagagggaggatggcagaccccctcctccccaacctgaggcccctctccagagctccctgggaaggcaccggcgtctcaggtccctctcagcgcgaggcagcctgggaaggcgccggcgtctcaggtccctctcagyggggagcagcctgggaaggcgacggcgtctcaggtccctctcagcgtggggcagtcccagctccacgcgaagcccccgctccctgcactcaaatttgcctctgggtttccctgagggggccgggaagaattggaaggtgttgggtctgaattcagtcagagctggaaaccaaaagagaagcaaaaagtgataaaagaagaagaaagacaggtgcccgctagggtgaagtcagtggggagggccgggctgactcatgaagaattcagggagggctctggttgagtcatgattggggccctcaaaattctgtgttcagttttgttgaaaccactcctaatgatcatcttgagagaaatgaaaaagtcaagaattgggctgatggccagatggtgtttctgaaataaagatcacatctctcaagtgtcaaactacaccgccagacgacaaaccgtgggatgactaattcctgtctctcttccagggcccctgccgtggctacaagcgcatgccagcggg

SEQ ID NO: 5651 - DNA, 685 bp, Homo sapiens
tgagcccccatcacaaggcagccctccccgtagagagggaggatggcagaccccctcctccccaacctgaggcccctctccagagctccctgggaaggcaccggcgtctcaggtccctctcagcgcgaggcagcctgggaaggcgccggcgtctcaggtccctctcagtggggagcagcctgggaaggcgacggcgtctcaggtccctctcagcgtggggcagtcccagctccackcgaagcccccgctccctgcactcaaatttgcctctgggtttccctgagggggccgggaagaattggaaggtgttgggtctgaattcagtcagagctggaaaccaaaagagaagcaaaaagtgataaaagaagaagaaagacaggtgcccgctagggtgaagtcagtggggagggccgggctgactcatgaagaattcagggagggctctggttgagtcatgattggggccctcaaaattctgtgttcagttttgttgaaaccactcctaatgatcatcttgagagaaatgaaaaagtcaagaattgggctgatggccagatggtgtttctgaaataaagatcacatctctcaagtgtcaaactacaccgccagacgacaaaccgtgggatgactaattcctgtctctcttccagggcccctgccgtggctacaagcgcatgccagcggg

SEQ ID NO: 5652 - DNA, 790 bp, Homo sapiens
aacccccacccttccccttcctacttcacccactttccccaaactctgggcttccccctctctgcagcctttcttctcttccacacagaagggctttctatgcacaccaggaaatatggccccaggcagttcaagattcataaccttggtcctctaccaaaaaggaaaagaaaccttccctcccagttccgtttaaaagaagaacaaaccaaacaaaccaacagaaaaggacttgaagtacccactcttctgggcagagtgagatggggtactttcattggtctcccatccagagccaaacagtaggcgtgggggagaaatgtcccctgaaagaaggggatgatggttgtagcagacaaaacaaagtcagccagtacatgacatgggattgcttttctgaaatgaagggccaccgtttttgttttgtttggtttggggggggttgtttgtttttgtttgtttgtttgtttgttttgatatggagtctcgctcttgttacccaggctggagtgcaatggcgtgatcttggctcaatgcaacctccgcttcccgggttcaagtgattctcctgccttagcttcctgggtagctgggattacaggcgcccaccaccgtgcccggctaatttttgtattcttagtagagacggggtttcaccatgttgaccagactggtatggaactcctgacctcaagtgatctgcccacctcggcctcccaaagtgctaggattasaggcgtgagccactgtacctggccccggggccactgtttttaaccaattgtcaaag

SEQ ID NO: 5653 - DNA, 769 bp, Homo sapiens
gcactccccagtagagctctctgcatggatgaaactgttctctatctaccatacctgtcayagtacttgctgctacatgtgactattgagcatggaggtatcagtgtttacatttatttcactttgtcaaaagtaaatagccacctgtgactagtgaccctggtattgaatccatagatgctgagcgcacgctcttcctcctagcacaggtatttaaagatggctcacaccgagtgctgagatgtgcagttgcaggctcctgggtgtgcagttttgccccattaactaagagaagctgatgacatctggagtggcacccactatggctgaggtctgttccaagcattttcagtaacttacctggttctcctaacagtcctataggttatcatcttcattttctgagagaggaaacagagacagagtgagatcaggccattctcccatcatcaggcagttatgatggtggagtggggtcccatatagacagtccggccgtgctgatttcactgcggctgcagctcgcttggcatgaagccagcaggcttcccatttccttcccaggcgtctgttcttacgtgaagccgtgctctctctgagctggccttccctgggcatggcccaggcttatctgggcagcatctggactcttcttttcaggtccctttgtcccctggagaatgtggcttccacccagaaagtcccagcagcacttttgcgggacacatgtttggctcccaatgtggcctctggggcgtccagggccctg

SEQ ID NO: 5654 - DNA, 685 bp, Homo sapiens
gttttagggtacatgtgcacattgtgcaggttagttacatatgtatacatgtgccatgctggtgcactgcacccactaactcgtcatctggcattaggtatatctcccaatgctacccctcccccctccccccaccccaccacagtccccatagtgtgatattccccttcctgtgaccatgtgatctcattgttcaattcccacctatgagtgagaatatgcggtgtttggttttgttttcttatcaggcttattgacacgcccaaattgtgggtgctttctagatgtgggagcttgggttgatgaatcagaaacagccaattgtcaccattacctgtgctgtcctttctcctggcacatacctgcatggcgtttaccagtgttttagtccatttttgttgctatagtggaatacctgaggctgggaagtctataaagataagaggtgtatttggctcagggttctgaaggttgtataagaagcatggcatcagcatctgcttctggtgagggaggcctcaggctgcttccactcataacagaaagggaagggggagcagacatctcacaacaagagaaaaagrgaggggagggaggtgccaggctctttttaacagtcagttccctgggaactaatagagaaagaactcactcatcaccaggacagcaccaagccattcatgag

SEQ ID NO: 5655 - DNA, 760 bp, Homo sapiens
tctgccacgggttaaattttcaggtgaagagtgaggttgtcatggcctcagctatgcttcctggctctccctcaagagtgcagccttggctagagaactcacagctctgggaaaaagaggagcagacagggttccctgggcccagtctcagcccagccactgatgctggatgaccttggcctgaccctggtctggtctcagaatcacttttcccatctgtaaaattgagatgaattttggtgttgaaagttcttcctggagcagatgtcctagaaggttttaggaatagtgacagagtcaggccaccccaagggccatgggagccagctgacctgcttgacygaaggatttctgacagactatctttggggatgttttcaagaagggatataagttatttactttgggcatttaaaagaaaatttctctcgggaataattttatagaaaaataaagcttctgtgtctaaggcaactactgtttccatctctctaggctttgggccggggctgtgtgtgtgtgtgtgtgtgtgtttgtgtgtatgtgtatgtttctgaggaggccctaccctggcatgagagggtagggaatctggctacacatctagtgtggcagctggacccagaggtggggcaggaaccctgactatgattcaccccgctggtcctgggatgtgggcccagagacttcctcccccaggaacccctctgcttcctcttcctctccacatccttaactaactttagcagaaccctactcc

SEQ ID NO: 5656 - DNA, 658 bp, Homo sapiens
agagagggtctgaaagcctacattccctagctgcctgatatgttacctggggcagcacacggcggtacatgtgccagcacatctgcggcaggcagaactgctcacagcctctttcctgccaggtctggactaggcctgtgaatctttcccaggcctgggtgcctggaagccactgcaatcagcagggtgacctatctgtgaaaggtgggccagtttcacacacattcttccagctaagatactaggcaagcctgagtcactcccagttttaatggaaaaggaaactgagcttcagaaaatcaactcaagttccttcctgggattacacatagggcagaaccaagacttagacccaaatctgactcacaagtccatatccttcctaagwcacttttttttttttttggagaaaaaaaaaagattgaaataaggagaagcaaggaaatagcaggcagacagcaccttcttccacattaggtctggaggcagcccaggtccttctatgccctaaatggaatatgtcccttggtaaattcaagagaggtaatgggattttcctatgtcaggaaaaaagaaaaaaaaaatcacacattttggtggtatcttttccctcttctccatattcaacattttctaaaaatgttaagtgagcctcatg

SEQ ID NO: 5657 - DNA, 782 bp, Homo sapiens
gaattcatcatggtctatccctttggggatctcatgtctactaggggtaggggcaggtaaatgaatcagtaatctcaaggtttttcagtaactctacagatgtccaagatgccatggagaagcagagcaggcagtcactggcactggtggtggtatcaaggaaattttctcatgaggtggcattttatgtgtctggaaaattggagtggtagtgagaagtgacagcgtgctggcagtcctcacagccctcgctcgctctccgcgcctcctctgcctgggctcccactttggcggcacttgagcccttcagccccgccgctgcactgtgggagcccctttctgggctggccaaggccggagccggccccctcagcttgcggggaggtgtggaaggagaggcgcgggcgggaaccggggctgcgcgcagtgcttgcgggccagcgtgagttccgggtgggtgtgggctcggcggaccccgcacttggagcggtcggccggctccaccggcccagggcagtgaggggcttagcacctgggccagcagctgctgtgctcaatttctcgaggggccttagctgccttcccgcggggcagggctcggaacctgcagcccgccatgcctgagcctccccctgttccgtgggctcctgtggggcccgagcctccctgacgagcgccgccccctgctccacggagcctagtcccatcgaccacccaagggctgaggaatgcgggcgcacggsgcgggactggcaggcagctccacctgcagccccggtgcg

SEQ ID NO: 5658 - DNA, 782 bp, Homo sapiens
gaattcatcatggtctatccctttggggatctcatgtctactaggggtaggggcaggtaaatgaatcagtaatctcaaggtttttcagtaactctacagatgtccaagatgccatggagaagcagagcaggcagtcactggcactggtggtggtatcaaggaaattttctcatgaggtggcattttatgtgtctggaaaattggagtggtagtgagaagtgacagcgtgctggcagtcctcacagccctcgctcgctctccgcgcctcctctgcctgggctcccactttggcggcacttgagcccttcagccccgccgctgcactgtgggagcccctttctgggctggccaaggccggagccggccccctcagcttgcggggaggtgtggaaggagaggcgcgggcgggaaccggggctgcgcgcagtgcttgcgggccagcgtgagttccgggtgggtgtgggctcggcggaccccgcacttggagcggtcggccggctccaccggcccagggcagtgaggggcttagcacctgggccagcagctgctgtgctcaatttctcgaggggccttagctgccttcccgcggggcagggctcggaacctgcagcccgccatgcctgagcctccccctgttccgtgggctcctgtggggcccgagcctccctgacgagcgccgccccctgctccacggagcctagtcccatcgaccacccaagggctgaggaatgcgggcgcacggcrcgggactggcaggcagctccacctgcagccccggtgcg

SEQ ID NO: 5659 - DNA, 801 bp, Homo sapiens
ggaaggagccgaatagaagccgccccactgcagggcctgctctctccagctcaccccagccccattcagcccacgtcagcccccatgacagctggcctggttcaacttccctcatgttgccgatgaggaagccgagttagagacttgcccaaggccgtgcagccagtttgaggtggagtcaggtctctaactcaagtctggagaatcccagtgtctcactctgttccagccctgatgatctgagcctctgtgagattcttctccccttatctaaatcatactcatcttttaagggctgactccagtttcttcttccaagaagccctccttgaccgctcccatcagccctcatgtttcctttcctcctctgacttccgtcaggctgggtgactgtgcagacccatttatgacagatcctctatggcttatgaacctcttaggcctcagcattaggagtgtggggtcgggacccagcagacctggccttcacatctgtgaccctgggtgggtgacctccctccctgagcctgtatttgctcagttgagatacgggcataatagaagagggagtccctgaaagggtggagtgggacaggcacwgtgccaggcacaccataggaagcgtgctctggagtgtctggtcctcgtgatggctgccagtgatgctgagcagagcagcatctcatccttcgtgatgtcttcaaaccaccaattgagagggggccaggaaacagcaatacagaggggacttgagaggcagctgagggcagtggtggagaatgtggacttgggagttggaca

SEQ ID NO: 5660 - DNA, 801 bp, Homo sapiens
ggaaggagccgaatagaagccgccccactgcagggcctgctctctccagctcaccccagccccattcagcccacgtcagcccccatgacagctggcctggttcaacttccctcatgttgccgatgaggaagccgagttagagacttgcccaaggccgtgcagccagtttgaggtggagtcaggtctctaactcaagtctggagaatcccagtgtctcactctgttccagccctgatgatctgagcctctgtgagattcttctccccttatctaaatcatactcatcttttaagggctgactccagtttcttcttccaagaagccctccttgaccgctcccatcagccctcatgtttcctttcctcctctgacttccgtcaggctgggtgactgtgcagacccatttatgacagatcctctatggcttatgaacctcttaggcctcagcattaggagtgtggggtcgggacccagcagacctggccttcacatctgtgaccctgggtgggtgacctccctccctgagcctgtatttgctcagttgagatacgggcataatagaagagggagtccctgaaagggtggagtgggacaggcacagtgccaggcacaccataggaagcgtgctctggagtgtctggtcctcgtgatggctgccagtgatgctgagcagagcagcrtctcatccttcgtgatgtcttcaaaccaccaattgagagggggccaggaaacagcaatacagaggggacttgagaggcagctgagggcagtggtggagaatgtggacttgggagttggaca

SEQ ID NO: 5661 - DNA, 801 bp, Homo sapiens
ggaaggagccgaatagaagccgccccactgcagggcctgctctctccagctcaccccagccccattcagcccacgtcagcccccatgacagctggcctggttcaacttccctcatgttgccgatgaggaagccgagttagagacttgcccaaggccgtgcagccagtttgaggtggagtcaggtctctaactcaagtctggagaatcccagtgtctcactctgttccagccctgatgatctgagcctctgtgagattcttctccccttatctaaatcatactcatcttttaagggctgactccagtttcttcttccaagaagccctccttgaccgctcccatcagccctcatgtttcctttcctcctctgacttccgtcaggctgggtgactgtgcagacccatttatgacagatcctctatggcttatgaacctcttaggcctcagcattaggagtgtggggtcgggacccagcagacctggccttcacatctgtgaccctgggtgggtgacctccctccctgagcctgtatttgctcagttgagatacgggcataatagaagagggagtccctgaaagggtggagtgggacaggcacagtgccaggcacaccataggaagcgtgctctggagtgtctggtcctcgtgatggctgccagtgatgctgagcagagcagcatctcatccttcgtgatgtcttcaaaccaccaattgagagggggccaggaaacagcaatacagaggggacttgagaggcagctgagggcagtggtggagaatgtggacttgrgagttggaca

SEQ ID NO: 5662 - DNA, 2017 bp, Homo sapiens
tccgtcatctggaggtaggcaggccagggtgtaatgtttccatttcccaggtaagcaaactgaggttctttctatcacaccctgctggtcactctccatagggtctacaggattgggactcaatgaccatgtggataagacatgggcctcaggtataaaaggtgagtacattcaggtataaaaggtgagtacatctggacaacttattaatctcttcaggctaataagttgtcccagcaagctgcagaaagccaggttcaaattctagcttggctacttagtggctgtgtggccttgggcagcttgatgaccctctctgggcctcagtctcatcatttgtaaaatagagctaataataccaacagaagtttcaataagataatggaagcatagcatataccacagtgcggracacacaggtggcacctttcacctccctgtctcgggcctcctccaggcctctcaggactaccctcagcctgcgagggcagtagaactgaaaccctggcagcccttccaccatcctcccttggccaagaacacctttcttctgctcttccctggatggctgcaccttgtctggggataagcaagaggctagggtttaaaaagaaaaaaaccaccaccatttccaaccatttttttcctggactaattgccctttcagcccttggttcttctcatcctccaaagccctgggaaaatggctcctcctccaggaagccttcttggctctctccccattccctcctaagcaccccaagtctgtagttatggatagagctctctcctgcgccctagactggcagcccgagggacggtacggagggccttcagcatctgggcagctcccacacctggcctaggaactggtacacagcaggtgtcctggaagtggtatttgagtgaaaaatgaatgagctgttctgaagcccaaattgtcccatatttcctacccagatcactaggaatttgaagaccagagagaaagaatcatctcatgtcctgagatccagaaccttccatttagctgactcagagaggagagaggactgaggtgactgacccccacccttcccaggagcatgcactctggctgcctccaggcctttccacctcctcctcacctgcctaactcttgctcctcgctcagcttccaccgcagtggcccctcctcctggaggccgtcctctgaccgcctgttcctggctgacgctcccctggatgggctgggtgcctccgtcagcttccacagaccctccctgcctgctctgctttcctcagcacaaccccagtccccctgcaccttcactgtctgtagatgtatctgtcaccatctctaggctgggtgggccttgggggcaggggtcatcatggccatttccaaggccccctaatgcctggcacatgacactcaacaagtgttagcttcctggtcctcaatgaagacatcactgagccctccaagaagaagaaaaatcaagagctgaatgatttcagtggatgtctgatggatggatgtatcatggacagatggatggatggatggatggatggatggaccaatggatggataggaaaggggaagttggggagggtgtagaatttttcctatttttaagagcaaaggcctgaatcacttgagtacattggccagggtccctatctaattcccttcacaaaaggctggcctgtgtggtctcagccctggcctgagcctgggggtctgcaggagttgtctgtccccgctccttctccctcaactgggtgtctccaccctgtccttgaagagaagcagcagaatttctatgtgggggtctgggcctcccctcccacccagcattccaaccctcacacccttccccagtcagcatagcacaggctgccagctggcggcctccctcccagagcccaccccattgaccgcaccccacccccgcagactcccccagacacttctgggccactggtccagcctctgtaagaagggctcgagctgaaagcagggtgggaagga

SEQ ID NO: 5663 - DNA, 2017 bp, Homo sapiens
tccgtcatctggaggtaggcaggccagggtgtaatgtttccatttcccaggtaagcaaactgaggttctttctatcacaccctgctggtcactctccatagggtctacaggattgggactcaatgaccatgtggataagacatgggcctcaggtataaaaggtgagtacattcaggtataaaaggtgagtacatctggacaacttattaatctcttcaggctaataagttgtcccagcaagctgcagaaagccaggttcaaattctagcttggctacttagtggctgtgtggccttgggcagcttgatgaccctctctgggcctcagtctcatcatttgtaaaatagagctaataataccaacagaagtttcaataagataatggaagcatagcatataccacagtgcggaacacacaggtggcacctttcacctccctgtctcgggcctcctccaggcctctcaggactaccctcagcctgcgagggcagtagaactgaaaccctggcagcccttccaccatcctcccttggccaagaacacctttcttctgctcttccctggatggctgcaccttgtctggggataagcaagaggctagggtttaaaaagaaaaaaaccaccaccatttccaaccatttttttcctggactaattgccctttcagcccttggttcttctcatcctccaaagccctgggaaaatggctcctcctccaggaagccttcttggctctctccccattccctcctaagcaccccaagtctgtagttatggatagagctctctcctgcgccctagactggcagcccgagggacggtacggagggccttcagcatctgggcagctcccacacctggcctaggaactggtacacagcaggtgtcctggaagtggtatttgagtgaaaaatgaatgagctgttctgaagcccaaattgtcccatatttcctacccagatcactaggaatttgaagaccagagagaaagaatcatctcatgtcctgagatccagaaccttccatttagctgactcagagaggagagaggactgaggtgactgacccccacccttcccaggagcatgcactctggctgcctccaggcctttccacctcctcctcacctgcctaactcttgctcctcgctcagcttccaccgcagtggcccctcctcctggaggccgtcctctgaccgcctgttcctggctgacgctcccctggatgggctgggtgcctccgtcagcttccacagaccctccctgcctgctctgctttcctcagcacaaccccagtccccctgcaccttcactgtctgtagatgtatctgtcaccatctctaggctgggtgggccttgggggcaggggtcatcatggccatttccaaggccccctaatgcctggcacatgacactcaacaagtgttagcttcctggtcctcaatgaagacatcactgagccctccaagaagaagaaaaatcaagagctgaatgatttcagtggatgtctgatggatggatgtatcatggacagatggatggatggatggatggatggatggaccaatggatggataggaaaggggaagttggggagggtgtagaatttttcctatttttaagagcaaaggcctgaatcacttgagtacattggccagggtccctatctaattcccttcacaaaaggctggcctgtgtggtctcagccctggcctgagcctgggggtctgcaggagttgtctgtccccsctccttctccctcaactgggtgtctccaccctgtccttgaagagaagcagcagaatttctatgtgggggtctgggcctcccctcccacccagcattccaaccctcacacccttccccagtcagcatagcacaggctgccagctggcggcctccctcccagagcccaccccattgaccgcaccccacccccgcagactcccccagacacttctgggccactggtccagcctctgtaagaagggctcgagctgaaagcagggtgggaagga

SEQ ID NO: 5664 - DNA, 751 bp, Homo sapiens
aagctctaatccaggtgttggtggtcacgacggtgctgtgggtggaggagagaatggggcctcccatgcttcctcagggtcaagttgaaatccatgatgctccaacccagtgaggtgagcaaaggcctggagcttaggaccgaatctgctctcaggacctgggtttgccactttctgcttgttgactttggccaaggtttttgtctttttgctctttatatctctgttccctcatctaagatacctgaagaataatatctacctgcaatcataatttccaaagggcctgattccataagaattgcccaataaacctatgagtaggtgttatctaatccttttatctttctgctaaatttacacttagcaagtgacttcacggacgatgtctcctctgaggtagagcagttatgaagatctctgctttctargacccctcttcctttcctttctcacacagactcctctgccagttttcttcctctccttctccatccctcatgaagccaattttcccctgtcaggcactttcaataacaacctatgaggcacattgagtaacagtgtaaatcctgggcccacactcagtctcctgacatgtccagctgcttctgctgttttttctgcttttttttgaaataaaagggcaactttcacatggaaagtgttcacatcagtctcttttatgaaattccatttagttcacattctccactcatgtccgtggccatgtcctcggtttctgtctcac

SEQ ID NO: 5665 - DNA, 801 bp, Homo sapiens
tcaaaaggctagaggaattcaggacattaaatctcatttaagtatttattctcattaatggtgttacaaytgggtgtaggaaggaaagcaaatgagttcattgttgtacattttctacttgggctttggttcccttatattctgaattagctactgaaaagtcgatgcctttatgtaaaagtaaatcaagtaggttctcaaaatattttaaatataaatctatttgaattttcatcaagaaactaagaatctccatatcacagtctccttcaaccatgctttcattcaatgtatgaatcttgagtgttttaattttaattttattattttaattttttctatgaagttttaagaaaatttatttacagaaaatattttaattgttccaaattaagtttttgagcttcaaaattagaaaacattccattaaccctgtcatgagaaagataagttttaatgataatttctgattgttttgtgcattagcctacgagtagcgcctatcagtctagtgaccctcctgaccaagacagtcacttttactatcaccagagagaaaaacaagggaaaggctagaatctaaggtttatttttagactatgaatgagagcattaccagttagtactatgttttaaaaactgatgaaataataattagtaatagcttccatttttctacattcaggtattttgcagacatttacttcatttaattcttaaaaagccttacaaaataaggattattggctctcattatattaattaaagaaaccgagtcttagaagaattgagtaagaattt

SEQ ID NO: 5666 - DNA, 583 bp, Homo sapiens
ccaagcatagtctgtccaggcctctgcccaacccttccccaggcctgggagtgacagatcacttacctcgggagctcagagtcaactatggataccgggatctggaagcctgcccagaggccccaggaaaagtgtgaagcctaaataaaaaattagaaatgattcaggaaaatctctctctctgtttttggtgcaaacatgccccaacaatgacttttttatcacttgggtgagaggctggttatattgctgtctaacttcttctaaaataatagccagcctacctctgtctgtctgtctgtcttcctctctctctgtcccctccccaccacattayccaggaacagaagctccggggttaaaattagttgccaatttgtaaggaggcagctataagccaaaaatcactggagaatatcaagttcggggccagcagagctcataaaagaggtgctctccgaagaatcctgagaaggtctcaaaatccaaatcagcagagcggtgatctcaggatgacccttttgctgtggcatcctggtgaagggtgctgacactggagtcaccctacctgcgtttgaattct

SEQ ID NO: 5667 - DNA, 814 bp, Homo sapiens
ttatgctacagctgttcccaaattcttatataacagttgcaaataggaatgctttcctcataaatgttttaagtccaaggttatggccctttctttaagaagtagacttcattccagttgcttgcctttaagagaggattgtagtaggtggataaatacttaaacatcaaaatagaaaattttttcctgatcccaactatcaccatagaaagagggcctgagtaggctgtcatcctggttctactgctaactaatattggaaaattctcttaacctccctgggacttagtttcctcctgtgtaaaatgttgatccttattctatgccagcttcarattctcccaaatgtccaaatcctttgtgcaaagcaggctgctaattcttcaccaaaggctgagatgacttcagaagtcaatagttcattttattgaattcggtgccacaaccttttctcagttactgaacgaataaataagtgaagaaatgaatcaagggcaaataacgacacttatgtgggagacaagaaatgaagagcctgatatgtattcattcattgctagaatgacttctaacctacattaccataagacttctcagatatatcaatagagtgaagtaacagcatgttttctagggaaagtagaatcttcccatttgaggtgaattatttttgtggggtatattgctcactgctctctttctgttttatatttacacggaaagagaaagctatactttcatatccactttactaggaaaacaaaatttatgaattctgaaaagtgtgaagggaggaatttaacttttaccagta

SEQ ID NO: 5668 - DNA, 718 bp, Homo sapiens
ctctaaaccaaaaaatgtccttggcttctcaataagcatactgctgtgaagtcccaactcattatttccaaaccaacctcacagtccaaggcattccagactcagaggaggagctccaatgtaatcctgatcacaatcctgaattctacatgcagctgagtgttcaatgtgctgggctagatcctcctattgcatacatgctcctttaaatagggtcactctgtcactttctctgcctttatgccaagtaactgttaacagaggctaatgaatagagcaactactaggaattaatgataggtaagcagagacatcttataaaccataaaaatacaaaacaaccctgagcttgaattacagatcaagaaattatacatcaagcaccaagcaagggctgacttaaaaagaaaaagagagrgaaagcaagcaattaattctgttgatgctgaggaaccaggataaatctcagagaaccaagaaagctatggctaatttttaaaaacactgaccaagtacctaccatgtacaaagccttggatatggatgaggggtgtcaagcataaaaagatgaggatggaactgaactcaaaggatgtcaggacaccatggtctcatgtgtatttttcttgtttctctggccctatactctcagtcttatttctctgtgcgttaaatgctgttatctctcaatgttccatcttcagtcctcttcttaatc

SEQ ID NO: 5669 - DNA, 828 bp, Homo sapiens
gtttcatctgccccgcctcaggtgctatgccctaccctgcacctttctgaacatgcccatccctttctcacctgctatatgtcgctgcacatactggtctttctgcccattaacatcctctctgccactccctaacaccatgcctttcctttccatctgcccaactcccatttgtccttcatggctcagctcaaaggtcaccactccaggcccaatccaaatcaggggctattcccctatgtttccatagtaccctgtgcattccactctcgtaatttttttttttttttaagacagggtctctctctctgttgcccaggctggagtgcagtggtgcaatctcagctcactgcaacctctacctcccaggttcaagcgattctcctgcctcagcctcctgagtcgatgggattacaggcgcccaccaccatgccyggctaatttttgtattttttagtagagatggggttttgccatgttggccaggctggtcttgaactcctggcctcaggtgatctacccacctcggcctcccaaagtgttgggattacaggcgtgggccatgcacctggcccataatcttgatcacaaaatgtaataactgtttgtttagtctcctgttggccaataagctcttaggaggcagggaatgtatcagatttctttttgtatcttcggtacctggcacttagaagacactcagtaaatacacacagaaggcaaggaaagcaagaagaaagaaggcaaggaatgaaggaaagaaaacaagaaaaagacacctactggagataaaatatacacatgatgtgaaagtaggagggtttaagg

SEQ ID NO: 5670 - DNA, 788 bp, Homo sapiens
agggcacggggcttgtgagcgactagccaatcgtgtcgtcccgccatccgcgaaccagccaatcgcacggaggccgcgtaggaaattcgaatggcaactcctcgctccacgttccgcgcagaggaacgtggctccaaattcaaatcaacgcagcctcacgccggcggcgagcgcgaggggcggagcctgcccggcgtgggccgagacgcgctgtgtgattgccycggagagaggaaggcgctccagttccgggtcaggcccttctcccgcctccctcggccttagccatggcgagtagcagcggtgctggggcggcggcggcggccgcggcggcgaatctgaatgcggtgcgggagaccatggacggtgagtttccgttgcgctccctttaccttgcgtgccttcccagagccaaggcccccaggcgggaatgagcctggggaggacttcaggtccccttagtgccccaaacggcatcttccaagatctttggtagggacctgccagggccgcagggctgatggccctatcccttgagagttgtctccgccgctgcgtagtttgtcgcgcgcgctaggcgttgcggcccctagtcagccggttgcgcaccgcgtccctctcgcgcgaatgccgcgccccctctatcccgcatcccaggtccgccctacccgcccgatctcctgcggtgacagcgtcacgcccaccccacccagtacacccgttccctcctgcgtgccgcgtcccacccgattcccgcccggggcgcttcgggggtccccaaggttggg

SEQ ID NO: 5671 - DNA, 788 bp, Homo sapiens
agggcacggggcttgtgagcgactagccaatcgtgtcgtcccgccatccgcgaaccagccaatcgcacggaggccgcgtaggaaattcgaatggcaactcctcgctccacgttccgcgcagaggaacgtggctccaaattcaaatcaacgcagcctcacgccggcggcgagcgcgaggggcggagcctgcccggcgtgggccgagacgcgctgtgtgattgcctcggagagaggaaggcgctccagttccgggtcaggcccttctcccgcctccctcggccttagccatggcgagtagcrgcggtgctggggcggcggcggcggccgcggcggcgaatctgaatgcggtgcgggagaccatggacggtgagtttccgttgcgctccctttaccttgcgtgccttcccagagccaaggcccccaggcgggaatgagcctggggaggacttcaggtccccttagtgccccaaacggcatcttccaagatctttggtagggacctgccagggccgcagggctgatggccctatcccttgagagttgtctccgccgctgcgtagtttgtcgcgcgcgctaggcgttgcggcccctagtcagccggttgcgcaccgcgtccctctcgcgcgaatgccgcgccccctctatcccgcatcccaggtccgccctacccgcccgatctcctgcggtgacagcgtcacgcccaccccacccagtacacccgttccctcctgcgtgccgcgtcccacccgattcccgcccggggcgcttcgggggtccccaaggttggg

SEQ ID NO: 5672 - DNA, 788 bp, Homo sapiens
agggcacggggcttgtgagcgactagccaatcgtgtcgtcccgccatccgcgaaccagccaatcgcacggaggccgcgtaggaaattcgaatggcaactcctcgctccacgttccgcgcagaggaacgtggctccaaattcaaatcaacgcagcctcacgccggcggcgagcgcgaggggcggagcctgcccggcgtgggccgagacgcgctgtgtgattgcctcggagagaggaaggcgctccagttccgggtcaggcccttctcccgcctccctcggccttagccatggcgagtagcagcggtgctggggcggcggcggcggccgcggcggcgaatctgaatgcggtgcgggagaccatggacggtgagtktccgttgcgctccctttaccttgcgtgccttcccagagccaaggcccccaggcgggaatgagcctggggaggacttcaggtccccttagtgccccaaacggcatcttccaagatctttggtagggacctgccagggccgcagggctgatggccctatcccttgagagttgtctccgccgctgcgtagtttgtcgcgcgcgctaggcgttgcggcccctagtcagccggttgcgcaccgcgtccctctcgcgcgaatgccgcgccccctctatcccgcatcccaggtccgccctacccgcccgatctcctgcggtgacagcgtcacgcccaccccacccagtacacccgttccctcctgcgtgccgcgtcccacccgattcccgcccggggcgcttcgggggtccccaaggttggg

SEQ ID NO: 5673 - DNA, 788 bp, Homo sapiens
agggcacggggcttgtgagcgactagccaatcgtgtcgtcccgccatccgcgaaccagccaatcgcacggaggccgcgtaggaaattcgaatggcaactcctcgctccacgttccgcgcagaggaacgtggctccaaattcaaatcaacgcagcctcacgccggcggcgagcgcgaggggcggagcctgcccggcgtgggccgagacgcgctgtgtgattgcctcggagagaggaaggcgctccagttccgggtcaggcccttctcccgcctccctcggccttagccatggcgagtagcagcggtgctggggcggcggcggcggccgcggcggcgaatctgaatgcggtgcgggagaccatggacggtgagtttccgttgcgctccctttaccttgcgtgccttcccagagccaaggcccccaggcgggaatgagcctggggaggacttcaggtccccttagtgccccaaacggcatcttccaagatctttggtagggacctgccagggccgcagggctgatggccctatcccttgagagttgtctccgccgctgcgtagtttgtcgcgcgcgctaggcgttgcggcccctagtcagccggttgcgcaccgcgtccctctmgcgcgaatgccgcgccccctctatcccgcatcccaggtccgccctacccgcccgatctcctgcggtgacagcgtcacgcccaccccacccagtacacccgttccctcctgcgtgccgcgtcccacccgattcccgcccggggcgcttcgggggtccccaaggttggg

SEQ ID NO: 5674 - DNA, 788 bp, Homo sapiens
agggcacggggcttgtgagcgactagccaatcgtgtcgtcccgccatccgcgaaccagccaatcgcacggaggccgcgtaggaaattcgaatggcaactcctcgctccacgttccgcgcagaggaacgtggctccaaattcaaatcaacgcagcctcacgccggcggcgagcgcgaggggcggagcctgcccggcgtgggccgagacgcgctgtgtgattgcctcggagagaggaaggcgctccagttccgggtcaggcccttctcccgcctccctcggccttagccatggcgagtagcagcggtgctggggcggcggcggcggccgcggcggcgaatctgaatgcggtgcgggagaccatggacggtgagtttccgttgcgctccctttaccttgcgtgccttcccagagccaaggcccccaggcgggaatgagcctggggaggacttcaggtccccttagtgccccaaacggcatcttccaagatctttggtagggacctgccagggccgcagggctgatggccctatcccttgagagttgtctccgccgctgcgtagtttgtcgcgcgcgctaggcgttgcggcccctagtcagccggttgcgcaccgcgtccctctcgcgcgaatgccgcgccccctctatcccgcatcccaggtccgccctacccgcccgatctcctgcggtgacagcgycacgcccaccccacccagtacacccgttccctcctgcgtgccgcgtcccacccgattcccgcccggggcgcttcgggggtccccaaggttggg

SEQ ID NO: 5675 - DNA, 823 bp, Homo sapiens
ttccactgtccagcctttggcttttcaaatacatgtgtgtgcacgtgtgcacgcaaacacacacacacgggcatgtgcacacacatactaacagagaaacataaatatttatctttcatatttaatttgaaaaataccacagataacccaattcaatagtcctgtatgcaattcaaaactatatccatgagggaatatctggtttttatattagtattttgatgtgcggtcaatgcctgtcaaacagatctgaaaataaacttctcatgattagtcrtgaaataaattgtatattttcactctgtccatcataatcaaatcataaaataaaaaacaaaataacttaaataagaaagtttgaataatatgggaaatgcatttataaagagaattcttacatctggggagaaaggtattctttgcactctcatgttctatctctaaatactatattgtctgaagaacaaatttattttttctgcatcaggcaggctttgttgtcttctggttggagttggtcaatgagaccacctgagggagtaagagaagataggttgactaatattataagaaacacggatggagtggataatagacccttgatcccccagaaatctgcaacaatggatgatttatcatgaggttcatgtgaaataaatagttggcagtatattaaggtgctgcgaacctatataagcagataaaattctaggtctgttggggaagctgacttgattgactatacaggtgtttcatgctttcttataccatttccaaagcaaaagcagtttatagaccttggtctcctttatgagaagataaa

SEQ ID NO: 5676 - DNA, 631 bp, Homo sapiens
attattcaaaaaactgacaattcctcatggtttgacctactacatgtcattcgggcctgctacgtgcctgcacaatgcaagatgttctctgtaattctcacaagaactgtgcaaggaatgtgttattttgatttgaaaagctgaggaaactgaggctaagacagatcaggtgactatccagttgctcctagcaagtcagtagtgggaccggtccttgaactcaggtcagtttccaaagcagtgcaacagctgaaaatctatgtgctgagtttgctaatttgaccagctcttcttaaggttatatttgtctttgggggatggaagctgtcakcatggagatgcagggccctgcttggggtcaaggtgggattcagggacttggtcttattaatataattatcttatgatgaagaaacaaagccccagtcacatggggacaagtcatagcctggaacttccagggctcctgaggtgcatggggaggtaggcagagccatttatcaaaagatctggtttcaatcctggttcagctgtgagccctgcccaccctgggcctcgcttcctcagctacacagagaccactgtaacctccagctctaaggtttggtgaatctgggcagagtcacagctg

SEQ ID NO: 5677 - DNA, 810 bp, Homo sapiens
aaacaaaaggtcagatgaatgtttcccctcaaagcttcccgcagtgactgagttttagagaaacttactctaaatgagaaatgagaaatgggaaatgagaggggctggtagtttacagaatttagggccatgcagtgaccttgcggattccatggggtgttcacagagacccaaggataatgagactgaattccccattataatcatttcccagagcctttcgacatgctaaagtgaactttgaaactgcgagaagatgtggcacacacggcaggtgacgggagtctgaccagaggagtcggggaccatctgagaagacgcgtgttctctaaacacggcttggaaaataggtactggttttcaaatgcgctcagtgaactccttagacaagctttgagaagaggcaaagaagcaggatgtcggcccgtttcaaggacagtcttctcctgctcgtttctttcacatgtctggctctgcagtgactaagctttcctttgaagaaaggtttctttgactatcgcaaccccccaaraaaaggattctagaaatatttgtggatgctcaagaccgaagctcaactgtcagctattttccccctggccttgctactcctgagacttcaatatggtatttttggaatgaaaccacatatgaaatccaaaaggcaaaaacctctgacttttccccacaagtgtgttagaaccaggagcaaagggaagggcgccctcttggtgggaggtcactcatgaagctggacagaggccagagacccggcagtttggtgacttgtgtctaagctctgagtgtgga

SEQ ID NO: 5678 - DNA, 1236 bp, Homo sapiens
ttttcagcaagtgatacatgtttgttttcctaacactaatctttgcatttagatcacttattgtcatgcaaagattgtcttttaaaaattaaccttttaagagaaacattttttctatcctgtagcagcatttttcatgtttctttgacctcgtgaatcctttagaaaagtcaattctaatcaataggctaagtttcaagtttttttaaaaaaattttcattgcacaggtaaatgagaatttttaagaatctgttaacctgctttgtagaacttaactatttcgataaatacttgattgggtgtgttggctcacacctgtaatcctaacactttgtaatcctaacactttagcaagagcatcacttcagcccaggagttcgaggctgcagtgagctgctgtggttgtgccactgccctccagcttttgtgacagagtgagagcttgtctctaaaaaaaaaaaaaaaaaaaaaaggaaaaaatatagatgaatacttgaggaaaattaagcgttaggcatactatatatctgaaaccgattttattgacagatactgcaaatgaagtaggaaaatgcagtttgctttctgatgagagctgtcctagatatatttggcttaagagcatctctctgcattggcaataattgtaggtgctttaatatccatgaaagcctgaacattacttgagtgagtatctgttgagatgtgtttgtgtctgttggttagggaaatattattctagtgttttattagtcagtataagacaactggttttgttgtttcacaatatattaagtgtatcagacagtatattagtctgttctcatgctgctataaggacatactcgagactgggtaatttataaagtaaagaggtctaattgactcagttccacaggrctaaggaggcctcaggaaacttacaatcatggcagaatgggaagcaaacacgtccttcttcacgtggcgggagaaaagagaagaatgagagcccagcagagggggatgccccttataaaaccatcagattttgtgagatctaagtcactatcacaagaacaggagggggaaaccgcccccatgattcaattatctccacctggttcctcccatgacacgtggggattatgggaactacaattcacaatgagatttgggtgggaacacagccaaaccatatcagatagtataagtctttttaaaattactattttaaaatgttttttccctctcag

SEQ ID NO: 5679 - DNA, 1236 bp, Homo sapiens
ttttcagcaagtgatacatgtttgttttcctaacactaatctttgcatttagatcacttattgtcatgcaaagattgtcttttaaaaattaaccttttaagagaaacattttttctatcctgtagcagcatttttcatgtttctttgacctcgtgaatcctttagaaaagtcaattctaatcaataggctaagtttcaagtttttttaaaaaaattttcattgcacaggtaaatgagaatttttaagaatctgttaacctgctttgtagaacttaactatttcgataaatacttgattgggtgtgttggctcacacctgtaatcctaacactttgtaatcctaacactttagcaagagcatcacttcagcccaggagttcgaggctgcagtgagctgctgtggttgtgccactgccctccagcttttgtgacagagtgagagcttgtctctaaaaaaaaaaaaaaaaaaaaaaggaaaaaatatagatgaatacttgaggaaaattaagcgttaggcatactatatatctgaaaccgattttattgacagatactgcaaatgaagtaggaaaatgcagtttgctttctgatgagagctgtcctagatatatttggcttaagagcatctctctgcattggcaataattgtaggtgctttaatatccatgaaagcctgaacattacttgagtgagtatctgttgagatgtgtttgtgtctgttggttagggaaatattattctagtgttttattagtcagtataagacaactggttttgttgtttcacaatatattaagtgtatcagacagtatattagtctgttctcatgctgctataaggacatactcgagactgggtaatttataaagtaaagaggtctaattgactcagttccacagggctaaggaggcctcaggaaacttacaatcatggcagaatgggaagcaaacacgtccttcttcacgtggcgggagaaaagagaagaatgagagcccagcaragggggatgccccttataaaaccatcagattttgtgagatctaagtcactatcacaagaacaggagggggaaaccgcccccatgattcaattatctccacctggttcctcccatgacacgtggggattatgggaactacaattcacaatgagatttgggtgggaacacagccaaaccatatcagatagtataagtctttttaaaattactattttaaaatgttttttccctctcag

SEQ ID NO: 5680 - DNA, 628 bp, Homo sapiens
tttcctgaggaaggaactcagattaaacaaatctaagtttcaagctttaagaccagaagagtcagtttctgtgtttttccaaaaaaaacygtccacaggacttttgggtcggtttcagttttattttagcttccaattgttttggagccatatatctagttttcaaatgttgacatattgagttgacattaaatcagatgaaacaaaactttgtatgtcaatgattatttcaaattttcatactgtaattacaatataccaggacaactcaatctgtttctgaaacaccaggggttcagtctaagtccaattgctgactgcccagaaagccaatcactaagacaatagtaatgcaaaggtagaaggctttattcaggtgctacaacctcggagatgagagatctgtctcaaatcaatctcctcaactgactaaaattaacagtttatataccaggaacgaaaagtaaccatgtctgggaaaacaattagggagggctaaggaagagtagttagtcaacaggaagcaggtggtcagttaggtcatcatgatgggtgaggactgtggcctctcattgtccagatgcagacatctggtaagtgtcagttacttgataatatctgggaggcc

SEQ ID NO: 5681 - DNA, 628 bp, Homo sapiens
tttcctgaggaaggaactcagattaaacaaatctaagtttcaagctttaagaccagaagagtcagtttctgtgtttttccaaaaaaaactgtccacaggacttttgggtcggtttcagttttattttagcttcmaattgttttggagccatatatctagttttcaaatgttgacatattgagttgacattaaatcagatgaaacaaaactttgtatgtcaatgattatttcaaattttcatactgtaattacaatataccaggacaactcaatctgtttctgaaacaccaggggttcagtctaagtccaattgctgactgcccagaaagccaatcactaagacaatagtaatgcaaaggtagaaggctttattcaggtgctacaacctcggagatgagagatctgtctcaaatcaatctcctcaactgactaaaattaacagtttatataccaggaacgaaaagtaaccatgtctgggaaaacaattagggagggctaaggaagagtagttagtcaacaggaagcaggtggtcagttaggtcatcatgatgggtgaggactgtggcctctcattgtccagatgcagacatctggtaagtgtcagttacttgataatatctgggaggcc

SEQ ID NO: 5682 - DNA, 628 bp, Homo sapiens
tttcctgaggaaggaactcagattaaacaaatctaagtttcaagctttaagaccagaagagtcagtttctgtgtttttccaaaaaaaactgtccacaggacttttgggtcggtttcagttttattttagcttccaattgttttggagccatatatctagttttcaaatgttgacatattgagttgacattaaatcagatgaaacaaaactttgtatgtcaatgattatttcaaattttcatactgtaattacaatataccaggacaactcaatctgtttctgaaacaccaggggttcagtctaagtccaattgctgactgcccagaaagccaatcactaagacaatagtaatgcaaaggtagaaggctttattcaggtgctayaacctcggagatgagagatctgtctcaaatcaatctcctcaactgactaaaattaacagtttatataccaggaacgaaaagtaaccatgtctgggaaaacaattagggagggctaaggaagagtagttagtcaacaggaagcaggtggtcagttaggtcatcatgatgggtgaggactgtggcctctcattgtccagatgcagacatctggtaagtgtcagttacttgataatatctgggaggcc

SEQ ID NO: 5683 - DNA, 628 bp, Homo sapiens
tttcctgaggaaggaactcagattaaacaaatctaagtttcaagctttaagaccagaagagtcagtttctgtgtttttccaaaaaaaactgtccacaggacttttgggtcggtttcagttttattttagcttccaattgttttggagccatatatctagttttcaaatgttgacatattgagttgacattaaatcagatgaaacaaaactttgtatgtcaatgattatttcaaattttcatactgtaattacaatataccaggacaactcaatctgtttctgaaacaccaggggttcagtctaagtccaattgctgactgcccagaaagccaatcactaagacaatagtaatgcaaaggtagaaggctttattcaggtgctacracctcggagatgagagatctgtctcaaatcaatctcctcaactgactaaaattaacagtttatataccaggaacgaaaagtaaccatgtctgggaaaacaattagggagggctaaggaagagtagttagtcaacaggaagcaggtggtcagttaggtcatcatgatgggtgaggactgtggcctctcattgtccagatgcagacatctggtaagtgtcagttacttgataatatctgggaggcc

SEQ ID NO: 5684 - DNA, 806 bp, Homo sapiens
acctgccccatgagccctcctgctgccgtggagagtcattcacatcctggctatccttgcctcctgccaccttgcacacttaggtgtccccaactgtgatcccatgcatcttactgacttccactgcctacagcaggggccagaggtacaggcactcacagggccagcgctggggtccaggaatgccctgatagggtatggaaaccctgacccccatggtcacctgctgttcagcggcagcctcatgtggccaggcagcaaggcacccagtgcgggcagcacgattttttttttttttttttggagatggagtcttgctctgttgcccaggctggagtgcaagtggcatgatctcggctcaccacaacctccgcctcccgrgttcaagcaattctcttgcctcagcctcctgagtagctgggattacaggtgtgcaccaccatgcccggctgatttttgtatttttagtagagttggggtttcactaggttggccaggctggtcttaaactcttgacctcatgatccgcctgccttggcctcccaaagtgctgggattataggtgtgagccatcgcgcccagccagcttgatttttaaaaaagaaacttcacgtggaatttggagtgaaatctcctagtttttaaattaaataaaaagacttttaagcattgtgtgggctgaatgaacggatctgccagtgaccttcccccgattcccagtgtgtgaagcccctggcccccagtgcaagccctttgtaacctccctcatctctgcacgttcacatgcgttggggagccagaggagg

SEQ ID NO: 5685 - DNA, 753 bp, Homo sapiens
ttcccaaagtactaggattacaaatgtgagccaccacacccaacctacttttatatgcttaatgctgccttttgatttaataaataggatttatccaatcatccacctgcccttcaattcagcaagtccacgttgagaacttccctcaggcactgggggacaaaaccatcccagctcctgcacacatgagtttccaagtgtgtggtgcagaaaacaataatcgccaaataggtaaaataactacgaatgtgctctattctgtgaaggaaagaagaactggctaggatgggaggaaaatgaaggaggttggggctggaaaatattccctttggcttttggttggttttctaaaaatacttgctactctttgcccaagattcagaaaaaaattatgtttctccatgacactgaaacctcctagaggcagggattgctttgaaacctccccagtggtgacccccacttccctccctgggttggtccagggcctcctgtccatctcattcctgttttgtgggtaaatgctcggtacatcctaaagtcattgaatagagttgttgctcccttggcccctgttcacttgaggttggagtgcaggggccaaggaggaagaaaatgggaagttcctgtccagctgccracgtcaggacatccaggcatggattgggctgtaactgaggttgcgtaaaccttcacctttgatcctttgagttctcagcatggcaagggccttgaaggctggaaggggattta

SEQ ID NO: 5686 - DNA, 753 bp, Homo sapiens
ttcccaaagtactaggattacaaatgtgagccaccacacccaacctacttttatatgcttaatgctgccttttgatttaataaataggatttatccaatcatccacctgcccttcaattcagcaagtccacgttgagaacttccctcaggcactgggggacaaaaccatcccagctcctgcacacatgagtttccaagtgtgtggtgcagaaaacaataatcgccaaataggtaaaataactacgaatgtgctctattctgtgaaggaaagaagaactggctaggatgggaggaaaatgaaggaggttggggctggaaaatattccctttggcttttggttggttttctaaaaatacttgctactctttgcccaagattcagaaaaaaattatgtttctccatgacactgaaacctcctagaggcagggattgctttgaaacctccccagtggtgacccccacttccctccctgggttggtccagggcctcctgtccatctcattcctgttttgtgggtaaatgctcggtacatcctaaagtcattgaatagagttgttgctcccttggcccctgttcacttgaggttggagtgcaggggccaaggaggaagaaaatgggaagttcctgtccagctgccgacgtcaggacatccaggcatggattgggctgtaactgaggttgcgtaarccttcacctttgatcctttgagttctcagcatggcaagggccttgaaggctggaaggggattta

SEQ ID NO: 5687 - DNA, 743 bp, Homo sapiens
catagatacactcacacgtttgaaatgatgtatattcaaagttattccctatagctttgttcacgataataaaaactggaaatgatctatatacccatcaatattgttaagtaaatgacagcacatctctacaatggaataccaggtatytactaaaaatgaatgcgcccgacacggtgggtcacacctgtaatcccagcactttgggaggccgaggtgggtggaccacctgaggtcaggagatcgtgaccatcctggctaacacggtgaaaccctgtctctactgaaaatacaaaaaattagcagggcgtggtggcgggcacctgtaggtagtcccagctaattgggaggctgaggcaggagaatgtcgtgaacccaggaggcagagcttgcagtgagccaagatggcgccactgcactccagcctgggcaacagagcaagactccgtctcaaaaaaataaataaataaaaagaatgcagcgctactatggaagaacttccaagaaatattatttcaataagaaaacgtataaaaccgtggatactgttaccatgtgtgtaaaagaaaaattgtaatatatgcatgtatattatatgcatgtatattatatatactctgaaatcactgaaagaatacacaagaaaatggtaatacagtggctgtttctagaagggccactgggtacttgggagacagaaaagggagacttagttttcactctacactcttttgtgccttttt

SEQ ID NO: 5688 - DNA, 1310 bp, Homo sapiens
atagatggatcttgaaaacacactttgtgaaagaatcaagacacaaaagaccacatattatagggtcctatttatttgaaatgcccagagaaggcaaatctacagagacagaaaatagattagagattgcccaggctgaagttggagtgaatgggaagtgactgctagtggtacaggatttctgtttcaggtgatcaaaatgtgcccaattttattttgatgatattggcacaactctgaatctagttaaaaaacattgaattgtacactttaagtaggtgaattttatggtattatatttcaataaagctgttaaagaaaagtggctaacattaggttccatgaaaccagcagtactattcaagctttttaaaactaccaaataaaataaattgagataatatcttaacatttatgtaccactgctcattttgttcttaagttaggaaatgtccttcaagctacagcataaaatttgcagagaggcaccctgggctgccattagttctgtgtttgaaacttcagggaacgctatcctgaagaggtcaacgtctccactgacgtcccagctgcctcctgacaagttgtgctgtgaccgtcttccactcccatcttggacggcccagatgtgggctgtgaagccaccctcttctgtctgcacttcacgcttgcttcccctccatctgctgggtccagctcacctcataaccaagagtctaatgctgatggctcccgggaaccaccactttcttggcaagaaggatccatgcagtgtttctcatcaaggagtaaggggcgtgcttctgcatttctgttcacatcgtctttcttcctacctttctattgctttttcttgtttttgcctgcattccttttatttgcctatcatattttcttcttattttttgtttactttaatattagctcaaactccagtttcattatgaggctttccttggttactgtagtgtaccatgagttctcagttctctattttattgcatgcattcgtgttctgcttgtctggtgcagaccataaacttcctggcactgtgtcagctttcctgagtatgcactatgtgcctaacactgtgataagagccttmcacttgccatgaggtttaatcatgtgagttgatcttgttgtctttgtgagcaggcaagcaagccgttctgagagcctccattctcttctatgattctgtatgtatcaaaatgctccccaaattttattataccgaagttaaggctcagtaaattctgctgaattgctttaattattggcttattttctgtttttctggtttttt

SEQ ID NO: 5689 - DNA, 804 bp, Homo sapiens
tcccacctctacttctgccccctctcaggttgatgtggcctcctctatttcagggttaaccatgctgtattgcagtgtggttttgcgagaatacaggatgtctctgtcttattcacttttgtatcccaggaacccagcacagagcttggcgcatagtaaatgctaaacaaatctctgaggaatgaaacaagggatggataaatgaatatcggccttttctcccccttgtctttctctcccctcctcctgctagatatatttccctacctcagagtctttctgtacatttctatcacttcacaccaagcctggcacacagagggtgctcagtaaatgctaaattaattactgctacaaggaacatctcagaacaatttagttgcttccaaaataagaatgaaaataaatttcaggcaagatatatttctatatccaaaagaaacagacaagataagtacacactgtatgtaaaaaaaacaaamaaaaaaaaactgttttggagacaagactaatgctgtgctcagccatagacagcctagaacaggctgtctaaaaatcagattacctgactgggtaatactgactttttcctacactacatgatacagcatatttccccagtgtggctgcctgactgtcacagcaataaactgccttctattccaaagccactgaaaacctctaacaggaaatcacatggagcctctgggaccacatggttcaggaagactgcatcgtctagatactctgagctctatcttagaagtcaagagacctggtttctttccttggctgcccaaaaga

SEQ ID NO: 5690 - DNA, 362 bp, Homo sapiens
ttgttgtattttttgtagagatggggttttgccatgttgcccagggtggtctcaaactcctggtctcaagtgatccttctgcctcggcctcccaaagtgctaggattacaggcataagcctctgcccccagcccccaactcctttaaaattcctcataagaatacatttgggccgggcacagtggctcatgtctgttatgccaacactattggaggctgaagcaggaggattgcttgagcccgggagtccaagaccagcctgggcaacataatgagaccctgtckctacaaaaaaattaaaaattaggtgggcgtgagggtgcacgcctgtagtcccagctactcaggaggctgaggtgaga

SEQ ID NO: 5691 - DNA, 618 bp, Homo sapiens
aaagaataagtctttaaagaaaagaatagaaatacagtggcatagcagactcaagctttagaacgtcctcctagagttgaacagcacacacacttatatggcagaagatacaagcatctatgtaggctagagagggagaggctgaagaaggtggacaggaagtgaaaatggacagtttctagagaaagaaagatgggaaagggtacatggacacatctggagggagggggttgctcttgaaaagaaagaaggtcatttcttcctctgagatatatatatataaagagatgacactgagatgaaaaaagtgaagtggaaatatacctcagatggttgagatttttctcagcaaaggaagagattaagttatttgctataaaaacctgaggaaatgagaagaaaaggaacacaacactagagacccagcagagagcaccaactggcataaaaactgaccaatatcctcacatagctgtctctgatgtccctcagaatttcaggggtcaaactggtaaagctagcgaggcttatttaggattggggactrgaaaggtaagtctacagaaagtgaagcattctaggccatcaataggagcttagtaaaagctgatgatcatg

SEQ ID NO: 5692 - DNA, 779 bp, Homo sapiens
tcctgggtccttagactamcatcctgctcgtttcagttaccttcttaccttggatacagcctcataggtcaactatggccaatgaggtcaagcatcaacctaatgctctccttactcataaagcatctatattaattgagcatgaacattccaggcactgtttctggctctgaggtgacaactataaataagacaaagttttttcaggagactcttgtggttgggtgcaggggcagggggagacatgctacatatataaacaagataatttaaattgtggtaagtactatggagaaaataaagccggggtgtaataacatacaatattagaacttgctttttaaatacaactttagagaacttgaaagtaacagacactttagatagcactagagtggtcggagaattctgtgagttgtccttaagatacaactcttgagggaaaaatactgcgatgtctggcagctgagagactcagccaacctgtgtagctatttgaggaagcaaagcctgggatgcaattataagaggagatcctggagtctccatggctgggaagtgctgactaaaagctgttgttgaagcgccactgacaacaatcatgggtcctcaggagtctctgccataataagttgtaggatgctagctcatgctaatgggaggaacaaccaaaagctcttggatttatgagtctctattggtcttaggtactctctttacttcctctctccaatatttaagctcccttgagaaagaagatcgaagtcactaaatgtctc

SEQ ID NO: 5693 - DNA, 671 bp, Homo sapiens
ctgattgcagacagaagacaggcgcagcagcttcaggtcccggggaatttaaaaagcaaaatttcccacgttttgtaggctgccagcctgaggctccttcttacctgacctttccttatgtggcatctgaccttttaaaatgatcttcccttatctcccagcaagttgttctgcttcttccactaacccctgccctccccatgggagagtgactaatcagcactgttcaggaggagatggggygcccatcagaatgcccagggggccctcgaacccgggccctagtgaggatgggctccctgctcctccatgtgccactacaacatgagagtcaagtctgggatctgctttggcgacgcgagtggaggtctgctgaggaatgggctctaagggcaaaaggaagtggttcttagactttccatagtaatggaggctcccacccatgggcatgacagctttccctatgaactggagtcctcgtcgacacctctccctgaattagaagtgtttaggaccacgtgtcttctccccaaccaggctcctcagtgagggagtgaccagctcccttcaggtttccatccccttcgtgagtgtggcagatagccacctcctgatccccactccctgtggctgccaccgatacagaaaagagggaggggcactttgctacc

SEQ ID NO: 5694 - DNA, 842 bp, Homo sapiens
cccctcaccctcccctaattggctgcctggccctttgcctccctcttccctycctccatcccctcccttcctggtaattaccactggagcaaataagttaggccattagacactcaccaacatttggtcagcttgcatctagcactggcaaggcagggagcagctgaaatgagagggttaggcaaccccgtctctactgggattataaatgtataattctctgcattatcttcagcttttttgtagagaaagcatttcacaaataggtcaggcttagggtgagtcagacagatagaagccattcacatttgctgaggtcaagaaaaccaggtggagagagacattctcagcagttccctgtggccagtgtgatcgtggtcatgtgcaattctggtgaaagctttgctttgggaagttttcccggaagctgtccagagggctccaggcacataactttgagagcaccccatatttttctttttgatggtagaatttgggattggttcaccaagctgctcaggtccagtctcaagagatgcccaggcccccagaggtcatcaacttcatacgtggtccttattcttgaggtgccctccaccctcactgtggtgcccagccatcctccctggcacagaaaaaaagtaatacagtaaaatgatggcatggtaagatgtgcgtgtcactcttcccagaaatgatgcatccacttcaacagaggacacagcacggatgcgtaagaactggtaactggcttattgaccattctggactcctggttgtataactgggtattgcctttacctttcctctcaccctgcctttcagaccttccctctcggttt

SEQ ID NO: 5695 - DNA, 842 bp, Homo sapiens
cccctcaccctcccctaattggctgcctggccctttgcctccctcttcccttcctccatcccctcccttcctggtaattaccactggagcaaataagttaggccattagacactcaccaacatttggtcagcttgcatctagcactggcaaggcagggagcagctgaaatgagagggttaggcaaccccgtctctactgggattataaatgtataattctctgcattatcttcagcttttttgtagagaaagcatttcacaaataggtcaggcttagggtgagtcagacagatagaagccattcacatttgctgaggtcaagaaaaccaggtggagagagacattctcagcagttccctgtggccagtgtgatcgtggtcatgtgcaattctggtgaaagctttgctttgggaagttttcccggaagctgtccagagggctccaggcacataastttgagagcaccccatatttttctttttgatggtagaatttgggattggttcaccaagctgctcaggtccagtctcaagagatgcccaggcccccagaggtcatcaacttcatacgtggtccttattcttgaggtgccctccaccctcactgtggtgcccagccatcctccctggcacagaaaaaaagtaatacagtaaaatgatggcatggtaagatgtgcgtgtcactcttcccagaaatgatgcatccacttcaacagaggacacagcacggatgcgtaagaactggtaactggcttattgaccattctggactcctggttgtataactgggtattgcctttacctttcctctcaccctgcctttcagaccttccctctcggttt

SEQ ID NO: 5696 - DNA, 812 bp, Homo sapiens
aggctgggtttttggttgagccaatcccagcaccacagaggcccggagtgccaccactggaaagaggcttgttgatcaccccgttttcccccacttcagaccagcagatggaggaggcccagagatgccttctgatctgtgaaaactcagcgatccaaagcagaagttcacccaaggccacctgaatcgtcacgcaggactctgcccaatattccacaatagctcttggtgcccacaggtgatgaatcagataaaagggaggcaaaatagacaaagattctgcccagggcccctaggaggcagaggtgagactcccagggagggcagcccatccaggctggggacagttaagccctgcaggaaggaaaatgcagactctgtayctacccaacccccacaccagctgggtattaacaggacttgagccgagaggtcctggaattatactctgctgtactcccgcctgtacctgggcactctttacctgggtggtctaggatacccgatcaaagcaatgatgacatcagggcaacttacgagaatatctgaaggatatcccctcttatccactttttgaggttccagttacctgtggtcagctgtagtttgaaaatattaaatggaacattccagaaagaaataacttataagttttaaattttgcaccattctgagtactgtgatgaaatctcgtgctgtcccactgcgtcttgcccaggatgtgaatggtccctttgcccagcatctccacaccatagattctacctgcctgtgaggcacttagtagccagcatcactgtcaaatcaaaaaa

SEQ ID NO: 5697 - DNA, 812 bp, Homo sapiens
ctaaatgactatcatagcaatcctgatggcatgtttcatgagcaagaattaaatgtctgttattttaagccattgtgatttgggggttgtatcggtctgttctcacactgctataaagaaacacctcagactgggtaatttataaagaaaagaggtttaattgactcagagttccacatggctggggaggcctcaggaaactaccagtcatggcggaaggtgaaggggaagcaaggaccttcttcacatggcagcaggagagagaagagccagcaagagcagggaaaattgccttataaaattatcagatctcatgaraactcattatcaggagaacagcatggcggaaactgcccccatgatctaatcaactccctccaacgacgtggggattacggttccctcccttggcacgtggggatcacaattcaagatgagatttgggtggaaacacaaagccagacaatatcaagggtatttttaatataaactacaaacaaaactagtctaccctgactgacacagaaccagacccaaaggagctttttaaaccccccaagagacccagcaggtattagaattctctacacccagaatcataaactcaagtgctacagggatcgggtagggcaggtaactaaggaaagcagctgagcacatgataatagaaaggggaagggactgggtcaaactggtgagcacatgccaaggaaatgtgggctccctgttgctaaatcttgcaatttttcagaagaatttggatatttgtgtgacttttcccaatggataaaaaattgtacaaataaaacaaa

SEQ ID NO: 5698 - DNA, 812 bp, Homo sapiens
ctaaatgactatcatagcaatcctgatggcatgtttcatgagcaagaattaaatgtctgttattttaagccattgtgatttgggggttgtatcggtctgttctcacactgctataaagaaacacctcagactgggtaatttataaagaaaagaggtttaattgactcagagttccacatggctggggaggcctcaggaaactaccagtcatggcggaaggtgaaggggaagcaaggaccttcttcacatggcagcaggagagagaagagccagcaagagcagggaaaattgccttataaaattatcagatctcatgagaactcattatcaggagaacagcatggcrgaaactgcccccatgatctaatcaactccctccaacgacgtggggattacggttccctcccttggcacgtggggatcacaattcaagatgagatttgggtggaaacacaaagccagacaatatcaagggtatttttaatataaactacaaacaaaactagtctaccctgactgacacagaaccagacccaaaggagctttttaaaccccccaagagacccagcaggtattagaattctctacacccagaatcataaactcaagtgctacagggatcgggtagggcaggtaactaaggaaagcagctgagcacatgataatagaaaggggaagggactgggtcaaactggtgagcacatgccaaggaaatgtgggctccctgttgctaaatcttgcaatttttcagaagaatttggatatttgtgtgacttttcccaatggataaaaaattgtacaaataaaacaaa

SEQ ID NO: 5699 - DNA, 812 bp, Homo sapiens
ctaaatgactatcatagcaatcctgatggcatgtttcatgagcaagaattaaatgtctgttattttaagccattgtgatttgggggttgtatcggtctgttctcacactgctataaagaaacacctcagactgggtaatttataaagaaaagaggtttaattgactcagagttccacatggctggggaggcctcaggaaactaccagtcatggcggaaggtgaaggggaagcaaggaccttcttcacatggcagcaggagagagaagagccagcaagagcagggaaaattgccttataaaattatcagatctcatgagaactcattatcaggagaacagcatggcggaaactgcccccatgatctaatcaactccctccaacgacrtggggattacggttccctcccttggcacgtggggatcacaattcaagatgagatttgggtggaaacacaaagccagacaatatcaagggtatttttaatataaactacaaacaaaactagtctaccctgactgacacagaaccagacccaaaggagctttttaaaccccccaagagacccagcaggtattagaattctctacacccagaatcataaactcaagtgctacagggatcgggtagggcaggtaactaaggaaagcagctgagcacatgataatagaaaggggaagggactgggtcaaactggtgagcacatgccaaggaaatgtgggctccctgttgctaaatcttgcaatttttcagaagaatttggatatttgtgtgacttttcccaatggataaaaaattgtacaaataaaacaaa

SEQ ID NO: 5700 - DNA, 812 bp, Homo sapiens
ctaaatgactatcatagcaatcctgatggcatgtttcatgagcaagaattaaatgtctgttattttaagccattgtgatttgggggttgtatcggtctgttctcacactgctataaagaaacacctcagactgggtaatttataaagaaaagaggtttaattgactcagagttccacatggctggggaggcctcaggaaactaccagtcatggcggaaggtgaaggggaagcaaggaccttcttcacatggcagcaggagagagaagagccagcaagagcagggaaaattgccttataaaattatcagatctcatgagaactcattatcaggagaacagcatggcggaaactgcccccatgatctaatcaactccctccaacgacgtggggattacggttccctcccttggcacgtggggatyacaattcaagatgagatttgggtggaaacacaaagccagacaatatcaagggtatttttaatataaactacaaacaaaactagtctaccctgactgacacagaaccagacccaaaggagctttttaaaccccccaagagacccagcaggtattagaattctctacacccagaatcataaactcaagtgctacagggatcgggtagggcaggtaactaaggaaagcagctgagcacatgataatagaaaggggaagggactgggtcaaactggtgagcacatgccaaggaaatgtgggctccctgttgctaaatcttgcaatttttcagaagaatttggatatttgtgtgacttttcccaatggataaaaaattgtacaaataaaacaaa

SEQ ID NO: 5701 - DNA, 592 bp, Homo sapiens
agaagcagatctttgtcagcctccagagctgcagaaggacactatcttgggcatgaatatcccacagcagcagtgcttttcttctctctccgccggacctggctcattcttgtctggcagaggaacaagcgatttctttttatgagcctrcaaacctccagcctcccagcctcccagctggctgggtgccagggctgggcctgacacacaggctgacgtccccacccagacccatggtcctggctgctccgaattctggagcgtctgagtcaccatgcctgagccggcggcgtctccatgaaagagttcagaagaataaaggaacaggctctcctatgggcctgctgatagcaatctatcagcatgactacattttggcctcctttttttgctgcctctaatccagcaaagcaggctgtgggtgtctgatggtgaactgcctagcaggggagggagtccatcagagttcccttcccaaaggcgatcgtgtggggagtgtaaacctccctctgtccttcccccacagtactgttggtttctgcgcatgatggagtagggtgggagaaggaggcttttctggctcgtttgtccg

SEQ ID NO: 5702 - DNA, 805 bp, Homo sapiens
tacccaggcagggcgtttgatccagagcctgctttgcctctaggcttcacagccttggaagcgatgccatctaagatcccatctttgcaaatagggccactggccatgactgccgaatttagcaaataaaaatacaggccacgcagttcaaattgaatttcagataagcaatacatcctttttagcataagtatgtcccatgcaatatttgggacacatttatactaaaaattattcatttgttgatctgaaatccaacttgaactgggtggcctgtattttatctggtgcccctaccactggggcccacagaagtcaagtgacatacaaagtgacattggcagtttgtcagagttggaggtctgggcccagggccccgggcccctgcctcttcctctgatgctttttcagccagccggctgcaactcctccccaaacctcctcccactctgtgtgtttacaaccaaacccctcactttccccaaaccagcagccttcccaagttttggtggctgccaatgtcaccacatcacgtgaccaactgccatcattcccctctctgaagtcctctggccctttctgtccaccagcargtgacctacaaggtgccttggggacactggctgactttagaactggtaagtcttctcgccccaataagcttgcaaactccataagggcagggaccgcatgtcatatgtctggtatgctactaagccaggcttgccatgctaagaccaccccccacaatgtccacaagttcagcccagttctaggctgtggggggcatgaacccttcctcagg

SEQ ID NO: 5703 - DNA, 783 bp, Homo sapiens
tctcctctttcattctagcacatgtcarttcattaattagactcaaggcagaattttcttagttttttctgtttattttattttattattattatttttttgagacggagtctaactgttgcccaggctggagtgtagtggcacaatctctgcttgctgcaacctccccctcctgggttcaagcaattctccttcctcagtctcccaagtagctgggattacaggcacccaccaccacaccaggctaatttttctgtatttttagtagagatagggtttcaccatgttggccaggctggttttgaactcctggcctcaactgatccacccacctcagcctcccaaagggctaggattacaggagtgtgccaccacccccagcctcaaggcagaattttctgacaccttatctttcgtctaaaggaatgcatttcatctactcttgatactggtcagaggtctcagaataaaaacgaagtccgtcttctaatgcagtaatttattgcagttcttttgttgcatctaattttttttttattatactttaagttctagggtacatgtgcgttgcatgcaggtttgttacatatgtatacatatgccatgttggtgtgctgcacccattaacttgtcatttacattaggtatatctcctaatgctatccctccccccttcccccaccccacaacaggccctggtgtgtgatgttccccatcctgtgtccaagtgttcttattgttcaattcccacctatgagtgagaacatgcggtgtttggttttc

SEQ ID NO: 5704 - DNA, 706 bp, Homo sapiens
ttacgaatgagctagtgccttaactatagaaacataaaagataaaagaaatttaatgagaacactgcatagaactttacaccaatacatgtgaaagtcttgataaaatacattataatgttagaaaatataaattacgaagtttgagtcatgaggatatagaaaatctaaataggcagataataaggaaataaatgataagagctaaatatctacaactgaaaagaagccatcgagcccaggggattttataggcaagacttatcaaattatcaagtaatggataacatctatcttatataaactgatccagagaaagaaacaaaaaaggatagttttttaacttattccataatcctaatacccaaactgagcaaatatatgctctccatttagaaaaatttagtagacatgttagaatgtttaagttctttatgttcgtaggatgcaacatcaacttmgaaaaatcagtaacagcttttctcaagtcagtaataactatgtagaaaacataaaagaaagcataaatgaaaaactgatcctatttctgaagtttaaaagattgcaacagtagaattttcactctaaaaggcacacatgatcttctttatagataagcaaaggcggtacagagaggttaagtagtttgtccgaggtcacacaactggtaagtggcagactcagcatttggactctgttagtctgga

SEQ ID NO: 5705 - DNA, 808 bp, Homo sapiens
acttgtctaacttaaacaagacagactcatttcctttgagggcttagttccaacctctgagtacatcactattaggcctatgggcagtgtcagactgacctgattcctgacttcccatctttagcccagactcaatatgtccagatgtaagtgtccttagttctctggctgtctttgtctgcttgggttgctataaccaaataccataaagtgggaggcttgtaaacaataggaattcattcctcacagttctggaggctgggaagtccaaggtgaaggcatcagcagattcagtgtctggtgaggtcctgcttcccggatcatagaagggacaagagagcactgtagagtcgctctgataagggcacgaatcccattcatgagggttttgctctcatcatctactcacctcccaaaggctgtccctcctgatgccctcacattgggggttaggtttcaacatacaaattttggtgggaatgtagacattcagaccatagtactggcccttagacacaaaactttcaagtcttggtggactcttactctagcgaatccttttgattcttccagtgtgatactaatctgttggcgtgtattaccttgtatttctattgtcaccaccctaatccatgccttttaactaagtttttggcctatcaccctttttccaaccctataaaattatartcgttgctttctaaaatactgctttcatccttctacttaattgaagtattggttttcttggtgctcagtgttgaatcccgctgttggctggggagtagaagcagggtgtggggaatat

SEQ ID NO: 5706 - DNA, 789 bp, Homo sapiens
taccaatgtgttatgtctccccccgacgcccagctttaaaatttctctctttttgtactctgtccctttatttctcaagccggccgacgcttacgaaaaatagaaaagaacctaygtgattatcggggcaggttccccgatatctggcgcccacgtggtctttcttttgcaggattcctagtgacagtgcagatgtgcaggtgaggacagcaggaatgaagactgatgggtgattgcttaattgattgtatatggaggggagggaaaggaggagtctagcatgagtccctgatttctggctatacagtgagatatgattgtgatgctattttctagtaatgggaatttgggaagaaaagaaaaatgagttcctttacttactgcatttgaggcatcctggctaaggatatccagcaggtgtctggatatgtgaggctgaagctgaacagtaaatcccatttacttcgccgacttcaattacaacccaaacacaaaccaacctgtattgtgaaaagaaagacctcaaagataaattacatgtggaatgttcatccttggagttgaaaaaaaaattacatgaaaaatgcacaattcagaacacaacccaacttgtgtttaggttgtaattgaagtctgggaggtaaatgggattgtcagggagagagtatcaagtgagaagaggttgtagctgagcactagtagtaagaagagagcagagagccctcaagggagcctgagatacaggggccaaatccagcccactgctgatttttgtaaaatactcttttg

SEQ ID NO: 5707 - DNA, 789 bp, Homo sapiens
taccaatgtgttatgtctccccccgacgcccagctttaaaatttctctctttttgtactctgtccctttatttctcaagccggccgacgcttacgaaaaatagaaaagaacctacgtgattatcggggcaggttccccgatayctggcgcccacgtggtctttcttttgcaggattcctagtgacagtgcagatgtgcaggtgaggacagcaggaatgaagactgatgggtgattgcttaattgattgtatatggaggggagggaaaggaggagtctagcatgagtccctgatttctggctatacagtgagatatgattgtgatgctattttctagtaatgggaatttgggaagaaaagaaaaatgagttcctttacttactgcatttgaggcatcctggctaaggatatccagcaggtgtctggatatgtgaggctgaagctgaacagtaaatcccatttacttcgccgacttcaattacaacccaaacacaaaccaacctgtattgtgaaaagaaagacctcaaagataaattacatgtggaatgttcatccttggagttgaaaaaaaaattacatgaaaaatgcacaattcagaacacaacccaacttgtgtttaggttgtaattgaagtctgggaggtaaatgggattgtcagggagagagtatcaagtgagaagaggttgtagctgagcactagtagtaagaagagagcagagagccctcaagggagcctgagatacaggggccaaatccagcccactgctgatttttgtaaaatactcttttg

SEQ ID NO: 5708 - DNA, 789 bp, Homo sapiens
taccaatgtgttatgtctccccccgacgcccagctttaaaatttctctctttttgtactctgtccctttatttctcaagccggccgacgcttacgaaaaatagaaaagaacctacgtgattatcggggcaggttccccgatatctggcgcccacgtggtctttcttttgcaggattcctagtgacagtgcagatgtgcaggtgaggacagcaggaatgaagactgatgggtgattgcttaattgattgtatrtggaggggagggaaaggaggagtctagcatgagtccctgatttctggctatacagtgagatatgattgtgatgctattttctagtaatgggaatttgggaagaaaagaaaaatgagttcctttacttactgcatttgaggcatcctggctaaggatatccagcaggtgtctggatatgtgaggctgaagctgaacagtaaatcccatttacttcgccgacttcaattacaacccaaacacaaaccaacctgtattgtgaaaagaaagacctcaaagataaattacatgtggaatgttcatccttggagttgaaaaaaaaattacatgaaaaatgcacaattcagaacacaacccaacttgtgtttaggttgtaattgaagtctgggaggtaaatgggattgtcagggagagagtatcaagtgagaagaggttgtagctgagcactagtagtaagaagagagcagagagccctcaagggagcctgagatacaggggccaaatccagcccactgctgatttttgtaaaatactcttttg

SEQ ID NO: 5709 - DNA, 789 bp, Homo sapiens
taccaatgtgttatgtctccccccgacgcccagctttaaaatttctctctttttgtactctgtccctttatttctcaagccggccgacgcttacgaaaaatagaaaagaacctacgtgattatcggggcaggttccccgatatctggcgcccacgtggtctttcttttgcaggattcctagtgacagtgcagatgtgcaggtgaggacagcaggaatgaagactgatgggtgattgcttaattgattgtatatggaggggagggaaaggaggagtctagcatgagtccctgatttctggctatacagtgagatatgattgtgatgctattttctagtaatgggaatttgggaagaaaagaaaaatgagttcctttacttactgcatttgaggcatcctggctaaggatatccagcaggtgtctggatatgtgaggctgaagctgaacagtaaatcccatttacttcgcmgacttcaattacaacccaaacacaaaccaacctgtattgtgaaaagaaagacctcaaagataaattacatgtggaatgttcatccttggagttgaaaaaaaaattacatgaaaaatgcacaattcagaacacaacccaacttgtgtttaggttgtaattgaagtctgggaggtaaatgggattgtcagggagagagtatcaagtgagaagaggttgtagctgagcactagtagtaagaagagagcagagagccctcaagggagcctgagatacaggggccaaatccagcccactgctgatttttgtaaaatactcttttg

SEQ ID NO: 5710 - DNA, 817 bp, Homo sapiens
aactgcaaggagggaggagccgccgcagaggcgtcgaagacccgggacccttcggcgccacgcccacgccctcccggcgcacggttcgtgcgcgcagctctgggctccgcggcctggcgagcgcgrccccgggtgcaccgggcggatggggccgcggagggacgggcccggactcggtttcggtttccttcgccgggcagccgtggcgcccgcctagcgcagctcgggagagtgcagggagcgcgcagggacgtgacgttcgcgggccgggctcgccgcaaccccgcgaggcaaccgccggcgactgcgcggggaggcgggcgggggcggaggccgcagtcatgtgccctgcggcggcggcagtgattcggcccgcgccctccccggccggtccccggtggccctgagtggctgcggcgcctgagccaggcccggcctggccgctcccagcgccctgcaccgcaggcccagcgctcgccccaccgaaattgccgaacctggttcacacactcatttactcattccgcagataggtctgagggcctcccatgggccacgcgctggggattcaaggtggctgggacattcccctgctctagaggcgctcgcaagttagcggggacaccgttaccgcaattacaacacaatgtagcaagtgcttctaccaggtgcctgctgagatcatgccagcaagcatgttctgcctggatgacctagggccccacattgaactggggcctgggggatgcataagtttgtcacgtaaggggcatgtgcaagaatggaagatgtgcaaaaaagggaggaggaggcattt

SEQ ID NO: 5711 - DNA, 629 bp, Homo sapiens
tcgttaaatgagtgtttcttctacgccagccctttactagtttctttgcacagttctactcatttaatacccttggcagtcctatgaataggaggttgtgtttgtcccagtcctccagaaacagtcccagatgggggtactatgcaagagagttttgagggaaaacagggagctggacctgggatgcaggtgtgatccttgtgaaggaaagaggcaagcaaggaaggaaggttgggtggaaggaagcatttgatatatatacagtccatgtataaaaagttcagcaaggccattggggtggggaatcctttagccaaatgggcttgtcccagaagtctggcatctcccagaaagaggccygccttagtatccctgctgtgctcagtcatgagctgggagcagccttaggaagctggcctttgcagcaacctagggataaatatcagggtatggatttcagcagagctcagcagttgaggcggagccattggtcagttatgctatctacactgcaagatccaagaagtacattttcttggcaactatagtgtattatcctcattttacactcaagaacactggggctctgagttaagtaacctaacaagctcaactggttgctgagtggt

SEQ ID NO: 5712 - DNA, 789 bp, Homo sapiens
attaggggaaaacattatctagtccattcattagtaggatctagagtatttataccatatgacatcttatctaccttctgatcaaaaacacatagacagttacttaatagatactgaacacaatgttaaaataccataataaaggccatgaaaaggattataatttaatggatataatatatacaacatttacacatcatatgtattaggaaccagaatactgtatttttatttccacagattgaagtcatttaatgcatgagattgcctgaaaagagaggctggttttaatacgggcctagcatttaaaacctgagaggatttgcctsccgagtagctgtgactacaggtacctgccaccatgcccggctaattttttgtatttttagtagaaatgaggtttcaccatgttagccaggatggtcttgatttcctgacctcgtgatctgcccacctcggcctcccaaagtgctaggattacaggtgtgagccactgcacccggccatgaacccgggaggcagagcttgcactgagccaaaatcgcgccactgcactccagcctgggctacagagtgagactccgactcaagaaaaacaaaaacaaacaaaaaaaaaaaacaccttagaggatttgaggacagacacaatggaactattgtcaacattgttgctacaaagaaaagggaaagtgaagagagaattcaaccacaaagaagggtaaagatgagaaaactatttagcaacagagccaaaataccgaaaacaaaagaaaacaaaacaaaaaagcc

SEQ ID NO: 5713 - DNA, 789 bp, Homo sapiens
attaggggaaaacattatctagtccattcattagtaggatctagagtatttataccatatgacatcttatctaccttctgatcaaaaacacatagacagttacttaatagatactgaacacaatgttaaaataccataataaaggccatgaaaaggattataatttaatggatataatatatacaacatttacacatcatatgtattaggaaccagaatactgtatttttatttccacagattgaagtcatttaatgcatgagattgcctgaaaagagaggctggttttaatacgggcctagcatttaaaacctgagaggatttgcctcccgagtagctgtgactacaggtacctgccaccatgcccggctaattwtttgtatttttagtagaaatgaggtttcaccatgttagccaggatggtcttgatttcctgacctcgtgatctgcccacctcggcctcccaaagtgctaggattacaggtgtgagccactgcacccggccatgaacccgggaggcagagcttgcactgagccaaaatcgcgccactgcactccagcctgggctacagagtgagactccgactcaagaaaaacaaaaacaaacaaaaaaaaaaaacaccttagaggatttgaggacagacacaatggaactattgtcaacattgttgctacaaagaaaagggaaagtgaagagagaattcaaccacaaagaagggtaaagatgagaaaactatttagcaacagagccaaaataccgaaaacaaaagaaaacaaaacaaaaaagcc

SEQ ID NO: 5714 - DNA, 811 bp, Homo sapiens
atttaaatcaaaattaccatctcaatctattgtaataattggtttattcattatctagcccaattggtctataagctctgtgacagtacgcactctcctgtacatcaccatattgctggcaactaaaatactcccttggtctataggagatacttgaaaaatatttgcaaaataaatgaactagtaaaatgtatcatatctctagaaaatgtgcaagaaggcagaatgaattctagaaattgtatggcagtytggaaagaaagcaaaagaaaaaagaaactattatcacaaacatgatagattagctgaacctcaaaatgatttaaattatactggggagatgatgctttagatctattggaaaaacagcttatgccaaagaattaaaaacacacagaatcatcaaagcacaatctgtgtttgagataaatgatagtctgagtcacctatgtaagaagtaactctgaaatagtaggatagtattatcatttcctgtaatagattcacctctcagcaattggtctgttttcattctatggaaactctccgtactgtaattttcattctatggaaactccccatactgtaattggacagttttggtttccacaccagctatcatcagtcttggaggcaaatatgtgggctaatctcacgtgcatttctataataatgggctctatccttagcctgatacttggcctgtttcttccccaccattatctctctgtcttacggagctaaattaacacacttttctctaaaattttagattcataaatttctctattatcaaataatgtacttcaag

SEQ ID NO: 5715 - DNA, 811 bp, Homo sapiens
atttaaatcaaaattaccatctcaatctattgtaataattggtttattcattatctagcccaattggtctataagctctgtgacagtacgcactctcctgtacatcaccatattgctggcaactaaaatactcccttggtctataggagatacttgaaaaatatttgcaaaataaatgaactagtaaaatgtatcatatctctagaaaatgtgcaagaaggcagaatgaattctagaaattgtatggcagtctggaaagaaagcaaaagaaaaaagaaactattatcmcaaacatgatagattagctgaacctcaaaatgatttaaattatactggggagatgatgctttagatctattggaaaaacagcttatgccaaagaattaaaaacacacagaatcatcaaagcacaatctgtgtttgagataaatgatagtctgagtcacctatgtaagaagtaactctgaaatagtaggatagtattatcatttcctgtaatagattcacctctcagcaattggtctgttttcattctatggaaactctccgtactgtaattttcattctatggaaactccccatactgtaattggacagttttggtttccacaccagctatcatcagtcttggaggcaaatatgtgggctaatctcacgtgcatttctataataatgggctctatccttagcctgatacttggcctgtttcttccccaccattatctctctgtcttacggagctaaattaacacacttttctctaaaattttagattcataaatttctctattatcaaataatgtacttcaag

SEQ ID NO: 5716 - DNA, 811 bp, Homo sapiens
atttaaatcaaaattaccatctcaatctattgtaataattggtttattcattatctagcccaattggtctataagctctgtgacagtacgcactctcctgtacatcaccatattgctggcaactaaaatactcccttggtctataggagatacttgaaaaatatttgcaaaataaatgaactagtaaaatgtatcatatctctagaaaatgtgcaagaaggcagaatgaattctagaaattgtatggcagtctggaaagaaagcaaaagaaaaaagaaactattatcacaaacatgatagattagctgaacctcaaaatgatttaaattatactggggagatgatgctttagatctattggaaaaacagcttatgccaaagaattaaaaacacacagaatcatcaaagcacwatctgtgtttgagataaatgatagtctgagtcacctatgtaagaagtaactctgaaatagtaggatagtattatcatttcctgtaatagattcacctctcagcaattggtctgttttcattctatggaaactctccgtactgtaattttcattctatggaaactccccatactgtaattggacagttttggtttccacaccagctatcatcagtcttggaggcaaatatgtgggctaatctcacgtgcatttctataataatgggctctatccttagcctgatacttggcctgtttcttccccaccattatctctctgtcttacggagctaaattaacacacttttctctaaaattttagattcataaatttctctattatcaaataatgtacttcaag

SEQ ID NO: 5717 - DNA, 795 bp, Homo sapiens
gaacctgggaattggaggtagcggtgagccaagattgtgccactgcactccagcctgggctgaagtctcagaaaaaaaaaaaaaaaaaaccctcagaaatatggacagcaaagcttggaaaagtgaatctagtggaaagagtactcactcacaaattagacaagagctaacggatctgtgcccacctgtttatcattcataacacccctagaatgaatgtaggaactgtttctatattgcttataaaactagtgcagacaaagtgggaataatttgcccaaggtccaacatctcttcctatatgcccatcaatgacagagtgtatgaagaaaatatggtacacatacaccatggactactatgcagccataaagaagaatgagattatgtcttttgcaggaacatgggatggatggagctggaggtcattatccttagcaaactaacccaggaacagaaaaccaaatactgcatgttctcacttataagtgggaactaaatgatgagaactcatgaatagaaagaaggaaacaacagatgctggggcctacttgagggtggaggatgagaggagggagaggagcaaaaaaaataaccactgggtaataggcttcgtacctgggtaacaaaataatctgtacaacaaatccccatgacatgagtttattatctacataacaaacctgcacatgtacccctaaacgtaaaataaaattaaaaaaaaaamccagcgataataggatatacccaggcaggcctggctccagagcccatgttctcatgcactaggtagga

SEQ ID NO: 5718 - DNA, 820 bp, Homo sapiens
tctccaaagaaccaatgtatcagtatgttcagctcccctggtctttgttcttcattttaaagtttaacttcctcattctttatgtctccttgcccctagtttcagtaaacaaccccctcctagcctctatcacctagctccatcctgagtcaccccaggtcacctgctccattctgagtcactcctaatcacctgctctgacctgagtcacctttagttacctgttctgtaactccttcccacsaaactactcaccctgccactccagctcatacccctgctctgtttaaaatagccaatcagaattagcttagactgtgtggtccaaccctagccaataggtgaaagacacagcagtagagattagctgcgttaggataagaaccccttcccctcccttgttcagttgtgctctcaccattgctcaatccacgagacccacccttctatagaagtaaaattgccttgctgagaaattaaatttacgttcgagtgctatttcttttgcggcaccgaaaatttatttctaacaccatagaagcctaaactcaaactattaaccatagggaacagaagtgatttttttctgccttttatctttctgtactgtgtggtatttatctttataataagcaggtattattataataagaaaataaagatacaactgtaaaaggaacaaatcaaatgactactgaccctgaagcatggggcataatgtggggtctctaggaggacaggctggccaggacatccttgacaaataaacaggtgctccctgccaaggcaagcctaaaggacagaaaggaaaataagactt

SEQ ID NO: 5719 - DNA, 833 bp, Homo sapiens
gttcggagggagcagtgactgggccatgccttctatttttcaagataaacaactaagtctcataagtttgtaagagtagaatcaaacattgtttatctctgtaccttgtcctttttcttttcccaccgtctagcctcagcacctagtgcagaacctgatataatatggtggaaktcaatttttttggatgagaagactttacactcacacatagcaatgtgataacgtattaacaacatttattgagattatgtgaaaccgctctaaacacgtttcccatattaacttatctaatcctcacatcaaccctttgggaaaggtattattattaccccttgacaataattggtgaaaaattggggcacagataggctaaatgactcacagctactaagtggcgaagacaggaattgaacccagttccactccagcaccagagcctgagcccttaaccacaacactgtattgtcgatattataatgggcttctgtttaactaaaaaaggtctaggtcagaaaaatatggaataggctcatattttaccttgaacttaggttccaaacttggatgaaaggtatgaattcttagcaataactaaagataattggagaattctaaaatatgctcactttctgtagggtttactccattctggtttttgtttgttttgttttttgttttttgaggtggaatctcgctctgtcgcccaggctggagtgcagtggcacaatctcagctcactgcaacatctgcctcccgggttcaaatgattctcctgcctcagcctcccgagtagctgggactacaggtgcgtgctgccacacccagctaat

SEQ ID NO: 5720 - DNA, 833 bp, Homo sapiens
gttcggagggagcagtgactgggccatgccttctatttttcaagataaacaactaagtctcataagtttgtaagagtagaatcaaacattgtttatctctgtaccttgtcctttttcttttcccaccgtctagcctcagcacctagtgcagaacctgatataatatggtggaattcaatttttttggatgagaagactttacactcacacatagcaatgtgataacgtattaacaacatttattgagattatgtgaaaccgctctaaacacgtttcccatattaacttatctaatcctcacatcaaccctttgggaaaggtattattattaccccttgacaataattggtgaaaaattggggcacagataggctaaatgactcacagctactaagtggcgaagacaggaattgaacccagttccactccagcaccagagcctgagcccttaaccacaacactgtattgtygatattataatgggcttctgtttaactaaaaaaggtctaggtcagaaaaatatggaataggctcatattttaccttgaacttaggttccaaacttggatgaaaggtatgaattcttagcaataactaaagataattggagaattctaaaatatgctcactttctgtagggtttactccattctggtttttgtttgttttgttttttgttttttgaggtggaatctcgctctgtcgcccaggctggagtgcagtggcacaatctcagctcactgcaacatctgcctcccgggttcaaatgattctcctgcctcagcctcccgagtagctgggactacaggtgcgtgctgccacacccagctaat

SEQ ID NO: 5721 - DNA, 615 bp, Homo sapiens
caatctgggcattgaaggaaatgggacttaagtgacaagggtgtgagagagtggcactcctggtactgcaagtgctttccccaggaggatgtgactcaggaagacacatggcagaggggaagctggaaaggaccagggtcaggttgagaagactgaatcagccagwggggcaatgtagatttcatcctgaagtgatggaatctggggaattattttaagcatggagaggcatgagcagatcagcaatatccctcagctttgggtggggaatggctggagaacagtgacattggatgagatactcctttaagaagctcctgttctagaccagataagagatgagcagtcctgaggcaggaaggcaggaacagtatcagaatctccaagaggaaggatgaacacatcttttgcctttgccctttttcagggaggaagcatgcctacatggcaagcctgctggtgtctagcctggaaatgcttccccaaaacacatgtatctgtgggtttgttggaagaataccccagcaacaactaagctggtgggactttaaatgtcctcggtccacttagtgcacagtggcttacccttggccgaggagtacctcctagctgcca

SEQ ID NO: 5722 - DNA, 615 bp, Homo sapiens
caatctgggcattgaaggaaatgggacttaagtgacaagggtgtgagagagtggcactcctggtactgcaagtgctttccccaggaggatgtgactcaggaagacacatggcagaggggaagctggaaaggaccagggtcaggttgagaagactgaatcagccagaggggcaatgtagatttcatcctgaagtgatggaatctggggaattattttaagcatggagaggcatgagcagatcagcaatatccctcagctttgggtggggaatggctggagaacagtgacattggatgagatactcctttaagaagctcctgttctagaccagataagagatgagcagtcctgaggcaggaaggcaggaacagtatcagaatctccaagaggaaggatgaacacatcttttgcctttgccctttttcagggaggaagcatgcctacatggcaagcctgctggtgtctagcctggaaatgcttccccaaaacacatgtatctgtgggtttgttggaagaataccccagcaacaactaagctggtgggactttaaatgtcctyggtccacttagtgcacagtggcttacccttggccgaggagtacctcctagctgcca

SEQ ID NO: 5723 - DNA, 642 bp, Homo sapiens
agcagactaccccatctggtgccaaatctggtctgtggcctgattttgtttagccctcaagctaagagtggtttttacatgtttaaagggttgtacaaacaaataaggaaacaaccaagaaaaagatgagacagagaccatatgtgtcctgcaaaacctgaaatatttactacctgatccttacagaaaaaattgtccaactcctgctttagaaaactttcattttaatcacacagatgtggaatacacacatgtacaaaaataaaaatagtacattttaataatagtgactgtattgatatttgcatgtatcaggcactgactaaataatttatayccattatttcatttagttctcacaacaaaactgtgagagatgtcttgttatttattaccattatacagataattcaaagaggtcaaataatttgtccatagtcatccagccagtaagtggtagagctagaatttaaaccaggctatttgattccagagtccattctctctgctattagagatctgaagtaagagatatatggtcaaaaaggaaagataaaattttctttcataagagcagtaaaaacttggaggaaatgggagcagggtgcggtggctcatggctataatcccagcactttagga

SEQ ID NO: 5724 - DNA, 642 bp, Homo sapiens
agcagactaccccatctggtgccaaatctggtctgtggcctgattttgtttagccctcaagctaagagtggtttttacatgtttaaagggttgtacaaacaaataaggaaacaaccaagaaaaagatgagacagagaccatatgtgtcctgcaaaacctgaaatatttactacctgatccttacagaaaaaattgtccaactcctgctttagaaaactttcattttaatcacacagatgtggaatacacacatgtacaaaaataaaaatagtacattttaataatagtgactgtattgatatttgcatgtatcaggcactgactaaataatttatatccattatttcatttagttctcacaacaaaactgtgagagatgtcttgttatttattaycattatacagataattcaaagaggtcaaataatttgtccatagtcatccagccagtaagtggtagagctagaatttaaaccaggctatttgattccagagtccattctctctgctattagagatctgaagtaagagatatatggtcaaaaaggaaagataaaattttctttcataagagcagtaaaaacttggaggaaatgggagcagggtgcggtggctcatggctataatcccagcactttagga

SEQ ID NO: 5725 - DNA, 764 bp, Homo sapiens
atgtaacgtttgtgacaaagagggaaaagagggaagagcttttggggtggaggggacaaaataagcaaaggcccagaggcagaagggcccaggagacttgcaggtctacagaacatacaaccggaagccagctttccaaagggtagggaaggagagaggatggcttcagaaagtagtctcagttaagactggaaggatatggggtctgaacttaaagagccaaaaatgtaagcagagggcttgacattttattctgcagattatagagagaccttgaatgtttttaagcaaaaaaaaaaaaaaaaaaagaacttaatcttgcaagaacattaatctttttagttggaaaagaaagaaaggaatgcctcatgatcacgacatccaatatctcttmcaaaggatgccacatatcactagattattaacactacaacagaagattacattactgatatcactaaaatgattttagcggacatttcttgtgtgtcaaatgtctccgaaataaagaacactcatttgcaatccacagacatcaagaggggatagaaatgttttgaactgcagatattgtgtctcctatctactgctgcccaagaaaagtaaatgagtatccttacttttggtctgtaatatttcctttttgacatcatttcaccgtttagttccagacaaagttgcaaacctggaggcaaacaataatggcaggatgaggtctcttgtagtgagctggtcgccccctgctggagactgggagcagtatc

SEQ ID NO: 5726 - DNA, 764 bp, Homo sapiens
atgtaacgtttgtgacaaagagggaaaagagggaagagcttttggggtggaggggacaaaataagcaaaggcccagaggcagaagggcccaggagacttgcaggtctacagaacatacaaccggaagccagctttccaaagggtagggaaggagagaggatggcttcagaaagtagtctcagttaagactggaaggatatggggtctgaacttaaagagccaaaaatgtaagcagagggcttgacattttattctgcagattatagagagaccttgaatgtttttaagcaaaaaaaaaaaaaaaaaaagaacttaatcttgcaagaacattaatctttttagttggaaaagaaagaaaggaatgcctcatgatcacgacatccaatatctcttacaaaggatgccacatatcactagattattaacactacaacagaagattacattactgatatcactaaaatgattttagcggacatttcttgtgtgtcaaatgtctccgaaataaagaacactcatttgcaatccacagacatcaagaggggatagaaatgttttgaactgcagatattgtgtctcctatctactgctgcccaagaaaagtaaatgagtatccttacttttggtctgtaatatytcctttttgacatcatttcaccgtttagttccagacaaagttgcaaacctggaggcaaacaataatggcaggatgaggtctcttgtagtgagctggtcgccccctgctggagactgggagcagtatc

SEQ ID NO: 5727 - DNA, 764 bp, Homo sapiens
atgtaacgtttgtgacaaagagggaaaagagggaagagcttttggggtggaggggacaaaataagcaaaggcccagaggcagaagggcccaggagacttgcaggtctacagaacatacaaccggaagccagctttccaaagggtagggaaggagagaggatggcttcagaaagtagtctcagttaagactggaaggatatggggtctgaacttaaagagccaaaaatgtaagcagagggcttgacattttattctgcagattatagagagaccttgaatgtttttaagcaaaaaaaaaaaaaaaaaaagaacttaatcttgcaagaacattaatctttttagttggaaaagaaagaaaggaatgcctcatgatcacgacatccaatatctcttacaaaggatgccacatatcactagattattaacactacaacagaagattacattactgatatcactaaaatgattttagcggacatttcttgtgtgtcaaatgtctccgaaataaagaacactcatttgcaatccacagacatcaagaggggatagaaatgttttgaactgcagatattgtgtctcctatctactgctgcccaagaaaagtaaatgagtatccttacttttggtctgtaatatttcctttttgacatcatttcaccrtttagttccagacaaagttgcaaacctggaggcaaacaataatggcaggatgaggtctcttgtagtgagctggtcgccccctgctggagactgggagcagtatc

SEQ ID NO: 5728 - DNA, 822 bp, Homo sapiens
aattccagcccaccagccaattgtctggaagtattctctttccctcactgtatctcagtttccaaatctgaaaaatagggataattatattgaccccttcaggtttcagtaaagattaagtgagatcccttatttaaaaagagcatrgcatacagtagggcctcaatgaatgccagttccctttcttctttccttttccctcaccatctgccagctgttctgggaaatttggttccggcccctggcagtctgtacatcataaacttcacagccacgctgtgggaaagacccagcacagtgaagatgctgggagcaacggtctttcctgctgctctccacatcccttaagcagatgcatctgcttctcggcagaaagcaatcacatccctctcttccccaaagggaacctgacttctgagacctttttaggcattgggtatcagggtaataatagtaacagcttccgtttattgagtttttactatgtgccaagcatcgcgttaagcgctttatgtgcgttcttaccacgtggcaggaatgagcatcctcagactgaggaaacccaggtagggagaagctaagttgcttatgcagggtcacatagctaggaagaactggactcaggatagaaatcccaaaccaaacctcactcttgatcaagggccccagcaagatgtacggtatacatctgcctttgtgtgaatgtagcacgttatgactatcttataattgtcgtcaatactgcattgtcatggataatgtgcattttaaaatttcagactccagcacgacccaagtaggtatcagataatgtctgtcctt

SEQ ID NO: 5729 - DNA, 1508 bp, Homo sapiens
cctccatcggggtctggggcaacacggggcaaggggactctcggaggagaggcaccccgttctgggaagaggggggatacgggccaggggaggctggttcccggggctcccgggctcaccacagatgctctctggaagcttaggggcgtagggggctgggaccgtttctgggggcctgaaagctgctctacaaatgaagacaaactgtctaactcaggtgagaatcaagactttgagaggagggaaagtccaagaaaatccctgagagccccaggacatgtgctgttgggtgaaataattaagaaaacctgcccgatctcccacrgagacagaaatcatcccctgccgctccgggctgatcctcaccgtccagctcctaattcttcacagctgtccctgtgagaccactggaggggggtggggaccaaagcgtgaggccggaagcaaaggagggagtggagggacaggctcagagagatacgggaggagggggagacggcagtgcagagacagacagaaacagagaggcaagggagatggatggcgagggacacccagcatgagacagagatggtggggggtggtcaagagagaatctgattgacttaggaggccttgtgaccggccaattaagaggattgtggaaattaagaagatcaagtcaaggtctgggagtgtgtgggctgggagaccttggcctggtgccaacctagaccccattccctgggagctgcagcagctccaggcaggcaggccctgggcactggccctggatcccacctctactctccccacctcaaaaccacccagaggaacctgggcgcatgtactgtgttctctcagacaggcacagggctggggcaccccatccaggcttcactgcttaacctgcagatgaaggggtgaggtcggagagggagtgaatggcttccagaccccccagagggaagcacatctctcctggccaatggccacagcttatgggccaggctggggagggtcctgcgggcgggtgggcattactccttccctcctggagacctgagacattggaaggtcattaggagacacagaagccaaaatccccctgcccctgttctggaaagagctggtcctgccttgccctcaggatcaggagggaaatgaggggcctgctcccagctccactgaaagtccctgaggggaggccttgcagccccattttacagatgagggagacaagcctcacaggggatgagggtctcggccagcatctgtcagctggtgagaggagggccagaaactggaaaccagatgcgctgtcccccctcccttccctcatccttgtccccccacttccgtcctcctttccccttccctccctttctccttccctccctttctcctttctctcccttcctccctccatctttctctccttccttttctccctccctctctccatctcccctcccgcctgcccccatttactcatcgttttccccacactcatttgttgagtgatggga

SEQ ID NO: 5730 - DNA, 1345 bp, Homo sapiens
ttgtattgttagtgaggatgtatgcggtttgtttgcttgtttgtttttagcttaaagtttcacactgatattcctatctattgcctaaggctccttatcctactttatattgaggcagagtaatacaaaatctaaatgtgatttaattggttcaatttgctatatatttttatgctaagcttaggtccatatcttgatgagcccccgtagytgtgctagaggtttacagcttcacattccttgcatttccttatttttagaaagcaagcgtctatcaatcacacagataaattagaaagaaacatgtatagacataacacatggaaaatatttttcagcgtgctatgtaattattaacctgatttttaccattgtaagaagccatgaattgcagatagcatggatgaagttaaaagcttttattctggatacattttgcttatacagaactctataggtatggtcgaacaatataattgaagctttgtcagctctgtaacctagcaacagataatactgttaggttactgaattgctcctggttgacaagtagggagtatttttgtgtttatcatgtttgctaatgatgggatcctttccaaaaggcttgtcttaatcttaattagagtttatcagcagaggtctgcatgacattgtgcagagactgatttcataaataataaaaagtgcaagtgaaaaatttggcaggatgggaagatatttaaggccactgcttctagtaacaggcgcatgaatttccaaaatataatcgagtttgaactgtgactttattctttattatcaaaacttgtagtacacgtcactgcggttttgacagcaattataagaaaaatttataagcttcctgttagaaaccgtatctggttgcacaagaaccttgatcataaacattacttagaacagcaaatatatgctttttcaagaatgtcaaggtcttagtagttattccttttcacagaaccttgaataagtatttgtcctttatttgtgaagggagtggtattgtgagtatgaagactgaggagagtgactatgtttgcagcataagagacagacaaagagagaatcctaaaataacctttccatttggtggaagcgaggaaggtatcagatagctgcttcagtgcctgatgtcatttgataaagatttcatgcccatgcaagaggaatgtgattttttgctctagtttgcgcaatatgatctttccacagttttggaggatgcattactattgatcattcctaataataaaataaatcacttcaaaataataaagaattaaacattgtaaaactaaatataatcaacaaatttaccaagttc

SEQ ID NO: 5731 - DNA, 807 bp, Homo sapiens
aacatgggtacaacgttcaggggtttcaaacatattaatttacattggtcttttttcagatgagtaagctgtactctttgagttcaaatgatttgtccaaaatcatcagccagcagttaagaaaactagatgttctaatgcttttttttttttaatggagtctcactctgtcacccaggctggagtgcagtggcgcgatcttggcacactgcaacctctgcctcccaggttcaagcgattctcctgcctcagcctcctgagtagctgggattacaggcacatgccatcatgcccggctaatttttgcatttttagtagagacagggtttctccatgttggccaggctggtcttgaactcctgccctcaggtgatctgcccgtctcgcctcccaaagtgctgagtttacaggcgtgagccactgtgcccagcctaggtcttgtaattctaaatccaccctccatttaatattccttatcttagcaagaaaatgtgaagaaataacattacactattgtgattgttgagaagtaaagaattagaattaaggawttaatttttttgtttattctcagtgtcggctgctttacatacgtttcttattgtcactcaagccctcacaataaccatgtgaaggaagtcttattagcctcactctgttttttattttccttcataaacacatttaatgactggtcatgtactgcatattgcatattaagagaatttctagtaagacatgcagagactaatgctagaccaagtcttgctcagcccaattctagtttattatattattatttttgtt

SEQ ID NO: 5732 - DNA, 807 bp, Homo sapiens
aacatgggtacaacgttcaggggtttcaaacatattaatttacattggtcttttttcagatgagtaagctgtactctttgagttcaaatgatttgtccaaaatcatcagccagcagttaagaaaactagatgttctaatgcttttttttttttaatggagtctcactctgtcacccaggctggagtgcagtggcgcgatcttggcacactgcaacctctgcctcccaggttcaagcgattctcctgcctcagcctcctgagtagctgggattacaggcacatgccatcatgcccggctaatttttgcatttttagtagagacagggtttctccatgttggccaggctggtcttgaactcctgccctcaggtgatctgcccgtctcgcctcccaaagtgctgagtttacaggcgtgagccactgtgcccagcctaggtcttgtaattctaaatccaccctccatttaatattccttatcttagcaagaaaatgtgaagaaataacattacactattgtgattgttgagaagtaaagaattagaattaaggatttaatttttttgtttattctcagtgtcggctgctttacataygtttcttattgtcactcaagccctcacaataaccatgtgaaggaagtcttattagcctcactctgttttttattttccttcataaacacatttaatgactggtcatgtactgcatattgcatattaagagaatttctagtaagacatgcagagactaatgctagaccaagtcttgctcagcccaattctagtttattatattattatttttgtt

SEQ ID NO: 5733 - DNA, 807 bp, Homo sapiens
aacatgggtacaacgttcaggggtttcaaacatattaatttacattggtcttttttcagatgagtaagctgtactctttgagttcaaatgatttgtccaaaatcatcagccagcagttaagaaaactagatgttctaatgcttttttttttttaatggagtctcactctgtcacccaggctggagtgcagtggcgcgatcttggcacactgcaacctctgcctcccaggttcaagcgattctcctgcctcagcctcctgagtagctgggattacaggcacatgccatcatgcccggctaatttttgcatttttagtagagacagggtttctccatgttggccaggctggtcttgaactcctgccctcaggtgatctgcccgtctcgcctcccaaagtgctgagtttacaggcgtgagccactgtgcccagcctaggtcttgtaattctaaatccaccctccatttaatattccttatcttagcaagaaaatgtgaagaaataacattacactattgtgattgttgagaagtaaagaattagaattaaggatttaatttttttgtttattctcagtgtcggctgctttacatacgtttcttattgtcactcaagccytcacaataaccatgtgaaggaagtcttattagcctcactctgttttttattttccttcataaacacatttaatgactggtcatgtactgcatattgcatattaagagaatttctagtaagacatgcagagactaatgctagaccaagtcttgctcagcccaattctagtttattatattattatttttgtt

SEQ ID NO: 5734 - DNA, 807 bp, Homo sapiens
aacatgggtacaacgttcaggggtttcaaacatattaatttacattggtcttttttcagatgagtaagctgtactctttgagttcaaatgatttgtccaaaatcatcagccagcagttaagaaaactagatgttctaatgcttttttttttttaatggagtctcactctgtcacccaggctggagtgcagtggcgcgatcttggcacactgcaacctctgcctcccaggttcaagcgattctcctgcctcagcctcctgagtagctgggattacaggcacatgccatcatgcccggctaatttttgcatttttagtagagacagggtttctccatgttggccaggctggtcttgaactcctgccctcaggtgatctgcccgtctcgcctcccaaagtgctgagtttacaggcgtgagccactgtgcccagcctaggtcttgtaattctaaatccaccctccatttaatattccttatcttagcaagaaaatgtgaagaaataacattacactattgtgattgttgagaagtaaagaattagaattaaggatttaatttttttgtttattctcagtgtcggctgctttacatacgtttcttattgtcactcaagccctcacaataaccatgtgaaggaagtcttattagcctcactctgttttttattttccttcataaacacatttaatgactggtcaygtactgcatattgcatattaagagaatttctagtaagacatgcagagactaatgctagaccaagtcttgctcagcccaattctagtttattatattattatttttgtt

SEQ ID NO: 5735 - DNA, 807 bp, Homo sapiens
aacatgggtacaacgttcaggggtttcaaacatattaatttacattggtcttttttcagatgagtaagctgtactctttgagttcaaatgatttgtccaaaatcatcagccagcagttaagaaaactagatgttctaatgcttttttttttttaatggagtctcactctgtcacccaggctggagtgcagtggcgcgatcttggcacactgcaacctctgcctcccaggttcaagcgattctcctgcctcagcctcctgagtagctgggattacaggcacatgccatcatgcccggctaatttttgcatttttagtagagacagggtttctccatgttggccaggctggtcttgaactcctgccctcaggtgatctgcccgtctcgcctcccaaagtgctgagtttacaggcgtgagccactgtgcccagcctaggtcttgtaattctaaatccaccctccatttaatattccttatcttagcaagaaaatgtgaagaaataacattacactattgtgattgttgagaagtaaagaattagaattaaggatttaatttttttgtttattctcagtgtcggctgctttacatacgtttcttattgtcactcaagccctcacaataaccatgtgaaggaagtcttattagcctcactctgttttttattttccttcataaacacatttaatgactggtcatgtactgcatattgcatattaagagaatttctagtaagacatgcagagactaatgctagaycaagtcttgctcagcccaattctagtttattatattattatttttgtt

SEQ ID NO: 5736 - DNA, 846 bp, Homo sapiens
taattaaagcaatccagggaaatattttaaagtacttcattagggatctttaatttttttacataagtgaactattaggcattattttgaaaacataatttctacttagcttgtcaaatgcatcctattatttaactttacagggaaagaatccaatagccaacctacctggcatattggcttcccattgtaacttttrtccaaccttattatgtatagctggaatacagatattgagcacaatatatcattaagtcactaataaacttcagttgcccctttaccactttcccccatctccccctgtcaatgagtaatttatctccagcagcaatatgcataagttgtctttgaaaaggtgggacatggcattatcagtcactgcatgaacgagttatagccagctccatcatggaagagaacagatgattacaatcaataatcaatcaaagaaccagtgacagtaatcatacatcactttccactgtggaatcttcactcactcaaagcttagtaatgcaaaatccactttctgggtatattggtgccttgcctttgtcctgaatctgctcctggtttggaataagcctggaacgtggagcactcctacttggatttcacccttttgggaaggttagcaacagtagagccaaactgaacgtgagagaagaaaagaacaattgttgtaatccttgcctaagtccttattactcattgtatcccattttgtatacagctaaggctgcactggctaaatctttgtagaatatctcttgttaatcaagtgtatgcattttgtgaagcttgtgggcagacattttataactagacgtgtaaatcatgtcc

SEQ ID NO: 5737 - DNA, 605 bp, Homo sapiens
aaagtttgtagacaggttcgtggaaagagggtttatctgattagaaatacggtagttcatatgagtacttaaagtttgaaaatatgtttcaagaagtcatatctaatgaagaatttcaaaacctgtatttgagggctgaggtcaaattgagttccaaaaaaagagatcaacctagtatttgtgattgctaaccatgcgattgtgcatgactcccagagggtcactagagatatgtactatgaatgaaaagcaaaccatagggtctgtggttctcagtaaatgacagcaacaaaatccagagaaattcctggtatagattttgtaaaagaggcttagtaaaatagttcaaacttartgtttgtacgttatagtgaaaagtaaataaatattacaaaagaaataagtcataatgaagtctagttaaaatattgagagcttatagaaaaatatgctatcatgttaggaaaattgttaaaattttagccacaaatgtactataatttacacaaataagagaagcactcttgaaacaactgaattttaagatttcaagggattttaaaagtcaattggcttagtggctccattttcaaacatcccaagtg

SEQ ID NO: 5738 - DNA, 882 bp, Homo sapiens
ccgagccctgggccttccccggaactttctagcctagatttagtttgtcaggtttcagaaagaataaaattatctaaaattgagggraaaaaattggcaggcaatttggaaaagactctcagttggcctgccaacaacactggcagaagaaatgtagtcgagttagaatccttccagcatgttccctaggggatgctcacacaggaaccacaggtgaaatagggaagtccctggctcctaaagcctaagcaggaaccatatactccaccactcccctcctgaagtgaaattgagtcccaaaccaggagtaacaggagcacaaaggtgacggagctcatacaaactgagatgaattgcagcttccaggacggaaatgactagtagcttattatttgtcattggctccagataaatcttacaacctgattaaaagcaaatgtattgactttttttttttttttttttggctatggctattctgactattctcttttactgaaaatggtttttttctaattagatagcagcagcctgaaggtaggaccatcttagtttctgtgttccttatagaatctaggaaattattttgtacattgtaagtattcaataaagattggattactcaacttgaataaaaacaagcagatgataataccttaatagtcccagaattaagtttctttggacagtgatttgttgatatttttaaattagctattagacacaacaccctgcagcaaaaaggctttgcttacttgagctcacgcttgttatccttttggagtctgaagcctaattaatgtagaatagagcctcttttagaataaaagtcctctgccctatgggcttattctttgggtctctaaacacagattggggaac

SEQ ID NO: 5739 - DNA, 882 bp, Homo sapiens
ccgagccctgggccttccccggaactttctagcctagatttagtttgtcaggtttcagaaagaataaaattatctaaaattgagggaaaaaaattggcaggcaatttggaaaagactctcagttggcctgccaacaacactggcagaagaaatgtagtcragttagaatccttccagcatgttccctaggggatgctcacacaggaaccacaggtgaaatagggaagtccctggctcctaaagcctaagcaggaaccatatactccaccactcccctcctgaagtgaaattgagtcccaaaccaggagtaacaggagcacaaaggtgacggagctcatacaaactgagatgaattgcagcttccaggacggaaatgactagtagcttattatttgtcattggctccagataaatcttacaacctgattaaaagcaaatgtattgactttttttttttttttttttggctatggctattctgactattctcttttactgaaaatggtttttttctaattagatagcagcagcctgaaggtaggaccatcttagtttctgtgttccttatagaatctaggaaattattttgtacattgtaagtattcaataaagattggattactcaacttgaataaaaacaagcagatgataataccttaatagtcccagaattaagtttctttggacagtgatttgttgatatttttaaattagctattagacacaacaccctgcagcaaaaaggctttgcttacttgagctcacgcttgttatccttttggagtctgaagcctaattaatgtagaatagagcctcttttagaataaaagtcctctgccctatgggcttattctttgggtctctaaacacagattggggaac

SEQ ID NO: 5740 - DNA, 882 bp, Homo sapiens
ccgagccctgggccttccccggaactttctagcctagatttagtttgtcaggtttcagaaagaataaaattatctaaaattgagggaaaaaaattggcaggcaatttggaaaagactctcagttggcctgccaacaacactggcagaagaaatgtagtcgagttagaatccttccagcatgttccctaggggatgctcacacaggaaccacaggtgaaatagggaagtccctggctcctaaagcctragcaggaaccatatactccaccactcccctcctgaagtgaaattgagtcccaaaccaggagtaacaggagcacaaaggtgacggagctcatacaaactgagatgaattgcagcttccaggacggaaatgactagtagcttattatttgtcattggctccagataaatcttacaacctgattaaaagcaaatgtattgactttttttttttttttttttggctatggctattctgactattctcttttactgaaaatggtttttttctaattagatagcagcagcctgaaggtaggaccatcttagtttctgtgttccttatagaatctaggaaattattttgtacattgtaagtattcaataaagattggattactcaacttgaataaaaacaagcagatgataataccttaatagtcccagaattaagtttctttggacagtgatttgttgatatttttaaattagctattagacacaacaccctgcagcaaaaaggctttgcttacttgagctcacgcttgttatccttttggagtctgaagcctaattaatgtagaatagagcctcttttagaataaaagtcctctgccctatgggcttattctttgggtctctaaacacagattggggaac

SEQ ID NO: 5741 - DNA, 822 bp, Homo sapiens
atatgcgtgtgcttatatgcacatgttagacaaatgggacatcaaagaaaacttctgttgccattggggatatctgtctatgtaaatataagtttcccataagaatgtgtaacaagaatattattagtgttggaaattaaagttatgaaggctcaaataaaacaatcctttcctacttatctgggtcacaataaaataaattcaataaaatttttcacccaccacttttctcttaaatgtgtactattatataaaataaatgagaataatgcagaataactggaacataaaatccctgggaaatctgtgaacttgcccacagactgatatgtgtaaattgatggtgccagagagcctgccagtatctatgtgatatgctccagggtcgtctctggaaggcctccaatcacacactccagaaggtggtcaccaccaggaagaaggagctgagtcaattaacatcttctggatatctgtggkgatatgctaagttcttaactatgctaagttctttgatatatattcttaaaacagctctgtaaaacaatattattcccatcttatagctgaggaagctaaggcttagaaaagttaaataactagtaacaagtagagacagaattctgcttgctgtgaggattcccagagtataagggtagaaatagatacataagaaggtgtctcccttttagtgatgacacaaaggtaagttcctgcaaaccgaactctagacacagtccaaatattcagaaaggatgaaattgcggacagttttcagaaggaaaagccagtaagagagaaggaattcctggtacagaagga

SEQ ID NO: 5742 - DNA, 601 bp, Homo sapiens
ccataagtgtttataggatctattgtgccaaactgcccaggatagttcatgagttggttgaaatataatttttaaaaaatttttatcattgtcatcaattttttttttaactaccactcctgccaaagcatrgggaatgcaattatgaaaaaggccttaaaaagctcctgacttagtcaaggagacaaatctgatagattatgtggcccatggcaaaaaataataataataataataataataataataataataataatatgcattgagcattaaatgaatggcctgaaaaacaaatgcctcaaatatcacagatggcagctattcctgtgggtggagctattgtagacatttcctgggaggacatagcaatgctttttttcagttagactccaaaactcagtggcttaagaaagataatttattattttttgtgatcctgtagattggctgtgacgcccttctgctgatcttctccgggctcacttctgaagttgcactcaactggagggtctgctggtctagaagttgccgatggctactgactagggggccttgattctcttctaggtgaccttatatcctccattaagtcaccctg

SEQ ID NO: 5743 - DNA, 630 bp, Homo sapiens
ccgtcaatgtactttgaactacctgactcattccagcactacagaagtgtgttttactcatttgaggaacagcacatcagcttcgcccttgacgtggacaataggtttcttactttgatgggaacaagtctccacctggtcttccagatgggagtcatattcccacagtaagcagcccttactaagccgagagatgtcattcctgcaggcaggacctataggcacgtgaagatttgaatgaaactatagttccatttggaagcccagacataggatgggtcagtgggcatggctctattcctattctcagaccatgccagtggcaacctgtgctcagtctgaagacaatggacccaagttaggtgtgacacgttcacataactgtgcagcacatgccgggagtgatcagtcagacattttaatttgaaccacktatctctgggtagctacaaagttcctcagggatttcattttgcagtcatgtctctgagcttctatacctgctcaaggtcagtgtcatctttgtgtttagctcatccaaaggtgttaccctggtttcaatgaacctaacctcattctttgtatcttcagtgttgaattgttttagctgatccatctttaacacaggag

SEQ ID NO: 5744 - DNA, 630 bp, Homo sapiens
ccgtcaatgtactttgaactacctgactcattccagcactacagaagtgtgttttactcatttgaggaacagcacatcagcttcgcccttgacgtggacaataggtttcttactttgatgggaacaagtctccacctggtcttccagatgggagtcatattcccacagtaagcagcccttactaagccgagagatgtcattcctgcaggcaggacctataggcacgtgaagatttgaatgaaactatagttccatttggaagcccagacataggatgggtcagtgggcatggctctattcctattctcagaccatgccagtggcaacctgtgctcagtctgaagacaatggacccaagttaggtgtgacacgttcacataactgtgcagcacatgccgggagtgatcagtcagacattttaatttgaaccacttatctctgggtagctacaaagttcctcagggatttcattttgcagkcatgtctctgagcttctatacctgctcaaggtcagtgtcatctttgtgtttagctcatccaaaggtgttaccctggtttcaatgaacctaacctcattctttgtatcttcagtgttgaattgttttagctgatccatctttaacacaggag

SEQ ID NO: 5745 - DNA, 626 bp, Homo sapiens
tggtcagaaaaattaagaccacttactagaacaaaaattgtatgagtggtttatttctttatgtaatatttattgagcaactactgtgtgctgttgtaggtgcttgggatatatcacagaataaaatggacaaagaagcttgcccttttggagcttacaaagaggaaagacagaaagtaaacataataagttttgtggaagaagaaaaaataaaacaggaaaagagggagagagggcccaggtgccacggcccacgccagtcatcccacactttgggagggaggccgaggcaggcagatcacttgaggtcaggaattcgaaaccagcctgaccaccacggtgaaaccatgtgtttacttaaaaaaaaaaaaaaaaaaattagctcaktgtggtggcgggcgcctgtagccccagctactcaggaggctgaggcaggagaatcgcttgaacctgggagacagaggttgcagtgagccaagattgtgccactgcattccggcctgggagacagagttgagactccttgtcaacaaccaaaaaggtgcgggggcggggggtgcagggagcagggggacagggcatgagaggaggccggtgtggctggatcagtcagaggcaggcagggt

SEQ ID NO: 5746 - DNA, 633 bp, Homo sapiens
tacgggatgacattttggccatgatattcatggcagaaagttgctataggactcagcttggagtaagggttgaaacagttgttaacagtaagcttaataatatattaagcaagctaacttcccaaaagaaaagaataataatctattttaaagattattaatcttgaatactgtygccacatctttgctggtttgatgggttgatgtaccttgctgattaagcaacaagaaaataaattgtcacatttgtctccaatttttaagttggcaaatgagggatatatctagaataaatttaaagaacagatttttttcaaatgtctaaaaaatcaagactcagaatgaaaaatgagatagaatgagtttccagtgcatttatttaaaaatatttcactcttataaaataaaaactagttagaaggtttctcatttcactttatgagctttcggctcatagcgaatatattcagttaaagttactaccaacctacagctctgagttcttttattcctcatgtgaactattaaatgtgatctttattgcattttcattaataagtaatatttagcaggagacctcagatttgggggtaattctaaattagcaaaatttttatcagagtcataatgaag

SEQ ID NO: 5747 - DNA, 811 bp, Homo sapiens
ccaatattcacacccaagaactactttgttagcaggttaactgtgtatcagagggacattaggaggattgccaagagctcacagcctgccttctggggacgctgggaagcctccctgcagggacccttcacttagctgtagccagctatccactgggcttggagtgcttcccacacccctcctgcatgctggcttggccctaccagggatcgcaaagcccagctggtcaccaaggacagaggtgctctctcgacgtggctgatgtttttctaaccagcttagcccagaaagaacatttggattcatttcccatctgtaacgcagagaaccttcrtatgaacttaagttccttgagatatttgcactgaaataggcacgtatgaatttaagagtcataaatgggcccaatttccctgaactgtgccctagaatgcgcagtgcatgctgtgtgactgtttttcctttccttctggtaactactagcttccacatgggagagggttcacagggggtggggtgtccaggctgcacgagtggctgaagaagagctccctgctagtctctgtgagtacagggaaggccctatgtggccgtagagcccttggaagctcagcctgctgagagcggtgctcaccaggttccactgaagctgaacagcactggagctaggaatgcaggaaggaggcgctgcccacaccctgagctctcagtctggctgggaagccggcagtagctgtgtcctataaaggcacctcgaacactggacaacactgtagctcatgcttgaatgaaggttctctaacaagtgtgt

SEQ ID NO: 5748 - DNA, 815 bp, Homo sapiens
agctcagtgtcctcacctgtaaacgggggtcgtgacagcagcgccaggagaatgcaacgccccaccaatgtttgtccttaagacttataagtaactgaaattaacatgagcatcgcagcctcaggtcactttcaagggacctcaaccaaaggctggcctccaccccagctaaggtggcacctcggccgctgacactgggggcttcctggcctgcactgcagctggctctggcctggctgacttgtatctgagttgtatctccagggggagcaactccatgggcagtggactcctaaaggcagtgcccactgtatgctgaggccccttgaaacgtatcacagatccacggacagagccttcggtgttggtgattcactgatttcagggccagcagagaggaattttgggtgtgaaggttccaatctcgaagatctgagctgcattctcctctggggtagggcagggcaggcccaccagggaggacaaaccagcccttgggggacagtcatgagtcagaagcacaggatttgccgtcagctgaacaatttagaaaacctgctcctgagattcaggctctgctgtgggcctggtggggtctgactgtctggaygccagcagggaacagtggagcaagagtcatgggcctctgatgatctcagtgtgactttatgtctctgctttccaatgagagaaagtgacaattcactgagcacctccttgtgctgggcattgtcctagcggcttctccaggtctccctctcactcgtcacacagcacatgagctgtgatttctcctgagttttcagagttcagga

SEQ ID NO: 5749 - DNA, 809 bp, Homo sapiens
gatcctgccgaaaggtgctcagtggcctggagctggactacctggacctccaccttattcactggccaacaggctgtcatcctgggaaggaattttcctttttagatgaatcaggcaactcattcaggggctggtgaaagctgctggcatctccaacttcaccatctccaggccgagaggaccttaaacaaatctggcttaaagtgaaagctggctgggtatggtggctcacgcctgtaatcccagcactatgggaggccgaggcaggcggatcaggaggtcaagagatcaagaccatcctggctaacatggtgaaaccctgtctctactgtaaatacaaaaaaattagccgggtgtggcggcgtgtgcctgtagtcccagctacttgggagactgaggcaggaaaatcgcttgaacccaggagatggaggttgcagtgagccaagatcrtgccactgcactccagcctgggcaacagagtgagactccgtctcaatgggaaaaaaaaaagtgtaagccagcagtggttcatcagattgagcgccactggtaggtccctaactcaagagaacttaatccagtactaccagtccaaggcagcatagtgaccgcctacagcccccttggctctcccgacaggcccagggccaagcctgaggacccttccctcctggaagaccccaggatcaaagtgattgcagccaagcacaatgaaactgtagccaggttctgatgtggctcctcacacagaggaacttggtggtgacccccacatctgtgacactggatcgcattgctgagaacttcaa

SEQ ID NO: 5750 - DNA, 809 bp, Homo sapiens
gatcctgccgaaaggtgctcagtggcctggagctggactacctggacctccaccttattcactggccaacaggctgtcatcctgggaaggaattttcctttttagatgaatcaggcaactcattcaggggctggtgaaagctgctggcatctccaacttcaccatctccaggccgagaggaccttaaacaaatctggcttaaagtgaaagctggctgggtatggtggctcacgcctgtaatcccagcactatgggaggccgaggcaggcggatcaggaggtcaagagatcaagaccatcctggctaacatggtgaaaccctgtctctactgtaaatacaaaaaaattagccgggtgtggcggcgtgtgcctgtagtcccagctacttgggagactgaggcaggaaaatcgcttgaacccaggagatggaggttgcagtgagccaagatcgtgccactgcactccagcctgggcaacagagtgagactcygtctcaatgggaaaaaaaaaagtgtaagccagcagtggttcatcagattgagcgccactggtaggtccctaactcaagagaacttaatccagtactaccagtccaaggcagcatagtgaccgcctacagcccccttggctctcccgacaggcccagggccaagcctgaggacccttccctcctggaagaccccaggatcaaagtgattgcagccaagcacaatgaaactgtagccaggttctgatgtggctcctcacacagaggaacttggtggtgacccccacatctgtgacactggatcgcattgctgagaacttcaa

SEQ ID NO: 5751 - DNA, 809 bp, Homo sapiens
gatcctgccgaaaggtgctcagtggcctggagctggactacctggacctccaccttattcactggccaacaggctgtcatcctgggaaggaattttcctttttagatgaatcaggcaactcattcaggggctggtgaaagctgctggcatctccaacttcaccatctccaggccgagaggaccttaaacaaatctggcttaaagtgaaagctggctgggtatggtggctcacgcctgtaatcccagcactatgggaggccgaggcaggcggatcaggaggtcaagagatcaagaccatcctggctaacatggtgaaaccctgtctctactgtaaatacaaaaaaattagccgggtgtggcggcgtgtgcctgtagtcccagctacttgggagactgaggcaggaaaatcgcttgaacccaggagatggaggttgcagtgagccaagatcgtgccactgcactccagcctgggcaacagagtgagactccgtctcaawgggaaaaaaaaaagtgtaagccagcagtggttcatcagattgagcgccactggtaggtccctaactcaagagaacttaatccagtactaccagtccaaggcagcatagtgaccgcctacagcccccttggctctcccgacaggcccagggccaagcctgaggacccttccctcctggaagaccccaggatcaaagtgattgcagccaagcacaatgaaactgtagccaggttctgatgtggctcctcacacagaggaacttggtggtgacccccacatctgtgacactggatcgcattgctgagaacttcaa

SEQ ID NO: 5752 - DNA, 701 bp, Homo sapiens
tgtttgtagggttaattggctttataatttattacatctgaagtttctctgtatgacagatagaatagtattcttctatccattctgccttttgggtattaatygtatgtcagtcaagaaacgaaacagacttgtaaaccctgattactgtcaaataatccgcgcccaacgcaaataatcgctctaatatttcaagccgtgataagtgctctaaatgggaagttgagggatctaaagtcgcgtacagtggtctggtaaaaatagtaaccagtaatacagttggcttcattcataattcatggtgatttcaatatccacatggatgattcctgcaatgactatacagcctctcagcttccaacctcctgtgatctttcccacactagcgcagccacacattcctgggatcacacccttgaccttactcataactgtgtaccctccgtagtgtcagtttcaaacagctcactttacttcccctttccattccagctcatacctcctagtgctagtaattacttaaccttcaccagattcctcacctttccctatccctctgctcttacacgtccttcttttcccagcataaattcatgtcccatcattttagtgcgtatactctcaacggccttggctccctctccctcctttctccaagccaggaaaaaccccagctctccacctactctggaactgctctt

SEQ ID NO: 5753 - DNA, 465 bp, Homo sapiens
aatatttaacttaattttactttggcatcaacaaagaaagaatgggaaaaaaaccccacgatagtgatatagcagttattaagaaatactttttaggcagatagtaagggtaaatgttctcagtggaaattttcctgttttaagaaacaacccctgaaccatctcttttctaacagaaaaggcagcttgaagagccaggcccgcaagctttgatatgcaaatgtcagtccttagaaactgagttcactcaacatggcgattccgccatctcttccttgtcatcaggtgtaccaagtgtcayggccacctccagataacaccatgtgttcagaacatcacggtgacctgtatttgcatattaaagggctaaggtgggagggccaggtttttcgagagctatgtaaatgacacacctggtcaaaccaatcccctgggccctatgcaaaccagacaccgcctcctcca

SEQ ID NO: 5754 - DNA, 465 bp, Homo sapiens
aatatttaacttaattttactttggcatcaacaaagaaagaatgggaaaaaaaccccacgatagtgatatagcagttattaagaaatactttttaggcagatagtaagggtaaatgttctcagtggaaattttcctgttttaagaaacaacccctgaaccatctcttttctaacagaaaaggcagcttgaagagccaggcccgcaagctttgatatgcaaatgtcagtccttagaaactgagttcactcaacatggcgattccgccatctcttccttgtcatcaggtgtaccaagtgtcacggccacctccagataacaccatgtgttcagaacatcacggtgacctgtatttgcatattaaagggctaaggtgggagggccaggtttttcgagagctatgtaaatgacacacctggtcaaaccaatcccctgggccctatgcaaaccagacaccrcctcctcca

SEQ ID NO: 5755 - DNA, 563 bp, Homo sapiens
ttggagcagtgaaggctaatttcagatggacccagggttgtaaatttaaccgaaaacgtccatgcttggatggaatgtggggcagacctagggtatgtagcattggtatccttaatccatattctaaaagatacaccagcgtctatattcctaactggaatgagtgtaccatgctgagcaataaataagtgaattcctctgtgtttaataaatttcccacaaatgggaaatctctccctgctgtcagaaacaattgtgctttttcctgagcaattaacttgttcaagtcatatgaaattttaagccacattaccacgttagcatctagaaaggctgacattaaatatggctcaactacagctagagtttaagatttgacagcacagcctaagtattccaaggccacatctggattgttcttgttttcacagccctacattctggttgtccagatgcactcagctatttttatattttatttggtcttcttgaattgtaggtatttccgtaagctgccttgaatcatttttggaataaagtgggatataartaagtaaataaag

SEQ ID NO: 5756 - DNA, 1818 bp, Homo sapiens
caggctcagtgctttagggcttgtacatgaatgctggactcctgcatggtgatgaacaccctgtgactgacgcataagtgcatgtcagcaggtgactgtcagcattgggccacacacctgagctcatgttttgactttttcattcaggagctccaaagctggggccactcccattggcccttcagattctccacctgagcagtgagggtaatgaaaggtggctctggcacgggtgaattagtcatgtatggagagagtagaacaggggtggattttactttttagaagtggagactggcaattgtgctgtgtaaatggaaaatctctcctgagaaaacacacagcctcccctatacgaaaacacacacaatcatatcacacgatgcagactcataagacaccaggcaagcgcacagcccaccgcccccataggaatgcagctgcttcatcagatggagacatttggtcataatttttgcctggagaacttaaaaaaaaaagtccactacccttattcctatcagaatcccagaatcagggtggctcttcacattgaagccagcaaggatgtcacacctttcttgacatccagacttttctttctcagcaagtaattccagagtacttactggagtcacacctcagaggggccacctgcacgacctgcaatacagaaacaaagctatatgaggggcacattgagctgtggattgtttgcacctggctctgtttctctcaaagagcattaaaaactgcatcagaaactgtagtcaactccaaggctcccaaaacaagggtaggatgcacactggaaaagacatgagtttttcctagaaggtgtatctcttaggtccatttaggtcggcaagtgcaaaatgcttaatccaagaagacattgcttccaagaacaaggaccccagggatacagtctataacctgaggccatcatacgtaaatgtcattttgggttacatatcagttgctaagaatctcttcttccaccaccccagaaaacagtatttaatgtctataatgcacatcgtttttttcacatgtaaarttaattgaaaaagcaaccaagaaaggaacatgtctattttagggaaagcaaggcaacctcaccctcacgtcgatcggcctctcttcatctcctctgccctcatgagctggaaactcctgcgaggctagaaggacacagagcaactgtcggtcatagatgcttctgttcatgatttatccagggagctctgctgaaggtagacaataggacagtgtgtgtggatgtgttcggttaaaagcacagcttggactgcgctagaaaatttttcctcatgaaaagacaggcaagaaagaggagcatgaaaggagtgagaaactgagtccctggcattttgctaatggcaacctaacgcaacaagaataagtcagtctacaaacagtactgaagtacatgctgtaatttgatgagaatcccattactcacactgccggttttgaaacccagctaaatggttttctaaaccccgtaaaacaatattagcttgtaagatttatgccccaagaccatttttatgtcaatggatccacattggctgtcactgcagttattatgtgttttaggattttgcacttgaataaaagcaaagtttaatggacagattggattcaattccaggcaaaacagtctattgtatttattcactaatcctttgttataatcaatgacagaattagaaacactgaaattatatcctttaaaataaccattattaataacccactattttttcatccagaccgccttttctttgtcatgta

SEQ ID NO: 5757 - DNA, 1818 bp, Homo sapiens
caggctcagtgctttagggcttgtacatgaatgctggactcctgcatggtgatgaacaccctgtgactgacgcataagtgcatgtcagcaggtgactgtcagcattgggccacacacctgagctcatgttttgactttttcattcaggagctccaaagctggggccactcccattggcccttcagattctccacctgagcagtgagggtaatgaaaggtggctctggcacgggtgaattagtcatgtatggagagagtagaacaggggtggattttactttttagaagtggagactggcaattgtgctgtgtaaatggaaaatctctcctgagaaaacacacagcctcccctatacgaaaacacacacaatcatatcacacgatgcagactcataagacaccaggcaagcgcacagcccaccgcccccataggaatgcagctgcttcatcagatggagacatttggtcataatttttgcctggagaacttaaaaaaaaaagtccactacccttattcctatcagaatcccagaatcagggtggctcttcacattgaagccagcaaggatgtcacacctttcttgacatccagacttttctttctcagcaagtaattccagagtacttactggagtcacacctcagaggggccacctgcacgacctgcaatacagaaacaaagctatatgaggggcacattgagctgtggattgtttgcacctggctctgtttctctcaaagagcattaaaaactgcatcagaaactgtagtcaactccaaggctcccaaaacaagggtaggatgcacactggaaaagacatgagtttttcctagaaggtgtatctcttaggtccatttaggtcggcaagtgcaaaatgcttaatccaagaagacattgcttccaagaacaaggaccccagggatacagtctataacctgaggccatcatacgtaaatgtcattttgggttacatatcagttgctaagaatctcttcttccaccaccccagaaaacagtatttaatgtctataatgcacatcgtttttttcacatgtaaaattaattgaaaaagcaaccaagaaaggaacatgtctattttagggaaagcaaggcaacctcaccctcacgtcgatcggcctctcttcatctcctctgccctcatgagctggaaactcctgcgaggctagaaggacacagagcaactgtcggtcatagatgcttctgttcatgatttatccagggagctctgctgaakgtagacaataggacagtgtgtgtggatgtgttcggttaaaagcacagcttggactgcgctagaaaatttttcctcatgaaaagacaggcaagaaagaggagcatgaaaggagtgagaaactgagtccctggcattttgctaatggcaacctaacgcaacaagaataagtcagtctacaaacagtactgaagtacatgctgtaatttgatgagaatcccattactcacactgccggttttgaaacccagctaaatggttttctaaaccccgtaaaacaatattagcttgtaagatttatgccccaagaccatttttatgtcaatggatccacattggctgtcactgcagttattatgtgttttaggattttgcacttgaataaaagcaaagtttaatggacagattggattcaattccaggcaaaacagtctattgtatttattcactaatcctttgttataatcaatgacagaattagaaacactgaaattatatcctttaaaataaccattattaataacccactattttttcatccagaccgccttttctttgtcatgta

SEQ ID NO: 5758 - DNA, 1818 bp, Homo sapiens
caggctcagtgctttagggcttgtacatgaatgctggactcctgcatggtgatgaacaccctgtgactgacgcataagtgcatgtcagcaggtgactgtcagcattgggccacacacctgagctcatgttttgactttttcattcaggagctccaaagctggggccactcccattggcccttcagattctccacctgagcagtgagggtaatgaaaggtggctctggcacgggtgaattagtcatgtatggagagagtagaacaggggtggattttactttttagaagtggagactggcaattgtgctgtgtaaatggaaaatctctcctgagaaaacacacagcctcccctatacgaaaacacacacaatcatatcacacgatgcagactcataagacaccaggcaagcgcacagcccaccgcccccataggaatgcagctgcttcatcagatggagacatttggtcataatttttgcctggagaacttaaaaaaaaaagtccactacccttattcctatcagaatcccagaatcagggtggctcttcacattgaagccagcaaggatgtcacacctttcttgacatccagacttttctttctcagcaagtaattccagagtacttactggagtcacacctcagaggggccacctgcacgacctgcaatacagaaacaaagctatatgaggggcacattgagctgtggattgtttgcacctggctctgtttctctcaaagagcattaaaaactgcatcagaaactgtagtcaactccaaggctcccaaaacaagggtaggatgcacactggaaaagacatgagtttttcctagaaggtgtatctcttaggtccatttaggtcggcaagtgcaaaatgcttaatccaagaagacattgcttccaagaacaaggaccccagggatacagtctataacctgaggccatcatacgtaaatgtcattttgggttacatatcagttgctaagaatctcttcttccaccaccccagaaaacagtatttaatgtctataatgcacatcgtttttttcacatgtaaaattaattgaaaaagcaaccaagaaaggaacatgtctattttagggaaagcaaggcaacctcaccctcacgtcgatcggcctctcttcatctcctctgccctcatgagctggaaactcctgcgaggctagaaggacacagagcaactgtcggtcatagatgcttctgttcatgatttatccagggagctctgctgaaggtagacaataggacagtgtgtgtggatgtgttcggttaaaagcacagcttggactgcrctagaaaatttttcctcatgaaaagacaggcaagaaagaggagcatgaaaggagtgagaaactgagtccctggcattttgctaatggcaacctaacgcaacaagaataagtcagtctacaaacagtactgaagtacatgctgtaatttgatgagaatcccattactcacactgccggttttgaaacccagctaaatggttttctaaaccccgtaaaacaatattagcttgtaagatttatgccccaagaccatttttatgtcaatggatccacattggctgtcactgcagttattatgtgttttaggattttgcacttgaataaaagcaaagtttaatggacagattggattcaattccaggcaaaacagtctattgtatttattcactaatcctttgttataatcaatgacagaattagaaacactgaaattatatcctttaaaataaccattattaataacccactattttttcatccagaccgccttttctttgtcatgta

SEQ ID NO: 5759 - DNA, 1818 bp, Homo sapiens
caggctcagtgctttagggcttgtacatgaatgctggactcctgcatggtgatgaacaccctgtgactgacgcataagtgcatgtcagcaggtgactgtcagcattgggccacacacctgagctcatgttttgactttttcattcaggagctccaaagctggggccactcccattggcccttcagattctccacctgagcagtgagggtaatgaaaggtggctctggcacgggtgaattagtcatgtatggagagagtagaacaggggtggattttactttttagaagtggagactggcaattgtgctgtgtaaatggaaaatctctcctgagaaaacacacagcctcccctatacgaaaacacacacaatcatatcacacgatgcagactcataagacaccaggcaagcgcacagcccaccgcccccataggaatgcagctgcttcatcagatggagacatttggtcataatttttgcctggagaacttaaaaaaaaaagtccactacccttattcctatcagaatcccagaatcagggtggctcttcacattgaagccagcaaggatgtcacacctttcttgacatccagacttttctttctcagcaagtaattccagagtacttactggagtcacacctcagaggggccacctgcacgacctgcaatacagaaacaaagctatatgaggggcacattgagctgtggattgtttgcacctggctctgtttctctcaaagagcattaaaaactgcatcagaaactgtagtcaactccaaggctcccaaaacaagggtaggatgcacactggaaaagacatgagtttttcctagaaggtgtatctcttaggtccatttaggtcggcaagtgcaaaatgcttaatccaagaagacattgcttccaagaacaaggaccccagggatacagtctataacctgaggccatcatacgtaaatgtcattttgggttacatatcagttgctaagaatctcttcttccaccaccccagaaaacagtatttaatgtctataatgcacatcgtttttttcacatgtaaaattaattgaaaaagcaaccaagaaaggaacatgtctattttagggaaagcaaggcaacctcaccctcacgtcgatcggcctctcttcatctcctctgccctcatgagctggaaactcctgcgaggctagaaggacacagagcaactgtcggtcatagatgcttctgttcatgatttatccagggagctctgctgaaggtagacaataggacagtgtgtgtggatgtgttcggttaaaagcacagcttggactgcgctagaaaatttttcctcatgaaaagacaggcaagaaagaggagcatgaaaggagtgagaaactgagtccctggcattttgctaatggcaacctaacgcaacaagaataagtcagtctacaaacagtactgaagtacatgctgtaatttgatgagaatcccattactcacactgccggttttgaaacccagctaaatggttttctaaaccccgtaaaacaatattagcttgtaagatttatgycccaagaccatttttatgtcaatggatccacattggctgtcactgcagttattatgtgttttaggattttgcacttgaataaaagcaaagtttaatggacagattggattcaattccaggcaaaacagtctattgtatttattcactaatcctttgttataatcaatgacagaattagaaacactgaaattatatcctttaaaataaccattattaataacccactattttttcatccagaccgccttttctttgtcatgta

SEQ ID NO: 5760 - DNA, 881 bp, Homo sapiens
ctcactctattagttcccatgagagctagttgttaaaaagagcctggcacctcgcccttctctctcgcttcctttctcactatgtgatctctacacagctccccttcacattccaccataagtagaagcagcctgaggccctcaccagatgcccaatcttccagccagcagactggtgagccaaataaaccttttttctttataaattacccagtctcatgtattgctgtatagcaaaaacagaacagataagataaatagcaggttagctaatcctagatggtatgacttaagtcaattactctaaattcaaacacatattttggtagtttttcactaatttttacatggccgccattaagtaaattgatcaatgaggctaagcccatccactatttaagaacagcaaatatgttgcaacaaacaggacttttacacttaaagaaaccttggaaacaatctagttctactccacacacaatgctgtgatcctctcaatgctgtaactgatrgagaattttccatgtcagcttggtcacttccagagacattactcagatctccaaagcttctcattccattttggaagacttgtaatttctttcctgatagcacttggacaccactgctttaagtcactgctccattcttgcacctttggtcaagctccagtttgacaaattaacatttctatgaaaatgctgaataaaagaaatgtagatgaatcaatgaaaataatattagtaccactacttcccctatcctggaccaattctggtgaaatagataaattatagtttttaaaataagatttacattcattttagaattgatattctcaaagatttggaagccagagtcatctcttttatgttacatga

SEQ ID NO: 5761 - DNA, 825 bp, Homo sapiens
cttggtcaagtagcaagacatcatcagttaggtggtgacttttgtaggatttttacttttaaaagtaatttgtaattaaattcaattacaaatcttttgtaatttatattcaagaaattattattctttttataatttcatagaagtatctgagatgaggtatatgaagccactctgtacatgaggctgctccattccatgggccaagggaataagggttgaactgtgcttgaaagaatttgggggtacggagacaggcgcggtggctcatgcctgtgagcactgagggagggaggctgaggagggtggatcacttaagcccaggagctcaagaccaggctgggcaacatggcaaaacccagtttctacaaaaagtcaaacattagcagagtgtggtggcacatgcctgtagtcccagctacttgggagactgaggtgggaggatggcttatgctggggaggtcaaggctgccatgagctgagatcactctaccgcactccagcctgggggacacagtgagaccctgggggtaggtttgcaaggatcaaaatctgttcttcctctgctaattgcctgcttgttctcctttttcatcctactgaatccctctcatttttttctgattacgactacttaaaaaaatgttttcttctctgttgaatgatctgtttatacacagatctggaccttaaawgaacctttatttcttccctattgatagtctgagtaaagtgatcagacttcaggaacatggggtagaaatccccatagaatcacatcttaagcacagatctaaggagggattctgtgggtgacaccaggga

SEQ ID NO: 5762 - DNA, 672 bp, Homo sapiens
gctgctaaaaatacaaaaagtagccaggcatggtagcacgcgcctgtaatcccagctactcaggaggctgaggcagaagaatcgcttgaacgctggaggcagaggttgcagtgagccaagatcgcgccattgcaccctagcctaggcaagagagtgagacgccgtctcaaaaaaaacaaaaaaaaagaaagaaaaattaaatagatatgttttttaaaagtcgtaagtgaagttataggatagatagggtcaagtttacccagacatagggtttcccaatttagcaaataaaaatgtgtcccagatactgcatgagagaaaattatactttaaaaactgtttatctgaaattcacatttaactggtcatcctgcatttatctggtaaccctgcccacagagcttctgggyatgtgcattcaagtttcattttccctgggcaaaggaaagattgtctctttatcccatcatgccacagcacagagaacacaatgagagtcaaagccagcagtggttaaaatctcctacatgctttattggacttcaaagaattttatgaaataacacagaaaaccccatttgagggtgtccagggagtacaaggcagtctgcagcctagcaccctcctaagaccagccccaggtatacccaccccaggcccaaaataggatcc

SEQ ID NO: 5763 - DNA, 658 bp, Homo sapiens
aaacaccttcctagccctacttgatattagctaaatctcttagagatggtttcaggaatctgtagtttttatatacagactatgtactcagacttatgcaattacatttggaaaattacagaatgagtatactgtggccaccccaatacaaggatcttctcctaatttcttaagtttttgcagtgacagctcatttatctgataaagaatgagcagtaatcctctctagtaattsaaatttgttgcagggacctgcaaactactgccacttgttttgtatagcaaggtagctcaggatggcttttacagtgtttaatgattcaaaaaaaataatgttttgtgatgtgaaaattgtatgaaattcaaatttcagtgtctgtaagtaaagttttattggaacatagccatacttattcatttacatattgtctttgtctgcttacatactgtagaggcagagatgagtagttgtagcagagaccacgtgattggcaaagcttaaattttttgcgacctgatactagacagaaaaaaaaaaaagatttgttttggagccattttcaatgaaacttttaaaaaactttgttatttaaccttttttggacagttcagttatcggtataaacactgtttttcataactttgctttaatataatg

SEQ ID NO: 5764 - DNA, 861 bp, Homo sapiens
gcaacagcctgcggccaggtcttcacccaccttgtgcaggtgttccagggccagcacgatctcacccccatacacgcgcacctcagcctccttgaagtactggcgctggtagaggtgggtgaacatctccccgccgctcacatagtctgggaggtgcagtggaagtcaggaagcagccccgtcaggtggcctcgcctgcccccagccaccccamccccgttgggatgtggtgtgcgctcacccaggatgaggtgcagcttggcatccgtctggaaagcgtagtgcagcgtgaccaggaagggcgcctggcgcaccagctccagcaccgagcgctcggtgcgcgtgtgctcttgcgtcttggcgcgctgcaccagcgccgccttgcgcagcaccttcatggcgtacagcttccccgcgtcgtgcccgcccgccttccgcaccaggaacaccttgccgtaggctgtgggagcagcgagtgggtggagggtgggctgtgagcgggagattggtgcaggcttggggggtgggggcgatgccaacccaggagggtgtgcaaatgaggcgaaggagctggggcaacaggcaggtgtgcaaaaagctggcagagcccttctaaggaaagggtgtgcacaccccgggagggtgcccagcaaaaccagggaaaggatgtgcaaaccaggctggggagcatgcatctccagggggcctgctgcgaggcatgggggcggggcatatgcaaacctgcgagagatcagatggatgtgaaaagatgccagtgcaaggaagggaggcagaggtgtgcacctggctggggaagggatgcgcaaaccagcgctggggcatttgcaaaatgtgggaggg

SEQ ID NO: 5765 - DNA, 610 bp, Homo sapiens
cgaggtcaggagatcgagatgatcctggctaacatggtgaaaccccatctctactaaaaatacaaaaaaaattagccaggcatagtggcgggcgcctatagtcccagctactcgggaggctgaggcaggagaatggcgtgaacccgggaacagaggttgcagtgagccaagatcgtgccactgcactccagcctgggagacagagtgagactatgccatacacacacacacacaaaaaattatactttmtctgattgtactttaaaggatcattgtaactcctaaacaaaaaagactataaaaagattaggagtagaagcaaagataagagaccaacgcagtggactagacagtagataaactagaacgacaacagtgaaaatggtgagaaattgaacaaaatatatgtgtcatttaaataagattgctaatctttttatttatttaactttttattctaaagataaagtctcactatgttgcccaagctggtctcgaagtcctggcctcaagcaatactcccacctttgcctcccaaagtgctgagattacatgcatgagccactgctcctggccaaaattgctagtcctgaaaataacagtataaatg

SEQ ID NO: 5766 - DNA, 610 bp, Homo sapiens
cgaggtcaggagatcgagatgatcctggctaacatggtgaaaccccatctctactaaaaatacaaaaaaaattagccaggcatagtggcgggcgcctatagtcccagctactcgggaggctgaggcaggagaatggcgtgaacccgggaacagaggttgcagtgagccaagatcgtgccactgcactccagcctgggagacagagtgagactatgccatacacacacacacacaaaaaattatactttatctgattrtactttaaaggatcattgtaactcctaaacaaaaaagactataaaaagattaggagtagaagcaaagataagagaccaacgcagtggactagacagtagataaactagaacgacaacagtgaaaatggtgagaaattgaacaaaatatatgtgtcatttaaataagattgctaatctttttatttatttaactttttattctaaagataaagtctcactatgttgcccaagctggtctcgaagtcctggcctcaagcaatactcccacctttgcctcccaaagtgctgagattacatgcatgagccactgctcctggccaaaattgctagtcctgaaaataacagtataaatg

SEQ ID NO: 5767 - DNA, 845 bp, Homo sapiens
agtggtgggcacctgtaatcccaggtactcaggaggctgagacaggagaatcgcttcaacctgggaggcggaggttgcagtgagctgagatcgtgccactacactccagcccaggtgacagagtgagattccatctcaaaaaaaaaaaaaaaagaagaagaagaagaaggcaaagcataggaggtggtgctgcccttggggtatcagatatcaccaaggatttgggcaaaaatgtagaggaggaaaagaatgaagagacccggagacctgggagtaaaccggttcatgtggggccgactcatatgtggaagggtaaaaggagatgagattgcaacagtgggctgcggcaaggagggaacawccaagtacagcactgaagagtgagagctcaggggctcagtatgagcttgaatttctgttccaccactagtcagccaaggttcctatccatctcaaaggctgtctcctcagagataaaacagggatgataataatcctgcctactgattcataaggttgctgtgaagtttaagtagaataacagatgtacttagcactatgcctggcacgcagcaaataattaacagatgggcaaaggcacgaatggccaatgtgagaggcagcacaaaggaaaggcaaaccagacatgaaccggataacagagtttaatgcgaccaacagcccaggtctaggagatcagcataaacactggtgcccagaagaaaaataggggagtccagagacagggccaatttggtgggcacaagaagttctacagacactgttgggagactgggactcagaacatcagtcagacctgtgccatggatctggggaagggatcc

SEQ ID NO: 5768 - DNA, 845 bp, Homo sapiens
agtggtgggcacctgtaatcccaggtactcaggaggctgagacaggagaatcgcttcaacctgggaggcggaggttgcagtgagctgagatcgtgccactacactccagcccaggtgacagagtgagattccatctcaaaaaaaaaaaaaaaagaagaagaagaagaaggcaaagcataggaggtggtgctgcccttggggtatcagatatcaccaaggatttgggcaaaaatgtagaggaggaaaagaatgaagagacccggagacctgggagtaaaccggttcatgtggggccgactcatatgtggaagggtaaaaggagatgagattgcaacagtgggctgcggcaaggagggaacaaccaagtacagcactgaagagtgagagctcaggggctcagtatgagcttgaatttctgttccaccactagtcagccaaggttcctatccatctcaaaggctgtctcctcagagataaaacagggatgataataatcctgcctactgattcataaggttgctgtgaagtttaagtagaataacagatgtacttagcactatgcctggcacgcagcaaataattaacagatgggcaaaggcacgaatggccaatgtgagaggcagcacaaaggaaaggcaaaccagacatgaaccggataacagagtttaatgcgaccaacagcccaggtctaggagatcagcataaacactggtgcccagaagaaaaataggggagtccagagacagggccaatttggtgggcacaagaagttctacagacactgttgggagmctgggactcagaacatcagtcagacctgtgccatggatctggggaagggatcc

SEQ ID NO: 5769 - DNA, 2818 bp, Homo sapiens
aattcttttatccaaatttccagaccttgccaatttagtgattccaacattttcttttactacctaaattatgacatctaaacaaagcatgattaataaagagaaaatctagtctcactttttttttttttttttttttttttagacagagtttcactcttgttgccaaggctggagtgcaatggcgctatctcagatcactgcaacctccacctccggggttgaagcaactctcctgcctaagcctcctgggtagctgggattacaggtgcctgccaccgcacccagcgaattttttgtgtttttagtagagacaggatttcaccatgttggcctggctgatctcaaactcttgacctcaggtgatccaccggcctcaacctcccaaagtgctgggcttacaggagtgagccactgcactcagcctcgtctaattttatcttgtcccaaataaatactcccaaccgctgtcagcattgcttccatgtgtctacgaatcagatctcctcatttcttgtttttgactaacaactggacaaggtaaaaccaagagacaggtactacttatgaataacacgatgtctgcaaatctctggacagctttccctgctggtcccagcttcctccatagtcactgccttgccctagtgatggaacacaggtgtcactgccagcaatggaattcctattcttattgaatccagtctctctctatccctgccaagaagacttagcattaccatttgctgaaatcctggtagttcatagatttttggacctaatcaagcttcctgttcgaaaagtcttaattattgccaccactgcagagctctctacttgttgcctccagaccaagtagaaaacattacttccattgttgttttgacttttgctgcacatccatttcaatttccacaaagtgcgcccatggcacagggagtctagatgaagactacctttagcctgtgtgggcacaccactcggacactttgaattctggtatgaagtccacatctccagccaagactcctccttcccttataacactacccctttctggggtcctcattgtccttttctatcatctggtcttgatttgggctactgtagtatatcacatgtttgattcctttgaaccacaaagggaatgagttgggttctcaatcccatacctcctaaaatgctcctagaataaaaacaagtaaattcgagatgcatggcctgattctaaaacgcaacattcaatacctaaaaacaaataatttgctggagtgaccctagattcatccattcatagcatctaaacccaaggcacttgcccagctaaagtgacttcttatacttttacttatttaacagatatttatcacatatctgatatatgtcaggcactctgctaaaataagaataccaaaggacatgaaatttaccttcttagagtctggtaggggagcagataaggatatagattataatgtgctgtgttaacagaatgaccctcaggaaggcaaccaaaccagactgggaatgctaagaaaaccttcagtctaagttgaattataaaggttcatagtagttttccaggcaaagatggtgaaataaaactccaagttaaagggtagaagaggcacagagaattgagagtagaaacatggcatgtgttgacttacaagtgaaagaaatagattacgatgtaatgtgaattctggggttgtatgcctaggttcaaaccacgtgtctttggacaaataactgttactgttccccttaagcctcattatttctatctataaatgaaactaataacagttcttatcccattacatttttatgaggattaaatgaaagttcatgtaaagcagtgttttctcaaatttctcagatgataagtcacacccatggtgcttttttaaaaaatacatcttcccagatcattccctgaggattatgattcaatgggtctgggatgaggaccaggaattatatttttagcaaggatcccaggtgatattcatcatcagtgaagtttggaaaatactgatataagacatttagcatagttccaggatcagggttagtactcaatagatattaactataaattagttataaaagcagaatttgcagaggaagagggtgatttagtatgagaagggatatatgaagctggaaacagaaacaatgatcaagtcatgaaatgtctaaatgcatgttacattaaggagttagtattttatcttgaaagcaattaggaaccatttaaaggtttttaaggagcaaagtgccttgattagatattcatttcttaaggattcatctagcttcatggtgaagggaattgtaaacaggcaagaaagaaggtcataaaactatttatgaggtaactacaggaagccagatgcaaaattaaggagcactgaattagaacactggaagagggaatcgagagatacatagaaagcaaaatctagaggacttgacccactgcatgtaaagaatgagggagagtctagcttgttgtcttatsggtttatagttaggagaaatgggttgtgcacagggaaaagaagccacaatagtaggatcaagcttgttcagcaataaaatcgatttcgaacaaactgagattgagttgccactgagctattccatctgacagttggatatatgtgcacatagactacggaacagaaatctgaattagagatctacacttggaaagtatatagatggtagttgaaatcatcttatgttttcctggagacatttagtgatgtgaccaaagtcacatccctaatggttggatgataagctaatg

SEQ ID NO: 5770 - DNA, 2818 bp, Homo sapiens
aattcttttatccaaatttccagaccttgccaatttagtgattccaacattttcttttactacctaaattatgacatctaaacaaagcatgattaataaagagaaaatctagtctcactttttttttttttttttttttttttagacagagtttcactcttgttgccaaggctggagtgcaatggcgctatctcagatcactgcaacctccacctccggggttgaagcaactctcctgcctaagcctcctgggtagctgggattacaggtgcctgccaccgcacccagcgaattttttgtgtttttagtagagacaggatttcaccatgttggcctggctgatctcaaactcttgacctcaggtgatccaccggcctcaacctcccaaagtgctgggcttacaggagtgagccactgcactcagcctcgtctaattttatcttgtcccaaataaatactcccaaccgctgtcagcattgcttccatgtgtctacgaatcagatctcctcatttcttgtttttgactaacaactggacaaggtaaaaccaagagacaggtactacttatgaataacacgatgtctgcaaatctctggacagctttccctgctggtcccagcttcctccatagtcactgccttgccctagtgatggaacacaggtgtcactgccagcaatggaattcctattcttattgaatccagtctctctctatccctgccaagaagacttagcattaccatttgctgaaatcctggtagttcatagatttttggacctaatcaagcttcctgttcgaaaagtcttaattattgccaccactgcagagctctctacttgttgcctccagaccaagtagaaaacattacttccattgttgttttgacttttgctgcacatccatttcaatttccacaaagtgcgcccatggcacagggagtctagatgaagactacctttagcctgtgtgggcacaccactcggacactttgaattctggtatgaagtccacatctccagccaagactcctccttcccttataacactacccctttctggggtcctcattgtccttttctatcatctggtcttgatttgggctactgtagtatatcacatgtttgattcctttgaaccacaaagggaatgagttgggttctcaatcccatacctcctaaaatgctcctagaataaaaacaagtaaattcgagatgcatggcctgattctaaaacgcaacattcaatacctaaaaacaaataatttgctggagtgaccctagattcatccattcatagcatctaaacccaaggcacttgcccagctaaagtgacttcttatacttttacttatttaacagatatttatcacatatctgatatatgtcaggcactctgctaaaataagaataccaaaggacatgaaatttaccttcttagagtctggtaggggagcagataaggatatagattataatgtgctgtgttaacagaatgaccctcaggaaggcaaccaaaccagactgggaatgctaagaaaaccttcagtctaagttgaattataaaggttcatagtagttttccaggcaaagatggtgaaataaaactccaagttaaagggtagaagaggcacagagaattgagagtagaaacatggcatgtgttgacttacaagtgaaagaaatagattacgatgtaatgtgaattctggggttgtatgcctaggttcaaaccacgtgtctttggacaaataactgttactgttccccttaagcctcattatttctatctataaatgaaactaataacagttcttatcccattacatttttatgaggattaaatgaaagttcatgtaaagcagtgttttctcaaatttctcagatgataagtcacacccatggtgcttttttaaaaaatacatcttcccagatcattccctgaggattatgattcaatgggtctgggatgaggaccaggaattatatttttagcaaggatcccaggtgatattcatcatcagtgaagtttggaaaatactgatataagacatttagcatagttccaggatcagggttagtactcaatagatattaactataaattagttataaaagcagaatttgcagaggaagagggtgatttagtatgagaagggatatatgaagctggaaacagaaacaatgatcaagtcatgaaatgtctaaatgcatgttacattaaggagttagtattttatcttgaaagcaattaggaaccatttaaaggtttttaaggagcaaagtgccttgattagatattcatttcttaaggattcatctagcttcatggtgaagggaattgtaaacaggcaagaaagaaggtcataaaactatttatgaggtaactacaggaagccagatgcaaaattaaggagcactgaattagaacactggaagagggaatcgagagatacatagaaagcaaaatctagaggacttgacccactgcatgtaaagaatgagggagagtctagcttgttgtcttatgrgtttatagttaggagaaatgggttgtgcacagggaaaagaagccacaatagtaggatcaagcttgttcagcaataaaatcgatttcgaacaaactgagattgagttgccactgagctattccatctgacagttggatatatgtgcacatagactacggaacagaaatctgaattagagatctacacttggaaagtatatagatggtagttgaaatcatcttatgttttcctggagacatttagtgatgtgaccaaagtcacatccctaatggttggatgataagctaatg

SEQ ID NO: 5771 - DNA, 655 bp, Homo sapiens
cagtatgggacccatctcctcaatacaactcactatcaagaggagaacacataacatgcctttgaaaaatgttcttccccagatttagtgccctgtgaattgattgttatttttgtagcatgatgtgaatgtctactatattgtaagagattctatgagtttcttggggcaaatacacataggaataagtttccgcaaaagaacttaatgtaatttttagaaaacaaatacatacacatataaattaatgaagtagataaatgtcagaaacaggccatgaatatatatgtgagctacatacagtgatggacagcctccaagtttcaaaactgtataagaccttagttaaaagtagtcaagtatgaccaccagtgaagaatagaatagagagagtgmagagtagagatgaccagaagtagaatactttaaaagaaaaaaaaatacattcttacatctcattcaaacttttatgtacataattgctcccacatctgaaaggtgctgccattactggttgaattttatgtttgatttccatattatagaatgtctaagaccatattaaatctcaagattagggtatggtctgaattaaatcctgacctcatttctgaggactgagtcagagcttaatgtccttgaaacactagaattt

SEQ ID NO: 5772 - DNA, 655 bp, Homo sapiens
cagtatgggacccatctcctcaatacaactcactatcaagaggagaacacataacatgcctttgaaaaatgttcttccccagatttagtgccctgtgaattgattgttatttttgtagcatgatgtgaatgtctactatattgtaagagattctatgagtttcttggggcaaatacacataggaataagtttccgcaaaagaacttaatgtaatttttagaaaacaaatacatacacatataaattaatgaagtagataaatgtcagaaacaggccatgaatatatatgtgagctacatacagtgatggacagcctccaagtttcaaaactgtataagaccttagttaaaagtagtcaagtatgaccaccagtgaagaatagaatagagagagtgcagagtagagatgaccagaartagaatactttaaaagaaaaaaaaatacattcttacatctcattcaaacttttatgtacataattgctcccacatctgaaaggtgctgccattactggttgaattttatgtttgatttccatattatagaatgtctaagaccatattaaatctcaagattagggtatggtctgaattaaatcctgacctcatttctgaggactgagtcagagcttaatgtccttgaaacactagaattt

SEQ ID NO: 5773 - DNA, 655 bp, Homo sapiens
cagtatgggacccatctcctcaatacaactcactatcaagaggagaacacataacatgcctttgaaaaatgttcttccccagatttagtgccctgtgaattgattgttatttttgtagcatgatgtgaatgtctactatattgtaagagattctatgagtttcttggggcaaatacacataggaataagtttccgcaaaagaacttaatgtaatttttagaaaacaaatacatacacatataaattaatgaagtagataaatgtcagaaacaggccatgaatatatatgtgagctacatacagtgatggacagcctccaagtttcaaaactgtataagaccttagttaaaagtagtcaagtatgaccaccagtgaagaatagaatagagagagtgcagagtagagatgaccagaagtagaatactttaaaagaaaaaaaaayacattcttacatctcattcaaacttttatgtacataattgctcccacatctgaaaggtgctgccattactggttgaattttatgtttgatttccatattatagaatgtctaagaccatattaaatctcaagattagggtatggtctgaattaaatcctgacctcatttctgaggactgagtcagagcttaatgtccttgaaacactagaattt

SEQ ID NO: 5774 - DNA, 636 bp, Homo sapiens
gcatgaagattgtgttataatgatagaaattagaattgtttaaactatatcactgtgagtcaatcaaaaaactcagttttaggcacatgtaaccaaattgtatttttccatccaatgacctgctcctactggcttaatgaatatcaaaaatgtactaaagacatttttataaaactttataaagttagacaagccaacaatgccaattataataatattcaaagttaaaggtaagactattctatgctaagattagatagaagacgtagaagtgtatattaacaaacagagataaaccacccaaagtaatgtactttaaataaaaattaaattatagttttctggattgatattggtggcattattactgaggtaataattagrtttgcttctgaggcactacatattttttaatatgtactttaaatacattgtgtgttttcacatttcatcaaatattatatgagtgatcaatatttataaatatttgacagccaattttgaaatatgaaaaattactattggataattattgcagaaataaatatttgatctatatgaaattaattcagcagtttattgcaggaaggaaactaaaatttttttaggacatagtgtatgccaagcatatttcca

SEQ ID NO: 5775 - DNA, 594 bp, Homo sapiens
actcttatttgtccgtttccttctttgtgctcatatacacttccatcaaaggacctatgagctatatttgtttcacttatttatacacttatttaaattcatattgcccrtactagaagcacgaatggatacactatgctgggatgaagagattagagatggaaaaataaggctatggaaagataaagatagggccaggaactgcagctcgtatgcctgtaatcccaacactttggcggaccgaggtgggaggatttcatgaagccaggagttggagaccagcctagggaacatagtgagaccatgactctacaaaaaataaagaattagctggccatggtggcaagcacctgtagtcctagctactcaggagggtgaggtgggaagatcgctggagcccaggagtttgaggctgccgtgagtcatgattgtgccactgcactccagcctgggtgactcaaaaaaaaaaaaaagacaaaaatagatttcaaaatagttctgaaagaaatgattaaataaatatacagacagggaggtgttcaaaaatagaatgtgggaaaaaagaaaaaacaagaatgaccatcaaaatatggc

SEQ ID NO: 5776 - DNA, 792 bp, Homo sapiens
agcagaggaccgacagctgtgactttatttggtgatggaataaataaggtgagggggacgaggggcacagaatgttcttcaagggtgcccattttcataatgttatttttctaaatctgcatcttcccagtcccaaaccttcttcagcttttttttgttgactgtttaactcctgctttcctccacgtccttgcgtgtgctttgtgtcagttctttcaggtaccaagcgggtggtggtgttagtggggctcttgctggctctgaactggggagagaggcacgctggtcttttgygtagagtgagaatctggttttgcttcaactccacttctgtccttcacctttccaccaatgcattcccctccattttcctactgatttacctgggggtgaaaccatcttaacactgttaatattaaatattaactttcttctaaggaccacacactgttgcaagagcagaaattctttccattagcataactttgtaagggacactagtgctcctctaatggtaataaagtagaattattatttgcaaaacaggatacaaaacgaatatacagtaaatctcagtattgcaacaacaaggagatagaaaaaaaattcctaaatacacatcttgagaaagactgaaaagaagcatgtcaaatactaaaagaggtaaactgtagccagaacaggatttcagataattttgtttgttttcagatagggacttgctctggcacccaggctagagtgcagtggtgcaatcctggctcactgcatcctcaatctcctgggctcaaa

SEQ ID NO: 5777 - DNA, 775 bp, Homo sapiens
ctgtccttcctcgcagcaggtgcttagtcctctcctagggagaagcacggaaagattcctcaaggcctcagtcccatgtcyaaggcatacctaggttagaaatgtcctttacttgtttctcagttactatttctcctcttcctccctccccctgccttctcttggctgtcatttagctctctggcccacagaaatactccatccaaggagctggtcctcagtcagcctgatgaggacaggtcagtggccaacccttttgccccagtccttcatctggagacagtcacatagtcacgtcaacagttcacccaaagagaagaggtggggcctggcttctcccacagggcacagcctaactatggagacccagggctccttcctgctgcactaggcctgtgctctccctattgccttcaggtggtgtgatcccggcttcctcacagagcccttttttctttctgcccagctccatcccaccagagtttctacccccgctgaggcatctcctgggcacagaccaccacactctaagccggctggcctgggagttagggtcctgcccacctcacctgggagttggggtcctgcccacctggagtttagcacgctggtcgctcactttgctttggtctgcacacctggtgtgtgcatgtgtatactgcttgtgccatctgtgtacccctctccctggagtacacttgtggtcacactacagtggggacatcaagaatgcaatatttatggattgctgcatgattcttaaaaatgaataaaa

SEQ ID NO: 5778 - DNA, 481 bp, Homo sapiens
  misc_feature (1)...(481): n = A,T,C or G
tccctcctaggcctgggygtgggctcgcagaatgctgggattcccagattacaggccggtgcaccacaccaggagcaaacacttcccactttaaaaattcagtttgtgattggctgtcattcagtattatgctaattaagcatgcctgtttttaaacttcttaaaacaattttttaaaattaaaaaaataataaaaataataaaggctaactcttcacacttcagtcaaggcagccttatcatccatctgtcccagaaagtcctccagcctttgaaggggaggcagcgtgtgtggaagaatgcagcctttggaatctgagctagtcaagctggcccttggccctgggcaatgttagtttctactaatctttctgttctttnnnnnnnnnnnnnnnnnnnnnnnnnnnnnnnnnnnnnnnnnnnnnnnnnnnnnnnnnnnnnnnnnnnnnnnnnnnnnnnnnnnnnnnnnnnnnnnnnnnnt

SEQ ID NO: 5779 - DNA, 481 bp, Homo sapiens
  misc_feature (1)...(481): n = A,T,C or G
tccctcctaggcctgggcgtgggctcgcaraatgctgggattcccagattacaggccggtgcaccacaccaggagcaaacacttcccactttaaaaattcagtttgtgattggctgtcattcagtattatgctaattaagcatgcctgtttttaaacttcttaaaacaattttttaaaattaaaaaaataataaaaataataaaggctaactcttcacacttcagtcaaggcagccttatcatccatctgtcccagaaagtcctccagcctttgaaggggaggcagcgtgtgtggaagaatgcagcctttggaatctgagctagtcaagctggcccttggccctgggcaatgttagtttctactaatctttctgttctttnnnnnnnnnnnnnnnnnnnnnnnnnnnnnnnnnnnnnnnnnnnnnnnnnnnnnnnnnnnnnnnnnnnnnnnnnnnnnnnnnnnnnnnnnnnnnnnnnnnnt

SEQ ID NO: 5780 - DNA, 742 bp, Homo sapiens
agaattattggcagacatcaaaatgtagactgscttttttaattttatttatcttgtagcaatcttgatctttttagaggcaaatgctatgcctggcagaaaggtgaggtcagacacagagaaatgcaaaaggattgcatttagatatatttccaaacaacatccttgttatccttgttacataatgtcatatcatatttctcatgttattttgttttctgcttcttttccatctgacatgtccaaatagtgtttaaatgtaatgtggccatggacacagggaggggaacaatacacacttgggcctttcaggggaatggggtgggggaagggataccatcaggataaatagctaatgcatgtggggcttaatacctaggggatgggttgataggtgcagcaaaccagcatggcacgcgtttacctaagtaacaaacctacatgtcctgcatctgtatcctggaacttaaaataaagtaaaattaaatttaaaaaaaaacttggtgcggcaacaactgctatgccactgctatgcaatttctgtcataggacatggaaggatattatgccacataagtcaacgctgtctacctacattaatagatatttaatagatagcaattgtgtctgcacttaacaggtaccttctccatatatgctgatcattgagtttagcacaaaaggaaaaatgtgagaggcacaagttaaaataactgtccttgaagaacttaaaatatatctg

SEQ ID NO: 5781 - DNA, 742 bp, Homo sapiens
agaattattggcagacatcaaaatgtagactgcctttttwaattttatttatcttgtagcaatcttgatctttttagaggcaaatgctatgcctggcagaaaggtgaggtcagacacagagaaatgcaaaaggattgcatttagatatatttccaaacaacatccttgttatccttgttacataatgtcatatcatatttctcatgttattttgttttctgcttcttttccatctgacatgtccaaatagtgtttaaatgtaatgtggccatggacacagggaggggaacaatacacacttgggcctttcaggggaatggggtgggggaagggataccatcaggataaatagctaatgcatgtggggcttaatacctaggggatgggttgataggtgcagcaaaccagcatggcacgcgtttacctaagtaacaaacctacatgtcctgcatctgtatcctggaacttaaaataaagtaaaattaaatttaaaaaaaaacttggtgcggcaacaactgctatgccactgctatgcaatttctgtcataggacatggaaggatattatgccacataagtcaacgctgtctacctacattaatagatatttaatagatagcaattgtgtctgcacttaacaggtaccttctccatatatgctgatcattgagtttagcacaaaaggaaaaatgtgagaggcacaagttaaaataactgtccttgaagaacttaaaatatatctg

SEQ ID NO: 5782 - DNA, 742 bp, Homo sapiens
agaattattggcagacatcaaaatgtagactgccttttttaattttatttatcttgtagcaatcttgatctttttagaggcaaatgctatgcctggcagaaaggtgaggtcagacacagagaaatgcaaaaggattgcatttagatatatttccaaacaacatccttgttatccttgttacataatgtcatatcatatttctcatgttattttgttttctgcttcttttccatctgacatgtccaaatagtgtttaaatgtaatgtggccatggacacagggaggggaacartacacacttgggcctttcaggggaatggggtgggggaagggataccatcaggataaatagctaatgcatgtggggcttaatacctaggggatgggttgataggtgcagcaaaccagcatggcacgcgtttacctaagtaacaaacctacatgtcctgcatctgtatcctggaacttaaaataaagtaaaattaaatttaaaaaaaaacttggtgcggcaacaactgctatgccactgctatgcaatttctgtcataggacatggaaggatattatgccacataagtcaacgctgtctacctacattaatagatatttaatagatagcaattgtgtctgcacttaacaggtaccttctccatatatgctgatcattgagtttagcacaaaaggaaaaatgtgagaggcacaagttaaaataactgtccttgaagaacttaaaatatatctg

SEQ ID NO: 5783 - DNA, 753 bp, Homo sapiens
  misc_feature (1)...(753): n = A,T,C or G
attcaggacrcttcattccttgatggcgccctagctgctcagggcactcagggaaactttattttgttcaacataagaaaagagtcagttgtgggaggccgacgcaggcggatcaactgaggtcaggagtttgagaccagcctggccaacctggcaaaactccgtctctactaaaaatacaaaaattagccgggcataatggcgggcacgtgtaatcccagctacttgggaggctgaggcaggagagctgcttgaacctcaaaggcaggggtagcagtgagccgagatcatgccactgcactccagcctgggcgacagaggaagactccatctcaacaacaacaacaaanaaaaaaaaaaaaaaaaaaaaggaggagaaaagagtcagttgggtaaggggaggattatttcaaggaaaagggaagttaagaaagaatagaactggcagtgcgtggtggctcacgcctgtaatcccagcactttgggaggccgaggcgggtctaacacgaggtcaggagttcgagaccagcccagccaagatggtgaaacccccttctccactaaaaatacaaaaattagccgggcatggcagcaggtacctgtaatcccagctgctcaggaggctgaggcagagaattgcttgaactcgggagccggaggttgcagtgagtcgagattgctcccccgcactccagcctgggcgaaagagtgagactccgtctcaaaaaaaaaaaaagtatatttaacatagga

SEQ ID NO: 5784 - DNA, 793 bp, Homo sapiens
gtcacagggtccattggtattaaacttggaattcagacataggtctctccatctccccactctcaccattttccagcatacaagataacatggatgtacagatgtaatatcaggatggctctaacctttggcggggggtgggggtggggctaggcatacctcctccctgagttaggaatgaggggtggaggatgtcttgccctccttggcagctggagaaggtttctgtggctcacatcagggtaggtggaaaaggttctgctcaactcctggctcatcacattctgagaccagaaaaatcttcctttttcccacttccttttccctggaagggtttgttagctgcatcctcctctgtgataagtcacctttcctgtgccatcccctggctccttatcccctggctccttgtctcctgcccagaccaaggagagacttcttccaattctacatctgcccaagtaccattaatgtttattagcattaagttctgtagtgaggaggatgagagatgcttgctaggctgagtgcattctttggagatttccacccagagccctcgctgtctgcctcagtttctccacctttgtcagtgaytgagcatgtatccagatgccagagtgtgggccctggtagggcctggctgggtttgccactggtgaagctgcagcaagcacctcctaaaggacttggcaccaaagtccagctcctgcctcttttgacctcatcgccaaaggtcttcccaccaggccaggattaattgcagggcagacatcacagacccaagccctca

SEQ ID NO: 5785 - DNA, 676 bp, Homo sapiens
ggttgtgaagattaaatgaaatcatgcgtgtcatgttcctgtcacatagtaggtgctcaataaatggtaaatttgatttgtcaggcttccaaggagccttgtctgtcggcaccctctttcctagggataagccttccaacctgaattctcccaccctctgcctcctgttggaagtagcatcgggaaaggcgttccatggtgatgacacaggggcacaggaaaggagaatgcagttggaaacagaaccggctgctttctgcctccacttctactcacacctacttcctgctgcttagaatttacagcctgcaaagggctaatatccagaatctacaaagaacttaaacaaatttacaagaaaaaacaaccccatcaaaaaatgggcaaaggatatgaacagacacttctcaaaagaagacatttatgcagccaacagacacatgaaaaaatgctcatcatcactggtcatcagagaaatgcaaatcaaaaccacaatgagataccatctcacgccagttagaatggcgaccattaaaaagtcaggaaacaacagatgcaggaaaggatgtggagaaacaggaacacttttacactgttggtgggagtgtaaattagttcaattagacagtatggcrattcctcaaggatctagaactagcaatatcatttgacccag

SEQ ID NO: 5786 - DNA, 706 bp, Homo sapiens
tgattaaggaaggtaggaaaaattggtaactgaagaattatttcacaagctcacttctattaactgctgtcactaaagaaccaaacaattcatccaaccaaagtcctcaacgtgtgtgtgtgtgtgtgtgtgtgtgtgtgtgattgtgaaagtgtgaaactattatattgaacatttggatagaaaatcttccaaaaatgtgtatagattctataatctttaaaatatattttgtgcagtatatttttaaggtatattaaaaacacaggcctggcgtggtggctcatgcctgtaatctcagcactttgggaggccaaggcgggcagatcacttgaggtcaggagttcgagaccagcctggccaacatggtgaaaccctgtctctacttaaaaatacaaaaattatctgggtgtggtggtgcatgcctgtaatcccagctacttgggaagctgaagcagaagaatcatttgcacccgggtgatgaagattkcagggcgctaaggtcgcgtcactgcactccagcctgggtgacagagtaagactctgtctcaaaaaaaaaaagtcagaatgaagaccacttactgtttgttacaaaggaacgaaaccataggaatctgcataatttattacatgtttcacactttgtgattacacacttgatatacctgttactcttacatcttatactttttaaagagagcattca

SEQ ID NO: 5787 - DNA, 807 bp, Homo sapiens
ctctttgatcctttgagggatgtggacatgtcttttgggggctataattcacttctctgtattctatcctctgcctcccagaattcatgttcatgccatatgctaagtattacctcttttccctaccaacatccccaaaagtcacaacccattcattacagcatcaactctaagtctaaatttttttwaaaaatattatcggctcaaaggtccaatcttatcatctcaatcatctgactctggtatggttgagactctggaatttatcctagggcaaaattcctgtgcttctgtggacctgtgaaactacaataaaagttacctcctgccaaaatacagtagtaggatatgcgtaggatagacatttcaaaaggaagaaatggaaaagaataaaagagtcactggtttcaaacatgtttaaaatctagcagggcaaattccattgtgtttcaaggccagagtttcccatctggcttgaggcactgccctcctggactgcggcttcattttctgggcctgtggctctgcccattcctgcctttgtacacacagcttaggcctttaagtgcacatctctgcccttggagtcattcatacattttattgaagggtagcacaggtttgcacctaggtagctctatcagcctgtttcctgcttgtggaattttgcaagtccagtagctgccttcttcttctttttctttttttttttttaatcatgcctttgtgcctttcagtccaagatggcggtgtttctgcagatactacattctcaaaaaccttgtgtatctcctgtgtatgtcatgg

SEQ ID NO: 5788 - DNA, 668 bp, Homo sapiens
tttttcttatgctcctttctgggtcactagcaccttgttatatttgggttctgtggacacagttgtagtctaaaagtattgcgaatccctgtttgtattgcaatagatagatagatagatagatagatagatagatagatagatagatagagatacgtgaatctgattatatccaacaaacatattaaataatatactattttttcacctgccgataataaaaagtgtrttttctcaatggatattgtgggagtataataaataaagaagtaaaatgcctagcaaaaagtaaacatttataatatatctgtttctgcaaatctagttcttttcactctatttctttccttcccaattttatttattattgagaactgttataacactgttgtctataccactgtttttaacattttgattttttcttttattttataaattgaaataatttgacataaaatagttgcaaaaataacacaaaaactttctgtatgcccttcacccaaattctccaaatgtttacatcaaacatagttacagggtagtacaattagcaaaaccaggaaagtaattttgctatgtatcatagtattaattaatctataggccctattcagtttttactaattatcccaccaatgccttttttgttatgtaagtccaattca

SEQ ID NO: 5789 - DNA, 639 bp, Homo sapiens
tgaattggacttacataacaaaaaaggcattggtgggataattagtaaaaactgaatagggcctatagattaattaatactatgatacatagcaaaattactttcctggttttgctaattgtactaccctgtaactatgtttgatgtaaacatttggagaatttgggtgaagggcatacagaaagtttttgtgttatttttgcaactattttatgtcaaattatttcaatttataaaataaaagaaaaaatcaaaatgttaaaaacagtggtatagacaacagtgttataacagttctcaataataaataaaattgggaaggaaagaaatagagtgaaaagaactagatttgcagaaacagatatattataaatgtttactttttgctaggcattttacttctttatttattatactcccacaatatccattgagaaaayacactttttattatcggcaggtgaaaaaatagtatattatttaatatgtttgttggatataatcagattcacgtatctctatctatctatctatctatctatctatctatctatctatctatctattgcaatacaaacagggattcgcaatacttttagactacaactgtgtccacagaacccaaatataacaaggtgc

SEQ ID NO: 5790 - DNA, 641 bp, Homo sapiens
tgagaacattccgctgtatgtcttggaaccttctaaccctaggaatttgcaaacccctcccagtccctcatctgggggctcagagactggaggtgccttttttatttttttcttcttcaytttatgaacacagaaaaatcgtttgtccctctccgggccctgcacccgccagcgtcgtgtgcaggcgtccccgggctgtggataattagacacgttcttccctcattgcccaaggctcgttagaattcgccctagagctgtatcatgtattttctttcaaattaactttgcttgcaattaagcttagggaaccagcaacaaaagcaaacttggcccgaggtcgttcaccgcgaaaatggattagagaaacttcttccccgatttaaggggaaagattcctgcggccagcgctttggggaaagtgccccgaccgcagaggcgacgacaggggagcaggaagctgctcacggtagtcggcgttggcggcagcggtggccttcctcatctgggcgatgtgggctcctagaagagtaaggataacatcctggaaatgacttctgtacggtttgagcccaactgcacactcatgacttggagctgccctgtggagttacagtttaccaaacacattcatgaacata

SEQ ID NO: 5791 - DNA, 777 bp, Homo sapiens
cattgaaagatacttgtattttccctttaatagttttagttctcagggtttgttactgtgattgtactctatgagcatttcattycatatttgaaaacttttgctagatagagtggaaatcttcttacccatttcttcattacctgaaaaggaaacagtaagaagccattagtaatgtttctatcggcaatgaagatcagaccctgctcccgtgggttgggactcttccctcaactcttaggaaacaatggatcttccaattccctcagctgcatagaaaaagctgttatgggccttacatcttatctgatgactatttacaaaaatggctcctaaggacactacaaattaggcagcatggcggaatctaggctggcataatgggtgtctttattttatttttgagacagtctcgatgtgtcacccaggctagagtgcagtggtgtgatctcggctcactacaacctctgcctcccaggttcaagcgattctcctgcctcagcttctagagtagctaggactacaggcgtacaccaccatgtgtggctgattttggtatttttagtagagacggggtttcgccatgttggccaggctggtctcgaactcctggcctcaagtgatctgcccacctcggcctcccaaagtgctgggattacaggtgtgagccatggtgtccagccatggttgccattaaatacaacattggttcactcagtttgaaagagctgattgaatagaggggcttccaatgttggaacactcctgactctaccg

SEQ ID NO: 5792 - DNA, 777 bp, Homo sapiens
cattgaaagatacttgtattttccctttaatagttttagttctcagggtttgttactgtgattgtactctatgagcatttcattccayatttgaaaacttttgctagatagagtggaaatcttcttacccatttcttcattacctgaaaaggaaacagtaagaagccattagtaatgtttctatcggcaatgaagatcagaccctgctcccgtgggttgggactcttccctcaactcttaggaaacaatggatcttccaattccctcagctgcatagaaaaagctgttatgggccttacatcttatctgatgactatttacaaaaatggctcctaaggacactacaaattaggcagcatggcggaatctaggctggcataatgggtgtctttattttatttttgagacagtctcgatgtgtcacccaggctagagtgcagtggtgtgatctcggctcactacaacctctgcctcccaggttcaagcgattctcctgcctcagcttctagagtagctaggactacaggcgtacaccaccatgtgtggctgattttggtatttttagtagagacggggtttcgccatgttggccaggctggtctcgaactcctggcctcaagtgatctgcccacctcggcctcccaaagtgctgggattacaggtgtgagccatggtgtccagccatggttgccattaaatacaacattggttcactcagtttgaaagagctgattgaatagaggggcttccaatgttggaacactcctgactctaccg

SEQ ID NO: 5793 - DNA, 1524 bp, Homo sapiens
gaggcggccgaactgctgaaaaccacattgtttaggtgacccaggcttttactgagagaagaaagccatcgaacccagatagctttgacaggaattgcaggctttggtctctaaacaaagagggttcttggagcgcattgcttgcagctctttcctctatctgcaagctagaaaatccttcttcttcttcttcttttttatttttattttttgagacggagtttcgctcttgttgcccaggctggggtgcaatggcatgatctcggctcgtcgcaacctctgcctcccgggttcaagcaattctcctgcctcagcttcccgagtagctgggattacaggtatgcgccaccatgcctggctaattttgtatttttagtagagacagggtttctccatgttggtcaggctggtctcgaactcctgacctcaggtgatctgcccacctcagcctcccaaagtgctgggattgcaggcatgagcyactgcacccggcctagaaaatccttataattgaattcaggaagagttcccctttccattataaaggctaccctccactgtcacctgtccacctctgggctggaaatcactcagctatttgtattttggaagaggaaggatcttgaatctctacaagatattaattacttcttaatcaagcaattattacctccatagcgacccacatcaaatcttccattccatttaggatcctcaggacagtctgggatctcagattctggcccacctggggaggtggagcccaactcattattcttagcggctgccccactgcattcgtcggtcaacaagtatctctctaataaaggccttgcagaatgccagcctctcacatctgttcaggaccttacaattgacaaattgtttcattctcacaacagccttgtgcagttacagaatgagaagaaacatttattgatgcagaataggatgctcctcttctgtgccaggcaaggtaccacttactgtgatactgagatagataagggccctaacctcctagagttcacagtctggggttgaagtcggaaaggagtgtgttacatagatacaaaaagcgcttcttggtagcacagctgaatgccataataaaggtgcagtgtgtcctaagctgttccccaaaggaatagagctgctaatggttggcaatggagtagctgggaagggaagcaggtttgaaggtcagcaatgcatcccctagtagttaagggctgccccctacctcaagaggggaatgagtcctccttctctgaggtttgtaattagctctgccttcctccctgcctcagcctcagaggtcataaaggtgcaggtagtatatctccttcccccaaaatcaaggtattcctatggtggtgttcagcccagagttttgggagtcaaggcacagagaaaaataaaactcaaaagtgttacaaatttccagcaggtaaggctttgcactgagtgatggtgcacttcctataatgaccagcaggggccaccaacagctattcccagttt

SEQ ID NO: 5794 - DNA, 778 bp, Homo sapiens
tcctttaataaaaaatccttttttcttttcttttttttttgagatggagtcccactgtgttgcccaggctggagtgcagtggcacagtcttggctcactgcaaactctatctcccaggttcaagtgatcctcctgcctcagcctcccaagtagctggattacagacgagagccaccacacccagctaattttggtactttagtagagacaagagtttcatcatgttggccaggctggtcttgaactcctgaactcaactgatccgacccttcagcctcccaaagcactgggattacagatgtgagccaccacatccagccaaaaaaaaagacatcctttgttcttttgcaagacttactttagctagatgtttaacamgtacatctaaatgctgcttgactaggaatgagaatagatacggaattgctctgtgattccacatcaagattcatgacctaggcagaaaagaattcattaaactgtacatttttaggtctctctgaagatcatgtattgacactcagagacctcaaaatgatccctccccgagtctagttttgatattttcagcagtatccctaccctctcgacgcttggtatttgtgatggttgattctatgtgtcaagttgactgggccatggggtgcccagattaaacattgtctttgagtgtgtctgtgagggtggttttggataaggttgcatttgaaatgttgtacttagtaatgtaggttgccctctccattatgggtgattgtcatccaatcttctgaagcct

SEQ ID NO: 5795 - DNA, 778 bp, Homo sapiens
tcctttaataaaaaatccttttttcttttcttttttttttgagatggagtcccactgtgttgcccaggctggagtgcagtggcacagtcttggctcactgcaaactctatctcccaggttcaagtgatcctcctgcctcagcctcccaagtagctggattacagacgagagccaccacacccagctaattttggtactttagtagagacaagagtttcatcatgttggccaggctggtcttgaactcctgaactcaactgatccgacccttcagcctcccaaagcactgggattacagatgtgagccaccacatccagccaaaaaaaaagacatcctttgttcttttgcaagacttactttagctagatgtttaacacgtacatctaaatgctgcttgactaggaatgagaatagatacggaattrctctgtgattccacatcaagattcatgacctaggcagaaaagaattcattaaactgtacatttttaggtctctctgaagatcatgtattgacactcagagacctcaaaatgatccctccccgagtctagttttgatattttcagcagtatccctaccctctcgacgcttggtatttgtgatggttgattctatgtgtcaagttgactgggccatggggtgcccagattaaacattgtctttgagtgtgtctgtgagggtggttttggataaggttgcatttgaaatgttgtacttagtaatgtaggttgccctctccattatgggtgattgtcatccaatcttctgaagcct

SEQ ID NO: 5796 - DNA, 785 bp, Homo sapiens
ggcttgaaccccagaggtggaggttgtagtgagacaagatcgtgccactgcactccagcctgggtgccagagcgagactccatctcagcaacaacaacaaaaataaatcacttcattcacacacacacactattagctctgtatctctagagaacactgaataatgcaagtatctaaaaaaattttttttaaagtacttgtacaatgagtggggtttgtaaaataaacctatattgtgaagatcttaaaattacagatctaaaagaaaaaaaaaaaaacctttccaagttcctgcttcagtgagcagggaagattttattttacagatggaaaaatgccccataaagttcacattatggggcacattcctgtgcccaagagacagtctagagtgtgccagcacaatgcttacagaaatctgaaccccaatctgaattcaagattcaactttatatgcctttctcaacactccctaactctcttctcagaaaaacytgtgcggcccaagccattaaatcaagtaggtgctcaaaggtctctgtctgcttagtcagtatcaactgtgactcctcacgcatgggtcattttgaaggtcttatttatttgtcgccagaggaaaccttcggttgtagctggatggtgatttgtgtccagtgataaccactttgttcatggacacttgtagcctctctgcttcatttgatgtcagagacctctgcattttattatagtgctaaaagccaacttgctttttgttgtctcctatggcttcagtactgggttag

SEQ ID NO: 5797 - DNA, 785 bp, Homo sapiens
ggcttgaaccccagaggtggaggttgtagtgagacaagatcgtgccactgcactccagcctgggtgccagagcgagactccatctcagcaacaacaacaaaaataaatcacttcattcacacacacacactattagctctgtatctctagagaacactgaataatgcaagtatctaaaaaaattttttttaaagtacttgtacaatgagtggggtttgtaaaataaacctatattgtgaagatcttaaaattacagatctaaaagaaaaaaaaaaaaacctttccaagttcctgcttcagtgagcagggaagattttattttacagatggaaaaatgccccataaagttcacattatggggcacattcctgtgcccaagagacagtctagagtgtgccagcacaatgcttacagaaatctgaaccccaatctgaattcaagattcaactttatatgcctttctcaacactccctaactctcttctcagaaaaacttgtgcrgcccaagccattaaatcaagtaggtgctcaaaggtctctgtctgcttagtcagtatcaactgtgactcctcacgcatgggtcattttgaaggtcttatttatttgtcgccagaggaaaccttcggttgtagctggatggtgatttgtgtccagtgataaccactttgttcatggacacttgtagcctctctgcttcatttgatgtcagagacctctgcattttattatagtgctaaaagccaacttgctttttgttgtctcctatggcttcagtactgggttag

SEQ ID NO: 5798 - DNA, 658 bp, Homo sapiens
aaaacttccgggttaactttgggtggagtaaagaatgaaagtggaatatgattaagaaagggaagcaaatgctttctaaaattaaacttcaattcctaagaagtaggtgcaagattaaatcaccttgcgaaatagtatgagagtttcttccaactaaaattagagatcttgtggaaattaaaaatcggtttcatatttgttcagtcaagcattcaattgaataattaccaagtaatgaaaatattaaaatatattcacttttgaagtgaggatgttttgcataaatgatgtacaagtgtgaattcaaatatataataactatggtaaacatcaaaaccactagttgatgtctcaaagttgagagaggtattgtattgataaataaatgtgtaatatgatttactaattagcacatcaattaataacttagagctagaaatgtatttktttgaaagtttctttttagtgctgataccttatctgttagttcagttatcctgttattttagttacagtatcagcaaatgtttaagatacctttatgcttattactaactttatgataactttatgcttattactaactttaagataactttggccaggtgcagtggctcacgcctgtaataccagcactttgggaggctgaggcgggtgg

SEQ ID NO: 5799 - DNA, 394 bp, Homo sapiens
ccgggttgtctagagttctgatgactgggaaagaggaagatggcagggaaggaagaagggatgatattagaattgccacgcatagctgggcgcagtggctcatgcctgtaatcccagcactttgggaggccgaggtcrgcggatcatgaggtcaatagatcgagaccatctggccaacatggtgaaactccgtctttactaaaaatacaaaaattagctgggcgtgatggcgcatgcctgtagtcccagctacttgggaggctgaggcaggagaatcccttgaacctgggagtgagccgagatcacgccactgcactccagcctggcaatagagtgagactccatctcaaaaaaaaaaaaaaaaaaaagccatgcatatttttaaacatcttga

SEQ ID NO: 5800 - DNA, 597 bp, Homo sapiens
caatgttgctaattactagctgcctgatcttgagcaagttgcttctctgaggtcatttttctcacctctccctgggatctaattcacagcgtgttgtgaggattaaatgaatggacattcatytggcttttcaacatctattcatctcttcctccatttgaaagcagccatgtaatttggttagaaaagcctgcatcccaaactccagaaataggccatggttgatccaatcaattaggataacaccagccctgttgctacactgattggtcgagggatgagttacctaggctatgccaatcaacatgtgaatttctcctggttggttcagtttgctttggtcagagtaaagttcagaaatttctttgatggggctgggtgtggtgcctcatgcctgtaagtaactctggcactttaagagggcaaagtggggaatcacttgaggccaaaaatttgagaccagcctaggaaacaaagtaagaccttgtctctataaaaagtacaaaaaaaacctagccagcatgatggcatgcacctatagttccagctacttgggaggcttagctgggagtattgcttgagcccaggaggttaagg

SEQ ID NO: 5801 - DNA, 335 bp, Homo sapiens
tcagaagaatgactgtctctgtttcagaaaaagattsagggccagtgacattgatgcaaaaaaaatgatggaagcaccagctctgatctgaaccttgaaaaggagattccctggaggacggtgtatgccaattatttctgcctggcagaggagagcaagaaaggaggcaagtgccaggtggggtgagaaatttactgtagccagagttcacctacaggctgtctaattcctttaacctgggctggactgaagggctgagaagaacattctcattagggtatgaaatggatcatttccagtggccagatggttccccataaatacattaatgactt

SEQ ID NO: 5802 - DNA, 786 bp, Homo sapiens
tgtcgtctgctctgtcatcctcaacttctcttcatctgtgaacacactttctcccaattactgaagatgttaacacctgattcacaatattcgcctccaatttaaccctgaccatcatccctgctaatgtcagcatcacaagaatgacactcagtcaatattctgacatcttagttttttgaccttctctcaattcaaaagactttagtggcaagcctttcccatagtcctatcctagaacttgtcataaattaaaactacatctcttctgaattcagcaactcaaatatcccaagtactttctgatgcccatagattatccttcaagcttggtttttcagccattcctactatctctgcctgctggtctcaccagaccaatgtagsgggaggagggaaggtggtaaaaagaaaagaaagttttatctgaggaatgtgagctcctttaaatttaaattttaaaaaggtgaattctggccaggtgcagtggctcacatctgtaatcctagcactttgggaggctgaggcaggaaaatcacctaaggtcggcagttcgagaccagcctggccaacatggtgaaaccctatctctactgcaaatacagaattagccaggcatggtggcacatgcctgtaatcccagctactcgggagaatgaggcaggagaatcgcttgaacccaggaggcggaggttgtggtgaggtgagatcacgccattgcactccagcctgggcaatgagcgaaactccatctcaataaataaatgaatttatgaatgaatgaat

SEQ ID NO: 5803 - DNA, 773 bp, Homo sapiens
ccggcttccaggagaatggcatcccagtcagcctgccaggaggagctggctgtggagtgtctcccaagtagccggagggacagacctagtagatggcgctatttagtgctgaccacttgcacacgctgagtggaggccaagtgcaatttccattttagtgcacttgctgctaagctgttctttctggctctaattagccagcatgttcagctgcttcttaagggcatttgttgctaataaaaataaaaaccagaccactggcccagatgatggtggtactcttcctatttgccacagcaggaagacacggaccaaccagctggtagcagcacaggctgcttcagccaaggtcacgggcttccttcacacagtggaaatcagaacaggcaggaggcaaccatggtacccactctagattctgcatgccacaatacccacactccaggctctgaaggaaagacagctgggaacgtcggccagcttcaggagagccagaggctaatatgggtgactgacgttctctgtccccttctgagtgaaattaagcagctggacacctacagagccatcttgtgtgtgccaggcactgtgctggtgtcacagcacagaggaccaacacagggaccccacctgccctgaaggggttcccagtcttgccaggagatggacacaagccaggagttacgtcgcaggtgcgcaaagggaagcatgtagaacagcaagggagccctgaggagggaaaagccatttytgcctgggcgtaatgggacttg

SEQ ID NO: 5804 - DNA, 777 bp, Homo sapiens
ggagagatgaatttcacctcatttgctgagtacgtactaagtgcagggaatgaggagcacgaagacaaaggagacacagtcctgaagcccgaggcgacagcgcctgatgggggctgtccttagggtggatgcgaaccagaattcagatgacacgagctctcccctgtcccattctctccgtccagatcactgtcaagtcctgttttacgtacaggcagcatggccacgccatcctcaggaaactcttctgtactctcagaagttatctgaatcagtaacaccctggccttccccgttcggtcagagccgttgaatggaagctaagatggccgtctgcacacacgctggtttctatcctgccccatctctgggaggaaagaggcccgagtgggagttgcagaggccccccgcaggggaagaagggcctggactccggcctcagagatgcccctgcaagggggagaagggcctggactctggcctcactccgaggtggtgcccaggactggaaggtgtaaccttagaagccyaagacccggaataacatactgcctctgggccttccctcggtgaactggtttgcgtggtgcagaactcaaataatggttcttcagattcacagagtggcttcctccacgtccacacagaccaacgcccaagtgtggcctctccctgaagccccgctgtagtgcaggacagcacactctgcttccgaaggctcctctgcggatgcctgacactcgtcatgagcaccggctctggagtcagacagcacag

SEQ ID NO: 5805 - DNA, 782 bp, Homo sapiens
agttccctttggtgctcatttcaagattctagacttctgagtcctgctaaggctcttgcctgcctctcatcaactcagtccttccacagcccaccccccaaccccaggttagatgctagtgaggtccctcattaatctagttgacaggcctggaacctgcttctgtttgtcaattccttcctcccagcatgctggtccagagcccagcagctggggccatcggtgtcaggattcctcccttggcagtccctgtcacccaggcagatcatctaagcctcaggctagcttccttcctgggctctggcatgggttggtttccagcccttatcaagaaaagagggaacagagggcagtggcatgccagtcctactgtaaggactgcagcttcccttatctcccttcatcttgccatcctcttgaggcagatggggccaggaaccccactttaagaaaaaggggcgrgggcagaccccacccagaggtgccgactccagagcttgagctccttcctcagccttgtgctgcctccttagatctcctctgggaaagcagggcacagttctttggccaggagtcctgccttaactcaattcatcaaatatttattaatagaccagaagctttgcttggcatggtgttaggggacagcaagggaccacagaacctatggggtgattcccttccagcccctggggtgggcctcggtccctcccccagggcagtgtcaggccatcgtcagacacccatgggcctctgacagccactttcccaattgtcctttt

SEQ ID NO: 5806 - DNA, 855 bp, Homo sapiens
gcagagctgaactcctggctcccagacccagtgaggggctgatgtgcactcttctcctgtaaggcctggcaggagacaggaatcctattcagctcagagctcaataagaacggaagttcagtggaagatggccccagctcatcgcaccatctttgagtcttagagcatctatgtctgtacctttccatattctttccaaaatatggagccaaagatgggtaactaggatgcagtggacatttttgtggattattctacagggttctaagagccttgttggccccagtgctgcttctactttctgggcgtgaaagcctgaaaaagcacagtggttccctggcctccctcccctcccagggtccctggtggctcrgaggcctctctaaggaggaagggactcaagaagtgggaccactgccaactgcctggccctgctgggagccttcccttttctcggtgattcttcctcttccaggaggccatttgcccagagacagagagcaggagcagctggccaagcgaggcactgcatatgcacagaaggaagctgtcctcaatccacaagagccctgccagctgctccccgtgacgactttcctgaaggtggggtggcttaagcctggggcagtttacagagtatgggacaagggggaggttctgcatcaacaggggccagggcagtaggtgctccaatcatctccagagataacttatctcccatctctgggttttctgccacctgagaagtgacgtcttggtcactggcctttgcctccattcccctagatgctgggtgggtctgctgggagcacttccctctggcatttggccttgggcagaaagagagagaaggag

SEQ ID NO: 5807 - DNA, 619 bp, Homo sapiens
gcatatctcctcccctgactccttaacttgaagggagaaacccaacaccctggcttggaaagcagtcccagccatatggaattccaccagactactcacmtttgagaagacgacaccagaattgctgccaatttcactgagaacaaacaaacaagaacaaactcagagtttcctcttgggaattttttggccaatcttccccttctcctgggagctcgtcttccacgttccttcactgaggcaccacaagggcccacccagctctcacacctcacctcctgcttccccttgaactgtacattccagccatgtgcacagcacactgcttgtaattccctgcaccctcatctaactagtcttaaaagatgagcatgagacttagtggtctgacgtggcagtggggcctgcctgagatcaaatcaaactacctgtggccgagacataaaaaacaaacaaacaaaacaaaacaaaaagcacaaaacctggcaggtaaaacaatcataggcaaaataatatgtttggttgggatatgtgcacattaattcaactggatacagtagtagaatggaagcctgctagttcatgacagcctcccttcatttgaacaacccctatgcat

SEQ ID NO: 5808 - DNA, 619 bp, Homo sapiens
gcatatctcctcccctgactccttaacttgaagggagaaacccaacaccctggcttggaaagcagtcccagccatatggaattccaccagactactcacctttgagaagacgacaccagaattgctgccaatttcactgagaacaaacaaacaagaamaaactcagagtttcctcttgggaattttttggccaatcttccccttctcctgggagctcgtcttccacgttccttcactgaggcaccacaagggcccacccagctctcacacctcacctcctgcttccccttgaactgtacattccagccatgtgcacagcacactgcttgtaattccctgcaccctcatctaactagtcttaaaagatgagcatgagacttagtggtctgacgtggcagtggggcctgcctgagatcaaatcaaactacctgtggccgagacataaaaaacaaacaaacaaaacaaaacaaaaagcacaaaacctggcaggtaaaacaatcataggcaaaataatatgtttggttgggatatgtgcacattaattcaactggatacagtagtagaatggaagcctgctagttcatgacagcctcccttcatttgaacaacccctatgcat

SEQ ID NO: 5809 - DNA, 619 bp, Homo sapiens
gcatatctcctcccctgactccttaacttgaagggagaaacccaacaccctggcttggaaagcagtcccagccatatggaattccaccagactactcacctttgagaagacgacaccagaattgctgccaatttcactgagaacaaacaaacaagaacaaactcagagtttcctcttgggaattttttggccaatcttccccttctcctgggagctcgtcttccaygttccttcactgaggcaccacaagggcccacccagctctcacacctcacctcctgcttccccttgaactgtacattccagccatgtgcacagcacactgcttgtaattccctgcaccctcatctaactagtcttaaaagatgagcatgagacttagtggtctgacgtggcagtggggcctgcctgagatcaaatcaaactacctgtggccgagacataaaaaacaaacaaacaaaacaaaacaaaaagcacaaaacctggcaggtaaaacaatcataggcaaaataatatgtttggttgggatatgtgcacattaattcaactggatacagtagtagaatggaagcctgctagttcatgacagcctcccttcatttgaacaacccctatgcat

SEQ ID NO: 5810 - DNA, 619 bp, Homo sapiens
gcatatctcctcccctgactccttaacttgaagggagaaacccaacaccctggcttggaaagcagtcccagccatatggaattccaccagactactcacctttgagaagacgacaccagaattgctgccaatttcactgagaacaaacaaacaagaacaaactcagagtttcctcttgggaattttttggccaatcttccccttctcctgggagctcgtcttccacgttccttcactgaggcaccacaagggcccacccagctctcacacctcacctcctrcttccccttgaactgtacattccagccatgtgcacagcacactgcttgtaattccctgcaccctcatctaactagtcttaaaagatgagcatgagacttagtggtctgacgtggcagtggggcctgcctgagatcaaatcaaactacctgtggccgagacataaaaaacaaacaaacaaaacaaaacaaaaagcacaaaacctggcaggtaaaacaatcataggcaaaataatatgtttggttgggatatgtgcacattaattcaactggatacagtagtagaatggaagcctgctagttcatgacagcctcccttcatttgaacaacccctatgcat

SEQ ID NO: 5811 - DNA, 1664 bp, Homo sapiens
actcacttctttctccttgagaaacctatcaggctggctcagaggagtgtttctctggaagaactcagggggcagtctcctctggtcatcatggtactgtgggtagaggacagaagaacagcaagggaggtgatgacccagggctgtggccaggcctgaggccctcaaagctctgagccaggactaaggtggcctctgctctgccaaatccaataggccccagtggaggatgaaacaagtggggaggaaaggaaaaaccagaatatgtgtgtggagggctgcacctttgctggaacctatcaggggctacataaacacgtgtcatttgatttgacttaccttaaaaacaacaccagcactaaatgatgtgaggaatgtccctgtgccttccattttatggctgagggctctgaggcttagaygggttaggtcatctgcccagagtcatcagctgggtacagtcccagcccgatgggaattaaggacagctgagttccaatgctcctgttctttacccttcctgatgctgcctccatgtatgtgatatggcatgacttatggacacagatacagatggaccacgaccacctccccacctacaccacacagctacacacagataagctggacattccgcatcatctcagggaaaacacccttgtaaaggacaaagagaactgggcaagagctcagaagaccaaaatcagggctctggttccgacatttcttgggtatctgctttatctgattcatattctctctctctctctctctctctctctctctcgcctctgtgtatctccatctctccctatttgtctctctgcttactctccccttgttctcactcagggctatagagggagaggagacccataccaggatcctctctccagtttatacacaactgctaacaaagacatcacccatccaaataaacagatatttagcaaattcctcaatgtttgggaaataaaatacatatcctgatgaggtaggcattttttttataagacaatgagaactagggaatcatccaattgccctctttgccatgggctactaggaatctcagagctaaattgcataatgagccacggtagctgtcctgggtttagttttcctggtagaagcaactgcctacctagctctcatccctttgttatttttcaatggctttgaaattttgtagctgatttgcaggtttcctctgtttacagttttttattgtaggttgacccaaattctatttagaagtaggcatgacataaataactttttctttttaaattaataggcaaatttgagagtgttcagtattcctgtgagagaaacaacaaacaaagaccctgcgtaaaatggtttctctacaataatccttttacttgattcaatccaacctgagaaaattaagcattttactcctgttttctttgggaaataaaataatagctgcctccctcagaagctgggattccttgggccttcctacctgacccctcctggcggccacagcagctgaagcacggaggtgttcttgtccctctgctcatgctcctgccacatgtccccaagcctttgtcctttctccctagggaggtgggctgcatggtctttgatgtcccatatgttttaaatctattttattttgggtttcataaccc

SEQ ID NO: 5812 - DNA, 669 bp, Homo sapiens
ttgtagttcattgaaatgaataaaccatgcaacttttaagctgcagaatcttgccaatgtgatcagaagaatttgttgttgttgttttttgagacagggtcttgctctgttgcctaggctggagtgtagtggtgtgatcacggctcactgcagcctcgatctcccatgcttaagagagcctctcacttcagcctctcgagtagctgggactataggcacgcaccaccattcctggctaatgtttattttttgtagagaggaggtaccactacrttgcccaggctggtcttgaactcctggactcaagcaatcctcctgcctcagccttccaaagtgctgggattcaggcatgagcatgcctagctgatcagacaaatttgtattctgatttgtggcaaggtgtggagggctctgtgggctccacagatctaatgatccaacatagtgcatttttgtgctttcatcaactactgaagaatgaccctgtggaaatgtgaaacattgcctcagtcatgggtattttatactggtcacgtgcaaggagttttgaattaaaatgtatttgctgcaattcagaaagcgtaacattcaaaagtttttcctgcaaattgtctcacagccttaaggaacagctttatattttacagaaagcattttctttgtgaccct

SEQ ID NO: 5813 - DNA, 579 bp, Homo sapiens
taagctctagggacatgagaacagaagacaagagagtttatgtgtcaagagggctagaacaagtcatgggaagtgagcrgctaaggctggttctctggctgggacaatcgaggggccatctaagagcactgagtgccaatggcacactaggaactggcactggcagatttctttcttcttaactccttatatgtcagctttactacccgtaatgcatatactcaagtgtggtatctaaacagtatgattaccttggacctggcaaactacaacaccaaggaggctgggataatacctctttttaagattatcagtcacatctgaagccacaggcatgagcattgattcaaagccttaaatgggatcaaattttccaaactagatgggagcctagttcattctgtagaaagcaaagttgcttttaggatatatcctaagtggtggtcactctttccttccaacagacagattaaagagtgtcctgtgacaagaacacagaactcttgagtgttctgtgatatggctgtttaaggagactgagaaaattttatatgtaagaaatagggccaggcgcagtgg

SEQ ID NO: 5814 - DNA, 579 bp, Homo sapiens
taagctctagggacatgagaacagaagacaagagagtttatgtgtcaagagggctagaacaagtcatgggaagtgagcagctaaggctggttctctggctgggacaatcgaggggccatctaagagcactgagtgccaatggcacactaggaactggcactggcagatttctttcttcttaactycttatatgtcagctttactacccgtaatgcatatactcaagtgtggtatctaaacagtatgattaccttggacctggcaaactacaacaccaaggaggctgggataatacctctttttaagattatcagtcacatctgaagccacaggcatgagcattgattcaaagccttaaatgggatcaaattttccaaactagatgggagcctagttcattctgtagaaagcaaagttgcttttaggatatatcctaagtggtggtcactctttccttccaacagacagattaaagagtgtcctgtgacaagaacacagaactcttgagtgttctgtgatatggctgtttaaggagactgagaaaattttatatgtaagaaatagggccaggcgcagtgg

SEQ ID NO: 5815 - DNA, 772 bp, Homo sapiens
acctctagacctattgccatgtggagtaataaacaactattattcaaccattggaaagtgaattatctatctatgcaaccataatcatcttaaccaatatgacaaaattctaaatggagtgggatagagacaggaatgtgtggaaagctcaaaggatgaggcaaatgaatatccaaggagaaaaggaaaatgacatttccctgggaacaggttcaaatcctgccctgcctctattaggaatttgaggaattctcagagatgatgcaaaaaaaaawgtgtgattgaatgtcagagatcatgggagggatggaactggtggattcatagtagaggaaaaacccagtaatgaagagaaaactgcattgaaccacattcaatgctcttcattaagagcactgaagaggaaactggtttgaaccactgtgtatcaggatggagagagaaaaggccaccacttctgtcctttttgggctcagtcaagggaaggaaaggttggaagaactgctctggatagggctcagagctgaaaactacaaccaaaatcttgacagttgtttatcttactcctttactgactactttaaaattgattggcctgagaaagttgggactacttctgcctttggagtagagtgttatctggtggtattttatcatccagagttagggccccttatcctccaaaaaattagctagtaattccattcaattgttaattcactatcctcatcttttaaaacatgaaatctgtattaagacattaaaataatcc

SEQ ID NO: 5816 - DNA, 772 bp, Homo sapiens
acctctagacctattgccatgtggagtaataaacaactattattcaaccattggaaagtgaattatctatctatgcaaccataatcatcttaaccaatatgacaaaattctaaatggagtgggatagagacaggaatgtgtggaaagctcaaaggatgaggcaaatgaatatccaaggagaaaaggaaaatgacatttccctgggaacaggttcaaatcctgccctgcctctattaggaatttgaggaattctcagagatgatgcaaaaaaaaatrtgtgattgaatgtcagagatcatgggagggatggaactggtggattcatagtagaggaaaaacccagtaatgaagagaaaactgcattgaaccacattcaatgctcttcattaagagcactgaagaggaaactggtttgaaccactgtgtatcaggatggagagagaaaaggccaccacttctgtcctttttgggctcagtcaagggaaggaaaggttggaagaactgctctggatagggctcagagctgaaaactacaaccaaaatcttgacagttgtttatcttactcctttactgactactttaaaattgattggcctgagaaagttgggactacttctgcctttggagtagagtgttatctggtggtattttatcatccagagttagggccccttatcctccaaaaaattagctagtaattccattcaattgttaattcactatcctcatcttttaaaacatgaaatctgtattaagacattaaaataatcc

SEQ ID NO: 5817 - DNA, 751 bp, Homo sapiens
atctraaatgagctactactaggccaagtgggatggctgacacctgtagtcccagctctcaggaggctgatgtgggaggatcacttgagtccaggaggtagaggctgcaatgagccatgatcaccccactacactccagcctgggcaacagaccctgtctcaaaggggagaaaaaaaaaaaaaaaaaaaaaaaggagctactactactcaattcaattctgactgactgatgctctgtgggaattcaagcgcaaggtgaccaatcttatgttttgcaagtgatgtcggaaactgggattttatgtaaaatctctatttcaattatgtaggaaaacaaaacaaaaagagaactataactgcaagtcaggtttgacctatgaaatggtagtttaggacttctgacctagatcatctgtgtggtcaattgccaaataatgacattttaaaatcacagcgtccataaagtctttttaccatagaagagactatgatgcgtgccacattaatgtgagcagtatacatgtttgtgtatagtgcatatacacaggaaactaaaaaaatcattcatccatccatcttgtttcttctctgaattgaaacctttttgatagattcatttcttctttacttggtgaggtaattataaagagctgcactatttgcgttagattttcctagagaagaaaccctgctgtaaaatttttaaaaacacatagaagttgtatgaccatgaacaacattatttaaccta

SEQ ID NO: 5818 - DNA, 629 bp, Homo sapiens
catctgtgatgctttccttcatctttgggccagtccagattgggatcagacccacacttaccctccacacaygtgcatatgacacgtgcatacaacacacacatgcacacagcacaccatatgcacacagcaccacatatatgcacacagcacacacacacatgcacaaaccgcccacacatgaatacagcacacacatgcatatagcacacacatgcacagcacaccacatgcatacgctacacacacatgcacacaacacacacatgcacacagcacatgcatgcacacagcataaaacatacaccacacacatgcacacagcacacaggcacacagcataaaacatacaccacacacatgcatacaccacacacatgcacacagcacataggcacacagtaccacacatacagcacacccacatgcacacagcacacacatgcacagcaccacacacatgcatagagcacaagaatgcacatggcaccacacacataggcagagcacacatgcacacaacacatacatacaccacgcacatgcacacaacatacatacatgcacgcagcaccaacatgcacacagcacacatgcgcatagcagacaacacacacatgcatatacca

SEQ ID NO: 5819 - DNA, 629 bp, Homo sapiens
catctgtgatgctttccttcatctttgggccagtccagattgggatcagacccacacttaccctccacacacgtgcataygacacgtgcatacaacacacacatgcacacagcacaccatatgcacacagcaccacatatatgcacacagcacacacacacatgcacaaaccgcccacacatgaatacagcacacacatgcatatagcacacacatgcacagcacaccacatgcatacgctacacacacatgcacacaacacacacatgcacacagcacatgcatgcacacagcataaaacatacaccacacacatgcacacagcacacaggcacacagcataaaacatacaccacacacatgcatacaccacacacatgcacacagcacataggcacacagtaccacacatacagcacacccacatgcacacagcacacacatgcacagcaccacacacatgcatagagcacaagaatgcacatggcaccacacacataggcagagcacacatgcacacaacacatacatacaccacgcacatgcacacaacatacatacatgcacgcagcaccaacatgcacacagcacacatgcgcatagcagacaacacacacatgcatatacca

SEQ ID NO: 5820 - DNA, 629 bp, Homo sapiens
catctgtgatgctttccttcatctttgggccagtccagattgggatcagacccacacttaccctccacacacgtgcatatgacacgtgcatacaacacacacatgcacacagcacaccatatgcacacagcaccacatatatgcacacagcacacacacacaygcacaaaccgcccacacatgaatacagcacacacatgcatatagcacacacatgcacagcacaccacatgcatacgctacacacacatgcacacaacacacacatgcacacagcacatgcatgcacacagcataaaacatacaccacacacatgcacacagcacacaggcacacagcataaaacatacaccacacacatgcatacaccacacacatgcacacagcacataggcacacagtaccacacatacagcacacccacatgcacacagcacacacatgcacagcaccacacacatgcatagagcacaagaatgcacatggcaccacacacataggcagagcacacatgcacacaacacatacatacaccacgcacatgcacacaacatacatacatgcacgcagcaccaacatgcacacagcacacatgcgcatagcagacaacacacacatgcatatacca

SEQ ID NO: 5821 - DNA, 797 bp, Homo sapiens
acgcctacatccagcaccaggtcagtgagccctctggtccctgccccagatcctgtcagaccagaggagggggctgagccagcttcattgtctgcccagggccctgcacccgtgaaaccatccaactccctgctccctcctccagcctgtccagtctcttcccagagttccctcagggctggagacaggcaggcctgactgcgggcctggaaagcagcacactccgggcactcctgctgtctgggcccagccttagagcccaactccacggcactaacagaaacacaaagacttccrttcttagaaaacagtggttcgaaagtctgctaactgattgggatttggtaactgaatgggaagtgaagatccccagactctccgcccacctgctaaggatggcagtgagactggaatgggagattaggatctctgccctgagaaaccaggggacagccccacggtttcaaaaactcggccacctcagcccccgagggagcgcctgggcaggcacctgtccaaggagtacactccttctcctcccacgggtgctcagagtgcctggaagtcgtgggtgaggaggagggcgtgccctattcctggggagtcctggccctccactgcatcctggtggatctgagccaccatgagggctgcaggtggcccagatggagcgtggctctgcaggccccgggtgtccagggtgatgcctggggtgggccttgggctcagggccctggggcaggtggccgtatggctgtaagaaatttccacagatagtacgtgacctccctttccat

SEQ ID NO: 5822 - DNA, 670 bp, Homo sapiens
taccgctcatgggtccagaggacagggctgtgttcaggagtgcccatctgaggagttcaaaaaagagcaggccggcccctttatacatggagtagaatctgctgggaaggcagagaacagccagccagaaactggaggctctcccagaggttggccgtccctggcacagcctgcactgcccctccagggtctctgcctgcagacacctcccactgctcccagcatcactggctccaggtctgcctgctaaagccaccagcccagcgactgtctgagggccacgtactgcgggagggtccccttaggttcccccttgggtctggcatcgtcctggccccacaacagcggccccagcacacagagaaggcatggcygtgtaggacggcccaatcgatttcaggtctaatctcaagcacgatgattccttctgaactaatggcacgcagttgcctgggagagcagattttcaggaacaagaaatcaataaaaaccctcagcagtgtgtgttgggcatgggagaccttatgtttagtctaatgtttatttcattcattccaaaagcagccattcagcatctcaggcatgcagttagcacacccagtcatggctctgaattctgtagtctggagagaataggtaacaatttggaacactcagtgaccaagggcag

SEQ ID NO: 5823 - DNA, 670 bp, Homo sapiens
taccgctcatgggtccagaggacagggctgtgttcaggagtgcccatctgaggagttcaaaaaagagcaggccggcccctttatacatggagtagaatctgctgggaaggcagagaacagccagccagaaactggaggctctcccagaggttggccgtccctggcacagcctgcactgcccctccagggtctctgcctgcagacacctcccactgctcccagcatcactggctccaggtctgcctgctaaagccaccagcccagcgactgtctgagggccacgtactgcgggagggtccccttaggttcccccttgggtctggcatcgtcctggccccacaacagcggccccagcacacagagaaggcatggccgtgtaggacggcccaatcgatttcaggtctaatctcaagcacgatgattccttctgaactaatggcacgcagttgcctgggagagcagattttcaggaacaagaaatcaataaaaaccctcagcagtgtgtgttgggcatgggagaccttatgtttagtctaatgtttatttcattcattccaaaagcagccattcagcatctcaggcatgcagttagcacacccagtcatggctctgaattctgtagtctggagagaataggtaacaatttgraacactcagtgaccaagggcag

SEQ ID NO: 5824 - DNA, 819 bp, Homo sapiens
gacccccactttttaccctatacaaaaatcaactcaaaatagatccaaggcctaaatgtaatacctgaaataataaatctgctacaagaaaatatagtagaaatgcttcaggacattggtctgggaaaatattctgtaaataagacctcagttatttcctcactgcattttccttttctctcatcttttaaatactaatttactcacaacatttactttatcctttactttaacttctctmttgtcttagtttatccagtgatttcattaagtggaagtgagcagaagtacatcttaacctcaaacagaaacagtatagtcttcttgccttttagctacatcttgtagagaaggccaaaataatgttacacatatcaacatttgatattacgaaactttaaaatggcagatttaatactgatagaaaatatgttttgtaatttttttctacgttgcaaaaatggaaaaaaactacttatattttatttttaaagttatctaatggtaatcttatgtctataatgcacaggaattctaggtctgatgactcgtatatgaaaaatttattgtttaatttttaaaatggtctactatcttatttgttctgctttataatatttgcgagttgcttttgaactactttttgaaatttcagttttttctctattgatatacagagaataatctaatattattacttgactgttttttgaaaatgaagacatacaggctctttgagtgctgatccaaattcaatggcatgcaagtaatcagaaaaatcagtgtatatggtcatttatataatctcacagttgagaa

SEQ ID NO: 5825 - DNA, 819 bp, Homo sapiens
gacccccactttttaccctatacaaaaatcaactcaaaatagatccaaggcctaaatgtaatacctgaaataataaatctgctacaagaaaatatagtagaaatgcttcaggacattggtctgggaaaatattctgtaaataagacctcagttatttcctcactgcattttccttttctctcatcttttaaatactaatttactcacaacatttactttatcctttactttaacttctctcttgtcttagtttatccagtgatttcattaagtggaagtgagcagaagtacatcttaacctcaaacagaaacagtatagtcttcttgccttttagctacatcttgtagagaaggccaaaataatgttacacatatcaacatttgatattackaaactttaaaatggcagatttaatactgatagaaaatatgttttgtaatttttttctacgttgcaaaaatggaaaaaaactacttatattttatttttaaagttatctaatggtaatcttatgtctataatgcacaggaattctaggtctgatgactcgtatatgaaaaatttattgtttaatttttaaaatggtctactatcttatttgttctgctttataatatttgcgagttgcttttgaactactttttgaaatttcagttttttctctattgatatacagagaataatctaatattattacttgactgttttttgaaaatgaagacatacaggctctttgagtgctgatccaaattcaatggcatgcaagtaatcagaaaaatcagtgtatatggtcatttatataatctcacagttgagaa

SEQ ID NO: 5826 - DNA, 819 bp, Homo sapiens
gacccccactttttaccctatacaaaaatcaactcaaaatagatccaaggcctaaatgtaatacctgaaataataaatctgctacaagaaaatatagtagaaatgcttcaggacattggtctgggaaaatattctgtaaataagacctcagttatttcctcactgcattttccttttctctcatcttttaaatactaatttactcacaacatttactttatcctttactttaacttctctcttgtcttagtttatccagtgatttcattaagtggaagtgagcagaagtacatcttaacctcaaacagaaacagtatagtcttcttgccttttagctacatcttgtagagaaggccaaaataatgttacacatatcaacatttgatattacgaaactttaaaatggcagatttaatactgatagaaaatatgttttgtaatttttttctacrttgcaaaaatggaaaaaaactacttatattttatttttaaagttatctaatggtaatcttatgtctataatgcacaggaattctaggtctgatgactcgtatatgaaaaatttattgtttaatttttaaaatggtctactatcttatttgttctgctttataatatttgcgagttgcttttgaactactttttgaaatttcagttttttctctattgatatacagagaataatctaatattattacttgactgttttttgaaaatgaagacatacaggctctttgagtgctgatccaaattcaatggcatgcaagtaatcagaaaaatcagtgtatatggtcatttatataatctcacagttgagaa

SEQ ID NO: 5827 - DNA, 746 bp, Homo sapiens
atgcaaaatggctcattttgcrttactatattgattgtgaatttggaccattccatagtaatatcacaacttaatccacagtataatgtcttgccatttctgccaatgcttttagttgaataaactaagagtaataaaaattcacttaagaattgatagaaaaacctaaagattctaccaaacttttataactgataaatgaatttagtaaagttgtaggatacatagttaatatacaaaaaccagaagagtttctatacacaacaaactcattgaaaaagaaatcaagaggtcaatcccatttacaatagctacaaaaatataaaaatacctagaaacaaatttagccaaggaggtgaacgacctctacaaggaaaactacaaaacactgatgaaaggaattgaagaggacacaaacaaatgtaaagacagcccatgctcatagatcaaaataactaatattgttaaagtgacaatactacctaaaacaagccacagattcaatgcaatccttaccaaaataccaatgacattctccacataaataaaaataaaatcttgaaatttgtatggaactacaatagaccccaaatagccaaggcaatcctgagcaagaagaatatagctggaggtatcccaataccaaacctcaaaatatactacaaagctgttgtatcccaaacagcattgtactgtcataaaaacagatacacagaccaaaagaacagaatagagaaccaataaat

SEQ ID NO: 5828 - DNA, 746 bp, Homo sapiens
atgcaaaatggctcattttgcattactatattgattgtgaatttggaccattccatagtaatatcacaacttaatccacagtataatgtcttgccatttctgccaatgcttttagttgaataaactaagagtaataaaaattcacttaagaattgatagaaaaacctaaagattctaccaaacttttataactgataaatgaatttagtaaagttgtaggatacatagttaatatacaaaaaccagaasagtttctatacacaacaaactcattgaaaaagaaatcaagaggtcaatcccatttacaatagctacaaaaatataaaaatacctagaaacaaatttagccaaggaggtgaacgacctctacaaggaaaactacaaaacactgatgaaaggaattgaagaggacacaaacaaatgtaaagacagcccatgctcatagatcaaaataactaatattgttaaagtgacaatactacctaaaacaagccacagattcaatgcaatccttaccaaaataccaatgacattctccacataaataaaaataaaatcttgaaatttgtatggaactacaatagaccccaaatagccaaggcaatcctgagcaagaagaatatagctggaggtatcccaataccaaacctcaaaatatactacaaagctgttgtatcccaaacagcattgtactgtcataaaaacagatacacagaccaaaagaacagaatagagaaccaataaat

SEQ ID NO: 5829 - DNA, 733 bp, Homo sapiens
ggagaaggcaatcaggaagcaagaaccttcttcatggggcgataggagagagagaaaaagtaagaggggaactgccaaacacttttaaaccactggatctggtgagaactcacgcactatcccaagaacagcatggggaaaccgtccccatgattcatcacctcctacgagatgccccctcgacacgtggggattacaacttgagatgagatttgggtggggacacagagctacgccgtatcaatgaccacatgggaaagtttgggaaaagtcctacatgagtgacgaatgtgtgagaacagatgggtggcagtgatggcagcgggtgttctgggcaaaggggcgagctgtgcaaaatgttcgaggttagggcagggccagaagtgtgaggrgctgaatgaaagtcagtctggccacagcttacatttctcaaaagcaggtggaggcagggagcagcaaggcagctttcctctcacctgtaaatgggctcccctggttcataccctagtaaccagtgcatcgcgtgagtgaagaaaagagtttttggcttctgactcacaggagggagctggataagaaggaaagatgattggggctcccctctgaccaggggcgagggcgtccctggaaaagcatctccctccctggctgttcttgcccctccttcctgccgtggcttggtcacgatgaaaccggctccccgccctgcaacatctgttccttgtaaccgtgg

SEQ ID NO: 5830 - DNA, 733 bp, Homo sapiens
ggagaaggcaatcaggaagcaagaaccttcttcatggggcgataggagagagagaaaaagtaagaggggaactgccaaacacttttaaaccactggatctggtgagaactcacgcactatcccaagaacagcatggggaaaccgtccccatgattcatcacctcctacgagatgccccctcgacacgtggggattacaacttgagatgagatttgggtggggacacagagctacgccgtatcaatgaccacatgggaaagtttgggaaaagtcctacatgagtgacgaatgtgtgagaacagatgggtggcagtgatggcagcgggtgttctgggcaaaggggcgagctgtgcaaaatgttcgaggttagggcagggccagaagtgtgaggagcwgaatgaaagtcagtctggccacagcttacatttctcaaaagcaggtggaggcagggagcagcaaggcagctttcctctcacctgtaaatgggctcccctggttcataccctagtaaccagtgcatcgcgtgagtgaagaaaagagtttttggcttctgactcacaggagggagctggataagaaggaaagatgattggggctcccctctgaccaggggcgagggcgtccctggaaaagcatctccctccctggctgttcttgcccctccttcctgccgtggcttggtcacgatgaaaccggctccccgccctgcaacatctgttccttgtaaccgtgg

SEQ ID NO: 5831 - DNA, 828 bp, Homo sapiens
cagtttcagctttctacatatggctagccagttttcccagcaccatttattaaatagggaatcctttccccatttcttgtttttgtcaggtttgtcaaagatcagatagttgtagatatgcggcgttatttctgagggctctgttctgttccattgatctatatctctgttttggtaccaggaagtggtaccattcttatacaaagacaccaactgaccagacatgtggcaaagtatttaattaataaaatcctaaaactggttaaaagtgtgtggggcgggggaggggagtagctaaaagaggaggaataatttgtttcgtttcattctctgataaacataatacagtttcttactaaggctaatacatagctaacttctcaaattatcattcycaaagaggggaatataagggtgggaaatatgaaataacattacaaaaataatacaaaccataaactttctagtcaactgatttatctactgactttccagtagataatcacatttgaatgtgtgtgtgtgtgtgtgtgtatgtgtgtgtgtgtgtgtgtgatattctaataattcattccaaacgaactacattttggcaaccaagcttacgaagttgaaaggtgtagctttcactgagtttaacaaggtactatagctcaggctggaaatagcctattcttggactaagagaaaatttacactatttcaaaccttccctgaaacaaacaaagaagtttaaaatgtgggtttgtatgggtgccccaacttgcactcatctggcacccagggtcaataaagggattttgaaaaatgagtgaagaaaatacattg

SEQ ID NO: 5832 - DNA, 812 bp, Homo sapiens
aagcgcagtttcacccccaatgtcacagctaactcggagtcctgccccatacaaagggatgcagaggctctgttgacccatgtagccacattttatggggctgagaagatgtaacatcttgtttcctggagaatcagagctttggctgagctgtactatcttgacctccaggctgagtaggtgccctgcttgagattctaagatgtcccacttctgtggggagtggtcattgctgcactgcttcccacccttcagctcccaagccgtattggcatcttgctatttctgagtacttgctgctgctgcacctggtgtcacagaacccatacatcttagttccaacctctcagggtctacagtcaccactgtgtggtacctcataccccactgtgttttgttggttccaggtcctgcattgctgctgtatcctgctccaggaggccttagccwctggagaacctattttcccccagagacatgtcaatactgtgcctggacccttaggatcaaaactacagccacaccccagttccctgggtccaggttgctgggatgtacctcagagcaacagttcttagcttagtgggagaactgcatctactcataccttggaaagtgaagctgcacctcaagtcccaggtgctataatagttagttttacaagaccctgatcccagaaacctgtcttcacagtttctctgatcacctgtgctttgactccaagtaccacgtgcctgtgggccatgtcagacatgacaccaagagagatcccctcagataagactcctactgtagggaagataagaagagaa

SEQ ID NO: 5833 - DNA, 783 bp, Homo sapiens
aagaattctgtccacttgaaggttaaaaaaatgggaaccagtctctatttttttatttccttcctttcactagagatagctgcttcttttatgttttaattggagaacacagttcatttaaaatgttttctaagtagttattaggttttatttatatatgtatacacatacatgtacttttttcagttggctacttcaaatatttttaaatgatgtgctttatatgcagtacattaatgggagtaggtaggaagattacatttataacatgctatgcctgctgatgtctttggtatcacaaaaaactatataaaattagttaaatcaagtgtgttagaaagaaaaatattagtcaggatctccaataaaaagcatatacaaccaattctaaattttccaagacttttcccctcactgttggtcttttgaactagtttactaatattagcatttgaagttaggagtagagcaaaagagaaacagggggtgacacttattttgaatcaatatatgagaayatttaggtagaagggaggccagagacttaagtgattaaaataaacttaggagtttaactttcccttcagttatccattaccttgctacctttctcaatattttattttattattcttaatgacagtttggcaacagatgtgatttccttgccaaacccacttccaaaacatctatatacttctactcttttgtataatcctccaaaagaggataatcctccaaaagaatgccacaatgggaaagagtttccaagaccagcaaaat

SEQ ID NO: 5834 - DNA, 707 bp, Homo sapiens
gaattttattctttaaactttttgcccagttagtcatacgtctgaaaatgcatagagtatcctcttaagcaagagtgtgactcaaactctcactacatacttgcgaaagaactttggcatgccccatctctgagaaggctggtggggttgaggctggaccaaatagtggctgaatgccttcatgaacatggaggtcactcttgagatcaaggctgggtggatctgaagggtggggcagcccactgagcaccacgtaaagtcagaggggctggaatgttggggaaaaattgaacagacactgaaggagtcaatctgtggttgctgccaagtgtctcctcctcttcttctaccataaatttggaatctgcgtttatctctttcacttcccccactccagtccttaccggagtctctatttgttctgtttgcagtcacatttcattccatctcccgcactttaaggcagtgtctttatcataaatttggccacttccatcatactacaaaccttccagcttgtacagtaccccttataatcctacaataatttccaattgctttcccaagtgtttcatgaagcttctctgtaaggctttctcatgtattttcaaacctggataccttacctaytctttccacaatactcatcaaaattgtcaatcccaaataaacagaccatgtgtaggtttgctgtgaaataatggatt

SEQ ID NO: 5835 - DNA, 665 bp, Homo sapiens
tctcatctttttaatcacttccaaagcactttcaagcagaagacaattctaaagaccaagaagatacagttcatgggaaccattgcttttaataataataaatttgcatagcacttctaataacaaagcatttttacataaaaataacaaaaaccttttcttaaaggtttacttaacatacatacattatattaattctttttttgttctttttttttgagatggagtcttattctgtcacccaggctggagtgcagtcgcacgatctcggttcactgcaacttccacctcccaagttcaagcgattctcctgcctcagcctcctgagtagctgggactacaggcatgcaccaccacacccagctaatttttgtatttttagtagagatggggtttcgccatgttgaccaggctggtctcgaactcctgaccttgagcgatccacccacctyggcatcccaaagagctgggattacaagcatgagccaccacatccggccaacatacattaattcttacctcaacctggagaggaaacaagctactgttattctcattttacagataacaggcttggagagggtaaacggtgggcacccatcacactgctctctgttcagctgccaagtccttaccctcaaaccacagctccctactggattgct

SEQ ID NO: 5836 - DNA, 665 bp, Homo sapiens
tctcatctttttaatcacttccaaagcactttcaagcagaagacaattctaaagaccaagaagatacagttcatgggaaccattgcttttaataataataaatttgcatagcacttctaataacaaagcatttttacataaaaataacaaaaaccttttcttaaaggtttacttaacatacatacattatattaattctttttttgttctttttttttgagatggagtcttattctgtcacccaggctggagtgcagtcgcacgatctcggttcactgcaacttccacctcccaagttcaagcgattctcctgcctcagcctcctgagtagctgggactacaggcatgcaccaccacacccagctaatttttgtatttttagtagagatggggtttcgccatgttgaccaggctggtctcgaactcctgaccttgagcgatccacccaccttrgcatcccaaagagctgggattacaagcatgagccaccacatccggccaacatacattaattcttacctcaacctggagaggaaacaagctactgttattctcattttacagataacaggcttggagagggtaaacggtgggcacccatcacactgctctctgttcagctgccaagtccttaccctcaaaccacagctccctactggattgct

SEQ ID NO: 5837 - DNA, 486 bp, Homo sapiens
  misc_feature (1)...(486): n = A,T,C or G
tnnnnnnnnnnnnnnnnnnnnnnnnnnnnnnnnnnnnnnnnnnnnnnnnnnnnnnnnnnnnnnnnnnnnnnnnnnnnnnnnnnnnnnnnnnnnnnnnnnnntatttttcagctacccagtgtttcagagaccttgaattatgcctattggcaaatgtgtaaccactgaaaattcttcacagtcagaaactggaaagaaaaattcacccctgyagttttaggttttttggttttgtacataatattgaaggtggtggattaagtgcaatatttagaataatatattcaaggatttaaggaatttgagttcaattttgaaccactccaccacccctggctggacctcagctcaatcccttaatcttttggcttctttctccatctgcacaagatgcctctggcaacgcactgagtgcagtagcataggaatacattcaataatgggcttaatatcaccactcaaaagggagtaaattgcttttttgtg

SEQ ID NO: 5838 - DNA, 584 bp, Homo sapiens
acttctggcaaaccaaaaggctgccccgagtggagaggccctcaccccacccctgccctcactccactcctgtgcagacaagggaaatatgtgtatggcacatggcggccagtgccagtggccttcctgccttggtgtgatggaccgaagagaagaggaagagtcccactggccactgaagaccatcgctctctcccactatcaggaaggagctggcagactctgcccccttcacccctccacacccgccaccagcaaccctgccaccctcccaagtccttctgcayacccagccctctctgaccactgtgatgctgggcactggccaggattccacatccttttaagaaatgtaagggacaataacttctgggctagagtgcctgggcattgcttgggcaccgggtccatgaaaagaaggcatcttttatgtgtttatctttttgttttgtcttgtttgctgcccagagaagaggtaaggaataggagtgctctattaaccttattttcaacaaaaggaaataagggggtatgatgggctaccttctagaggtgtcaaggatgggggagaatgattctcccaa

SEQ ID NO: 5839 - DNA, 1272 bp, Homo sapiens
ttccctttccagggcccttgcctgaggatgtgcagcatggccaccgcatgcgggtcacatcctaaggctcagccggagatgaaggataaatggctgctccatctttcccaaattgctttctttgggctgtcactggcgatttggcatggttttctaagctggggaagactcctagggaactgtgtgcttccggctcagagctgtacaggctggagaaggtggggggaggaagtatggattgctttcaggcctccaggcacccagtttgcagctgaacaggccttggcaagagcgggctctcaggcagaatgtgccatgtggtatttagaattgtggtgattgcacacaatttcaagcagacagtttattaatctaaactgcaggcgtatgtagaagaggccatacaagattgacatggggggattagttttgctggggtttttgctggggtcatcaccgtagcaccgggataaatggacccacatacatccctagctgcacgtgggaaactcacatgctatttaatttactgtctccattgtggggctgccatcagcctgtattaagggcaggcggggtagcgggtatatggctttacccacaacccttcatggggatcccagagtctctgctctccaagggaaaacaaaacatatatagtctcagcctactcggagtggactgggagtctcactccactgggacagagattagcctaagcagggtccctcaagsggtctctacccatccctaaaaccaagccatgctctcccacaaccacactcccaggacttgaccccatgcctttagaatctcaagagtggtctttctatccctcagcctccttctctttgcctggctccccaaagcaccacaggactgggaactctagggactgactgtaggtctcatttggcctgaggccacatgtcttttttcttcttccagtccctcctgttgtctgcttccatcaagagggaaggagagtctccaacggcatcaccccactcatctgccaccgatgacctccaccattcagacagataccaggtgaggaggggtggtgagtggccatgagaagcaagctcacctgggggagggcttcaagagcctgcccggtgctaactcctcctctcctctgtaggccacaggagaggcctgaactgggtttggttccccctgtgtcccgtgcccctaagtgaactcaggaggcatacgtgtcagggaataggccttaaatagatggattttagggagagatgccaaggtcac

SEQ ID NO: 5840 - DNA, 697 bp, Homo sapiens
aggtccatatggctttggccaatctcttaatctttctaggccttaattgccctcatatgtaaaatgagataatatccaccttagagggctgttatgaggcttaaatgtaataatggttgtaaaacacttcacacaggttcccggtacatccaaaccagtcggtagtgttggctgcgggtaacgttattgccgcggctgttaaagtgccccacctttaaggaggcattctgggcccacgggacaggtcttcctgtgcaagtgttctggacctcacctgaggagcctggaaactcaaagccgggattgaatttggcacttggcagtagagtaaaaatacattctctcaaaagattttgcctccaatctataaggattaggagaaaaaaacagtatttgaaagacaactgctgtgttctgatttagaacacatgctcaggatgaggctacaaaaacattctctccccaagtagtgggacttttctcttgtgacttacactcctaattttagmctaatattacatagttggaatttccagaggggttataaagaataagaaaattgctaatttgagtctgtagggagtgggttgggatattttcatcccctccggagctgtgtaaatatgttccaggccaaaagttcccaggagagtgtcattcctggggtctatttagtgccacgggcttgactcaagga

SEQ ID NO: 5841 - DNA, 673 bp, Homo sapiens
aagaaaagaaaaataaattttcattttcctctctcttcccgcttttttcagctcatttaatctttgttgcctttcaaattccacaaacatgttattgagaaacctcttgtgaaatgcatgttttttttcactgagcatttcttaagtacctgcaatttactggtaacaagttctggacagaaatgtttgtcagaaaattttgataatggatttcattagctcccctttattggggtggaataaaactcaggcacagcttaagtaatttactgtcatgaagacagtaagcaaaagacccaggggaacactctagacatttctaacacagcttagtgtgctcttctaactttctatttagagaaaaaaacaaaatagaccagcaaacaaacaaacaaaaaaaaccacctcctgaaacattttctcagagaccaaaggctgtggtactgcatccttattaagtatcctatcaagtaagawaaaatagttctggaagggaccatgtgggtcatgcatcttacttggcttctttattctaacaaataggattttggttcaaagaaaaggaggaattagaaatcacagtgaataataattggggtgtgtgtgtgtgtctgtgtgtgtgtgtgtgtgtgtttgattcaaacataaccccaacagatcacaaaaaaacctg

SEQ ID NO: 5842 - DNA, 575 bp, Homo sapiens
ctgtgagtgcttaactcacttctccatgcattggagtcagctatttaaatctctctctcctccactgggtcacctaatacatgacaaggaggtcttagtcgtcactgcatcccccacagcacatactaggttcccaagagttgtctgctgaatcggcctgattttgtygaaatggtgcagcagtgaaatggtgacctgtcccctgaggggtcatctcgtgggtcagtgcttgtcaggacctcaggagtcaggcttgactgagaacgcccagagtgcagcagggaaggacagttcactggagacctgcaagagtcgtgttctgccctccctctgcctcctgttccctccctccagagaaggcccttgcttgagattgctcttcccatcgttagctgtgtttgtggagagttccccagctgcagcttcctttggtcttctctgtcttccatggtttgttgatttacttccctgtcagtctctttctctggctgtggttgtaaatagagctggtgactgtaagctccgccctgcgcagtgaacctgcctcatgtgcatggcaggtccaggagactgtg

SEQ ID NO: 5843 - DNA, 575 bp, Homo sapiens
ctgtgagtgcttaactcacttctccatgcattggagtcagctatttaaatctctctctcctccactgggtcacctaatacatgacaaggaggtcttagtcgtcactgcatcccccacagcacatactaggttcccaagagttgtctgctgaatcggcctgattttgtcgaaatggtgcagcagtgaaatggtgacctgtcccctgaggggtcatctcgtgggtcagtgcttgtcaggacctcaggagtcaggcttgactgagaacgcccagagtgcagcagggaaggacagttcactggagacctgcaagagtcgtgttctgccctccctctgcctcctgttccctccctccagagaaggcccttgcttgagattgctcttcccatcgttagctgtgtttgtggagagttccccagctgcagcttcctttggtcttctctgtcttccatggtttgttgatttacttccctgtcagtctctttctctggctgtggttgtaaatagagctggtgactgtaagctccgccctgygcagtgaacctgcctcatgtgcatggcaggtccaggagactgtg

SEQ ID NO: 5844 - DNA, 476 bp, Homo sapiens
acattaatttctcaatccttggagttcctgtagcatrtgatccctggtataccagccagcaggtaaaggcctaatgtgccttgtttgctgattatcttatgagcatgatctttggctccctaacttgtgagcttgctgaagctagagattaggtctgattctttttagtagctttcacagcattcatcaaagggctatgcatgccagttagagtgtgttgtggatttttcgaataccaggtatagacatataagatttggcaggatttggagcaaacctaaaacattccctgttgctgcttggacaaaatctctactgttagagatctgtggactgctacagccggaagggactttaaagatgtacagtagaaacgcccattttgcagaggagaaaactaaagccctagaaagttttcccaagggggtataggaaagatgtggctgagtgggaactggggctcccccaagttactg

SEQ ID NO: 5845 - DNA, 868 bp, Homo sapiens
tatggaaatgcacacaggtggcagatataaatagcagcagatacacgaatcagtgcgggtccatcatataactcctagctttagtctctaaacttaggctcccactcaactcaactcctactctaactcaagatataccataccttggtttgctctttctctaagcatcgctgttctagtcttctaaggagcaggaatataaatctacatctatgtgaaactacagcacccccaagggaaaataaagaatccagtgctattctagtaattttagggcagtagtacagtacaatgcaaagtataggcttttgaactaaattggcctgggttcaaatatgagccctctyacattctattaggttgaaccatataaaaatggagatattcaatcatttttttacagtttcacgtagttcatctctgtattctagtggtaaatcattttaacctaagtttcatttccttctgttgttagtttttttaatggtgctaatacccctacctttcagggttgtaaatgaaaagatgttaaaaaaaaatacctgacatatagtgggtgttcaataaatgttagttttcccaaagatagtcagatgcatgaatcataataagaggtatttctggtcaacactaagcttaagaatccaagaaaagatatatcaaaatgagacatctttgggtttggatagtgggggaggctgtatatacacaggtatgtatgtaggggcagggagtaaatgggaaatctctggctcttctgcttaactttgccgtgagcttaaaactgctctaaaaaacaaaatctgaccaggcctggtggctcacacttgtaatcctagcactttggggggctgaagcagaaggatcc

SEQ ID NO: 5846 - DNA, 868 bp, Homo sapiens
tatggaaatgcacacaggtggcagatataaatagcagcagatacacgaatcagtgcgggtccatcatataactcctagctttagtctctaaacttaggctcccactcaactcaactcctactctaactcaagatataccataccttggtttgctctttctctaagcatcgctgttctagtcttctaaggagcaggaatataaatctacatctatgtgaaactacagcacccccaagggaaaataaagaatccagtgctattctagtaattttagggcagtagtacagtacaatgcaaagtataggcttttgaactaaattggcctgggttcaaatatgagccctctcacattctattaggttgaaccatataaaaatggagatattcaatcatttttttacagtttcacgtagttcatctctgtattctagwggtaaatcattttaacctaagtttcatttccttctgttgttagtttttttaatggtgctaatacccctacctttcagggttgtaaatgaaaagatgttaaaaaaaaatacctgacatatagtgggtgttcaataaatgttagttttcccaaagatagtcagatgcatgaatcataataagaggtatttctggtcaacactaagcttaagaatccaagaaaagatatatcaaaatgagacatctttgggtttggatagtgggggaggctgtatatacacaggtatgtatgtaggggcagggagtaaatgggaaatctctggctcttctgcttaactttgccgtgagcttaaaactgctctaaaaaacaaaatctgaccaggcctggtggctcacacttgtaatcctagcactttggggggctgaagcagaaggatcc

SEQ ID NO: 5847 - DNA, 868 bp, Homo sapiens
tatggaaatgcacacaggtggcagatataaatagcagcagatacacgaatcagtgcgggtccatcatataactcctagctttagtctctaaacttaggctcccactcaactcaactcctactctaactcaagatataccataccttggtttgctctttctctaagcatcgctgttctagtcttctaaggagcaggaatataaatctacatctatgtgaaactacagcacccccaagggaaaataaagaatccagtgctattctagtaattttagggcagtagtacagtacaatgcaaagtataggcttttgaactaaattggcctgggttcaaatatgagccctctcacattctattaggttgaaccatataaaaatggagatattcaatcatttttttacagtttcacgtagttcatctctgtattctagtggtaaatcattttaacctaagtttcatttccttctgttgttagtttttttaatggtgctaatacccctacctttcagggttgtaaatgaaaagatgttaaaaaaaaawacctgacatatagtgggtgttcaataaatgttagttttcccaaagatagtcagatgcatgaatcataataagaggtatttctggtcaacactaagcttaagaatccaagaaaagatatatcaaaatgagacatctttgggtttggatagtgggggaggctgtatatacacaggtatgtatgtaggggcagggagtaaatgggaaatctctggctcttctgcttaactttgccgtgagcttaaaactgctctaaaaaacaaaatctgaccaggcctggtggctcacacttgtaatcctagcactttggggggctgaagcagaaggatcc

SEQ ID NO: 5848 - DNA, 868 bp, Homo sapiens
tatggaaatgcacacaggtggcagatataaatagcagcagatacacgaatcagtgcgggtccatcatataactcctagctttagtctctaaacttaggctcccactcaactcaactcctactctaactcaagatataccataccttggtttgctctttctctaagcatcgctgttctagtcttctaaggagcaggaatataaatctacatctatgtgaaactacagcacccccaagggaaaataaagaatccagtgctattctagtaattttagggcagtagtacagtacaatgcaaagtataggcttttgaactaaattggcctgggttcaaatatgagccctctcacattctattaggttgaaccatataaaaatggagatattcaatcatttttttacagtttcacgtagttcatctctgtattctagtggtaaatcattttaacctaagtttcatttccttctgttgttagtttttttaatggtgctaatacccctacctttcagggttgtaaatgaaaagatgttaaaaaaaaatacctgacatatagtgggtgttcaataaatgttagttttcccaaagayagtcagatgcatgaatcataataagaggtatttctggtcaacactaagcttaagaatccaagaaaagatatatcaaaatgagacatctttgggtttggatagtgggggaggctgtatatacacaggtatgtatgtaggggcagggagtaaatgggaaatctctggctcttctgcttaactttgccgtgagcttaaaactgctctaaaaaacaaaatctgaccaggcctggtggctcacacttgtaatcctagcactttggggggctgaagcagaaggatcc

SEQ ID NO: 5849 - DNA, 868 bp, Homo sapiens
tatggaaatgcacacaggtggcagatataaatagcagcagatacacgaatcagtgcgggtccatcatataactcctagctttagtctctaaacttaggctcccactcaactcaactcctactctaactcaagatataccataccttggtttgctctttctctaagcatcgctgttctagtcttctaaggagcaggaatataaatctacatctatgtgaaactacagcacccccaagggaaaataaagaatccagtgctattctagtaattttagggcagtagtacagtacaatgcaaagtataggcttttgaactaaattggcctgggttcaaatatgagccctctcacattctattaggttgaaccatataaaaatggagatattcaatcatttttttacagtttcacgtagttcatctctgtattctagtggtaaatcattttaacctaagtttcatttccttctgttgttagtttttttaatggtgctaatacccctacctttcagggttgtaaatgaaaagatgttaaaaaaaaatacctgacatatagtgggtgttcaataaatgttagttttcccaaagatagtcagatgcatgaatcataataagaggtatttctggtcaacactaagcttaagaatccaagaaaagatatatcaaaatgagacatctttgggtttggatagtgggggaggctgtatatacacaggtatgtatgtaggggcagggagtaaatgggaaatctctggctcttctgcttaactttgccgtgagcttaaamctgctctaaaaaacaaaatctgaccaggcctggtggctcacacttgtaatcctagcactttggggggctgaagcagaaggatcc

SEQ ID NO: 5850 - DNA, 760 bp, Homo sapiens
atgaccaactacagaaacaccaagtgtaatagcttgtgtgtttccctactgcttgttatattcacgcatttattttatgtactaatcaatcttttattccttctctttgttgccctcgttcttgtgtattttatatactagttattggaagttaatttgcawttcagtattaagtaaaagaatattcaatgcatcagaccattcatttaaaccacctgcgaattttgagaagtgagaaatgcagctttttatagatacaataactgttggaaatgtgtgtcttctcattttggagaagagtgagagcttctccatttgtaaggagagatgtgtgccgtttaggtatacgtgtagagttaacttattataatgaggagttcaaatatatgtagagggatgcttatttggagtaaccaaataataaataacctgaacttaatcatgttcttcattatcaattctttgcctttcagctctgaatgtacccttcagtaaatggcgtaggataaacggcagtatccctttgaatatttctcctttgaagtgaacatgttattatgttctctcagtagagagctctggaaggacattataggaggaagagaatctcctgctaattagcgtttaggcagagtaggcctgttgatagcttttctgtagacatccggacactctgaaaactaccagctgcactgatgaccaaacgactcatgtggcctactcgccataatgtctcttctctactagtggtgcctgcact

SEQ ID NO: 5851 - DNA, 802 bp, Homo sapiens
tggattcacagccagctttacttggcaataaaattcaagtcctgttcacatcacaacacatttttaccgaaagaaaaatatgatgtgtagatgtttggaggcatcctatcttaatgaggcttttgttagaaagagttttcttaaaattacagggttggggaaataaaaaatgtttgttgctcagattaacaaaaaaatrgtatatagaaaataaagctaagaaaggaaagtgcagacaaccaagagactagaattttcaataaatggcaaaattgtggtgttctgtggttacctcttgaagatttggcctgaatcatgcaacaattgccccttaccctcagtcctcaaattacaatagtgaaagaggtttctataggtattatatttgaatctgctatattttgtttattacttgcaaggacatataggagagcaaaagttttccctctaatttcttaggtttagtaactggaacttgtgaattaaactggcaaaatacagattaacaggagaagagtcatagacattttattttaaatttcatatgcaatgtagttccagagaaaagaagtgaaagcctgaagaagcaattagacttgaggagttatatctttaacaaagggtggtgagtgtagagaagtgactagattttttttaagatggttttaggcttccaagggtgataaaccatgggaaggaaaatacatgagggaaactaatggtatataggagttatttagtaaggtttgtttacacagactaatctcagtggtaagaacggtttttctcctttttctggtca

SEQ ID NO: 5852 - DNA, 585 bp, Homo sapiens
taaaaggcaagattcagaaattatgttgtaatctgtgacttagtgcaatttagtccttgaatttcttgtgtgcaatttattgaagctatcttattatatgttaattctgtgtcttctttgccctctctttttgtaaaaattttctttttctgaatttttttccagagtcaatcattgatcttcttgataacattcatttcccttsgtgaactaactttggttcatcgctttatcattcttctccaggctgtttttgaagggtctgtgagctgagaatggtttttaatagataaatgctcacaatcaatttggggataagaaatattattttgaatctcagttacaaaaaatgttatccttcataaaataattcatttttttctcagtaataaaaatgtatttcaaaaatatggtgtccttattatattttaaattttgccaataaaaataataaaaattgattttctctaattatgtaagtacctagatgatttttaaaattttgtctcttgacttatacaaagcctaaaatatttataactgcccctttatagaaaaagtttgcgaacctattttctaaaggtt

SEQ ID NO: 5853 - DNA, 670 bp, Homo sapiens
cttcctcacctctgtcagcctttggtggccccaggagttcttgggccaggccagcgtcactccagcctctgcctctgcggtcacgtggccttctctctgtgttgctcttgtctcaagtctctctctgtgtttctcttctaaggacacgtgtcactggatttagggctcaccctaaatctgggatgatctcatcttgagatcctcagcttagtgacatctgcaacaactcttttccaaaaacttcacatgcacaggttcctgggcctcatatctctgggggccaccatttagcccactaccctagtggaccaggaggaaggagccagggaagaggcagggatctgccgcccagagtcccttcctcctcctcctcttgagccctttgggagctgggcccttctgatctgggtgccagagcagacaggcagggcctgccagaggaagcatccatccccaaggacgaagagcatagtaagcaaacatgtgaacagcggggtgagttcagatgagcaaggacggggtycctgaggtagggagggtctcttctagacgggcctcatctgttcccctccatcaccctcagagatgcacctcatgaccccatcttacagccaaagagctgggctcatcaacaagccgcccacggccacggggcaaggcaggagccaca

SEQ ID NO: 5854 - DNA, 630 bp, Homo sapiens
ctgggccatattttgaggaccactgagctagaggtggggtggaagaagtcaggtgagagagtgctggcaggcgaggctgcacaggactgtaaataacrataacaacaaaggtttgttggcacctgccgcgttctaggcacagtcactggagaaccccgtgaagtaggtgttcttacttcacagaggaggagaggttaaggcagtgagcagaaaggcttgggctaaagccaggcaagcgcctccaaaccacgccgtcagctgcccctggaaaggccactggtgtcatgcttgctgtgtgtgtgcaggtctttggatgactgactcaggagttgggatttgttttttacataaagaggacttacatcagagtttacaatgggtgatttggcggcagtttacaaggtggaatgtggggagctaggaagcctggaggccagttaggaggattttatggggcagatgagttgtgtcctctgtgccctcggtgtgcatggcgtcacctatgcatgcatggcgtggagtgctagaggtgctgacttctcacacaaaatgacccggaagtgtgaacaaacatcttcattccgtattcagtggaagaagcagtgatctgttccagtgcaagaggaaaca

SEQ ID NO: 5855 - DNA, 567 bp, Homo sapiens
tatgtttatgtctaagaggaaaacaacagaagcttccaccaagatatattttagcaagtattcaattatagaaaggaactgaagatggcaatacgagtcagaatgayaccgtgaagttagcaatagatgtcagacacccaggagagaaatgctcagactaaaaaatctctaggaattgcttggtgagttgccaaatgtgggcatggcagttggttggctgtccaccaaatcttggtatttcctattgcatggtgtgaaattgtcattaggaagtggttgcccagccagggacagtattttctggtcatgcttccatgcagctatggtcatgttctcaccggtggaaggtgagaagtgacacgaagtcacttcaagaccaaagttttcaagaagtaaggatgccttcctctctctttcttctccagttggaggcagacaactccaataagttctgtcctcactgaacttatttatagatacaactcttagtatggtcctgctataagattattattttatttgtctggaattcacattttggaaatttcttaatctttctccctcttt

SEQ ID NO: 5856 - DNA, 574 bp, Homo sapiens
cccagcacaaccagtgcccaacttcagggtggcagaatacagagccatgggctcagtcccagtgcctcaagattgcagcacacagcttgggagtgtcaagctgcgatctgtggctggtgcttgagcggacaggggagacctcagtctcagaacactgaaragggatgaaagatgtgtggtttgtgggctggcagagtagcagaacatgcctcccctcacagggctggtctgggaaggatgtagctagcttttctgccaactgcaggttttgcccaagggagccccgtagcccagaacatctaacaaaagaaacacatgtaaagcaccagtaatcacaagaggcttccttaaggcccaggagtggacctggagaggagagggggtcatgtctctccacaacccaccacccccggccagccacagagagtgctgcaaacgcactgaaatacagaaaagacacgtggctaagtaagcctatctgctggccattactcttcagtgccacctactggatggcagcctaaatctcacaacccaaagactattcccaaaatatacattgcctgtgaaatct

SEQ ID NO: 5857 - DNA, 1672 bp, Homo sapiens
caatctgggcattgaaggaaatgggacttaagtgacaagggtgtgagagagtggcactcctggtactgcaagtgctttccccaggaggatgtgactcaggaagacacatggcagaggggaagctggaaaggaccagggtcaggttgagaagactgaatcagccagwggggcaatgtagatttcatcctgaagtgatggaatctggggaattattttaagcatggagaggcatgagcagatcagcaatatccctcagctttgggtggggaatggctggagaacagtgacattggatgagatactcctttaagaagctcctgttctagaccagataagagatgagcagtcctgaggcaggaaggcaggaacagtatcagaatctccaagaggaaggatgaacacatcttttgcctttgccctttttcagggaggaagcatgcctacatggcaagcctgctggtgtctagcctggaaatgcttccccaaaacacatgtatctgtgggtttgttggaagttaccccagcaacaactaagctggtgggactttaaatgtcctcggtccacttagtgcacagtggcttacccttggccgaggagtacctcctagctgccaggatgctgtggctctcctcactgtccttacaatagtgtctctcagcagtggctctcgtgtggctctgaagttctggacttcaattctgtgtcacagttcccactgtgaggcctgggagatcaccctgtccagacccagtctatcttattggctacccagagttgtcttagtctatttgtgttgttataaaggaatacctgaggctgggtaacttatcaaaaggtttatttggctcatgattctgcagcctgtgcatgaagcatggggccagcatctgcttctgatgaggcctcaggctgcttccactcatggtggaaagaaaggggaactggcctgtgcggagatcacatggcaagagaagatgcgaggtgaggatgggggagatgccaggctctttataataccagatctcaggggaactttcttgggagctaatagaacaagaattcactcagtaacaccctatcccagggaaggcattaatctattcatgagcgatctacccccatgacccaaacacatcccattaagccccactcccaacattgggaatcaaacttcagcatgagacttggagggcaaacaagccaaactatagcacagaggaagcagcaaaggctagagctgaccacacaagtcccaagactgggatactgggtccccatccaggcatgcaatggttctccctttccctgggcctctgttttcatttctgtgagatagaaagctcagtctaatgatctcttaaggttcttttagtataacgattctcaaactagagactgcatcaaaatcttctcgggcttgttaaaacaccgacggctgggtcccactaccagagattctgatttagtaggtcttagctggggcctgagaatttgcatctctaacaagttcccaggtgatgctgattctgctggttgaggatcaaactttgaaaaccatattttccaccttgcattctttgacagagcagtttttagtcatgccatctgggtggctcagccctttaaaacagagaaagcagaggaattgtcctatttcggccagtaagtgca

SEQ ID NO: 5858 - DNA, 591 bp, Homo sapiens
cctgggacactgtccttgtgtacttggtagaggctgaatcacagcatgtttgtagggagggaataaagcccagaaacacccccgccatttctgttcacattccattgacgagaactgaagtcatgtgaccatgcctcactgccagggagactggggaaaacgagagttgctttggtgggcaatcaagagatccratcataataataaagacacttttgtcccaaatgggttaacttagaaaaacaatataaccaaaacaacacctttgcagatcaggaaggcagagctgtcaatgtccctctgtacaatgtatttgtatctgctcaatgtaattaatccaaattatatagtatatagttagtaggcaatagacatttatttcaagtttgaaaaaaaataatagaagccacaagtctctctagtcaatcagagagagccaaaagtcatgataaacaattttgtttaacttaatctaagacttactaaaaatgagagaagagaaacaactaattgaaaatatcttttttcaaaatccattttagttaggattcctaatttaaagtagtttataaaaatggacaccaaaacaaa

SEQ ID NO: 5859 - DNA, 725 bp, Homo sapiens
  misc_feature (1)...(725): n = A,T,C or G
tggacttctccgcccatcaaggtgtaatattcctctcctccctgatgtaacatcaaaggagctctggtagagagtcaggactttcaccaggactcagtagtaaccaggctatgtcctcgcagtgtcactggaggccaygttaggagtagtagcaaggattccttttccctccaacccagaatgatatttgcagaggcctacagactagtctttcccccttccatgggaaacaatggagtcagtggagactggtaggagaatctagaccccaatggccacctggaaatagtgaagatctagaatcttaaagcataatacccaacatgtccacatttcaataaaaaatggctcataacaccaaaaaataagatctcaaactgagcaagaaatcacaatcaacatgcaccacacgaacataacacagaagttaaaattatctgacaagcattttaaagcctctgtcataaaaatgcttcaataaacaattacaaacatgcctggaaaaaatgtaaaaaatagaaagtctgagcaaaggaatataagatataagaaagactcaaatggcaatttaagaactaaaaggtacaataaccaaagtnnnnnnnnnnnnnnnnnnnnnnnnnnnnnnnnnnnnnnnnnnnnnnnnnnnnnnnnnnnnnnnnnnnnnnnnnnnnnnnnnnnnnnnnnnnnnnnnnnnnaaataaaaaataaaaaataaaaataaa

SEQ ID NO: 5860 - DNA, 740 bp, Homo sapiens
gtttatgttttctgttactgttactgactcctcctgctcttctttgccactctctgctcctggtccccaaagctctcctttccctcggccctgaggtgctgggctctctccttttccacggctcctatcctggaggctcacacaggcaagcagggctgcagagagaccaggcatggggggcgcagcaagaagacccggcccagggtgggggtgtggtgagcactgggggagggcagggcgcaggaccaggggayagtagctgcccccagaggcacaatgagctctaaggagggccgccccaccctcccctgcagggagggatcatggcttttcctcctccacatacacacctggctggacagttttcactttttgttaatatttagatattacataatagttatgcacattatatgatccgtatttaggggcgtgtgtgtgtctgtgtgtgtgttagacatgggatcttgctctgttacccaggctggaatacataatagttatgcacattatatgatctgtatttaggggcgtgtgtgtgtctgtgtgtgtgtgagacatgggatcttgctctgttacccaggctggaatacataatagttatgcacattatatgatccgtatttaggggtgtgtgtgtgtctgtgtgtgtgttagacatgggaacttgctctgttacccaggctggaatgcagtggcaccataatggctcagtgcatcctcaaacttctgagctcaag

SEQ ID NO: 5861 - DNA, 740 bp, Homo sapiens
gtttatgttttctgttactgttactgactcctcctgctcttctttgccactctctgctcctggtccccaaagctctcctttccctcggccctgaggtgctgggctctctccttttccacggctcctatcctggaggctcacacaggcaagcagggctgcagagagaccaggcatggggggcgcagcaagaagacccggcccagggtgggggtgtggtgagcactgggggagggcagggcgcaggaccaggggacagtagctgcccccagaggcrcaatgagctctaaggagggccgccccaccctcccctgcagggagggatcatggcttttcctcctccacatacacacctggctggacagttttcactttttgttaatatttagatattacataatagttatgcacattatatgatccgtatttaggggcgtgtgtgtgtctgtgtgtgtgttagacatgggatcttgctctgttacccaggctggaatacataatagttatgcacattatatgatctgtatttaggggcgtgtgtgtgtctgtgtgtgtgtgagacatgggatcttgctctgttacccaggctggaatacataatagttatgcacattatatgatccgtatttaggggtgtgtgtgtgtctgtgtgtgtgttagacatgggaacttgctctgttacccaggctggaatgcagtggcaccataatggctcagtgcatcctcaaacttctgagctcaag

SEQ ID NO: 5862 - DNA, 758 bp, Homo sapiens
cctgaggtcaggcgttggagacaggcctgccaacatggcaaaaccccatctctactaaaaatataaaaattagctgagcatggtggcacatacctgtaatcccagctactcgggaggctgaggcaggagaatcgcttgaacctgggtggtggaggctgcagtgtgctgagacgtgccattgcactccagcctgggcaacagagcaagactcagtctcaaaaaaacaacaamaaaaaaacaaaagttctaacatagccacaatgccgttattataccagcctaaattagctctgattccttgatattatctaacagaggtgggcacactgctgggcttgtggactgtttttgtatggcctacaaactaagaatgatttttacacttttaaaggaatgcttaaaaatagtactcagcagttctgtgtggcccacaaagcctaaaatatatgctacctggttcttacagaaaatgtttgccaactccagtttaataaaataagtaatttttccaaaacgcatatccaagtttgctactcctttgcccgaagctcccgaggatcaagtctggactccttatggttgcagcccttgtctttgcctacctgtctgattttccctttgcctgccccagatgtcttcggggggtgaacaccagttcctctgtacctgctcttcccttggcactcttctcttcctgaagctattcctgtagtccatcccccctttcccaccctccatgtcctgtatttgcatttttt

SEQ ID NO: 5863 - DNA, 770 bp, Homo sapiens
tcccctgcacccagccaaaacccagtcccgttggctccctgacatccgtggcagccaaaagattcggtgctagaaggcactttccccaggagcggaggaaccggttggccctcaagaatcagagaggaagtgcaggtgggatgcaacaccgcctttcctagaaggccaatgtcaggagcggtgggcttgcctccgcctcttcctggaccgagcgtgcagccatcacttgggccatggagaccgagagagcttccctgtcccacacaggtatggaagcccagagctccaggatcaccacagctgcccaatcatccasaaagaggtgtggagagggaaacaatcatgacgcggaccgccacgaggtttctccctgatggacggggaagtcttctttgtggaagacactgagccacgctaagaagccgccaggcttctcagagacggggcagacacagcaagagggaggtcagagcagaggccagagcccaggcaggatacgggggggccatgccaccaccaccggcatccggggaggagtgtcaaacgggtgactcggccaggaaggccagcctttgagagacagacatgcttgccccatccccttgccggcttccttctccgtccctgcgtcgagctgtggctacatttctcgatgagggcagagggcgacaggcgtgacaaccaccttcttgaagctctgcgggcaccctcctgcgggtggacaatgagcgcctgggaggccgttgtccttggttggggagcgctcgtct

SEQ ID NO: 5864 - DNA, 770 bp, Homo sapiens
tcccctgcacccagccaaaacccagtcccgttggctccctgacatccgtggcagccaaaagattcggtgctagaaggcactttccccaggagcggaggaaccggttggccctcaagaatcagagaggaagtgcaggtgggatgcaacaccgcctttcctagaaggccaatgtcaggagcggtgggcttgcctccgcctcttcctggaccgagcgtgcagccatcacttgggccatggagaccgagagagcttccctgtcccacacaggtatggaagcccagagctccaggatcaccacagctgcccaatcatccagaaagaggtgtggagagggaaacaakcatgacgcggaccgccacgaggtttctccctgatggacggggaagtcttctttgtggaagacactgagccacgctaagaagccgccaggcttctcagagacggggcagacacagcaagagggaggtcagagcagaggccagagcccaggcaggatacgggggggccatgccaccaccaccggcatccggggaggagtgtcaaacgggtgactcggccaggaaggccagcctttgagagacagacatgcttgccccatccccttgccggcttccttctccgtccctgcgtcgagctgtggctacatttctcgatgagggcagagggcgacaggcgtgacaaccaccttcttgaagctctgcgggcaccctcctgcgggtggacaatgagcgcctgggaggccgttgtccttggttggggagcgctcgtct

SEQ ID NO: 5865 - DNA, 770 bp, Homo sapiens
tcccctgcacccagccaaaacccagtcccgttggctccctgacatccgtggcagccaaaagattcggtgctagaaggcactttccccaggagcggaggaaccggttggccctcaagaatcagagaggaagtgcaggtgggatgcaacaccgcctttcctagaaggccaatgtcaggagcggtgggcttgcctccgcctcttcctggaccgagcgtgcagccatcacttgggccatggagaccgagagagcttccctgtcccacacaggtatggaagcccagagctccaggatcaccacagctgcccaatcatccagaaagaggtgtggagagggaaacaatcatgacgcggaccgccacgaggtttctccctgatggacggggaagtcttctttgtggaagacactgagccacgctaagaagccgccaggcttctcagagacggggcagacacagcaagagggaggtcagagcagaggccagagcccaggcaggatacgggggggccatgccaccaccaccggcatccggggaggagtgtcaaacgggtgactcggccaggaaggccagcctttgagagacagacatgcttgccccatccccttgccggcttccttctccgtccctgcgtcgagctgtggctacatttctcgatgagggcagagggcgacaggcgtgacaaccaccttcttgaagctctgcgggcaccctcctgcgggtggacratgagcgcctgggaggccgttgtccttggttggggagcgctcgtct

SEQ ID NO: 5866 - DNA, 807 bp, Homo sapiens
actgacttttagaagagcaagaccaccagctagtgtctagatgttcacctcatcatccttttaatatgttgcctctgtaatgtggaccattaaaatcttttatctggctggctgccttatagtaatatcccctcaattattttactcatttacttcttttcttttatccccaactccatgtgcctcctctctaccttgctgatctaagtagcaataatattttacttctattccttttccttttcatttcaacctgtttattttgaacaagaataaatatcctttcagggacatgttctcattccttttcaccaggtctgtgagatagtgatgatcctctgtttatgtttatttgcrgaaatagatattttattttatgtgtagactagtcattatcttgtcctatccatcttttccatgttttcctttgtttgtttcatttccttttcctttgtttcatttcctaggattacaggcatgagccaccgcgcccagcctccacacatctttacgagatagtttcatcttgattggtggcttctgccattatggttgaaggaatccatgagacatacatctaattgcaggacagttctcagggtggccttgggctgaccctgttttcctctctgcttgtcacttgtagttatcaagaataactgcagaaagtgctggaaatgtaacactctgagatagagaggtactgggtggaatagcccaggctttgttacagtctccactagaaacaggatgtccttcaacacttagcttagtacgtcatgtttctccagggtataaaacccaagg

SEQ ID NO: 5867 - DNA, 1767 bp, Homo sapiens
aagagacaatagatmaataaccaacacgcagagaacaatggagaattaacagctcatacaatgaggggagaggattcttttctcatataattattttcttctctaaaagagtgattcgttagatcttaaactaaatgttgcttaattttagaataacttcaggaatatttttataaatcagaaaaaaatcttattcctttatatatgctaattctacatctgaaaacatttttcggttcttacattgctcccacctccttgacccttaggtataatggagagaattctgcatcctagtatgcatacgcattcccacctgggtgcctttgctctgggtgccttcccacccagaggcccttctttcctcttctctgcctgagttctattcttcttccatcaatgaagccttttctgtgcacatcagttaacagtgacattttctttcctgcttctgagtcctcatgggacgaatttccaggttatgcttggacacactgtcttgagtaaccagctaagttttcatagatgtgtgctcatgtctatttattacatggatggttcctgacatgcccagacagtgtgaagcctcaatgaatatccgttcatgactgagcctctatggacatttgagaacagctttaaagtgaataactgtataataattttatggaaaatattcaaattttccaggaaaagggatgatcggatgacaagaacacctctgtttctgtccccattatttctactagtcattcacttttgcatgagccagagttgatactcttattaaatgcttggtgtttggaaaagtttgtgaggccaacatttgccttaggtactggtcagacaaagctgaacctgatgagagagaagaggtcatcagattgcacatacttaaaaagtaaagaaactctaggtagtcttgcctcccacccaggcttaaagagttggcatcaaggtgctcaaatggacccaacacagagactggcgatgctttcaggtttggttctgtttgctgctcttataaactcattttgtgtccaagtggcttgctctgtcagatgaaaccttggaaaggtaaaaaatccttctcaagtcaaattttcatcttcctttgaaatctctgaacccattaactcgggacattaaccagcactttcatgttacccacctgagaccacctcttgttcagcatcaaccatcttttttttttttttttttttttttttttttttttttgtgaaagagcatgctttatttggaagcagagtgctgcacagtgaccgacagatgaaggccacccattgggcactcacacatcgtactccaaaatacacacaggatgctttgctaataaaaatcaatgggaacagggattcctctgggcaactcccccaacctcatccctttcaggggttgggaaatctcccaaccatcttcctgatggcagcggtggttcactagagataaagcccctcagggatgccttcgtgtttcttataaagaacactttctatagattttttgaagtcttcatttgttgctttcattctatgttctcttaaggccatcagaccagcttctgtacagattgccttgatgtcagcaccagagaagtcatctttagccatgatcaagtcgtccagggttacatcattggccagtgtcatcctgcttgtgtgaatctgaaagatgtgcttcttagtcttttcatcaggcaggtggaactcgatcttcttgtcaatgcggcctggtctgataagtact

SEQ ID NO: 5868 - DNA, 1767 bp, Homo sapiens
aagagacaatagataaataaccaacacgcagagaacaatggagaattaacagctcatacaatgaggggagaggattcttttctcatataattattttcttctctaaaagagtgattcgttagatcttaaactaaatgttgcttaattttagaataacttcaggaatatttttataaatcagaaaaaaatcttattcctttatatatgctaattctacatctgaaaacattyttcggttcttacattgctcccacctccttgacccttaggtataatggagagaattctgcatcctagtatgcatacgcattcccacctgggtgcctttgctctgggtgccttcccacccagaggcccttctttcctcttctctgcctgagttctattcttcttccatcaatgaagccttttctgtgcacatcagttaacagtgacattttctttcctgcttctgagtcctcatgggacgaatttccaggttatgcttggacacactgtcttgagtaaccagctaagttttcatagatgtgtgctcatgtctatttattacatggatggttcctgacatgcccagacagtgtgaagcctcaatgaatatccgttcatgactgagcctctatggacatttgagaacagctttaaagtgaataactgtataataattttatggaaaatattcaaattttccaggaaaagggatgatcggatgacaagaacacctctgtttctgtccccattatttctactagtcattcacttttgcatgagccagagttgatactcttattaaatgcttggtgtttggaaaagtttgtgaggccaacatttgccttaggtactggtcagacaaagctgaacctgatgagagagaagaggtcatcagattgcacatacttaaaaagtaaagaaactctaggtagtcttgcctcccacccaggcttaaagagttggcatcaaggtgctcaaatggacccaacacagagactggcgatgctttcaggtttggttctgtttgctgctcttataaactcattttgtgtccaagtggcttgctctgtcagatgaaaccttggaaaggtaaaaaatccttctcaagtcaaattttcatcttcctttgaaatctctgaacccattaactcgggacattaaccagcactttcatgttacccacctgagaccacctcttgttcagcatcaaccatcttttttttttttttttttttttttttttttttttttgtgaaagagcatgctttatttggaagcagagtgctgcacagtgaccgacagatgaaggccacccattgggcactcacacatcgtactccaaaatacacacaggatgctttgctaataaaaatcaatgggaacagggattcctctgggcaactcccccaacctcatccctttcaggggttgggaaatctcccaaccatcttcctgatggcagcggtggttcactagagataaagcccctcagggatgccttcgtgtttcttataaagaacactttctatagattttttgaagtcttcatttgttgctttcattctatgttctcttaaggccatcagaccagcttctgtacagattgccttgatgtcagcaccagagaagtcatctttagccatgatcaagtcgtccagggttacatcattggccagtgtcatcctgcttgtgtgaatctgaaagatgtgcttcttagtcttttcatcaggcaggtggaactcgatcttcttgtcaatgcggcctggtctgataagtact

SEQ ID NO: 5869 - DNA, 1767 bp, Homo sapiens
aagagacaatagataaataaccaacacgcagagaacaatggagaattaacagctcatacaatgaggggagaggattcttttctcatataattattttcttctctaaaagagtgattcgttagatcttaaactaaatgttgcttaattttagaataacttcaggaatatttttataaatcagaaaaaaatcttattcctttatatatgctaattctacatctgaaaacatttttcggttcttacattgctcccacctccttgacccttaggtataatggagagaattctgcatcctagtatgcatacgcattcccacctgggtgcctttgctctgggtgccttsccacccagaggcccttctttcctcttctctgcctgagttctattcttcttccatcaatgaagccttttctgtgcacatcagttaacagtgacattttctttcctgcttctgagtcctcatgggacgaatttccaggttatgcttggacacactgtcttgagtaaccagctaagttttcatagatgtgtgctcatgtctatttattacatggatggttcctgacatgcccagacagtgtgaagcctcaatgaatatccgttcatgactgagcctctatggacatttgagaacagctttaaagtgaataactgtataataattttatggaaaatattcaaattttccaggaaaagggatgatcggatgacaagaacacctctgtttctgtccccattatttctactagtcattcacttttgcatgagccagagttgatactcttattaaatgcttggtgtttggaaaagtttgtgaggccaacatttgccttaggtactggtcagacaaagctgaacctgatgagagagaagaggtcatcagattgcacatacttaaaaagtaaagaaactctaggtagtcttgcctcccacccaggcttaaagagttggcatcaaggtgctcaaatggacccaacacagagactggcgatgctttcaggtttggttctgtttgctgctcttataaactcattttgtgtccaagtggcttgctctgtcagatgaaaccttggaaaggtaaaaaatccttctcaagtcaaattttcatcttcctttgaaatctctgaacccattaactcgggacattaaccagcactttcatgttacccacctgagaccacctcttgttcagcatcaaccatcttttttttttttttttttttttttttttttttttttgtgaaagagcatgctttatttggaagcagagtgctgcacagtgaccgacagatgaaggccacccattgggcactcacacatcgtactccaaaatacacacaggatgctttgctaataaaaatcaatgggaacagggattcctctgggcaactcccccaacctcatccctttcaggggttgggaaatctcccaaccatcttcctgatggcagcggtggttcactagagataaagcccctcagggatgccttcgtgtttcttataaagaacactttctatagattttttgaagtcttcatttgttgctttcattctatgttctcttaaggccatcagaccagcttctgtacagattgccttgatgtcagcaccagagaagtcatctttagccatgatcaagtcgtccagggttacatcattggccagtgtcatcctgcttgtgtgaatctgaaagatgtgcttcttagtcttttcatcaggcaggtggaactcgatcttcttgtcaatgcggcctggtctgataagtact

SEQ ID NO: 5870 - DNA, 1767 bp, Homo sapiens
aagagacaatagataaataaccaacacgcagagaacaatggagaattaacagctcatacaatgaggggagaggattcttttctcatataattattttcttctctaaaagagtgattcgttagatcttaaactaaatgttgcttaattttagaataacttcaggaatatttttataaatcagaaaaaaatcttattcctttatatatgctaattctacatctgaaaacatttttcggttcttacattgctcccacctccttgacccttaggtataatggagagaattctgcatcctagtatgcatacgcattcccacctgggtgcctttgctctgggtgccttcccacccagaggcccttctttmctcttctctgcctgagttctattcttcttccatcaatgaagccttttctgtgcacatcagttaacagtgacattttctttcctgcttctgagtcctcatgggacgaatttccaggttatgcttggacacactgtcttgagtaaccagctaagttttcatagatgtgtgctcatgtctatttattacatggatggttcctgacatgcccagacagtgtgaagcctcaatgaatatccgttcatgactgagcctctatggacatttgagaacagctttaaagtgaataactgtataataattttatggaaaatattcaaattttccaggaaaagggatgatcggatgacaagaacacctctgtttctgtccccattatttctactagtcattcacttttgcatgagccagagttgatactcttattaaatgcttggtgtttggaaaagtttgtgaggccaacatttgccttaggtactggtcagacaaagctgaacctgatgagagagaagaggtcatcagattgcacatacttaaaaagtaaagaaactctaggtagtcttgcctcccacccaggcttaaagagttggcatcaaggtgctcaaatggacccaacacagagactggcgatgctttcaggtttggttctgtttgctgctcttataaactcattttgtgtccaagtggcttgctctgtcagatgaaaccttggaaaggtaaaaaatccttctcaagtcaaattttcatcttcctttgaaatctctgaacccattaactcgggacattaaccagcactttcatgttacccacctgagaccacctcttgttcagcatcaaccatcttttttttttttttttttttttttttttttttttttgtgaaagagcatgctttatttggaagcagagtgctgcacagtgaccgacagatgaaggccacccattgggcactcacacatcgtactccaaaatacacacaggatgctttgctaataaaaatcaatgggaacagggattcctctgggcaactcccccaacctcatccctttcaggggttgggaaatctcccaaccatcttcctgatggcagcggtggttcactagagataaagcccctcagggatgccttcgtgtttcttataaagaacactttctatagattttttgaagtcttcatttgttgctttcattctatgttctcttaaggccatcagaccagcttctgtacagattgccttgatgtcagcaccagagaagtcatctttagccatgatcaagtcgtccagggttacatcattggccagtgtcatcctgcttgtgtgaatctgaaagatgtgcttcttagtcttttcatcaggcaggtggaactcgatcttcttgtcaatgcggcctggtctgataagtact

SEQ ID NO: 5871 - DNA, 1767 bp, Homo sapiens
aagagacaatagataaataaccaacacgcagagaacaatggagaattaacagctcatacaatgaggggagaggattcttttctcatataattattttcttctctaaaagagtgattcgttagatcttaaactaaatgttgcttaattttagaataacttcaggaatatttttataaatcagaaaaaaatcttattcctttatatatgctaattctacatctgaaaacatttttcggttcttacattgctcccacctccttgacccttaggtataatggagagaattctgcatcctagtatgcatacgcattcccacctgggtgcctttgctctgggtgccttcccacccagaggcccttctttcctcttctctgcctgagttctattcttcttccatcaatgaagccttttctgtgcacatcagttaacagtgacattttctttcctgcttctgagtcctcatgggacgaatytccaggttatgcttggacacactgtcttgagtaaccagctaagttttcatagatgtgtgctcatgtctatttattacatggatggttcctgacatgcccagacagtgtgaagcctcaatgaatatccgttcatgactgagcctctatggacatttgagaacagctttaaagtgaataactgtataataattttatggaaaatattcaaattttccaggaaaagggatgatcggatgacaagaacacctctgtttctgtccccattatttctactagtcattcacttttgcatgagccagagttgatactcttattaaatgcttggtgtttggaaaagtttgtgaggccaacatttgccttaggtactggtcagacaaagctgaacctgatgagagagaagaggtcatcagattgcacatacttaaaaagtaaagaaactctaggtagtcttgcctcccacccaggcttaaagagttggcatcaaggtgctcaaatggacccaacacagagactggcgatgctttcaggtttggttctgtttgctgctcttataaactcattttgtgtccaagtggcttgctctgtcagatgaaaccttggaaaggtaaaaaatccttctcaagtcaaattttcatcttcctttgaaatctctgaacccattaactcgggacattaaccagcactttcatgttacccacctgagaccacctcttgttcagcatcaaccatcttttttttttttttttttttttttttttttttttttgtgaaagagcatgctttatttggaagcagagtgctgcacagtgaccgacagatgaaggccacccattgggcactcacacatcgtactccaaaatacacacaggatgctttgctaataaaaatcaatgggaacagggattcctctgggcaactcccccaacctcatccctttcaggggttgggaaatctcccaaccatcttcctgatggcagcggtggttcactagagataaagcccctcagggatgccttcgtgtttcttataaagaacactttctatagattttttgaagtcttcatttgttgctttcattctatgttctcttaaggccatcagaccagcttctgtacagattgccttgatgtcagcaccagagaagtcatctttagccatgatcaagtcgtccagggttacatcattggccagtgtcatcctgcttgtgtgaatctgaaagatgtgcttcttagtcttttcatcaggcaggtggaactcgatcttcttgtcaatgcggcctggtctgataagtact

SEQ ID NO: 5872 - DNA, 806 bp, Homo sapiens
agtaaagaacaccctccttcctatccaagtttggaactgagagagctggagtyaggtcgatggaggtcaaagtaactattgctaataaaacgggaaggtagcttcagggctgcagccaggttggcctgccaatatattacacctctggactcactctgtcactggctgggctggctacaggctattctctgcacaaggcagagaactgccaggacacattctttctgctggcagccagagtccacagggaaggaactagaagggtatataggacatgggtgcctagttattctccaaacataatcagggagtcactctgcctccagtgggtggagagagaggctaggaacattaaccagtggaagccctccacatgaagacatgagacacagggaataagtgttcctcccaccaacactatcttgcactttttttccaccttttctttggtgtgaaaatgttcaaagagtaaagaaaatagtaataatgacctcacattttcccctcagccagctagagcaatctttacattatacatagacacaccaatttactcatggcaacacaataggtattttttactcaattctgtaaaaataaagtttttacagaagtttgtacacatcagcagtactacaagaactgctgatgcctggctacaattttataaaccaccacagagcttacaaaataaacaaaagaaaaattgaaattataagttcaaagagtaggttttaatttaataagctattgtgtatttaggtgaaaaccaattaaacttggaattgcattacaaatttgaaatt

SEQ ID NO: 5873 - DNA, 806 bp, Homo sapiens
agtaaagaacaccctccttcctatccaagtttggaactgagagagctggagttaggtcgatggaggtcaaagtaactattgctaakaaaacgggaaggtagcttcagggctgcagccaggttggcctgccaatatattacacctctggactcactctgtcactggctgggctggctacaggctattctctgcacaaggcagagaactgccaggacacattctttctgctggcagccagagtccacagggaaggaactagaagggtatataggacatgggtgcctagttattctccaaacataatcagggagtcactctgcctccagtgggtggagagagaggctaggaacattaaccagtggaagccctccacatgaagacatgagacacagggaataagtgttcctcccaccaacactatcttgcactttttttccaccttttctttggtgtgaaaatgttcaaagagtaaagaaaatagtaataatgacctcacattttcccctcagccagctagagcaatctttacattatacatagacacaccaatttactcatggcaacacaataggtattttttactcaattctgtaaaaataaagtttttacagaagtttgtacacatcagcagtactacaagaactgctgatgcctggctacaattttataaaccaccacagagcttacaaaataaacaaaagaaaaattgaaattataagttcaaagagtaggttttaatttaataagctattgtgtatttaggtgaaaaccaattaaacttggaattgcattacaaatttgaaatt

SEQ ID NO: 5874 - DNA, 806 bp, Homo sapiens
agtaaagaacaccctccttcctatccaagtttggaactgagagagctggagttaggtcgatggaggtcaaagtaactattgctaataaaacgggaaggtagcttcagggctgcagccaggttggcctgccaatatattacacctctggactcactctgtcactggctgggctggctacaggctattctctgcacaaggcagagaactgccaggacacattctttctgctggcagccagagtccacagggaaggaactagaagggtatataggacatgggtgcctagttattctccaaacataatcagggagtcactctscctccagtgggtggagagagaggctaggaacattaaccagtggaagccctccacatgaagacatgagacacagggaataagtgttcctcccaccaacactatcttgcactttttttccaccttttctttggtgtgaaaatgttcaaagagtaaagaaaatagtaataatgacctcacattttcccctcagccagctagagcaatctttacattatacatagacacaccaatttactcatggcaacacaataggtattttttactcaattctgtaaaaataaagtttttacagaagtttgtacacatcagcagtactacaagaactgctgatgcctggctacaattttataaaccaccacagagcttacaaaataaacaaaagaaaaattgaaattataagttcaaagagtaggttttaatttaataagctattgtgtatttaggtgaaaaccaattaaacttggaattgcattacaaatttgaaatt

SEQ ID NO: 5875 - DNA, 806 bp, Homo sapiens
agtaaagaacaccctccttcctatccaagtttggaactgagagagctggagttaggtcgatggaggtcaaagtaactattgctaataaaacgggaaggtagcttcagggctgcagccaggttggcctgccaatatattacacctctggactcactctgtcactggctgggctggctacaggctattctctgcacaaggcagagaactgccaggacacattctttctgctggcagccagagtccacagggaaggaactagaagggtatataggacatgggtgcctagttattctccaaacataatcagggagtcactctgcctccagtgggtggagagagaggctaggaacattaaccagtggaagccctccacatgaagacatgagacacrgggaataagtgttcctcccaccaacactatcttgcactttttttccaccttttctttggtgtgaaaatgttcaaagagtaaagaaaatagtaataatgacctcacattttcccctcagccagctagagcaatctttacattatacatagacacaccaatttactcatggcaacacaataggtattttttactcaattctgtaaaaataaagtttttacagaagtttgtacacatcagcagtactacaagaactgctgatgcctggctacaattttataaaccaccacagagcttacaaaataaacaaaagaaaaattgaaattataagttcaaagagtaggttttaatttaataagctattgtgtatttaggtgaaaaccaattaaacttggaattgcattacaaatttgaaatt

SEQ ID NO: 5876 - DNA, 806 bp, Homo sapiens
agtaaagaacaccctccttcctatccaagtttggaactgagagagctggagttaggtcgatggaggtcaaagtaactattgctaataaaacgggaaggtagcttcagggctgcagccaggttggcctgccaatatattacacctctggactcactctgtcactggctgggctggctacaggctattctctgcacaaggcagagaactgccaggacacattctttctgctggcagccagagtccacagggaaggaactagaagggtatataggacatgggtgcctagttattctccaaacataatcagggagtcactctgcctccagtgggtggagagagaggctaggaacattaaccagtggaagccctccacatgaagacatgagacacagggaataagtgttcctcccaccaacactatcttgcactttttttccaccttttctttggtgtgaaaatgttcaaagagtaaagaaaatagtaataatgacctcacattttcccctcagccagctagagcaatctttacattatacatagacacaccaatttactcatggcaacacaayaggtattttttactcaattctgtaaaaataaagtttttacagaagtttgtacacatcagcagtactacaagaactgctgatgcctggctacaattttataaaccaccacagagcttacaaaataaacaaaagaaaaattgaaattataagttcaaagagtaggttttaatttaataagctattgtgtatttaggtgaaaaccaattaaacttggaattgcattacaaatttgaaatt

SEQ ID NO: 5877 - DNA, 787 bp, Homo sapiens
aaaggccatggagaagaaggagaagtagaggtggtcyatccaagaagagaaaggggtgagtttttagccaaaccagaaaggggaaggtagtggttggggcagaggctctatttctgacttctgtaatacggttatttctcccatgggctgaaggcagcaggaactatgagataatttttatgagaaaagtattcccttttttattgcctttccatattctgaataagtctagagagagcctcagtttggtgccaattttcctttaacacctctcaacatttcctcatctcctccaccctctttccttaacaaagagggaacagacctcaatttaagagccctggtcggcaaaactgtggttagctggaattcaattacaatgctttgttttgtatttatttctattgatggtgaataatctggtttgaaatgtatagtagctatagtcttctttaaaataaaatttgaaaaaagaatttattacattggaatttaagctgagtgatttgaaactaattatcaaactaaaattcttcattgacctaaatgtcaagaaaatgacaggatgatatggtggacataaaccttagtctgggaatcaaggatcttccatgagctgtgagtgtgatttttggtcacagtgatttcattttcacttttattaatgaaagacatacagctgctagccagaacttagcatgagacggccaaagtttgaacatattaagttactaaagttctagtcaaaggcaaagaaatgatgttttagtgagtctgtgccaattta

SEQ ID NO: 5878 - DNA, 787 bp, Homo sapiens
aaaggccatggagaagaaggagaagtagaggtggtctatccaagaagagaaaggggtgagtttttagccaaaccagaaaggggaaggtagtggttggggcagaggctctatttctgacttctgtaatacggttatttctcccatgggytgaaggcagcaggaactatgagataatttttatgagaaaagtattcccttttttattgcctttccatattctgaataagtctagagagagcctcagtttggtgccaattttcctttaacacctctcaacatttcctcatctcctccaccctctttccttaacaaagagggaacagacctcaatttaagagccctggtcggcaaaactgtggttagctggaattcaattacaatgctttgttttgtatttatttctattgatggtgaataatctggtttgaaatgtatagtagctatagtcttctttaaaataaaatttgaaaaaagaatttattacattggaatttaagctgagtgatttgaaactaattatcaaactaaaattcttcattgacctaaatgtcaagaaaatgacaggatgatatggtggacataaaccttagtctgggaatcaaggatcttccatgagctgtgagtgtgatttttggtcacagtgatttcattttcacttttattaatgaaagacatacagctgctagccagaacttagcatgagacggccaaagtttgaacatattaagttactaaagttctagtcaaaggcaaagaaatgatgttttagtgagtctgtgccaattta

SEQ ID NO: 5879 - DNA, 836 bp, Homo sapiens
aacctgcacaagggctggactgtggcaggcatggaaatgtgctcctcacatcccccttcaaagaaaaatttgcttccagctgcagggagtggggtctccaggtggcctccagcagtcagctcctgcaggctctgctgctgttgaaagagctggcttggctacatttatgtccttcctggagatgcctgaatcccacggatttaaaactcctagagaattttaaaacaaacaaacaaaaaacccctagctaatttagcaaggtcacaaaatgcaaggtcaaaaatcaaatctattatattaatacatattcatcaacaacaatttaaaaaaagaaattaagaagcaatgctttcctatccacttcctagaaacctaatggaggggcaccaagttctcaaggyttgcccatatctgggggtttcatcttattgaaactgtttggctagccacccatagaccctgcccaaaaagcaaggaggagtaaatacaaggagatggggttgagaccagcaacaacgtggtgaaagatatattcaaacagatttttgtggagtttttttaggtaaagtacaaaataactcacctcttgtttattcctaagaattcctcaataaaattcacatttatgctaattgcccttaaggtagctagtcactgttcccttcttaggttgaggctactgtagttttcaacttacaatcatttctccattgcccagttacttaaaaatggctatgggtcccttggggaaggaccggggaatcaataccatgtatatttccatgaatttttcagggtccttcattctggacacctgagcacctatttagccagtg

SEQ ID NO: 5880 - DNA, 836 bp, Homo sapiens
aacctgcacaagggctggactgtggcaggcatggaaatgtgctcctcacatcccccttcaaagaaaaatttgcttccagctgcagggagtggggtctccaggtggcctccagcagtcagctcctgcaggctctgctgctgttgaaagagctggcttggctacatttatgtccttcctggagatgcctgaatcccacggatttaaaactcctagagaattttaaaacaaacaaacaaaaaacccctagctaatttagcaaggtcacaaaatgcaaggtcaaaaatcaaatctattatattaatacatattcatcaacaacaatttaaaaaaagaaattaagaagcaatgctttcctatccacttcctagaaacctaatggaggggcaccaagttctcaaggtttgcccatatctgggggtttcatcttattgaaactgtttggctagccacccatagaccctgcccaaaaagcaaggaggagtaaatacaaggagatggggttgagaccagcaacaacgtggtgaaagatatattcaaacagatttttgtgsagtttttttaggtaaagtacaaaataactcacctcttgtttattcctaagaattcctcaataaaattcacatttatgctaattgcccttaaggtagctagtcactgttcccttcttaggttgaggctactgtagttttcaacttacaatcatttctccattgcccagttacttaaaaatggctatgggtcccttggggaaggaccggggaatcaataccatgtatatttccatgaatttttcagggtccttcattctggacacctgagcacctatttagccagtg

SEQ ID NO: 5881 - DNA, 772 bp, Homo sapiens
agtttatgtaaacatgtrgttctcaaatttggcaggatattagtgtcacccaagcaaataataataataaatcccacttaaagtttcgggcaaaatagttgtagtggtagcatatttttcccaaatcttcataaaaccagctagaacaattcagtagcaaatccaaaaacccttggcctatatttatagtaaagctaggtgacaagaattttgggttatttattgctgcataacaaatcacacccaaatttagtggcttaagataacattatattatcactatgatatctgtgggatagaaaatttaaaaaatggcttaggtgggtggtcccagctctagatttttcctaatgctgcagtcagactgtggctggaacaggaacagaagatgctgaaggagctcagggttggccaggtaacttcctctcttaatgtgttatcaggatctctccatatggaatctccagatcatgtctcatgggcttcctcagaacctaatgtcctctagaaagtcagagtgcctatagtatgtctgaagacttcaagagtattccatcaagaaaggcagaagcttcaccacctcagatccagccacagcagtcaccaggggcatttctgtcatactctacagattcagtccaaaaagccagtcaagtttcaaggagagaagacacagattccatctgttagtggcatggtgtcaaaaccacattgtaaagtgaccatgtggaatgacagttatggttgcagccatctttaaaaagtattgtcc

SEQ ID NO: 5882 - DNA, 772 bp, Homo sapiens
agtttatgtaaacatgtggttctcaaatttggcaggatattagtgtcacccaagcaaataataataataaatcccacttaaagtttcgggcaaaatagttgtagtggtagcatatttttcccaaatcttcataaaaccagctagaayaattcagtagcaaatccaaaaacccttggcctatatttatagtaaagctaggtgacaagaattttgggttatttattgctgcataacaaatcacacccaaatttagtggcttaagataacattatattatcactatgatatctgtgggatagaaaatttaaaaaatggcttaggtgggtggtcccagctctagatttttcctaatgctgcagtcagactgtggctggaacaggaacagaagatgctgaaggagctcagggttggccaggtaacttcctctcttaatgtgttatcaggatctctccatatggaatctccagatcatgtctcatgggcttcctcagaacctaatgtcctctagaaagtcagagtgcctatagtatgtctgaagacttcaagagtattccatcaagaaaggcagaagcttcaccacctcagatccagccacagcagtcaccaggggcatttctgtcatactctacagattcagtccaaaaagccagtcaagtttcaaggagagaagacacagattccatctgttagtggcatggtgtcaaaaccacattgtaaagtgaccatgtggaatgacagttatggttgcagccatctttaaaaagtattgtcc

SEQ ID NO: 5883 - DNA, 582 bp, Homo sapiens
gtcagtaaaggagtaagataaacaactgtcaagattttggttgtagttttcagctctgagccctatccagagcagttcttccaacctttccttcccttgactgagcccaaaaaggacagaagtggtggccttttctctctccatcctgatacacagtggttcaaaccagtttcctcttcagtgctcttaatgaagagcattgaatgtggttcaatgcagttttctcttcattactgggtttttcctctactatgaatccaccagttccatccctcccatgatctctgacattcaatcacayatttttttttgcatcatctctgagaattcctcaaattcctaatagaggcagggcaggatttgaacctgttcccagggaaatgtcattttccttttctccttggatattcatttgcctcatcctttgagctttccacacattcctgtctctatcccactccatttagaattttgtcatattggttaagatgattatggttgcatagatagataattcactttccaatggttgaataatagttgtttattactccacatggcaataggtctagaggtggatcc

SEQ ID NO: 5884 - DNA, 582 bp, Homo sapiens
gtcagtaaaggagtaagataaacaactgtcaagattttggttgtagttttcagctctgagccctatccagagcagttcttccaacctttccttcccttgactgagcccaaaaaggacagaagtggtggccttttctctctccatcctgatacacagtggttcaaaccagtttcctcttcagtgctcttaatgaagagcattgaatgtggttcaatgcagttttctcttcattactgggtttttcctctactatgaatccaccagttccatccctcccatgatctctgacattcaatcacacwtttttttttgcatcatctctgagaattcctcaaattcctaatagaggcagggcaggatttgaacctgttcccagggaaatgtcattttccttttctccttggatattcatttgcctcatcctttgagctttccacacattcctgtctctatcccactccatttagaattttgtcatattggttaagatgattatggttgcatagatagataattcactttccaatggttgaataatagttgtttattactccacatggcaataggtctagaggtggatcc

SEQ ID NO: 5885 - DNA, 809 bp, Homo sapiens
tttgggttgactccacatgttggctgttggaattagtgctgctatgagcatggggtacatgtgtgagtatctgttttcaattctttggagtacattcctagcagtggaattgctgtgacatatgggaactctatatttaactttttgaggaaccgccatactattttccacagtggctgagccatttcacatttctgccagcgatgtacgagggttccaatttctccacaaccttgtcaacacttacttttcgtttttaaaattatagccatcctggtggatgtgaagtggtatctcattgtggtttttatttgcttttccaagactttttttttttaaaaaactgaaagagttggcaattttatgttcacatttcacaatacagatgaaaactgtacttttttggtctcacttctcccctccaaaactattctctggtaggaagggggagcaggtcttccttatgctgctaaggaaacacccagcgtcacagcaccatggtctcctggagaagaacaaatagcaaaaagctgatatgacgaggtctctccactattctaatctgtctggcttagttattctgggctgcgtgggctccaccatgcgatgggtgggcgggctcatcctgggggcctgggtaacactggcatgtgacatcccatgggtggcctcattccaggagcaggtcccatggcatcaccctcaggaggaggtgggcctgtcactggcaccataggaggaccccccatagagggtgctggcaycacaccagggtggcgaggaggacctgggcgctggtggaagtggga

SEQ ID NO: 5886 - DNA, 804 bp, Homo sapiens
ggctcttcccagatgaggacagagctaccaagtgggcagcagcagtagcggcaggactcatccactcaagaactggcctcaaggtcccccaagaatgaagcactgaaggcaggtggctgccagctagcatgggcaggcctctctgctcagctcaggatattctctctaacattctgtccttgctcagaattcctgggccactctgcgcctgagacccctcagccccaggcagttcaggcatgttctgtctactacactctaaaggagaagtgtgaacacaaaccacagccgcatgcacaacaccgagcttgtttctccacccacatagactgtatttgtcactattatacacaatatggtgccatcatgcatattttgtacatttgatcarccaatatttatataaaactttcataaacactttcaaacagttttaccccacagggtgggcagaggtgcttgtcaatataataaaactgaacaacagtggtagaaaaaggtacacttgtacttatcttcaagtttaagatgtaaattttttctgttcaatggccactacctcatattatttttaggatctgggatcggacttagcaacacattatgactttcaagaagttgagctcactgttttgtggcgttctttgcagaacaccatgaacttccgggtgccccatgtgctgacaagtgtcagaacagctggtgtccagctgacgtgaggctggacttgtgtgataggcacgttgtggccatagctccccactctgtgaaatgatgagatcgacatgcctccatccatcagta

SEQ ID NO: 5887 - DNA, 753 bp, Homo sapiens
agggtcagaaagttcttgaaaggaggagaagcctggaggtcctggtaattggagggaatccagcctggcatttggaatatttgctgtgctgatacactgatgttctttcactgaaamaaaacaaaacaaaacaaaacaaaacattgccacatgatgcaaggatcacaaatggagaacaagatgatgaacaagatggtagcaagtatagtaatgtcaagagaaacaggttttcaccaaaagagggtaagctattagaaaggattttaccctctacttgactgactgaacctgccttacacttaagagtcatttggagggaactggaggggcagccagttaccctaggagagcagcctccaggggctgcccaagcctgctgtgtgaaattcagggctaaagctctaaaactctgttgatctgtgcatgcgtttgctagcgctgcagtgacaaagtactacaaactggagggcttacataatagaaatttattgtttcacagttctggaagccaaaagtgtcaaatcaaggggtcagaagagttgtttccttctgaggctggaggagaatctgttctgtgcctctctcgtagctcctggtggtttgctagaagtctttggcattccttggcttgtgacagcataactctgatattcatatggctttctcactttatctctgtatccaaatctccccttttcacaaggacttgatcatattggattaggcccaccctaatgacctcaccttaactag

SEQ ID NO: 5888 - DNA, 585 bp, Homo sapiens
aatatgctgtgtgatcttggatacgccacttagtctctaactaaatgctgatagtaacatctgtgttgttgatgtcagagaaacgaggtaggaatcagtgayagactgtttaaaaagttacttttaaagaacaaagggctatacaaaagctaagtctgtggtgatttccctcctcctttgtatatggacacctgcttaaatgcaattgattatgtggggtgtgtataataataatttgagttaatttcctccatgaacattggggcttctgagacgtcgcttgcacagcggctggttagctaatttggttaatgaggccagactcagctgtgtaaccctagagctagccagattcttcccctccattcccaggccaggaatgctcagaggccctgatcgacagcttttaagtggatgttgctggtcaccagcagccccactgacagagtgaagattatttcccgtggcttcactgctgaggcagcccctggtgcaaggaattctcactcctcaacctctggaagtcagatgagcttcaagcctggtggccccacatctctaaggcaattggtgggggtgggtggg

SEQ ID NO: 5889 - DNA, 836 bp, Homo sapiens
atcccgaggtcaggagatcgagaccatcctggctaacacggtgaaaccccgtctctactaaaaatacaaaaaattagccgggcttggtggcgggcgcctgtagtctcagctactcgggaggctgaggcaggagaatgtcgtgaacccgggaggcggagcttgcagtgagccgagattgcgccactgcactccagcctgggcgacagagcgagactccgtctcaaaaaaaaaaaaaaaaaaaaaaagggaagtgtcacatccactgtaagcaatactccctctacaaacgcactcccagactaaaccgtcacggacctaagaagagcacatgagatccgcaatcagccccgggctcatggcctcccacgggagggaaagcctgtggctccgctttcaggagcaatgttatgggaagctatatatggaaactagaatttggccttacagtgctacggtgctgtaygttttataaaattagaatccagtgtcttttagaggtggcgggaaccttggagagtgcatgctgggtaggtgccccattgagaacaccctgagtgggagggaaccccgcccagctagcatatggcagtgaacagggagtgaggggatggcccagaacccgcacctggcctcacgcagccagtcgcagcacagaggccaccaggggtcagtctagcagcatcataagtgagaaagaccctggttcttctgctccatggagaacacccctgcagttcactagcccagcccatggcaggcggggaagcagaacggactcttcatagccaccagcctgttgcctcctcgcctgatgaaaatcagaccaatacgaaatt

SEQ ID NO: 5890 - DNA, 636 bp, Homo sapiens
acttgagtcacaagtacacatttaattctgaaaatggctctgggagattgggactattttttttttaatgtccattttatgctgaggaaaacgaagctcaaccaagtaaatggtttgtataaggtcacagaatgaggaagcggcaatctgctgggtccattgaggttcctttcctaccacacagcattctactgctataggggagtccgcagagcaggcagagctgggcttagggggagctccagaggtctctctcttcagggaaggtctggtctgaccacctggggaggccatctgtgaaggctgcttgggctccagttcctcaggccttaggagagggtgtaacrtcatgttaaaacggaagtttccgctgagatgataagttgctaggtatcagctcccagagtcactggagcaaaatgcaaattttataaggaaatatttaaaaactaggtttttacaactcttgcagccccacttacggctgaggatcaggttgttggagattaagggggaaaggaattgtttattgaataccatgtgcctcttcttgcaggaaagacagtggaaggcacctgcctctcacagtaagtctatgaggggagcttcatcagaacttctctgaaagaggagtca

SEQ ID NO: 5891 - DNA, 636 bp, Homo sapiens
acttgagtcacaagtacacatttaattctgaaaatggctctgggagattgggactattttttttttaatgtccattttatgctgaggaaaacgaagctcaaccaagtaaatggtttgtataaggtcacagaatgaggaagcggcaatctgctgggtccattgaggttcctttcctaccacacagcattctactgctataggggagtccgcagagcaggcagagctgggcttagggggagctccagaggtctctctcttcagggaaggtctggtctgaccacctggggaggccatctgtgaaggctgcttgggctccagttcctcaggccttaggagagggtgtaacatcatgttaaaacggaagtttccgctgagatgataagttgctaggtatcagctcccagagtcactggagcaaaatgcaaattttataaggaaatatttaaaaactaggtttktacaactcttgcagccccacttacggctgaggatcaggttgttggagattaagggggaaaggaattgtttattgaataccatgtgcctcttcttgcaggaaagacagtggaaggcacctgcctctcacagtaagtctatgaggggagcttcatcagaacttctctgaaagaggagtca

SEQ ID NO: 5892 - DNA, 636 bp, Homo sapiens
acttgagtcacaagtacacatttaattctgaaaatggctctgggagattgggactattttttttttaatgtccattttatgctgaggaaaacgaagctcaaccaagtaaatggtttgtataaggtcacagaatgaggaagcggcaatctgctgggtccattgaggttcctttcctaccacacagcattctactgctataggggagtccgcagagcaggcagagctgggcttagggggagctccagaggtctctctcttcagggaaggtctggtctgaccacctggggaggccatctgtgaaggctgcttgggctccagttcctcaggccttaggagagggtgtaacatcatgttaaaacggaagtttccgctgagatgataagttgctaggtatcagctcccagagtcactggagcaaaatgcaaattttataaggaaatatttaaaaactaggtttttacaactcttgcagccccacttacggctgaggatcaggttgttggagattragggggaaaggaattgtttattgaataccatgtgcctcttcttgcaggaaagacagtggaaggcacctgcctctcacagtaagtctatgaggggagcttcatcagaacttctctgaaagaggagtca

SEQ ID NO: 5893 - DNA, 636 bp, Homo sapiens
acttgagtcacaagtacacatttaattctgaaaatggctctgggagattgggactattttttttttaatgtccattttatgctgaggaaaacgaagctcaaccaagtaaatggtttgtataaggtcacagaatgaggaagcggcaatctgctgggtccattgaggttcctttcctaccacacagcattctactgctataggggagtccgcagagcaggcagagctgggcttagggggagctccagaggtctctctcttcagggaaggtctggtctgaccacctggggaggccatctgtgaaggctgcttgggctccagttcctcaggccttaggagagggtgtaacatcatgttaaaacggaagtttccgctgagatgataagttgctaggtatcagctcccagagtcactggagcaaaatgcaaattttataaggaaatatttaaaaactaggtttttacaactcttgcagccccacttacggctgaggatcaggttgttggagattaagggggaaaggaattgyttattgaataccatgtgcctcttcttgcaggaaagacagtggaaggcacctgcctctcacagtaagtctatgaggggagcttcatcagaacttctctgaaagaggagtca

SEQ ID NO: 5894 - DNA, 636 bp, Homo sapiens
acttgagtcacaagtacacatttaattctgaaaatggctctgggagattgggactattttttttttaatgtccattttatgctgaggaaaacgaagctcaaccaagtaaatggtttgtataaggtcacagaatgaggaagcggcaatctgctgggtccattgaggttcctttcctaccacacagcattctactgctataggggagtccgcagagcaggcagagctgggcttagggggagctccagaggtctctctcttcagggaaggtctggtctgaccacctggggaggccatctgtgaaggctgcttgggctccagttcctcaggccttaggagagggtgtaacatcatgttaaaacggaagtttccgctgagatgataagttgctaggtatcagctcccagagtcactggagcaaaatgcaaattttataaggaaatatttaaaaactaggtttttacaactcttgcagccccacttacggctgaggatcaggttgttggagattaagggggaaaggaattgtttattgaatrccatgtgcctcttcttgcaggaaagacagtggaaggcacctgcctctcacagtaagtctatgaggggagcttcatcagaacttctctgaaagaggagtca

SEQ ID NO: 5895 - DNA, 814 bp, Homo sapiens
tacctggagactcaggctgcatgtcgccccagaggtgtgcagatcttttggtctggacaccatttttaaaatatgtgaatttgactgccacccaatcccctcaacatctgaatttctagcctgcattataaaattttttttaatttttttatttccatacgttattggtgaacaagtggtgttttgttacatgagtaagttctttagtggtgatttgcaagattttggtgcacccatcacccaagcagtgtacactgaacccagtttgtagttttctatccctcaccccsttcccaccctttccccctgagtccccaaagtccactgtgtcatttctatgcctttgcatactcatagcttagcttagctccaacttatgagtgagaacatacgatgtttggttttccattcctgagttacttcacttagaataatagtccccaatctcatccaggttgctgtgaatgccattaattcattcctttttatggctaatataccttcatatgtgtgtgtgtgtatatatatatatatatatatatatatgaaaatccaaataacctcaatgagaaataaaatgggagatattacaacggacacaatagaaatacaaaaaaatcattcaagtctactatgaacacctttacgtgcataaactagaaaatctagaaaagatgaataaattcctggaaagataaaccctcctagcttaaatcaggaagaattagatactctgaacagaccaataacaagcagcaagattaaagtggtaattaaaaaattaccaacaaaaaaagtccaggaccagacggat

SEQ ID NO: 5896 - DNA, 1396 bp, Homo sapiens
catggtcatggagaggatcttggaaactgcgactttaaacacaaggataggccaggcatggtggttcatgcctttaatcccagcactttgggaggccgaggcaggcagatcacttgaggtcaggagttcgagaccagcctggccacatggtgaaacccctctctactraagatacaaaaattaacctggcgtggtggtgggcacttgtaatcccagctactcgggaggctaagcggggagaatggctggaacccgggaggcagaggctgcagtgagcggagatcacgctactgcagtccagcctgggcaacagaacgggactcgttctcaaaacaaacaaacaacaataaaaaaaacctacaaggacatataacaaaatcaattttaccataggcctgtaatcccagcattttgggaggcaaaggtgggaggatcacttgagcccagaagttcaagaccagcctgggcaacatggcaaaacctggtctctaccaaaaatacaataattagctgggcatggtggcatgcgcctgtagtcccaactactcgggaggctgaggtgaaaggatcacttgagcctgagaggttgaggctgcatgagctgtgatgatgccatcatgcagactgtacactccagcctgggtgacagagtgagacactgtctcaaaaaaaattaccaatctaactctgacaaaagtgtgattgtgtatgatgctaaaacagggtgagagagaaaggatctttttttttttttttttttggaaaaagtatctcactgtgtctctcccaggctgaaaggatcctccctgactcagccatctgagcagctggaactgtagatgcatgccaccatgcctagctagttttttgtaaataaatatatatatatataatatatattatacattataaatatatacatatatgtaatacatatatatgtaaatatatacatataaatgtaaatatatgtgtgtgtgtatatatatatatatatatatatattttttttttttttttgtagaaaggggttttgccatgttacccaggctgatctcaaactcctgtaggcgagtgatcctcctgcctcagcctcccaaagtgctgggattataggcctgagccaccttgcccagtcaggatactcatttcaagaaaaaattgacctgggaagataaagtatgggttgcacccctatttccatcaagctcaatttagtgtggagaatatttatggaaaattatgagtattctgtctgtgatgttaagaccccagtgaataatctacgtagagtctgtgaagcctcaaatcaatcaggagcagaatcagcagttgcctgcaggtgagttgctaccttttgagaacatagtgaaaaagtaggtgacaaggctgctaa

SEQ ID NO: 5897 - DNA, 767 bp, Homo sapiens
aatcattcactcactcaggactaactacatgtrtttcagatgagatgtgtacttgcctacatgcaagctagatggggacagggatatggttttatttaccttgttatccctaggacttagcacactaattatgtgcttcaaaatggctagaaatataatgaatgttgcagaatcataaaatctagcccaaccttattctggctgaattccttccacagttccacaattcttctagtataactactgggagtgtgggaatggagtctgaaggccatgtgagtatttatctctatgtatgagaaaactcaggaattaaaccaaaactatataaacttgaggtttaagatatttttacacattttttatgtaaaaagtaactcatactagttgcagaaaatataaatcgtaaaacacaactctaagcacattctttctttcatccattatcaaaagactatgatttggtacagtatcatatcctggttagcccttaatagattaaaaagaactgcagaatacattttcacctttaccgaacaggttcacctaacacaaaacttccaattgcctactgagtagacaaattaagcatgatccctgccctaggtgactttatatggtaatcccttgtcagcctctgggatgtacattcttaaaaaatcgtatttttgtcaaactctagattaacataaatcaaggtctcatataaaataggtctcatataaaattatttaaatagcattaaatatatatttttaaaaataaaa

SEQ ID NO: 5898 - DNA, 767 bp, Homo sapiens
aatcattcactcactcaggactaactacatgtatttcagatgagatgtgtacttgcctacatgcamgctagatggggacagggatatggttttatttaccttgttatccctaggacttagcacactaattatgtgcttcaaaatggctagaaatataatgaatgttgcagaatcataaaatctagcccaaccttattctggctgaattccttccacagttccacaattcttctagtataactactgggagtgtgggaatggagtctgaaggccatgtgagtatttatctctatgtatgagaaaactcaggaattaaaccaaaactatataaacttgaggtttaagatatttttacacattttttatgtaaaaagtaactcatactagttgcagaaaatataaatcgtaaaacacaactctaagcacattctttctttcatccattatcaaaagactatgatttggtacagtatcatatcctggttagcccttaatagattaaaaagaactgcagaatacattttcacctttaccgaacaggttcacctaacacaaaacttccaattgcctactgagtagacaaattaagcatgatccctgccctaggtgactttatatggtaatcccttgtcagcctctgggatgtacattcttaaaaaatcgtatttttgtcaaactctagattaacataaatcaaggtctcatataaaataggtctcatataaaattatttaaatagcattaaatatatatttttaaaaataaaa

SEQ ID NO: 5899 - DNA, 767 bp, Homo sapiens
aatcattcactcactcaggactaactacatgtatttcagatgagatgtgtacttgcctacatgcaagctagatggggacagggatatggytttatttaccttgttatccctaggacttagcacactaattatgtgcttcaaaatggctagaaatataatgaatgttgcagaatcataaaatctagcccaaccttattctggctgaattccttccacagttccacaattcttctagtataactactgggagtgtgggaatggagtctgaaggccatgtgagtatttatctctatgtatgagaaaactcaggaattaaaccaaaactatataaacttgaggtttaagatatttttacacattttttatgtaaaaagtaactcatactagttgcagaaaatataaatcgtaaaacacaactctaagcacattctttctttcatccattatcaaaagactatgatttggtacagtatcatatcctggttagcccttaatagattaaaaagaactgcagaatacattttcacctttaccgaacaggttcacctaacacaaaacttccaattgcctactgagtagacaaattaagcatgatccctgccctaggtgactttatatggtaatcccttgtcagcctctgggatgtacattcttaaaaaatcgtatttttgtcaaactctagattaacataaatcaaggtctcatataaaataggtctcatataaaattatttaaatagcattaaatatatatttttaaaaataaaa

SEQ ID NO: 5900 - DNA, 767 bp, Homo sapiens
aatcattcactcactcaggactaactacatgtatttcagatgagatgtgtacttgcctacatgcaagctagatggggacagggatatggttttatttaccttgttatccctaggacttagcacactaattatgtgcttcaaaatggctagaaatataatgaatgttgcagaatcataaaatctagcccaaccttattctggctgaattccttccacagttccacaattcttctagtataactactgggagtgtgggaatggagtctgaaggccatgtgagtattyatctctatgtatgagaaaactcaggaattaaaccaaaactatataaacttgaggtttaagatatttttacacattttttatgtaaaaagtaactcatactagttgcagaaaatataaatcgtaaaacacaactctaagcacattctttctttcatccattatcaaaagactatgatttggtacagtatcatatcctggttagcccttaatagattaaaaagaactgcagaatacattttcacctttaccgaacaggttcacctaacacaaaacttccaattgcctactgagtagacaaattaagcatgatccctgccctaggtgactttatatggtaatcccttgtcagcctctgggatgtacattcttaaaaaatcgtatttttgtcaaactctagattaacataaatcaaggtctcatataaaataggtctcatataaaattatttaaatagcattaaatatatatttttaaaaataaaa

SEQ ID NO: 5901 - DNA, 767 bp, Homo sapiens
aatcattcactcactcaggactaactacatgtatttcagatgagatgtgtacttgcctacatgcaagctagatggggacagggatatggttttatttaccttgttatccctaggacttagcacactaattatgtgcttcaaaatggctagaaatataatgaatgttgcagaatcataaaatctagcccaaccttattctggctgaattccttccacagttccacaattcttctagtataactactgggagtgtgggaatggagtctgaaggccatgtgagtatttatctctatgtatgagaaaactcaggaattaaaccaaaactatataaacttgaggtttaagatatttttacacattttttatgtmaaaagtaactcatactagttgcagaaaatataaatcgtaaaacacaactctaagcacattctttctttcatccattatcaaaagactatgatttggtacagtatcatatcctggttagcccttaatagattaaaaagaactgcagaatacattttcacctttaccgaacaggttcacctaacacaaaacttccaattgcctactgagtagacaaattaagcatgatccctgccctaggtgactttatatggtaatcccttgtcagcctctgggatgtacattcttaaaaaatcgtatttttgtcaaactctagattaacataaatcaaggtctcatataaaataggtctcatataaaattatttaaatagcattaaatatatatttttaaaaataaaa

SEQ ID NO: 5902 - DNA, 2679 bp, Homo sapiens
tgtcaagacatgcagtttgttagtcttgagcaagtaagagtccttatttgtatgccctcacatgttatcacaaatcccccagattctttttcagatctcatgccctaatttggggtttatgaaatctaccatgctgatagggattcctgtctgtcatggggactttgagccatgactcagaacaagacacttatcaatctggggcctctccgaagatgctgagaccagggccagtctcagctgcaacgccctgcttggaagccactatgggatgattctgcaacagatatcatgatgcaacagatgcccatgaatgacatgggaaagctgggccccatcgcccagggggacactcctgctgtgctctgtcagcaggagggagcctcctaggaacttcatcaggacccattctttctctttttcttttytttttttttttttttttttgtgagacggagtctcactctgtcacccaggctggagtgcagtggctcaatcttggcttactgcaacgtccgcctcctgggttcaagcgattcttttgactcagcctcctgagtagctgggattacaggcatgcactgccatgcctggctaatttttgtatttttagtagagacaaggtttcaccatgtcggccaggctggtctcaaactcctgacttcaagttgtcctcccaccttggcctcccaaagtgctgggattacaggcgtgaaccactgcgcttggccaggacccatctttgtgtgggatccctggctcagtgctaggacagaaacaggttttccttggactctgtggtgtgtgcttgagtgtatgtgggtgagtgtgtgtgtgataacgcaccctgccctgcctttccctccccactcctccaacctggaggtgacagtcacgaggcccagcccctccctgccaccttcctgccccagccccatctccattcaggggcaagtcctgctgtggtgcttagagtgcagctctttcaggctttcctttcgcttagccttgatttccaggccaccatgatcagactgggctcccaggcagcatcggagcatccccaaatccagggctgggaggagccaggccatcttgtccaagtaaggacttgaagttcagagaggagaaggcaccaagcttgtgtcacccgcaggtccatgcagaagggagattagaacccagatctgcttttcagcccagccaggcctgctacaaaagggcgggagggggcacccaggctgaggtgctggaattagcagttctctttaccctcaaattagccctgaggctggcccaagcccctccctgccagcgtgcccctctgtcttcaggagcccccagtgcctgccagggcttctccccttttgccagcttgcatccatcccccacggttccgtctcttggctgctgcttttacaggctccaagcagtggggaggctgatggggagagggggtctgtgttggactcagccagacttacttccagccagtcctcttgcctcccctccaaagatctgcttagagaccagggatgctcttcaaacctcacccttcgcctcactgctacagctctgactcagcccaataaaattatctaggattggtccgctgactcagcaaggaagtccagagccccctttccccatcctcaggcctcaacccccacagctgtctttcattccagagtacttggccccctcccctcaggaaattcctggaaaatatcaggcttcttggaggggagatctaaccacagccccggcagggagcaaagccgctgcagcctcatccatcattctgcccctgcccctcctccagcagcttgtgtgttgcatgggactgagcatggaagtgtcagaccccataaagtgatgggtgcatggctctgaggggaactccggggagggaggagagaggtgaggctggcatggggtagggcagtcagggcaggctgctgggaggtggaggactttgttttgggccagaaacgatgataaaaactgctaagtgcagaaatggaaagcgtgcttcaggcccaggggatggcataagaaaaggctagaggtagaaaccaaccggtgtgtagggggatggggaggaaatttgagaataagcagggctaggccagtcgcggtggctcatgcttgtaatcccagcactttgggaggccgaggcaggtggatcacctgaggtcaggagttcgagaccagcctggcctacatggcaaaaccctgtctcttctaaaaatacaaaaattagccgggcgtggtggcacacgcttgtaatcccagctgcttgggaggctgaggcaggagaattgcttgaaccggggaagcggaggttgcagtgagccgagattgtgccactgcactccagcctgggtgacacagcaagactctgtctaaaaacaaaacaaaacaaacaaacaaacaaaaaacaaaaacagaataaggtctagaggagtggccggaccggagaacctgggctgatcaggccagagggccggggccggggccaggctgtggaatttgcaggaagtctccaaagcaaaggcccaagagactctgggagacctgggagcaaaggagagcgtttgggggcggggagatgaatcttggactaaaagaaccttggccaaggaacactggtccctgcaacatccttggaccaccttg

SEQ ID NO: 5903 - DNA, 2679 bp, Homo sapiens
tgtcaagacatgcagtttgttagtcttgagcaagtaagagtccttatttgtatgccctcacatgttatcacaaatcccccagattctttttcagatctcatgccctaatttggggtttatgaaatctaccatgctgatagggattcctgtctgtcatggggactttgagccatgactcagaacaagacacttatcaatctggggcctctccgaagatgctgagaccagggccagtctcagctgcaacgccctgcttggaagccactatgggatgattctgcaacagatatcatgatgcaacagatgcccatgaatgacatgggaaagctgggccccatcgcccagggggacactcctgctgtgctctgtcagcaggagggagcctcctaggaacttcatcaggacccattctttctctttttcttttctttttttttttttttttttgtgagacggagtctcactctgtcacccaggctggagtgcagtggctcaatcttggcttactgcaacgtccgcctcctgggttcaagcgattcttttgmctcagcctcctgagtagctgggattacaggcatgcactgccatgcctggctaatttttgtatttttagtagagacaaggtttcaccatgtcggccaggctggtctcaaactcctgacttcaagttgtcctcccaccttggcctcccaaagtgctgggattacaggcgtgaaccactgcgcttggccaggacccatctttgtgtgggatccctggctcagtgctaggacagaaacaggttttccttggactctgtggtgtgtgcttgagtgtatgtgggtgagtgtgtgtgtgataacgcaccctgccctgcctttccctccccactcctccaacctggaggtgacagtcacgaggcccagcccctccctgccaccttcctgccccagccccatctccattcaggggcaagtcctgctgtggtgcttagagtgcagctctttcaggctttcctttcgcttagccttgatttccaggccaccatgatcagactgggctcccaggcagcatcggagcatccccaaatccagggctgggaggagccaggccatcttgtccaagtaaggacttgaagttcagagaggagaaggcaccaagcttgtgtcacccgcaggtccatgcagaagggagattagaacccagatctgcttttcagcccagccaggcctgctacaaaagggcgggagggggcacccaggctgaggtgctggaattagcagttctctttaccctcaaattagccctgaggctggcccaagcccctccctgccagcgtgcccctctgtcttcaggagcccccagtgcctgccagggcttctccccttttgccagcttgcatccatcccccacggttccgtctcttggctgctgcttttacaggctccaagcagtggggaggctgatggggagagggggtctgtgttggactcagccagacttacttccagccagtcctcttgcctcccctccaaagatctgcttagagaccagggatgctcttcaaacctcacccttcgcctcactgctacagctctgactcagcccaataaaattatctaggattggtccgctgactcagcaaggaagtccagagccccctttccccatcctcaggcctcaacccccacagctgtctttcattccagagtacttggccccctcccctcaggaaattcctggaaaatatcaggcttcttggaggggagatctaaccacagccccggcagggagcaaagccgctgcagcctcatccatcattctgcccctgcccctcctccagcagcttgtgtgttgcatgggactgagcatggaagtgtcagaccccataaagtgatgggtgcatggctctgaggggaactccggggagggaggagagaggtgaggctggcatggggtagggcagtcagggcaggctgctgggaggtggaggactttgttttgggccagaaacgatgataaaaactgctaagtgcagaaatggaaagcgtgcttcaggcccaggggatggcataagaaaaggctagaggtagaaaccaaccggtgtgtagggggatggggaggaaatttgagaataagcagggctaggccagtcgcggtggctcatgcttgtaatcccagcactttgggaggccgaggcaggtggatcacctgaggtcaggagttcgagaccagcctggcctacatggcaaaaccctgtctcttctaaaaatacaaaaattagccgggcgtggtggcacacgcttgtaatcccagctgcttgggaggctgaggcaggagaattgcttgaaccggggaagcggaggttgcagtgagccgagattgtgccactgcactccagcctgggtgacacagcaagactctgtctaaaaacaaaacaaaacaaacaaacaaacaaaaaacaaaaacagaataaggtctagaggagtggccggaccggagaacctgggctgatcaggccagagggccggggccggggccaggctgtggaatttgcaggaagtctccaaagcaaaggcccaagagactctgggagacctgggagcaaaggagagcgtttgggggcggggagatgaatcttggactaaaagaaccttggccaaggaacactggtccctgcaacatccttggaccaccttg

SEQ ID NO: 5904 - DNA, 751 bp, Homo sapiens
cccttcccaggccaaggttcagctctccatccctgctgctgcttgtgtggtggtgatccagctcccttagtcaagggtcatttgttgacccctcccacttccagctcatattctgcactttgagggactggaagtgctgtggtttgaatgttcatgtctacttcaaaattcatgttgagccttaatccccagagcaacaatattaagraatgggcctttaggaggtgattagggcgcttgggctctgtcctcatgggtgagattattgtccttaaaaaagggccaaagggagagactttgctccccttcattccttttgccacaagagaacacctggacgatgccatctatgaggaataggccctcactggacaccgaacctgctggtgccttgatcttggacttcccagcctcaagaactatgagaaaataaatttgttttttataaattacctggtctcaggcattttgttatagaagcacaattggactaagacagaagactgcagttcaaaaatgactggcttggagccagagaggtgcatggctcaagcttcaagacttctttcttaaatgggtctcttctaaatcaatattagctttcaaacctaatatgagataaataattttacaccttctgttttgaggagactccaccatattgtataagcccacagaattttcatccatctggccagtagaggagccctaggaagggcctagcctgacttaaggaactgtgaggtctaac

SEQ ID NO: 5905 - DNA, 813 bp, Homo sapiens
ggatcctgaagttgcttctcagggcaatgagaagccaatgtagactattaacacatgattaagaaatactaatctrtcaataaaaaaacagacacatgttttccagactagagaatctgggtcatagggaactgctgaataacctgggccacacaggaacgaaagactactgcagtagaaagaaaaaacaaaaagaggatgagcactggtaaccttggagaaaacaacagaatctgcagatgggcaaaacagaaaagcaggtagcagaatacatacccccaaaatatgctctttctcatattgattattttgagttgaagacaattgaaaagcagatacagatgcacacgttaataaacttctatttgttttcctcttgttaatctgtcttttgtcattcaatttatagggtcctgggtggagaatagctctagggggcagaagaaaacattaagtttttcctcccctacagtataaagttttgaattagaatcagatgaccaagtcacccacactcagtgcctctcgatctccttatctgtaaacaagatgatgatggcctccacctcaaagggtttttgaggacattaaattaggtaatatgaatttgggttctctataagttttaaacatttaaccaaatgtaaactactattattgttgatgttacaaagagtaaacacaataataaagagctaaaatgactgatttcttatttagaatcttagaagattcaccaggtttgacaagtgtggaaataaaaaaataaagactcacagaatgaagactactattttttctaacagtgggtaa

SEQ ID NO: 5906 - DNA, 813 bp, Homo sapiens
ggatcctgaagttgcttctcagggcaatgagaagccaatgtagactattaacacatgattaagaaatactaatctatcaataaaaaaacagacacatgttttccagactagagaatctgggtcatagggaactgctgaataacctgggccacacaggaacgaaagactactgcagtagaaagaaaaaacaaaaagaggatgagcactggtaaccttggagaaaacaacagaatctgcagatgggcaaaacagaaaagcaggtagcagaatacatacccccaaaatatgctmtttctcatattgattattttgagttgaagacaattgaaaagcagatacagatgcacacgttaataaacttctatttgttttcctcttgttaatctgtcttttgtcattcaatttatagggtcctgggtggagaatagctctagggggcagaagaaaacattaagtttttcctcccctacagtataaagttttgaattagaatcagatgaccaagtcacccacactcagtgcctctcgatctccttatctgtaaacaagatgatgatggcctccacctcaaagggtttttgaggacattaaattaggtaatatgaatttgggttctctataagttttaaacatttaaccaaatgtaaactactattattgttgatgttacaaagagtaaacacaataataaagagctaaaatgactgatttcttatttagaatcttagaagattcaccaggtttgacaagtgtggaaataaaaaaataaagactcacagaatgaagactactattttttctaacagtgggtaa

SEQ ID NO: 5907 - DNA, 816 bp, Homo sapiens
ccgagttgcaatcaactgtgaaaaatttactgaaacattagttaagctgagtaagtataaaagatgagcagtaaattccactgaattattttaagcccctagtcattcaggaaggggagaaaaattatgagmcaatcctttttttctttttttaaagtgaatgcttaaaaatattaatattcttgggaacattttaattttcattaagaaaacaccaacttactggtttccattgaatagttctgcccagagtttcagctggcctataaaggagtgtggagtagggctgatcacttctgtacatagaagcccacatcctccaccatctgcccagcagattctgaaaacaaaaaacaaaactgctctgcttagggaggcaggcgtagaggtggactccccagccctgctcttgagggtgcgatgagatctatagtgccagctgtgctttggagctggcaatggcaagagcagtgggcttgccagtgtgaagcagaggtgcatatatgagtaattaggaggtaagtctcataaaataggtgagtgagaagaagagaaacttgaaaacggagatgatgagaaacagaaaacaaaaccatcagtgaattatgtggcggggggtctcgaatatctttagtaatattgtctctgcagtaatgtgcctaagagctgttagagaactgctccctttgggtaacattcctatagctgataagtttttcagagacatgcagctctcctccagaggtcctctatctcaggacttccagagttctaggcgtctgtgtcctccctcttgacttcattagggatgggcca

SEQ ID NO: 5908 - DNA, 819 bp, Homo sapiens
tcaactttcctaagaaacaaggaggaaaataccatctgttcttcgcttctgccttgggcgtccagtggggtaacaggtggagggctgtgaggggagagagaactggagcgggggcctgtgatgggaagagcctgtctctggtcattgccttttggttctcaaggaatgttcaaagcagaggagtttgtccttcctcatcccaagcataagagttaagcgagttgtgaccttgccgtgtgagctcagataataaaaaaattcagtggttaatgaagccttatctttggaaagacatacaaaagactggtagcactgcttgcccctggagggtggagaacggggcagctgagccataggtgcatggggggagaattgwttttctctgtattatactcttttgcactttttaaatgtaatacaatgtgattgtaatatctagtaacaaataaagagaattcaaacttaaaagtgattcaagtgagccaggcgcggtggctcattcctgtaatcccagcactttgggtggctgaggtgggccaatgacctgaggtcaggagttcaagaccaggctagccaacatggtgaaaccctgtctctactaaaaatacaaaaattagctgggcatggtggcgggcacctgcaatctcggctactcgggaggctgaggcacaagaatcacttgaactcgggaggcggaggctgcaatgagctaagatcatgccactgcgctccagcctgggcagaaagtgaaactccgtctcaaaaaaaaaaaaaaaaagaaaaaagtgattcaagtaattcaaggttctaggaattggt

SEQ ID NO: 5909 - DNA, 819 bp, Homo sapiens
tcaactttcctaagaaacaaggaggaaaataccatctgttcttcgcttctgccttgggcgtccagtggggtaacaggtggagggctgtgaggggagagagaactggagcgggggcctgtgatgggaagagcctgtctctggtcattgccttttggttctcaaggaatgttcaaagcagaggagtttgtccttcctcatcccaagcataagagttaagcgagttgtgaccttgccgtgtgagctcagataataaaaaaattcagtggttaatgaagccttatctttggaaagacatacaaaagactggtagcactgcttgcccctggagggtggagaacggggcagctgagccataggtgcatggggggagaattgtttttctctgtattatactcttttgcactttttaaatgtaatacaatgtgattgtaatatctagtaacaaataaagagaattcaaacttaraagtgattcaagtgagccaggcgcggtggctcattcctgtaatcccagcactttgggtggctgaggtgggccaatgacctgaggtcaggagttcaagaccaggctagccaacatggtgaaaccctgtctctactaaaaatacaaaaattagctgggcatggtggcgggcacctgcaatctcggctactcgggaggctgaggcacaagaatcacttgaactcgggaggcggaggctgcaatgagctaagatcatgccactgcgctccagcctgggcagaaagtgaaactccgtctcaaaaaaaaaaaaaaaaagaaaaaagtgattcaagtaattcaaggttctaggaattggt

SEQ ID NO: 5910 - DNA, 827 bp, Homo sapiens
ggatcccagctgaacacctagcagtgwctctggggccatctcagagccagctgtggtagagagagctttcttctatctctcatggaacagagggaattaattaattctattaagcctccgtccaactctcatttgaaacataagcccataaacaaatgtaatccatctccatcccagattctctccgggaaaggcaggcagatggagaggcagatatgaaacatggtgctggactaagtaagcatactggcctttatgccaatatccacggtggtcgcccatccttcctgagcctccctgtgctgcagagtccacaacatgataaatggagcctgtcacacagagagagattaatttgggggcagggttacttgcctggcagccatgggaaagtgagccctctatacgcttggctcaagtcagaatttcatttgaaagcttctataattcagaggcaaagggaatatggctggttcaagggggtgacggctgtccaaagaccaacctgagagctgaagatattcactgggtacttcgatatgccaggtgctgtggatgtaacaatggacaagcctctagcatacatagttaagatgatcataggattccagaccagagtgctttgagagtgaagaacacaggcttcaattggaactatctggagctcaatgggacatgccgtcacagtaagcagagccattaagaccacccacagctctggagctcccaattctgaatctggccaagtgaccatgagcttgtttcttgctgcacaaaatgggaacaataacagtacagagctcttgcctctcataaatgttgtaagg

SEQ ID NO: 5911 - DNA, 779 bp, Homo sapiens
ccaagggaattaaagaggcaaaggtggggaagagaacaggagaaacgaagagacaactggaagcggaaagaaatgttgggtggacattggacagctaatggaaatgtttcaaagtacctactgtttggtccacgctgtgattccatctacaagcccgtctctgcataacgtcttcagcaaagtagccattgtttctgaacgtcttgatggaggcagatctttttgggaggatacagcagactcaaggtgggtcggcagagggagctgaggcactccccatgtcctactccgcactccatgaaggctcaactaagggtgaattggtgaacaccaagtgcttagcctagtaccagtctgtagagaagtttctataaaccgtattattatcaccattatctttattatgtaggctggctttggtctatcaacactaacctggaaatataaagctggagatcagtagggcagacgggggsgaaatatgccccataagaacaaaggggagtgttattattatacattatccctagggaagcctagggttcaggagaaagaaatgacttcgagaaatcccaggagagtctcaggcagctctatgtgtgccaggtctacctccagtaagacatgggtggtattccacactgatcagttgtttgaagaatgagaagaatgttaattaatcctgttatctgagcagagtactttctggttcaatttctctgataaaaccaccctgaatggagaactctcagaacacccaagcaggcctccttctagga

SEQ ID NO: 5912 - DNA, 779 bp, Homo sapiens
ccaagggaattaaagaggcaaaggtggggaagagaacaggagaaacgaagagacaactggaagcggaaagaaatgttgggtggacattggacagctaatggaaatgtttcaaagtacctactgtttggtccacgctgtgattccatctacaagcccgtctctgcataacgtcttcagcaaagtagccattgtttctgaacgtcttgatggaggcagatctttttgggaggatacagcagactcaaggtgggtcggcagagggagctgaggcactccccatgtcctactccgcactccatgaaggctcaactaagggtgaattggtgaacaccaagtgcttagcctagtaccagtctgtagagaagtttctataaaccgtattattatcaccattatctttattatgtaggctggctttggtctatcaacactaacctggaaatataaagctggagatcagtagggcagacgggggcgaaatatgccccataagaacaaaggggagtgttattattatacattatccctagggaagcctagggttcaggagaaagaaatgacttcgagaaatcccaggagagtctcaggcagctctaygtgtgccaggtctacctccagtaagacatgggtggtattccacactgatcagttgtttgaagaatgagaagaatgttaattaatcctgttatctgagcagagtactttctggttcaatttctctgataaaaccaccctgaatggagaactctcagaacacccaagcaggcctccttctagga

SEQ ID NO: 5913 - DNA, 766 bp, Homo sapiens
gcctgctgcagccctccccacctccaagagttaccagagagactctataagctggaaacagtaaactaaagctcagagatgtatggcagactcacgtccctttagacacaacagtaaacacccccccgccaaaaaaaaacataactcattttctcagccacctttgcagctaggggtgaatatgtgatacgaatctggctaatgggaagcaagaggaaggtaataggtgagaatgctgggtaagttccataaaagggagccgactcagccagtatgttcctttcagccctggcccattcccttcctcctgctagaaatgcgaatgagagggttggaggttggcagccatctcatgcccatgagacaagcatgcactaacgatcatggaagacagcagayagaagtagcctgcatctctgatgacattgtgaagctgctctcctagtcccagactgactacatccagacttcacattatgccagaaaaacaaaacctttcattggaataagtcaatattttcttaacatctagtacttagagttgaaagtaagtcctaagtgatacaggatagttattattgaataatcaactgcccagtaagtgatggaggaaggaaggactttttttctcctttcttcatcagtgctattctaggttctgaataggaatatttggtactttgtcagcattcagtatttacctaccaattctaagcacaaagaagacaacagaaattgtctgcataacatctaaattctatttcct

SEQ ID NO: 5914 - DNA, 794 bp, Homo sapiens
ggatcccctgtacctcctcccaaccactgcgtccctttcagctctataaactttctgaactcttctttcttcccaaactgtgctcttttgttttccaatgtgatagatacactaacttggttaatttagacaaaagtattgatggccaaaggtaatgatatatataggcagtttatatttatataakataattgcttctcatgttatttgttttagtaaaagtttctaccatttgaatttctttttaaaaatttgagcttatagtttgcatgttattaaactaaaaatatcattattgatatgaatgaagaaaaagaatctcaattgctgaactttagctgaatgtttcttccagcatgagatattgaaatattggtgtcttgaaaagcctttttcaattcataaagcagattatgaaaaactgccaggaatgagagtcattacgtttgtttaactgtttcaacttcaggctgtgtctattgacgtccttgttataattttgttctggtgtctccctcctgtaagtgtactaatgaatttgtgaccattatgatagtctcatccacatagagattggattaagagtgatcatgtaattcagttctggcaataaaatgtgagggagggtctgcaggagagacttaattttttttactctaattctactggacactatcacatccacatagattcctgcagttgtggcagctttggggaggaggtaagcaaggactaagccaacaagataatcacagggcagacacacagaagtaacctggattctccttgacatc

SEQ ID NO: 5915 - DNA, 589 bp, Homo sapiens
gggagagcccaagaaggaagatgatacagagaacatcagagctgagagaggatgagccagtttcttgacttgagtccctctgtctaaagctagtatccttggccttctcagttatgtgagctaagacatttcttgacccacacagcttcccactgcccagaatgatcctgggcctggcaccctgcaaggcagaccccagccataagtgctcgggcctgtccatccacccacctgcagaacaggagagggtccctggacatcctgcccacagtggccgaggctggagggtgcagctgggcatgtccttctgtgtctgggcatgaggcacaagcaggggactctgggyaagtaggacaaccaaccaaagccccttttcctcgtgtgtgtgtgtttgtgtgtgtgtgtgctgtgcacatgttagcgaccagcggcagcagcaacaaggagcaggagcccggcctcacggctgactccgctgcagtggaggacgcctatgcttcttcccgatgttggttctggcctgctgactgtgattgggtccttgccccaggaggctgcaggcagtgccaggaaaggcctctccttagca

SEQ ID NO: 5916 - DNA, 589 bp, Homo sapiens
gggagagcccaagaaggaagatgatacagagaacatcagagctgagagaggatgagccagtttcttgacttgagtccctctgtctaaagctagtatccttggccttctcagttatgtgagctaagacatttcttgacccacacagcttcccactgcccagaatgatcctgggcctggcaccctgcaaggcagaccccagccataagtgctcgggcctgtccatccacccacctgcagaacaggagagggtccctggacatcctgcccacagtggccgaggctggagggtgcagctgggcatgtccttctgtgtctgggcatgaggcacaagcaggggactctgggtaagtaggacaaccaaccaaagccccttttcctcgtgtgtgtgtgtttgtgtgtgtgtgtgctgtgcacrtgttagcgaccagcggcagcagcaacaaggagcaggagcccggcctcacggctgactccgctgcagtggaggacgcctatgcttcttcccgatgttggttctggcctgctgactgtgattgggtccttgccccaggaggctgcaggcagtgccaggaaaggcctctccttagca

SEQ ID NO: 5917 - DNA, 589 bp, Homo sapiens
gggagagcccaagaaggaagatgatacagagaacatcagagctgagagaggatgagccagtttcttgacttgagtccctctgtctaaagctagtatccttggccttctcagttatgtgagctaagacatttcttgacccacacagcttcccactgcccagaatgatcctgggcctggcaccctgcaaggcagaccccagccataagtgctcgggcctgtccatccacccacctgcagaacaggagagggtccctggacatcctgcccacagtggccgaggctggagggtgcagctgggcatgtccttctgtgtctgggcatgaggcacaagcaggggactctgggtaagtaggacaaccaaccaaagccccttttcctcgtgtgtgtgtgtttgtgtgtgtgtgtgctgtgcacatgttagcgaccagcggcagcagcaacaaggagcaggagcccggcctcacggctgactccgctgcagtggaggaygcctatgcttcttcccgatgttggttctggcctgctgactgtgattgggtccttgccccaggaggctgcaggcagtgccaggaaaggcctctccttagca

SEQ ID NO: 5918 - DNA, 704 bp, Homo sapiens
tcctatacccaggctcttaccggtggcaccttcgtggcagagcttggggtcgggggcccttcatccctgggcagcgacgggccgttgggctccatgtccttccctgcaagagagcagtgggagtgaggacccaggcatggtggcgtggccaggcttctcaggccgctgcctggtgtgaggcaggcgaagcgtgggtgcggatgacctgggaggggcaggaagtcagccggaggtggtggcaggaacaggacactgcctgagaggtgtaataaacgccagcaagcgtcactgtgggaggagtgtgccaggagaactggcagggcctccaggacctacagggaggaagctgggacargagctggtaggaaccggcatcctgggcctgctgtagtgtgcaattgggggtctgtgaaggccagagtccccagttttcagaaaaagaatgtgacatccagtctcaaagacacatggcaggtttggggcccctggactgtgcatccccctggctggatgctgccggcccctgcgtgctgggctcttgctgggaggtggtcagccctgtctgccatcccaccctggcaggctgggtaaggagggagaggcaaaggagggagacctgaggtgtctgtgtttgctcctttgggaaatggcctcccctcccccggctctgtttgctttggtgccagtttcccaaggtacgattt

SEQ ID NO: 5919 - DNA, 786 bp, Homo sapiens
ccctgacagccctgggcagggactggatggggacgaagaacggaaaagccaggacggtggcctgaggaagtggttctgtccaaaggtcctggaccgtggccactcacagtcacagaacatcgctgaccctggccggcagtggctgctcccccacctgggagcctctgcttccccatctgcagagtgtacgcccctgacccggagtgctggggggaggctagcaggagcgctcttccctctggcactttctcatatagttctaggggcttggcctgtggccgccagcaaactactttccatgtggatgctgcctcctggccgggaggactcaaaggctggggcccttggaccactcaaagggatagggtgcaggtgccctgggcagggggaagtcagcactggtccttctcctcacagcctgtccacacccaccccactcccttggcctgggacctaccgcctccattcctcggaaaaggcccttcccagcacatcttctgcaccgcctgggccagttgctagttggtccgagtccctctgaaactgaccagcagctgggacccagcccttcccctccccacccctgactctgcaagtgcttctaagcctccagccagggtgaacgtgacagcagagaataaaaggtgtaggatttaccttgccgggtgtcgagtgcccctgcctgccatagcaccttcagcaaggccacctctacgctgggactccgtttttccatctattggatgggactttggctgcraccacacgcccctcgagcctgggtgg

SEQ ID NO: 5920 - DNA, 724 bp, Homo sapiens
gtagtcatagaaattatcatccaaagtgggatattcttgagagaaaaaggaggttctatttataattatggtgggataacaaacttaagatgaacagctctagacaaactgggttgtatggtccctggaaaacaaggattactgtaaatgtgagtcccgccttgtgcttctctctgtcccaccaagaaaatatgatcttgatacagatgttcattgtgtcaaggcaaccatggcaaccatgatctagatacactgttcaagttttatgctgatcctacctatatatgtctcaggarctttccagagtttcctttgagtgcttctaaattttgcataaatggtatgttgtcccttgtctctttttaaaaccagtaagccattttcccttattttcctggaaaattaaaggaacaaggaccaggaaataacaatgtattagctaaggttctgttgattgaaagcaacagaacctaattctggctagcttaaaccatgctaggatttaatgaagaatactgcagaatcttagatatcttatgactgggaaagaggaggttcaggcagttcctgggatgtcagcaacaggtagctgtcaattaactgcccccacaccacccactgctgccgtcatcaatatagcacaccacaatggctcccagcctctgtacgtctgggttccggtgttcaaattctagagacagcaagagaaatcccattgagtcag

SEQ ID NO: 5921 - DNA, 724 bp, Homo sapiens
gtagtcatagaaattatcatccaaagtgggatattcttgagagaaaaaggaggttctatttataattatggtgggataacaaacttaagatgaacagctctagacaaactgggttgtatggtccctggaaaacaaggattactgtaaatgtgagtcccgccttgtgcttctctctgtcccaccaagaaaatatgatcttgatacagatgttcattgtgtcaaggcaaccatggcaaccatgatctagatacactgttcaagttttatgctgatcctacctatatatgtctcaggagctttccagagtttcctttgagtgcttctaaattttgcataaatggtatgttgtcccttgtctctttttaaaaccagtaagccattttcccttattttcctggaaaattaaaggaacaargaccaggaaataacaatgtattagctaaggttctgttgattgaaagcaacagaacctaattctggctagcttaaaccatgctaggatttaatgaagaatactgcagaatcttagatatcttatgactgggaaagaggaggttcaggcagttcctgggatgtcagcaacaggtagctgtcaattaactgcccccacaccacccactgctgccgtcatcaatatagcacaccacaatggctcccagcctctgtacgtctgggttccggtgttcaaattctagagacagcaagagaaatcccattgagtcag

SEQ ID NO: 5922 - DNA, 658 bp, Homo sapiens
aaaaggctggttattagtttatttatttaaaagtcctggaatactgaggttgggggtggtggctcatgcctgtgatcccaacactttgggaggctgaggcggatggatctcttgagtccaggagttcaagatcagcctggccaacatggcgaaacgctgtctttactaaaaatacagaaattacccgagtgtggtggcgcgtgcctgcagccccagctacttggaaggctgcagcatgagaatcgcttgaacccgagaggcagaggttgcagtgaacgtagattgtgccactgcactccagcctgggcgacagagagagactctgtgtcaaaaaataaatrcataaaaatttaaaaaaataaaataaaaataaaaagttttggaatactttacaagcaatctttatgagccgatttatataaaagtaagttttgtagaagaactgtgactatttgaaatttctgatttttttaaccctctaaaacattttctaaatattccttctttttgatttttagaaatcaccagtaagttgcagtgtgatcgtactttagatatgctattatttaataagggacttgacggtcacatctcaggagaccactcccagagagctgtggttggttggcaaattgcttcacttttcatgagaaccttt

SEQ ID NO: 5923 - DNA, 810 bp, Homo sapiens
ttaaatgtggaaatggcatctacccctctcccctgtgattgctctttatataataagtaaatttattataggaagagcctgttatcctaaataataaggttccttatttttcaatttcccttagaatatggcaagtatttcaggtcagggcctgctctccatttttaccactcattcattttctctctctttttctctcttctctgtaccctcctctctgtcttgcatctcttcctccctccctcctcctatgtatttaacaagtataattgtctcaacatttcaatttgtaggaagaaagtttaaggtccagtttagctctccagacaraagcttacttgttccaattctgtcatgtaacagagcgaaatggaataaggatctcatgctgccattcacttagtggttcttttattctaagcaccctgctcctatattttgcacatatctttcttggaaactgtatggggagatagggacatttgtcagggcaatgtgtaagcattcttaattacttggctattcaacgtttaccctaacattaataaaaaatgttctggaagagggtgccttcagtttatctttgctataccagtaggtaaagaactattaggtggcttgattacagaaatttgggatgatattaagatagttataattttctttaaattatgtctctgttacacaggataattcatttgctatgtgatgaagatgagatttttcttaaagcctgatatggtttggctgtgtccccacccaaatctcaacttgaattgtatctcccagaattcccatgtgttatgggag

SEQ ID NO: 5924 - DNA, 767 bp, Homo sapiens
cgggactggctgttgcagtagctcatttgaagccatctggtctccagcttccttccccctttctgctctgccctgcccagtgtgctggcctctttctcaggctggttgcccccagctagcaagggggctgcagaccccaaacatcgcattctcatgcaacaaccataggcagagaaaggtgctgtttattcacctgtgtctcttcttaccaggtattaaagaaacaccttgtgctaaaggcctccagtggaattccccttgtgtttcattatgggaaagggggaatgggagcaccaggattcacttgggtccatggggcattgtgaaaatgtgaagggggtcatttttggctggcacaataattcaaggagggctatgaccatgcagtgggcagaggctagagatggtagacaacctgcratgtgtgggatggtcatggtcacactctgtgacctgcatgatttttgaatgtcccattgaacatttgcacaaatgaaaaatcttcaaagtgatctgagctaaaaccaaactctcatatataaacccaaagtatttaaaaaacacactgtattttccaggaaagcaattgctgtgcacatcgagagaagatcttgctttgttttgtttagaacttttccaggagttgttcactgttttggaaaatcacattagcaatgtcaacattactcatggaattcgagcctccagtacaatacacccgatgggcctgccccagtggctgccacattgactgtgattctaggtat

SEQ ID NO: 5925 - DNA, 767 bp, Homo sapiens
cgggactggctgttgcagtagctcatttgaagccatctggtctccagcttccttccccctttctgctctgccctgcccagtgtgctggcctctttctcaggctggttgcccccagctagcaagggggctgcagaccccaaacatcgcattctcatgcaacaaccataggcagagaaaggtgctgtttattcacctgtgtctcttcttaccaggtattaaagaaacaccttgtgctaaaggcctccagtggaattccccttgtgtttcattatgggaaagggggaatgggagcaccaggattcacttgggtccatggggcattgtgaaaatgtgaagggggtcatttttggctggcacaataattcaaggagggctatgaccatgcagtgggcagaggctagagatggtagacaacctgcgatgtgtgggatggtcatggtcacactctgtgacctgcatgatttttgaatgtcccattgaacatttgcacaaatgaaaaatcttcaaagtgatctgagctaaaaccaaactctcatatataaacccaaagtatttaaaaaacacactgtattttccaggaaagcaattgctgtgcacatcgagagaagatcttgctttgttttgtttagaacttttccaggagttgttcactgttttggaaaatcacattagcaatgtcaacattactcatggaattcgagcctccagtacaatacacccgatgggcctgcccyagtggctgccacattgactgtgattctaggtat

SEQ ID NO: 5926 - DNA, 299 bp, Homo sapiens
gatagtgtatataaagcacttggtatgtcacaggaacaccgtaagggttttgctagtatttaaarttgttttgcttttctttttaacaagaactacaaagatgttaatattattttagccatttggtaagaaatatatgaaaaaagcccactgatttgcatagtgatttttcttatcgtttttgccattatatagtttcaagattggttttggggaataaagaaaaatttcaatttatcttgcacattttattatttcaatgaaagctcaaaattcaagtttttaaaggaaagaaaaaa

SEQ ID NO: 5927 - DNA, 636 bp, Homo sapiens
cttgagcccaggaggtcgggctgcagtgagctctgatcatgtcactgcagtccagcctgagagaaagagtgaaaccctgtctagaatgaatgaataaataaataaatgaataagcttcctcattgtttgttcaggcacttcatgacctcatattaataagtttattgcctctctgggcaacatgtcagcctcagtttctttctgttaaaacactgggcctctccattttttaaattcaaatccctgggaataygtacttggttggactagctcaccccatctaggcagagctcctcaccccaagactcccacaggccatgggcagcccatgagttggctgcttttgagtcaggttcaatcaagtgcagctggaggaagaatgagtctcacggtgcgaaacactgtggctaatggtgcctccatcaggaccatttccttagaaaggcctgtggacacagaaggcactcccagagacagtcctcctcccaagcaccatcagggcaagataccaccatcccctgaacagcacagcattttacccatgaacaaatgaataaataaacaaacagcgagttgaatagcccatagtcaattgtgatggtttgtacaggtttcagtttgaaaagcagtcactaa

SEQ ID NO: 5928 - DNA, 636 bp, Homo sapiens
cttgagcccaggaggtcgggctgcagtgagctctgatcatgtcactgcagtccagcctgagagaaagagtgaaaccctgtctagaatgaatgaataaataaataaatgaataagcttcctcattgtttgttcaggcacttcatgacctcatattaataagtttattgcctctctgggcaacatgtcagcctcagtttctttctgttaaaacactgggcctctccattttttaaattcaaatccctgggaatatgtacttggttggacyagctcaccccatctaggcagagctcctcaccccaagactcccacaggccatgggcagcccatgagttggctgcttttgagtcaggttcaatcaagtgcagctggaggaagaatgagtctcacggtgcgaaacactgtggctaatggtgcctccatcaggaccatttccttagaaaggcctgtggacacagaaggcactcccagagacagtcctcctcccaagcaccatcagggcaagataccaccatcccctgaacagcacagcattttacccatgaacaaatgaataaataaacaaacagcgagttgaatagcccatagtcaattgtgatggtttgtacaggtttcagtttgaaaagcagtcactaa

SEQ ID NO: 5929 - DNA, 646 bp, Homo sapiens
ctgactcggctgcaactcatggaccaagaatctgggacttttagtgacggtcatttcaacctgaccctgactagtcctgctcaactcctacccaaatcctccgggccctggtgaaacacatagggcccacagaaaaagagctgtccatgatcgccctgcctctgtgagcttcaatcctaacttacctgtctcatcagcctcatgtttagctctaccgctgcccattctcttctgtaccccaacatagcctccttaattttatgcacaatttaattttctgggcccctttctcatctctctgcttgttagtcatttcacttgcagtcttctgggyctgcaattcatactaggaactttggaagaaatgaaggatacatttctcttagagaagagactatgggaagcaaaatgggaccttcaaatgaaagctagggtggacaggtcctgtgctgctgcagccaccgctgttagaaccagaagggagacagttgaaaggatcagatgtctgttcaatacaagccacttactgtttcaatgaatatgtgcgagcacttactatctgcaaggtgataggcactttgggccatccaaaggaagtacttgccaacaaatagaatgcattccgttgaattctagtgttgaacgg

SEQ ID NO: 5930 - DNA, 769 bp, Homo sapiens
aaaatggaacttggtattcctttcccctttgtgccagtcgtgtgcttcctgatgccaggcctccctccagccctcccatcacagggaaactagtacagaccacccccacagacctgtggactgacacctgactacctttgggggcatctgaccttgcctgcggtcccacggtgactcacagtgaaactaagatgcacagctcgggtaggaacctgctggcccagcaagagaatctcttcttcggggacccattaagctaggctctgtcaggtgaggagaatggggaccctgcaggcaaggagagaccgtgggtgggctgaaatctgttcctgcagtcggggaaaggctgtgggctcaaggaggcataaagaggcgacacccaagcaaaggcagcactgtgccgactgtgtctttggtgcccctcaacttcttctttttttttttttttttttttgagacagggtctcgcttygtcacccaggcagtgtcatgataatagctcactgcggccctgaattcccaggctcaagtgattctcccaccttagcctcctgaggagctggggctacaggtgtgggtcatcatgcctggttactttaaaaaaattttttatagagacagggtcttgctttgttgcccaggctggtcttgaactcctggcctcaagtgatcctcctgccttggcctttcaaagtgctgggattacaagcacgaaccacctctcccagcctaggttcacttttgcaaaaggtggttatgggtgcttaac

SEQ ID NO: 5931 - DNA, 764 bp, Homo sapiens
cagaagaaaacatcagcacgacagttaagtgccacattttatttctttggattcgctgggtgtaaagagtatgtgtatgaatgtagcacttttagcagaaggtcctccctggtggtgttgagaagaggccgtggttcctgccatctcttctgcctccttcaggtcttaggcggggagggtctggcagcctggagagagcagcagaagccctcttaagcttgctgaaggcctgggggatttatcagaaggatgcgggagtgccttgtgggacccacagccagaaaaacatccaggtctcaggggagctgagaggctcccaaacccagtgagctgccttccctcgctattttccctctccgaggccacaytgggtctcgtccctgctgctccctctgctccattttcctgccgtgctctgcagatctgctttctttgcttactcatcaacacacggtcctaaaatagctgcatgggcctcccccggtctaccctggctgcctgatctcagcttcgggcctagccacagactgactccccagccctgagccccttagttctaagatcttaagacagagtatctgattggctgttggtcaccaagaggctgtctcctgctggagcaggtatccattggtccaattgtctgaagccagcaggcaggggcaggtggccctggggctgcctccttgggatggatttgttggaaggagaggctaggcaggcaggcctcccctctgcagctctagtgtcacccaggcccacta

SEQ ID NO: 5932 - DNA, 764 bp, Homo sapiens
cagaagaaaacatcagcacgacagttaagtgccacattttatttctttggattcgctgggtgtaaagagtatgtgtatgaatgtagcacttttagcagaaggtcctccctggtggtgttgagaagaggccgtggttcctgccatctcttctgcctccttcaggtcttaggcggggagggtctggcagcctggagagagcagcagaagccctcttaagcttgctgaaggcctgggggatttatcagaaggatgcgggagtgccttgtgggacccacagccagaaaaacatccaggtctcaggggagctgagaggctcccaaacccagtgagctgccttccctcgctattttccctctccgaggccacattgggtctcgtccctgctgctccctctgctccattttcctgccgtgctctgcagatctgctttctttgcttactcatcaacacacggtcctaaaatagctgcatgggcctcccccggtctaccctggctgcctgatctcagcttcgggcctagccacagactgactccccagccctgagccccttagttctaagatcttaagacagagtatctgattggctgttggtcaccaagaggctgtctcctgctggagcaggtatccattggtccaattgtctgaagccagcaggcaggggcaggtggccctggggctgcctcctygggatggatttgttggaaggagaggctaggcaggcaggcctcccctctgcagctctagtgtcacccaggcccacta

SEQ ID NO: 5933 - DNA, 819 bp, Homo sapiens
tctcttggccatcactgccccatctccagcatctcctttctcttctcaggtccatagcagctgctgtgtgccaagcctcagaagttctcaccccacatatgtgcagcccagcttctagccatggacttgcagggagatctccttacggaattctgagatccctcaccacaaagctctcttgtctcaatgcctcatcccacagattcacactggtcttggtgtcttaaacgctgacctctgcctcttcaattcagtgggatcatcttactttgcaaaaaccagcacattgttctgcaattgtggattgtccccacatgagagctgggtgaacatggagttcacctcctgagtttaccttgtttttctactccctggacattggctgaacaccactgtctcatctcrtctgtccatttttacagctgttcacagggagaaggttgctccaggatcagttactccatcatggatgtgaaattctgacctgaaaattttatggtgacaagtgagcattttgggggtaaagagaaatgatttacatgttccaggaagtaacagatttgtattatctcatctaaagctgcaataagagaaaatgaattaaaaatgtaacaattagctgcttaatttattcaatgtagataactgattcaagtaattatgttctcagagttaaattgtttggcttgaaatcagtgaggtgacttttcttgattaaacaatgtgatatttactaggtctgtgctttgcctagtgtcaggtagacatggttcgagatacaatctttggatgaggaaataattagttcctgcattattt

SEQ ID NO: 5934 - DNA, 588 bp, Homo sapiens
ctgacactgacagggtgattctcatggagaattgctgtccagtggaagtgctttgggtcagaaccgcaactagctgtatggaactcaacaccaacacttcaatgtgcccattcacacttccattctcattctgctttttaaattttgttgtaagtttctgtacaaatatataaacatcgaaaatgacaatttctgcttttgtgcagaagtttcaaaatgcttgtcatgactgaagtgtctccctatttgctagctttggtgttgaagaagtgtggcttctactgatactcacctgtttaatgagtcattcatgcatctcacatcttggcgacaagaactgtgctaagtgcrcactatgcttttgatcttctagaaggttatagaacaacaggagggaaacacaagatagaatgaggaaataggggaaaacagcacatgtttggggctaaaaaatgagtggtcttatagagatacgttgcatgtgttgggcagggtgggggtaagcttcagggcagaataggaatcgggccctcccttcctccttttctgagggcatgtaggagtatggggtgggacaggcatggccaa

SEQ ID NO: 5935 - DNA, 588 bp, Homo sapiens
ctgacactgacagggtgattctcatggagaattgctgtccagtggaagtgctttgggtcagaaccgcaactagctgtatggaactcaacaccaacacttcaatgtgcccattcacacttccattctcattctgctttttaaattttgttgtaagtttctgtacaaatatataaacatcgaaaatgacaatttctgcttttgtgcagaagtttcaaaatgcttgtcatgactgaagtgtctccctatttgctagctttggtgttgaagaagtgtggcttctactgatactcacctgtttaatgagtcattcatgcatctcacatcttggcgacaagaactgtgctaagtgcacactatgcttttgatcttctagaagsttatagaacaacaggagggaaacacaagatagaatgaggaaataggggaaaacagcacatgtttggggctaaaaaatgagtggtcttatagagatacgttgcatgtgttgggcagggtgggggtaagcttcagggcagaataggaatcgggccctcccttcctccttttctgagggcatgtaggagtatggggtgggacaggcatggccaa

SEQ ID NO: 5936 - DNA, 588 bp, Homo sapiens
ctgacactgacagggtgattctcatggagaattgctgtccagtggaagtgctttgggtcagaaccgcaactagctgtatggaactcaacaccaacacttcaatgtgcccattcacacttccattctcattctgctttttaaattttgttgtaagtttctgtacaaatatataaacatcgaaaatgacaatttctgcttttgtgcagaagtttcaaaatgcttgtcatgactgaagtgtctccctatttgctagctttggtgttgaagaagtgtggcttctactgatactcacctgtttaatgagtcattcatgcatctcacatcttggcgacaagaactgtgctaagtgcacactatgcttttgatcttctagaaggttatagaacaacaggagggaaacacaagatagaatgaggaaataggggaaaacagcacatgtttggggctaaaaaatgagtggtcttatagagatacgttgcatgtgttgggcagggtgggggtaagcttcagggcagaataggaatcgggccctcccttcctccttttctgagggcakgtaggagtatggggtgggacaggcatggccaa

SEQ ID NO: 5937 - DNA, 555 bp, Homo sapiens
ctgtccggcaggtttgggactcctcaataaacaggccacactgtgttttgttcttatcctcctctatcaaaaaaaaaaaagtgctctcttaatttcatgactctttcttaagtttaatattcaactgaccatagcacagccttccaagtaactggaattacaagcatgagccaccacacccccctactttttgtacttttagcagagacagggtttcgccatgctggccaggctagtctcgaactcctgaccatagctcctgaaatwttttttgctgataaacaggttaaagaaaacttaatacatcatatgggcacccactaggtctgcccaccagaaatcacactctacactgacaaccccttcccctctgctccaaaagcctcccagctttccttaggcaggagggctggagagcctccaggtcaagtggactcacctaagatttttatgttacccatcccctgatattagattttcttgttattttgctttacttgtgtttcttctaaatagcaaataaccggcttgatttttatccagtttgaaaatttc

SEQ ID NO: 5938 - DNA, 843 bp, Homo sapiens
tctcacggaaggccaactgagcatcttgttggactgtgatgcaagttagcaataaaatttttactgcattttttaaatgggaaaaatcttaatagacatttttccaaagaagatataaaaagtggccaattagcacatcaaaatatactcaacatcattggctattaaggaaatgcagatcaaaaccatgagataccacttcacacatctattttgatggccagaataaaaaggcagataataacaagtgttggtgaagatgtggagaaattagaatcctcatgtactgctcatgggaatgttatatggtgcagccattttagttcatcagtaattaaacacagagttgtcayatgatagagaaatttcatttctgggtttacatacaaatgaattgaaaacatatgtctacctgaaaatgcacatgttcatagaaccattatttgcaatagccaaaaatggaaacaactgaagtgtccatcagaagacaaatgaataaataaaatgtggtgtatccataccatgtgagataccatgtgagatactactagcccttctcagtgcatcatacgataaaaaggaattaaatgctgatacattcttaatcatggatgaaccttgaaaacattatgctaagtgaaaggagccagtaacaaggccacttattgtttgatctcatgtatatggaatgtccagaataggcaaatcttatagaggtagatagtagatgccttagggctggagtgtgaagcagaatgaggtgtgactactaatgggcacagagtttattttgggaggtgatgaaatgtttcaaaattaggctgtggtgatatttgcacaact

SEQ ID NO: 5939 - DNA, 843 bp, Homo sapiens
tctcacggaaggccaactgagcatcttgttggactgtgatgcaagttagcaataaaatttttactgcattttttaaatgggaaaaatcttaatagacatttttccaaagaagatataaaaagtggccaattagcacatcaaaatatactcaacatcattggctattaaggaaatgcagatcaaaaccatgagataccacttcacacatctattttgatggccagaataaaaaggcagataataacaagtgttggtgaagatgtggagaaattagaatcctcatgtactgctcatgggaatgttatatggtgcagccattttagttcatcagtaattaaacacagagttgtcacatgatagagaaatttcatttctgggtttacatacaaatgaattgaaaacatatgtctacctgaaaatgcrcatgttcatagaaccattatttgcaatagccaaaaatggaaacaactgaagtgtccatcagaagacaaatgaataaataaaatgtggtgtatccataccatgtgagataccatgtgagatactactagcccttctcagtgcatcatacgataaaaaggaattaaatgctgatacattcttaatcatggatgaaccttgaaaacattatgctaagtgaaaggagccagtaacaaggccacttattgtttgatctcatgtatatggaatgtccagaataggcaaatcttatagaggtagatagtagatgccttagggctggagtgtgaagcagaatgaggtgtgactactaatgggcacagagtttattttgggaggtgatgaaatgtttcaaaattaggctgtggtgatatttgcacaact

SEQ ID NO: 5940 - DNA, 1573 bp, Homo sapiens
  misc_feature (1)...(1573): n = A,T,C or G
gnnnnnnnnnnnnnnnnnnnnnnnnnnnnnnnnnnnnnnnnnnnnnnnnnnnnnnnnnnnnnnnnnnnnnnnnnnnnnnnnnnnnnnnnnnnnnnnnnnnnaagggctcagttacagttttctgggttggaagtgctcctttttgaggtccctgtcagttacccttatctagataaaggatttggtccatggctaaagactgaggtggattggctcatggctaacccaaggccaagcagactggcgccctgtgctgatgaaggggtgcccagtgcttggcccttggccactccaaggcactctccctttccatcttagacatggtggggtggggagggttgtagagaaagtggccttggatcccttctttctggggtgtggggaggcagggttttcccttttggtttagctttaggaagttcgcattaattggtcttaggttctctgaccccagacccaggtgtttaacctttgatttaactttaagaaattatcacgaattgtcctcagattcctttcccccagaccttgatggtttcccttgattcagctttaggaagtcagcacaaatcagcggcctaagttccctgccaccagaccctattcttctgcctcagtggtctccgcatcatttcttcgagatcaaaagagaaccaaaagtcatctcttctacatccttgctttagtaagataatgcttatttacacgtaaagacatgaatgtaccttaaattttataaaaatattttctaccctttactcattaaaataatgtatgaattttaaggctctctaagatagatatttggtaggagagagagagagaaaaaaataatgcactcacaaattatttctgtggaaaaagttctgcaatttccgtacttctttctcatctgtccctctgacttggttaattgtttgggtcatagaaaagaataaagaacaagttttcaagtgacttgcaaagttntgagttagacactttcagaaggaagatgcttcaaccttcaacctaaaaattgaatgcmaaatcttgtagtcaagcatttctattcatgttagcctggagtaagaacaaaaagcataaaagactaaaaagatttcagttgaaacaaagggcatttgggaatggagtcacatactgagcatatcaaagattccaaagctaggttcctgcttttcggttttctgtagaaatgacatctcagaggagtaaatataaagaagaacaatgaaagagagagggtattggtaggaggagatcaagaaaaacattataaaaaatgagattttgaatagttcatatggattttgttcttcttttatcctgaatgggaaccaaaatctatctggttgggagacaaaaaaaaaaaaaaaatagagaaaactttgattcataacaattgactagcaaagaatctaagagaatctaaagttttgggtgataaaatgatttttcagacactctttaatatacttttaacaatatttctgcctctgttttttcatattttctggttatataataaagagaattatctgattacagttttctttttcctaggctttttata

SEQ ID NO: 5941 - DNA, 849 bp, Homo sapiens
caacccaatatgccaattttatccaaagaacaaaatttctaacctatattatttctctgtttgtcttcttccccttcctctccaacccacccacatactgacaaacttatgtatcctttatttgagttccccgttctcctaatttagaatatctatgacttaccaggttgtaatgtagtattcatgttgtctcacttgaaatcggagtaagttatgcactaagggaattttgcaagtgaaatcgcttaaagacaagacgatgacacatcacaattttcttttcctagttgcaagcggtacaatgtattaggtggaaattatcaatgtctcggaaagacacagtaactcaaaactcctccagcacagtgarctgctacagctggggcaaaaaggaataaaactgccaaaaagcatcaaggagtttgagaaagtgataaagtctggaaatgcatttatgaatgacaagcatatgggtttttagcaactcacttgttgaaaagttgaaaaaagtgcagaggttatatttttcttcaattccttttattattattgaattattccagcagcagacctttttcttcaaaagaatttcttagaattcgttaattacctgatttcatgtcagccagatattttcctctcaagccagcgcaccgtaacagttgatgcccggtggctaacctcctggcaaccaatgcagcttcgtttgatgattaattattcattgagcgcctaccatgaagagggaaaagcttgcattcttgctagaagcttgcagcttgctaggcaaacaccaaccaaatgaagcaaacaaaaatgttacacatttgtcctttttctgcatattct

SEQ ID NO: 5942 - DNA, 835 bp, Homo sapiens
cctcagtcttgtcaatcagagccacaatgttacagagcttgttagatttcaaacaggcaaagtggggtgtgttggaagagcatgcaattaggagtaagaggatatgggttccagcttattgttggtgttcacttaatacactcatttccttacctgtgaartgtacacgatacccatccagctacctcatgatgaagatgaaagccgaggaggcatgtgggaatgttctatagataaaacaaaaattgctgcaatttaatatcattcactgtgcaccactaactttatattcatcaactcttattctagtaacaattttgagagtcagagatgaaatgatccttccttcctaccttccttcctttcttcttaccttccttccttctttcctgcctttcttaaaaattcatggagcagggctgggcgcggtggcttacgcctgtaatcccaggctttgggaggctgaggcgggtggatcacccgaggttgggagtttgagaccagcctgaccaacatggagaaaccgtgtctctactaaaaatacaaaattagccgggcatggtggtgcatgcctgtaatcccagctactaggaggctgaggcaggagaactgcttgaactcgggaggcagaggttgcggtgagctgagattgtgccactgcactccagcctgggcaacaagagcaaaactccgtctcgaaaaaaaaaaaaaattcatggagcagtactatgtgacatgccctattgtagatgtttactcatattatctcatttaatgtattattaacctatacccagtgctatgctgagccatcctggaatgtaaggcaaaagga

SEQ ID NO: 5943 - DNA, 835 bp, Homo sapiens
cctcagtcttgtcaatcagagccacaatgttacagagcttgttagatttcaaacaggcaaagtggggtgtgttggaagagcatgcaattaggagtaagaggatatgggttccagcttattgttggtgttcacttaatacactcatttccttacctgtgaaatgtacacgatacccatccagctacctcatgatgaagatgaaagccgagkaggcatgtgggaatgttctatagataaaacaaaaattgctgcaatttaatatcattcactgtgcaccactaactttatattcatcaactcttattctagtaacaattttgagagtcagagatgaaatgatccttccttcctaccttccttcctttcttcttaccttccttccttctttcctgcctttcttaaaaattcatggagcagggctgggcgcggtggcttacgcctgtaatcccaggctttgggaggctgaggcgggtggatcacccgaggttgggagtttgagaccagcctgaccaacatggagaaaccgtgtctctactaaaaatacaaaattagccgggcatggtggtgcatgcctgtaatcccagctactaggaggctgaggcaggagaactgcttgaactcgggaggcagaggttgcggtgagctgagattgtgccactgcactccagcctgggcaacaagagcaaaactccgtctcgaaaaaaaaaaaaaattcatggagcagtactatgtgacatgccctattgtagatgtttactcatattatctcatttaatgtattattaacctatacccagtgctatgctgagccatcctggaatgtaaggcaaaagga

SEQ ID NO: 5944 - DNA, 835 bp, Homo sapiens
cctcagtcttgtcaatcagagccacaatgttacagagcttgttagatttcaaacaggcaaagtggggtgtgttggaagagcatgcaattaggagtaagaggatatgggttccagcttattgttggtgttcacttaatacactcatttccttacctgtgaaatgtacacgatacccatccagctacctcatgatgaagatgaaagccgaggaggcatgtgggaatgttytatagataaaacaaaaattgctgcaatttaatatcattcactgtgcaccactaactttatattcatcaactcttattctagtaacaattttgagagtcagagatgaaatgatccttccttcctaccttccttcctttcttcttaccttccttccttctttcctgcctttcttaaaaattcatggagcagggctgggcgcggtggcttacgcctgtaatcccaggctttgggaggctgaggcgggtggatcacccgaggttgggagtttgagaccagcctgaccaacatggagaaaccgtgtctctactaaaaatacaaaattagccgggcatggtggtgcatgcctgtaatcccagctactaggaggctgaggcaggagaactgcttgaactcgggaggcagaggttgcggtgagctgagattgtgccactgcactccagcctgggcaacaagagcaaaactccgtctcgaaaaaaaaaaaaaattcatggagcagtactatgtgacatgccctattgtagatgtttactcatattatctcatttaatgtattattaacctatacccagtgctatgctgagccatcctggaatgtaaggcaaaagga

SEQ ID NO: 5945 - DNA, 835 bp, Homo sapiens
cctcagtcttgtcaatcagagccacaatgttacagagcttgttagatttcaaacaggcaaagtggggtgtgttggaagagcatgcaattaggagtaagaggatatgggttccagcttattgttggtgttcacttaatacactcatttccttacctgtgaaatgtacacgatacccatccagctacctcatgatgaagatgaaagccgaggaggcatgtgggaatgttctatagataaaacaaaaattgctgcaatttaatatcattcactgtgcaccactaactttatattcatcaactcttattctagtaacaattttgagagtcagagatgaaatgatccttccttcctaccttccttcctttcttcttaccttccttccttctttcctgcctttcttaaaaattcatggagcagggctgggygcggtggcttacgcctgtaatcccaggctttgggaggctgaggcgggtggatcacccgaggttgggagtttgagaccagcctgaccaacatggagaaaccgtgtctctactaaaaatacaaaattagccgggcatggtggtgcatgcctgtaatcccagctactaggaggctgaggcaggagaactgcttgaactcgggaggcagaggttgcggtgagctgagattgtgccactgcactccagcctgggcaacaagagcaaaactccgtctcgaaaaaaaaaaaaaattcatggagcagtactatgtgacatgccctattgtagatgtttactcatattatctcatttaatgtattattaacctatacccagtgctatgctgagccatcctggaatgtaaggcaaaagga

SEQ ID NO: 5946 - DNA, 835 bp, Homo sapiens
cctcagtcttgtcaatcagagccacaatgttacagagcttgttagatttcaaacaggcaaagtggggtgtgttggaagagcatgcaattaggagtaagaggatatgggttccagcttattgttggtgttcacttaatacactcatttccttacctgtgaaatgtacacgatacccatccagctacctcatgatgaagatgaaagccgaggaggcatgtgggaatgttctatagataaaacaaaaattgctgcaatttaatatcattcactgtgcaccactaactttatattcatcaactcttattctagtaacaattttgagagtcagagatgaaatgatccttccttcctaccttccttcctttcttcttaccttccttccttctttcctgcctttcttaaaaattcatggagcagggctgggcgyggtggcttacgcctgtaatcccaggctttgggaggctgaggcgggtggatcacccgaggttgggagtttgagaccagcctgaccaacatggagaaaccgtgtctctactaaaaatacaaaattagccgggcatggtggtgcatgcctgtaatcccagctactaggaggctgaggcaggagaactgcttgaactcgggaggcagaggttgcggtgagctgagattgtgccactgcactccagcctgggcaacaagagcaaaactccgtctcgaaaaaaaaaaaaaattcatggagcagtactatgtgacatgccctattgtagatgtttactcatattatctcatttaatgtattattaacctatacccagtgctatgctgagccatcctggaatgtaaggcaaaagga

SEQ ID NO: 5947 - DNA, 809 bp, Homo sapiens
ttttgaacgatgggatgcacagaaaaattccattaagatctagaaagtgctgtttaatattaccatttcaaatcttcaaatcttgaatatcctctcaatgtgttttagtttggcttcaatgctcctaaaatttagatacttttattttctttatttgacgtagcattatctatagataggcatttgattaataattacatatatatcgtttacctacattatctatttgctctctagtgaaacagaatagatggatatatttctccatttctttctttttattttcttatttttgagacacagtcttgctctgtcaccctggctggagtgtagaggtatgatcatagctcactgcaacctcaactcctaggcttaagtgatcctcccgcctcggcctcccaagtacccaggactactggtgcacaccaccacayctggctaatttttaattttttttttttatagagatgggggtctcacgatgttgctcaggctggtcttgaactcctggcctgaagcgatcctaccaccttgacctcccaaagtgttgggattacatgtatgaaccaccatgcccggctctatttctccatgtcttgaatgaggaaaccgaggcttacagttaatgacttatggaattccgcactctcacaatggtatataatgctttctttgatgttaataatggtgggagtgtttatagctcttgtgtggaacacctaagggagaaacttagcacatcaaatcagcaataagatgagactaggggagctggagcattcatggaacggaggaggccgggtcttggg

SEQ ID NO: 5948 - DNA, 840 bp, Homo sapiens
tttcttctgaaattcagaccaagaatgtagcaacacagatcctatctttcaaatattaacagaaaataactttttttttaacttaaaaaatataattagatagttatgactcactgaatttttctgaaattcctggggtactttgtgtataattttagagacaactctggaaccaagacatactgctactggtttatttatttatttattcaatcaatcattaattcatttaacaaatgcttaagaaccatctatgtgacaggcactgctctaggcactatgcatataacaatgaaaaaacctgagacaatgtttgctcatgsagtattatttctagttgggaggtaaagatgataataaataggtgtgtgcaagtagatacacatgaacacacacacatagataattattatcgataccaaaagttcatggggaaccatatgtggggaagagatattgggagtgcccatgagtgtgctatttacagaaagtggccatgatggcttccttgagtaggtaagattggagcagttttctgaagtaggagaaagagaaaaatgactggctccttgaagggtaaggaatccaggcaaaagtaacaaaagccaaacctgaattttattttgcctgttctaggaaaagcaagcatggtagtaagacaaagcagaggaagagagtgggagctacaggagatgaggtgagaaaatttgtagagagagatccgcaatcaattggaaattacaggagattttatggggtttgaattatcttctcagtgaggtagggagtaactgggggcatttcaaaagaggagtgaaaagatctgtgttagattaaaaa

SEQ ID NO: 5949 - DNA, 528 bp, Homo sapiens
cccatgtgattccactgatatgcacattaaagctccagaaacagtttaaacctaatcaataggcaaaattatggtggatgaaatcccagctattttagcaatcaaattggatttctactcattcaatckgatccaaagctacacctccaatgatcaagataatcaaaccactaagtcaccctatgactaagtatgactcccttctcacactgctatgaagaacttcctgagactgggtaattcataaaggaaggaggcccaactgactcacagttccacatggctggggaggcctcaggaaacttacaatcatgacagaagggtaaggggaagcaaggcacatcttacatggcagcagagagagagagagagggaaatgacaaacacttttaaaccatcagatctcatggaactcactcaatatcatgagaatagcatgggggaaccacccctatgatccaatcacctcgcaccaggtccctccctcaacacctggggattacaattggtgatgagatttgagtgggg

SEQ ID NO: 5950 - DNA, 528 bp, Homo sapiens
cccatgtgattccactgatatgcacattaaagctccagaaacagtttaaacctaatcaataggcaaaattatggtggatgaaatcccagctattttagcaatcaaattggatttctactcattcaatcggatccaaagctacacctccaatgatcaagataatcaaaccactaagtcaccctatgactargtatgactcccttctcacactgctatgaagaacttcctgagactgggtaattcataaaggaaggaggcccaactgactcacagttccacatggctggggaggcctcaggaaacttacaatcatgacagaagggtaaggggaagcaaggcacatcttacatggcagcagagagagagagagagggaaatgacaaacacttttaaaccatcagatctcatggaactcactcaatatcatgagaatagcatgggggaaccacccctatgatccaatcacctcgcaccaggtccctccctcaacacctggggattacaattggtgatgagatttgagtgggg

SEQ ID NO: 5951 - DNA, 638 bp, Homo sapiens
aaattctgtcttacttcctgaatgtcaaagtgattttttttctggcttcctctgtgattaaaaaaaaggactgcttggaaggctttggaaagtttgttttcatttctggtcattattcatggcacaacttcagggtagcaggcaccaaagggataagaatagcgtgggtgctgctatgcagtgagatcaggcacagtaaagactatgaaagaataaagaaaaatgaccagagcttgtttttaaaaaatacagagctgagtctattcagatgcaagcaaaggaggaagagctcatgaagaaatgcactgagcataacacaacatttacattctggatagggggccctgctggttgtgctaatggaggattgatcaccaatgttgtggttgcagcagaatgagctcacaggtgtgtgcatgggggttaaaacaagccccgttgttcattggcatgggaaatgtcttcagtttggtccagagggkatcaggggtcagtccaagtgcatgcgcctctgtcagcagcagctggctggggccaggtgtgatggaacacaaggggcagttgtgatgtgtcttagacaggtgctgctgtggtagaaatttttatttgcaactctaattcacttagtcagcacctgt

SEQ ID NO: 5952 - DNA, 656 bp, Homo sapiens
catgggtggaaccagagaccccaaacagacacccagggccagttgacttgacctgggcctctcctccatgtatgtacaagctccacttcctcctccatgctccagcatcgcttggtcttgtgttgcttagcctactaagcttgtccaggtcactctgcccgacctcaccatgagccctccctactcttgtcccttctgcttaaggagccagagaaaacaactacagattcttgtgccctggggygtaagggaaactgtggatgcccaggggagagaaggggagaagcctgggggtgacaggaagatgggtgttagtagcccccacttcaacataagagggcaaaaatccagactaacacagaaaacaaactagatcaatgtttcccactgagatcaatgtttcccgctgagatcaatatttcccactgtgtgttccacagaacaagtcaccaggaataaagggttctgtggtccaataagtttgggaaaagcagaggtaagcagatttccatagcagacttcccagggcctttaatgtgctaatacgcatggcgaatctccaagagggaggcagagcatgtggcgcagcccagccttatgtgaccaaggaaccctttcatcacagtggatttctcaggaccaaagtgctagggaac

SEQ ID NO: 5953 - DNA, 613 bp, Homo sapiens
cttttaaaagaacttatccattgtataaagcaagatccacctatgaaagataaagatgaagcaatggcaaaaaagcaaaggcaatggcagagaaagccctatgatgtgtggagcatagtgacagaaagaagatgctgatggtgcctagggccctgggtctgagtctggtctgccctggacctgctgtgtggcatcagccaagtctctccttttcttccgtgcatgagggggttgggcaacatgacccccaaggcccacccagccctaaagtcagaactgaaggcccccacactgctttgggcagcccatccccacaggggatctgtccaggtgaatatctgaaaggtgtcaaagggaaaggacaaaactgctccaggagaagctccatggggctagccaaagtagccaaatctgtccacaggcatgaatttggctatgaaactagagatgagccaaaaatcagaaacgaggtccacgcagaaagagaattggaaaagcttccttccccacaagagtttctgccccatcaacttaggcctcagcccttcctacaggatgcagaggtgaccaagggtaaagagggagaggccaggtttcagyctgggttgctata

SEQ ID NO: 5954 - DNA, 841 bp, Homo sapiens
tccctttctagaccttctaaatttagataaatgagaccaattatcgcttccagaatgttcagtttctactctggtcctaaaatttggtctctaagagatgttgattttcttcctgtgggatcatttaaattctgcattttcccagttggtatccttatgggaggggaggaggactgtgggcggggcaggctggctgcttgctaaccaggagacacaaggaggggctttcagcctcctgggagcctggttgtgacccacagagacctcaccagctgtgggcagagggatggcctgcggcaaggtagctggtgcatgaacaagcctwtgagatcatcgtgtctgtggatacccaggtaagggagagaaacctctgaaaatgtgctatgatgatgtgaaaactgcaaggggaggagagatgtttttcaattccttttcttctttgcaacttccagagatgatcttgaatctgtgatgggcagatatggcatatccatacatcatttcaatacatatttattaagcacctactgtgggccaggcactgagccacactgtgcatagcgggtaaacaggaagacacaaccctgcagtctggagaaaaggagggtttgctgccaggggcagggagaattattcctagcagagcctcagagcttgggagaataacttgggaactgcttatgctattgtaagacctggagatggggagaaagaaccagaggatttcttttctctgatgcctgcctgcttttctctgctgagtttcccagcctcatcaaccctgactacctacctgctctcccacccagactctccccgcaaaatgtgagcctgtaactct

SEQ ID NO: 5955 - DNA, 823 bp, Homo sapiens
tcctgatttccccaaaatgcttgctctaatcataaatgaaactccaaatataagctttaagttcttgtcagcaggattcaggmaagttaagccattcagctataaacagatcagcctaaacagctctgcttgccctaaaaagaatgttaatgttaaacaatcatgaaaaaggttaaaatactttatcctttatactttataaactgtgctgtaactgctgtaagcaaagctttttctacacttggtttgaggcctcccagttcttgaattgttttgtatgcacaataaacttctacaatttatcaacttgacctgattttgtttttgacagtgacctcatcttcccttaaactttccaacttttaccttccaacttctatcgccttatatatcagctttaacactgtcaaatatggtaacagaaactgtgttataaccataattaagacttttgagcactgcccagaggttgagtctcagaattaaaactaataaacagtgtttgcattactatgtcatggttgaactgagaagctaaagctattgttccttcactctgatattataataatccttatacaaccagagggagaataatcttagtgtgaaggtttaatgtattcctctttctcctactcatcaatagacagaaaaccatgccacagcttcattttcttcacagtctgactgtgaccttctgttacttttctgtgtgactcctggggcctctgtctttgaatttcattctttggaaaaaaagacacatctttcatgcaatagcaggaacaccttcctcatatttgccaattggattttttatttg

SEQ ID NO: 5956 - DNA, 823 bp, Homo sapiens
tcctgatttccccaaaatgcttgctctaatcataaatgaaactccaaatataagctttaagttcttgtcagcaggattcaggcaagttaagccattcagctataaacagatcagcctaaacagctctgcttgccctaaaaagaatgttaatgttaaacaatcatgaaaaaggttaaaatactttatcctttatactttataaactgtgctgtaactgctgtaagcaaagctttttctacacttggtttgaggcctcccagttcttgaattgttttgtatgcacaataaacttctacaatttatcaacttgacctgattttgtttttgacagtgacctcatcttcccttaaacttyccaacttttaccttccaacttctatcgccttatatatcagctttaacactgtcaaatatggtaacagaaactgtgttataaccataattaagacttttgagcactgcccagaggttgagtctcagaattaaaactaataaacagtgtttgcattactatgtcatggttgaactgagaagctaaagctattgttccttcactctgatattataataatccttatacaaccagagggagaataatcttagtgtgaaggtttaatgtattcctctttctcctactcatcaatagacagaaaaccatgccacagcttcattttcttcacagtctgactgtgaccttctgttacttttctgtgtgactcctggggcctctgtctttgaatttcattctttggaaaaaaagacacatctttcatgcaatagcaggaacaccttcctcatatttgccaattggattttttatttg

SEQ ID NO: 5957 - DNA, 823 bp, Homo sapiens
tcctgatttccccaaaatgcttgctctaatcataaatgaaactccaaatataagctttaagttcttgtcagcaggattcaggcaagttaagccattcagctataaacagatcagcctaaacagctctgcttgccctaaaaagaatgttaatgttaaacaatcatgaaaaaggttaaaatactttatcctttatactttataaactgtgctgtaactgctgtaagcaaagctttttctacacttggtttgaggcctcccagttcttgaattgttttgtatgcacaataaacttctacaatttatcaacttgacctgattttgtttttgacagtgacctcatcttcccttaaactttccaacttttaccttccaacttctatcgccttatatatcagctttaacactgtcaaatatggtaacagaaactgtgttataaccataattaagacttttgagcactgcccagaggttgagtctcagaattaaaactaataaacagtgtttgcattactatgtcatggttgarctgagaagctaaagctattgttccttcactctgatattataataatccttatacaaccagagggagaataatcttagtgtgaaggtttaatgtattcctctttctcctactcatcaatagacagaaaaccatgccacagcttcattttcttcacagtctgactgtgaccttctgttacttttctgtgtgactcctggggcctctgtctttgaatttcattctttggaaaaaaagacacatctttcatgcaatagcaggaacaccttcctcatatttgccaattggattttttatttg

SEQ ID NO: 5958 - DNA, 790 bp, Homo sapiens
cttcccacctgggttctcctgaacttacagggccacaagaggaaactctgtgaacagtctgaaaacttaaataaatggaagaaggactagaacatgctgacccagacacacatttcaggctgcagggaagagacacactcaagtgtccttccgtgatggagcacagtggataatgttgatgcactttgagaattctcaaatctctttacagtttctggttactcctccccagttgcagtgtgcttttttgccttcaagagttacaggtctgtacctgtaactcttcttatgagaactctccttgggttactggaactgtttkacctactataggtaactactatagttacagtaactgctgtatgacctcccttacctagagttgggactacctctggtgtgtaacttatactcccttctagccatatctggtggaaaccaccccagcctctctctgttggactgcctgaaatcacaccatacttggttttctcccttccctgtcttccttcccccacttccaacccagcttctgggaacacttctttaattattgctttgcacattactcctcatttcagtgcctatttcaaagaacccaacctgaagcatagagatttcctgggaagatacatggacacctgagacatctcaccatttctggtgcccagcgtttccaagtccctcattggtcacattcagtttgggctccagtgccctacctgcccttgtggttctggcatttatcctttccaaaggataatttgatcggcctgatgccaccatgcac

SEQ ID NO: 5959 - DNA, 724 bp, Homo sapiens
cgcaagattgaggatatggtaaatagaagtggttggtataaaactggatctgttctgaggacacagaaataatttcaaatactgtatttatataaatgggctacctaatatgctaaaaagaagcttatcaaagatgatgtaaatttaagagcatgagtcaattagtccattaggtttttaggttttgttttgttttgttttttgagacaaagtcttgctctgccacccaggttggagtgcagtggcacgatttcagttcactgcaaccttgcctcccaggttcaagcaagtcttctgcctcagcctcccaagtagctggaattacaggtgtgcacgaccacacctggctaatttttgtatttttagtagagacagggtttcgtcatgttggccaggttagtctcgaactccggcctcaagtgatctgcctacctcagcctcccaaactgctgggattacaggcatgagccaccgtgcccggcagtccattaggttttaaaaggataggcaaaagtcttcagaaacgtatatagaaatttgccctcagaacacttaatatttcagttaatctactgccatgtatccaactacaccaaaatttagtggctcaagtaacagctattttatttcccatttgtgattctgtaacttaggcaggactcagcrggggaggctcatctttgcttcatgcggtgtcagatgcggtagcttgactgaggctgga

SEQ ID NO: 5960 - DNA, 671 bp, Homo sapiens
taaaagcaacagaagaaacaaataacatacaatggaactccagtatgtctggcagcagacttcagtggaaaccttacaagccaagagaaagtggaatgaaatatttaaagtgctgaaggaaccttagactactgcatctggaaaaaatatgctttaaacatgaaagagaaataaagactttcctagacaaacaaaagctaaaggatttcatcaacatcagacctgtcctacaagaaatgctaaagaaggtacttcaatcagaaagaaaaggatgttaatgagcagcaagaaatcatctgaaagtacaaaactcastggtaatattaagtacagagaaaaaacacagaatattataacactgtaactgtggtgtgtaaactactcttaagtagaaagactaaaagatgaaccaatcaaaacaataacaatttttcaagacatagtacagatgtcgagcaatgggctctcgtgacaactggcacaagtgctgcaagacaggggcaagagtaagccctcccacaagaagtggaagtatgagctggagtgccccgctgccaacaccaagattgggcccccgctgcgtccacacagtctgtgtgcagggacgtaacaagaaatactgtaccttgaggctggatgtggggaatttctcctggggctccaagtgatgt

SEQ ID NO: 5961 - DNA, 521 bp, Homo sapiens
ggtcaagatccaggtctcctgcacccatctgtgagcctcatagtcaccttcaggcccaccctgtctccagcctgctgctacaacacccgggcatcggtgtcacactagggacaccagaacctgggcgctagcaccaaggtgagtgggggtcaggagcagctgggccccaccttcctagtccccagccatgcctagaggcctggcacatctgtcctccatcagctggactgtcatggggaccccagagaagcygggggttgaggtgaggtgggcatgaggacagcagccagcatcagagggccctgggatgtggcagctccttctttcccagaaggtggtcactccaggaccattaagcctcctgggatgaggcaacaacttggaggtacatagagaagcccagcctggccccaggccatccatgagtctgttcaggggttgttgtcctggagtggcacttgtccccagctcccctggggccagcctctcatcaggtcttgctttgcagagtgtttggcagc

SEQ ID NO: 5962 - DNA, 894 bp, Homo sapiens
aaaaggcctgactcatatgagaaaatgctcaatatatttgttttgtcatttttaaggggtggttttagggcacagaaccctaaaggaatgaatggaattctaaatacttcgaagctagagtagtgaaagattccaggggaacacagtgctggccttctcccttcttcttggggaagaaaagatctcagtgaagttccatgggtcttctcagtaagtaaagaggagattaactagaatgctgaatctcagacactgaggggttagagtgattgaccagggctgggtcctgaagagcttggtattctaggctgagaatataattttattctaaagctaatgaaggtttttagggagatgtgcattttgaaaaggtctaggggctgcttggagaatggccaggagaagatgaggctgggatgtggatcgggaaggtgctgcggtgatccagcatggtgagtggaaaagagggggtagatctgagagatagttttatatttatttatttgtttgttytttaaatattaatagttcatcaagtttcccatcttttttaagtagctcatcacagagttattaagaaggtaaatattccgaggactttgtgaatgagagctgagggcgtggaggaaactagtaaaagtcaaagatgatgcttaggtgtctgccttgggtaactaggggatggatgggggtgctatcccctgagatgtgacacagtaaaggagcaagtttaggcaggaagagaagtaggtaagtttgaattgggtgtgatatgtccaaacaagatgtctaggaggtggttcggagcttatgagagggatctggttaagggatagagtcataaattatcaaattatcaccatatagatcataattgaagccatgggaatgaat

SEQ ID NO: 5963 - DNA, 815 bp, Homo sapiens
cccatccatttatgtattgtgcatgtctgcttattttctacaacagagtagttgcaacagaaaccatctgctccacgaagtccaaaatatttgtcatttgttcttttacaggaaaagctcaccaaaatctggtctatacaatcaaatgcatatataggtgtgtatatgtatatatacacacacacatatatatatatacagatatttccatttttttactgattttataaaactaaatatagttttaaaccttggttttttaaaaaattaacaatatttaggcaatcacctcaaatcagtatacataaatctgccttacctttgcaactactttatttactgggttctagcactttacataattgctttagttgagttctcacaagatcttattttaaactgcaaatagtgaagctcagaattaagtgacttacatttaattctccagtagtaaggggttgagcccttattgctgtcactccamgacttgaatattagtcgtgggcaatctgtatgctctttgctgaagattgactgaattagagaataatgtcatgttcatttgtgtacccctatccatgcagaggtgaatgtttcttgtgagtaggctattgacttgctttgctgggaaagtggctaaatcctgagggctatgcgttttaaacatgctcagccagtccatattggcctttttagcattgacctctggattagtagttctcacactgtccatcacaccccctggataattcaagaagtctgcaaagtagctacaaacacttttgcccactcagagtgaataatgatgtggatat

SEQ ID NO: 5964 - DNA, 815 bp, Homo sapiens
cccatccatttatgtattgtgcatgtctgcttattttctacaacagagtagttgcaacagaaaccatctgctccacgaagtccaaaatatttgtcatttgttcttttacaggaaaagctcaccaaaatctggtctatacaatcaaatgcatatataggtgtgtatatgtatatatacacacacacatatatatatatacagatatttccatttttttactgattttataaaactaaatatagttttaaaccttggttttttaaaaaattaacaatatttaggcaatcacctcaaatcagtatacataaatctgccttacctttgcaactactttatttactgggttctagcactttacataattgctttagttgagttctcacaagatcttattttaaactgcaaatagtgaagctcagaattaagtgacttacatttaattctccagtagtaaggggttgagcccttattgctgtcactccaagacttgaatattagtcgtgggcaatctgtatgctctttgctgaagattgactgaattaragaataatgtcatgttcatttgtgtacccctatccatgcagaggtgaatgtttcttgtgagtaggctattgacttgctttgctgggaaagtggctaaatcctgagggctatgcgttttaaacatgctcagccagtccatattggcctttttagcattgacctctggattagtagttctcacactgtccatcacaccccctggataattcaagaagtctgcaaagtagctacaaacacttttgcccactcagagtgaataatgatgtggatat

SEQ ID NO: 5965 - DNA, 815 bp, Homo sapiens
cccatccatttatgtattgtgcatgtctgcttattttctacaacagagtagttgcaacagaaaccatctgctccacgaagtccaaaatatttgtcatttgttcttttacaggaaaagctcaccaaaatctggtctatacaatcaaatgcatatataggtgtgtatatgtatatatacacacacacatatatatatatacagatatttccatttttttactgattttataaaactaaatatagttttaaaccttggttttttaaaaaattaacaatatttaggcaatcacctcaaatcagtatacataaatctgccttacctttgcaactactttatttactgggttctagcactttacataattgctttagttgagttctcacaagatcttattttaaactgcaaatagtgaagctcagaattaagtgacttacatttaattctccagtagtaaggggttgagcccttattgctgtcactccaagacttgaatattagtcgtgggcaatctgtatgctctttgctgaagattgactgaattagagaataatgtcatgttcatttgtgtacccctatccatgcagaggtgaatgtttcttgtgagtaggctattgacttgctttgctggraaagtggctaaatcctgagggctatgcgttttaaacatgctcagccagtccatattggcctttttagcattgacctctggattagtagttctcacactgtccatcacaccccctggataattcaagaagtctgcaaagtagctacaaacacttttgcccactcagagtgaataatgatgtggatat

SEQ ID NO: 5966 - DNA, 815 bp, Homo sapiens
cccatccatttatgtattgtgcatgtctgcttattttctacaacagagtagttgcaacagaaaccatctgctccacgaagtccaaaatatttgtcatttgttcttttacaggaaaagctcaccaaaatctggtctatacaatcaaatgcatatataggtgtgtatatgtatatatacacacacacatatatatatatacagatatttccatttttttactgattttataaaactaaatatagttttaaaccttggttttttaaaaaattaacaatatttaggcaatcacctcaaatcagtatacataaatctgccttacctttgcaactactttatttactgggttctagcactttacataattgctttagttgagttctcacaagatcttattttaaactgcaaatagtgaagctcagaattaagtgacttacatttaattctccagtagtaaggggttgagcccttattgctgtcactccaagacttgaatattagtcgtgggcaatctgtatgctctttgctgaagattgactgaattagagaataatgtcatgttcatttgtgtacccctatccatgcagaggtgaatgtttcttgtgagtaggctattgacttgctttgctgggaaagtggctaaatcctgagggctatgcgttttaaacatgctcagccagtccatattggcctttttagcattgacctctgrattagtagttctcacactgtccatcacaccccctggataattcaagaagtctgcaaagtagctacaaacacttttgcccactcagagtgaataatgatgtggatat

SEQ ID NO: 5967 - DNA, 1599 bp, Homo sapiens
ccatataattaatgcttagatttcccaaattctgatgacgctaattttaatctgcaatagatccataactgacaaagggtcacttagtcaagagagtttgctgagtcttaccactcagagataaaacaattatttgtttttaaatagcgtttacagttcaagattgcttttctgattgaatacttcttctctcttatttctcaaattattactctattgagtaagaatcttaactatgttcaacattttcaggcatgattattataaatattttgcaagttagcttcaggagctgaaaagatttcttgatgtcaggtgatacttttgttgaatcaacaagattgactggtctcatggctggtgtttagcaagtcaatcattttcactacacaatagataacagtgaactaaaattttcttttattcattgggaggctattctgtgatactaagaacaaagaaaatcaagtctctgtggaaccagagtcaatcttccaaaatgtaacacatccattaggagaaaaaaagagtgtcagacaagaaacaaattggctaaattggttgaaatatctctttaaaattaagtttacatattaaaggaaagataaaaggaatatgcacatcatttgctaagacacaaatatcatctgattttcagctatttcacatttctattttttcccccttactacattttcagcacttttggttttgaaaagcagaaaatgaagtcaaactggcttaaacagaaaagaagatgaatttattggtgcatataactaaactatccatgggtatctgacttcaggtgctgctggatccagttgctccaataatgtcagagttagtctttctctttctccagactctgctttttcccccttacttccttaatttttagttgtttgtaccccacaattgtcaattatgtccaataaacttcaaatatatatctcattgcctgatcgtgttttcattgcctgtctctgaatcaggtttatagccaaggagatacttcttggcaagatcttgagtctgtgcttatcctgtggagttggagatagggccaacccagtttaaatcatataaactgagaagaggtgagggtaatgatgccccaaaggataatcaaaggawcgatgtcagaaaagggagaatggataccaaggagacaaaaatactactctagaagagatcctgcatcatttgcctttaagaccgatacataatataacagtttcctttgagaagtccaggagaaatgagcttagagaattatcttttcatctttgtttttacccggcagcagagacttccaacacatctatgttgtaccaactcaattttaagaaagaagaaatgtctgacattccctgtcataaattcttgaagtaccacagtccatgaaggggaaacctgagggctgagggaagtggtggaataagcacactgtggtcagccttgctaagtgtttcatttatcttgttgaatgtgaaattcatctcttttgagcatagcccggtgcccacttacttgtatgctctcccttattcatctactgttgatataaaattacttaaactcagggtttttaagtga

SEQ ID NO: 5968 - DNA, 538 bp, Homo sapiens
tttggggaccacgaccacgctgcaaactcttcaccacaagttactgttgaaggaagtacaaaacacaggaagcttttagaaacttccataacaacttgacagagtaactttatgtctgttgaaactaataataagaaaagttaggcttgtattttgtatatcttctatcattttatcttcccagcaatttatttttactatgttttataaaagtattccatggtgcattataaattttttaaatatggccttttcaagtttragattaatataaaggataaatactaattatccaagcaaaggggggaacaaagtattacatagaaagatttgtgcttcacgagaaaactatgcattgtctagagtacatctttccttattacctgattctaaccttttattgagctattctgcagtttataaattgtaaataactaatagcaatgaaaaataatttctgcctgtagatatgcaaaaattctgtcaggcaattgacttcccttcctcgctatggaaggggccagctttgcccccactt

SEQ ID NO: 5969 - DNA, 866 bp, Homo sapiens
ccttttcaaggattcagtattgagtgtggtctcattttgctcttcttttcagcattcagctcccccttcatttctttcactgaggctccacagggttctgacaccctgcaacctagacaataaacaagtttttctttctcagcatgtcaggcaaattagcacttcacaaggtttggttgccacagatagagaaccaagcgtttgctgtgtgggtgtgtgcacatgtgtgggcacgtgtgtttgtatttgtgtgtgtgcatgtaagggtttccagcacattgtggtgtggaagatggctggacaagaccagggtcttgagggaaagtgatgtaaatagcaattgtgaagcaggttcttgcaaagatgagttagtcaagctcctgaccagatagcacagggatctgaaataccaaaaagttccaggtcagccggccgggacctgcctgagctgtgcggggtaggaggtgggagggactgggctctctgtgctgcgggtgtcattgcaaagtcaagagccactaatggaaataaccactggggcatgatttttcatgtcctgattccaatcacagacctgtcatccaagaagaatattgaaggggaaatcccatttcctttgaaaccaaatgttccccacagaagccaaaggcttgtagaaacaactctgattggaaagacttgagcatacattgcctggcttctcgagtaagaggtggcaacactcatcatttattgagagatgagtttacagagagayggggcctgcccatacatggtgatgacctttcttgcttccttgcatcagagacccgactcacaggaggacactgtggcccatctggtctctgtgagcagacggagatgga

SEQ ID NO: 5970 - DNA, 780 bp, Homo sapiens
ccaacattgcaaaaccctgtctctaccaaaaaatgacaaaaattacttgagcgtggtggcaggctcctgtagtcacagctatttgggaggctgaggtgagagaattgcttgaactcaggaggcagaggttgcagtgagccgagctcatgccactgtactccagcctgggtgacagaacaagaccctgtctcaaataataataataataataataataaataaggtcctttacattatttacaaaccatagtttgtgaagctctgtttttggactccaccattgatgtgactcaattgccttctggaagtccttcaattctcatcttgctacctgctgacatctgtattcagctacgtacatttttttctgtctcatagtttttttttcttttctcctagtttaggcttcctcatcattttggctatggcacagaaaagaggccacaagaagtcatcataagccgaagagaaagcactgtgttagatgctttatgaaaatgagagagagagagggagagagagagaaaatgaggccaacaggagattcaagagctgggsactacagaggaatcatttcatacacaagctggagataactgtgttgtgcccaaccatcactaaacaccttttattgttttggtgaacaaaaccacacctatatgaaatcaatggctcaatgctcatcattagaagagatcaccagggtctccaagccagaagctaaccccagccccaggagctaacccttggtggaagaagacctttgtcatgaggatccag

SEQ ID NO: 5971 - DNA, 780 bp, Homo sapiens
ccaacattgcaaaaccctgtctctaccaaaaaatgacaaaaattacttgagcgtggtggcaggctcctgtagtcacagctatttgggaggctgaggtgagagaattgcttgaactcaggaggcagaggttgcagtgagccgagctcatgccactgtactccagcctgggtgacagaacaagaccctgtctcaaataataataataataataataataaataaggtcctttacattatttacaaaccatagtttgtgaagctctgtttttggactccaccattgatgtgactcaattgccttctggaagtccttcaattctcatcttgctacctgctgacatctgtattcagctacgtacatttttttctgtctcatagtttttttttcttttctcctagtttaggcttcctcatcattttggctatggcacagaaaagaggccacaagaagtcatcataagccgaagagaaagcactgtgttagatgctttatgaaaatgagagagagagagggagagagagagaaaatgaggccaacaggagattcaagagctggggactacagaggaatcatttcatacacaagctggagataactgtgttgtgcccaaccatcactaaacaccttttattgttttkgtgaacaaaaccacacctatatgaaatcaatggctcaatgctcatcattagaagagatcaccagggtctccaagccagaagctaaccccagccccaggagctaacccttggtggaagaagacctttgtcatgaggatccag

SEQ ID NO: 5972 - DNA, 1563 bp, Homo sapiens
tggctactgcccctggctagaagactcttggccagtacctcagcctgctgaccctagcccaggtcagaagtgtgcttggtcacctgagctctccagcccctcccggcccagaaaaacaggtgtgcatgctcagtaacttgagcctaccttctgaaggcctgggaaattgagagaggacagataactctttctctggacaaccacaaggccaataaacaagtcttcagggagaccatggccagctgtaggttgtgcagggccggctgtcagtttgggggattatctaggacttttgcttttcatagcagcagcagcagccgccaccaccatttgttgatcacccagtgccaggtactgtgccaggttctttccatgctctttcccacttcttcccttgtgcagccctgtgaggagaggagttgcttacagcacagacatcggagtcagacagaccagggcttggacmccagccctgccacaggctgattgacttggagcaagtcagtgtttgagaattagaagaggaaatgtaggtaacattggtagcccagagcctggcatggagtaggccctaaacacgtggcagacaaattctgggagaggtgcccccactttatacaggagggcactgaagcccatttggccagacccaaaagtggatctgacgagctcctgttctcatcctttgtgtacacgacatcaccttgggttgtgttcccagccctggtaactgttctgatggagagactagacagaggggaattcctgggttcagtagttaaagttagagtttctccatacattttccagagaatcacataaatcaccagccagaagaaggtgaaaagcaccagctaagaaaagggtggcatcatctgtggcttcttattgcccaagctcttctgtccccaaaccaggacattcttcagaaagggataaagatgggcacacagagatgaaaccgcaagttgttttgttccaaccactgactataacccatacacacagagctaccagccacatgtttatgcccagactctagaacaaaaggcaaaggataaaaacacataagaatcccatacaaggggtgagatgggcatccccagagagaaggcttcagtatgtttgtgttcacgttgcacttacctggatgctacgggtcaacagagtgctgcccaaagctctgcaaggggtctaggtggtcagagttcccccaaagtcttaattattttcatcattgcttcatctcaacgtagtttaaattggtataaatacacttatgaataagatgtttggcatgaagatatgcattttctccacacaaacaattttatacatgatgtttaggttataagtttaatccataaagctctgtttaaaccataaattcagaaatactgtcttttaatgaaaaaaatatttatgttagaacatatgaaacacgtgcagcctaactaaacacactataatgtctacccagcatccatgtaatccttcttccttcctccaatcaggccatgtgaccctagggaccctggattctccctagccccagcgaggatc

SEQ ID NO: 5973 - DNA, 1563 bp, Homo sapiens
tggctactgcccctggctagaagactcttggccagtacctcagcctgctgaccctagcccaggtcagaagtgtgcttggtcacctgagctctccagcccctcccggcccagaaaaacaggtgtgcatgctcagtaacttgagcctaccttctgaaggcctgggaaattgagagaggacagataactctttctctggacaaccacaaggccaataaacaagtcttcagggagaccatggccagctgtaggttgtgcagggccggctgtcagtttgggggattatctaggacttttgcttttcatagcagcagcagcagccgccaccaccatttgttgatcacccagtgccaggtactgtgccaggttctttccatgctctttcccacttcttcccttgtgcagccctgtgaggagaggagttgcttacagcacagacatcggagtcagacagaccagggcttggaccccagccctgccacaggctgattgacttggagcaagtcagtgtttgagaattagaagaggaaatgtaggtaacattggtagcccagagcctggcatggagtaggccctaaacacgtggcagacaaattctgggagaggtgcccccactttatacaggagggcactgaagcccatttggccagacccaaaagtggatctgacgagctcctgttctcatcctttgtgtacacgacatcaccttgggttgtgttcccagccctggtaactgttctgatggagagactagacagaggggaattcctgggttcagtagttaaagttagagtttctccatacattttccagagaatcacataaatcaccagccagaagaaggtgaaaagcaccagctaagaaaagggtggcatcatctgtggcttcttattgcccaagctcttctgtccccaaaccaggacattcttcagaaagggataaagatgggcacacagagatgaaaccgcaagttgttttgttccaaccactgactataacccatacacacagagctaccagccacatgtttatgcccagactctagaacaaaaggcaaaggataaaaacacataagaatcccatacaaggggtgagatgggcatccccagagagaaggcttcagtatgtttgtgtkcacgttgcacttacctggatgctacgggtcaacagagtgctgcccaaagctctgcaaggggtctaggtggtcagagttcccccaaagtcttaattattttcatcattgcttcatctcaacgtagtttaaattggtataaatacacttatgaataagatgtttggcatgaagatatgcattttctccacacaaacaattttatacatgatgtttaggttataagtttaatccataaagctctgtttaaaccataaattcagaaatactgtcttttaatgaaaaaaatatttatgttagaacatatgaaacacgtgcagcctaactaaacacactataatgtctacccagcatccatgtaatccttcttccttcctccaatcaggccatgtgaccctagggaccctggattctccctagccccagcgaggatc

SEQ ID NO: 5974 - DNA, 801 bp, Homo sapiens
cctcttgctgcttttgcctggctgaattttatactttgagatacttttgaaagcttccttayagaaattaatgaaagattatatgtacatgtatgtgtgtgtatataaatgtatatgtttgtgtttatacacatgcacacacaccactccatgtttgtgctgccagttagagcttctgagttgatacaattcatcccaaagcaaagaaacttgtttttctttaatgaatatgcaatttctgctgggattttaaaatatttgatatgaaacttgaagattctctttaccactttttaaaatgttgtggcacattacagtgctgagcaaaacctgtgatgacaccaaaacaatcatctgtctctttctctactgtcggggaaggttggatctctgtcttaaaaaacaagtctttgttgagctccagatcaaaggaataatgaaggtctgttaatttcagtggatgacacattctttcactccccctctcccactcgttttttcatttcctactatgaggagcttcaaattggagtcaggaggtaacaacgccttgaatcctcacatactgttcagtaacaatgctattcaataatcattgtctcttatccacaaatcagcagggaggccaagtcaccaagcagtgggtatttagtgcttatctatctgtggacctgtattaattgcatctcaggcagctccatttgtgaattcaaagtgctgccccttaaggaaattgccatcagggtacactaatggctgagctattttgcttaaacagcaccctcatttcgagtttcatac

SEQ ID NO: 5975 - DNA, 759 bp, Homo sapiens
aaaaactaattcatggggcaaagtctgatcagataggtattattatctccatattttatagaggaataattgagaggtacagatggcaaagtgatttgtaaagtcttacaactagttagcagcataccaaaccaaacatcattcttctaagccccacagtagcattttccaacaatgctcttttgaatcacatgccactcctctccaacaaaataatttttaaaatgtatttttcatccttggggacttaaatcagcatttcaaattgatactggttaagtcttccaaataatgctattataatgggaaaatagcatttgaattaaatgaaagagtttttcaatgtaaaaagaaattctcatgcgtgtgtgtgtacatgtgagagtgtgtgagtctttatccataggcagtgcttaaactcatagtttaagaacatttatatcaaaagtctgaagtatgtaatatgtaaattcctttggtttatcaagttaatattaaggcatttcagattcccctaaaaggatttactgtttttttaattatattcatatttacctataatgaagtagaaagttaaaaataagagttgaaaaaaacatgcataatcactgcatttcatgaaagcactttttttggtaaccaaataactttccaataaataataaaaagsagttaatatcaccacaggacatatacaattaagaacagtactataggcatataacttgacatagggtggacattcgagatggctgaagt

SEQ ID NO: 5976 - DNA, 658 bp, Homo sapiens
aaatttgtctactgtgtatattaaagctgaagaaaccaaaaagtttctgcctatttggtatttttcctgaatactagatttgctgacttgggatttagatgtagacgtctgtttgcaaatgttttcttcacacatttgttcatttttcctatttacatcatcagtcatccccacttcacaatgttcttttcaaaggcctctttcttagtcattttttttaggcaatgtttggccatctggcgcacagtttatcagaagtattattgcttaaggtcccagccatagaggaagggaaactcagacataagtgagagttgcaagctcagatgtcaaaagaagatacaaataagaggyggggtacagtggctgatgcttgcagtcccagcactttgggaggccagggtgggaggatagcctgaggccaggagttcaagaccagcctggtcgacatagcaaggtcctgtctctacaaaaaaagaaagaaagataaagatgcaaataagaaaaaccaaactgactaatttatattttggaaacaaagtttttttttttttgaagtatttatttatttatttttgagacaggctcttactctgttcccagtgtagtgtagtggcatggttacggttcactgcagcctcaaactcttgggctcaag

SEQ ID NO: 5977 - DNA, 250 bp, Homo sapiens
aaaaaaaaaaaaaaaaaagaaaaaaccggttatacattaaaaggaaaatttaagaasataaaataacaggacaatttacaagatagagataagaccaaaggaaaccatgagggatagtgaaataccccagggctagctactgccggaagccattactacattaggcctgagagaacattgctggtagcaattaactgaagcagcagaaactatagctgatgaaggctgcctccctggaggtacactcagc

SEQ ID NO: 5978 - DNA, 731 bp, Homo sapiens
ttcttccctgtctcctaaaaagatgttcagggattacatatacttaataacctttcctcatcaaactctaatcacctattcatttaataaatatgtattatatacttgccatattccaaatactattctagtggtaaatatgacagaccagccctctgctctcatgtagtattctaggcacagggtgcatattgcaagcagtagagactacaagccagtcaacaaggaaaaatattctgattgtgacttgaaggaaatgatcaaaatccaagaacaggaagggacttggaggaggcagaagtggctgcctaagtgtcaaaggaaaggggaatctcacgtttgatctgcgagttgaatgataagaagtccactgtatgtgactatatggggataaaatgttccagatggaggaaacagcaattgccaaggcaagaatgatctcaagatcttagaggaatggaaagaagagtgtggggtggagcctaacagcaggcagcaaggcagaggtgaggagatgggtttgaaagatgagcagggatcagatcatacaaggtcttgtgtggcgtttcacttaatgagaaactcgtgatawcaaagattcaagctccagagtgttcagggtctaaatttgactttcaaaaaaagattttactattgtacattaaaaatcatctcaggacgcctggtgtggtggctaatacctctcatttgggagaccaaagcagaaggat

SEQ ID NO: 5979 - DNA, 1356 bp, Homo sapiens
gtattctctggaagaaatgcgcccgatgtccggccgaaggcgcgggctgcggacgagggagagggtagtctttggtggctctttccagactcgtggaaactttccaaaagtcatggaaattttacatattcatcgctccatagtgattctatattaatggctgacagggggatgcttgttytaaaaagatagaaatggatattgaaatgttcagatgttccaggtaaaccatgcaccaggtgtacactaagcctcctgtcgcctgggtccagcccagtcccccaaatgggtgagtgaccctcggactgagccggggctcggagcctgcaacgcccacccgggtggagccgggactatgggcgaccatcgctccagcctggcagggggttgcttcctgcccagacccccctcacccacgtccagccctgttgctggacacacgtgctctagtttatgtgccattttgatcctttgttgccctctgtgagaagaaaggagcctggacaagcgtctaaagcttctgggtgtgaatagatacccacgcacttcaggccttacctgagtccaggtcgcctcgctatgcacgccctggccctctcccaggatggcgcccgcgctgcaggcagagccaccgtctccatctgcgagagcgcacaggtgcgcagggagggcccaggctacacagctcaggagctgtcctcatccaggtggggtccagcctggggtccgcccagtcggggatgagctcatggactgcaggtggaggtcccagggcccctcctagagtcctccctccacggagggtctgcctgctgagggtcagaactgagggctgtggcctttatctggtgtagacaggctgtgttgctgcagagcaatcagtctgttttgatcttatggatactgaattgcacaactcagcatttctgtaatttgcattttcacacccactggggacagcgagagtgctggggatgggaagggtgtggaaaaatttcacttttgcagcttttgatgaaaaaggtaaaacaatcagcattaacaacagctttagcagcctaatgacaaaaccctgctatttcaatgctaatgcaccattaaaatagattgtcatagtccagaattttatattcttagcttgatgtgtttcaatgagtaggctgggacatgttcagggggtctttgtggatttgtgtctttaaaaatgaactctgttcagagaaacgcagaagagatcagggcttcccccttgtggctgctagaaaacagacaccttccatttctaaatgctgctctgaaacaggggggtctaatagtggggtcttgtgaccgctttgctctcttcaaatgtgttga

SEQ ID NO: 5980 - DNA, 1356 bp, Homo sapiens
gtattctctggaagaaatgcgcccgatgtccggccgaaggcgcgggctgcggacgagggagagggtagtctttggtggctctttccagactcgtggaaactttccaaaagtcatggaaattttacatattcatcgctccatagtgattctatattaatggctgacagggggatgcttgttttaaaaagatagaaatggatattgaaatgttcaratgttccaggtaaaccatgcaccaggtgtacactaagcctcctgtcgcctgggtccagcccagtcccccaaatgggtgagtgaccctcggactgagccggggctcggagcctgcaacgcccacccgggtggagccgggactatgggcgaccatcgctccagcctggcagggggttgcttcctgcccagacccccctcacccacgtccagccctgttgctggacacacgtgctctagtttatgtgccattttgatcctttgttgccctctgtgagaagaaaggagcctggacaagcgtctaaagcttctgggtgtgaatagatacccacgcacttcaggccttacctgagtccaggtcgcctcgctatgcacgccctggccctctcccaggatggcgcccgcgctgcaggcagagccaccgtctccatctgcgagagcgcacaggtgcgcagggagggcccaggctacacagctcaggagctgtcctcatccaggtggggtccagcctggggtccgcccagtcggggatgagctcatggactgcaggtggaggtcccagggcccctcctagagtcctccctccacggagggtctgcctgctgagggtcagaactgagggctgtggcctttatctggtgtagacaggctgtgttgctgcagagcaatcagtctgttttgatcttatggatactgaattgcacaactcagcatttctgtaatttgcattttcacacccactggggacagcgagagtgctggggatgggaagggtgtggaaaaatttcacttttgcagcttttgatgaaaaaggtaaaacaatcagcattaacaacagctttagcagcctaatgacaaaaccctgctatttcaatgctaatgcaccattaaaatagattgtcatagtccagaattttatattcttagcttgatgtgtttcaatgagtaggctgggacatgttcagggggtctttgtggatttgtgtctttaaaaatgaactctgttcagagaaacgcagaagagatcagggcttcccccttgtggctgctagaaaacagacaccttccatttctaaatgctgctctgaaacaggggggtctaatagtggggtcttgtgaccgctttgctctcttcaaatgtgttga

SEQ ID NO: 5981 - DNA, 1356 bp, Homo sapiens
gtattctctggaagaaatgcgcccgatgtccggccgaaggcgcgggctgcggacgagggagagggtagtctttggtggctctttccagactcgtggaaactttccaaaagtcatggaaattttacatattcatcgctccatagtgattctatattaatggctgacagggggatgcttgttttaaaaagatagaaatggatattgaaatgttcagatgtyccaggtaaaccatgcaccaggtgtacactaagcctcctgtcgcctgggtccagcccagtcccccaaatgggtgagtgaccctcggactgagccggggctcggagcctgcaacgcccacccgggtggagccgggactatgggcgaccatcgctccagcctggcagggggttgcttcctgcccagacccccctcacccacgtccagccctgttgctggacacacgtgctctagtttatgtgccattttgatcctttgttgccctctgtgagaagaaaggagcctggacaagcgtctaaagcttctgggtgtgaatagatacccacgcacttcaggccttacctgagtccaggtcgcctcgctatgcacgccctggccctctcccaggatggcgcccgcgctgcaggcagagccaccgtctccatctgcgagagcgcacaggtgcgcagggagggcccaggctacacagctcaggagctgtcctcatccaggtggggtccagcctggggtccgcccagtcggggatgagctcatggactgcaggtggaggtcccagggcccctcctagagtcctccctccacggagggtctgcctgctgagggtcagaactgagggctgtggcctttatctggtgtagacaggctgtgttgctgcagagcaatcagtctgttttgatcttatggatactgaattgcacaactcagcatttctgtaatttgcattttcacacccactggggacagcgagagtgctggggatgggaagggtgtggaaaaatttcacttttgcagcttttgatgaaaaaggtaaaacaatcagcattaacaacagctttagcagcctaatgacaaaaccctgctatttcaatgctaatgcaccattaaaatagattgtcatagtccagaattttatattcttagcttgatgtgtttcaatgagtaggctgggacatgttcagggggtctttgtggatttgtgtctttaaaaatgaactctgttcagagaaacgcagaagagatcagggcttcccccttgtggctgctagaaaacagacaccttccatttctaaatgctgctctgaaacaggggggtctaatagtggggtcttgtgaccgctttgctctcttcaaatgtgttga

SEQ ID NO: 5982 - DNA, 842 bp, Homo sapiens
tgtwaaagggtaaatattgttttccataatattgaagatgtgtaaaatttctcttctgtttttataaaactagaacaagcaatcccaatgaagaaacataatccatgactactgcgaaccgaaatccagactgcaggtgcaggaaggttgctagaaatacctcagacgggaacttaacccatggccaggagccaatgtcagcctccatcaacttccagccatttcccatgaaggccatgaagatctccagccacagcagcaggaacgcatggccaacagaaaccaatgccatctgtcagtgcttcactgaggctttagattgagaactgtaagaaaaatgattactctcacagcccaggcttgtgtataccagaagagaaatcgtgagctgctgtgtaaacaccctccgatgaacatgaaaaactctcaaactgcagggtccagaggcagccacacaaaccctcaaatcacacgcaaagtcagcacgtaggcagacacacaaaccctcaaatcacacccaaagtcggcacgtagatatcaacttgctagcttcacccagtgccagccaggacagggtccctaagcagcagggtagtgggagctatctggaaatgtgggcatggacatcactgtggcctaatggctgggggtctgggtgtcctctttctcctcacccattcagccatggccgctttccactgccacaaagacagaggggcagagccacatgaacactattttttcaagaaacgaatactccagatttccctgtttttgctgtaagaaaattgaaattatttaaacaacaaaaaacacacataggatctctggaaatgctccca

SEQ ID NO: 5983 - DNA, 581 bp, Homo sapiens
ttaatctgtagtcagggaggcaggcgttcagggaggaggaagtttcgtagccaggcccttctgtagttttctagtgcgggtgtctttttttttttttttttttttttttttttttttttgagacagagtctcactctgttgcccaggctagagtgcagtggcgtcatctcagctcactgcaacctctgccttctgggttcaagcaattctcctgcctcagcttcccgagtagctgggactataggtgcatgccaccacacccagctaatttttttctatttgtagtacagactgggtttcaccatgttggtcaggctggtcttaaactcctgacctcaagtgatccgcccacctyggcctcccaaagtgctgggattacaggctttttaatctgctctcggcaccatgggtccctgtggcgatctgttggctcaaggacactttctcagaatggttgtagatatataaactaaaattgaaaaggaaaccaattctactggtgatattgtttggctctgtgtccccacccaaatctcaggttgaattatcgtccccggtgttgggggaggggcctggtggga

SEQ ID NO: 5984 - DNA, 836 bp, Homo sapiens
tccctgcccacctcagaaatgtgagcaggcagctggggggcatttggactctaaccgggacaacctagtggccgggcaggggatgcaggcaccacaggtcacagtrgtttgctacgagtgtcagcttttaaaattttaaataatcctcttattgtaaaattgaggacattatttgaagcaacgcaaaaaccatgtaaaaaaaatgtctgtaggatatgaatagcatgtttctttaaggcaatatctgaagaaaatataaaagccccaggtgaaagacaccctgggagcagaggtgcccctgagggtcggctgccccaggacagaggagggctctgctggtgcccaggtggcactgcctgtcttgatgccaggtgcaggggtttagaagaaaagacaaggaagaaaataaaactcaccaccgacattcctaccactagagttacccactgttcccaatcaggcatatttcctcccaatcctgtcctctctgtgtatttggtaattgcgtaaaccatctctcccataattaatctcctttaaaatttggaataatatagttgttagaataatataataatcatgcagaataatttagaataatgttgtttagaacaatttttgtagtcatgctaccttgcagtcattcataactcagaagaactctgcatttagaaggtctatttaaaatgtgccctctttgctgaagagttagttttatggtaaaaatccaataaaattgtagctaagcactgaaaaaaagtaaaggattaagctcagcctccagaaatactgattttatatatatttgctctggggaagattggtttaagaagacc

SEQ ID NO: 5985 - DNA, 836 bp, Homo sapiens
tccctgcccacctcagaaatgtgagcaggcagctggggggcatttggactctaaccgggacaacctagtggccgggcaggggatgcaggcaccacaggtcacagtagtttgctacgagygtcagcttttaaaattttaaataatcctcttattgtaaaattgaggacattatttgaagcaacgcaaaaaccatgtaaaaaaaatgtctgtaggatatgaatagcatgtttctttaaggcaatatctgaagaaaatataaaagccccaggtgaaagacaccctgggagcagaggtgcccctgagggtcggctgccccaggacagaggagggctctgctggtgcccaggtggcactgcctgtcttgatgccaggtgcaggggtttagaagaaaagacaaggaagaaaataaaactcaccaccgacattcctaccactagagttacccactgttcccaatcaggcatatttcctcccaatcctgtcctctctgtgtatttggtaattgcgtaaaccatctctcccataattaatctcctttaaaatttggaataatatagttgttagaataatataataatcatgcagaataatttagaataatgttgtttagaacaatttttgtagtcatgctaccttgcagtcattcataactcagaagaactctgcatttagaaggtctatttaaaatgtgccctctttgctgaagagttagttttatggtaaaaatccaataaaattgtagctaagcactgaaaaaaagtaaaggattaagctcagcctccagaaatactgattttatatatatttgctctggggaagattggtttaagaagacc

SEQ ID NO: 5986 - DNA, 836 bp, Homo sapiens
tccctgcccacctcagaaatgtgagcaggcagctggggggcatttggactctaaccgggacaacctagtggccgggcaggggatgcaggcaccacaggtcacagtagtttgctacgagtgtcagcttttaaaattttaaataatcctcttattgtaaaattgaggacattatttgaagcaacgcaaaaaccatgtaaaaaaaatgtctgtaggatrtgaatagcatgtttctttaaggcaatatctgaagaaaatataaaagccccaggtgaaagacaccctgggagcagaggtgcccctgagggtcggctgccccaggacagaggagggctctgctggtgcccaggtggcactgcctgtcttgatgccaggtgcaggggtttagaagaaaagacaaggaagaaaataaaactcaccaccgacattcctaccactagagttacccactgttcccaatcaggcatatttcctcccaatcctgtcctctctgtgtatttggtaattgcgtaaaccatctctcccataattaatctcctttaaaatttggaataatatagttgttagaataatataataatcatgcagaataatttagaataatgttgtttagaacaatttttgtagtcatgctaccttgcagtcattcataactcagaagaactctgcatttagaaggtctatttaaaatgtgccctctttgctgaagagttagttttatggtaaaaatccaataaaattgtagctaagcactgaaaaaaagtaaaggattaagctcagcctccagaaatactgattttatatatatttgctctggggaagattggtttaagaagacc

SEQ ID NO: 5987 - DNA, 823 bp, Homo sapiens
actccaaatgcaccatctctgacattatgatgaagagaatatgtatttcatgacagggcaaatgttgccatccttctgagggaagatgtaaatgaggatgcttttagggatgatttctacattgtcactaaactgagacatttgtgcttgctcgtgccaagtgaagattgctgttgctgttgttctctcgcagtgattaaggttcattccctagcaacaggcagcagcagaaaggaagctttgcaggcagagtcaccgaataaacgcagtgggaacagtatcaacaacaaacccagtgatgaagggaggggcatgtggggcacaccacattgcctctctggcttctcgtctgcacctggggccagaggcaggtgggaaggagaccttgacaatgtgggaagtccctttgatttgctgaaatggaggagttcacattttactgtgcagtctaacattgcccattctggattagctccatcagacacgcttttgtgctttactgtaactctttctttatttgtcctcctsgaaactgatccataatgccaatttgctgatcagctgtccctgggacttcggtgtactgggctagaacctcagtctagtgttcaaaggagctggcagaatgggttgtctcggcatggaggacccaaaagcagagctccctggtgctttgggggagagtgaagcccttcattccactcctcattgcagaccagctttcctggtattcatgcactgcttttggtaacgcctcaaatgaaggccacagctcagccaagtagaagagagctcctagtaaatgaagtctggttgcctttga

SEQ ID NO: 5988 - DNA, 825 bp, Homo sapiens
  misc_feature (1)...(825): n = A,T,C or G
tcatagttcatgaaaaacaagtattcacgcaggtaacagactctaatctgctgcaagccaatgtgctattctcttcatgttatttatatccctcagaatacctcaaagttcccragagcagtcagtatttaactctaaactatatcatatatatgatatatttattatatataagttgggagaaagaagtantgagtgtttttgagatggagttttgctcttgttgcccaggttggagtgcaatggcactatttcagctcaccacaacctctgcctcccgggctcaagtgattctcttgcctcagtgtcctgagtagctgggattacaggcatgtgccaccacgcctggttaattttgtatttttaatagagacggggtttctccatgttggtcaggctggtctggaacacccatcctcaggagatccacctgcctcggcctcccaaagtgctgggattataggtgtgagccaacgtgcccagccaactatatcatattttaattgtgtagtgataaccctcatcaaaagaagtattcattatggtcagtgtactctgcttacttaccactgaagcttaacacaaaattgttgaaataaacatgcatattgaagtactcagctagctattgaggcaatacaggtttctagatttactcattttttttcactgtacacaaatgtcatgtgtgtcatgataaacccatgtgtgtgcatatattgattaaatattatatttctttttacttttattactattattgagaaagggtctcactctgtcgcccaggctggagtgcagtggcacgatctcagctgactgcag

SEQ ID NO: 5989 - DNA, 2147 bp, Homo sapiens
aatatagtgcttatctttacccattatgtatgaagaaggtagtatttttttwaaaaaggttatattattcttgagactgaaaagaaggagacagaagctctggacataactgtttgtaaaaaatctaatagtttcaactgccaatttcatacaagcatagaaatttgctaacataagttaaaaagtaaacatactatgtattataatttaaacactaaagttttttatattctctcaatatttacctgttccccttgttactactgtctgtggtgtagaggtctgaaaaataattgtttaaaaacacaaattttaaaattttgattaatcatgttatctgttacttattaagtgaccaattttggtcatctttatttgcagtaatcacaagcttttatactagatcctcatgaataccatgacactctgacacacaccacaaccccccacaaaaagtatacactacaatttcccttctctcctcaaatatgaggaaggagctcatgaaagtataaataaattcctagaacggttataaaaatataggtgaattcataggaacttatccaaaatatgaaacatatccatcacacatattttgacagagtgtggaggagcattttgcctcctgcctactgttctactgtatggaaaggttactaaagagcgataactgtgggtgctttcataaagaccatgtgagacgcttttgcactgcggtcatgttgggtgaatttacgttactgtttgcagcagtcttttgagagtgctgaagtgagaggaggcactgccatgggtcaaaaattgatatgctgcttgagttgggaatagttagctggccactgatgactgtttcctgatgaactcttactaaaattacagaaaatgaaaggaaaaaaaagcataaattcacaaagacagcaagaatgaaagaggaatccatggaagacagatttctaccacttttagaaaaagacaaggggctagaaaaatgtgaagtgatctaacagtgtggaaaagctagtggtgggcttcttacaggaatgacagctaaggataacagaagcagtggctgccttaaagaccctggaaaagccccagtcttgtacacacagtcagctgcaggagggaggctaaaatcaggggctgcttggaaggctgcacatagagttggaaagccctggttccttctctgtgtgactgcttccatcataaagcctatcagtccacagccctgtgggcaccccacagcttccaataatcttggcaataacttaatcccccagaacacattccttcctttgtgacatggaaataatgcctatttgtatttgttttctattgatactgtgcaaaatcagtggctacctaatgcatgcggggcttaaaacctagatgacgggttgataggcgccgataccaccatggcacatgtatacctatgtaacaaacctgcatgttcagcacatgtatcccagaacttaaagtaaaatagaacagaaaaaaaaataaataaatggtttaaaaaatagaaaagaaaaactgtaattctgttctaagaggattatggaaagatagtgatagaatttcaatgtcttatttcctatcccttcttcctagcttgaatttatttgtctatgttgagccaagcagcaatcggtgttggtgagctgttgtgtgtaaggtattgagttccaaaaagtcttgacagagaagaaaatgtggggctcttcccaacatgggttaggcattcttctgaaaaccagactcagataccctcaaaataaactttgtgcttgatgaattctggggaaaaaaaaaaaaaaagaaagaaagaaaagaaaagaaaaatcatcagtggcttaaaatgccacaaatgtatcatcttacagatctggtaggtcagaattccaattaaatgggttcaaccagaccagaatcaagatgtcaggggggccacattcctgccaggagctccaggagaaaatccatttcctttcatttccaggttctagaatctgcccacattccttgcctcatggttccttccatcttgctaggctgcagcagagcatcttcagatctctgactctatccctctgcttccttcatcccatctccttctctgactcgcctgcctcttctaa

SEQ ID NO: 5990 - DNA, 587 bp, Homo sapiens
caaggaggtcagctccccgcgtctcgggatgattctgaagccctcagcccatcctcgatgtcctgagccccctgctcggccctcagtggggctggctgttctgctgctgctactccattggtttttccttctctcctgcagggcacctcggttcagggacaggtcttgttacctggggcggtaggaggtgctcacrgagtgtttggggtactcccgaggtcagggctgagctaccaaggtcaacacagaagaacaagtgcagggtcttggatagaccctacccagcctgggaaggccccgtgctgctgcttcagggacgacgctctgccctgtgccaaacctgcagtcgggactgtgcccagcagcccagcctgggagactgatgggtgaggaggcagggtcctcctgccggccttggagtgcaaaggcaagagggaagccaaggagaaagccccccagaggagggctgggcaccctccccgggcctgcgtgccagacgcaccaggcaggaagcaggagggggcggggcagagcagggcagggcaagagcaggttggagactcctgagcagcctggcctgagtccct

SEQ ID NO: 5991 - DNA, 800 bp, Homo sapiens
atgaggcakgtaagccccgagtctcctagatgtactatgtggccacttcctttggcgcttccctcatccctaggcaccccctcttcctttctgctgtgagatttcatgggccatgcctctagggacttttgtctttgccctgacacctggccgagagagcagagcacaaagatcagtttctcgaggacactgacagtctcagcactcctgctgtgataacctttccacatcagcctgggaatgttctcttggtccacaggcccccagggagagcctttgctcatgatgtcctcctccagcattttttggctaagccatgatttttttccaatctcctgagaaactcatcttcaaagctgaaaagccaacgaagactcatttttgtctcctttctgctgtcacagggaacagcctcaactgacttcaagcagggaaggccaaggcaggaaaataaaaagccagaggaaaccacagaccttcttaacactatctgcccctcacatccaaccaatatgcatttactagctcttgccatgggtcagtcactgttctgggtgctaaagacaaaaacagtaaaacactcagcaccaaggctggacacactggttcatcccagcattttgggaggccgaggtgggcagatcacctgaagccaggagttcgggaccagcctggccaacatggtaaaatcctgtctctataaaaagtacggaaattagcttggtgtgatggtgcatgcctgtagctacttgggaggctgaggcaggagaattgcttgaacccaggaggcagagattgca

SEQ ID NO: 5992 - DNA, 800 bp, Homo sapiens
atgaggcatgtaagccccgagtctcctagatgtactatgtggccacttcctttggcgcttccctcatccctaggcaccccctcttcctttctgctgtgagatttcatgggccatgcctctagggacttttgtctttgccctgacacctggccgagagagcagagcacaaagatcagtttctcgaggacactgacagtctcagcactcctgctgtgataacctttccacatcagcctgggaatgttctcttggtccacaggcccccagggagagcctttgctcatgatgtcctcctccagcattttttggctaagccatgatttttttccaatctcctgagaaactcatcttcaaagctgaaaagccaacgaagactcatttttgtctcctttctgctgtcacagggaacagcctcaactgacttcaagcagggaaggccaaggcaggaaaataaaaagccagaggaaaccacagaccttcttaacactatctgcccctcacatccawccaatatgcatttactagctcttgccatgggtcagtcactgttctgggtgctaaagacaaaaacagtaaaacactcagcaccaaggctggacacactggttcatcccagcattttgggaggccgaggtgggcagatcacctgaagccaggagttcgggaccagcctggccaacatggtaaaatcctgtctctataaaaagtacggaaattagcttggtgtgatggtgcatgcctgtagctacttgggaggctgaggcaggagaattgcttgaacccaggaggcagagattgca

SEQ ID NO: 5993 - DNA, 588 bp, Homo sapiens
aggttcctgtgcccaggctaaggcagatatccctgctctgtgtccccagtgcaccctgsattcaccccactgtgcatgacgtccagggcatttgaaccgtctgcttctgtgcctggccgcctcccagagggtgccctccaggaggtcagggacagggtatccagcagtcctcggtggatgtttgcagagcaagcacacagagatcattcgttttctgcccccacaccctccagcaataccttcacatataaatatattcagttcatccgaactaattctgacaaccatttggcttaatagaagagatttcagagagctgtgcctcctctgtggctgctgatgttggttttgaagcagatgggtctgtctccctgcatctgcttgttttcaacaactgcaccacgcaggccagaggacaaaaggttcccaagtccttgagtagcttcagcctgagtgtcaggtctagcatgtgggtttgccgtgatggcagtgggcatccatgtggcttgacggcctccgttttggagagtggttggcaagtcaggctctgggattggactgcctgagttgcaagcctcagttctgcca

SEQ ID NO: 5994 - DNA, 781 bp, Homo sapiens
tcctatcagaggctgggcctggccgggtaacccacagatcagtgacccccctcaggaaccagatccctgaggctggctggggtgctgaatggccctgaccacctcactggaatccagtggctctgcttcctagggcatgtttactgcaaagccccagctcagctttgctgtccctgcatttcactaaactctgccgttgaactcaagcaccaaaactcccccttgtgaatcsagagtccaagtttgccacaggcttataaaatcacagatattagagatactgtgaattatgcaccagatggacccaattaactccccaactaatgtgattggggaaggaaatagctcattagaaacttgtaaactaccaactctcacagctgtgttctaattacagtacagccacagataaaaataatcacgccttctgctgagaggccgttcatgacccttccaaacttggaatcatgcagggatcaacctcagtctagctctgagcattgctggcctcagagctaatcaacccaaatgcaaatccacaagttaaaaagggaaatcagtagaagctggtggggaaacatgagaataaatccataaacccccaaaataattccaccccatcagatactctataaactgtgaatagatgcaaagcaaataatgacactacgatacgatgtaaaactagaatactatttctgcattttcacagaggtctaatgccctgcattaagcaagctcacaggcttcgacaaaattccaaattgagaaatgttaaatt

SEQ ID NO: 5995 - DNA, 723 bp, Homo sapiens
tagtccctcactctctcttacatatatcaaagttatgaaaaactccagcctccttttctttttttgtgttcccctctagctctatgttactatccttcaaggtaaagtttaagctctatctccgttaggactttgtctcttctaactagtaattaagaccatcttctgttattaaaatgtcagttaaaagctaacaatttagttttatttacaaatatacatttaaagatgtacctacagaggcaaatagtggaaaattgggactatttctgaataatagtagtcaagcaatcctgcctttatctaaaaatcctacataggccattagttaactgaaatygctaagcaagtaaagctttgtgccactctagaaggaactccatattgatattgggtttcagtgcatccataaattatatgcctccttttcctccagctgaattttcagcccaccaagagataaataaggagttattacagactaaaactagattggaagacataccttaggtgtatggtaataacaatgaacccaaagaattaggtagactcaccactctgtcacagccactctgggaaactgcatcctcacttcccctatcctatagggagcctttattgctaagtttgcttcattgctgaaagcatattagaacacatgtttctttgaacaggtagaagatccctgaaagaaaaaataaagggtaggttgacccatttgtg

SEQ ID NO: 5996 - DNA, 700 bp, Homo sapiens
gcttcataaatcaagcccacctgctctaaatgttatagatctcatgttgctctgttctactctcattttgtgactgcacgtttgacttaagggtttaagctaaattttgaaactttatatatagtcattgattaaccttagctggatctacagcatagttgatcactttatatttaaaaggaaraaaaaaaagcacagccctttgcttgccccaaattatggatctcttagtttaccaggcattcaagttttttattgagacataatatgttacatatttacggggtacatgtgatactttgttacatgcatagaatgtgtaatgatcaagtcagaggatttggggtgtccatcatcttgaatatttatcatttatcatgtgttggaacatttcaagttctctcttttagctattttgaaatacgcactacattgttgctaactatagtcaccccactctgctactgaacattagaacttataccttctatatatctgtatgtttgtacccattgaccaacctcttttcatccctcccctactctgctctcacccacatacccttcccagtctctggtatctgtcattctactctctacctcaatgagtgagcacaggtgaaatttatatttctgtacctggcttatttctctgcttaacataatgacctccagttccatccatgttgtttccaataaaa

SEQ ID NO: 5997 - DNA, 554 bp, Homo sapiens
cagatgtccattccaccttttgggacctcccggggggccctcttttcttcatccttcaagacaaggatagtggggtgaacagacagactttccttgcgagggttggctcaggaaggctctgggctcatctcacagccgccccagcgagggtcggggaggcaggtgctggctccggtggggtctgcrgcagagcaggactggagcccagggcgcagctgcacagctcaacgccggttcgcgccctggtttacagcgttgggctgggtcaccccttctttcctagcttgctgctgtgtgttccctcggtgtaggaatcaggggagtgtcttctggaggccactaaagcaggaatagcattttcatgttagcgtgcacgggcggtctccgcagcccctcctcgtgccggagcctgtcctggggcctgcggggcggctccgggcctcgggccggcgcaggcgggcggcagggggcgctgtgcgctcggcgcgggggcggggccggggccgagcctcccgcgtgcccggcctctgtgcgcgctcggccccgcccgcgca

SEQ ID NO: 5998 - DNA, 769 bp, Homo sapiens
ccggggcatcgccaccggcggggaaggtcggaactggccaagaggatgccccgcacatcccctgcgcgcggggtccgcggctgctactgcccctggtccccaccgcgagccctttcccggggaatgagccgccgcccgagccccggagttccctgcgggtcttacccaccccagcctccggccgccgaccccaagccccctgcactgtgcttggctcccagctgtttggtcgcttatgccatcctggaggcttcctggtcctggggtgaaggggtgacttctttaccctaatggtcttcgtaggcaggtctcaggatgtccactccaaagttcgtggtcttttttctagagaataataatttttaaaatccattgaactggccgggcgcggtggctcacgcctgtaatcccagcactttgggaggcygaggcgggcggatcacgaggtcaggagatcgagaccacggtgaaaccccctctctactaaaaatacaaaaaattagccgggcgcagtggcgggcgcctgtagtcccagctactcgggaggctgaggcaggagaatggcgtgaacccggaaggcggagcttgcagtgagcggagatcgcgccacagcactcccgcctgggcgacagaacgagactccgtctcaaaaaaaaaaaaaaaaaaaaaaaaaaatccattgaacaaacatcctgcgctgcctcctgcaggatcaaggctggggtaacagaggagtgaggtaaggccccagggaactatccccagtgga

SEQ ID NO: 5999 - DNA, 580 bp, Homo sapiens
tctgtcactcaggctggagtgcagtggtgcaatctcagctcactacagctttgatctctggggctcaagcaatcctcccacctcagcctcctgaatagctgggaccacaggtgtgtgccaccacacccagcaaatttttatattttttttgtagagggggggatttgccatgttgcccgggctggtcttgaatttttgagctcaagcaattctctcacctcggcctcccaaagtgcttggattacaggcatgagccactgcgcctggctaactatatatatttcaaccaataaatccaccttatgtcataagtggacattttgctgccatgggattgaaatgaaacaaggaagaaaccctcctattattaataaactggacaaagccatgcaagcaaccacattgctcctaaacggctgccctcccaggctgacctgataccatgcacctgcaggtctgactgagtactgttcatgtcagaactgggacagtgtgcccggcagagtccagaagcatctcctagtgcagyggtcgtggtcagtgcttgagcagagaaggcaagactgtggggacagagaca

SEQ ID NO: 6000 - DNA, 825 bp, Homo sapiens
atccttgcaagtcggcctgccccacctgtcgggccagatgactaacgcctcggcccccacaactctgtactaaaatggctcatctgtcttwctcccttgacgtgtgtatttgttagggcaaggatataacttgttgaccattggccccaaacacacggcaccatcctggaaacactgtaggttctcaaacacttaagaaagtaaagagcagacattctccaaaccctaattcctcactgctcttctgcctattcctctagggcctggctaagctcacagcctctctgcctctccctgccttccccatcctgacttgtctgaaggcgtgagcttgcatcattgctggtgtccaccagccttagccctggctgaatggggtgagcagaggtgctcaaataggcctgtccagggtccgggggcaaagaaggtagcctggttctacttcccctggtggactgcagcaggggaggtaacaggcgagggaattatgctacagggtgagagcccagcctcctgaggctttttgtgccacgttggcgggccaaccactgaaaccttcatgccgctaagctagagccagtgccttgctgcattctctctggtcctttctctgaaagtccccagggatggaagaacaaacgatagcacagagagccacaagaaaacagagccacacactgggccttgtccataattattactataatgatttacaaaagtttttttcaggcaaccgtgttaaattattgtacatatctgagagagggaggtggggccctggccacagcaaaagtgacgacctctttcttgggtgaggtaagaaaa

SEQ ID NO: 6001 - DNA, 795 bp, Homo sapiens
tgcatcagaggaaagaaaaaagataaaaacaaaacaaataaaccagctaaagaagtctggtccttaccagcctggacaacatggcaaaaatccatctctacaaaaaataaattwaaaaaaaaattagccaggcatggtggcaagcacctgtagttccagctacttgggaggctgagatgggagaatcacttgagctcagggaggtccaggctgcagtgagctgtcacaccactgtactccagcctggcagcctgggtgacagagtgagacccagtcaaaaaaagaagaaagaaagaaaagaagcaagcaagcaagagagaaaaagaaagaaagaaagaaagaaagaagaaagaaaggaaagaaagaaagagaaagaaagaaaagaaaagaaaaaagcaaagaaaataagaaatctgaataaagtattgtggacttaatgtatcaatgttattttattttttatttttatattttatttttattttcttagttgtaacaaatataccataataatttaagagggtaataacagggaaaactagttgtggagtagaaggtaactctgtatattaccttctcaatttttccaaaactgtaaatccaaaactgctctaaaaaataaggtctatttaaaaagaaataaaagaaactatatggtgtgtccttgtttttttgtgtcactagctgttcaaagttgccattttgttttaccttagtccactcctggcctagatataaagctctttctggtttaagttctttcactctgctcctacaagcactgtccacatgcct

SEQ ID NO: 6002 - DNA, 795 bp, Homo sapiens
tgcatcagaggaaagaaaaaagataaaaacaaaacaaataaaccagctaaagaagtctggtccttaccagcctggacaacatggcaaaaatccatctctacaaaaaataaatttaaaaaaaaattagccaggcatggtggcaagcacctgtagttccagctacttgggaggctgagatgggagaatcacttgagctcagggaggtccaggctgcagtgagctgtcacaccactgtactccagcctggcagcctgggtgacrgagtgagacccagtcaaaaaaagaagaaagaaagaaaagaagcaagcaagcaagagagaaaaagaaagaaagaaagaaagaaagaagaaagaaaggaaagaaagaaagagaaagaaagaaaagaaaagaaaaaagcaaagaaaataagaaatctgaataaagtattgtggacttaatgtatcaatgttattttattttttatttttatattttatttttattttcttagttgtaacaaatataccataataatttaagagggtaataacagggaaaactagttgtggagtagaaggtaactctgtatattaccttctcaatttttccaaaactgtaaatccaaaactgctctaaaaaataaggtctatttaaaaagaaataaaagaaactatatggtgtgtccttgtttttttgtgtcactagctgttcaaagttgccattttgttttaccttagtccactcctggcctagatataaagctctttctggtttaagttctttcactctgctcctacaagcactgtccacatgcct

SEQ ID NO: 6003 - DNA, 795 bp, Homo sapiens
tgcatcagaggaaagaaaaaagataaaaacaaaacaaataaaccagctaaagaagtctggtccttaccagcctggacaacatggcaaaaatccatctctacaaaaaataaatttaaaaaaaaattagccaggcatggtggcaagcacctgtagttccagctacttgggaggctgagatgggagaatcacttgagctcagggaggtccaggctgcagtgagctgtcacaccactgtactccagcctggcagcctgggtgacagagtgagacccagtcaaaaaaagaagaaagaaagaaaagaagcaagcaagcaagagagaaaaagaaagaaagaaagaaagaargaagaaagaaaggaaagaaagaaagagaaagaaagaaaagaaaagaaaaaagcaaagaaaataagaaatctgaataaagtattgtggacttaatgtatcaatgttattttattttttatttttatattttatttttattttcttagttgtaacaaatataccataataatttaagagggtaataacagggaaaactagttgtggagtagaaggtaactctgtatattaccttctcaatttttccaaaactgtaaatccaaaactgctctaaaaaataaggtctatttaaaaagaaataaaagaaactatatggtgtgtccttgtttttttgtgtcactagctgttcaaagttgccattttgttttaccttagtccactcctggcctagatataaagctctttctggtttaagttctttcactctgctcctacaagcactgtccacatgcct

SEQ ID NO: 6004 - DNA, 795 bp, Homo sapiens
tgcatcagaggaaagaaaaaagataaaaacaaaacaaataaaccagctaaagaagtctggtccttaccagcctggacaacatggcaaaaatccatctctacaaaaaataaatttaaaaaaaaattagccaggcatggtggcaagcacctgtagttccagctacttgggaggctgagatgggagaatcacttgagctcagggaggtccaggctgcagtgagctgtcacaccactgtactccagcctggcagcctgggtgacagagtgagacccagtcaaaaaaagaagaaagaaagaaaagaagcaagcaagcaagagagaaaaagaaagaaagaaagaaagaaaraagaaagaaaggaaagaaagaaagagaaagaaagaaaagaaaagaaaaaagcaaagaaaataagaaatctgaataaagtattgtggacttaatgtatcaatgttattttattttttatttttatattttatttttattttcttagttgtaacaaatataccataataatttaagagggtaataacagggaaaactagttgtggagtagaaggtaactctgtatattaccttctcaatttttccaaaactgtaaatccaaaactgctctaaaaaataaggtctatttaaaaagaaataaaagaaactatatggtgtgtccttgtttttttgtgtcactagctgttcaaagttgccattttgttttaccttagtccactcctggcctagatataaagctctttctggtttaagttctttcactctgctcctacaagcactgtccacatgcct

SEQ ID NO: 6005 - DNA, 795 bp, Homo sapiens
tgcatcagaggaaagaaaaaagataaaaacaaaacaaataaaccagctaaagaagtctggtccttaccagcctggacaacatggcaaaaatccatctctacaaaaaataaatttaaaaaaaaattagccaggcatggtggcaagcacctgtagttccagctacttgggaggctgagatgggagaatcacttgagctcagggaggtccaggctgcagtgagctgtcacaccactgtactccagcctggcagcctgggtgacagagtgagacccagtcaaaaaaagaagaaagaaagaaaagaagcaagcaagcaagagagaaaaagaaagaaagaaagaaagaaagaagaaagraaggaaagaaagaaagagaaagaaagaaaagaaaagaaaaaagcaaagaaaataagaaatctgaataaagtattgtggacttaatgtatcaatgttattttattttttatttttatattttatttttattttcttagttgtaacaaatataccataataatttaagagggtaataacagggaaaactagttgtggagtagaaggtaactctgtatattaccttctcaatttttccaaaactgtaaatccaaaactgctctaaaaaataaggtctatttaaaaagaaataaaagaaactatatggtgtgtccttgtttttttgtgtcactagctgttcaaagttgccattttgttttaccttagtccactcctggcctagatataaagctctttctggtttaagttctttcactctgctcctacaagcactgtccacatgcct

SEQ ID NO: 6006 - DNA, 795 bp, Homo sapiens
tgcatcagaggaaagaaaaaagataaaaacaaaacaaataaaccagctaaagaagtctggtccttaccagcctggacaacatggcaaaaatccatctctacaaaaaataaatttaaaaaaaaattagccaggcatggtggcaagcacctgtagttccagctacttgggaggctgagatgggagaatcacttgagctcagggaggtccaggctgcagtgagctgtcacaccactgtactccagcctggcagcctgggtgacagagtgagacccagtcaaaaaaagaagaaagaaagaaaagaagcaagcaagcaagagagaaaaagaaagaaagaaagaaagaaagaagaaagaaargaaagaaagaaagagaaagaaagaaaagaaaagaaaaaagcaaagaaaataagaaatctgaataaagtattgtggacttaatgtatcaatgttattttattttttatttttatattttatttttattttcttagttgtaacaaatataccataataatttaagagggtaataacagggaaaactagttgtggagtagaaggtaactctgtatattaccttctcaatttttccaaaactgtaaatccaaaactgctctaaaaaataaggtctatttaaaaagaaataaaagaaactatatggtgtgtccttgtttttttgtgtcactagctgttcaaagttgccattttgttttaccttagtccactcctggcctagatataaagctctttctggtttaagttctttcactctgctcctacaagcactgtccacatgcct

SEQ ID NO: 6007 - DNA, 490 bp, Homo sapiens
tttctgcagtattaaagaaacacatctttgaacttgaaaagctttagtttttcatcattacactcatataaaatggataacaggatttaagatgaaaccgaaagtaagatataatttagacctggcttgtttcactcatatttgaaagagacctcttcctgtggcttaagtaaaccaaatagagtgattaaagagtattggtatgstatgtatgtagaacaaaactgatcatgcctccatttgccttttccagtaatatattttgcttcagtaaaatgtttctacttctaaaagagatagcatagcatagtggtgcaaatgtaaacactggagccaggttgcctggtttgagactcagctctgcccttactagctgtgtgacactgatcaaattactcaacatctctgtgcctcagttatcttatctgaaagtggagataataaatagatactaattcataggggtgttatagattttaaatgagttact

SEQ ID NO: 6008 - DNA, 717 bp, Homo sapiens
ccttgctactggggaggctgaggtggatcacctgagccctaggaggtcaagactgtagtgagttgtgattatgccactgtgctccagcctgggtgagtgagagcctgcctcaaaaattaaaaatacataaatgcataaataaataaataaaagagggaaaaataaagtcttgtgatagattttttaaatcttgaaaataagttatttggaagattttgcatttagttaaaaattatacttttgaaaaattccttttgttcttcaaactagaaatgaaactgaactaaataagatccattcaaccacaaatattcattgagtacttattccatgccaggctctattccatgtgctggggctgtatcagagaacaaaacagacaaaaactcttgccttcgtagtgcttatataagagtcatttgaatatgtatttatatataggaatatatcaatgactgttattttaatcttaaagtgaagatgaaaaagattttattaaaaatatttctgtcttacagatctcagaacaataactracataaatattgcatcatatttttcttttacagtagcaggtaaaacatgattcatttaatggcaagagaaaaaagggcacagaaccaggaattgcagggctgcatatcttgttgaatgctgtagacttcctgacagctctctggttccttgtgcacacagagttggttgtcagcacctctt

SEQ ID NO: 6009 - DNA, 799 bp, Homo sapiens
agatatgatacaaaattgcagtggtttatttgccattataaaataacgacagcaaccaacatttatccagtctttgctatgtgttagatgctattctaaaacacatatctatttcctttttactctgtttccccttctatgaatttagaagagcaagatagtttattcctttttaaatttgtcatacttggattatatatcagtctgagtgatataaccagttttctggccgataaaaaactaagcattgtgttgctaattctttaaacgctgttaattttcaagggttagctcttgttccttttcttttgggaatgcaaatgcacacactcattacmccctctcgatgaataacagagactatataccacatatacttacttcaaaaacccaatctttgcagaaacctgtaaatcagcagaacaattttcatgggcacaaaaccttgcaaagtttatctggaaataaaaagacaacgttttttattttgatttaatcagcaagtatatttatatatattttaaagatgacgacacctgtgatgcatgagaaaaataaaattgatacatcaaattgacaactctttattttatctcttttaaaaagttcaatttgagaattagtagggttcaaatgacaattacttgcagggctaaaagagctaagttctaaataggtaaaatttaaagcccaaattttctaagtgaaataagatttggaaaaaaagttaaatgaaaggcattaaaggagtttattagctgccaagatgtttttcattgggttcctctcaattttctgt

SEQ ID NO: 6010 - DNA, 1146 bp, Homo sapiens
gatcaataaatactacaaaggacctaggaagacccaaggcataagctgggcaaaaggaaaaaatggggagagataaaagggaaggtaacgggaacaggtagagagagacagatgcagaaaacaaagagagatctagaaagtcagaaggagccaggctcattaagtgtgaagtgactagagtactgtcaaatagcgtgcctacagctgggggagaggtgtaaatatctctctaaataaatatgatttttttttctgccatttctattggtaaagcaggttgttctaagaatcaaaatataaattaatataactaccaattgctaaggttttggcttgtgtacttgcaatattgagattttcactattaaagacatttacaaatagttgatgttgacaactgaagttcaaaagaagagtaaaaacaacccctgacttccgtaaatattttcatatgagggtgtagagaaaaatctgctcttcagttatcttcatttgatcctgtattctagactagactagtggtgattgtaagctcaattatcttaaagtgactatggggcaattttgtctggacaggatgtgaactagacctttaaatgtccctttcatcttttacattctgtgtgtcattagtgaacattttaatgaaggctttttactatgcccagacacatcctgtttttggacaaacmctatgtctttgtgttgatagacactaaaggtctgaacaacaggactcctgagaataaatacactgtcagtgaaacttaaatattttgagataatttagaaaacggttcactggttagaatgtaggatccatctcaaatgcaattgatcctgggatgtggctgaaaagcatataatgaaatttttaaaaagaaattattgtataacataaatacatgtgtctgtaaatgggtaaaactaagcaagaaaatttgattatgaagacatgagtgaatctgtgagtaggatgaaagcaagggagaaaatgagaagaggaagataaactgaggacacatgatgacactgaataactaacttgtaaatacaatcttctcccattatgatttctctctagtaatatatctttcttcactggcaaggcattaaaaatagaacatcagcattttatatgagaat

SEQ ID NO: 6011 - DNA, 3087 bp, Homo sapiens
atgtgagctacagcagatacagtgacagcttctaattaatgcagaggaatggaagagtcccacagatctgcagtgatgtccagcaaaggccaatgttcagtgggaaggcaggttcagtgttagaaggacaggagtagagaaaacagaataggagggaaggaacaaaatgttagtagctgactggatggctgaatggaaagctgcaagctaaagctaccccagaaacccttagtagacggctaatgccttgttaagaattttaccacctggccattcctgctaaagaggttggaaaagcaagtcttcaactttccctttttttttttttttttatacggagtctcgctctgttgcccaggctggagtgcaatggcatggtctctgttcactgcaacctccgcctcccgggttcaaacgattctcctgccccagcctcctgagtagctgggattacaggtgcctgccaccacgcccagttaatttttgtatttttagtagagatggtgtttcaccatattggccaggctggtctcgaactcctgaccttgtgatctgcctgcctcagcctcccaaagtgctgggattacaggcatgagccactgggcccggccaacttttccattcttaatctagaagtaagcaaggaggagggagtattcagactgagtattgacttgataaaggtgattaaaaagtcagtatcagattagggctgggcaccgtggcttatgcctataatcccagcaatttgggaggccaaggtagaaggatccttgaccccagaagtttaaggctgcagtgagatatgaytgcaccacagcatgccaacctgggtgacagagtaaggcctcatctctaaaaaaaatttttttagttaaaaataatcagtatcagattaaatataggcaggtattatggggaaaatctagaagggttctgcattcagatttggcttatgaaacataaaaagaaaatatcttatccctatatcaaaagatagtgaatggacattcatttatatattttaagttaaaatatttaacacacgcttatgtcattctttataataccccacagtaactggcaatttccaacttgtcaactatagatcctatcacaactggtagactgagcagacttctattacatccttcttattttgaaaatagctttattcttttaaagatttaggcttattataaatattgtgatcatacagaaatgtccaaagacaaaagcaaaattcagctgttagggtgaacatccttccagacatccctccatgtgcacctattaaaatattatacaaatgggatcatgctgttctgttatcccttttttgcactcaattatacatgtcataggcaaattttcatgtcatcaaatctacatcatcatttatatattgtctatatggaagtgccttaatttctttatattttttaaaccaatgatttaaccttattgataaccatccacttttcactgttataaacaaggctgagatggaaagacttgtctttagatctccatttgttttggcaatgattgtccgggggtaaattacaagaagtgagatcactgggtcaaaggtacactcatttgaaatgttcattcctgccagcccagtggactgcagaaaggctgggccaatttatgtcaccaccagcagagcataaaagggccgggctccagcccctcaccagtccgagattttgtcattcttctgtttcctagagtaaaacttcagaaggattctcttcatccatcttttgtctactatgttcttttttgtagatgcttttttgcataggtttcatgctgagtttttttctgcctatctttaatggagagcagttctctcagggtttaccatctgcttgaaaatggtatgcatgaaatctccttgactccttttcctgttggtttggttactatccgaatcttcacttagcatttaagttggaaggctagaatctaatcatgattttcccctgtttatttgccagaaagacttggtgaaggcatagaaccttgatttatctcctaaattgttgccatttctgctacctggacaacttggtcaagttggagaagtctgggttttgccttgtctcccctcttctgggtaggctaatgagaggtgcgtgagcaatgccaggtggttcgtaaagtgaatctgcttctcttttaaaaagagagtgagccaattgagacaaacacaggcaaaaacccagctgcagcaacatcctcctggctaattggatcctacctgggaagggccatcttctagatagcttgttcccaagcagtgtccccagctggcccctcaggaagtattaggcctgtccttggctaatcccacagtttagcgttgacataattctatctgacccagtctccagaaagactcaaagacttctcagctaatagctctgtcctaacatctagaaccacaccctcaaagatgagatggtacccctgatttccacaatcctctcctttgggacacagagcataccatccctgactgcaccagacatagttattctctgcccatgggctactctctctttccaggaggcctcagggcaactgtcgggcctcctgagaaagccatctcgcggcaatgggacccggacattagaggatatcatctatgatcacagtaggtgggcaagaagcagagttagttccctgttcagaatcagagccccaagagactggcaggacattcctgtgagaatcacagtttgttttaggaatctcaccagccacttaagaaaatacagatggccaagagcaccccaggaccaaggtcattgactgattcagtaatacctcttggccttccacctctgtatgaatttgttattgctgccaggacaaattaccacaaatgtgagagcttaaaaaaaacacccatttattatttcacagtttgcaggtctggagtttgacatgggtctcactaggctacaaggtgtcagcaggctgttttccttactggaggagggtcacttacaggttcatgaaggttgctggcagtgtccagttgtatgtggttgtagcactggggtccttatt

SEQ ID NO: 6012 - DNA, 710 bp, Homo sapiens
cagagtctctctctgtcacccaggcgggagtgcaatggcaggatctcagctcactgcaacctccacctcccggcttcaagcaattctcatgcctcagcctcccgagtacctgggattacaggcacccacaaccacgccccactgatttttgtaatttcagtagaagtggggtttcgtcatattggccaggctggtcttgaactcctggcctcaggtaatccaccagccttggcatcccaaagtgctgtgattataggcgtgaaccaccacacctggcccatcttaagatctataaccttaattgtatctgtaaagtctccttgccatgcaaatttaatatattcacaggttccagggatgaggcaaggacatctttggggccattattcagcttaccatggcccttttggccaagagtcatccaggagtaagagcccggcagagataattccaaggaagacccacatgatttcctctcctccatccccctcccacaacacacccatccctgggaaccagttggycagatcttccagctgaatacttcaccagactcatgccacaatgcatcactatcaaggcgaggctgagcacctggcacagccaactccctctggagagctggggcaaggctggtactttcaacccaagccctgagtggcctgtctgctcactgctgtttcctgaagctcagccaatatgcctaggag

SEQ ID NO: 6013 - DNA, 1840 bp, Homo sapiens
gatcctcaagtacttgttgctggccaagtctcctttaactgatctgcagtctttccaaggattaagaagtaatcttccatctacacccaggcaccaggaaaaggacctagctcaggggaaatgtgtcagccargtgaattagtcccactctgctgaacacaccaccctttgaacatctcgcctcttcctagattggcctctttgctgtcctcctgcttcactcttcatatacccaagacccagctcaaacacttctctttggaagcctcctctgagtcccccaggaaaggaaggcattcttaagtccttcatttatctctcgtgcaatgcccaccctatatgagctggcttcctttcctatctccccttttaaattatcacctcctagagggcactggccaagtttgttcatttctacatccctgctgtcagcacaaagaagcctcctctccaggcccccaacccccgtgatattttttgaatggctgtatatcaatcatttaattatgggatgaactattgttttagatcttaagccaagccaatagtgctccaattattttctcagcaaggaagtaacacaggagtcagttgcttcaaaccaaagcccagttatcagccgttcggtctctaggccactgaggagcagaggggatgccttgagacgtgcaaaagacttggggccaggtggcctgtgttcacatcccagctccaccaattatgtgcaagagaatggggtgagctccttaaactctcttaagcctcagtttccacatctctaaaatgggggtaattatccctaccacctaggacagttggggagatcaagggactcgtgagtgtgaatgaattatatcagtactggaagccttctgcttacttctgtgaaagagcttgtgtcccacacctgcttcccgtttttgtccgtaattagaaaatggcaggcaaattctctggagtgttacagcacttgggagcagcatccccttagggactttgggaaagagctcttgaggaagtcaagcattaggtattggaaaacaaaaatagaagaaaaacaaaaaataaactgaagcctacatttcaaaaatgaaagcaaaccagacttttatttttaatactgaagactataaattgtttcaccacgtaggtagatttcaataaatcagagataatgagatggtagaggaaaacatggggggaaacaacttacgaggttcccattatgagcccaacgcaaggctaggcattttcacatatattccatcatttaaccttcatgacgcccccatgtgaagaaataagagtcagaaccattaaggaccaggcatgtggtcacacgggctcagcagtggaacccggtttgttctgcctctagagtctgggttttttccactatggcattttcagaatggaaagactccaaggcagtcagcaagtcagcatagatttcctggtagggaagaggccaggaatgtcagtgtcagacccttctgaggtcaggcgctgaacttctccaagctctgcctttctgcagtttagatcagtcaacttcttaggggtcaaagtatgtgctttttgaagccacagccctccccgacatgtgcgtcagcagatgatggctgaacccaaacccttccctactattggaaaaacaactcaaaaagtctgcacactgatgaggaactctagagcttaatgttgatgtggaaagataatacatttttcaatttaagagtatgtctgagaggctaaaccagaaatgtgtaaatttggtgagactttaaacagcctgtgaccgacgggccaatcttcctcttttccttccagatgtcacact

SEQ ID NO: 6014 - DNA, 1840 bp, Homo sapiens
gatcctcaagtacttgttgctggccaagtctcctttaactgatctgcagtctttccaaggattaagaagtaatcttccatctacacccaggcaccaggaaaaggacctagctcaggggaaatgtgtcagccaagtgaattagtcccactctgctgaacacaccaccctttgaacatctcgcctcttcctagattggcctctttgctgtcctcctgcttcactcttcatatacccaagacccagctcaaacacttctctttggaagcctcctctgagtcccccaggaaaggaaggcattcttaagtccttcatttatctctcgtgcaatgcccaccctatatgagctggcttcctttcctatctccccttttaaattatcacctcctagagggcactggccaagtttgttcatttctacatccctgctgtcagcacaaagaagcctcctctccaggcccccaacccccgtgatattttttgaatggctgtatatcaatcatttaattatgggatgaactattgttttagatcttaagccaagccaatagtgctccaattattttctcagcaaggaagtaacacaggagtcagttgcttcaaaccaaagcccagttatcagccgttcggtctctaggccactgaggagcagaggggatgccttgagacgtgcaaaagacttggggccaggtggcctgtgttcacatcccagctccaccaattatgtgcaagagaatggggtgagctccttaaactctcttaagcctcagtttccacatctctaaaatgggggtaattatccctaccacctaggacagttggggagatcaagggactcgtgagtgtgaatgaattatatcagtactggaagccttctgcttacttctgtgaaagagcttgtgtcccacacctgcttcccgtttttgtccgtaattagaaaatggcaggcaaattctctggagtgttacagcacttgggagcagcatccccttagggactttgggaaagagctcttgaggaagtcaagcattaggtattggaaaacaaaaatagaagaaaaacaaaaaataaactgaagcctacatttcaaaaatgaaagcaaaccagacttttatttttaatactgaagactataaattgtttcaccacgtaggtagatttcaataaatcagagataatgagatggtagaggaaaacatggggggaaacaacttacgaggttcccattatgagcccaacgcaaggctaggcattttcacatatattccatcatttaaccttcatgacgcccccatgtgaagaaataagagtcagaaccattaaggaccaggcatgtggtcacacgggctcagcagtggaacccggtttgttctgcctctagagtctgggttttttccactatggcattttcagaatggaaagactccaaggcagtcagcaagtcagcatagatttcctggtagggaagaggccaggaatgtcagtgtcagacccttctgaggtcaggcgctgaacttctccaagctctgcctttctgcagtttagatcagtcaacttcttaggggtcaaagtatgtgctttttgaagccacagccctccccgacatgtgcgtcagcagatgatggctgaacccaaacccttccctactattggaaaaacaactcaaaaagtctgcacactgatgaggaactctagagcttaatgttgatgtggaaagataatacatttttcaatttaagagtatgtctgagaggctaaaccagaaatgtgtaaatttggtgagastttaaacagcctgtgaccgacgggccaatcttcctcttttccttccagatgtcacact

SEQ ID NO: 6015 - DNA, 835 bp, Homo sapiens
ttgtggaaagaccgtaacaggaagagcattctgaggtaacctttcccaactttctcctccacacattcttgcagaggaaattaagagagagaaaaaaattaagaaatcccaacttagtccggactctagtagtacatgtcaagcacagaacccctaatttaagacccgsgtcccgaggccaggctccctcgggaaggtagcgagtgcatcgcgataaaatctttcctcccgccttcggagtcaaacggccccgcaatccaaacagtttagaatccagcttgttcttaatgccacagtcaagagaagatccataacccgccttggtcatctgcccttctgtgttcacaaccgttcagggcacaagttcttcggtctaaccgaatctttccctgctgcggggttaagcccaacctttctttctgaccttggggagccggcagctccccgcccggtgccctcacaaaagcctttgggggctccctctccaagatgagacgtttatcccatccccccaccctcctaaatttaggacaggaaagctttagggccaccgtctctcttccgggaccgatcacacttcgttccaaataggaaaagacaggggggaaaaaagatggaggggcgggagacctggaccccggagagtcaccttccagctacccacaggaaccaagcatccgatcactcgcgcatccctctcccctcctcccccggcccgcagtgcaccccacagggagccccgccgggtccactcttgctccgacccccatttcgcgcgccccctcggctctatctcccagatcctcaggcgacgaatggaaagggggtcccttcc

SEQ ID NO: 6016 - DNA, 778 bp, Homo sapiens
ataaaagtcaagccaggtttcaaataaattcaattatgtcataataatatcatacaagtatttgagttgaatccgtgtaacatattttaaaacaggcggacctatccggcagtggtgcagacggcctgacgaggttccttggccgggggttgggcaggggcctggggggcttccctggggggcttgtcgccggggccgcctgggctttcaggtcttccgaggtgaggacggtgctctgtggggagcttgcaagggcgggtttgttttccgcggcccacgttctaagtctgggggagactctyctgagcggagagggtagggaatcgggtgccggggccggcggagggtcttcctggaaccgcaggaggaaatcctcggtggggctgcgggaacggctgtccctgacccaggagctgccgggccgaccccatccactccgcagaatcagaacagctggcagaatcagaacagctttcagggaaaggaagggtgcggggaggtgggcaggctggtaacgcagcgggaggagggaaaggcggctggagagcgccggaggtgagggtgaggattagtggaactattgaggtcctccttgagcccggaggctggggaggtcttaactctctgctttccggaacctgtgtttctatttggttcagtatcgtgccgcgtttactcactgtgcatgctgccaagtcacctgtctgatcgtgtcctacacaggctgacattcacgtttcattctgccacactcgggaacggtgatcggggaagcatg

SEQ ID NO: 6017 - DNA, 778 bp, Homo sapiens
ataaaagtcaagccaggtttcaaataaattcaattatgtcataataatatcatacaagtatttgagttgaatccgtgtaacatattttaaaacaggcggacctatccggcagtggtgcagacggcctgacgaggttccttggccgggggttgggcaggggcctggggggcttccctggggggcttgtcgccggggccgcctgggctttcaggtcttccgaggtgaggacggtgctctgtggggagcttgcaagggcgggtttgttttccgcggcccacgttctaagtctgggggagactctcctgagcggagagggkagggaatcgggtgccggggccggcggagggtcttcctggaaccgcaggaggaaatcctcggtggggctgcgggaacggctgtccctgacccaggagctgccgggccgaccccatccactccgcagaatcagaacagctggcagaatcagaacagctttcagggaaaggaagggtgcggggaggtgggcaggctggtaacgcagcgggaggagggaaaggcggctggagagcgccggaggtgagggtgaggattagtggaactattgaggtcctccttgagcccggaggctggggaggtcttaactctctgctttccggaacctgtgtttctatttggttcagtatcgtgccgcgtttactcactgtgcatgctgccaagtcacctgtctgatcgtgtcctacacaggctgacattcacgtttcattctgccacactcgggaacggtgatcggggaagcatg

SEQ ID NO: 6018 - DNA, 778 bp, Homo sapiens
ataaaagtcaagccaggtttcaaataaattcaattatgtcataataatatcatacaagtatttgagttgaatccgtgtaacatattttaaaacaggcggacctatccggcagtggtgcagacggcctgacgaggttccttggccgggggttgggcaggggcctggggggcttccctggggggcttgtcgccggggccgcctgggctttcaggtcttccgaggtgaggacggtgctctgtggggagcttgcaagggcgggtttgttttccgcggcccacgttctaagtctgggggagactctcctgagcggagagggtagggaatcgggtgccggggccggcggagggtcttcctggaaccgcaggaggaaatcctcggtggggctgcgggaacggctgtccctgacccaggagctgccgggccgaccccatccactccgcagaatcagaacagctggcagaatcagaacagctttcagggaaaggaagggtgcggggaggtgggcaggctggtaacgcagcgggaggagggaaaggcggctggagagcgccggaggtgagggtgaggattagtggaactattgaggtyctccttgagcccggaggctggggaggtcttaactctctgctttccggaacctgtgtttctatttggttcagtatcgtgccgcgtttactcactgtgcatgctgccaagtcacctgtctgatcgtgtcctacacaggctgacattcacgtttcattctgccacactcgggaacggtgatcggggaagcatg

SEQ ID NO: 6019 - DNA, 778 bp, Homo sapiens
ataaaagtcaagccaggtttcaaataaattcaattatgtcataataatatcatacaagtatttgagttgaatccgtgtaacatattttaaaacaggcggacctatccggcagtggtgcagacggcctgacgaggttccttggccgggggttgggcaggggcctggggggcttccctggggggcttgtcgccggggccgcctgggctttcaggtcttccgaggtgaggacggtgctctgtggggagcttgcaagggcgggtttgttttccgcggcccacgttctaagtctgggggagactctcctgagcggagagggtagggaatcgggtgccggggccggcggagggtcttcctggaaccgcaggaggaaatcctcggtggggctgcgggaacggctgtccctgacccaggagctgccgggccgaccccatccactccgcagaatcagaacagctggcagaatcagaacagctttcagggaaaggaagggtgcggggaggtgggcaggctggtaacgcagcgggaggagggaaaggcggctggagagcgccggaggtgagggtgaggattagtggaactattgaggtcctccttgagcccggaggctggggaggtcttaactctctgctttccggaacctgtgtttctatttggttcagtatcgtgccgcgtttactcactgtgcatgctgccaagtcacctgtctgatcgtgtcytacacaggctgacattcacgtttcattctgccacactcgggaacggtgatcggggaagcatg

SEQ ID NO: 6020 - DNA, 626 bp, Homo sapiens
tgacagttcagttccatgactgcacctgtacctctgaaagtgattttggccttgtcttttctctccaagctctctccagagccccctctgaactggcatcagcaaagcaatcatattctaaatgagcttcatgaagaatatgccattgcagtaaaacaccagagacaggataaggctgaaggctagaaaataaatcgtgtgtgtgtgatgagagggtgtgtgtgtatgtgtgtgtgagggtaaggtgtgttccagccctcatgaacgtggtgatcacttccttcttgaattaagcagccctcctgtcagctggagaaagaactccctggagaaggcagggaccgcctatccccagctgatctgctgaggaggccacccacctgcaggagatggacaacattttaatcctggctacgtgggttgtttccttgtgtgatgcccagaaggactggcrgcaggaggaaattcctggagaaattgtctcttgagtcaggttgttggatttcaaatcctaggtgtcattgcttcagtccctccttctccttagaatcctcctttcctttaaacactggaaatgattcttaaaaccatgtacaactattaaggtgagaaaggctgagaagtca

SEQ ID NO: 6021 - DNA, 770 bp, Homo sapiens
ccgccatctccagctgtggagcttcttagacactgagatgggaaactattcaatacatgaagtcggctagcgttagaatgaaatcaattactatgtgccaagcgtggaacgtggcacttctgcgtcaaaaccccaggtgttaccaggctaggggctggagtctcaaaatgtgttcccagaccacagcatcagcctcacctcacctgggaacttgttagaaatgccagtcctaaggaccaacccactgaatcagacacttgggcaccaggcccggtggtccattttcagtgagccccccttccggtgtgattctgatgccggttccagactaagaaccactgatctagccctgttttcggagatggagaaataggcttggaggctatrccgcttacgcaaggccatagctgttcaatggctcgccaggtttcaaatccagctttgtctggttctagaaacaaggcttatatacaggcctgcccattcggggactggagaagaaaacaatcccaggaaggtggagaagcgtcaaggaaggccctttcatagagaaaggtggccggaacctcgggtctctgttctttgcctctctagcagccagacatcagaggacggctcacactgtcaccccacatgccccacgggggcggctggagggaaggccacagcacagttgggctttctgacagtgacctgtgtctttcagaagtaggcggcacccagggccctccccccgccgaagaacacacaactgggaaatacttgcaagt

SEQ ID NO: 6022 - DNA, 805 bp, Homo sapiens
agcatgccacgtagggagcaggatctgatccccaagagagttgggattcagagttatgcccccatgctagaatggagtggagtataagacagagcaagaaggggcaccaagaggagaggagtttggttaagaagtccaggcttggccaggcgcagtggctcacgcctgtaatcccagcactttgggaggccaaggtgggtacatcacttgaggtcaggagttcaagaccagcctggccaacatggtgaaaccccatctctactaaaaatacaaaaaattagctgtgcatggtggtagccacctgtaatcctagctacttgggaggctgaggcaggagaattgcttgaacccgggagacagaggtggcagtgaaccgagatcrcgccactgcactccagcctgggcgacagagaaagactccatcaaaaaaaaaaaaaaaaaagtaagtcttttaagtaaactttccctggtggtagagaatcctgcaagttgggcagctatgtaaataacatggaatatctcagaccggttagcagaaaggaggataggctgaggagacctgaggtcccacacaactccgactggaccatctgtttcagaaaaaggaaatctgcacttttagatggttctgatgtggctgatctacaggttatacaatgaattttccctctctgtcagggttggctgatccgtctgaaccacaggagaggatgagcacatgactgtgaacggatgagaaaaaaggtggcaaaggagtgattatgtgtcttctcaaggatgttgacatttggaacctgatttcccc

SEQ ID NO: 6023 - DNA, 629 bp, Homo sapiens
tctctctcaccttcaaatggactttttccaggtggctgagagatatggtctcagtgttagagttttaacttctrataaattctgtccctagagaggaactagataatatctctttctctctccctcaatccctccctttctttcaccctgaaaaatcatcttactagtccagctcaagtcttaagccagttttgccagaggtggggcacagtccaagccaagttcctccacctctttagaatattcaggagtggtagcatgtgaaaacatggcagcttccatgggttcagagggggtggttaatggcagcacagtttctaagaggagcaacagagtcaggacccgcaatactgtaggtacgacctgtgctctcacctacagcagctcagaacttggtgcctctcactcaaaatgctgctggacaggtgaacaaagatgggacaaagggcttgtggtagagacccttgacgagctaatcagaggcaagaatgcattttcctagcagtgaatactcatcctctccatcaggtgccaatttggcagcttacactatgctatatcaacttcattcatcttattttatttagttgttcaacatatattgttgagtacctgttatgtatctgaca

SEQ ID NO: 6024 - DNA, 629 bp, Homo sapiens
tctctctcaccttcaaatggactttttccaggtggctgagagatatggtctcagtgttagagttttaacttctaataaattctgtccctagagaggaactagataatatctctttctctctccctcaatccctccctttctttcaccctgaaaaatcatcttactagtccasctcaagtcttaagccagttttgccagaggtggggcacagtccaagccaagttcctccacctctttagaatattcaggagtggtagcatgtgaaaacatggcagcttccatgggttcagagggggtggttaatggcagcacagtttctaagaggagcaacagagtcaggacccgcaatactgtaggtacgacctgtgctctcacctacagcagctcagaacttggtgcctctcactcaaaatgctgctggacaggtgaacaaagatgggacaaagggcttgtggtagagacccttgacgagctaatcagaggcaagaatgcattttcctagcagtgaatactcatcctctccatcaggtgccaatttggcagcttacactatgctatatcaacttcattcatcttattttatttagttgttcaacatatattgttgagtacctgttatgtatctgaca

SEQ ID NO: 6025 - DNA, 669 bp, Homo sapiens
ccactgatgcataccaggcctccatccccagcctgagggccaagtctgactgttgctcttggatctcattaaggtagtggtgaggtggggagttcagctctgactaggacaagtcataaatgggcagatgagaatatggattcagttctctagggcagtgtgtctatgacttgaaagtgcacatgaatcacctgggggtcttgtccaaatgcagattctgactgaggggatgcccaaattttctatttctcacaagctctcargcaatgtcgagactgctggcccacagaccacaccttgagaagcaagatctagattagagatgctaatacatcttagccactcttgggataaacagcaaatctgtgagctggtagctttcttaaaaatctgagatggaaaaatgtgcgcttgataaaaaatttatttttaaaacatgtttatagaaggaaccctgagatgaaaattaagaggtcttacaaatttacacatatcacatagcccacctatgcttcggtgtccccagttctgagttgagagtaacaaatattgcttcaaggtaattaatgcatatgatattgtttggaacaaaaccattatggaaaatgcagattataatctgtgattttttttgtattttttccttgtaggagatgtcagtgaaaaaag

SEQ ID NO: 6026 - DNA, 669 bp, Homo sapiens
ccactgatgcataccaggcctccatccccagcctgagggccaagtctgactgttgctcttggatctcattaaggtagtggtgaggtggggagttcagctctgactaggacaagtcataaatgggcagatgagaatatggattcagttctctagggcagtgtgtctatgacttgaaagtgcacatgaatcacctgggggtcttgtccaaatgcagattctgactgaggggatgcccaaattttctatttctcacaagctctcaggcaatgtcgagactgctggcccacagaccacaccttgagaagcaagatctagattagagatgctaatacatcttagccactctygggataaacagcaaatctgtgagctggtagctttcttaaaaatctgagatggaaaaatgtgcgcttgataaaaaatttatttttaaaacatgtttatagaaggaaccctgagatgaaaattaagaggtcttacaaatttacacatatcacatagcccacctatgcttcggtgtccccagttctgagttgagagtaacaaatattgcttcaaggtaattaatgcatatgatattgtttggaacaaaaccattatggaaaatgcagattataatctgtgattttttttgtattttttccttgtaggagatgtcagtgaaaaaag

SEQ ID NO: 6027 - DNA, 669 bp, Homo sapiens
ccactgatgcataccaggcctccatccccagcctgagggccaagtctgactgttgctcttggatctcattaaggtagtggtgaggtggggagttcagctctgactaggacaagtcataaatgggcagatgagaatatggattcagttctctagggcagtgtgtctatgacttgaaagtgcacatgaatcacctgggggtcttgtccaaatgcagattctgactgaggggatgcccaaattttctatttctcacaagctctcaggcaatgtcgagactgctggcccacagaccacaccttgagaagcaagatctagattagagatgctaatacatcttagccactcttgggataaacagcaaatctgtgagctggtagctttcttaaaaatctgagatggaaaaatgtgmgcttgataaaaaatttatttttaaaacatgtttatagaaggaaccctgagatgaaaattaagaggtcttacaaatttacacatatcacatagcccacctatgcttcggtgtccccagttctgagttgagagtaacaaatattgcttcaaggtaattaatgcatatgatattgtttggaacaaaaccattatggaaaatgcagattataatctgtgattttttttgtattttttccttgtaggagatgtcagtgaaaaaag

SEQ ID NO: 6028 - DNA, 669 bp, Homo sapiens
ccactgatgcataccaggcctccatccccagcctgagggccaagtctgactgttgctcttggatctcattaaggtagtggtgaggtggggagttcagctctgactaggacaagtcataaatgggcagatgagaatatggattcagttctctagggcagtgtgtctatgacttgaaagtgcacatgaatcacctgggggtcttgtccaaatgcagattctgactgaggggatgcccaaattttctatttctcacaagctctcaggcaatgtcgagactgctggcccacagaccacaccttgagaagcaagatctagattagagatgctaatacatcttagccactcttgggataaacagcaaatctgtgagctggtagctttcttaaaaatctgagatggaaaaatgtgcscttgataaaaaatttatttttaaaacatgtttatagaaggaaccctgagatgaaaattaagaggtcttacaaatttacacatatcacatagcccacctatgcttcggtgtccccagttctgagttgagagtaacaaatattgcttcaaggtaattaatgcatatgatattgtttggaacaaaaccattatggaaaatgcagattataatctgtgattttttttgtattttttccttgtaggagatgtcagtgaaaaaag

SEQ ID NO: 6029 - DNA, 830 bp, Homo sapiens
ttggcaatattttgatgttttattatctacagtactagtaactagagtcctaacagttaggggatgaactcttagctttcaggctgtaatttgcctgtgaaccaaaggtgtcccaaagcctaaaatgtaagaatgacatttacattkttcacagattgtaaaaaaaaagaaaaaaaagtgacagagagacagagatagtatttgtcctataaagcctaaaatatttactctctggttctttgcagtaaataaaagtttgccaagccttgaactagactaaatatgagacttccattacttaaaccttaatagataaaaagctagggacttcttttatacttcaccctaatttctgagcagataactaaaatatcccccttaaggtaaagttccctgagattctgtcttgaaacacagaaagaataaatgctatggaagcaagacacaataggaaaattcagattggagactcaataacacgggtggaggatgaagactaattactaaggtgaagagaagcagaagaaaattctcaggagacagaagacagggaatttgaaaaaaaccacatggtccagctaaaggtcagagtgcaaagtgagtaataagaaaaattaaggctacataagtaaatacaggttagaaatgaaagaacttatacacagaaaaatgtctagatattatactaagggcactggggagcaactgcaatgatagtctactgctattcttaatacctaccactaagcccagagcaccctccagacaaatgattcagacccctatcctgaatgtgagactataatggaagttattgagtggagaacagg

SEQ ID NO: 6030 - DNA, 820 bp, Homo sapiens
ataccccaacttcagcatcgatatacccatgtaaaagacctgcacatgtaccccccgtacctaaaagttgaaatttaaaaataattacaaagaacaataactaaaatgccttaaaacgtgtgaattatgatgggaggactaagtcccaaagcagtttatctgtgtaccccaagactgcaaataaatttatagaacrgtgttgcctggtagaattttctataatgatagaaatgttttatgatctgtactgtccaatactgtagccactggccacatgtgattattgagcacttgctatgtggctagtggaatcaaggaactaaatttcatattttattttaattaatgtaaatgtaactataaatgtattaacatgacagttctactaatcccttttctgaaattttaaattataactacttctaaattatgacaaaattttacactaaagaaaattcttatatattttatactatatactatatatcatgatattttaaatatcatatacaaactataagaagctaaggaagcaaatgcctggttctatatatatatatatatatatatatatatatatatatatatgtacatttctaaaattatattcaatactatggtttagaattttaagtattttcctcattggcactgaattttaattaaaaaaataatttttatttaagctaaaacatgataaaatatggctgtgccagtgttaaaatagtcttaacttgaagtattatttatttactgagagttcattttttgaaatagatttatggagatacaatttacatatctcaaaattcacttattt

SEQ ID NO: 6031 - DNA, 816 bp, Homo sapiens
cctgcctcagcctcccacgtagctgggactacaggtgcatgccaccacgactggcaatacttctctttttgataaatatagtgcatagagcaggtttctgagacttagcactattagcattttggtccagataattttgtgctgagagtgctgtcctccatattgtagggtgtttagcaacatctctggctcctactcactaggtgcagggaggtgccactcccacccaaaaatatctcccaacattgccagatgtcctgtttgggaaccactggggtagagtaagcaacacaatctgaaatacatgactacaaaaaagccagtgaatgcatcagcccaaagctgatggartttgtccttaaaaaagaggcaaaatgtcagtaagaggtgaagcttgcaactttctgtgaccttgaaactgtttcgaaataaaaagttctaaaaagagagaggccaggtggggtagctcaccactgtaattccagcattttgggaggccaaggcaggaggctcacttaagcccaggagtttgagaccagcctggacaacacggtgaaatcctatctctacaaaaaatactgaaattagtggggcgtggtggtccatgcctatagtcccagctcctcgggagggtgaggcaagaggatcacttgggcccaggaggttgaggctgcagtgagccatgatcatgccactgcactctagcctgggcaacagaacaagaccccatcatctcttgaaaaaaaaaaaaaaaaaaaaaaagaagacgagagagagagaagagagaaagacatagcttggattcaaagttgttcc

SEQ ID NO: 6032 - DNA, 896 bp, Homo sapiens
aatgaggtaagaaataaataaactctggtataaaggaactgaaacctcagccggatactggacaagagtttgaaaggcagacaactgaggtgccacaaatgacacttttttttttttgcacttgaatgcagattatttctcatggttgttgataatttgtaagtcagctcaccaaacttttattgcatattgttgaggaatcaaagagaagaaaagatgttctagaacagtatggacattttaaagaagtcattctgatttaaaaagcagggtaaattatagattcagaaaacctcagataggtacacttgctcctgaacacaattttagaattgatcattacagtctgtctctgtctactagaaaaagtttatcaccaatatcaaatataaatatactaggtacaagttgtgttggactaaattaatttcttatttgccttgttgaaaactagaatgccggagaaatgtgagagacagagtatatttgcattttagcaagtcgctgatgaaaaacctcccattattttcycatggataaaatggcggaaaaataagctagacttgacataattagatggattaatgacttgtttaacaattaagatgacagctattatcctaggtaaaaattctcctcaaaaagttttaatgagttctccatgttttggtgaacattctccatttttcccttttcaaagtagggatcattggtattctgtggacctcccgttggtcttaatcaacaaattgtttaccaatgactttataaatatttaattttcagacgacatttggttgggaagaatagcaagtatattggatgacataatctgaatccagtacaagctagattggtttggaagacaagttgcctttaacaagactgagtatgca

SEQ ID NO: 6033 - DNA, 838 bp, Homo sapiens
ttcaccatgttagccaggatggtctcgatctccggacctcgtgatccgcccgcctcggcctcccaaagtgctgggattacaggcatgagccaccgcgcccggcctaattttgtattttttagtagagatggggtttctccatgtcggtcaggctgctcttgaactcctgacctcaggtgatccgcccgccttggtctcccaaagtgttgggattacaggtgtgagccaccgtgcctggccagccccagctaattaaaaaatgttttttagagacagggtctcactatgttgcccaagctggtatcgaactccygggcttaaatgatcctcccacatcaccccctcgaagtgctgggattataggcatgagccaccacagccagctgatgggtgcttctattggtcaagcccatgacgtggctggtgaccattactcatcaccacaaccctaggatgaaggcgctttcattcctctaggtgaggaagttaaggctcagagaggttaagttacttgcccaaggtcacaaagcagggacatggtagagctaagattcaaacccaagtagcggaattctgcacttttagcaatcacattataacagactgctctggcattgggcaggggcgtctcttagtactattgggggagggtgtctccagcactcagagggcccccggctgcggcaggagctgtaccttggcagggatggaggcagggtggttctcaaagaagaggcgctggagacagtgaatccacagcctcttctcttcttggttcttggcctaggagtgggttggagtagagtcagggggccaggtgtgaggtctcgaggctggg

SEQ ID NO: 6034 - DNA, 801 bp, Homo sapiens
tagagacttgataagtgaaataaatgactgacagtgagtcattggcaaagaaatatttgttggctttactacactggtgttcattataaggttaaattctagcacctgcctttttctcacagttgacccatgctcttaaggacacgttattcttctccacaaatactgtagtactttgttccttatttggagaaatgattttttttcctctaagatatgagatatttcagtagagaataaatattactgaaatataattatacacgcactaataatacctgaaaggcaggagcagaaaaagaagtctgcctggagctgaattttttttctttctttctttctttcttttyttttgagacggagtctcattcttcttgcccaggctggagtgcagtagcgtgatctcggctcattgcaacctctgcctcaagggctcaagcgattctcctgcctcagcctcccaggtagctgggattacaggtgcctgccatcacgcccagctagtttttgtatttttagtagagatggggttttaccatgttggccaggctggtcttgaactccagacctcaggcaatccacctgcctcggcctcccaacgtgctgggattacaggcgtgagccaccgtgcccagccattactttttttaccctgaaataaagggggataaaatgtgaattaagaccataaagaaaaaaaatttcaattggaaaattgtacttgaagtaaaaaataaataaaaggacaaacaaatgagacagggagacaaagaaaatcctaagcagcttgaaattgtaaaa

SEQ ID NO: 6035 - DNA, 858 bp, Homo sapiens
tcctgaaatacatcctcaaaaggtaaacccctttctacctagaagtcatcaaaggttaagccttactatatataccaactccctttttacaacttctactttaaaataagtattaaaaattaaactggctcaaatgaaaatataaaaccaatagttaatcctcatgtattaaaacatgcactgtttataattaatttgagtgggtagaaaataatggctgttaatgtgtttgtaaagacactcatggcttagtaaagtgtgtttttcatttcagcaactgttaattctgttggtaccaagcctcccgacagcctattgagtacacagtcgatatttgttactgaatgaacatgggtgcatttggagttcagctccgtaataactggtgtttgccatcacaggacttgctgcacgtgaagagcgtgaaggatattttagctctcatcttggcttttggaaattatatgaatggaggaaataggactcggggacaagccgatggatatagcttagaaattctgcccaaactcaaggatgtcaaaagtcgggtatttatttttcataataagttcccatgatctgccattattttctttctttacctttaattttaaaaaacgtattccagattgttccatttatctctatcctccccttaacaacatttatattagagcatgcatttttttgtttgctttcttttcactttcgaataaagagtttkgttttttttttttcacgttagactttattttcaattactcaattcccatcttcgtgtgctctgacatacacaatcaggtattgaactgctactcagtgagagaacaaaacagatagcatacagtaccaggatcc

SEQ ID NO: 6036 - DNA, 587 bp, Homo sapiens
ggctgactatatttagtctatattttattttgagagaaggtctagctctgtcacctaggctggagtgcagtggtgtgatcagagtttgtctcagccttgacctcctgggtttaagtgattctcctgcctcagccttcagagtagctgggatcacaggcaggcgccaccacacccagctaatttttaaatttttttatagagacaaggtcwccataaaaacttcattgcccaggctgatctgatcccaaaccctaaattcaagtgattcttccatttcagccttccaaagtgctggggttacaggcattagtcattgcacctggcctatacatttattttagaaattaaatgactatatgaaaagcacttaatatagttcttgacatatatttatttaaagattttctgtttcagagaggttacttcctatttgttattattaatataaacaatataataccttgcacacaaagctctagttttaaattaatcaattaatttttgagatagtatccagcgccgtcacacaggctggagtagagtgacgcaatcacagctcactgtaattttgaactcctgggctcaag

SEQ ID NO: 6037 - DNA, 528 bp, Homo sapiens
ccacacactgtactaatcactgggaactaggctgagattgctgaatataagtgactcagaatcaggccctgcctcaaggagtgccttcttcacaaagtgcacaatgaactacactttatygtataatgtgagcacaaagaagggagacaagattattccagttgaatcaatatggaaaggctctatggacttggtatccctgaatgacaggagaaggccgggttagcagaaacaaggcagaggcatacaaaacagaggaaatgggatgagtgcaatcatgaggccaagggatagcaccggaaatttggggaaacagcaggcagttcaatttgactgatagaatttgtaaaggctcataatggtaagtaaggctggagcaagaaactcagtcatgacatacaaaggcttgtggatgtaacagacgtatatggaagcagtgagaacccaccgaaattcttatgcatgaacatgagagtgatctggaccagtatacttctcaaattttaatgtgcataaggaatcaactgg

SEQ ID NO: 6038 - DNA, 769 bp, Homo sapiens
aaataaataggctactacatagaaatatcacagtaaaacacacatgctggagtgaaaaactgaagagaaaatagtaaaaataagaaaaatatcaacaattctaaaactgcattacaattttaaaactgaggagttacaaagagcagagaacggctgaaagtttccttttcaatatcaggatatgcctggtctgaaaactctggaaaataaattctggagtaattggctgattaaggagattcttaaaaagttgtggctaaagtttgggaagttacttgatgatctttggtaactgggaaataaaactgaatttctgctgaattgggaaaaaatattggttcatatgaattaaaaataaatattgagaacctacaagttaaaagtactgtggtccttgagggaggagaggaaaaggaggaacatatcctgccatagagattttactgcttgtaattcagttgaatattaaaaagatggcacatgaagcataaccatgctttyctttgcaagtgagagtcatgtactcggagaactttgatctgaaacagacttcagtgatcttatttctagagatctcattttaggtattgtgaatcctatacccagaaaggtagacctaccgaaattaactgttaagggtaagtaaaattagataattagcttaagactggaaagcaattttcagaacagagttgaactaatgtgtccctgttttaattgattcttgagaaagggaactttaagtgctttctttgaactcctgggatcc

SEQ ID NO: 6039 - DNA, 769 bp, Homo sapiens
aaataaataggctactacatagaaatatcacagtaaaacacacatgctggagtgaaaaactgaagagaaaatagtaaaaataagaaaaatatcaacaattctaaaactgcattacaattttaaaactgaggagttacaaagagcagagaacggctgaaagtttccttttcaatatcaggatatgcctggtctgaaaactctggaaaataaattctggagtaattggctgattaaggagattcttaaaaagttgtggctaaagtttgggaagttacttgatgatctttggtaactgggaaataaaactgaatttctgctgaattgggaaaaaatattggttcatatgaattaaaaataaatattgagaacctacaagttaaaagtactgtggtccttgagggaggagaggaaaaggaggaacatatcctgccatagagattttactgcttgtaattcagttgaatattaaaaagatggcacatgaagcataaccatgctttcctttgcaagtgagagtcatgtactcggagaactttgatctgaaacagacttcagtgatcttatttctagagatctcattttaggtattgtgaatcctatacccagaaaggtagacctaccgaaattaactgttaagggtaagtaaaattagataattagcttaagactggaaagcaattttcagaacagagttgaactaatgtgtccctgttttaattgattcttgagraagggaactttaagtgctttctttgaactcctgggatcc

SEQ ID NO: 6040 - DNA, 785 bp, Homo sapiens
tggatgcccagctacataactatccctgggtctgggatgaaatttgcacttgaaacccaccaaaggctgccgttcttccacctcaaaacacaaatctagctacctgcattattgcctgaaagcctctagatatggcctggagaagatgtaaactctctccgactcagtctcttgagctggtaactctgggtgaatggaggcttaatgtaaatagaacaaggggttcttcgtgatcacataatcctgtctacatgctcactttggggaaaatcaggatgtcatgggcttcagaatcagagtttaaaagatttatagatgccttaagaagcaaaagtgaacacccttactcccaactccatgaacttgctcaggtaacttgtccgaggccatatatctagtaagtgaaagaatgagattaaaatccaagttgtctaactctcaatacctatgtacrtaacaattttgctaaatgagaattctgtcaaggtccatgccaaataacctcatgcatgagaaaatcttgtgaagggcttactgtcagaaaaaggtaaggatatcaatgtttacccgcacccttcaccattctccacctttaacgtctaccctaaatttagtcaatcctctcattctttacatagagccctcattggttcctcactatagattcatggcttcatacttcacacccagcatagcacacatgcataagtgggtcctagctccggctcagtagaaccatctataatggcacatctattttttagatccctcccattagagcaaga

SEQ ID NO: 6041 - DNA, 691 bp, Homo sapiens
acctctagacctattgccatgtggagtaataaacaactattattcaaccattggaaagtgaattatctatctatgcaaccataatcatcttaaccaatatgacaaaattctaaatggagtgggatagagacaggaatgtgtggaaagctcaaaggatgaggcaaatgaatatccaaggagaaaaggaaaatgacatttccctgggaacaggttcaaatcctgccctgcctctattaggaatttgaggaattctcagagatgatgcaaaaaaaaawgtgtgattgaatgtcagagatcatgggagggatggaactggtggattcatagtagaggaaaaacccagtaatgaagagaaaactgcattgaaccacattcaatgctcttcattaagagcactgaagaggaaactggtttgaaccactgtgtatcaggatggagagagaaaaggccaccacttctgtcctttttgggctcagtcaagggaaggaaaggttggaagaactgctctggatagggctcagagctgaaaactacaaccaaaatcttgacagttgtttatcttactcctttactgactactttaaaattgattggcctgagaaagttgggactacttctgcctttggagtagagtgttatctggtggtattttatcatccagagttagggccccttatcctccaaaaaatta

SEQ ID NO: 6042 - DNA, 691 bp, Homo sapiens
acctctagacctattgccatgtggagtaataaacaactattattcaaccattggaaagtgaattatctatctatgcaaccataatcatcttaaccaatatgacaaaattctaaatggagtgggatagagacaggaatgtgtggaaagctcaaaggatgaggcaaatgaatatccaaggagaaaaggaaaatgacatttccctgggaacaggttcaaatcctgccctgcctctattaggaatttgaggaattctcagagatgatgcaaaaaaaaatrtgtgattgaatgtcagagatcatgggagggatggaactggtggattcatagtagaggaaaaacccagtaatgaagagaaaactgcattgaaccacattcaatgctcttcattaagagcactgaagaggaaactggtttgaaccactgtgtatcaggatggagagagaaaaggccaccacttctgtcctttttgggctcagtcaagggaaggaaaggttggaagaactgctctggatagggctcagagctgaaaactacaaccaaaatcttgacagttgtttatcttactcctttactgactactttaaaattgattggcctgagaaagttgggactacttctgcctttggagtagagtgttatctggtggtattttatcatccagagttagggccccttatcctccaaaaaatta

SEQ ID NO: 6043 - DNA, 802 bp, Homo sapiens
ttttaaaaaataaaaacgagttaaaattttcactgtatgttgagagacttgtatttactgtttaaaaggaataaaaattaagttttctagaacttgaagcaagtaggagaaattatattttgagtgtttgctggagaagaaattgtatcataattatctcctcagtgtgctattgcaaaaaaaaaatctaaatctttgggaatggatagaaagaccatgtttgatctttctgccacagaacatagaactatggaataaaattaagatatctgtagttgggagtagaccctttgtatggtatttgatcatttgtgttacatttgtaatatgatctctgatggatctgtgaaacaccatttgatgttgatttataataagagtagaacagtttcactacggttataccagttaatttggcaaaacgtcacaagccaaatgtgctggaggaaatatctgcctttcaatattktgtgcactctattttgtgtattagttcaatttggctactggaggaaaggggatttatggtctctatttttaaagcatttttccttgtttttaatccgctttactttgccaaaaacatgtaattttatttttctgctcaactatgttcgacttcctagcattattcactttggaaatgccacaaagatactatcagttctgtcttttacgatttcaggagattgagtttctttttctcttctaaaacactttgcaacactaataatgatttaattaattatttggagatctttaatgatctattttctgcagaagtgtaagctttatgacagca

SEQ ID NO: 6044 - DNA, 791 bp, Homo sapiens
ctgcaagaagcaggtatgtgaaattcactcctacgtttactgtagaaatgctatcgagggtagctctaccacaccacttaatgcccccaatattaaactctttgaatttgttttagatttcagtaccaggaaaacatgtcttgctgagaaacatatatgcttcttccttcatcatcatagcaacaattttaatgattgtgatttctaacctcttcttccccarccaggaagctgagagccaaatttgaagccaaatcaaaaaaattatgttaattcttaatattagcatcttctcatgttactcttccctggtattgttttctgttttccttttattaccctcattgttacatttgtatataaaggacgattcttccttatttcttttctctcaatttagaaagtgaaagcaagcatcttttttgttaaagaaatgtagcattttcgttagaaatttcatttcactagaaatgaaaatactgtttcaccacctgattattttgttcatctcaatttgtgtaatcatataggatttttgtcttggcccttgaaatttagaaagtacagctagctgcagcactctttttaatcttggctgcccgttagtgaacccttttgacctaatgactgacctcttttcagttgagagaatttttcttctattatttctttgatgatgattgcttccccttcatctcatctattcactcatgaagataattatttcttagaaataaacacttttaaggtggccaattcacctgatttgcttgtaactttcccagttttag

SEQ ID NO: 6045 - DNA, 579 bp, Homo sapiens
cttgggcttgaattttggaggtcgaggctacagtgagccatgattgtgccactgcactctagcctgggtgacagagcaagatcctgtctcaaaaaatcacccaaaaattgtttgatgtccgggcgtggtggctcatgactgtaatcacagcacttcaggtggttgaggcaggaggatcgcttgagcccaggaggtcgaggttgcagggaaccatggtgcactccagcctgggtgacagagtgagaccctgtcaaaaaaaattgttttattattgttatttaaaaatgaattcataattagaaagaaaaygttctcagtttaaatttctaatatggtagatgttgatagatataactcacatacacaaaaaccctttgaggtcttaaatatctttgatgagtctaaacaagttctgagattagaatgtttgagaactgctgatgtaaaactttgaagatttcaggattttggatattctcaggaacgaaatcaggaacccctgagaagttttaagaaggtgagttttaagtcgaaggagatcataaagatcattaaccttgcatatgtgtttatgtgggt

SEQ ID NO: 6046 - DNA, 583 bp, Homo sapiens
agttttacgagctctgtgtccctgggcaagctccgtgtccctgtgtccctgctataaaatgggaatgatagtacctcctcatagagtggccctggaagcatgggaggccaagtgcatatcctatggtttgcacttgtacgtggctccctgccctgccccagctctgcctcgtgagtctctgcagactagtcctcgggacacaccccacccccagcctgctagaycgcaggaccccatggccataggcacgtgccctttctcctccttgcttgaccttggagagcccatggggagcccaggtgggagcttggggtctgcagcaatgggaacgggacccacttttctttgcacatctgctacctgggctccccttaggcccgaaccacaggagtgggcctttgagggtcttgggggtggtaattttgctttaatgtagagagaaaatccaaggttcagtgctcacagattcagatggaatctcagacatcttctaatccagcagccattaaagctgtctgtggccccagtggcataggaaaggcatgcgctcccaggcttccatgctgtgggacttctcagagcc

SEQ ID NO: 6047 - DNA, 583 bp, Homo sapiens
agttttacgagctctgtgtccctgggcaagctccgtgtccctgtgtccctgctataaaatgggaatgatagtacctcctcatagagtggccctggaagcatgggaggccaagtgcatatcctatggtttgcacttgtacgtggctccctgccctgccccagctctgcctcgtgagtctctgcagactagtcctcgggacacaccccacccccagcctgctagatcgcaggaccccatggccataggcacgtgccctttctcctccttgcttgaccttggagagcccatggggagcccaggtgggagcttggggtctgcagcaatgggaaygggacccacttttctttgcacatctgctacctgggctccccttaggcccgaaccacaggagtgggcctttgagggtcttgggggtggtaattttgctttaatgtagagagaaaatccaaggttcagtgctcacagattcagatggaatctcagacatcttctaatccagcagccattaaagctgtctgtggccccagtggcataggaaaggcatgcgctcccaggcttccatgctgtgggacttctcagagcc

SEQ ID NO: 6048 - DNA, 800 bp, Homo sapiens
gtcttcatttactcatccagcagtcactggggatcttctatggaccaggcactgtgctaggtactggagatgcaggtggtgagcaagacaggtgagacagcaaagctgagcaagggataacaggtaagcaaatggcagagtcatgtcaatgttgggtgccaatacgggtaataaatcacatggaagcgagtgatggatacggaagataattttaattgggtggtcatggaaggcttctcagaggaagggacatttgagttgaggcctgagaaggaggcagtcagggaaagggtcctggaaaggatgtgctatgctgaggraaaagtgcacgcaaagaccctgaggtgtgtctgaggacagaagtctagagtggctggagttggcgactgcaaggaagggatggggtggcgtaaggctgggggacgggagtaggcttgtggtcactggcttgtgatttcagcagtcctgctgctccctgagcctcagttctctgacttacaaaatgagcttcatcatttcagtccccgccccgaccctggtcgggaatgttgtaggtgtgaagtaagacagtgctttggcttttggctctgggcagcaatgagctattgcagttatttttattattactatgagtgggatgtttagggactatgggtggggctggggaagctgtgcctctgtttctccgggttgctgttgtaagtgagtgccaagtgtatgtaaaaggcgtggtgtgcctcgtctgtacctccccccaggtcccctgaaccacagccccttgccagctccctttaagcaca

SEQ ID NO: 6049 - DNA, 800 bp, Homo sapiens
gtcttcatttactcatccagcagtcactggggatcttctatggaccaggcactgtgctaggtactggagatgcaggtggtgagcaagacaggtgagacagcaaagctgagcaagggataacaggtaagcaaatggcagagtcatgtcaatgttgggtgccaatacgggtaataaatcacatggaagcgagtgatggatacggaagataattttaattgggtggtcatggaaggcttctcagaggaagggacatttgagttgaggcctgagaaggaggcagtcagggaaagggtcctggaaaggatgtgctatgctgagggaaaagtgcacgcaaagaccctgaggtgtgtctgaggacagaagtctagagtggctggagttggcgactgcaaggaagggatggggtggcgtaaggctgggggacgggagtaggcttgtggtcactggcttgtgatttcagcagtcctgctgctccctgagcctcagttctctgacttacaaaatgagcttcatcatttcagtccccgccccgaccctggtcgggaatgttgtaggtgtgaagtaagacagtgctttggcttttggctctgggcagcaatgagctattgcagttatttttattattactatgagtgggatgtttagggactatgggtggggctggggaagctgtgcctctgtttctccgggttgctgttgtaagtgagtgccaagtgtatgtaaaaggcgtggygtgcctcgtctgtacctccccccaggtcccctgaaccacagccccttgccagctccctttaagcaca

SEQ ID NO: 6050 - DNA, 637 bp, Homo sapiens
aagtatgtaaagattatgttctagatcagctttggtctgtcctaaaagaaatttgccagtggattattccatatggataaaagtcagtttctctggtcttcctggaatgtgtctagaaagcaaatacattatttacaattcatagtagatcaatgtattggattaaaatatgacaaacataatttggtcattgtgagcatgccagctcrgtcaactattcaccatacatgatgccctaaatataactctaggttttcttatgcccaagagagggacatactcttgggtgtctggactagggaaacatgcatgaaaaaccatttggccactctacatcttgttactggagaattgaaaccatctatattcaaagatattattaaaaggcaagaagttaaaaaaaaaaagaacattgatctcatgattctttcattatatccattttacattatcctgccttatacccacaattgaagagttgccactttatacctaggatagaggagttgccacatcatgagcatgctggcaccaagtggaggcacatccaggtttttcagcattctcctggtaaggttgattagctctcggaagctgagcatatgtttaaaatccttaaccaacatcacttagattt

SEQ ID NO: 6051 - DNA, 807 bp, Homo sapiens
tgaaggctaagaagtaataaaccatcaaaagcttcattgcaaatgctctgaaaaatctcttttccttccacagctcagcagggtgcagctctgcttacattttcaggccatgaatgagaaagttgcctttggccttatctgacccctttctccatgtcagaaagggagagaacactcacaagatggaataaaagaattgaatggtttgcttcttgtttccgtcaacccaatgtctgctgccaaaaaaaaaaaaaaaaaaaaggaaaaaaaacacacattcgaagcaaatgcttcttattaatatgcatatggatctcctgatgatcttgataaattactgtttcaggacatctggggtgaggcctgaaattctgcatttctaacaagcttccatgtgatgttgatgctgccagcccaaggaccacattttgagtggtgtgttgggcagaatcctaacaatgcccttcttcctctaagattcttataccctggttatttaatcaaagatcaatttaggttctgctggaagggaagtttgcagttataattgaagttccaaatcagttttaattgaccttaagatgcagaggttatccaggtgggcctgctctaatcacatgagacctttaaaaagcaggatargggagcagaaaggaggtaaagaaattcaaaagatgctaggggtttgacatgctgttgttgctttgaacatggagcatgcgtgtgagaaggaatgtgtcagcttcaaagagatgagggtggcctccagatgacagccggcaaggaaatggggtcttgtgaggaact

SEQ ID NO: 6052 - DNA, 807 bp, Homo sapiens
tgaaggctaagaagtaataaaccatcaaaagcttcattgcaaatgctctgaaaaatctcttttccttccacagctcagcagggtgcagctctgcttacattttcaggccatgaatgagaaagttgcctttggccttatctgacccctttctccatgtcagaaagggagagaacactcacaagatggaataaaagaattgaatggtttgcttcttgtttccgtcaacccaatgtctgctgccaaaaaaaaaaaaaaaaaaaaggaaaaaaaacacacattcgaagcaaatgcttcttattaatatgcatatggatctcctgatgatcttgataaattactgtttcaggacatctggggtgaggcctgaaattctgcatttctaacaagcttccatgtgatgttgatgctgccagcccaaggaccacattttgagtggtgtgttgggcagaatcctaacaatgcccttcttcctctaagattcttataccctggttatttaatcaaagatcaatttaggttctgctggaagggaagtttgcagttataattgaagttccaaatcagttttaattgaccttaagatgcagaggttatccaggtgggcctgctctaatcacatgagacctttaaaaagcaggataggggagcagaaaggaggtaaagaaattcaaaagatgckaggggtttgacatgctgttgttgctttgaacatggagcatgcgtgtgagaaggaatgtgtcagcttcaaagagatgagggtggcctccagatgacagccggcaaggaaatggggtcttgtgaggaact

SEQ ID NO: 6053 - DNA, 887 bp, Homo sapiens
atgtttgtgtatatggagaatggcgatgtttgaagggaatctttttattatgtttcatgtaccctgtatgatttgaaacaacagtatattcatgtaatgcaattataataaaataatacaatatcaggtcttgctctaaaaagaatgttattccaatttagggacttccaggcaattaatacttctgtcatctataaaaatgtttccttgtgagtattgactttggtggaggaaattgagaaaccagctgctaatttatgtaaattgaacaaacaaaaccatggttgtgatgtttccaattgaagacacctcccgtcttatgggcatctggaatatgtagctagttatctgtgatggttctggaattattctattttaaccgatacgtgtttttattrctggtggcagcaaagggactatgacagccagagcagagggtgcatagagtcaagtatttgggataaccaagcaaaataacccagcccttggtctgattcattataacacagaaacatagtccaggaacaagttcttttcccctccatgcaggtacagctacagtctgattggttcagaggagagcagattctagccatgaacgaatggggctgtggttgctcatctctaattagatttggcttcagaagccaggaccctgacaagagcttctataatcaatttccagggacagccctggggccgttggagccacaagcataaggaatgctggctatttgtgttctacccaaaaggtcacattcatgcctcttcttcccagacaagcatggcaggtaccagctttcagagtcctgctggacagccaaacaaatttctccctttttccctttaatgacttctaaatacaagtccaatttttagttgaccca

SEQ ID NO: 6054 - DNA, 814 bp, Homo sapiens
tccaaaatcaagaaaaggctcggggtagtacagtttaatccaaaacaacagccaaaactgggtagaaaattagactcttcaaggaactcccaggtacattaccccgtttaatccttgcaacaactggatgagataccaaacaaaaatctgttattactgttttatgtattagaaaaacattagatgaaggagcttcatctaatgtcccaagactggtatttgacaaagcattgactagaagccaattcctttaaaaaaaaaattgtagagatgaggtctcactatgatgcccagcctggtcttgaattcctggcctcaagtgatcctcctgccttggcctccccaagtgctgtgactacaggtgtgagccaccacacccagcccagaaaccaattcatgactctcagtttatgactacgacatcatgctgctcctcagacaccccaaagttcacaacctggaatatttttcattagctactacagtgttactaatccatacctatattmttcaccaagattagtaaggaatccagccaagttatttccccatctcttcctactttatttccaactaagggactcacttcttcacttggaaactgttctgctctggtcagtctccttagtccaatattccctccattctcaggattcactctttgttcaaatcctctgtagcatccagcagttgctaacagagacaagcagttaaaacgcagagatgccaagcatcaggaactgtggctggaggaaataaactggaggttttggggctggctgcagtggttcacgtctgtaatcccagcactttg

SEQ ID NO: 6055 - DNA, 758 bp, Homo sapiens
tacttttggtggcmtggagaaatacagctgtgatttcacatatggcatctttcaatttctaattagtttactttcaacagcacccccataccctaatccaacaccaatttagattatagtgttaaaaatatcatcataaaatgtagccttgtacaaagagatgatctaattattcagccttgctgtatcagcctaatgaattatgcagtcttgcctacagtatttcacctgacagaatgagtgtgtcaaacactatagtgcatgaattctccaaccagcctgtgtaggtgccagagcagtgagtgtttagtaccacgatctgagagtcagttttacggagcttgaagagtgaatattaataattcacatttttttctgtaggggttgggaatatgcattatcctaaggggcttgtatgcacatagaatatatgatatgtgataattgtggtatatttaataatgttcattcaaacaaagggtaggctgttgcataattacttgcacattattccagagtggtaataaaaaaatctaagaggaatcccccaagagttccaacaagtttatttgggacagatgaaaatcaacctcttgaggctcccgtcaggagaacaagaggacatatttacagctctatctgttcacatgggagaaagctcaaacatctactccagccacttaggtgtactgaatggccgttaaatggaaaccttcgggtctacttgattgtctgttccaacatcaccgtgtgtgatt

SEQ ID NO: 6056 - DNA, 758 bp, Homo sapiens
tacttttggtggcatggagaaatacagctgtgatttcacatatggcatctttcaattkctaattagtttactttcaacagcacccccataccctaatccaacaccaatttagattatagtgttaaaaatatcatcataaaatgtagccttgtacaaagagatgatctaattattcagccttgctgtatcagcctaatgaattatgcagtcttgcctacagtatttcacctgacagaatgagtgtgtcaaacactatagtgcatgaattctccaaccagcctgtgtaggtgccagagcagtgagtgtttagtaccacgatctgagagtcagttttacggagcttgaagagtgaatattaataattcacatttttttctgtaggggttgggaatatgcattatcctaaggggcttgtatgcacatagaatatatgatatgtgataattgtggtatatttaataatgttcattcaaacaaagggtaggctgttgcataattacttgcacattattccagagtggtaataaaaaaatctaagaggaatcccccaagagttccaacaagtttatttgggacagatgaaaatcaacctcttgaggctcccgtcaggagaacaagaggacatatttacagctctatctgttcacatgggagaaagctcaaacatctactccagccacttaggtgtactgaatggccgttaaatggaaaccttcgggtctacttgattgtctgttccaacatcaccgtgtgtgatt

SEQ ID NO: 6057 - DNA, 758 bp, Homo sapiens
tacttttggtggcatggagaaatacagctgtgatttcacatatggcatctttcaatttctaattagtttactttcaacagcacccccataccctaatccaacaccaatttagattatagtgttaaaaatatcatcataaaatgtagccttgtacaaagagatgatctaattattcagccttgctgtatcagcctaatgaattatgcagtcttgcctacagtatttcacctgacagaatgagtgtgtcaaacactatagtgcatgaattctccaaccagcctgtgtaggtgccagagcagtgagtgtttagtaccacgatctgagagtcagttttacggagcttgaagagtgaatattaataattcacatttttttctgyaggggttgggaatatgcattatcctaaggggcttgtatgcacatagaatatatgatatgtgataattgtggtatatttaataatgttcattcaaacaaagggtaggctgttgcataattacttgcacattattccagagtggtaataaaaaaatctaagaggaatcccccaagagttccaacaagtttatttgggacagatgaaaatcaacctcttgaggctcccgtcaggagaacaagaggacatatttacagctctatctgttcacatgggagaaagctcaaacatctactccagccacttaggtgtactgaatggccgttaaatggaaaccttcgggtctacttgattgtctgttccaacatcaccgtgtgtgatt

SEQ ID NO: 6058 - DNA, 758 bp, Homo sapiens
tacttttggtggcatggagaaatacagctgtgatttcacatatggcatctttcaatttctaattagtttactttcaacagcacccccataccctaatccaacaccaatttagattatagtgttaaaaatatcatcataaaatgtagccttgtacaaagagatgatctaattattcagccttgctgtatcagcctaatgaattatgcagtcttgcctacagtatttcacctgacagaatgagtgtgtcaaacactatagtgcatgaattctccaaccagcctgtgtaggtgccagagcagtgagtgtttagtaccacgatctgagagtcagttttacggagcttgaagagtgaatattaataattcacatttttttctgtaggggttgggaatatgcattatcctaaggggcttgtatgcacatagaatatatgatatgtgataattgtkgtatatttaataatgttcattcaaacaaagggtaggctgttgcataattacttgcacattattccagagtggtaataaaaaaatctaagaggaatcccccaagagttccaacaagtttatttgggacagatgaaaatcaacctcttgaggctcccgtcaggagaacaagaggacatatttacagctctatctgttcacatgggagaaagctcaaacatctactccagccacttaggtgtactgaatggccgttaaatggaaaccttcgggtctacttgattgtctgttccaacatcaccgtgtgtgatt

SEQ ID NO: 6059 - DNA, 758 bp, Homo sapiens
tacttttggtggcatggagaaatacagctgtgatttcacatatggcatctttcaatttctaattagtttactttcaacagcacccccataccctaatccaacaccaatttagattatagtgttaaaaatatcatcataaaatgtagccttgtacaaagagatgatctaattattcagccttgctgtatcagcctaatgaattatgcagtcttgcctacagtatttcacctgacagaatgagtgtgtcaaacactatagtgcatgaattctccaaccagcctgtgtaggtgccagagcagtgagtgtttagtaccacgatctgagagtcagttttacggagcttgaagagtgaatattaataattcacatttttttctgtaggggttgggaatatgcattatcctaaggggcttgtatgcacatagaatatatgatatgtgataattgtggtatatttaataatgttcattcaaacaaagggtaggctgytgcataattacttgcacattattccagagtggtaataaaaaaatctaagaggaatcccccaagagttccaacaagtttatttgggacagatgaaaatcaacctcttgaggctcccgtcaggagaacaagaggacatatttacagctctatctgttcacatgggagaaagctcaaacatctactccagccacttaggtgtactgaatggccgttaaatggaaaccttcgggtctacttgattgtctgttccaacatcaccgtgtgtgatt

SEQ ID NO: 6060 - DNA, 810 bp, Homo sapiens
ggcttacttgagggtagagggttggaggagagagatgattagaaaaaataactattgggtactaggcttagtacctgggtaataaaataatctgttcaacaagccctcatgacataagtttacctatataacaaacccgcacatgtaccctgaatctaaaataaaagtttttttttttttaaaagattacatttagctcttgcctgttccagcagtaacattcctttgggacaatcattgcctgaattttataccgtaagtctgcagcaagaacccagaccaccagggcaggtcaaaagctttactgggtgagaaactgaaaaataggtacaagaggccaggtacggtggctcaggcctgtaatcccagcactttggaaggccgaggtgggcggatcacctgaggtcaggagttcaagaccagcctggccaacatggtgaaatcccgtctctactaaacatacaaaaaattagccagcatggtggcaggcacctgtaatcatcccagctacttgtggggctgaggcaggagaattgtttgaacctgggaggcagaggttgcagtgagccgagatcacaccactgcactctatctagcctcaccaacaagagcaaaactttgtctcagaaaaaaaaaaaaaggggtatragggtctggttgtcctctggcatggcattcattgccacctcagctctcttccccacagactgccagctgttgtattagttttctattgctgccataacaaattaccacaaacttagcaatcagtcctgtgtggagaaagtctgggtacaatgtggctcagtc

SEQ ID NO: 6061 - DNA, 1864 bp, Homo sapiens
tctatggggtgtcaggtctaagtcctggagccttcaccaggggaaaggtccctgacccacactcccagaggccagcacacatcagcacttgtctcagtgactgttcctgctctatgccctgagcacgaacaatttccttccccattcttgtcttctgtccctaccgttgccaatgaaccaagaccttgaagatggaggtgtggggaggagagcagccgttaagtgtggacagaaggatgttttcctgggcacctctacacacagggcaacatcccctcccctgccccatgctggagggccaggggccagggcgatgcaaagccacagaagatcccaaagccctctggggttggcctcaaactgtgatcacccacacayccactttctgttgggtggcggctctaagaggagctccactggattcctgaacaggagactcaccccctcccctggccctgggcagagggagaacctgggccctgggtcagtggccccagcgcagtgtctgcctcccacaggctgccacaccctgtacctgagctcagtgagcgtggagaccctgactggagccctggccgtgcagaaagccatctccaccacctttgagagggacatcctccccacgcccaccgtggtccacttcaaagtcacagagcagggcatcactctgactgatgtccagaggaagtaagggccttcccttgccctggggctccggggctggcggagtagagctggaggggatagctgagacagctgcagatcagggatgaaggtcaagttcagggttctggatgacccagcggggccagtgatgtgctgagtgactccaggcagcttccctgcctcctccaggcctcactccactgccaaagcccctgttcatcatgactgatgaaaatggagttaacgggggccgggcacggtggctcatgcctgtaatcccagcactttgggaggccgaggcgggcggatcacctgaggtcaggagttcgagaccagcctggtcaacatgatgaaaccccgtctctactaaaaatacaaaattagccgggcatggtggcacgcacctgtaatcccagctacttgggaggctgaggcaggagaattgcttgaacccaggaggcggaggttgtagtgagctgagagcacgccattgcactccaacctgggtgacagagtgaaactccatctcaaaaaaggaaggaaggaaggaaggaaatggagttaactagtattcatgggtgccgattatgcctgcacccattgatggaacatcttccctcggccagactggctgaccactgggacccagagaggaatgagatcgttccttccccaggctcggatctcacagtctaacaggagcctgatccagggctgagcacttcacagggagaaacaagagatgaccaagatgtaattcgtgtcctcaaaaagttagtggccaaaaaaaattaaatggcgtggtaggggtgtgatagaaaaccccagagtgtaagacagaggcagacaagccccatgagaggagagaggcaggagcggggcgccagggccccccagtgggaaaggccatagcggtcttcaaggtctaacccagagacttcttggaggacagggcacctgagcttggggggaacgagagatgctggaggcaggatgacactgggacaggctgtcatcgcttcccttctctccccgcctcctcctagggtgtttttccggcgccattacccactcaccaccctccgcttctgtggtatggaccctgagcaacggaagtaagttcaaggctgggccaaactaagaaggctgtccagggccccgctgcccaccaaggcgtcctgccgactctgggcctggg

SEQ ID NO: 6062 - DNA, 1864 bp, Homo sapiens
tctatggggtgtcaggtctaagtcctggagccttcaccaggggaaaggtccctgacccacactcccagaggccagcacacatcagcacttgtctcagtgactgttcctgctctatgccctgagcacgaacaatttccttccccattcttgtcttctgtccctaccgttgccaatgaaccaagaccttgaagatggaggtgtggggaggagagcagccgttaagtgtggacagaaggatgttttcctgggcacctctacacacagggcaacatcccctcccctgccccatgctggagggccaggggccagggcgatgcaaagccacagaagatcccaaagccctctggggttggcctcaaactgtgatcacccacacacccactttctgttgggtggcggctctaagaggagctccactggattcctgaacaggagactcaccccctcccctggccctgggcagagggagaacctgggccctgggtcagtggccccagcgcagtgtctgcctcccacaggctgccacaccctgtacctgagctcagtgagcgtggagaccctgactggagccctggccgtgcagaaagccatctccaccacctttgagagggacatcctccccacgcccaccgtggtccacttcaaagtcacagagcagggcatcactctgactgatgtccagaggaagtaagggccttcccttgccctggggctccggggctggcggagtagagctggaggggatagctgagacagctgcagatcagggatgaaggtcaagttcagggttctggatgacccagcggggccagtgatgtgctgagtgactccaggcagcttccctgcctcctccaggcctcactccactgccaaagcccctgttcatcatgactgatgaaaatggagttaacgggggccgggcacggtggctcatgcctgtaatcccagcactttgggaggccgaggcgggcggatcacctgaggtcaggagttcgagaccagcctggtcaacatgatgaaaccccgtctctactaaaaatacaaaattagccgggcatggtggcacgcacctgtaatcccagctacttgggaggctgaggcaggagaattgcttgaacccaggaggcggaggttgtagtgagctgagagcacgccattgcactccaacctgggtgacagagtgaaactccatctcaaaaaaggaaggaaggaaggaaggaaatggagttaactagtattcatgggtgccgattatgcctgcacccattgatggaacatcttccctcggccagactggctgaccactgggacccagagaggaatgagatcgttccttccccaggctcggatctcacagtctaacaggagcctgatccagggctgagcacttcacagggagaaacaagagatgaccaagatgtaattcgtgtcctcaaaaagttagtggccaaaaaaaattaaatggcgtggtaggggtgtgatagaaaaccccagagtgtaagacasaggcagacaagccccatgagaggagagaggcaggagcggggcgccagggccccccagtgggaaaggccatagcggtcttcaaggtctaacccagagacttcttggaggacagggcacctgagcttggggggaacgagagatgctggaggcaggatgacactgggacaggctgtcatcgcttcccttctctccccgcctcctcctagggtgtttttccggcgccattacccactcaccaccctccgcttctgtggtatggaccctgagcaacggaagtaagttcaaggctgggccaaactaagaaggctgtccagggccccgctgcccaccaaggcgtcctgccgactctgggcctggg

SEQ ID NO: 6063 - DNA, 1864 bp, Homo sapiens
tctatggggtgtcaggtctaagtcctggagccttcaccaggggaaaggtccctgacccacactcccagaggccagcacacatcagcacttgtctcagtgactgttcctgctctatgccctgagcacgaacaatttccttccccattcttgtcttctgtccctaccgttgccaatgaaccaagaccttgaagatggaggtgtggggaggagagcagccgttaagtgtggacagaaggatgttttcctgggcacctctacacacagggcaacatcccctcccctgccccatgctggagggccaggggccagggcgatgcaaagccacagaagatcccaaagccctctggggttggcctcaaactgtgatcacccacacacccactttctgttgggtggcggctctaagaggagctccactggattcctgaacaggagactcaccccctcccctggccctgggcagagggagaacctgggccctgggtcagtggccccagcgcagtgtctgcctcccacaggctgccacaccctgtacctgagctcagtgagcgtggagaccctgactggagccctggccgtgcagaaagccatctccaccacctttgagagggacatcctccccacgcccaccgtggtccacttcaaagtcacagagcagggcatcactctgactgatgtccagaggaagtaagggccttcccttgccctggggctccggggctggcggagtagagctggaggggatagctgagacagctgcagatcagggatgaaggtcaagttcagggttctggatgacccagcggggccagtgatgtgctgagtgactccaggcagcttccctgcctcctccaggcctcactccactgccaaagcccctgttcatcatgactgatgaaaatggagttaacgggggccgggcacggtggctcatgcctgtaatcccagcactttgggaggccgaggcgggcggatcacctgaggtcaggagttcgagaccagcctggtcaacatgatgaaaccccgtctctactaaaaatacaaaattagccgggcatggtggcacgcacctgtaatcccagctacttgggaggctgaggcaggagaattgcttgaacccaggaggcggaggttgtagtgagctgagagcacgccattgcactccaacctgggtgacagagtgaaactccatctcaaaaaaggaaggaaggaaggaaggaaatggagttaactagtattcatgggtgccgattatgcctgcacccattgatggaacatcttccctcggccagactggctgaccactgggacccagagaggaatgagatcgttccttccccaggctcggatctcacagtctaacaggagcctgatccagggctgagcacttcacagggagaaacaagagatgaccaagatgtaattcgtgtcctcaaaaagttagtggccaaaaaaaattaaatggcgtggtaggggtgtgatagaaaaccccagagtgtaagacagaggcagacaagccccatgagaggagagaggcaggagcggggcrccagggccccccagtgggaaaggccatagcggtcttcaaggtctaacccagagacttcttggaggacagggcacctgagcttggggggaacgagagatgctggaggcaggatgacactgggacaggctgtcatcgcttcccttctctccccgcctcctcctagggtgtttttccggcgccattacccactcaccaccctccgcttctgtggtatggaccctgagcaacggaagtaagttcaaggctgggccaaactaagaaggctgtccagggccccgctgcccaccaaggcgtcctgccgactctgggcctggg

SEQ ID NO: 6064 - DNA, 1864 bp, Homo sapiens
tctatggggtgtcaggtctaagtcctggagccttcaccaggggaaaggtccctgacccacactcccagaggccagcacacatcagcacttgtctcagtgactgttcctgctctatgccctgagcacgaacaatttccttccccattcttgtcttctgtccctaccgttgccaatgaaccaagaccttgaagatggaggtgtggggaggagagcagccgttaagtgtggacagaaggatgttttcctgggcacctctacacacagggcaacatcccctcccctgccccatgctggagggccaggggccagggcgatgcaaagccacagaagatcccaaagccctctggggttggcctcaaactgtgatcacccacacacccactttctgttgggtggcggctctaagaggagctccactggattcctgaacaggagactcaccccctcccctggccctgggcagagggagaacctgggccctgggtcagtggccccagcgcagtgtctgcctcccacaggctgccacaccctgtacctgagctcagtgagcgtggagaccctgactggagccctggccgtgcagaaagccatctccaccacctttgagagggacatcctccccacgcccaccgtggtccacttcaaagtcacagagcagggcatcactctgactgatgtccagaggaagtaagggccttcccttgccctggggctccggggctggcggagtagagctggaggggatagctgagacagctgcagatcagggatgaaggtcaagttcagggttctggatgacccagcggggccagtgatgtgctgagtgactccaggcagcttccctgcctcctccaggcctcactccactgccaaagcccctgttcatcatgactgatgaaaatggagttaacgggggccgggcacggtggctcatgcctgtaatcccagcactttgggaggccgaggcgggcggatcacctgaggtcaggagttcgagaccagcctggtcaacatgatgaaaccccgtctctactaaaaatacaaaattagccgggcatggtggcacgcacctgtaatcccagctacttgggaggctgaggcaggagaattgcttgaacccaggaggcggaggttgtagtgagctgagagcacgccattgcactccaacctgggtgacagagtgaaactccatctcaaaaaaggaaggaaggaaggaaggaaatggagttaactagtattcatgggtgccgattatgcctgcacccattgatggaacatcttccctcggccagactggctgaccactgggacccagagaggaatgagatcgttccttccccaggctcggatctcacagtctaacaggagcctgatccagggctgagcacttcacagggagaaacaagagatgaccaagatgtaattcgtgtcctcaaaaagttagtggccaaaaaaaattaaatggcgtggtaggggtgtgatagaaaaccccagagtgtaagacagaggcagacaagccccatgagaggagagaggcaggagcggggcgccagggccccccagtgggaaaggccatagcggtcttcaaggtctaacccagagacttcttgkaggacagggcacctgagcttggggggaacgagagatgctggaggcaggatgacactgggacaggctgtcatcgcttcccttctctccccgcctcctcctagggtgtttttccggcgccattacccactcaccaccctccgcttctgtggtatggaccctgagcaacggaagtaagttcaaggctgggccaaactaagaaggctgtccagggccccgctgcccaccaaggcgtcctgccgactctgggcctggg

SEQ ID NO: 6065 - DNA, 1864 bp, Homo sapiens
tctatggggtgtcaggtctaagtcctggagccttcaccaggggaaaggtccctgacccacactcccagaggccagcacacatcagcacttgtctcagtgactgttcctgctctatgccctgagcacgaacaatttccttccccattcttgtcttctgtccctaccgttgccaatgaaccaagaccttgaagatggaggtgtggggaggagagcagccgttaagtgtggacagaaggatgttttcctgggcacctctacacacagggcaacatcccctcccctgccccatgctggagggccaggggccagggcgatgcaaagccacagaagatcccaaagccctctggggttggcctcaaactgtgatcacccacacacccactttctgttgggtggcggctctaagaggagctccactggattcctgaacaggagactcaccccctcccctggccctgggcagagggagaacctgggccctgggtcagtggccccagcgcagtgtctgcctcccacaggctgccacaccctgtacctgagctcagtgagcgtggagaccctgactggagccctggccgtgcagaaagccatctccaccacctttgagagggacatcctccccacgcccaccgtggtccacttcaaagtcacagagcagggcatcactctgactgatgtccagaggaagtaagggccttcccttgccctggggctccggggctggcggagtagagctggaggggatagctgagacagctgcagatcagggatgaaggtcaagttcagggttctggatgacccagcggggccagtgatgtgctgagtgactccaggcagcttccctgcctcctccaggcctcactccactgccaaagcccctgttcatcatgactgatgaaaatggagttaacgggggccgggcacggtggctcatgcctgtaatcccagcactttgggaggccgaggcgggcggatcacctgaggtcaggagttcgagaccagcctggtcaacatgatgaaaccccgtctctactaaaaatacaaaattagccgggcatggtggcacgcacctgtaatcccagctacttgggaggctgaggcaggagaattgcttgaacccaggaggcggaggttgtagtgagctgagagcacgccattgcactccaacctgggtgacagagtgaaactccatctcaaaaaaggaaggaaggaaggaaggaaatggagttaactagtattcatgggtgccgattatgcctgcacccattgatggaacatcttccctcggccagactggctgaccactgggacccagagaggaatgagatcgttccttccccaggctcggatctcacagtctaacaggagcctgatccagggctgagcacttcacagggagaaacaagagatgaccaagatgtaattcgtgtcctcaaaaagttagtggccaaaaaaaattaaatggcgtggtaggggtgtgatagaaaaccccagagtgtaagacagaggcagacaagccccatgagaggagagaggcaggagcggggcgccagggccccccagtgggaaaggccatagcggtcttcaaggtctaacccagagacttcttggaggacagggcacctgagcttggggggaacgagagatgctggaggcaggatgacactgggacaggctgtcatcrcttcccttctctccccgcctcctcctagggtgtttttccggcgccattacccactcaccaccctccgcttctgtggtatggaccctgagcaacggaagtaagttcaaggctgggccaaactaagaaggctgtccagggccccgctgcccaccaaggcgtcctgccgactctgggcctggg

SEQ ID NO: 6066 - DNA, 836 bp, Homo sapiens
taagcaaagcagaacccagtctctgaggcgaggaggcccacctggtagggagctcaaatgcgccattgtcctgcttgtctttataaagggagctgacacgtttctcccagcataaagttgggagtgacaccagagccttctgcaagatgcttctgattctgctgtcagtggccctgctggccttcagctcagctcaggacttagatgaaggtaagccgaattgggggaagatattgtgactctgattggggtttacgggcgaatgctatagagggggaaagtggagggaagagaggaggatgagaaaacagataggactgaagagttctcatgccaaggatcagaagacctgttgtgccttcattcctcatcaagacctcataatttattgattgcacaaatagaacccaataaagaatttgtaccgggggagtgagagagtgagatttgcatttatagagacatgggactgctgggaaggatrtggagaatgcaagacagattcagggaagtgcagctgtgaagatcctatactgatcccagtagacagggatgatggtggccttgctggacagtggatgagtatccatgaaggagataaacacatgtcagagctattgctgaggcagagaattgggtaaacacttgcctctgtctacatagagttagagaatcaccagagtgaaatattgtcatttttttctctcctgcatgtagtattttaatgtgctgggacgggcatttgtaagattgtatctaagtggctatgtctggtggctcctgttgagaaagcttgcaaacataaacaacatatttacagatgaaagagggcagaa

SEQ ID NO: 6067 - DNA, 836 bp, Homo sapiens
taagcaaagcagaacccagtctctgaggcgaggaggcccacctggtagggagctcaaatgcgccattgtcctgcttgtctttataaagggagctgacacgtttctcccagcataaagttgggagtgacaccagagccttctgcaagatgcttctgattctgctgtcagtggccctgctggccttcagctcagctcaggacttagatgaaggtaagccgaattgggggaagatattgtgactctgattggggtttacgggcgaatgctatagagggggaaagtggagggaagagaggaggatgagaaaacagataggactgaagagttctcatgccaaggatcagaagacctgttgtgccttcattcctcatcaagacctcataatttattgattgcacaaatagaacccaataaagaatttgtaccgggggagtgagagagtgagatttgcatttatagagacatgggactgctgggaaggatatggagaatgcaagacagattcagggaagtgcagctgtgaagatmctatactgatcccagtagacagggatgatggtggccttgctggacagtggatgagtatccatgaaggagataaacacatgtcagagctattgctgaggcagagaattgggtaaacacttgcctctgtctacatagagttagagaatcaccagagtgaaatattgtcatttttttctctcctgcatgtagtattttaatgtgctgggacgggcatttgtaagattgtatctaagtggctatgtctggtggctcctgttgagaaagcttgcaaacataaacaacatatttacagatgaaagagggcagaa

SEQ ID NO: 6068 - DNA, 836 bp, Homo sapiens
taagcaaagcagaacccagtctctgaggcgaggaggcccacctggtagggagctcaaatgcgccattgtcctgcttgtctttataaagggagctgacacgtttctcccagcataaagttgggagtgacaccagagccttctgcaagatgcttctgattctgctgtcagtggccctgctggccttcagctcagctcaggacttagatgaaggtaagccgaattgggggaagatattgtgactctgattggggtttacgggcgaatgctatagagggggaaagtggagggaagagaggaggatgagaaaacagataggactgaagagttctcatgccaaggatcagaagacctgttgtgccttcattcctcatcaagacctcataatttattgattgcacaaatagaacccaataaagaatttgtaccgggggagtgagagagtgagatttgcatttatagagacatgggactgctgggaaggatatggagaatgcaagacagattcagggaagtgcagctgtgaagatcctatactgatcccagtagacagggatgatggtggccttgctggacagtggatgagyatccatgaaggagataaacacatgtcagagctattgctgaggcagagaattgggtaaacacttgcctctgtctacatagagttagagaatcaccagagtgaaatattgtcatttttttctctcctgcatgtagtattttaatgtgctgggacgggcatttgtaagattgtatctaagtggctatgtctggtggctcctgttgagaaagcttgcaaacataaacaacatatttacagatgaaagagggcagaa

SEQ ID NO: 6069 - DNA, 634 bp, Homo sapiens
ccctttttccaggtaagaaaacagcagtatctactctttcttttgtttaacttgtactggaacctaaacttttagaaataaagtttcaaagataaattcgttagggttatcctttctattttaatatgacgtcttccttttggaaataggtttctctcttttgtctgggcttctttctgttctttttgtttttaattaaaatgtgtacaagcatagcttattaaattttataggggagtctactaatatatagctctcaggttcttccatattattataagccaagctgttctttratattgcatattttaggcatgattgaacatggtctcagtgactgttctcagtatagaccccggaaaagtatgtctgaagatggtgggcttcaggaaagtaacccatgtgcagatgattttgtttctgcatccactgctgatgtttcacataccaacttgggaactatcaggaaagtcatggcaggaaaccatggagaagatgctgccatgaagactgaggagcctttgttccaagtggaagacagcagcaaagggcaggaacccaatgataccaatcaatatttgaaacctccatctcgcccatctccagattcttcagaaagtgactgggaaacttt

SEQ ID NO: 6070 - DNA, 834 bp, Homo sapiens
cagcttagatcaatagcaaccgtagaatgtgatgagggctattctgggagaagtgagcctgctatggcataaagcaggggtcccagccaagcctgagggtcagggatctgggtcagaaaagtgccccccaaagaagggataatcagacctgagggctgagcaggagttctccaggtagagggatggagggggcttgctggggatagacgaacagtgtttttaaagttcccaggcaagagagaggccctggaaccttgaaaacagtatgttcagtggaagaagccagaaacaaagggccacatgctatgtgattccatctgtagacagtgttcaggatgagtaaatccatagagacagaaagygggttggtatttgccagggttgggagagggaatgggcaataactgctaataggcagaagttctttttggggtgataaaaatgctgtggaatgagacagcagtgactgttgcacaatcttgtgaatatatcaagacccattgaattttgtactttaaaatggtgaattgtatggtatatgaattatatctcaattttttaaaaagagaggccctgagttccactgagcaactgaatgaagcgcagctcccttggcatgaaagggggagttgggccaggccagatcacacaaggtccacttcaaatggactttgtgctgagggctgggggaaccagtagaaggctctaagctaagaggtgacatggtcagatttgcactttaggaaggtcactgtggctgaagtgtggagaatgcactgggtgggggatagatagaccagttaggaggctgctgccccagtccagatgagggat

SEQ ID NO: 6071 - DNA, 834 bp, Homo sapiens
cagcttagatcaatagcaaccgtagaatgtgatgagggctattctgggagaagtgagcctgctatggcataaagcaggggtcccagccaagcctgagggtcagggatctgggtcagaaaagtgccccccaaagaagggataatcagacctgagggctgagcaggagttctccaggtagagggatggagggggcttgctggggatagacgaacagtgtttttaaagttcccaggcaagagagaggccctggaaccttgaaaacagtatgttcagtggaagaagccagaaacaaagggccacatgctatgtgattccatctgtagacagtgttcaggatgagtaaatccatagagacagaaagcgggttggtatttgccagggttgggagagggaatgggcaataactgctaataggcagaagttctttttggggtgataaaaatgctgtggaatgagacagcagtgactgttgcacaatcttgtgaatatatcaagacccattgaattttgtactttaaaatggtgaattgtatggtatatgaattatatctcaattttttaaaaagagaggccctgagttccactgagcaactgaatgaagcrcagctcccttggcatgaaagggggagttgggccaggccagatcacacaaggtccacttcaaatggactttgtgctgagggctgggggaaccagtagaaggctctaagctaagaggtgacatggtcagatttgcactttaggaaggtcactgtggctgaagtgtggagaatgcactgggtgggggatagatagaccagttaggaggctgctgccccagtccagatgagggat

SEQ ID NO: 6072 - DNA, 747 bp, Homo sapiens
taagaaatcaggattaaggtaattacagtatcctatttctctttgccagtgatttgtttagggaactgggcatatgacctggttctggcccgtgagatacaaggggggatgtttgctgagtgacttccaattttcttccgtaataagagaggtttgtattaccagaaggtcctttcccaccagtcctcttctttcctacttggattactatggtgtgaggaagtcatggctggagctttggcagccattttgtgaccctgagatgaaggccaatacaattgcagggaggttacacaaccttggagctacctatctctagacattttgtcaggtgagatgaataaatacatttgtggttaagccactgttagtcaggttttctgttatgtgcagctgatatagaacccaagtgctccctctcctttggtcataggctagatgaagttagacgctttagtcctcacctcgtgggtagagttggagtttccaagttgcagcccgaggcagctgcagaattgaggtagtgttctggggtcatgaagggtttgcttttgttgctaggcagcacrctggggtctggtccttacagagctctctctcagtgttctttacctgtctccatgctccctccctccatcttccaggaactgtctctacctgtggggatggacagcagcatctagcctagaggaaccctctgaggtaggtcacactccagttggagttgggtgtgttgcactttggtgg

SEQ ID NO: 6073 - DNA, 799 bp, Homo sapiens
aagtctaaacacggaactaatttatgttttatagtcaccttacacatgtagcccaaaggtaattttatacaatatctctaataattttgtggacacatcacatgtggtcaggtgtggaatttttcacttgttttcatgttggcacttaaaaacttttggattttgtagcatttccagttttggattttcagcttagggatgcttcacatgcacttgtggaaagcaagactccatattcttaaaaagaaaacaatcaagagaaagcaaaattgggaggtcttcaggtctttattactctattaattaattaattrttattatttgaaacacggtctcattctgtcacccaggctggagtgcagtggcacaatcgtagctcactgcagccttgaactcctgggctcaagaaatcctcccacctcagcctctcgaatagctgggactacagacatgcaccaccatgcctggctaattttttaaaaaatttttagtacagacagggggtcttgctatattgtccaggctggtttcaaattcctgggctcaagcaatcctcatacctcagcatcccaaattcttgagattataggcatgatccaccatgcccagctactctattaatttaaaaggcggtgggtaggcttggttggccataacagtagaaagaaaataaagtggtgcataagtgattgaggagaagttactaagtcctcaacctacagactaactgaaaatatttgtcttagagataaacatccagaattctctttccaaatccatatttaaaaatacattgtcc

SEQ ID NO: 6074 - DNA, 643 bp, Homo sapiens
ttgcattcttcttaaaaggacgtagtcaaggttcggtgtctgagtaaggtctgaccctgagagtcaagctgagcagatgaaaatgaacagaaatggaggctgatgagaaaagccaacattatagtgagggtttttgcagacatgacaacacaagcagggaggggagttcagacagataaactgatttgacccctgtctgcaaatagccttttcattccagtctcctttctcattgtagtgctttcacgttggtgttctttcttttcttggaacaacaatttttttcccatttcgtgattgtattgtgcttgtcctttatttctcctaactagaactcatgctatttctttgtacagctggcctctttctcagctttcaggccttagcttctttattacattttaaaatggtgtatttccaacctcagcatttatcacaattattgcgcttatttgttgtttgttttttctagtgtatgctttctgactattagtgcatgcttatattcatgtatttattgtctgttttcccaccagaaattaagttcaaagagggcaggaaccttccttccttcctcactgttgtttctccagagccargaacaagttctgggaagaaagtaagtcctcaataaaaatacttg

SEQ ID NO: 6075 - DNA, 821 bp, Homo sapiens
tgaaaaaaggacacatttgtttttaggcaaaaatattggttagttgtttttcataaaaaaatgtgtataaatctcagttccttctaattctccatttgtaacacttcaattatatggaggttgtatttctgataattactgacaaaaataatcattattaaatataaaaagataaaaaattactgacaagaaaaaaaatcaatggaaaacaaaatataagagagatttaaaacaaatttatttttaaaataaaaaaatctgctaaatgcataaagaaacacaaaataataaacagaaatgcctagaagttttatatttcaggtctgtcttagtccaggctgctataacagagtaccacacactgggtcaattataatgaacagaaacgtattggttcacakttctggaggctgggaagtgtaatatcaaggtgccagcatctagcaagtgccttcttaccatgttttaatatggtgggaagcatcacatggcaaagggcaaaaagagtgccacagagatagcaagaggaggtgaacctgcactcacaaaaaggaagccactctcttcatagtgctattagtccattcatgcaggcaaagttctcatacctaaacacattttgaaggtcctgtccctcaataccattaaaatggcaattaaacttcagcatgaattttggccagtacaagcagtcaaaccatagaaaggttctaaagcaaacagaggtagccaaatgctagattccttttttaaaatatgccctcacctaacagaagaaaatggactgcccatggcttactgatgtgcttattaatgtaaca

SEQ ID NO: 6076 - DNA, 821 bp, Homo sapiens
tgaaaaaaggacacatttgtttttaggcaaaaatattggttagttgtttttcataaaaaaatgtgtataaatctcagttccttctaattctccatttgtaacacttcaattatatggaggttgtatttctgataattactgacaaaaataatcattattaaatataaaaagataaaaaattactgacaagaaaaaaaatcaatggaaaacaaaatataagagagatttaaaacaaatttatttttaaaataaaaaaatctgctaaatgcataaagaaacacaaaataataaacagaaatgcctagaagttttatatttcaggtctgtcttagtccaggctgctataacagagtaccacacactgggtcaattataatgaacagaaacgtattggttcacagttctggaggctgggaagtgtaatatcaaggtgccagcatctagcaagtgccttcttaccatgttttaatatggtgggaagcatcacatggcaaagggcaaaaagagtgccacagaratagcaagaggaggtgaacctgcactcacaaaaaggaagccactctcttcatagtgctattagtccattcatgcaggcaaagttctcatacctaaacacattttgaaggtcctgtccctcaataccattaaaatggcaattaaacttcagcatgaattttggccagtacaagcagtcaaaccatagaaaggttctaaagcaaacagaggtagccaaatgctagattccttttttaaaatatgccctcacctaacagaagaaaatggactgcccatggcttactgatgtgcttattaatgtaaca

SEQ ID NO: 6077 - DNA, 821 bp, Homo sapiens
tgaaaaaaggacacatttgtttttaggcaaaaatattggttagttgtttttcataaaaaaatgtgtataaatctcagttccttctaattctccatttgtaacacttcaattatatggaggttgtatttctgataattactgacaaaaataatcattattaaatataaaaagataaaaaattactgacaagaaaaaaaatcaatggaaaacaaaatataagagagatttaaaacaaatttatttttaaaataaaaaaatctgctaaatgcataaagaaacacaaaataataaacagaaatgcctagaagttttatatttcaggtctgtcttagtccaggctgctataacagagtaccacacactgggtcaattataatgaacagaaacgtattggttcacagttctggaggctgggaagtgtaatatcaaggtgccagcatctagcaagtgccttcttaccatgttttaatatggtgggaagcatcacatggcaaagggcaaaaagagtgccacagagatagcaagaggaggtgaacctgcactcacaaaaaggaagccactctcttcatagtgctattagtccattcatgcaggyaaagttctcatacctaaacacattttgaaggtcctgtccctcaataccattaaaatggcaattaaacttcagcatgaattttggccagtacaagcagtcaaaccatagaaaggttctaaagcaaacagaggtagccaaatgctagattccttttttaaaatatgccctcacctaacagaagaaaatggactgcccatggcttactgatgtgcttattaatgtaaca

SEQ ID NO: 6078 - DNA, 821 bp, Homo sapiens
tgaaaaaaggacacatttgtttttaggcaaaaatattggttagttgtttttcataaaaaaatgtgtataaatctcagttccttctaattctccatttgtaacacttcaattatatggaggttgtatttctgataattactgacaaaaataatcattattaaatataaaaagataaaaaattactgacaagaaaaaaaatcaatggaaaacaaaatataagagagatttaaaacaaatttatttttaaaataaaaaaatctgctaaatgcataaagaaacacaaaataataaacagaaatgcctagaagttttatatttcaggtctgtcttagtccaggctgctataacagagtaccacacactgggtcaattataatgaacagaaacgtattggttcacagttctggaggctgggaagtgtaatatcaaggtgccagcatctagcaagtgccttcttaccatgttttaatatggtgggaagcatcacatggcaaagggcaaaaagagtgccacagagatagcaagaggaggtgaacctgcactcacaaaaaggaagccactctcttcatagtgctattagtccattcatgcaggcaaagttctcatacctaaacacattttgaaggtcctgtccctcaataccattaaaatggcaattaaacttcagcatgaattttkgccagtacaagcagtcaaaccatagaaaggttctaaagcaaacagaggtagccaaatgctagattccttttttaaaatatgccctcacctaacagaagaaaatggactgcccatggcttactgatgtgcttattaatgtaaca

SEQ ID NO: 6079 - DNA, 821 bp, Homo sapiens
tgaaaaaaggacacatttgtttttaggcaaaaatattggttagttgtttttcataaaaaaatgtgtataaatctcagttccttctaattctccatttgtaacacttcaattatatggaggttgtatttctgataattactgacaaaaataatcattattaaatataaaaagataaaaaattactgacaagaaaaaaaatcaatggaaaacaaaatataagagagatttaaaacaaatttatttttaaaataaaaaaatctgctaaatgcataaagaaacacaaaataataaacagaaatgcctagaagttttatatttcaggtctgtcttagtccaggctgctataacagagtaccacacactgggtcaattataatgaacagaaacgtattggttcacagttctggaggctgggaagtgtaatatcaaggtgccagcatctagcaagtgccttcttaccatgttttaatatggtgggaagcatcacatggcaaagggcaaaaagagtgccacagagatagcaagaggaggtgaacctgcactcacaaaaaggaagccactctcttcatagtgctattagtccattcatgcaggcaaagttctcatacctaaacacattttgaaggtcctgtccctcaataccattaaaatggcaattaaacttcagcatgaattttggccagkacaagcagtcaaaccatagaaaggttctaaagcaaacagaggtagccaaatgctagattccttttttaaaatatgccctcacctaacagaagaaaatggactgcccatggcttactgatgtgcttattaatgtaaca

SEQ ID NO: 6080 - DNA, 691 bp, Homo sapiens
tggatcctaaggcacagcccgcattaggtgcccattgcaatatgcccttacaaaagggctgtacgtcttgtctctgctacgaggctgaactgtaatccaccctgaaagatgtatggctccttccccctctccagcagggatgctgaagagcctaaattcaggaaggaacgctcttttaaaaggcgatcctgctattaaggcaggctctaatttaaaattgccacaagctttctrtgcacaaaataccagaagtcctaaagacataaatatgtttgactatatacaagagtaatattttatgtatcgaaacgctatacccatgttaaatgacaagtggcaaatgaaaaatatttgctacatgtgacagatcaatatccttaaaatataaagaaacctaaccaaaaataaaaataagaataaaataacactgtcaaagaaaatgaacaggcaattgaaaatataaatgaagaatatgtgaaaacattctaattcattagaattatagttcaaattaagataaaatctatctaccattcatacctatcaaattggtagagatgaaaatattaataaatgccaatgagtatcgtggaataagtgaaaaaatagagttctcttatatgttggcaagaatacaagttagagaagaatttctggaagataatttatttttattaaaagccaactaaaa

SEQ ID NO: 6081 - DNA, 1604 bp, Homo sapiens
gtctgggtggaaagcaaaggttctttccgcagtgcactgtgtacataaacttgcagccaaacaccgttataaaggctgtgaaagatgcagagaaatgcaacacttcttattagtttcctaatctcaaaatgcaggtagcctagttaaggagataaaattacatataagaaaaattaagtaacaacacaagatctgaagattaatatagtatctttgactccaatctaaacatattccaaaaatggtgaaatgattgggagaattccaaatgcaaacaattggagtactataaaatgtggttgatcccacagaatccagtctgcttcaggaaatactttttctaattggagcctctgagagactaaatccattctgcgaagtgtattctagctcttccatagtctcccaatgactcttgcctcagaaagctctgttaatttggttgatcgcttctggtttttctctatatttcatatattgatcaaattttgtaatacaatcttcagatccacactacccaaaagaaaaacatgcttcctgctatcattttgtttatttccctctaaataagtaggagcatggtactttgatcgataagaatgaaaaaaattattagggaacttgccatcatattccaggagaaatggagtatggcatgcacccagcactgaccttcaatcagaattaaagcacgtcagagaaaaggaattgtatagaattgctgggatcaaatgtaacrcaaaatcatcggaactataataggatcacgaagcagaatcaccactgaagtccatctcatgattcagcagcaggagcaggggagcacagcagaaagaagcatgggtgaagggatccgagagtcaatcctacctggcaaataggagtgtgatcctggcatccagtttgtgtctcagagtctttgttcccaggtagaactgggagactgagctagatcaggggttcttagaaaacagttgagggggatcatgaacttaatgaaagaatgaatctttatttcctataatctttaactaaaatgtatagcacttcctccaattatgaatgtaagtcataaaccacaatactactaaccatacatgttatattgttccaatacaaattacagatattttcacattagtataatttttagttatctcagaatatcatttatgatcactagctcttcaaatttacaaagatcatctcagtcacagctgtttccctttacttaatgcattgggaaagaagcacatgcatgactgtatcaaaacatccttaaaaagtattgattagtgtttgagcataattggcttcctctataatcaaacgtgtgctagctgacgctttctgaaatgtttttcttagatgtgactttatcagactgcctatatggtccccttagacagtgcctaagggccatttccttgaacatggtggaattctcagcctcctgtctcagaagcagagatgcctaactggctgggatgcatttcaaggataagcaagagcaggagactggagtaactgccgaatggtgggaggtgacaactggaaacaacagtggtattaaattgatccaaatgcagcctcagggcatgtta

SEQ ID NO: 6082 - DNA, 784 bp, Homo sapiens
gtgtcttagaaggtctcctaagaggaggagcgccggttgagtgcctgtgggccaagtcatggaggtccactgaggagggctcgctccgtctgtctcagtggagggcgctagatgtgcagtggggttcttggtgggaaaagaggattcatgagaatctcagtcctgcctcctccagaatggtctcgctggccgtctagtccactgtcgctctctcttctttaccaggactttccaggtccttactgtctcaacccagtgccagggactgagtatctaattctccacattgctatgtctctctctctctccctctccctctccgtctctgtgtctgtgtgtgtgtgtgtgtgtgtgtgtgtgtgtgtgtgtgtcggttgggggtgtctctatgctggaatcattagcttttctggggcacacatgtgatctcctgtatctttctggcctatgttcatgacatctagtgcagggctccataggaagcgggcagcggaacatatttggttgaactaacaaagraatgattgacggtagagtggagtgctaggagccacttgaatacgacagagcttaaggtgccatctggaggctcttctctttggacagtttctgagtggcttctgtcctttgtcatctccttaggagacgaacaagaagacagtccatgcaaaatattgcagcaggtttgtccatgctccctggaaggatgggagcttggtccacgtcaacattaccaaagagaagtgcaagtggtacagtgagagaatccacacagccctggccc

SEQ ID NO: 6083 - DNA, 2349 bp, Homo sapiens
cgagagtcaatcctacctggcaaacaggagtgtgatcctggcatccagtttatatctcagagtctttgttcccaggtagaactgggagactgagctagatcaggggttcttagaaatcagttgaggggaccgtgaacttaatgaaagaatgaatctttatttcctataatctttaactaaaatgtatagcacttcctccaattatgaatgtaagtcataacccacaatactactaaccgtacatgtgatattgttccaatacaaattacagatattttcacattaatataatttttagttatctcaaaatatcatttatgatcactagctcttcaaatttacaaagatcatctcagtcacagctgtttccctttacttaatgcattgggaaagaagcacatgcataactgcatcataacatccttaaaaatgaattcattagtgtttgagcataattggcttcctctataatcaaaggtgtgctagctgacgctttctgaaatgtttttcttagatgtgactttatcagactgcctatatggtccccttagacagtgcctaagggccatttccttgaacatggtggaattctcagcctcctgtctcagaagcagagatgcctaactggctgggatgcatttcaaggataagcaagagcaggagactggagtaactgccatatggtgggaggtgacaactggaaacaacagtggtattaaattgatccaaatgcagcctcagggcatgttagtaactaggaaatactaagagggaacagagtaagatggaacaactcagatcatcagtaagaaatgcctggccagggccaggtgtggtggctcatgcctgtaatcccagcactttgggacgtcgaggcatgtggatcatttgaggtcaggagttcaagaccagcctggccaatatggtcaaactccatctctactaaacatacaaaagttgaacccgggaggcagaggttgcagtgagctgagatcatgccactgcactccagcctgggccacagagtgagactccatctcagaaacaaaaaagaaagaaaaaaagaaaacaaaaacagaaatgctcggccagcaaatgcaccaggcagccagaccgatacaggttccagagccgcctactctgtcaaaaagtacaacagtgtggtactcccagcactcattgacaatcatttcctcacattgggctgttaagtaatagaaagtaacaggtgaaaaagcacaagaaacgctatggttacacagattacaactttggtggaagcgtatgtatgatgagaactagaactgcacgctcggttatgttaaatccgtggccattgtctaagtgcttatggtaaaaccacagtgtgctagaggtatgagcctactgaaataagacgtgtgaacttctcagaaaatctatcccagcttctgctggcaaagaaaacaactaaaagagccatctacaaagagatgcatgagttagctgaggtggctcctagcagtgagacagaggtgtagaagggaatgtgtgagtggtgtctccagcatcaaggtgttaggtgaaagtgcagagattctgaatcaggggatctggagaatcaggggatctggaatgggatcttcaaaacctgcattcactgggcaccccaggcatattaggatgcaggggatctgcaaamcactttgaaagaaaccagctgcggctcctggctgaggtattttgagtctgaaaagcaaagcaaaacaccatcgttgtgagcccctacatactgcagctcagccccagcaggtgcaggacgctgtatgtgggtaaaagactagttatgtgttcaaaatacagtgatgaagaggccaatgagaaggtggttgtaaatgaagagataaagagcatggtgcaataaagggtgataggatcctctctcagccatcacacgatttgctttcttcagccagctctgtcaaaagtatcccctattagaaacgctgtccccttagagagtagtttgttgaaggtttctaacagaaaaagacaaggctcggacactagcagccctgcaggaaacagttgtattcaaagcagacgtgaaaaccctgtatcatgtgatgcactgccaatgcaacagcaccttcaagcactaacttcgatagaccctcagcctctgggatgacctggcatttccctctatctacgtgaactcgctgaggccccctttaacaatttagtaactccttttggcatggtgcactggcccaatggactaagtgtcctattgaagaatgcaatagaagcagacagcgagattggcctcaacagggttgcagaaagccctgtctcagcctggtcatg

SEQ ID NO: 6084 - DNA, 2349 bp, Homo sapiens
cgagagtcaatcctacctggcaaacaggagtgtgatcctggcatccagtttatatctcagagtctttgttcccaggtagaactgggagactgagctagatcaggggttcttagaaatcagttgaggggaccgtgaacttaatgaaagaatgaatctttatttcctataatctttaactaaaatgtatagcacttcctccaattatgaatgtaagtcataacccacaatactactaaccgtacatgtgatattgttccaatacaaattacagatattttcacattaatataatttttagttatctcaaaatatcatttatgatcactagctcttcaaatttacaaagatcatctcagtcacagctgtttccctttacttaatgcattgggaaagaagcacatgcataactgcatcataacatccttaaaaatgaattcattagtgtttgagcataattggcttcctctataatcaaaggtgtgctagctgacgctttctgaaatgtttttcttagatgtgactttatcagactgcctatatggtccccttagacagtgcctaagggccatttccttgaacatggtggaattctcagcctcctgtctcagaagcagagatgcctaactggctgggatgcatttcaaggataagcaagagcaggagactggagtaactgccatatggtgggaggtgacaactggaaacaacagtggtattaaattgatccaaatgcagcctcagggcatgttagtaactaggaaatactaagagggaacagagtaagatggaacaactcagatcatcagtaagaaatgcctggccagggccaggtgtggtggctcatgcctgtaatcccagcactttgggacgtcgaggcatgtggatcatttgaggtcaggagttcaagaccagcctggccaatatggtcaaactccatctctactaaacatacaaaagttgaacccgggaggcagaggttgcagtgagctgagatcatgccactgcactccagcctgggccacagagtgagactccatctcagaaacaaaaaagaaagaaaaaaagaaaacaaaaacagaaatgctcggccagcaaatgcaccaggcagccagaccgatacaggttccagagccgcctactctgtcaaaaagtacaacagtgtggtactcccagcactcattgacaatcatttcctcacattgggctgttaagtaatagaaagtaacaggtgaaaaagcacaagaaacgctatggttacacagattacaactttggtggaagcgtatgtatgatgagaactagaactgcacgctcggttatgttaaatccgtggccattgtctaagtgcttatggtaaaaccacagtgtgctagaggtatgagcctactgaaataagacgtgtgaacttctcagaaaatctatcccagcttctgctggcaaagaaaacaactaaaagagccatctacaaagagatgcatgagttagctgaggtggctcctagcagtgagacagaggtgtagaagggaatgtgtgagtggtgtctccagcatcaaggtgttaggtgaaagtgcagagattctgaatcaggggatctggagaatcaggggatctggaatgggatcttcaaaacctgcattcactgggcaccccaggcatattaggatgcaggggatctgcaaaccactttgaaagaaaccagctgcggctcctggctgaggtattttgagtctgaaaagcaaagcaaaacaccatcgttgtgagcccctacatactgcagctcagccccagcaggtgcaggacgctgtatgtgggtaaaaractagttatgtgttcaaaatacagtgatgaagaggccaatgagaaggtggttgtaaatgaagagataaagagcatggtgcaataaagggtgataggatcctctctcagccatcacacgatttgctttcttcagccagctctgtcaaaagtatcccctattagaaacgctgtccccttagagagtagtttgttgaaggtttctaacagaaaaagacaaggctcggacactagcagccctgcaggaaacagttgtattcaaagcagacgtgaaaaccctgtatcatgtgatgcactgccaatgcaacagcaccttcaagcactaacttcgatagaccctcagcctctgggatgacctggcatttccctctatctacgtgaactcgctgaggccccctttaacaatttagtaactccttttggcatggtgcactggcccaatggactaagtgtcctattgaagaatgcaatagaagcagacagcgagattggcctcaacagggttgcagaaagccctgtctcagcctggtcatg

SEQ ID NO: 6085 - DNA, 2349 bp, Homo sapiens
cgagagtcaatcctacctggcaaacaggagtgtgatcctggcatccagtttatatctcagagtctttgttcccaggtagaactgggagactgagctagatcaggggttcttagaaatcagttgaggggaccgtgaacttaatgaaagaatgaatctttatttcctataatctttaactaaaatgtatagcacttcctccaattatgaatgtaagtcataacccacaatactactaaccgtacatgtgatattgttccaatacaaattacagatattttcacattaatataatttttagttatctcaaaatatcatttatgatcactagctcttcaaatttacaaagatcatctcagtcacagctgtttccctttacttaatgcattgggaaagaagcacatgcataactgcatcataacatccttaaaaatgaattcattagtgtttgagcataattggcttcctctataatcaaaggtgtgctagctgacgctttctgaaatgtttttcttagatgtgactttatcagactgcctatatggtccccttagacagtgcctaagggccatttccttgaacatggtggaattctcagcctcctgtctcagaagcagagatgcctaactggctgggatgcatttcaaggataagcaagagcaggagactggagtaactgccatatggtgggaggtgacaactggaaacaacagtggtattaaattgatccaaatgcagcctcagggcatgttagtaactaggaaatactaagagggaacagagtaagatggaacaactcagatcatcagtaagaaatgcctggccagggccaggtgtggtggctcatgcctgtaatcccagcactttgggacgtcgaggcatgtggatcatttgaggtcaggagttcaagaccagcctggccaatatggtcaaactccatctctactaaacatacaaaagttgaacccgggaggcagaggttgcagtgagctgagatcatgccactgcactccagcctgggccacagagtgagactccatctcagaaacaaaaaagaaagaaaaaaagaaaacaaaaacagaaatgctcggccagcaaatgcaccaggcagccagaccgatacaggttccagagccgcctactctgtcaaaaagtacaacagtgtggtactcccagcactcattgacaatcatttcctcacattgggctgttaagtaatagaaagtaacaggtgaaaaagcacaagaaacgctatggttacacagattacaactttggtggaagcgtatgtatgatgagaactagaactgcacgctcggttatgttaaatccgtggccattgtctaagtgcttatggtaaaaccacagtgtgctagaggtatgagcctactgaaataagacgtgtgaacttctcagaaaatctatcccagcttctgctggcaaagaaaacaactaaaagagccatctacaaagagatgcatgagttagctgaggtggctcctagcagtgagacagaggtgtagaagggaatgtgtgagtggtgtctccagcatcaaggtgttaggtgaaagtgcagagattctgaatcaggggatctggagaatcaggggatctggaatgggatcttcaaaacctgcattcactgggcaccccaggcatattaggatgcaggggatctgcaaaccactttgaaagaaaccagctgcggctcctggctgaggtattttgagtctgaaaagcaaagcaaaacaccatcgttgtgagcccctacatactgcagctcagccccagcaggtgcaggacgctgtatgtgggtaaaagactagttatrtgttcaaaatacagtgatgaagaggccaatgagaaggtggttgtaaatgaagagataaagagcatggtgcaataaagggtgataggatcctctctcagccatcacacgatttgctttcttcagccagctctgtcaaaagtatcccctattagaaacgctgtccccttagagagtagtttgttgaaggtttctaacagaaaaagacaaggctcggacactagcagccctgcaggaaacagttgtattcaaagcagacgtgaaaaccctgtatcatgtgatgcactgccaatgcaacagcaccttcaagcactaacttcgatagaccctcagcctctgggatgacctggcatttccctctatctacgtgaactcgctgaggccccctttaacaatttagtaactccttttggcatggtgcactggcccaatggactaagtgtcctattgaagaatgcaatagaagcagacagcgagattggcctcaacagggttgcagaaagccctgtctcagcctggtcatg

SEQ ID NO: 6086 - DNA, 2349 bp, Homo sapiens
cgagagtcaatcctacctggcaaacaggagtgtgatcctggcatccagtttatatctcagagtctttgttcccaggtagaactgggagactgagctagatcaggggttcttagaaatcagttgaggggaccgtgaacttaatgaaagaatgaatctttatttcctataatctttaactaaaatgtatagcacttcctccaattatgaatgtaagtcataacccacaatactactaaccgtacatgtgatattgttccaatacaaattacagatattttcacattaatataatttttagttatctcaaaatatcatttatgatcactagctcttcaaatttacaaagatcatctcagtcacagctgtttccctttacttaatgcattgggaaagaagcacatgcataactgcatcataacatccttaaaaatgaattcattagtgtttgagcataattggcttcctctataatcaaaggtgtgctagctgacgctttctgaaatgtttttcttagatgtgactttatcagactgcctatatggtccccttagacagtgcctaagggccatttccttgaacatggtggaattctcagcctcctgtctcagaagcagagatgcctaactggctgggatgcatttcaaggataagcaagagcaggagactggagtaactgccatatggtgggaggtgacaactggaaacaacagtggtattaaattgatccaaatgcagcctcagggcatgttagtaactaggaaatactaagagggaacagagtaagatggaacaactcagatcatcagtaagaaatgcctggccagggccaggtgtggtggctcatgcctgtaatcccagcactttgggacgtcgaggcatgtggatcatttgaggtcaggagttcaagaccagcctggccaatatggtcaaactccatctctactaaacatacaaaagttgaacccgggaggcagaggttgcagtgagctgagatcatgccactgcactccagcctgggccacagagtgagactccatctcagaaacaaaaaagaaagaaaaaaagaaaacaaaaacagaaatgctcggccagcaaatgcaccaggcagccagaccgatacaggttccagagccgcctactctgtcaaaaagtacaacagtgtggtactcccagcactcattgacaatcatttcctcacattgggctgttaagtaatagaaagtaacaggtgaaaaagcacaagaaacgctatggttacacagattacaactttggtggaagcgtatgtatgatgagaactagaactgcacgctcggttatgttaaatccgtggccattgtctaagtgcttatggtaaaaccacagtgtgctagaggtatgagcctactgaaataagacgtgtgaacttctcagaaaatctatcccagcttctgctggcaaagaaaacaactaaaagagccatctacaaagagatgcatgagttagctgaggtggctcctagcagtgagacagaggtgtagaagggaatgtgtgagtggtgtctccagcatcaaggtgttaggtgaaagtgcagagattctgaatcaggggatctggagaatcaggggatctggaatgggatcttcaaaacctgcattcactgggcaccccaggcatattaggatgcaggggatctgcaaaccactttgaaagaaaccagctgcggctcctggctgaggtattttgagtctgaaaagcaaagcaaaacaccatcgttgtgagcccctacatactgcagctcagccccagcaggtgcaggacgctgtatgtgggtaaaagactagttatgtgttcaaaatacagtgatgaagaggycaatgagaaggtggttgtaaatgaagagataaagagcatggtgcaataaagggtgataggatcctctctcagccatcacacgatttgctttcttcagccagctctgtcaaaagtatcccctattagaaacgctgtccccttagagagtagtttgttgaaggtttctaacagaaaaagacaaggctcggacactagcagccctgcaggaaacagttgtattcaaagcagacgtgaaaaccctgtatcatgtgatgcactgccaatgcaacagcaccttcaagcactaacttcgatagaccctcagcctctgggatgacctggcatttccctctatctacgtgaactcgctgaggccccctttaacaatttagtaactccttttggcatggtgcactggcccaatggactaagtgtcctattgaagaatgcaatagaagcagacagcgagattggcctcaacagggttgcagaaagccctgtctcagcctggtcatg

SEQ ID NO: 6087 - DNA, 802 bp, Homo sapiens
atgctcagagaggttagcgaacttggctgaggtcatacaagtcctgaacccttggccacacttcacagtgtcaactgttcaccatcatgtctacagatttaaggttttctaggagtgctcctttatcatctgattgactttttttcacatagtacacaattgtaggcattctgttagtttgttagggccaccataacaaagcaccatagacaggatgacttaattaaaaggtatttatttcctcacagttctggaggctggaagtccaagatcaaagtgtccgaaggktattttttttttctgaggcctctctccttggcttatagatgtagatggtcattttctccctgtttccccacatggtcttcctcttgtgtgtgtctatgtcctaatctcttctttttataaggacaccagtcacactgtatttaggtccaccttaacaacctcattttaacttaattatctccttaaagactctgtctccaaatacagtcacattctgaggtactggagattcaaacttcaacagataaattttgggggcacgcaattcagcccataacagatacctcatttatgccaggcatcacggtaaatgctaaactgagcaatctttgaggctgaccctaccgatgttcataaagttggtaacaaatcacgtactatcattttcattgacccttaagtatttatggtaggggagggggcacaatagaaactgcagatacagttttcttggaaattaattaactggaaaaatgattttttcatctcattttccctttggcactgtcagaat

SEQ ID NO: 6088 - DNA, 618 bp, Homo sapiens
aaaataaaaaatatattgactcaattggcatttattgcacaaacgttgtgtgatcgagactttcagcagttacttcatttaatattctctgactagatatcatcagcttggtagctgggggtcaccaagccactgcagaggttaartaaccttcaaggtctcaacatctcctttattcagacagaactaattccaagtctgtttaattccaaaactactgttcttcctggtatattattattttgtttctttattaaattcctaaagattaaactttaaaacttcaaagcatttacttccaagacttctgaatttttaaaataattcttagtgaaataaagaatctctgttatgcctccaaatacaggtttagtagaaaatattgtcaggtagttttagaataagttctgtctctggacttctgggactagttaagtaaataaccagtatttataatgctccatttgttcccatgtaaattatgacaacaatagtcattgtttttcaaacgtttctagatcttagagaatagacctttttgtgacaggaaactggaaaaaatatccccccagattattcacacaaaaaatagtgatattgttttgctaggggcaaggt

SEQ ID NO: 6089 - DNA, 1473 bp, Homo sapiens
gtttgtggcttgactgaagaaacctcgaaaatccagagcttggtttttttttttgtttgtttgtttgtttttaatggagactttattttttagagtagttttaggaaaactaagcttttggcacaaagagatcagccttggggcagcgccttcactgacgagagcaccggagcaagaacttgaagcacagtgtggttttttgagacttcttttgttatggaaaatgataaggattttccactttattttggagatagaacttttccttctgagctagcaaatacattccagtgtcaaaaagggagctggtttaaagggagtggggacagtaaggtgatgtgtaaatgctccgaaataatggaggaaggtaatgggatggctgacatttggggaactgcactcacctaactctgggtctggctgcatctggcagctgggagccatgggggtacctgggtcccccgctctcttgaggcctggctttcctcactcctcagcagctgctctgtcctcccatgcaggtgacgcactggcacagcccctacttcttcgcctacttccccactgccagctcgtacccggccatgcttgcggacatgctgtgcggggccattggctgcatcggcttctcctgggtgagggtccggatgcacctcgggaaggggtcctggctgtggtgggatcccggggtggggacacggtacctatgcacaagggacctgagcagatggcggtgctgtctgtgggcagacgggctactgttgcagggaggagaaaggattcagcccagagagagtgcctctgagaaagtagcgattgagaacagagaaagtctcaacaactcaaagcccattctgcacaggctgtgttggaagcacttggtatgaactaacatcatggtctggggcccagagtttctgcagctcgaacctgggaatctgcatttctccaagcagctcagagaatttctatatcctccaaagcttgagaaccgcgactgcccctgtctcattccttctgttctccaccagggctgctgccyggggagaggctccaaccagcctatcagatgtgtccagagccttggagcaggggggtctctggaaaagggcctagctcctgcctgcaaaccaccagtcccaccctatctggaggtaaaatgcctaaaaaagtccctactcagaagaacggtaggcagggctggctctgcccgtgactctgtgctccaggcacagattacaggaaagatgcattcctcccaaatgcagagagcttggaggtagagctgcctgctgatggccagtgtccgagggctgctgcaccctggggagttcctcaaaagccaggggctgtccttggcctttggggtccagagcactcaccttgtctgtggcttggagccaggtggacttgtgggcatcggtctatgtggcatgctgtgatgtgtaaaggagctgtcaattaggaatttgc

SEQ ID NO: 6090 - DNA, 852 bp, Homo sapiens
catatttgtaagtgggcacaataacaccttgtgagaatgacaaaagcacttatatgataccaacgcagcagatgctaatgttcctccttcctttttattcaagtctctaagcattttacagtgaatctaatgctacytttcatccaggcctgaatgagaaagcacatagaaatggtaagctggtacttttcatacggttcacacagatgcttaggacccaaatctgttctgaattatccaggcccaatatcaggtcctgaatttcaatgctgagtagagatgcaagctgaggaggcagatagtcctgcctctctgcttcctgctctagggagaaaggccttaggcaccccctccctcccttgcagcctcagcactgaaatcccccagcagcagatagaggctcccaccaagccagttccactctcagggcaagggtaatttccagaagtcaggagacagcttgcgtgatgaccttggagcaggttctgggccaccctgcttcaccctgggatggcgtaactgtggccaagtcaccgtgtgagccgagcctgtgccttcatccatgatccagggcctggtactgcagggaacgaagggagcggcagtgctgggtacattagcaacccgagggcatcaggtcaggaacacggccaggccagggaagagccagggacaggctggctgtggtccctccctagctctcggtgttcccccaggaccccatttcctacagtgtttcccttcctacagtgacatgcgtattaatggtaatgttgaagaggggaggtggaacatttttagtttaactatatttgtggaaagctggattaaataaaccatcttctattctgc

SEQ ID NO: 6091 - DNA, 673 bp, Homo sapiens
gtcctcatgattcaaacatctcctacatgcctcacctccaacactggggattrcatttccaaaagatatttagaggggagaaatatccaaactatataacttacctttcctgcacaataagatttaagttctagaggtaacttgtgtttagactggagactcatgtgcaagatgatgttcctcaggatttgctccactatcaggtttaggtcttttcttttctctgatgctataagatgattttttcacatgctcttgtcctctcatagcaagaacctgctgctgactgaggagaggagcagagtgttttctgttgtttggattgaggctcagtttcagataggcattgtgttcctgaataccctgatagtggtgccttctccatgatactgccctttcctaaactgcaagagagctgtttatctgagcttagcatgtattgttgcctttctttcagagatagagagtctatgtttatttcttctctccagatgcagtggatcttcaccactgtcccaaggccaacattgtttattgtctttttcttacaagcttaagctatgtgcgctatagaagaggtagggtgaagaatctatggctttattccaatgctacacaggctgctatttttctctttgaaatatgagccatgagtaaatttttcttggattct

SEQ ID NO: 6092 - DNA, 632 bp, Homo sapiens
agaagagtatgttatcaattctcaagcctaggagaagtcaggagtggagaacagctctgagaagatactgttgtccaactgatctccaggcaccacggagtccggtccctccaatcaggawggtcagaatctctgatgtcatcgctcatgccaacctggcaaccagtttgaaaaaaaacacatgtaactgccaggctgatctcttgtcctggagatcctgggtgaatggtatctcctgccactgtcccaacctcagaccattgtccaaaagcatcttcagggactccacatccctctgttccctgtcccagcagaggctgtgtcctctccactcaaagcctgaagcatgttggggtctctttgtctctgtacatgcccatttcagagtccagtctggtgggagagggaacagagtgggaaagaaaactagggtaagcagaaatgatgaaaccttataagagtgagattatcatgtacaagagtgagattatcatgtacaagagtgagattatcatgtacaagagtgagattatcatgtacaagagtgagattatcatgtacaagagatcccaggaatactgacttgatgaaaaagtcacatcagagcactcagtttggcagagcttttctgc

SEQ ID NO: 6093 - DNA, 632 bp, Homo sapiens
agaagagtatgttatcaattctcaagcctaggagaagtcaggagtggagaacagctctgagaagatactgttgtccaactgatctccaggcaccacggagtccggtccctccaatcaggatggtcrgaatctctgatgtcatcgctcatgccaacctggcaaccagtttgaaaaaaaacacatgtaactgccaggctgatctcttgtcctggagatcctgggtgaatggtatctcctgccactgtcccaacctcagaccattgtccaaaagcatcttcagggactccacatccctctgttccctgtcccagcagaggctgtgtcctctccactcaaagcctgaagcatgttggggtctctttgtctctgtacatgcccatttcagagtccagtctggtgggagagggaacagagtgggaaagaaaactagggtaagcagaaatgatgaaaccttataagagtgagattatcatgtacaagagtgagattatcatgtacaagagtgagattatcatgtacaagagtgagattatcatgtacaagagtgagattatcatgtacaagagatcccaggaatactgacttgatgaaaaagtcacatcagagcactcagtttggcagagcttttctgc

SEQ ID NO: 6094 - DNA, 632 bp, Homo sapiens
agaagagtatgttatcaattctcaagcctaggagaagtcaggagtggagaacagctctgagaagatactgttgtccaactgatctccaggcaccacggagtccggtccctccaatcaggatggtcagaatctctgatgtcatcgytcatgccaacctggcaaccagtttgaaaaaaaacacatgtaactgccaggctgatctcttgtcctggagatcctgggtgaatggtatctcctgccactgtcccaacctcagaccattgtccaaaagcatcttcagggactccacatccctctgttccctgtcccagcagaggctgtgtcctctccactcaaagcctgaagcatgttggggtctctttgtctctgtacatgcccatttcagagtccagtctggtgggagagggaacagagtgggaaagaaaactagggtaagcagaaatgatgaaaccttataagagtgagattatcatgtacaagagtgagattatcatgtacaagagtgagattatcatgtacaagagtgagattatcatgtacaagagtgagattatcatgtacaagagatcccaggaatactgacttgatgaaaaagtcacatcagagcactcagtttggcagagcttttctgc

SEQ ID NO: 6095 - DNA, 632 bp, Homo sapiens
agaagagtatgttatcaattctcaagcctaggagaagtcaggagtggagaacagctctgagaagatactgttgtccaactgatctccaggcaccacggagtccggtccctccaatcaggatggtcagaatctctgatgtcatcgctcatgccaacctggcaaccagtttgaaaaaaaacacatgtaactgccaggctgatctcttgtcctggagatcctgggtgaatggtatctcctgccactgtcccaacctcagaccattgtccaaaagcatcttcagggactccacatccctctgttccctgtcccagcagaggctgtgtcctctccactcaaagcctgaagcatgttggggtctcttygtctctgtacatgcccatttcagagtccagtctggtgggagagggaacagagtgggaaagaaaactagggtaagcagaaatgatgaaaccttataagagtgagattatcatgtacaagagtgagattatcatgtacaagagtgagattatcatgtacaagagtgagattatcatgtacaagagtgagattatcatgtacaagagatcccaggaatactgacttgatgaaaaagtcacatcagagcactcagtttggcagagcttttctgc

SEQ ID NO: 6096 - DNA, 632 bp, Homo sapiens
agaagagtatgttatcaattctcaagcctaggagaagtcaggagtggagaacagctctgagaagatactgttgtccaactgatctccaggcaccacggagtccggtccctccaatcaggatggtcagaatctctgatgtcatcgctcatgccaacctggcaaccagtttgaaaaaaaacacatgtaactgccaggctgatctcttgtcctggagatcctgggtgaatggtatctcctgccactgtcccaacctcagaccattgtccaaaagcatcttcagggactccacatccctctgttccctgtcccagcagaggctgtgtcctctccactcaaagcctgaagcatgttggggtctctttgtctctgtacrtgcccatttcagagtccagtctggtgggagagggaacagagtgggaaagaaaactagggtaagcagaaatgatgaaaccttataagagtgagattatcatgtacaagagtgagattatcatgtacaagagtgagattatcatgtacaagagtgagattatcatgtacaagagtgagattatcatgtacaagagatcccaggaatactgacttgatgaaaaagtcacatcagagcactcagtttggcagagcttttctgc

SEQ ID NO: 6097 - DNA, 583 bp, Homo sapiens
tcagatctcagtgacatgtttgaagaagatctcggattgggttatctctcctatagttgactattctcatttttctatgggttaattcttactagttttactttcaaaggtaattttaacatttcgggaaaacttacrtttgtcccctgtatttaatacgttaatacgatatttaagaactagatcctactttgtacagtatttcaaggtatcatgaaattaatggttttttgtttgtttgtttgtttgtttgtttgtttttttgaggcagggtcttactctgtcgcccaggctggagtgcagtcgtgtgatcttggcacactgcaacctctgcctcccgggttcaggtgattctcctgcctcagcctcctgagtagctgggactacaggtgcccaccaccacgccaagctaatttttggtatttttagtagagacagggtttcaccatattggccaggctggtctcgaactcctgaccttgtgatccacccaccttggcctcccaaagtgctgggattacaggcgtgtgcaccacacccagccagtgtgttctgaaagaaatagtgctttggaaaaatacag

SEQ ID NO: 6098 - DNA, 599 bp, Homo sapiens
tgttgcccaggctggagcagtggcatgaacgcagctcactacagccttgacctcctgggctcaagcaatcctcctgcctcagtttcctgagtagctgagacccaggcatgcaccaccatggccaactaatctttgcatgttttgtagcgatggggtctcaccatgttgcccagcctggtcgcaaactcctgggcttaagcaatcttcctgccttgacctgaagtgctgagattacaggcgtaagccaccgcacccagcctgtattcttttttcatagagagcctccaaacttgtgtaagtgacaggtcttacaaacttggaaacgctccacccacacccccagcatcttagtgccaaggtgaggaaaataagggagacacagtggtggaaagcaggttaatttatgctagtcctgatctaagagtcattttagcagcctatagaaaccgggttcatattgcttctcttccatgctgggagagtactgaggatgtctacataatcactggtggcctaagttctaaattctgccaaccacgtgtcattgycactcttaggtgtacaaaaaaaatgggactccaggatttttatattctcaa

SEQ ID NO: 6099 - DNA, 641 bp, Homo sapiens
tcctgcctcagcaggaggatcacctgaacccaggaggcagaggttgcagtgagccaagattgagccactgcactccagcctgggcaacagagccagatcccgtctcagaaaaaaaaaaaaaaaaagtaaagttacagtaagctaaggttaatttattattgaagaaagaagagtatttgcctatgtccataccaccttgactgtagccagtctcttctgatctcagaaactaagccaggtcaggcctggttagtacttggataggagaatcctaggactactgagtgctggagtctttaaaggaaagaagagtgctgctttataaattaaattttayattaataatagtaataaaaaattattattattaatagtaataatctcttgttattaataatagtaataatgtattggtagtaataatagtaataatgtgttgttattattaaatgctttattataatatataaagtcactcaactcacccagaacaacttccagtcctgtgagttccattcacggtaagtgccccctatacaggtgtaccattttttgtcttttatactgtatttttaccgcaccttttctagtttggatacacaaataccattgcatcacagttgcctacagtattcagtaca

SEQ ID NO: 6100 - DNA, 825 bp, Homo sapiens
gcatcacagggcgggactccacattacagcagcttgatgccatagacagtggcctgggtggcggtaaaggccactcaccccaggcccttggccagtgagcacagctgtgtcgctttgtcacccaagctgagctgtttccatcctctgagattcaagaactctgatttatcattcctggcagatttctttagccaggcactttaaaaaaaaaaaaacccccaaaaaacaaaggaattagctggtaagaagcaaagatacagtacggcttaaggatacacagatttaataaatgtgtaatttaagcatataagcgcagctaatccacacattcgtattacacagttgtgggcttaggtttactgccaacttcctctcttggggaattaatcaccttcttwcttaatttttttcctgtctttttaaaaagttgattcaatgatatatgattttgcttgatcttttgaataactaatcattggtttgtttacattttctattttttgttagtttctattttgttcaatgctattctgttgaacaacttactttgttccttttctaaatcctgtaatgagatctagtttatatcctctctttgccttcttaccagcatatgtatctagagaaacctattttcttctagataaaaccttgcactcacgaattttgatgggtggagtttgcttcttaaatggtatgttattaatgtttgtgaatattctctgtgatttcattgctattggggaagtgtttttaaatttagtgtgactattaaggcttttggggtcactgggtaactaggcaaaactagaaagtactggaagg

SEQ ID NO: 6101 - DNA, 825 bp, Homo sapiens
gcatcacagggcgggactccacattacagcagcttgatgccatagacagtggcctgggtggcggtaaaggccactcaccccaggcccttggccagtgagcacagctgtgtcgctttgtcacccaagctgagctgtttccatcctctgagattcaagaactctgatttatcattcctggcagatttctttagccaggcactttaaaaaaaaaaaaacccccaaaaaacaaaggaattagctggtaagaagcaaagatacagtacggcttaaggatacacagatttaataaatgtgtaatttaagcatataagcgcagctaatccacacattcgtattacacagttgtgggcttaggtttactgccaacttcctctcttggggaattaatcaccttctttcttwatttttttcctgtctttttaaaaagttgattcaatgatatatgattttgcttgatcttttgaataactaatcattggtttgtttacattttctattttttgttagtttctattttgttcaatgctattctgttgaacaacttactttgttccttttctaaatcctgtaatgagatctagtttatatcctctctttgccttcttaccagcatatgtatctagagaaacctattttcttctagataaaaccttgcactcacgaattttgatgggtggagtttgcttcttaaatggtatgttattaatgtttgtgaatattctctgtgatttcattgctattggggaagtgtttttaaatttagtgtgactattaaggcttttggggtcactgggtaactaggcaaaactagaaagtactggaagg

SEQ ID NO: 6102 - DNA, 825 bp, Homo sapiens
gcatcacagggcgggactccacattacagcagcttgatgccatagacagtggcctgggtggcggtaaaggccactcaccccaggcccttggccagtgagcacagctgtgtcgctttgtcacccaagctgagctgtttccatcctctgagattcaagaactctgatttatcattcctggcagatttctttagccaggcactttaaaaaaaaaaaaacccccaaaaaacaaaggaattagctggtaagaagcaaagatacagtacggcttaaggatacacagatttaataaatgtgtaatttaagcatataagcgcagctaatccacacattcgtattacacagttgtgggcttaggtttactgccaacttcctctcttggggaattaatcaccttctttcttamtttttttcctgtctttttaaaaagttgattcaatgatatatgattttgcttgatcttttgaataactaatcattggtttgtttacattttctattttttgttagtttctattttgttcaatgctattctgttgaacaacttactttgttccttttctaaatcctgtaatgagatctagtttatatcctctctttgccttcttaccagcatatgtatctagagaaacctattttcttctagataaaaccttgcactcacgaattttgatgggtggagtttgcttcttaaatggtatgttattaatgtttgtgaatattctctgtgatttcattgctattggggaagtgtttttaaatttagtgtgactattaaggcttttggggtcactgggtaactaggcaaaactagaaagtactggaagg

SEQ ID NO: 6103 - DNA, 821 bp, Homo sapiens
aaaggaaaaccaatccaaggaacggcttgtatgttcctggagcagagggcttcatgctcacaggtgcacaaagtggaaacggttttggtttttggtttttccttttagcttttaatacttttaaaattatttttcttgagaccgggtcttcctctgttgcccaggctggagtgcagtggtgtgattgcagctcactgtagcctcaaactcctgggcataagtgatccttctgcctcagcctccgagtagctgagactacaggcatgcatcatcacgcctggctaattttttttagttttatttttgaagaggccggtctcactatgttggtcagggtggtctcaaactcctgggctcaagcgatcctcccaaagtgctcggattacaggcatgagccaccacacccagcctagcttttactatattttatctgataatccttttatggaaaaaagaagggcagactcttttacagtttgaagaagctccatattccatcaggagccatcttgagcaatacytgggtttctaagagctccccagagccagttctccagctcaccttgctttctaatctaaggttgccctcaccttggacaagaagcacgagtccctcagagtaattcagagtatccaaactcaaaagtctatgtacatggaggccttgctagaccttaatggtgacattttcatcaatatccggttttctgccatgagtccctatccctctttttcttaacatattcaagccagaatattttttcagccattctgtaactgcacagtttcttccaagtctctactttgtctcccattaacta

SEQ ID NO: 6104 - DNA, 779 bp, Homo sapiens
tcattcttccgtggaaataatcagttggaactgagtattggctgccagtttcaaatagagcatggcctctcctatcttctgcaatccccactactcccagttcttatatctagtcacctcgctcacacacctacttgcctggtccctgtacgcatttacatttgtaactccctatgaaagtaggcatcttacagttgcacttaaacacaaagtcagtacctttaaacacaaaggtactgactttccttttgtcctggactgtctttctcagcctcgtctaaggatgtttatgtagtgaacagccttggaagatatagtgtcccctctggagcaaaggccattataactgcccattctaaaagagtcatgcttcctaatctttggcttcctcatcccactgtaacacactccattgtgtgtgcagttgccattgggctctcttcaccctttcctctgtgtttcttttgttatgtgactgcagccccstcacagcaaggtagattgttccaggctgggcacctgaccctcgagcagcactacattggttggtcagcactgatcatgtggcctggctgggaaagatgagctgcggcagccagagtttctctctgagagaataaagttgttagtgacaggatcaggaaacaaaaggatgcccagaaagacagaagattagaattggggccatggagggtaagagcaagtcaaatttttgagtgtaacagaagtgcacagagaagcaatgatgctatgagaaacacacacacacacacacacac

SEQ ID NO: 6105 - DNA, 721 bp, Homo sapiens
ttacaggtgcccgccaccacacccggctaatttttttttttttgtatttttagtagagatggggtttcaccatgttgcccaggctggttttgaactcctgatctcaagtgatctgcccgccttggcctcccaaactgctaggattacaggtgtaagtcaccgcactcggcccttagccacttctttattgcatcctgttttatcagcggggtctttgtgtcctgtaccttgtgctgacctcctatctcatcctgtgacttagaatgcctcacctcctgggaactcagcccagtaggtctcagccttcttctacccagtccctattcaagatagagtcactctgcttcaaatgcctctgacactctggctagcagaatacgttcatgtgttggaaatgttgggaaatggcattttcacaatgtatttggcatactaagggcatattttttccttcaattsgaacatatattgaacacttatatcagcactgctctaaaccaaagataatcagctaaagtgctcaacaaacatatttgcttgctaggaactatgctaagttacatacacacacacacatgcatttttttctcccatttaattctcatatttattctatttgtgtttctttatgttgagacagagtcttgctctgtcccccagactggagtgcatgcagtggcgccatcttgtctcactgcaacctctgcttccccggcttaaa

SEQ ID NO: 6106 - DNA, 805 bp, Homo sapiens
tactatgagccaatcacctcctcaacaagccccacctccaacattggggattacatttcaacatgagatttggcagggacaaatattcaagttatatcactaaaagtcaatgaattgtacattccaatgtaaaatgagtaaattttatgatacctaaattacagcttaacaaatctattcaaaataagtacaagagggaatattttatcatggccaaataagaaatgaggaagcaaagatagaactagaasgaaaaactaacaaaccaccaagtttccaaactgccaaataaatcactttttctctgattagaagcatttcatttcttatagcataataaatacaaataagtaggttataaggtctttggaattatcaaaccaaattttaaactgaaaaaatattgtgagactctataaaaataatatttaaaatttccccaagtttttcttttctttttctttttttttaattatactttaagtcctagggtacacgtgcataacgtgcaggtttgttacatatgtgtacatgtgccatgttggtgtgctgcacccgttaactcatcatttacattaggtatatcccctaatgctatccctcccccctcccctcaccccatgacaggccccagtgtgtaatgttccccaccttgtgtccaagtgttctcattgttcagttcccacctatgagtgagaacatgcggtgtttggttttctgtccttgcaatagtttgctcagaatgatggcttccagcttcatccatgtccctacaaaagacgtgaactcatccttttttatggct

SEQ ID NO: 6107 - DNA, 831 bp, Homo sapiens
gtgtttcactgagttagccaggatggtctcgatctcctgaccttgtgatccgcccacctcggcctcccaaattgttggtattacaggagtgagccacggcgcccggcctgatttaattcttgacgcttgtggaaggtaggtactgttagtcccattttacagatgaaacagttaaggcttaaagcggttaagggatttgcccaaggttacacagtcttaaagctaggaggggagggagctgggatgtgaatccaagtccaggtgacattgaagtccttggttcagaagcctgtaatgcaagcaagaaaatctagcttcagccccatcttcctaccaaggacattttaacccagaatgttgtggtgagaagtggggaccttccataggaaatcctccaaaggccctaaagattgtagtgagaagtagggacctcccacaggagatcctscagaggccctgcaaacagccatgcgtggggaaactacaggcgctctctggctattgcctcagggacgaggctggttaccagctctccaagagaactccaggccccattgactgttcccttcccacatgacacacacatgcaggttcattccaaccttacagcaatcccctcaggtaaagcgccctcactttacagaagaggacactgagactcaaagggatgacgtcaggtgcccaaggtactagtcagaaagtggccctggggcttctgcaacaaccactatgtcacacagtccgagctcaatccaactctgcaagagtccataagcaaaggggcggcgacgtgaggtggaaacagtagcctgaaacgtgggtgtgcacgtc

SEQ ID NO: 6108 - DNA, 737 bp, Homo sapiens
aagctaagttccatgaatagatgagtggataaagaatgaaataatatcctttgcaggcacttggatagaactggaggtcatcattctaagtgaagtaactcaggaatgaaaaactatactgcatgttctcacttataagtgggagctaagttatgggtacacaaaggcatacagagtggtataatggacattggagactcagaaaggtggagagtgagagtggatgaagggtaaaaatcctatatattrgatacgatgtatactactctgatgatgggtgcactaaaatttcagacttcatcactgtgtaattcatctatgtaacccagaaccacttgtaacccaaaaagctattgaaatttttaaaaaataaatttaaaaaacacaaaatactttgtactgtattttttaatttgttatctctctcaatcactcagtaactgtaaactctgagagatgatatcttctttgtttacatttctctcataaagcaccttgtctcactataaataggatctttagacatacagaagactaacattgcagagacgaagcacaaattctccaagtcctccatcactggcaatgatggtgaagacactcttacatgctgcagttcctaaactctgtgtgtgtgtgtgtgtgtgtgtgtgtgtgtgtgtgtgtgtaatcctcatgccatggtctgtggcaaatggtttgtctgctttgttagagcccaggaaagagaaagattg

SEQ ID NO: 6109 - DNA, 898 bp, Homo sapiens
tttaagacttttttggggttccttcctacttctccacttcttggtatctcaccgggtatggctcaaggcacttagcacatggcaggtgttcagtaagctgtctttgcaatggctaaggaaagatgagctcttgtgaacatctaagagaacaattttttaaaaataaggtctagaatatatgtctttatcttaatgtcaacatgacatacagaaatccactactgagctaaagagaaagatgagtgctgtgtttaccaaataattgaattctaagacttttatttaaatgttgaggaagaagcattagaatcttccagtaaagagctgcttcatatcttgaaaattaaattttgtgtgtcctaattacaccatttagtacaccataaagttgatttgacaggcccctaatctctatgcttctttctagacaatttgatgtcttttttttttactatgaatgatttattatawgttgtcaataaatatatcattttacaggtaaaattttatttcatttgaacaactgagtttatgagacattgtccaacagagttggattgagctttgtgtggttaaaaaaatacacacacacacacacacacacacaactgtttcatcttattactctctattcagaggcagttctacaagatgaggttgctgaccctacatgtggaagccttctgaaaactacaggctttgaattagtttagaataaacacctccagaaattaacaaaacattgtatctgatgactggtatttgaacaaattagatcatcattgcctatcagggttctgaattcagggatgatttgtgccccagctgtcagatggaacattaatacactcacttattcctttgtttatgtatttgacaactatttggatgtatagtg

SEQ ID NO: 6110 - DNA, 898 bp, Homo sapiens
tttaagacttttttggggttccttcctacttctccacttcttggtatctcaccgggtatggctcaaggcacttagcacatggcaggtgttcagtaagctgtctttgcaatggctaaggaaagatgagctcttgtgaacatctaagagaacaattttttaaaaataaggtctagaatatatgtctttatcttaatgtcaacatgacatacagaaatccactactgagctaaagagaaagatgagtgctgtgtttaccaaataattgaattctaagacttttatttaaatgttgaggaagaagcattagaatcttccagtaaagagctgcttcatatcttgaaaattaaattttgtgtgtcctaattacaccatttagtacaccataaagttgatttgacaggcccctaatctctatgcttctttctagacaatttgatgtcttttttttttactatgaatgatttattataagttgtcaataaatatatcattttacaggtaaaattttatttcatttgaacaactgagtttatgagacattgtccaacagagttggattgagctttgtgtggttaaaaaaatacacacacacacacacacacacacaactgtttcatcttattactctctattcagaggcagttctacaagatgaggttgctgaccctacatgtggaagccttctgaaaactacaggctttgaattagtttagaataaacacctccagaaattaacaaaacattgtatctgatgactggtatttgaacaaattagatcatcattgcctatcagggttctgaattcaggsatgatttgtgccccagctgtcagatggaacattaatacactcacttattcctttgtttatgtatttgacaactatttggatgtatagtg

SEQ ID NO: 6111 - DNA, 592 bp, Homo sapiens
cttgaggatctatggaccttgtatttgaaatcccagaatactgcttactgagagatagcttttatacttggggttctagattttgataatcattgycaggatttgattttattttaagctaacatacacaacaggttgcttgttaaaagagagcaaagatcatggaaaaaaataaatctgctccaaaattatgtattgtctgtttgttctctgcaaatgcttggtgagagagggaaatatttcacagaggtgttcactgtattgggcattcctaacaagctgtggtttcgaacattccctggggcagctcgcttcgtctcatcgcttggaatgatctctgccagtgtggggctgtttacagagaggaggggatgggttagagatggatctgagctattaaatcatgtggtttctggggacttggcctcctggtggctttgttgtttttgaatagttgttcttgggagggtaggaaagagaaggtatacgaatctgcctgctgctcagaagagatagttttatttctcatgcattgcatatgtgtctaaaacttactgcctgagttatgcttatttgtgattcctaccttttt

SEQ ID NO: 6112 - DNA, 592 bp, Homo sapiens
cttgaggatctatggaccttgtatttgaaatcccagaatactgcttactgagagatagcttttatacttggggttctagattttgataatcattgtcaggatttgattttattttaagstaacatacacaacaggttgcttgttaaaagagagcaaagatcatggaaaaaaataaatctgctccaaaattatgtattgtctgtttgttctctgcaaatgcttggtgagagagggaaatatttcacagaggtgttcactgtattgggcattcctaacaagctgtggtttcgaacattccctggggcagctcgcttcgtctcatcgcttggaatgatctctgccagtgtggggctgtttacagagaggaggggatgggttagagatggatctgagctattaaatcatgtggtttctggggacttggcctcctggtggctttgttgtttttgaatagttgttcttgggagggtaggaaagagaaggtatacgaatctgcctgctgctcagaagagatagttttatttctcatgcattgcatatgtgtctaaaacttactgcctgagttatgcttatttgtgattcctaccttttt

SEQ ID NO: 6113 - DNA, 592 bp, Homo sapiens
cttgaggatctatggaccttgtatttgaaatcccagaatactgcttactgagagatagcttttatacttggggttctagattttgataatcattgtcaggatttgattttattttaagctaacatacacaacaggttgcttgttaaaagagagcaaagatcatggaaaaaaataaatctgctccaaaattatgtattgtctgtttgttctctgcaaatgcttggtgagagagggaaatatttcacagaggtgttyactgtattgggcattcctaacaagctgtggtttcgaacattccctggggcagctcgcttcgtctcatcgcttggaatgatctctgccagtgtggggctgtttacagagaggaggggatgggttagagatggatctgagctattaaatcatgtggtttctggggacttggcctcctggtggctttgttgtttttgaatagttgttcttgggagggtaggaaagagaaggtatacgaatctgcctgctgctcagaagagatagttttatttctcatgcattgcatatgtgtctaaaacttactgcctgagttatgcttatttgtgattcctaccttttt

SEQ ID NO: 6114 - DNA, 592 bp, Homo sapiens
cttgaggatctatggaccttgtatttgaaatcccagaatactgcttactgagagatagcttttatacttggggttctagattttgataatcattgtcaggatttgattttattttaagctaacatacacaacaggttgcttgttaaaagagagcaaagatcatggaaaaaaataaatctgctccaaaattatgtattgtctgtttgttctctgcaaatgcttggtgagagagggaaatatttcacagaggtgttcactgtattgggcattcctaacaagctgtggtttcgaacattccctggggcagctcgcttcgtctcatcgcttggaatgatctctgccrgtgtggggctgtttacagagaggaggggatgggttagagatggatctgagctattaaatcatgtggtttctggggacttggcctcctggtggctttgttgtttttgaatagttgttcttgggagggtaggaaagagaaggtatacgaatctgcctgctgctcagaagagatagttttatttctcatgcattgcatatgtgtctaaaacttactgcctgagttatgcttatttgtgattcctaccttttt

SEQ ID NO: 6115 - DNA, 1175 bp, Homo sapiens
caggtagggaggggagggtatgaggtcaaaggcccagtgcgaggtggagacagctctgccgacaccctgcttggcaaataatgcttgggctgggtttcaagccccatccatgcctgaggccatgagctgcctacacaatgtgtggaattggaggcgggggtgccctgaatagccccacatcaatttacctaaaaaggaaagacggaagtcacttttccctaggccacggtggctttggcttcaatgggattgccgacagcctctgggcacacaagttccatttctgaatccccactacctcccactccttccacgcagtcccttgcttctatacaaagggctcccagcatctcacatgtttgcaagtgaccacagtgatcctgctggctccccagggcatcatttttctttgccacttccaaagcttgccagcatcactgaaagcatgtcattaaccaggggtgcctctaggtccttgtgcagagctcttggccccagggtcaactgtctgtcctagggcatgatgggcagcacaggctctctcatgagggttcctgacccttgtggcagactctgagctgggatccttgttgcagaagccacccagagtggacggagcagagcataactattggagtcagaaaaaacaaggcctacactgaattcactctgccatcagcttttagcttcacagtgaattggctgtacaaccttgggcttgttgcttaactgtttgtgtttaaaatgggaattataatagcacctcgtccctactcatggcagttttgcaaggagtaaatgacacaatacatattaagcacttagcacagtggctggcacataataattactctataaatatatattttaaaccttccaaattttctggaacagtactaatctaaaatattttcttgagaaacaggtgtgaagtacaaattagtacatttctgttttttaagttggtgatgcatatcaagagatttaaaatgtttttatcctattatgcagtatttcttcttcttgatcacacagtggaaatttccaaaactgtgaacaaagatgtatrtataacaatgtttaccacggtatttttaataatagtaaaaaaaagatggcaactacatgtttgatgatatgtgtagtgggtaaaaataattatatattctatcttt

SEQ ID NO: 6116 - DNA, 820 bp, Homo sapiens
ctgaggtgtcttcttgaaactctaaggytcctctgaacacaacttgagggccacccttctgggcatcatattttgagtcccagagtctaaaactggattgaagaaagcctctggctctccatccagttgccctcaggagccacccaaacatcattccacattcctggatctttacacatcttccctcacacccctttctctctcgagtacgtggagaaggcgtgggagagggagggtctggctgcttcacagctccagccagagggcccattttagagatgccagcaaggaatggcatatgaatcaacagcgtgttccctacacacccccacggtccagatggctgcagatcgcaggagcagagggcggctcctacacagacaacttccctggctgcagacacgtgccacacttcagaccatgagagaacacagttatggtggtggtggtggtggcagcggtggtggtggtgacatttttacagaaaagggcatggtctttcttttgctgcagattttcatttcaaacacttgtctgtaatgaagccttgtagtataaaatgctgagggctcacagaattggaaagcaccatgggaacaagctggtccagcttctctctcccagcctaaatcttttcacatccttgatgggggtcactgggctgaagcctgaaagatttcagattggggcagtcatgcctccgtgacgcagctctgatagttggaaagttctctccttataaatgttaagccaaaatctgctgtccgactctcccctctttggtctagttcctcattacacaaaatttaataacatctta

SEQ ID NO: 6117 - DNA, 655 bp, Homo sapiens
acagcagcatctgttgagtccatccttctgggtctactcaggccgctgaaaatctggtcagaatttgaacagctgtgaatgatgctgttctgcatcaaactaagatgttcctgaatcagaaatggtgtgtccatacatgtgtgggacaaagtaaggggttctgtatcaaggggctcacagtgaacaagtccgggccaatccccctagagaattgccttctgtgagggctgttcttggcatcccccatagaaytttccaacatttggcttgcaggcaccacacatggagccttttaagccattatccatgcatggaattggagctttagggtatcagatggtgaacacaacccgctggcactctctgcaagccaaccctccacctgctcaaaaacctcaccatctaatctctgcagccaggtccaagcaactctggaatattttatggcatttgcccttattttattaaaattagaggaaaactgaagcaaaaggactgacataagtgacaacacatgaaagcccaaggactgagacaggtggcattagtgagttttatagtgttcaaaatggttcatctttagcatgaatatgatgccttaagccaggcctcaagtatgaggctaagcgacaaaattgttaaggctgccagaagg

SEQ ID NO: 6118 - DNA, 798 bp, Homo sapiens
ggatcctaataccatccctstgtgtgtgtgtgtgtgtgtgtgtgtgtgtgtgtgtgtgtttaatttagtcagtttcgtgcaaccagagagtcattaccgatacaccccctaggaagttgctcagaatatgcacgatcttaatgacacctggatagttattgccccttcatccttctggtttccccagcaaattaaaaagttcactgcctagattagtgttcttcaaaccatagggttgggacttattagtgggtcatgaaatacacttagtgaatcacaacacaaataatgtttcataaaatagaagagactggaatagaaaatattagagtgcatctcatgtggtagactaagtacttttcatgtaacttttgcatacatgataaaaacacataagtttatattgggtcacaaatatgacacaattcctactaggaaagaaggaagggtggaaaactatatggtctaatttaatctgatatctttatacattctatatggctggaaccaaatgcagcagccacatgaaatattttcagggcaaagcatatgcatgtcaagaggccaatccccacgggtagagaaattcaatttgattaaagaatctcagtgaactgtagccaccaccatgtcatatgctggcagtagccattttaaatggagatttggtccctgggattttatgattgtgttaaagtagtgaaaatccacgaaaatttacctaaagacagctggacaactgctctactaggaataggacaaacagtagcttggcaaatacctactgaatacctactg

SEQ ID NO: 6119 - DNA, 807 bp, Homo sapiens
cttcaaacaatgcatgtggctgcacatagctgattcctaattagaatgtaaattccacaaggcagggaccatgtctagttggtcacgttgtatctccagggcttgtcaagtgtctggcatatagcaagttatcaatatttttgcaataatagatgagtgaataaattaatgttgtgggtctatcagcaatttctcatctttgccaactttaatgaagagtgatttttctttccaaaatggtagttccagtcatgaatctattgaatacactgaatcatttcaaaggatgtttgttactttaatagcacttaatcaggaagccgcctcagggatttttgggttgcaagggaraggctgagtgctgtggggaggcgtaatagtctgatattccaaccctcttccatcggaagagctgttttcaattgctttgcacactgggaatctcttcaacttttaatttaaaagattttgaccactaaaataaaaatgtgaaaaacttctttaggtcactgacaccaaatgatttaataggaccataagcaaataaatacttaataagaacccttgtaagatgatgcatacatatatttatatgggaaactgtgcagcattttctaaaactttcctgcatcccccttttttaaaaggaacttcgaacgaccagattacctgattgcactctgctgacccctgggaattttctggagttttctctattacttcccccaataggtcctttccatcaaaaaataacctgtcatgagttctcattcccttatgagctactctttatctgataaccatgaa

SEQ ID NO: 6120 - DNA, 807 bp, Homo sapiens
cttcaaacaatgcatgtggctgcacatagctgattcctaattagaatgtaaattccacaaggcagggaccatgtctagttggtcacgttgtatctccagggcttgtcaagtgtctggcatatagcaagttatcaatatttttgcaataatagatgagtgaataaattaatgttgtgggtctatcagcaatttctcatctttgccaactttaatgaagagtgatttttctttccaaaatggtagttccagtcatgaatctattgaatacactgaatcatttcaaaggatgtttgttactttaatagcacttaatcaggaagccgcctcagggatttttgggttgcaagggaaaggctgagtgctgtggggaggcgtaatagtctgatattccaaccctcttccatcrgaagagctgttttcaattgctttgcacactgggaatctcttcaacttttaatttaaaagattttgaccactaaaataaaaatgtgaaaaacttctttaggtcactgacaccaaatgatttaataggaccataagcaaataaatacttaataagaacccttgtaagatgatgcatacatatatttatatgggaaactgtgcagcattttctaaaactttcctgcatcccccttttttaaaaggaacttcgaacgaccagattacctgattgcactctgctgacccctgggaattttctggagttttctctattacttcccccaataggtcctttccatcaaaaaataacctgtcatgagttctcattcccttatgagctactctttatctgataaccatgaa

SEQ ID NO: 6121 - DNA, 1095 bp, Homo sapiens
ccggggaatcgtgggccgtttcccactcctcttcaaccctcagcgacatcttgggccttcttttccagtcagttgggacggcgcccctatgaggctgtgtcttatccctcggaacatgggcaccccacagagggtcctgtctcctgtggtctggagccccgcctcaaggaagaaacccatgctgtctgctcacaactccaggatgtttggacacctcagccccgtgaggattcctcatctcagaggcaagtttaaccttcaacttccttcattagatgagcaggtgatcccagccaggctcccgaagatggaggtgagggcagaagagcccagagaagcaacggaggtgacagaccaggtagagacccaggggcaggaggacaataaaaggggcccctgtagcaatggggaagcagcttccacctctaggcccctggagactcagggaaacttcacttcctcctggtacaatcccaggcccttggagggaaatgtccacctcaagagcttgacagaaaacaaccagactgacaaggcccaggtgcctgcagtgagtttctactccaacggccatggagtygccagttcacacagccctgctggaggcatccttccctttgggaagcgtgacccacttccaacagtgctccctgccccagttccaggctgctccctgtggccagagaaggcggccttgaaggtgctgggtaaagaccacctgcccagctctccaggcttgctgatggtgggggaggacatgcagcccaaggatcctgcagctcttgggtcaagtaggtcttctccacacagagctgccggccacagttcccacaaaagaaaactgtcggggccaccgctgcagctgcaaccgacccctcccctgcaactgaggtgggatagagacgaggggcccccaccggctaagcttccatgtctatctcctgaggcactgttggtgggtcaggcttcccaaagagaaggacgcctccagcagggcaacatgtgtaagaacatgagggtgttaagtagaacatcaaaattcaggagagtaagagagctgcttaggaggagaaagaagagatggtagggcaggcg

SEQ ID NO: 6122 - DNA, 805 bp, Homo sapiens
ccctcccttgccatctccagacctgccccacaaactccctccctggtctcctggctcttgttcactccttccaggcagccttccacagtcatctctaaaayatatatgactgtcccttcctttatccagcaccttccatggctccccagagccctccaggtcaagttcaagttctttgatcagacactagatctcaagctgcattctacctcctgaattaagatcccggagaagcccaccttgctcagcacaaacgcatcactgaagtcgaaaatcttgaacgtggccttggcattgaggaagtcatcaacaccctggctagtgagggtgcagtgccgctccaggatgatggtgtctaaagttgtgcaccaggtcgcaggccctgcagaagcatctcccctcaggagtgaggtagtacaggaagtctgtgcacaggcagatctgctggtgctgttacactatgagggcactgagctccaagatggtggcaatatattcactgggattcctgcacggtgaggttggagagaggaagcatctccataacacatatgaaaccctggaagcacttcccagccagaaattcaggaccacgttatatgcagatatgggtgccctctgagcacacttgtctctctgtctcccactctgagctgcctcctggccccacatgccccagcctggcccagggcttatcccagtgggtgttcagtccatggtgttgactgctccctgggccaggagagcccttggtggctctgtgactcctcctgtggaacccctacctctgccttgggacctccca

SEQ ID NO: 6123 - DNA, 742 bp, Homo sapiens
acggtggaaaggctgtatctggtattttcctaggtccttggttttcaccttctagacatccagcaggagtgaccatacccagccccacacctgaaatgggactcccttgtagagcacctgagacctctacagacagaagagtgctctggtgagacaggccacagaggtccccgggggggggggggatcaggggctggaggattctggaggtttccagccttgggctctgtggttcctcaaagagtttaggtttacctaggactaggcctcccctcccatgattcaaagagtgggtgagtgctatgcatcacgaactctgatctggacctattttttcatttaggtcaccaagagacaacccctaacccccaagctagggatggtccaagctctggcatgagattctcttccagcaatgtgatgcttgcagggacagggagaaaagccggtgaccaggcctgctgtcccccaggtaaggacagtgtgctacccaccctctgagaggcaggtggtgccaggtcactgcactgggtccctgtacccctggctctgcagacaccagtcatggaggtcctcccctctccacattaccttcttgctrctcccagatttcttctggtcattaagcactttgagccatttttctgtgcagccgatctgatatttttgctatcagatgaaacatgacaaagtaagccgagccaccaggattcctggagggaaccttggatgctgcgtcttg

SEQ ID NO: 6124 - DNA, 721 bp, Homo sapiens
cagcctggtgagtcagcacccaggctactgcttgycacccaccaagaaatgcacatgtttggaaatttgatgacatctggagtttcagtcttaatcaggctggttttggcatttcctttccaggcatggagctgtttctgggtatttttcaaaattgtctatagggaatgccatagaaaaacccctaaactgaatcttgctagagccacaccttgcaattccacgacttttgcacatttatctaatgatttgccgagtagccacaccaacaaaggacagagcagagactgtaaagggatggagccaagctgtacctaggcagaaaagtttccccacctgctgcctcacgcccatctctgctgtgtaccaggtgtaaactaaaaataaaattctaagcccctcaaccatctgaacggacccctccccttggccaagggcgttctaaagttagcctgaaaaactaatgcaggccatcatgggaagcaggagttggacatgctcctgcctttggagttcaggcccagctgaccagtattaacatcaacacaaaccttaagactgatagaaaagactctttaagtctgataagaaatatgtacatctattctctctgaagcctactacctggaggcttcaactgcatgataaaagcctggtctccacaaccccttatttaactcagacattcctttctattgattccaagtctttagacaataac

SEQ ID NO: 6125 - DNA, 721 bp, Homo sapiens
cagcctggtgagtcagcacccaggctactgcttgccacccaccaagaaatgcacatgtttggaaatytgatgacatctggagtttcagtcttaatcaggctggttttggcatttcctttccaggcatggagctgtttctgggtatttttcaaaattgtctatagggaatgccatagaaaaacccctaaactgaatcttgctagagccacaccttgcaattccacgacttttgcacatttatctaatgatttgccgagtagccacaccaacaaaggacagagcagagactgtaaagggatggagccaagctgtacctaggcagaaaagtttccccacctgctgcctcacgcccatctctgctgtgtaccaggtgtaaactaaaaataaaattctaagcccctcaaccatctgaacggacccctccccttggccaagggcgttctaaagttagcctgaaaaactaatgcaggccatcatgggaagcaggagttggacatgctcctgcctttggagttcaggcccagctgaccagtattaacatcaacacaaaccttaagactgatagaaaagactctttaagtctgataagaaatatgtacatctattctctctgaagcctactacctggaggcttcaactgcatgataaaagcctggtctccacaaccccttatttaactcagacattcctttctattgattccaagtctttagacaataac

SEQ ID NO: 6126 - DNA, 721 bp, Homo sapiens
cagcctggtgagtcagcacccaggctactgcttgccacccaccaagaaatgcacatgtttggaaatttgatgacatctggagtttcagtcttaatcaggctggttttggcatttcctttccaggcatggagctgtttctgggtattkttcaaaattgtctatagggaatgccatagaaaaacccctaaactgaatcttgctagagccacaccttgcaattccacgacttttgcacatttatctaatgatttgccgagtagccacaccaacaaaggacagagcagagactgtaaagggatggagccaagctgtacctaggcagaaaagtttccccacctgctgcctcacgcccatctctgctgtgtaccaggtgtaaactaaaaataaaattctaagcccctcaaccatctgaacggacccctccccttggccaagggcgttctaaagttagcctgaaaaactaatgcaggccatcatgggaagcaggagttggacatgctcctgcctttggagttcaggcccagctgaccagtattaacatcaacacaaaccttaagactgatagaaaagactctttaagtctgataagaaatatgtacatctattctctctgaagcctactacctggaggcttcaactgcatgataaaagcctggtctccacaaccccttatttaactcagacattcctttctattgattccaagtctttagacaataac

SEQ ID NO: 6127 - DNA, 1120 bp, Homo sapiens
agttacctattaaagatctctggttaaattaataaaagccttaaatgcaaatgcatatatatctgtgaaaatgaccaattttatgaatgaagtgtgggagtgattgtgtccagagaaagtaggagaagaagctgtgttcactgtcctcctcgcatttgtcctacagaaattttatcagggggtagaggttgggctatcaggtggcagtacaaagaggatactgctgctaggtgggctgacctctaggtcatttttcttaggttgggtaaggtctgtgtgttcagacaggatcttgatgttctcagattaggagtttcaatatttgccattttgtttaggtaaatttcttcccataaccactcacttgcctaggagccattttcagtactcccattagactgttcaaaagtagaaactcatacctggaaagcagtggctcttatcttctccccagcctattattgtgtttttatgtacataaaagagattcagatactatccttgtttaggacctcttgtttagtgtatagggagaaaaataaaaccaaacatttaacctgaaaatgtctaatctttaagacagagatacctaagggcatcccctctggccataggtaaaatccagatccagaacattttgactggatgwatttgaaacaaaatttgtcatgtgtgaggatgggcaaagggagtgaaggaggaacaagtcgaaattgttaaatattttttactatgtcagtgctacccagagcagttcgcatatgttttggcctcatatccaggatcctctggttagcagtttgacattttgaatgatgtgcttagttaaccatctctccctttctgtttcctcacctgatagtagattaaaatctgtatcactgcgttgttgtgaggatacaattatatcaggcaaaatgccatagtaataatacaaagaaaaaccttattggtaatttattagagacgacaataatattttcgctcatactattatttataactttgtttaaaatgtattatctatatctgttataaatttagcaataggagataagttggaaatttcccaatgatgctaaaagctggtcgatcaatttgagtcaagtaaggaagcatt

SEQ ID NO: 6128 - DNA, 806 bp, Homo sapiens
gcctgccttggcctcccaaagtgctggaatttcaggcgtaagccactgtgccaggccaaaagcagttttttaaatgcattttatgtcccagacttcatgcttaatccatgaaaaacaatgacaaatcacaaactcctgacatcagacttcaagactagtctgaaasagtttttctcaaaggatggtccatggatcaccaacttgggaagcactgaggaccttgtagaaattatggaattcaggaccctaatgtaggtagatcttcagaataaaaatctgtgaatgtgtgatccaggaatctgcgggggtttttttgttttttgtttttgtttttgtttttttttttgagatggagtctcactctgtcgcccaggctggagtgcaatggcatgatctcggctcactgcaacctttgcctcctgggttcaagcaattctcctgcctcagcctcccaagtagcttggactacaggcaccagccaccacatccgggtaattttttgtatttttcgtagagacagtgtttcgccatgttggccaggctggtctcaaactcctgacctcaggtgatccggccgcctcagcctcccaaagtactgggattacaggcatgagccaccacacccggcctaggaatctgcatttttaacagcattcaagaaccttgacactcaaaatgcagcatcacttaggagatcatgactgttggagaggccccatcccagacttactgtatcagattctgcattttgacagaattcttacccgttaaagtttgagaaacaccatcctagaagattctgttcc

SEQ ID NO: 6129 - DNA, 806 bp, Homo sapiens
gcctgccttggcctcccaaagtgctggaatttcaggcgtaagccactgtgccaggccaaaagcagttttttaaatgcattttatgtcccagacttcatgcttaatccatgaaaaacaatgacaaatcacaaactcctgacatcagacttcaagactagtctgaaagagtttttctcaaaggatggtccatggatcaccaacttgggaagcactgaggaccttgtagaaattatggaattcaggaccctaatgtaggtagatcttcagaataaaaatctgtgaatgtgtgatccaggaatctgcgggggtttttttgttttttgtttttgtttttgtttttttttttgagatggagtctcactctgtcgcccaggctggagtgcaatggcatgatctcggctcactgcaacctttgcctcctgggttcaagcaattctcctgcctcagcctcccaagtagcttggactayaggcaccagccaccacatccgggtaattttttgtatttttcgtagagacagtgtttcgccatgttggccaggctggtctcaaactcctgacctcaggtgatccggccgcctcagcctcccaaagtactgggattacaggcatgagccaccacacccggcctaggaatctgcatttttaacagcattcaagaaccttgacactcaaaatgcagcatcacttaggagatcatgactgttggagaggccccatcccagacttactgtatcagattctgcattttgacagaattcttacccgttaaagtttgagaaacaccatcctagaagattctgttcc
